United States Patent Application Publication US 2006/0257851 A1 - sequence listing, part 4

SEQ ID NO: 103578 - RNA, 32 nt, Homo Sapiens
aaaggaaaaacaaaauaguuuuuuacuggauu

SEQ ID NO: 103579 - RNA, 32 nt, Homo Sapiens
uucccgcccucccucccaccuacucauucacc

SEQ ID NO: 103580 - RNA, 32 nt, Homo Sapiens
cuggaugggugggugguaaaaagggaaggaug

SEQ ID NO: 103581 - RNA, 32 nt, Homo Sapiens
cgggugugagucagcucugucucugugggugg

SEQ ID NO: 103582 - RNA, 32 nt, Homo Sapiens
aaguauuuauugagcaucuacuguauaucaug

SEQ ID NO: 103583 - RNA, 32 nt, Homo Sapiens
aucucauauaauguuucucaaucuuguuaaaa

SEQ ID NO: 103584 - RNA, 32 nt, Homo Sapiens
cuauccacaacgcagccauaugcugacugaag

SEQ ID NO: 103585 - RNA, 32 nt, Homo Sapiens
gaugugcagucuuuuuuuuuuuuuuuuugaga

SEQ ID NO: 103586 - RNA, 32 nt, Homo Sapiens
ucccaggcaccaaucagacuuccuccuccacc

SEQ ID NO: 103587 - RNA, 32 nt, Homo Sapiens
gggcaggcuuggggggagcagcugccccaccc

SEQ ID NO: 103588 - RNA, 32 nt, Homo Sapiens
aagcagauguggagcuacucuaucuuuuggag

SEQ ID NO: 103589 - RNA, 32 nt, Homo Sapiens
gccgucucucaguuuugaaaucucugaggagc

SEQ ID NO: 103590 - RNA, 32 nt, Homo Sapiens
ugcauuucuaaagaagcgugagaaaugggcug

SEQ ID NO: 103591 - RNA, 32 nt, Homo Sapiens
gcugcggcggccucggagcgcggcggagccag

SEQ ID NO: 103592 - RNA, 32 nt, Homo Sapiens
gcugauccugggcuccuagcuugaauaagccu

SEQ ID NO: 103593 - RNA, 32 nt, Homo Sapiens
cacucccaagcccacacccacaggggcucacu

SEQ ID NO: 103594 - RNA, 32 nt, Homo Sapiens
aggcaucuuuucuguuuuuuuaacccuuugua

SEQ ID NO: 103595 - RNA, 32 nt, Homo Sapiens
cuucauguuaacgucccuucugauggucucac

SEQ ID NO: 103596 - RNA, 32 nt, Homo Sapiens
gcccgcucccucggucccuccucccuugcagg

SEQ ID NO: 103597 - RNA, 32 nt, Homo Sapiens
agcuaaguguagcagcagcaccagggcaggga

SEQ ID NO: 103598 - RNA, 32 nt, Homo Sapiens
cacaccaggaagagcaggcugcgccucacccu

SEQ ID NO: 103599 - RNA, 32 nt, Homo Sapiens
gcccccagucacauuuuccauggugacucuuu

SEQ ID NO: 103600 - RNA, 30 nt, Homo Sapiens
ccagguuugcugggaugggaaaccugcuca

SEQ ID NO: 103601 - RNA, 32 nt, Homo Sapiens
guugugaaggaagggagggaaggucauagccu

SEQ ID NO: 103602 - RNA, 32 nt, Homo Sapiens
cacacugccacccagcuuccaaggcugagucu

SEQ ID NO: 103603 - RNA, 31 nt, Homo Sapiens
agcugagcacggagaagacucccucucucgg

SEQ ID NO: 103604 - RNA, 32 nt, Homo Sapiens
guacugcuccgucucccuccccgggcagcggc

SEQ ID NO: 103605 - RNA, 32 nt, Homo Sapiens
uaaauuuagaacuguagaggcuaauaaacugc

SEQ ID NO: 103606 - RNA, 31 nt, Homo Sapiens
acuaggggacgagaagcauggggaaaauauu

SEQ ID NO: 103607 - RNA, 32 nt, Homo Sapiens
gaggauaaacacaguggaaaugcaggaggaaa

SEQ ID NO: 103608 - RNA, 32 nt, Homo Sapiens
gcaaaguuuucuuuccaaaaucaggcuuuguc

SEQ ID NO: 103609 - RNA, 32 nt, Homo Sapiens
gcccuagggucucacuaguaccaaguggguca

SEQ ID NO: 103610 - RNA, 32 nt, Homo Sapiens
ucaccagugucuggaugaucuuuguggucacu

SEQ ID NO: 103611 - RNA, 32 nt, Homo Sapiens
cuccacaucacgggaagugagauggauuucuu

SEQ ID NO: 103612 - RNA, 32 nt, Homo Sapiens
ucaacagagagcuaaacuuaugauggaaagac

SEQ ID NO: 103613 - RNA, 32 nt, Homo Sapiens
gcacaugcgggucaucuucccagaagucggcg

SEQ ID NO: 103614 - RNA, 32 nt, Homo Sapiens
gaauaccuuuucugaaugucuugaauacaugu

SEQ ID NO: 103615 - RNA, 32 nt, Homo Sapiens
ucaacuacauggaaaccgaacaaccugcuccu

SEQ ID NO: 103616 - RNA, 32 nt, Homo Sapiens
guagcugugggaaaggaaugggcaccucugaa

SEQ ID NO: 103617 - RNA, 32 nt, Homo Sapiens
agccuccucuacccggcccuuguaucucuggu

SEQ ID NO: 103618 - RNA, 32 nt, Homo Sapiens
ccggcagugcagccgccucacaggucggcgga

SEQ ID NO: 103619 - RNA, 32 nt, Homo Sapiens
ccucagucucuucuccuuccccugccugcaac

SEQ ID NO: 103620 - RNA, 32 nt, Homo Sapiens
cuuuaagagagaaagacugguuauuucuccuu

SEQ ID NO: 103621 - RNA, 32 nt, Homo Sapiens
ucuaagucgugcacuuucucgguccacucuug

SEQ ID NO: 103622 - RNA, 32 nt, Homo Sapiens
gaaaaacacggaugggauuucguuuucaccuu

SEQ ID NO: 103623 - RNA, 32 nt, Homo Sapiens
agaagcacuagaccaggacgaccuccagcgcg

SEQ ID NO: 103624 - RNA, 32 nt, Homo Sapiens
aagggauccagaagagacacuuuuuaguugau

SEQ ID NO: 103625 - RNA, 32 nt, Homo Sapiens
guuugucaaccucaggggauauuuagcaauug

SEQ ID NO: 103626 - RNA, 32 nt, Homo Sapiens
auccugggggagaggggaacagugauggugag

SEQ ID NO: 103627 - RNA, 32 nt, Homo Sapiens
ccucacugccccccgccagccaggcgucaaac

SEQ ID NO: 103628 - RNA, 32 nt, Homo Sapiens
acuccccaggacgugcaggaagggcagcucca

SEQ ID NO: 103629 - RNA, 32 nt, Homo Sapiens
guauggccggcgacauuagcuagcgcucgcuc

SEQ ID NO: 103630 - RNA, 32 nt, Homo Sapiens
aaauauuuaaaguggauacaaaacuauuucag

SEQ ID NO: 103631 - RNA, 32 nt, Homo Sapiens
cagaauaguaggaaacaagaaaacauuaaacu

SEQ ID NO: 103632 - RNA, 32 nt, Homo Sapiens
caaagauccaaguuuguacuaucccuaaagac

SEQ ID NO: 103633 - RNA, 31 nt, Homo Sapiens
ccuagacucaugggaaagucccugcuuugug

SEQ ID NO: 103634 - RNA, 29 nt, Homo Sapiens
cgggacauggaaauucggacucagggagg

SEQ ID NO: 103635 - RNA, 32 nt, Homo Sapiens
cagcccaaacuccaaagggaugugcagccuuu

SEQ ID NO: 103636 - RNA, 31 nt, Homo Sapiens
uugugaggucacugccuggaccuggugcccu

SEQ ID NO: 103637 - RNA, 32 nt, Homo Sapiens
aucuaauuuuuagauugcccuguauuuuguua

SEQ ID NO: 103638 - RNA, 32 nt, Homo Sapiens
ggucccaggucccagugcucuaguuacuuuac

SEQ ID NO: 103639 - RNA, 32 nt, Homo Sapiens
uuguacuguaauaaaauagaggcuauucuuuc

SEQ ID NO: 103640 - RNA, 32 nt, Homo Sapiens
auaguuuauguagcuuuguaacauuccucagu

SEQ ID NO: 103641 - RNA, 32 nt, Homo Sapiens
ccugagcagaggcgggugugggaccagugcgg

SEQ ID NO: 103642 - RNA, 32 nt, Homo Sapiens
cucggagaucaagauccacagauggaaacugc

SEQ ID NO: 103643 - RNA, 32 nt, Homo Sapiens
ggccccuccccggccucaguuuccccaaauau

SEQ ID NO: 103644 - RNA, 32 nt, Homo Sapiens
uagaauguacuauuugccccggagaauucaga

SEQ ID NO: 103645 - RNA, 32 nt, Homo Sapiens
cugagaaaucaucauaauugugcuuucacuuc

SEQ ID NO: 103646 - RNA, 32 nt, Homo Sapiens
uccagaaauuuaugguuggaccuugaagcaag

SEQ ID NO: 103647 - RNA, 32 nt, Homo Sapiens
ggccaacccccuccucagaaugggccucucca

SEQ ID NO: 103648 - RNA, 32 nt, Homo Sapiens
ccucagucgccgccgccuccucagucgccgcc

SEQ ID NO: 103649 - RNA, 32 nt, Homo Sapiens
ugcucacccuuuguugggggccaggcacaggg

SEQ ID NO: 103650 - RNA, 30 nt, Homo Sapiens
ucagagugguuuguuacagaagcuccuuca

SEQ ID NO: 103651 - RNA, 32 nt, Homo Sapiens
gcuggguucuggacagaaauaguuccaauuaa

SEQ ID NO: 103652 - RNA, 32 nt, Homo Sapiens
cuguuccuggaaacucucugccuguacuccau

SEQ ID NO: 103653 - RNA, 31 nt, Homo Sapiens
cgagcucgggcgguggcggcgguggccggag

SEQ ID NO: 103654 - RNA, 32 nt, Homo Sapiens
cucagguagaggaucaauguguccguuauguu

SEQ ID NO: 103655 - RNA, 32 nt, Homo Sapiens
gagagaagcggcugcgcagcccggacgggagc

SEQ ID NO: 103656 - RNA, 32 nt, Homo Sapiens
gaagaaacaacccaccugaaggccaaaugcca

SEQ ID NO: 103657 - RNA, 32 nt, Homo Sapiens
gcaucggcgacauuaucuuuaauuguauguau

SEQ ID NO: 103658 - RNA, 32 nt, Homo Sapiens
gauagaaaaagccuuuggggucaggcagacuu

SEQ ID NO: 103659 - RNA, 32 nt, Homo Sapiens
aaacaggcgucccuuucccucuggauaacaac

SEQ ID NO: 103660 - RNA, 32 nt, Homo Sapiens
uccagauuuuuuucuuuuuuacuuuuuuuucu

SEQ ID NO: 103661 - RNA, 32 nt, Homo Sapiens
aagugcaaacuccuaaugguguaaagaaccca

SEQ ID NO: 103662 - RNA, 32 nt, Homo Sapiens
uagacaccaggugcgcccucuggggcucagag

SEQ ID NO: 103663 - RNA, 32 nt, Homo Sapiens
gaggcagcagaguuggggcagcugcucagagc

SEQ ID NO: 103664 - RNA, 32 nt, Homo Sapiens
ggcauugccaagggcuuuguuuugcacacuuu

SEQ ID NO: 103665 - RNA, 32 nt, Homo Sapiens
aaauacgaaucugaaagaaaaauguuaacucc

SEQ ID NO: 103666 - RNA, 32 nt, Homo Sapiens
agcugaaugucucuacuccuuaaacuuguacc

SEQ ID NO: 103667 - RNA, 32 nt, Homo Sapiens
gagagcauggccccaaacaguucuugcucugu

SEQ ID NO: 103668 - RNA, 32 nt, Homo Sapiens
cacuaaugguucauccucuauaaggccaacaa

SEQ ID NO: 103669 - RNA, 32 nt, Homo Sapiens
uuguuauguggguuuucuuuuguauuuuuuuu

SEQ ID NO: 103670 - RNA, 32 nt, Homo Sapiens
uuccaauauaaaaccaaaugaaauaaaagcag

SEQ ID NO: 103671 - RNA, 32 nt, Homo Sapiens
ccaccucccauucacagauaccucucuuguag

SEQ ID NO: 103672 - RNA, 32 nt, Homo Sapiens
ccccugcugcucucaugcccgaauacccagga

SEQ ID NO: 103673 - RNA, 32 nt, Homo Sapiens
guagccacuccagcucucuuuggguuacuauu

SEQ ID NO: 103674 - RNA, 32 nt, Homo Sapiens
uaucugcuuaugcaguuuuucagaguggaaug

SEQ ID NO: 103675 - RNA, 32 nt, Homo Sapiens
uuugucuguuacgguugccauguucuuugaau

SEQ ID NO: 103676 - RNA, 31 nt, Homo Sapiens
acccaggagccccgagaaccugcuuuccuca

SEQ ID NO: 103677 - RNA, 32 nt, Homo Sapiens
aagaggaggaggagagccugccguuccaacuu

SEQ ID NO: 103678 - RNA, 32 nt, Homo Sapiens
uggcggaggaggagaaggaaggggccgggccg

SEQ ID NO: 103679 - RNA, 32 nt, Homo Sapiens
cuuuguugacuucuuugggaacauuaucucua

SEQ ID NO: 103680 - RNA, 32 nt, Homo Sapiens
uucacuuagccuuucugguuucccuuccugug

SEQ ID NO: 103681 - RNA, 32 nt, Homo Sapiens
caagugccuucaugcccuagggccccccaagu

SEQ ID NO: 103682 - RNA, 27 nt, Homo Sapiens
aauuaccccuucuucuggccaccccug

SEQ ID NO: 103683 - RNA, 32 nt, Homo Sapiens
uugaggggaggugacaagagcuaacauguuac

SEQ ID NO: 103684 - RNA, 32 nt, Homo Sapiens
uuguuuuuaagugacugugguuuaaagcacaa

SEQ ID NO: 103685 - RNA, 32 nt, Homo Sapiens
aggcgggacuuccggcaccgcuccgagauggu

SEQ ID NO: 103686 - RNA, 32 nt, Homo Sapiens
caaauuauucggucucuuucuggggggcccag

SEQ ID NO: 103687 - RNA, 32 nt, Homo Sapiens
ugggggagaaacaaaaucugcagauggaaucc

SEQ ID NO: 103688 - RNA, 32 nt, Homo Sapiens
gcuauugacuauagauucacauauuagcaaca

SEQ ID NO: 103689 - RNA, 32 nt, Homo Sapiens
cccuuacccuguggguucugcacuagcuccgg

SEQ ID NO: 103690 - RNA, 32 nt, Homo Sapiens
aggcccucagaauagaggaacaugaagagaga

SEQ ID NO: 103691 - RNA, 32 nt, Homo Sapiens
ugguggaagaacugaaaaagcuggggauccac

SEQ ID NO: 103692 - RNA, 32 nt, Homo Sapiens
uuauaucauuaccugguaucccauggauuuug

SEQ ID NO: 103693 - RNA, 32 nt, Homo Sapiens
aagugccgccgggauuacaggcgugagccacc

SEQ ID NO: 103694 - RNA, 32 nt, Homo Sapiens
guguucauaauuugccaaaaaauuacaaaagc

SEQ ID NO: 103695 - RNA, 32 nt, Homo Sapiens
cgcccgcgcgcgggcucaacuuuguagagcga

SEQ ID NO: 103696 - RNA, 32 nt, Homo Sapiens
uuuagaaaucaucaguccagugaccauauuua

SEQ ID NO: 103697 - RNA, 32 nt, Homo Sapiens
uaagugaaaugaauaugacuauuugaauuacc

SEQ ID NO: 103698 - RNA, 32 nt, Homo Sapiens
uaauagauauaaagcaaaaauaaaaaccuguu

SEQ ID NO: 103699 - RNA, 32 nt, Homo Sapiens
gcccguguuggccccaggacuccuuuggaaua

SEQ ID NO: 103700 - RNA, 32 nt, Homo Sapiens
aucagcacuuccaccauguauuacaagucuug

SEQ ID NO: 103701 - RNA, 32 nt, Homo Sapiens
ugccagcugauuagcucuguucccaccaggcu

SEQ ID NO: 103702 - RNA, 32 nt, Homo Sapiens
gugcaucuuuuaaaauacauuuuauuugggga

SEQ ID NO: 103703 - RNA, 32 nt, Homo Sapiens
gguuuggguuuuugagauuugcuggugaaguc

SEQ ID NO: 103704 - RNA, 32 nt, Homo Sapiens
ggcgaagacaccuucccugcccugguuuggcu

SEQ ID NO: 103705 - RNA, 32 nt, Homo Sapiens
ccuguuagcuguuauuucuauuuuuguagaag

SEQ ID NO: 103706 - RNA, 32 nt, Homo Sapiens
cgaccccccuccuaccccuccccucgcgcgcu

SEQ ID NO: 103707 - RNA, 32 nt, Homo Sapiens
gcagaucuguuucaaaaacaaauacaaaaaug

SEQ ID NO: 103708 - RNA, 32 nt, Homo Sapiens
gugggguuucugaugcauccacagccaaaggc

SEQ ID NO: 103709 - RNA, 32 nt, Homo Sapiens
caggccuggugccugccccaggaggaugagca

SEQ ID NO: 103710 - RNA, 32 nt, Homo Sapiens
guuugcaaggccagaguguuugaaaguuuugu

SEQ ID NO: 103711 - RNA, 32 nt, Homo Sapiens
ucuuucauauaaauaagaaguggaaauugccu

SEQ ID NO: 103712 - RNA, 32 nt, Homo Sapiens
uacaagaaaucuuuuuugauaacguaaaguca

SEQ ID NO: 103713 - RNA, 32 nt, Homo Sapiens
aggugucaggcucauucaugucucaggcacac

SEQ ID NO: 103714 - RNA, 32 nt, Homo Sapiens
ggauccagauucaaaugcagaaacugugauga

SEQ ID NO: 103715 - RNA, 32 nt, Homo Sapiens
aauuggcuaaucaagauguaacaccaucauaa

SEQ ID NO: 103716 - RNA, 32 nt, Homo Sapiens
aauugcuugagcccaggaguuuaagguuguag

SEQ ID NO: 103717 - RNA, 32 nt, Homo Sapiens
acgugugagcaugaugcaaaaauguaugcuca

SEQ ID NO: 103718 - RNA, 32 nt, Homo Sapiens
cucccucugugccucuucccaguucauggaag

SEQ ID NO: 103719 - RNA, 32 nt, Homo Sapiens
ggucagcgccgacggcagccggcaccugacgg

SEQ ID NO: 103720 - RNA, 32 nt, Homo Sapiens
cgugcaccaacccuucaccccuccuggaaagc

SEQ ID NO: 103721 - RNA, 32 nt, Homo Sapiens
caugacacaccuuuuucuuaguuuuucaguau

SEQ ID NO: 103722 - RNA, 32 nt, Homo Sapiens
cgcuggaggagcuccccagcugguggcuggag

SEQ ID NO: 103723 - RNA, 32 nt, Homo Sapiens
auauuaaaacaauguuuuauguaaaaaguguu

SEQ ID NO: 103724 - RNA, 32 nt, Homo Sapiens
ccaggcgcgggcccagugggccguaggggcga

SEQ ID NO: 103725 - RNA, 32 nt, Homo Sapiens
cuaggaauuuuuaaaacauuuuuuacaaaaua

SEQ ID NO: 103726 - RNA, 32 nt, Homo Sapiens
cugccuccaagccccagaugguucuggaggcu

SEQ ID NO: 103727 - RNA, 32 nt, Homo Sapiens
aggcggcccgcccgagccccagcagcagugcc

SEQ ID NO: 103728 - RNA, 30 nt, Homo Sapiens
ucucugggugacccugccuaugcugacccu

SEQ ID NO: 103729 - RNA, 32 nt, Homo Sapiens
acugcaguggguacugcccauccagcacccau

SEQ ID NO: 103730 - RNA, 32 nt, Homo Sapiens
uggguaacagcgagacucugucuuaaaaauaa

SEQ ID NO: 103731 - RNA, 32 nt, Homo Sapiens
cuucucuguaccauuccaguuuuuuaguauau

SEQ ID NO: 103732 - RNA, 32 nt, Homo Sapiens
aguauuucaaagcuuuucugguaauuuuagug

SEQ ID NO: 103733 - RNA, 32 nt, Homo Sapiens
ccgucccuucccccgcuggggcgacgggcucc

SEQ ID NO: 103734 - RNA, 32 nt, Homo Sapiens
aagaaacuugcucuguuuuguaagagcguguu

SEQ ID NO: 103735 - RNA, 32 nt, Homo Sapiens
cggcgggcgcaggcucgacccgggccaggagg

SEQ ID NO: 103736 - RNA, 32 nt, Homo Sapiens
agagguuucuagcaugcgcccgggguugacaa

SEQ ID NO: 103737 - RNA, 32 nt, Homo Sapiens
aaaacauaccuucaggauauuguuauguguug

SEQ ID NO: 103738 - RNA, 32 nt, Homo Sapiens
cagggguggggugggaggagcauuucuacccg

SEQ ID NO: 103739 - RNA, 30 nt, Homo Sapiens
acgcguccgggaaggggugagucugggucu

SEQ ID NO: 103740 - RNA, 32 nt, Homo Sapiens
agcuucuucuucgagucggagagcuacaagga

SEQ ID NO: 103741 - RNA, 32 nt, Homo Sapiens
gccucuguguaucucagcauuuuuauucccac

SEQ ID NO: 103742 - RNA, 32 nt, Homo Sapiens
ugaaaacauuuguuauacuaaaaugucuacau

SEQ ID NO: 103743 - RNA, 32 nt, Homo Sapiens
cuccggcugccuagcccuccccccagcucccu

SEQ ID NO: 103744 - RNA, 32 nt, Homo Sapiens
cgcagaggucccagccccaggccuggccucgc

SEQ ID NO: 103745 - RNA, 32 nt, Homo Sapiens
gucgacgcggccgcgcuccgcucccgugagua

SEQ ID NO: 103746 - RNA, 32 nt, Homo Sapiens
auaguggugcugucacagaaggacaaaauauu

SEQ ID NO: 103747 - RNA, 32 nt, Homo Sapiens
agaauuuaaaagacauaagacuaaauuacacc

SEQ ID NO: 103748 - RNA, 32 nt, Homo Sapiens
aggcgaagccagcaguuucuucugcugccggg

SEQ ID NO: 103749 - RNA, 32 nt, Homo Sapiens
auucccgcgggggcucggcggcagcccacggc

SEQ ID NO: 103750 - RNA, 32 nt, Homo Sapiens
cucucccacacgccccucuccucuaccccuau

SEQ ID NO: 103751 - RNA, 32 nt, Homo Sapiens
cuccugccucagccuucugagucucuggaauu

SEQ ID NO: 103752 - RNA, 32 nt, Homo Sapiens
agcaacccauucucgccucuuccuuggccggg

SEQ ID NO: 103753 - RNA, 32 nt, Homo Sapiens
cgagcccggacggcugccgucuccgccagagg

SEQ ID NO: 103754 - RNA, 32 nt, Homo Sapiens
cauuuuguguuuugcauagaaaguuuuaggaa

SEQ ID NO: 103755 - RNA, 32 nt, Homo Sapiens
aaaggaagggagcgugcuugcagacgccuccu

SEQ ID NO: 103756 - RNA, 32 nt, Homo Sapiens
gcuaacccugcaccccacccaccccugcacaa

SEQ ID NO: 103757 - RNA, 32 nt, Homo Sapiens
uggauaaacuugcugcaagccuggauacaauu

SEQ ID NO: 103758 - RNA, 32 nt, Homo Sapiens
cagaccuuuaagaguaugcuuuauugaguaaa

SEQ ID NO: 103759 - RNA, 32 nt, Homo Sapiens
cuuccuccggucccagguccccggcccucgcc

SEQ ID NO: 103760 - RNA, 32 nt, Homo Sapiens
aacaaaaaggaggcacaaaaccccaggcuuca

SEQ ID NO: 103761 - RNA, 32 nt, Homo Sapiens
gccucugccccuccccagcgcaggugugcgug

SEQ ID NO: 103762 - RNA, 32 nt, Homo Sapiens
ugagaccaagcaccccagcauagccacccagg

SEQ ID NO: 103763 - RNA, 32 nt, Homo Sapiens
ugcagagagccggcuccugggccugcuggggc

SEQ ID NO: 103764 - RNA, 32 nt, Homo Sapiens
accauguugcugugcccuggucaacaauaaac

SEQ ID NO: 103765 - RNA, 32 nt, Homo Sapiens
uauguaaugguggucauuuuuucccuuuuaga

SEQ ID NO: 103766 - RNA, 32 nt, Homo Sapiens
agcucacuguuaaugaagcggcugcucaacuc

SEQ ID NO: 103767 - RNA, 32 nt, Homo Sapiens
gacgacaguguuaagucagaucauuuaauggu

SEQ ID NO: 103768 - RNA, 32 nt, Homo Sapiens
ggugaauuagaguaaaacuuacaggauaagca

SEQ ID NO: 103769 - RNA, 32 nt, Homo Sapiens
aguguguucgcggcacgggcuggccaucgccu

SEQ ID NO: 103770 - RNA, 32 nt, Homo Sapiens
gacgcaaacacaauuggccggaccuugaucuu

SEQ ID NO: 103771 - RNA, 32 nt, Homo Sapiens
aacauguacagcauguuacuauacugaguacu

SEQ ID NO: 103772 - RNA, 32 nt, Homo Sapiens
guauagacuucuuagaaagauaauuucauuca

SEQ ID NO: 103773 - RNA, 32 nt, Homo Sapiens
agauguuugccucuuuccuccuccccacucua

SEQ ID NO: 103774 - RNA, 32 nt, Homo Sapiens
cagcuggcauuuguuaaucuucauuugagguc

SEQ ID NO: 103775 - RNA, 32 nt, Homo Sapiens
gaacaggaaggggacuaaaaugcugucccugg

SEQ ID NO: 103776 - RNA, 32 nt, Homo Sapiens
ccgccgaagaucugggaccacucagggcauca

SEQ ID NO: 103777 - RNA, 32 nt, Homo Sapiens
ucuuaaagacaucuuaauccugaauguaaaca

SEQ ID NO: 103778 - RNA, 32 nt, Homo Sapiens
auacuaaaaaauuuuaagaugguguuauacaa

SEQ ID NO: 103779 - RNA, 32 nt, Homo Sapiens
aacaauaacgaacgaacuguauggugccagcg

SEQ ID NO: 103780 - RNA, 32 nt, Homo Sapiens
ugcagaggugcucaagccuccucgcgguccgc

SEQ ID NO: 103781 - RNA, 32 nt, Homo Sapiens
uuuucacagccacugcaggauucaucuuccac

SEQ ID NO: 103782 - RNA, 32 nt, Homo Sapiens
augguucagacuccucccgccugccuucugac

SEQ ID NO: 103783 - RNA, 30 nt, Homo Sapiens
uccacccugcccgugcugcugcucugugcc

SEQ ID NO: 103784 - RNA, 32 nt, Homo Sapiens
ugcguugugugcaugcgagcgcuccugcaggc

SEQ ID NO: 103785 - RNA, 32 nt, Homo Sapiens
uaaaaguuuaggucuuacauuuagguauuuga

SEQ ID NO: 103786 - RNA, 32 nt, Homo Sapiens
ucacaguauuuucaaaaguuugcacauauugu

SEQ ID NO: 103787 - RNA, 32 nt, Homo Sapiens
aaugccguuucugaaaaucccaguuggaaucc

SEQ ID NO: 103788 - RNA, 32 nt, Homo Sapiens
cuuuuaaauguuuuaaaugauuucuugagaau

SEQ ID NO: 103789 - RNA, 32 nt, Homo Sapiens
cauuggaauaaaaaagauauuuuuguuacaaa

SEQ ID NO: 103790 - RNA, 32 nt, Homo Sapiens
ucagcucuguuguucugggauucaggcuggcc

SEQ ID NO: 103791 - RNA, 32 nt, Homo Sapiens
gaaugugucuugcggcagcugcagcaagugga

SEQ ID NO: 103792 - RNA, 32 nt, Homo Sapiens
ugcggcgggaguagaggcgccuugcgcaccag

SEQ ID NO: 103793 - RNA, 32 nt, Homo Sapiens
gguuagauuuuuaugcugcugcugaugggguu

SEQ ID NO: 103794 - RNA, 32 nt, Homo Sapiens
guaauacuggcauuuaaaauucuuauuuaacc

SEQ ID NO: 103795 - RNA, 32 nt, Homo Sapiens
acucaaguccugcagucaccccugccuaaaga

SEQ ID NO: 103796 - RNA, 32 nt, Homo Sapiens
agaacuuaugaguaagcagucugagaacuaaa

SEQ ID NO: 103797 - RNA, 32 nt, Homo Sapiens
guaacacggggagacccgucuuuaguaaauaa

SEQ ID NO: 103798 - RNA, 32 nt, Homo Sapiens
agaguuugagaucguggaccgaagccagcugc

SEQ ID NO: 103799 - RNA, 32 nt, Homo Sapiens
uucauagcuaggaaaugaaauucuuguaauuu

SEQ ID NO: 103800 - RNA, 32 nt, Homo Sapiens
aguuuggggucaucagauguggcuuuaggcuc

SEQ ID NO: 103801 - RNA, 32 nt, Homo Sapiens
auguuuauggauuuggagaaucaauauuguua

SEQ ID NO: 103802 - RNA, 32 nt, Homo Sapiens
aagauggcugccguacgccgggcccgcaguua

SEQ ID NO: 103803 - RNA, 32 nt, Homo Sapiens
ggagaggcugaguaaaccgagauccagcguuc

SEQ ID NO: 103804 - RNA, 32 nt, Homo Sapiens
ccagaauuuccucccucucugaugccacaugc

SEQ ID NO: 103805 - RNA, 27 nt, Homo Sapiens
acagaaguauuaaaugucucuuucuac

SEQ ID NO: 103806 - RNA, 32 nt, Homo Sapiens
aaaugauggaaauagauuaauuucuaauaccu

SEQ ID NO: 103807 - RNA, 32 nt, Homo Sapiens
agugaugcucguggcagugcugaaucucucug

SEQ ID NO: 103808 - RNA, 32 nt, Homo Sapiens
ugcugcagcccacugcaucuuuugaaagccug

SEQ ID NO: 103809 - RNA, 32 nt, Homo Sapiens
uuuauauuuuuucucaaaaauuuuagcagugu

SEQ ID NO: 103810 - RNA, 32 nt, Homo Sapiens
caguucucgcgagguuucgucuucccggaagc

SEQ ID NO: 103811 - RNA, 32 nt, Homo Sapiens
cauguauuaaauucaauuaaugcugaacauga

SEQ ID NO: 103812 - RNA, 32 nt, Homo Sapiens
auaguuuggaauugcaguuuccucacuucagg

SEQ ID NO: 103813 - RNA, 32 nt, Homo Sapiens
cgcgcugggcaggggcucucgcaggguuugaa

SEQ ID NO: 103814 - RNA, 32 nt, Homo Sapiens
agcaaaauaauuuuaaacaaaggguugagaug

SEQ ID NO: 103815 - RNA, 32 nt, Homo Sapiens
acagcuacuauaaggcuuguuugaucccaaau

SEQ ID NO: 103816 - RNA, 32 nt, Homo Sapiens
cgggcggcgggugggaagaggacuaccagagg

SEQ ID NO: 103817 - RNA, 32 nt, Homo Sapiens
cagugugucauuugcagauuugugguuaccua

SEQ ID NO: 103818 - RNA, 32 nt, Homo Sapiens
ucuacgauuugguaaaaacaucuuaaggucau

SEQ ID NO: 103819 - RNA, 32 nt, Homo Sapiens
auucccacugaauaagcauuaccuaauuaaac

SEQ ID NO: 103820 - RNA, 32 nt, Homo Sapiens
gccggacuccaaguccaccucccuucagaggc

SEQ ID NO: 103821 - RNA, 32 nt, Homo Sapiens
uggaaacacgcgaggagucggagggcacgggc

SEQ ID NO: 103822 - RNA, 32 nt, Homo Sapiens
cugcgggagggagagggacuugugggucugau

SEQ ID NO: 103823 - RNA, 32 nt, Homo Sapiens
gcccacgaccucagcgagagugagcuggaugu

SEQ ID NO: 103824 - RNA, 32 nt, Homo Sapiens
gggccauuuuucccucugccaaaaagacuucc

SEQ ID NO: 103825 - RNA, 32 nt, Homo Sapiens
cgccgccgcugcugcgcaccgcucccgggcuc

SEQ ID NO: 103826 - RNA, 32 nt, Homo Sapiens
acggauuccaaagaguagaauugcauugaccg

SEQ ID NO: 103827 - RNA, 32 nt, Homo Sapiens
gcauaugucaggcuccacucuuaaggagucag

SEQ ID NO: 103828 - RNA, 32 nt, Homo Sapiens
gcaaccaaggcaaugucuuacuaccucagcuc

SEQ ID NO: 103829 - RNA, 31 nt, Homo Sapiens
gcccugcagcgcaccaugaacgagaucuacc

SEQ ID NO: 103830 - RNA, 32 nt, Homo Sapiens
aaacaugcaccaguuuuuaccuauuaucaugg

SEQ ID NO: 103831 - RNA, 32 nt, Homo Sapiens
ucucaaacuaaaagacauuuguuauuuuggaa

SEQ ID NO: 103832 - RNA, 32 nt, Homo Sapiens
ccgcgcggggcgcugaugccgcagggcgcgcc

SEQ ID NO: 103833 - RNA, 32 nt, Homo Sapiens
ccaaugaggaggaaacagaaauaaaagaagac

SEQ ID NO: 103834 - RNA, 32 nt, Homo Sapiens
gguuuaaaaaucagauuaacuucuuggucucc

SEQ ID NO: 103835 - RNA, 32 nt, Homo Sapiens
ucuugacugagguuuuaauuuaucuuuuaauu

SEQ ID NO: 103836 - RNA, 32 nt, Homo Sapiens
cccuuaucuguaaguuuugaauuuauauuguu

SEQ ID NO: 103837 - RNA, 32 nt, Homo Sapiens
aaucauacaaaauaaaaaccugcuucaguguc

SEQ ID NO: 103838 - RNA, 32 nt, Homo Sapiens
aaaucuggagaugcugaauuuuguugggggga

SEQ ID NO: 103839 - RNA, 32 nt, Homo Sapiens
cagccugccugccuccguuucccuagcccugg

SEQ ID NO: 103840 - RNA, 32 nt, Homo Sapiens
gucuagguggagaaaaauaucaacagaacucu

SEQ ID NO: 103841 - RNA, 32 nt, Homo Sapiens
uuauuugggagaaaauuuuaucauauuuuagg

SEQ ID NO: 103842 - RNA, 32 nt, Homo Sapiens
aaauucaugggaaauuggauuuuuguaauaau

SEQ ID NO: 103843 - RNA, 32 nt, Homo Sapiens
cucugcucugggggcuggccuggcugugaggu

SEQ ID NO: 103844 - RNA, 32 nt, Homo Sapiens
aguaaccguccucacugcgccacgcacuccuc

SEQ ID NO: 103845 - RNA, 32 nt, Homo Sapiens
cuccagagaagaucauucccccugcuucugcc

SEQ ID NO: 103846 - RNA, 32 nt, Homo Sapiens
cugcccagaugacugucuaaccagaccucaga

SEQ ID NO: 103847 - RNA, 32 nt, Homo Sapiens
guucaauguggaggggggaggggcugcugcgg

SEQ ID NO: 103848 - RNA, 32 nt, Homo Sapiens
gugugagggcgcccggcuuccaggcaguaaug

SEQ ID NO: 103849 - RNA, 32 nt, Homo Sapiens
gucccuuucucucuccuuagugccuagcugug

SEQ ID NO: 103850 - RNA, 32 nt, Homo Sapiens
caggggaaacugaguuucauccaauguggaga

SEQ ID NO: 103851 - RNA, 32 nt, Homo Sapiens
agagagaaguagaacauacugauagagguuag

SEQ ID NO: 103852 - RNA, 32 nt, Homo Sapiens
uacuaacuggggcagaacucagacgggugccc

SEQ ID NO: 103853 - RNA, 32 nt, Homo Sapiens
ucuuaugcaaagaugguaaaacacuguuguca

SEQ ID NO: 103854 - RNA, 32 nt, Homo Sapiens
cuugccacuuccuuuuucucuuacuuccagca

SEQ ID NO: 103855 - RNA, 32 nt, Homo Sapiens
uuucccuccgcguccccgagcccaccccuucc

SEQ ID NO: 103856 - RNA, 32 nt, Homo Sapiens
gcauuucagucucaacgcauagauaaauuuag

SEQ ID NO: 103857 - RNA, 32 nt, Homo Sapiens
ccccacccauccccgugcccccucccuaccgc

SEQ ID NO: 103858 - RNA, 32 nt, Homo Sapiens
ugcacagaauccaaugcugugugcugaucuuc

SEQ ID NO: 103859 - RNA, 32 nt, Homo Sapiens
gcuguaaugggccaucaaaaaaugacaauuug

SEQ ID NO: 103860 - RNA, 32 nt, Homo Sapiens
cccacuaugggucuccacuacccagucacuga

SEQ ID NO: 103861 - RNA, 32 nt, Homo Sapiens
caaaaccuguccccggcagccagugcucucug

SEQ ID NO: 103862 - RNA, 32 nt, Homo Sapiens
aaggggcggcgggacgcgggccuggcccgugu

SEQ ID NO: 103863 - RNA, 32 nt, Homo Sapiens
gaaaaacugauuugaaggcaucuccgggguug

SEQ ID NO: 103864 - RNA, 32 nt, Homo Sapiens
ucugcgcccuggagggagguguagaaagaggu

SEQ ID NO: 103865 - RNA, 32 nt, Homo Sapiens
agccuggucaacauggugaaaucuugucucua

SEQ ID NO: 103866 - RNA, 32 nt, Homo Sapiens
aaccagguuuaccauguaauuuguuuuuaaau

SEQ ID NO: 103867 - RNA, 32 nt, Homo Sapiens
cccgugucuucccucccuucucggccccgcca

SEQ ID NO: 103868 - RNA, 32 nt, Homo Sapiens
ugaagggagcuaccuuugagaagugccuguug

SEQ ID NO: 103869 - RNA, 32 nt, Homo Sapiens
uaucuugggaccugaauaggaaaggaauuuac

SEQ ID NO: 103870 - RNA, 32 nt, Homo Sapiens
gccuggcaacagagaccccaagaccuacacag

SEQ ID NO: 103871 - RNA, 32 nt, Homo Sapiens
ucaagcacaucaugucuaucugauggagcucu

SEQ ID NO: 103872 - RNA, 32 nt, Homo Sapiens
cauuguauaugcgguccaucauuggccaaacu

SEQ ID NO: 103873 - RNA, 32 nt, Homo Sapiens
caucggaaccaggccuccuggcacuggccugg

SEQ ID NO: 103874 - RNA, 32 nt, Homo Sapiens
aaagggccuccgcuuagagcugcgggugagga

SEQ ID NO: 103875 - RNA, 32 nt, Homo Sapiens
aaaauagauguuacaguucuuaaaggcagugc

SEQ ID NO: 103876 - RNA, 32 nt, Homo Sapiens
auuuuuucaaagcuggguguugggaccaacau

SEQ ID NO: 103877 - RNA, 32 nt, Homo Sapiens
cuguagcuugaaaggggaaagauuggagguaa

SEQ ID NO: 103878 - RNA, 32 nt, Homo Sapiens
cugccgcaugcccuuccacucugccucccagg

SEQ ID NO: 103879 - RNA, 32 nt, Homo Sapiens
aaauuauauguauugaaacauuauuauguauc

SEQ ID NO: 103880 - RNA, 32 nt, Homo Sapiens
aagugggcccuaauccaguaugacugguguuc

SEQ ID NO: 103881 - RNA, 32 nt, Homo Sapiens
ccccaccaauaguaaaucccccugccuauauu

SEQ ID NO: 103882 - RNA, 32 nt, Homo Sapiens
ucacccugagcugcagcccgcuggcugcugag

SEQ ID NO: 103883 - RNA, 32 nt, Homo Sapiens
ccuuauguuugauuuuggggucagucugugug

SEQ ID NO: 103884 - RNA, 32 nt, Homo Sapiens
gcuuaguaccuggcaaagaaaguaaaauuguu

SEQ ID NO: 103885 - RNA, 32 nt, Homo Sapiens
aaucgaaguugaacuuuuuuuuuuuuuuuaac

SEQ ID NO: 103886 - RNA, 32 nt, Homo Sapiens
uaugguaauguuuucuuucucaucacccacuc

SEQ ID NO: 103887 - RNA, 32 nt, Homo Sapiens
ccgccccgggcucgcgcccccgggccaugaag

SEQ ID NO: 103888 - RNA, 32 nt, Homo Sapiens
uuuagccugggcgacagagagacccaucucaa

SEQ ID NO: 103889 - RNA, 32 nt, Homo Sapiens
cauagcuucuaaauggagcuucuguggaauga

SEQ ID NO: 103890 - RNA, 32 nt, Homo Sapiens
ugaagaacagaauggagggcucugggaggagg

SEQ ID NO: 103891 - RNA, 32 nt, Homo Sapiens
ggaaaguaaaauguacaaguuuaauaaaaagg

SEQ ID NO: 103892 - RNA, 32 nt, Homo Sapiens
cuccgugcuggugauuuuauguggcagcccuc

SEQ ID NO: 103893 - RNA, 32 nt, Homo Sapiens
ugccauauaagaauuuuuguuuuuguaaaugg

SEQ ID NO: 103894 - RNA, 32 nt, Homo Sapiens
aggccggcagcccugggguggcggcgggcaga

SEQ ID NO: 103895 - RNA, 32 nt, Homo Sapiens
uuucauacggguucucugcugcugaaacacag

SEQ ID NO: 103896 - RNA, 32 nt, Homo Sapiens
ccuuuguccucucuacccacagauggcccugg

SEQ ID NO: 103897 - RNA, 32 nt, Homo Sapiens
ggugauggagugccugggguccuacuugccca

SEQ ID NO: 103898 - RNA, 32 nt, Homo Sapiens
uagcauaauauauaacaaggcaucaggcuuuc

SEQ ID NO: 103899 - RNA, 32 nt, Homo Sapiens
accuguacagaaaauugaauauugaaaaauug

SEQ ID NO: 103900 - RNA, 32 nt, Homo Sapiens
ugggcggaucaccugaugucaggaguucaaga

SEQ ID NO: 103901 - RNA, 32 nt, Homo Sapiens
gggcgcggcggguggggaggcagcaggcacca

SEQ ID NO: 103902 - RNA, 32 nt, Homo Sapiens
uuuacaagccccagcuccucuucuugccccgc

SEQ ID NO: 103903 - RNA, 32 nt, Homo Sapiens
gaguaugggugugagcucuauagaccaucccu

SEQ ID NO: 103904 - RNA, 32 nt, Homo Sapiens
gcaccuuggugcccucugagcaccuggccgcc

SEQ ID NO: 103905 - RNA, 32 nt, Homo Sapiens
ccauugauauuguauuuagaagguuucaggug

SEQ ID NO: 103906 - RNA, 32 nt, Homo Sapiens
gcuugcagaagcugcccuuucacccaucuuga

SEQ ID NO: 103907 - RNA, 32 nt, Homo Sapiens
cuggacaucccauguucagcaaugucaauggc

SEQ ID NO: 103908 - RNA, 32 nt, Homo Sapiens
aggggcccucgcgccaaccuggaccggucccc

SEQ ID NO: 103909 - RNA, 32 nt, Homo Sapiens
uagauauuuaccauauacaauuauuuuuuaau

SEQ ID NO: 103910 - RNA, 30 nt, Homo Sapiens
gcggcgcgcgcugcgggcagugagugugga

SEQ ID NO: 103911 - RNA, 32 nt, Homo Sapiens
acugcagauugugaauuucacugccuuauauu

SEQ ID NO: 103912 - RNA, 32 nt, Homo Sapiens
cgccugggagacgcugccucggcccggacgcg

SEQ ID NO: 103913 - RNA, 32 nt, Homo Sapiens
cuaccgagcccgcgccagcgggggccccagga

SEQ ID NO: 103914 - RNA, 32 nt, Homo Sapiens
aaauguccaaaaagaacaugagauuuauggug

SEQ ID NO: 103915 - RNA, 32 nt, Homo Sapiens
aauaccaccuaguggauauggcaacugcagag

SEQ ID NO: 103916 - RNA, 32 nt, Homo Sapiens
uccaaaggccauccuuuuggggccaccuggcu

SEQ ID NO: 103917 - RNA, 32 nt, Homo Sapiens
gacuaggcgagccgaggcgggcgaagggcucu

SEQ ID NO: 103918 - RNA, 32 nt, Homo Sapiens
uaaguugccacaggccagcaaaagcacuucag

SEQ ID NO: 103919 - RNA, 32 nt, Homo Sapiens
caaagcagccccacaguggagccuucggcugg

SEQ ID NO: 103920 - RNA, 32 nt, Homo Sapiens
uuucauuuuuaauuuucaaaucaaaacaggaa

SEQ ID NO: 103921 - RNA, 31 nt, Homo Sapiens
cgagcggacaugcaggcuccccgcgcagccc

SEQ ID NO: 103922 - RNA, 32 nt, Homo Sapiens
ugugccggucccucacaaaccucucccccuuu

SEQ ID NO: 103923 - RNA, 32 nt, Homo Sapiens
ggcccaggacaggaggcugagaaggagcugac

SEQ ID NO: 103924 - RNA, 32 nt, Homo Sapiens
uuagauauugcuuuugaaguagaugguaaaau

SEQ ID NO: 103925 - RNA, 32 nt, Homo Sapiens
ccuucuucaccagccagcagcugugcccccgc

SEQ ID NO: 103926 - RNA, 32 nt, Homo Sapiens
aaaaaggugcugauucuauaagauuauuuaua

SEQ ID NO: 103927 - RNA, 32 nt, Homo Sapiens
ugaugugaaaaauuauuguaguaaacuuuuaa

SEQ ID NO: 103928 - RNA, 32 nt, Homo Sapiens
gaaccucauagaacaagcguccaggucaucug

SEQ ID NO: 103929 - RNA, 32 nt, Homo Sapiens
auaaaucaaagcucaucaguucccauaaaugc

SEQ ID NO: 103930 - RNA, 32 nt, Homo Sapiens
auacauauauauacauauauaugacuauacau

SEQ ID NO: 103931 - RNA, 32 nt, Homo Sapiens
uggcccgguucuacagccccagcccagaucua

SEQ ID NO: 103932 - RNA, 32 nt, Homo Sapiens
ccgcccacccuuccagauccccggccccggcu

SEQ ID NO: 103933 - RNA, 32 nt, Homo Sapiens
acagccagagcaaggcccggcuccacacggca

SEQ ID NO: 103934 - RNA, 32 nt, Homo Sapiens
cugcccugggcuggccggcgccguacugccug

SEQ ID NO: 103935 - RNA, 32 nt, Homo Sapiens
uucccgcugcgguagcgccgccggggaaacgc

SEQ ID NO: 103936 - RNA, 32 nt, Homo Sapiens
aaucaguggucucaaaucgauuugccucccuu

SEQ ID NO: 103937 - RNA, 32 nt, Homo Sapiens
cagcaagucuauuggugccauuuuuucaacau

SEQ ID NO: 103938 - RNA, 32 nt, Homo Sapiens
acauauauuuuuguguuuguugguaaguaauu

SEQ ID NO: 103939 - RNA, 32 nt, Homo Sapiens
acgagcuuguaucuccuucccugugccacgag

SEQ ID NO: 103940 - RNA, 32 nt, Homo Sapiens
guuugagcuaccauuuauauggguuauuuaua

SEQ ID NO: 103941 - RNA, 32 nt, Homo Sapiens
gaccuugcuggcccgcggcgccaugagccgca

SEQ ID NO: 103942 - RNA, 32 nt, Homo Sapiens
ccuucauuucuucaccgcgguuccucgucaua

SEQ ID NO: 103943 - RNA, 32 nt, Homo Sapiens
cguucgugacucagccgccccaucccgagucg

SEQ ID NO: 103944 - RNA, 32 nt, Homo Sapiens
ccgcugccgccaucgugccagccccucggguc

SEQ ID NO: 103945 - RNA, 32 nt, Homo Sapiens
acucuagaaugaucuagacuauguauguuuaa

SEQ ID NO: 103946 - RNA, 32 nt, Homo Sapiens
guuagaaaaaacaaaauguuuaccauaacaag

SEQ ID NO: 103947 - RNA, 32 nt, Homo Sapiens
acuucggcagggcuggagcggcugcugguugg

SEQ ID NO: 103948 - RNA, 32 nt, Homo Sapiens
aaacacucuuuccccgcaccccagcaauuaug

SEQ ID NO: 103949 - RNA, 32 nt, Homo Sapiens
gcgcucccuccuucuguagagggcgccugcca

SEQ ID NO: 103950 - RNA, 32 nt, Homo Sapiens
ccaguuucacauaaguuauuugucuucuuuuc

SEQ ID NO: 103951 - RNA, 32 nt, Homo Sapiens
gguuccuguuucuagguuguggaucuucagau

SEQ ID NO: 103952 - RNA, 32 nt, Homo Sapiens
gagggugguagugugacccugccugaaaaaag

SEQ ID NO: 103953 - RNA, 32 nt, Homo Sapiens
accugggaguaauaaaguuacuuuuuaaaugc

SEQ ID NO: 103954 - RNA, 32 nt, Homo Sapiens
cacccaccucaucauccccgggcucccaucag

SEQ ID NO: 103955 - RNA, 32 nt, Homo Sapiens
cagacgggcucugauuuacugaaggugugaug

SEQ ID NO: 103956 - RNA, 32 nt, Homo Sapiens
uauuuguaacaaaaaauuaauaugaauggagu

SEQ ID NO: 103957 - RNA, 32 nt, Homo Sapiens
uggcggcugaggagggcggagaguucuguggu

SEQ ID NO: 103958 - RNA, 32 nt, Homo Sapiens
gccccagcucacgggcccccaacuuccagcuc

SEQ ID NO: 103959 - RNA, 32 nt, Homo Sapiens
ugacagguuugcuacacccagccccggacugu

SEQ ID NO: 103960 - RNA, 32 nt, Homo Sapiens
uagggguuugggggaaugcuaauuauauauug

SEQ ID NO: 103961 - RNA, 32 nt, Homo Sapiens
gcauacuuuucaaagcugggaagacccuuuca

SEQ ID NO: 103962 - RNA, 32 nt, Homo Sapiens
uauguacaauacagcuaacauaaaacuguagu

SEQ ID NO: 103963 - RNA, 32 nt, Homo Sapiens
auaaugaggcagaaacaaaauccucgguaaca

SEQ ID NO: 103964 - RNA, 32 nt, Homo Sapiens
ucuuugagagucuggaacaaauuuauaaauca

SEQ ID NO: 103965 - RNA, 28 nt, Homo Sapiens
aggcuagacaagaugcauuugaaagaua

SEQ ID NO: 103966 - RNA, 32 nt, Homo Sapiens
ccuccaaagcgugcccuguuucccuuccuuag

SEQ ID NO: 103967 - RNA, 32 nt, Homo Sapiens
ggccaagucagcuucuucugagagagucucua

SEQ ID NO: 103968 - RNA, 32 nt, Homo Sapiens
cucaucugccuagggagggucacagaggcagg

SEQ ID NO: 103969 - RNA, 32 nt, Homo Sapiens
ccguuauauuccaaaauauauauugagauaaa

SEQ ID NO: 103970 - RNA, 32 nt, Homo Sapiens
gugcucgguuugucaaaauuugcaaccauuua

SEQ ID NO: 103971 - RNA, 32 nt, Homo Sapiens
ccuggagguaucuggaacccugcuuggcauga

SEQ ID NO: 103972 - RNA, 32 nt, Homo Sapiens
cucuagagguuggaaagagaagagaggcuggg

SEQ ID NO: 103973 - RNA, 32 nt, Homo Sapiens
ccccagcccuccccacucccagguuaaccaau

SEQ ID NO: 103974 - RNA, 32 nt, Homo Sapiens
ugcaacuccuacuucacauugccugugaccau

SEQ ID NO: 103975 - RNA, 32 nt, Homo Sapiens
uggauuaauauuugguauuucuuuuaaaguau

SEQ ID NO: 103976 - RNA, 29 nt, Homo Sapiens
augagcugcagguacgguccggaaucccg

SEQ ID NO: 103977 - RNA, 32 nt, Homo Sapiens
uagauuuuuuaaaaacuacauuuuguaaggcc

SEQ ID NO: 103978 - RNA, 32 nt, Homo Sapiens
ugugaaaguacuuuuugaaaucauucaguugu

SEQ ID NO: 103979 - RNA, 32 nt, Homo Sapiens
ucucuucucauccacacccauaaaccaguuca

SEQ ID NO: 103980 - RNA, 32 nt, Homo Sapiens
ugauauguggcaaaccugagcuauagauacca

SEQ ID NO: 103981 - RNA, 32 nt, Homo Sapiens
guuuugcaaagggaaacaggcuaaaugcacca

SEQ ID NO: 103982 - RNA, 32 nt, Homo Sapiens
agacuuguucuucuucugcaguaucuggaaaa

SEQ ID NO: 103983 - RNA, 32 nt, Homo Sapiens
cgugucgccccgcagugcugcggccgccgcgg

SEQ ID NO: 103984 - RNA, 32 nt, Homo Sapiens
ugugccgggggcgggggacggaggggcaggag

SEQ ID NO: 103985 - RNA, 31 nt, Homo Sapiens
guuccaucagcaagaaccugaguuugaagug

SEQ ID NO: 103986 - RNA, 32 nt, Homo Sapiens
ucccugacagcuuccccacucuaggcugcaca

SEQ ID NO: 103987 - RNA, 32 nt, Homo Sapiens
auucuaaacuuaaagggauucccuuuaaacca

SEQ ID NO: 103988 - RNA, 32 nt, Homo Sapiens
ucagacaaagcuuguacaaauuccugaaccgc

SEQ ID NO: 103989 - RNA, 32 nt, Homo Sapiens
aucacacccuccgguuauguugcuccaguaaa

SEQ ID NO: 103990 - RNA, 32 nt, Homo Sapiens
uugaaaacuaaauuguauuguccuauuauauu

SEQ ID NO: 103991 - RNA, 32 nt, Homo Sapiens
acagggcagugagggagggcugucaucugugc

SEQ ID NO: 103992 - RNA, 32 nt, Homo Sapiens
gcuuuccuccuccuuuacccuuucagauacaa

SEQ ID NO: 103993 - RNA, 32 nt, Homo Sapiens
aucagaaugaacuuugguaaccagaaauguaa

SEQ ID NO: 103994 - RNA, 32 nt, Homo Sapiens
uaauauauucccgaagagauauguaaauaagc

SEQ ID NO: 103995 - RNA, 32 nt, Homo Sapiens
aacuggcugcggccaucacagcugcgugccug

SEQ ID NO: 103996 - RNA, 32 nt, Homo Sapiens
acuuaaaagagaaaacauuuuguagauagaga

SEQ ID NO: 103997 - RNA, 32 nt, Homo Sapiens
agcccugugggaacuggugucuuauaaccaag

SEQ ID NO: 103998 - RNA, 32 nt, Homo Sapiens
auagaaaaauguuuuucuaaaguuuuugagca

SEQ ID NO: 103999 - RNA, 32 nt, Homo Sapiens
uuagauucauauucuucauuuauuuuauauca

SEQ ID NO: 104000 - RNA, 32 nt, Homo Sapiens
acugcuuuuuaaagacuuugauuucuccaagu

SEQ ID NO: 104001 - RNA, 32 nt, Homo Sapiens
ugcagcgggagacccuguccccgccccagccg

SEQ ID NO: 104002 - RNA, 32 nt, Homo Sapiens
aagaggggcaggucgggggagggugaugccag

SEQ ID NO: 104003 - RNA, 31 nt, Homo Sapiens
ugccugccugccugccugcccgcccagagcu

SEQ ID NO: 104004 - RNA, 32 nt, Homo Sapiens
cgcgagcagggcucuggcgcccgccccugucc

SEQ ID NO: 104005 - RNA, 32 nt, Homo Sapiens
gcauuucccccuccucagaugggaagccuggc

SEQ ID NO: 104006 - RNA, 32 nt, Homo Sapiens
uccucaaguccuuucccguccuccucauccaa

SEQ ID NO: 104007 - RNA, 32 nt, Homo Sapiens
aacccauccuucugugucuccuccucucugug

SEQ ID NO: 104008 - RNA, 32 nt, Homo Sapiens
ccgccgcugccucagccagcaaugcaagauua

SEQ ID NO: 104009 - RNA, 32 nt, Homo Sapiens
cucugaagaucccuguacacgugguguuggga

SEQ ID NO: 104010 - RNA, 32 nt, Homo Sapiens
agcuccugcccccaggccuaggcaugcugcuu

SEQ ID NO: 104011 - RNA, 32 nt, Homo Sapiens
ccaggcucccugcuccuccugaaggccuuggc

SEQ ID NO: 104012 - RNA, 32 nt, Homo Sapiens
ugaagacugagaaaacagauaauaaaaaucua

SEQ ID NO: 104013 - RNA, 32 nt, Homo Sapiens
ggucaggaggcaauuugccugccuuguacaaa

SEQ ID NO: 104014 - RNA, 32 nt, Homo Sapiens
cccaaaccuccuuuaaaggagcaugcauaaca

SEQ ID NO: 104015 - RNA, 32 nt, Homo Sapiens
acccguagggagaggcggguugcgggcggcgg

SEQ ID NO: 104016 - RNA, 32 nt, Homo Sapiens
cauccagauuauaacuucaaugggacacuuua

SEQ ID NO: 104017 - RNA, 32 nt, Homo Sapiens
auaaaguggggauauauagaaacacacagugu

SEQ ID NO: 104018 - RNA, 32 nt, Homo Sapiens
ggcugcccugacucaaccccagccuggggcuu

SEQ ID NO: 104019 - RNA, 31 nt, Homo Sapiens
uagcugcucaaugauugauuguugaaugaua

SEQ ID NO: 104020 - RNA, 32 nt, Homo Sapiens
uagguuuguccucauuuuacaaaugaggaaac

SEQ ID NO: 104021 - RNA, 32 nt, Homo Sapiens
cgggcccccgcggccaccaugaagaaggaggu

SEQ ID NO: 104022 - RNA, 32 nt, Homo Sapiens
gguuggggucauuuuucuuaaagacgagcugu

SEQ ID NO: 104023 - RNA, 32 nt, Homo Sapiens
cauguguagcccugaggccuggaucuguuaag

SEQ ID NO: 104024 - RNA, 32 nt, Homo Sapiens
aaauuucaucaggcaauaccccaggaucaacg

SEQ ID NO: 104025 - RNA, 32 nt, Homo Sapiens
augaggucaggagaucgagaccauucuggcca

SEQ ID NO: 104026 - RNA, 32 nt, Homo Sapiens
ucagucccgcaugcagccggagccuccacaga

SEQ ID NO: 104027 - RNA, 32 nt, Homo Sapiens
cacccaagggugccauggucccgggaaaaccc

SEQ ID NO: 104028 - RNA, 32 nt, Homo Sapiens
ucccaggcucccgaagcuucccacaucuggag

SEQ ID NO: 104029 - RNA, 32 nt, Homo Sapiens
cggcuccgcgcgcgaccuccggcccugcgcgu

SEQ ID NO: 104030 - RNA, 32 nt, Homo Sapiens
ucggggcaagguggggcgggccucccgagcuc

SEQ ID NO: 104031 - RNA, 32 nt, Homo Sapiens
agcgccgggcagagggggagggggacgaagcu

SEQ ID NO: 104032 - RNA, 32 nt, Homo Sapiens
ugagauacuccagcgccuuccuggagauagcu

SEQ ID NO: 104033 - RNA, 32 nt, Homo Sapiens
uuauacagauaaaacaugacuccuacaaggcc

SEQ ID NO: 104034 - RNA, 32 nt, Homo Sapiens
agugugacugaggaaggaaaauuuaaauuuug

SEQ ID NO: 104035 - RNA, 32 nt, Homo Sapiens
aucuggcagguuugacuauccagaggaaauua

SEQ ID NO: 104036 - RNA, 32 nt, Homo Sapiens
uuucuggucccucuucucuccucaguuucuca

SEQ ID NO: 104037 - RNA, 32 nt, Homo Sapiens
agcuuuagaagcagccaggucuggugagaaau

SEQ ID NO: 104038 - RNA, 32 nt, Homo Sapiens
cuuugaucguauauuucucauaaugugaaaua

SEQ ID NO: 104039 - RNA, 32 nt, Homo Sapiens
uuauaguaauauuaauaaaaguguuaaagcuu

SEQ ID NO: 104040 - RNA, 32 nt, Homo Sapiens
uggaggaauauggugacccacuauuguugaga

SEQ ID NO: 104041 - RNA, 32 nt, Homo Sapiens
acgaaucccuuccuccucuccccuuuaccccc

SEQ ID NO: 104042 - RNA, 32 nt, Homo Sapiens
uuaaauuuuuaaaaauuacuuagcucaaaaug

SEQ ID NO: 104043 - RNA, 32 nt, Homo Sapiens
aaaaaaacuaauuuaaauuugcuuuucuuuuu

SEQ ID NO: 104044 - RNA, 32 nt, Homo Sapiens
cagccuugagcaugcacaaaaggacacacuua

SEQ ID NO: 104045 - RNA, 32 nt, Homo Sapiens
ccugugccccugcucugccccauccuggcugg

SEQ ID NO: 104046 - RNA, 32 nt, Homo Sapiens
aggcgggggcgggugaggagggggugacgccg

SEQ ID NO: 104047 - RNA, 32 nt, Homo Sapiens
uuguuuuucuggcgcccagcccggcccgccgc

SEQ ID NO: 104048 - RNA, 32 nt, Homo Sapiens
uucugaguuuguagaaaguggcagaugcuguu

SEQ ID NO: 104049 - RNA, 32 nt, Homo Sapiens
gccugaaagggagagaagauuggcgcugggug

SEQ ID NO: 104050 - RNA, 32 nt, Homo Sapiens
aacuucauccauagaucauacucuguacaaaa

SEQ ID NO: 104051 - RNA, 32 nt, Homo Sapiens
cgcagccugggcggggacccgcgacccgucaa

SEQ ID NO: 104052 - RNA, 32 nt, Homo Sapiens
uuugucuguuuaaaauuucaguuuaauuuugc

SEQ ID NO: 104053 - RNA, 32 nt, Homo Sapiens
uggaccugagaggagcucuuaaagcuucauca

SEQ ID NO: 104054 - RNA, 32 nt, Homo Sapiens
aaaagacaaaaauauuauucagaagugaccuu

SEQ ID NO: 104055 - RNA, 32 nt, Homo Sapiens
ggagccuuuauaaaguuuuucucuaugcagac

SEQ ID NO: 104056 - RNA, 32 nt, Homo Sapiens
aagcaauuccuuggcuucggcuccucaccacu

SEQ ID NO: 104057 - RNA, 32 nt, Homo Sapiens
ggaccccucucagaggauccuauacauggaug

SEQ ID NO: 104058 - RNA, 32 nt, Homo Sapiens
agcuuaucaaggagucuagauugguuuuguuu

SEQ ID NO: 104059 - RNA, 32 nt, Homo Sapiens
uuuaugaauuucucuuuuuuucuucucugugu

SEQ ID NO: 104060 - RNA, 29 nt, Homo Sapiens
cagcgucggggacgauggcgcgacucgug

SEQ ID NO: 104061 - RNA, 32 nt, Homo Sapiens
gugguugacugggaugaaguuggagggagggg

SEQ ID NO: 104062 - RNA, 32 nt, Homo Sapiens
cccucccucuccccggggcccauggcgguggc

SEQ ID NO: 104063 - RNA, 32 nt, Homo Sapiens
auuccuugguuccaugagacaccccaaguccu

SEQ ID NO: 104064 - RNA, 31 nt, Homo Sapiens
ccagaguuagauccucucagaacagagucug

SEQ ID NO: 104065 - RNA, 32 nt, Homo Sapiens
cuaagaagcccggccucaaacucaagauaaaa

SEQ ID NO: 104066 - RNA, 32 nt, Homo Sapiens
cuugacuuagcaaaauuugugcucuuucauuu

SEQ ID NO: 104067 - RNA, 32 nt, Homo Sapiens
aucacugauuuacugauuuaagcuagccaaac

SEQ ID NO: 104068 - RNA, 32 nt, Homo Sapiens
uggcaccuggcggacccucccggagcgucggc

SEQ ID NO: 104069 - RNA, 32 nt, Homo Sapiens
uuggaaucucagauuguggggguguggauggu

SEQ ID NO: 104070 - RNA, 32 nt, Homo Sapiens
aaaauacaaaaauuagccagucauggugccac

SEQ ID NO: 104071 - RNA, 32 nt, Homo Sapiens
uccugggucucggggucggggaggggacgggg

SEQ ID NO: 104072 - RNA, 32 nt, Homo Sapiens
gaugcuggccggccgcgccuggcuucuuggaa

SEQ ID NO: 104073 - RNA, 32 nt, Homo Sapiens
ugccuauuuuggaguucacagacuuacaaauc

SEQ ID NO: 104074 - RNA, 32 nt, Homo Sapiens
uauuaauugguagccuacauauuagcagaugu

SEQ ID NO: 104075 - RNA, 32 nt, Homo Sapiens
uuugccaggaugggggcgucugcagaacuagg

SEQ ID NO: 104076 - RNA, 31 nt, Homo Sapiens
caauuucucaaugaaaauguuugaugugauc

SEQ ID NO: 104077 - RNA, 32 nt, Homo Sapiens
gggauugcugaggcaccguccaggccccaccg

SEQ ID NO: 104078 - RNA, 32 nt, Homo Sapiens
uccguguauguauauauacacacauauauaug

SEQ ID NO: 104079 - RNA, 32 nt, Homo Sapiens
ucagcuccgcggcucccggcggaagcggcugc

SEQ ID NO: 104080 - RNA, 32 nt, Homo Sapiens
ugaggcauguuccugccuaccauccuccuccc

SEQ ID NO: 104081 - RNA, 32 nt, Homo Sapiens
acugccauucagccuccugcuccagcuguuca

SEQ ID NO: 104082 - RNA, 32 nt, Homo Sapiens
aaccaaucuaaugaugagaauguacuuauauu

SEQ ID NO: 104083 - RNA, 31 nt, Homo Sapiens
gugcccagugcuaucagaugaguuaaaaccu

SEQ ID NO: 104084 - RNA, 32 nt, Homo Sapiens
ggauuacaucaacuuuggacccauugguuuug

SEQ ID NO: 104085 - RNA, 32 nt, Homo Sapiens
cuucccacccucguucuuggguacguucaaua

SEQ ID NO: 104086 - RNA, 32 nt, Homo Sapiens
ugggauaucaccccaaagugaccuugccagug

SEQ ID NO: 104087 - RNA, 32 nt, Homo Sapiens
cauugauaggcugaucuauguauuuugaaagc

SEQ ID NO: 104088 - RNA, 32 nt, Homo Sapiens
agaugagcacgcuuaccaguuucuuggcaaug

SEQ ID NO: 104089 - RNA, 32 nt, Homo Sapiens
gaaagcacgcggugcccauuucaucgacaccg

SEQ ID NO: 104090 - RNA, 32 nt, Homo Sapiens
cugcccccaaaaugcugucuccagcucacaca

SEQ ID NO: 104091 - RNA, 32 nt, Homo Sapiens
uuuguucauauugcucuguguacauuuaauuc

SEQ ID NO: 104092 - RNA, 32 nt, Homo Sapiens
cagcgugaacagagccaugccccacccuccca

SEQ ID NO: 104093 - RNA, 32 nt, Homo Sapiens
cucauuuucccccuuuuuccuguacacauccc

SEQ ID NO: 104094 - RNA, 32 nt, Homo Sapiens
aggagcuccaggcccgucggcgcggagugguc

SEQ ID NO: 104095 - RNA, 32 nt, Homo Sapiens
ggauauugagggcuucagcugcugcuauuaug

SEQ ID NO: 104096 - RNA, 32 nt, Homo Sapiens
gaggaucauuaauucagauaauuuuuaaguuu

SEQ ID NO: 104097 - RNA, 32 nt, Homo Sapiens
gccaggugugugggacugaaguucuuggagaa

SEQ ID NO: 104098 - RNA, 32 nt, Homo Sapiens
gcagacuuauuuuggcggauuuccaagggauu

SEQ ID NO: 104099 - RNA, 32 nt, Homo Sapiens
uuccuaaacuaucuuuuuuuuauuccacaucu

SEQ ID NO: 104100 - RNA, 32 nt, Homo Sapiens
acauuaaaagcccuguggauaauuacguuauc

SEQ ID NO: 104101 - RNA, 32 nt, Homo Sapiens
uagcacaugauuuucuuuuguuuucuucauuu

SEQ ID NO: 104102 - RNA, 32 nt, Homo Sapiens
aggcgcaaggcugguuccuguuuucugggcuu

SEQ ID NO: 104103 - RNA, 32 nt, Homo Sapiens
gagcaaccucuucagcugggaaggccgcaaga

SEQ ID NO: 104104 - RNA, 32 nt, Homo Sapiens
ccaagcucagcaccaccggccaugaccagagg

SEQ ID NO: 104105 - RNA, 32 nt, Homo Sapiens
aguuuaucacauuuuguugacuucugacauuc

SEQ ID NO: 104106 - RNA, 32 nt, Homo Sapiens
cuuuccuacauguaucucugguauuuagaauu

SEQ ID NO: 104107 - RNA, 32 nt, Homo Sapiens
ccuggaccuuggagccacggugacuguauuac

SEQ ID NO: 104108 - RNA, 32 nt, Homo Sapiens
cugggggcaccucguucacccuguccccacuc

SEQ ID NO: 104109 - RNA, 32 nt, Homo Sapiens
agagauguaaaauggacagucuugaugggguu

SEQ ID NO: 104110 - RNA, 32 nt, Homo Sapiens
cugaguacaaggccagccccccggcccaccag

SEQ ID NO: 104111 - RNA, 32 nt, Homo Sapiens
ggcaccuucaagucagcagaugggccacugac

SEQ ID NO: 104112 - RNA, 32 nt, Homo Sapiens
aggagccgaaagggcguugggauccaggggaa

SEQ ID NO: 104113 - RNA, 32 nt, Homo Sapiens
uuuuuuaacaauaauguuuguaacauuuuguu

SEQ ID NO: 104114 - RNA, 30 nt, Homo Sapiens
agaggaagagagagacccucacugcugggg

SEQ ID NO: 104115 - RNA, 32 nt, Homo Sapiens
cccagagagacccugcaagaccacggagggag

SEQ ID NO: 104116 - RNA, 32 nt, Homo Sapiens
gaccugagcgacugcggccgcgucuucccggu

SEQ ID NO: 104117 - RNA, 32 nt, Homo Sapiens
caguguauuuuuguuuuucaagaggaaguaga

SEQ ID NO: 104118 - RNA, 32 nt, Homo Sapiens
cccagcagcgcuccgccucccacuugacauca

SEQ ID NO: 104119 - RNA, 32 nt, Homo Sapiens
ugcuccaucucauacauugaugaugauuaauu

SEQ ID NO: 104120 - RNA, 32 nt, Homo Sapiens
gaccugcaugccaaagggacuggucaucuccu

SEQ ID NO: 104121 - RNA, 32 nt, Homo Sapiens
aggcucugguggccuugcauggaagagccugu

SEQ ID NO: 104122 - RNA, 32 nt, Homo Sapiens
auuuuggguuuuaaaggaaugguuuuacugca

SEQ ID NO: 104123 - RNA, 32 nt, Homo Sapiens
uccaacaaggauuuguauauuuucgcuuucuc

SEQ ID NO: 104124 - RNA, 32 nt, Homo Sapiens
aacccagugucugcucucugaguuccauuucc

SEQ ID NO: 104125 - RNA, 32 nt, Homo Sapiens
gaccaagugucuaaaauaggcaaguaguaccu

SEQ ID NO: 104126 - RNA, 32 nt, Homo Sapiens
caauuugccacuuuuuucuauuauaaaucuuc

SEQ ID NO: 104127 - RNA, 32 nt, Homo Sapiens
ucaaagaaauagccauuacuagguuuugucaa

SEQ ID NO: 104128 - RNA, 31 nt, Homo Sapiens
gcucggaacauauuuuuagccaagaaagccu

SEQ ID NO: 104129 - RNA, 32 nt, Homo Sapiens
acuucucacacuauggcagccauccaugagag

SEQ ID NO: 104130 - RNA, 32 nt, Homo Sapiens
agucuuacagcuuggauguuuggauguggaug

SEQ ID NO: 104131 - RNA, 32 nt, Homo Sapiens
cagguucagaucuguccccggcggguaaggga

SEQ ID NO: 104132 - RNA, 32 nt, Homo Sapiens
caagugaaaaggaggaccaagaggcaacaggu

SEQ ID NO: 104133 - RNA, 32 nt, Homo Sapiens
ucuguuuaucccccuuuuuuuuuuuuuaagcc

SEQ ID NO: 104134 - RNA, 32 nt, Homo Sapiens
cggagcuuuuucuccaguuaacugucggagua

SEQ ID NO: 104135 - RNA, 32 nt, Homo Sapiens
aaaagugaaggggaaacacacacacacaaaaa

SEQ ID NO: 104136 - RNA, 32 nt, Homo Sapiens
cccugggacuuccaggacuauguuaaaauaga

SEQ ID NO: 104137 - RNA, 32 nt, Homo Sapiens
cacaggagagccaaaaaagaaaaggaagcuga

SEQ ID NO: 104138 - RNA, 32 nt, Homo Sapiens
ucauuacuacuuuuagcauucuccaggcuuuu

SEQ ID NO: 104139 - RNA, 32 nt, Homo Sapiens
aaucuuaccuucuccuuuuuaugaagggaaga

SEQ ID NO: 104140 - RNA, 32 nt, Homo Sapiens
ggcugggugcgcgccggcuccggcugcaguuc

SEQ ID NO: 104141 - RNA, 32 nt, Homo Sapiens
cagaggguguggcagggaagugagaugaucac

SEQ ID NO: 104142 - RNA, 32 nt, Homo Sapiens
aaagaugaacaaaguauugcccuuugacuggu

SEQ ID NO: 104143 - RNA, 32 nt, Homo Sapiens
gguuuucuaaugcugucaucucaguucgauau

SEQ ID NO: 104144 - RNA, 32 nt, Homo Sapiens
cucccuccuguucacaccccagccaccccagc

SEQ ID NO: 104145 - RNA, 32 nt, Homo Sapiens
gaaaaccucacaugcauacauacacauauaua

SEQ ID NO: 104146 - RNA, 32 nt, Homo Sapiens
gcaaggcugggggagggugucggguagaggga

SEQ ID NO: 104147 - RNA, 32 nt, Homo Sapiens
gguccucuccaaguccuacuagucuuugaagu

SEQ ID NO: 104148 - RNA, 32 nt, Homo Sapiens
agagcgcguugguggcgacggccgagucagau

SEQ ID NO: 104149 - RNA, 32 nt, Homo Sapiens
aggggugacuccuggugaugggagucagcagu

SEQ ID NO: 104150 - RNA, 32 nt, Homo Sapiens
gcagauuauuaaaagagccauugaagaugcug

SEQ ID NO: 104151 - RNA, 32 nt, Homo Sapiens
agucuuuaaaagacuuguuuuauaucuauaaa

SEQ ID NO: 104152 - RNA, 32 nt, Homo Sapiens
uaagccaagcaccugggcccaagccccaccgu

SEQ ID NO: 104153 - RNA, 32 nt, Homo Sapiens
ggcugcuauaauaauaauaauacagauguugu

SEQ ID NO: 104154 - RNA, 32 nt, Homo Sapiens
cuaucaggccugccccuccaauaaaagugugu

SEQ ID NO: 104155 - RNA, 32 nt, Homo Sapiens
auagauagugauugcguuuggcuauguguugu

SEQ ID NO: 104156 - RNA, 32 nt, Homo Sapiens
ugccuagggaugcagggcuggaggccagaggu

SEQ ID NO: 104157 - RNA, 32 nt, Homo Sapiens
uucucacgcccucuccucuggggccucgucuu

SEQ ID NO: 104158 - RNA, 31 nt, Homo Sapiens
aauuagaucaucagaaaguccucccugagga

SEQ ID NO: 104159 - RNA, 32 nt, Homo Sapiens
ugaggagcgggcccguggugacggccacacgg

SEQ ID NO: 104160 - RNA, 32 nt, Homo Sapiens
acacugcccaaccgcaccucaggcaucuuuaa

SEQ ID NO: 104161 - RNA, 32 nt, Homo Sapiens
cagcgggagugugggggugccaugguguugga

SEQ ID NO: 104162 - RNA, 32 nt, Homo Sapiens
aggucggauuggacaccaccggaaacggaaau

SEQ ID NO: 104163 - RNA, 32 nt, Homo Sapiens
ugcgccagcucaggaugaggacaggcugggcg

SEQ ID NO: 104164 - RNA, 32 nt, Homo Sapiens
uucauugguaaaacuuuuaaauucaacaccug

SEQ ID NO: 104165 - RNA, 32 nt, Homo Sapiens
gaauaggggacggggggugcuacugaggcugu

SEQ ID NO: 104166 - RNA, 32 nt, Homo Sapiens
cccuucagaaaaggcuggaggggagggcgagg

SEQ ID NO: 104167 - RNA, 32 nt, Homo Sapiens
cccucccacccggcugcauacccgggcagggc

SEQ ID NO: 104168 - RNA, 32 nt, Homo Sapiens
ggacaaucuccccucaaccgcacaugugccac

SEQ ID NO: 104169 - RNA, 32 nt, Homo Sapiens
ccugcgaggaucgccguuggcccggguuggcu

SEQ ID NO: 104170 - RNA, 32 nt, Homo Sapiens
cuacugaaaacaaaaacaaugaaaauauucau

SEQ ID NO: 104171 - RNA, 32 nt, Homo Sapiens
cauuucuaaaauucacucaugcaccucaaacc

SEQ ID NO: 104172 - RNA, 32 nt, Homo Sapiens
aagcuguuucucggaagacccuggacaccugc

SEQ ID NO: 104173 - RNA, 32 nt, Homo Sapiens
uaaauacacacccagacacacacacacacagu

SEQ ID NO: 104174 - RNA, 32 nt, Homo Sapiens
gccccugucucuucuguaacuacuucagacuc

SEQ ID NO: 104175 - RNA, 32 nt, Homo Sapiens
acaugggugugaaugcacacacauacgcguac

SEQ ID NO: 104176 - RNA, 32 nt, Homo Sapiens
uauugcuuauuacuuucuuaauuuuacaggau

SEQ ID NO: 104177 - RNA, 32 nt, Homo Sapiens
auugauuacaguguuauuuuuauggucauaau

SEQ ID NO: 104178 - RNA, 32 nt, Homo Sapiens
uucagaaucuuacagugaucaagcauuuuuau

SEQ ID NO: 104179 - RNA, 32 nt, Homo Sapiens
gguggagggcagaggagaaacugcgucaggga

SEQ ID NO: 104180 - RNA, 32 nt, Homo Sapiens
cacacuuucuuugcuccuuuuuacagucuuug

SEQ ID NO: 104181 - RNA, 32 nt, Homo Sapiens
aguuaauuugaaaaggccccagaugaaucaau

SEQ ID NO: 104182 - RNA, 32 nt, Homo Sapiens
uuuaauuuauauguauuuuucuuaauuuguaa

SEQ ID NO: 104183 - RNA, 32 nt, Homo Sapiens
aaacaggaaaggaaaagcuaccaguuuuuuau

SEQ ID NO: 104184 - RNA, 32 nt, Homo Sapiens
aggacccagaucuggcuucuuucccaaggagg

SEQ ID NO: 104185 - RNA, 32 nt, Homo Sapiens
ugcugucuuaaauuauuuuaaaaaaauuaaau

SEQ ID NO: 104186 - RNA, 32 nt, Homo Sapiens
cggguggcacgcugcagcccggaguccccguu

SEQ ID NO: 104187 - RNA, 32 nt, Homo Sapiens
uccuguugccagcaugaccuacccucgccucu

SEQ ID NO: 104188 - RNA, 32 nt, Homo Sapiens
guuaaacuucugugcuguuccugugaaucucc

SEQ ID NO: 104189 - RNA, 32 nt, Homo Sapiens
ccugcaaacacaugcagacauuuaguuuugau

SEQ ID NO: 104190 - RNA, 31 nt, Homo Sapiens
aaaaugauaaaauaaaaauuaugaaaaacug

SEQ ID NO: 104191 - RNA, 32 nt, Homo Sapiens
auggcauuuuauauguuaauuuuuuaguuuaa

SEQ ID NO: 104192 - RNA, 32 nt, Homo Sapiens
uucugagcagucuuguaauauuguucauucau

SEQ ID NO: 104193 - RNA, 31 nt, Homo Sapiens
gaggcggcgggguccgcaggcgucgcgggac

SEQ ID NO: 104194 - RNA, 32 nt, Homo Sapiens
ucuugucugagaaccuaggccccagguaucac

SEQ ID NO: 104195 - RNA, 32 nt, Homo Sapiens
gggcaggggcuccuggcucagagccguaucca

SEQ ID NO: 104196 - RNA, 32 nt, Homo Sapiens
accagccuggccaacauagugaaaccccaucu

SEQ ID NO: 104197 - RNA, 32 nt, Homo Sapiens
ccucugggccgcgacugcgcagggcggggccg

SEQ ID NO: 104198 - RNA, 32 nt, Homo Sapiens
ccauuugggcacgaggccaggcagaucccacu

SEQ ID NO: 104199 - RNA, 32 nt, Homo Sapiens
ccuccccuggggaugacgguuggguguccaug

SEQ ID NO: 104200 - RNA, 32 nt, Homo Sapiens
ggcgaccacgggggccugcucagcacccucac

SEQ ID NO: 104201 - RNA, 32 nt, Homo Sapiens
uuccugcuuuuaucuagaaaagaagcaaaagg

SEQ ID NO: 104202 - RNA, 31 nt, Homo Sapiens
gcagccgagccccagcacaaagcagucggac

SEQ ID NO: 104203 - RNA, 30 nt, Homo Sapiens
ccggucagcgucggcggcugcaccggcggc

SEQ ID NO: 104204 - RNA, 32 nt, Homo Sapiens
aaacauuucgcauugaauauuuacauggagaa

SEQ ID NO: 104205 - RNA, 27 nt, Homo Sapiens
acaaaguccuucucuaguuaaucaggu

SEQ ID NO: 104206 - RNA, 32 nt, Homo Sapiens
aguguuucuuugaggugauugcauuagggaag

SEQ ID NO: 104207 - RNA, 32 nt, Homo Sapiens
cuauaugaauuaucuuuuuuuaaacuuguaga

SEQ ID NO: 104208 - RNA, 32 nt, Homo Sapiens
ugccaucugcgugacaauaaacauuaugcuaa

SEQ ID NO: 104209 - RNA, 32 nt, Homo Sapiens
uagaacugccuugguggacaccagccucgccc

SEQ ID NO: 104210 - RNA, 32 nt, Homo Sapiens
uauuauuggaaaauucucuaaaaguuaauagg

SEQ ID NO: 104211 - RNA, 32 nt, Homo Sapiens
accucuggcuaaccuacccccggagccauggc

SEQ ID NO: 104212 - RNA, 32 nt, Homo Sapiens
ccuuucaguucuuaacuauuucccuccaggcc

SEQ ID NO: 104213 - RNA, 32 nt, Homo Sapiens
caugaagucccucucacucccucuaccucccu

SEQ ID NO: 104214 - RNA, 30 nt, Homo Sapiens
caccgggcgcccguucuacacugcccaugu

SEQ ID NO: 104215 - RNA, 32 nt, Homo Sapiens
guagcugggauuacaggcacccgcuaccacac

SEQ ID NO: 104216 - RNA, 32 nt, Homo Sapiens
aaaauguauauuacuaacauaguuuggaagaa

SEQ ID NO: 104217 - RNA, 31 nt, Homo Sapiens
gcauuuagagggagaaagcuacuuccagcca

SEQ ID NO: 104218 - RNA, 32 nt, Homo Sapiens
gggaaggacgggugggcaaggcuggugcguuc

SEQ ID NO: 104219 - RNA, 32 nt, Homo Sapiens
ggcuuccuuucugcagcugagaugcacgcaga

SEQ ID NO: 104220 - RNA, 32 nt, Homo Sapiens
ccagcccuucccagcacccccagcccugaaac

SEQ ID NO: 104221 - RNA, 32 nt, Homo Sapiens
uacuccagccucugcuggcucccuugcauuuu

SEQ ID NO: 104222 - RNA, 32 nt, Homo Sapiens
auagcaacauuuagaacacuuuuuguuaucag

SEQ ID NO: 104223 - RNA, 32 nt, Homo Sapiens
ucccaggggccgccagcgcccgagggccgagg

SEQ ID NO: 104224 - RNA, 32 nt, Homo Sapiens
ccucaucacccugacacccccacauucucucc

SEQ ID NO: 104225 - RNA, 32 nt, Homo Sapiens
guucgaaccccgcucccgcuccgcuucgguuc

SEQ ID NO: 104226 - RNA, 32 nt, Homo Sapiens
agagaugccgugguacuuuuccauuuagauuc

SEQ ID NO: 104227 - RNA, 32 nt, Homo Sapiens
gcagcguggggcgcggcgcccgggagcaggug

SEQ ID NO: 104228 - RNA, 32 nt, Homo Sapiens
ugcgagcuccuaaauggaaagcuucucugggg

SEQ ID NO: 104229 - RNA, 32 nt, Homo Sapiens
gagauaccauaugcuagcauucccagucccca

SEQ ID NO: 104230 - RNA, 32 nt, Homo Sapiens
uccucauguuugucaucuucuaccucugccau

SEQ ID NO: 104231 - RNA, 32 nt, Homo Sapiens
agcgggaggugaugaagaagcaaggguucuac

SEQ ID NO: 104232 - RNA, 32 nt, Homo Sapiens
cucgcgguucagagcccagcucugccacuguc

SEQ ID NO: 104233 - RNA, 32 nt, Homo Sapiens
agaagauccaaguuuaaaauugccugcggaau

SEQ ID NO: 104234 - RNA, 32 nt, Homo Sapiens
aaguuucuguugaccuuguugauugagcauga

SEQ ID NO: 104235 - RNA, 32 nt, Homo Sapiens
uccuuggagacacccucuuuggcccucacuac

SEQ ID NO: 104236 - RNA, 32 nt, Homo Sapiens
guugccuagcugauuuucugcugugcagagcu

SEQ ID NO: 104237 - RNA, 32 nt, Homo Sapiens
auucagaaauacugagccaagaggaagagaau

SEQ ID NO: 104238 - RNA, 32 nt, Homo Sapiens
gcggcgucggcgacgguagcggcagcggcggc

SEQ ID NO: 104239 - RNA, 32 nt, Homo Sapiens
cggacuccaugcggcccgcuggcucagggcag

SEQ ID NO: 104240 - RNA, 32 nt, Homo Sapiens
ugcacgugcccggcccugcuccacacgagcuu

SEQ ID NO: 104241 - RNA, 32 nt, Homo Sapiens
uuugaucucuguuuuugaauucuuauuauuua

SEQ ID NO: 104242 - RNA, 32 nt, Homo Sapiens
uauacucuuaugucucuuuuuauagcacugaa

SEQ ID NO: 104243 - RNA, 32 nt, Homo Sapiens
gcguggcuguuuugagggacugucccaucagu

SEQ ID NO: 104244 - RNA, 32 nt, Homo Sapiens
acccugcucccuccucaucaucaggcagauac

SEQ ID NO: 104245 - RNA, 32 nt, Homo Sapiens
ugcauugacucuucccgccuccccucccucag

SEQ ID NO: 104246 - RNA, 32 nt, Homo Sapiens
cuuuagccacuuuggggagccugucucuccag

SEQ ID NO: 104247 - RNA, 32 nt, Homo Sapiens
aucaagggucagugagcuaguuguguauguuc

SEQ ID NO: 104248 - RNA, 32 nt, Homo Sapiens
ugugcaggaacgggcugcuggugauccgagau

SEQ ID NO: 104249 - RNA, 32 nt, Homo Sapiens
ggcauuugucaucuuuggcacuugcuuuuaga

SEQ ID NO: 104250 - RNA, 32 nt, Homo Sapiens
aauuauuuccaagagagauugauggguuaauu

SEQ ID NO: 104251 - RNA, 32 nt, Homo Sapiens
uagaaauuuauaucuucaguacucaaguacuu

SEQ ID NO: 104252 - RNA, 32 nt, Homo Sapiens
ggaaacgggccgcgacaggugggcgcacaaau

SEQ ID NO: 104253 - RNA, 32 nt, Homo Sapiens
aagcucauucuuuuccuuaaaaugggaagaua

SEQ ID NO: 104254 - RNA, 32 nt, Homo Sapiens
aauaaacacacacacacacacacacacacaca

SEQ ID NO: 104255 - RNA, 32 nt, Homo Sapiens
guggggcuuuugcuggggaacugcccucuucu

SEQ ID NO: 104256 - RNA, 32 nt, Homo Sapiens
gugaagacaacagcagaaaugcuaacaagcgu

SEQ ID NO: 104257 - RNA, 32 nt, Homo Sapiens
cuguguucaaaaucuggcaccauucccuugag

SEQ ID NO: 104258 - RNA, 32 nt, Homo Sapiens
acugcaggggagaggguggggcuggaaggaag

SEQ ID NO: 104259 - RNA, 31 nt, Homo Sapiens
uaagugaaauaaaccaguuauuauacaaggc

SEQ ID NO: 104260 - RNA, 30 nt, Homo Sapiens
agaggcagaggcggcggcggcagcggcugc

SEQ ID NO: 104261 - RNA, 32 nt, Homo Sapiens
uguacauacccuggccgcccccugccccccag

SEQ ID NO: 104262 - RNA, 32 nt, Homo Sapiens
guggggagaaguccgcugguguuguuuuagug

SEQ ID NO: 104263 - RNA, 28 nt, Homo Sapiens
uauguaguggcuauagguuuacuuaaag

SEQ ID NO: 104264 - RNA, 32 nt, Homo Sapiens
uucauuguuuuuaccuguuuucguuuuagcaa

SEQ ID NO: 104265 - RNA, 32 nt, Homo Sapiens
caaaagagaucggcgggugcugcagccucacu

SEQ ID NO: 104266 - RNA, 32 nt, Homo Sapiens
cagccucccgaguagcugggaguacaggcaca

SEQ ID NO: 104267 - RNA, 29 nt, Homo Sapiens
gauaaacuauaauuguagaaagggguaau

SEQ ID NO: 104268 - RNA, 32 nt, Homo Sapiens
aaauacagcagaugcaagauuaugggggaaau

SEQ ID NO: 104269 - RNA, 32 nt, Homo Sapiens
gccacccuggacaugaccguaucccucugcca

SEQ ID NO: 104270 - RNA, 32 nt, Homo Sapiens
uggggguguuggaugccuggaucucuguaagg

SEQ ID NO: 104271 - RNA, 30 nt, Homo Sapiens
augcaagagaagcaauucgucaguuucacu

SEQ ID NO: 104272 - RNA, 32 nt, Homo Sapiens
ugucagaaagcccaauuaaaccucugaaaagu

SEQ ID NO: 104273 - RNA, 32 nt, Homo Sapiens
aauaacaaaacuaugcagaugcucuuaaaagc

SEQ ID NO: 104274 - RNA, 32 nt, Homo Sapiens
uucugagugucuaaaacuugacaccccuggua

SEQ ID NO: 104275 - RNA, 32 nt, Homo Sapiens
aaggugcugauggcccucaucuccagcuaacu

SEQ ID NO: 104276 - RNA, 32 nt, Homo Sapiens
ggacggcgccaagggccuuccgggccaguguu

SEQ ID NO: 104277 - RNA, 32 nt, Homo Sapiens
aggcugucccgggaccccgaggaggacugccc

SEQ ID NO: 104278 - RNA, 32 nt, Homo Sapiens
gcauauuccuuccagaugccucagugcuacac

SEQ ID NO: 104279 - RNA, 32 nt, Homo Sapiens
uuuuucugauucuaaacuuauugugaaaauug

SEQ ID NO: 104280 - RNA, 32 nt, Homo Sapiens
caaugcugcguuucuuuuuucuaacugcagca

SEQ ID NO: 104281 - RNA, 32 nt, Homo Sapiens
aaucagaagggaugaauggaugucccagccca

SEQ ID NO: 104282 - RNA, 32 nt, Homo Sapiens
gagagaaauaaaugucuuucugguuuaacuca

SEQ ID NO: 104283 - RNA, 32 nt, Homo Sapiens
cuacacagucugcaagauucugaaacauugcu

SEQ ID NO: 104284 - RNA, 32 nt, Homo Sapiens
uauuauauauauauuuuuccuuugaauuaaaa

SEQ ID NO: 104285 - RNA, 32 nt, Homo Sapiens
ugcauugguuuuuagugucaugugcacucugc

SEQ ID NO: 104286 - RNA, 32 nt, Homo Sapiens
cugugaggaaagggcuguuaguggccccaauu

SEQ ID NO: 104287 - RNA, 32 nt, Homo Sapiens
ccccgagcucuccgccuccccccgcccgccag

SEQ ID NO: 104288 - RNA, 32 nt, Homo Sapiens
aucaaucuuggauugugaugcuauugguacuu

SEQ ID NO: 104289 - RNA, 32 nt, Homo Sapiens
uuccagugguaccagcucacucccugggaaag

SEQ ID NO: 104290 - RNA, 32 nt, Homo Sapiens
auuuguuuugaguucuaggagcacagcaccaa

SEQ ID NO: 104291 - RNA, 32 nt, Homo Sapiens
caaggaagcaccucaauuuaguucaaacaaga

SEQ ID NO: 104292 - RNA, 32 nt, Homo Sapiens
auguaaugaaaauaaaucccugcucugagaaa

SEQ ID NO: 104293 - RNA, 32 nt, Homo Sapiens
cugugcaguaggggcgggauggggguguggaa

SEQ ID NO: 104294 - RNA, 32 nt, Homo Sapiens
aucuccacaaguuuccuccugccccuuuguuu

SEQ ID NO: 104295 - RNA, 32 nt, Homo Sapiens
uuucuuugcuaucucacuccuaggaaguuaug

SEQ ID NO: 104296 - RNA, 32 nt, Homo Sapiens
cagaugugucacucagacucaacuugcuggga

SEQ ID NO: 104297 - RNA, 27 nt, Homo Sapiens
gcuuuguccuucugagcccauguuuuc

SEQ ID NO: 104298 - RNA, 32 nt, Homo Sapiens
gugcccccuuucugccagcaguucugguucuc

SEQ ID NO: 104299 - RNA, 32 nt, Homo Sapiens
caggggcgcucccagccccaccccgggaucug

SEQ ID NO: 104300 - RNA, 32 nt, Homo Sapiens
acggugcaaaucugguggaagaugccugcuac

SEQ ID NO: 104301 - RNA, 32 nt, Homo Sapiens
gacacugugcuaaguacuuucugugauuuaua

SEQ ID NO: 104302 - RNA, 32 nt, Homo Sapiens
gauucccagucuccugggucaagccccacuuu

SEQ ID NO: 104303 - RNA, 32 nt, Homo Sapiens
gccgaccucccgcuccaccgacugcugcucac

SEQ ID NO: 104304 - RNA, 32 nt, Homo Sapiens
gacagggccucugucagcacuggcucuggaga

SEQ ID NO: 104305 - RNA, 31 nt, Homo Sapiens
gcaguggugggccccaggaacauuuauuuca

SEQ ID NO: 104306 - RNA, 32 nt, Homo Sapiens
uuuaggguauuuuuagaauucauuccugagug

SEQ ID NO: 104307 - RNA, 32 nt, Homo Sapiens
ccgauuguauauucuaucuacugagauaggag

SEQ ID NO: 104308 - RNA, 32 nt, Homo Sapiens
cgucgccucucgucuccagccagcaccaagag

SEQ ID NO: 104309 - RNA, 32 nt, Homo Sapiens
acuggacacuugccaaugaugaaagaucaggc

SEQ ID NO: 104310 - RNA, 32 nt, Homo Sapiens
guuuuggaggggaccugcuugcgaccugcuga

SEQ ID NO: 104311 - RNA, 32 nt, Homo Sapiens
cucaaauguauuuacaaagagaauuuggccag

SEQ ID NO: 104312 - RNA, 32 nt, Homo Sapiens
cagcuugauguuagaugggauucugugacagu

SEQ ID NO: 104313 - RNA, 32 nt, Homo Sapiens
gccuccggaggguggggggcuauauuucauuc

SEQ ID NO: 104314 - RNA, 32 nt, Homo Sapiens
uguaaauuuuugugggaaauuuugugauaacu

SEQ ID NO: 104315 - RNA, 32 nt, Homo Sapiens
cgcccagaccucagccggcccaggauaggcag

SEQ ID NO: 104316 - RNA, 32 nt, Homo Sapiens
gcucuccuuuuaaucauguauucaucuauuuu

SEQ ID NO: 104317 - RNA, 31 nt, Homo Sapiens
ucuguuauuaagucauuucaagaugagacaa

SEQ ID NO: 104318 - RNA, 32 nt, Homo Sapiens
agcuaaaaacaaaacagaaugaggugggaaag

SEQ ID NO: 104319 - RNA, 32 nt, Homo Sapiens
auuuuguagcagcuucaagugaccaaaagacu

SEQ ID NO: 104320 - RNA, 32 nt, Homo Sapiens
cuuggaaaaaauuuuaagaaucaaaaauaaag

SEQ ID NO: 104321 - RNA, 32 nt, Homo Sapiens
ggagggcccgggugccggggcccaaggugcgg

SEQ ID NO: 104322 - RNA, 32 nt, Homo Sapiens
cccucccaagcaccaugucagugucguacaau

SEQ ID NO: 104323 - RNA, 32 nt, Homo Sapiens
uggauuggccucauccaggaucuuuggucacc

SEQ ID NO: 104324 - RNA, 32 nt, Homo Sapiens
cucaucugccccacccugggccacugccugcu

SEQ ID NO: 104325 - RNA, 32 nt, Homo Sapiens
auuaagggaaguaugucugaaauggcaaaaaa

SEQ ID NO: 104326 - RNA, 32 nt, Homo Sapiens
aguggcaguuugggaccucccugugccucuca

SEQ ID NO: 104327 - RNA, 32 nt, Homo Sapiens
ggaaaauguucauguucauauguacuuguuug

SEQ ID NO: 104328 - RNA, 32 nt, Homo Sapiens
cucugccuccagguugccucaacagcaggagg

SEQ ID NO: 104329 - RNA, 32 nt, Homo Sapiens
cacgagcgacagagaaaagguccgcgaggccg

SEQ ID NO: 104330 - RNA, 32 nt, Homo Sapiens
uccgacauggugucgccuccucccggggcggc

SEQ ID NO: 104331 - RNA, 32 nt, Homo Sapiens
aggauauauauucugccauagaaaugcuacau

SEQ ID NO: 104332 - RNA, 32 nt, Homo Sapiens
aaaguacaaaaauuagucgggcgugauggcag

SEQ ID NO: 104333 - RNA, 32 nt, Homo Sapiens
agaauucucacagauuuuaccauuccuguuau

SEQ ID NO: 104334 - RNA, 32 nt, Homo Sapiens
acgcugaaaacgaaucagcauuuagucuugcc

SEQ ID NO: 104335 - RNA, 32 nt, Homo Sapiens
gcaggggaggaggcauccgaauccacagggac

SEQ ID NO: 104336 - RNA, 32 nt, Homo Sapiens
uuugguugguuuuguuacaucuuacauuaugc

SEQ ID NO: 104337 - RNA, 32 nt, Homo Sapiens
aggucuggacggcuaccacacccaccuacugu

SEQ ID NO: 104338 - RNA, 32 nt, Homo Sapiens
ugugguuaauagacauccuaauacuaagcagg

SEQ ID NO: 104339 - RNA, 32 nt, Homo Sapiens
agcuaacagugucaagaggcuauuuuaaagau

SEQ ID NO: 104340 - RNA, 32 nt, Homo Sapiens
gcgcugggcaggggcggggcagggccagggca

SEQ ID NO: 104341 - RNA, 32 nt, Homo Sapiens
accugauuugaaaacaaaaucugagaauggau

SEQ ID NO: 104342 - RNA, 32 nt, Homo Sapiens
gcgucccgcgcucccgccccagcaugacagcc

SEQ ID NO: 104343 - RNA, 30 nt, Homo Sapiens
ccagggcugcugcugccgccgcggcugcuu

SEQ ID NO: 104344 - RNA, 28 nt, Homo Sapiens
agcccaguuacagcagaaaguuuucaug

SEQ ID NO: 104345 - RNA, 32 nt, Homo Sapiens
uuucuucaauuucaguauuuuauaguuucuac

SEQ ID NO: 104346 - RNA, 32 nt, Homo Sapiens
acgucaucgccgcgcgccggcuugccaggagc

SEQ ID NO: 104347 - RNA, 32 nt, Homo Sapiens
cauguccaugugacuuucauguuuccuaucuc

SEQ ID NO: 104348 - RNA, 32 nt, Homo Sapiens
cuuuugugaauggaugguuuuguuuccuaugg

SEQ ID NO: 104349 - RNA, 32 nt, Homo Sapiens
uuuccugggacaucuucuguuauuguugaugu

SEQ ID NO: 104350 - RNA, 32 nt, Homo Sapiens
cacuggccauggccaacaccacggccucugug

SEQ ID NO: 104351 - RNA, 32 nt, Homo Sapiens
uggucagaggggccucugaagccugggccagg

SEQ ID NO: 104352 - RNA, 32 nt, Homo Sapiens
aaaaauuaaaagauuauccaggugugguagug

SEQ ID NO: 104353 - RNA, 32 nt, Homo Sapiens
aggguguuuuaacucaaaugggugaugaaaag

SEQ ID NO: 104354 - RNA, 32 nt, Homo Sapiens
ccgauccuauccccggccccgcucgggccuuu

SEQ ID NO: 104355 - RNA, 32 nt, Homo Sapiens
uguuuugguuuuuuuucuuuggaguuuuugug

SEQ ID NO: 104356 - RNA, 32 nt, Homo Sapiens
ucuauguguuugaaauguguuaaugaaggcac

SEQ ID NO: 104357 - RNA, 32 nt, Homo Sapiens
agguaccguggcgccuccucgcguuggucuug

SEQ ID NO: 104358 - RNA, 32 nt, Homo Sapiens
acaagauccaacagugcacucaucauuaguua

SEQ ID NO: 104359 - RNA, 32 nt, Homo Sapiens
uaccgaggcugcugcgcggcggacagcgggcg

SEQ ID NO: 104360 - RNA, 32 nt, Homo Sapiens
gauaauuuauuuuauagaguugcugaaagaau

SEQ ID NO: 104361 - RNA, 32 nt, Homo Sapiens
agccacgcacgcggaggcgcucgggccucggg

SEQ ID NO: 104362 - RNA, 32 nt, Homo Sapiens
gagugucuucugaaaaaugaccucaacaaaau

SEQ ID NO: 104363 - RNA, 32 nt, Homo Sapiens
cuaugcugggggcuacuguuugaucuggagaa

SEQ ID NO: 104364 - RNA, 32 nt, Homo Sapiens
uuuauauuaaaauaaaauauuguauuaaaaau

SEQ ID NO: 104365 - RNA, 30 nt, Homo Sapiens
ccucuucugauaguuggggaaacugaggcc

SEQ ID NO: 104366 - RNA, 29 nt, Homo Sapiens
uucugucaauaauuguuaccaaagagaua

SEQ ID NO: 104367 - RNA, 29 nt, Homo Sapiens
gcccauggagggcgagcagaagcagggug

SEQ ID NO: 104368 - RNA, 32 nt, Homo Sapiens
cauuugcacuguauuuuugccauuuauuuuca

SEQ ID NO: 104369 - RNA, 32 nt, Homo Sapiens
cagccuguuucauaagaaacuccaaucaaguu

SEQ ID NO: 104370 - RNA, 32 nt, Homo Sapiens
aggccuucucuuccuucccacccaagcuuccg

SEQ ID NO: 104371 - RNA, 32 nt, Homo Sapiens
cucccuucccuuaccuggccccuuggugcucc

SEQ ID NO: 104372 - RNA, 32 nt, Homo Sapiens
auugcucuaugucugccuucgaccacagcaag

SEQ ID NO: 104373 - RNA, 31 nt, Homo Sapiens
cccggugagcgcagccagcaggagcugagca

SEQ ID NO: 104374 - RNA, 32 nt, Homo Sapiens
aaucaaaagagaaaggacuuuuuuggugacuc

SEQ ID NO: 104375 - RNA, 32 nt, Homo Sapiens
acuucuucccaucauagcacauguagaaaaua

SEQ ID NO: 104376 - RNA, 32 nt, Homo Sapiens
uauuauuguaauggaaaaaucuguggacuaga

SEQ ID NO: 104377 - RNA, 32 nt, Homo Sapiens
cucccgcgcgcuccgcggcugcaccggcccca

SEQ ID NO: 104378 - RNA, 32 nt, Homo Sapiens
uaggagugcucuguuguuuacaaacucaggua

SEQ ID NO: 104379 - RNA, 32 nt, Homo Sapiens
guaugguacaagcaaugccugcccauuggaga

SEQ ID NO: 104380 - RNA, 32 nt, Homo Sapiens
cccauuuuaaacaacccuuguuuccagauaag

SEQ ID NO: 104381 - RNA, 32 nt, Homo Sapiens
uucuuucuuaggcuauugacuggccuaagaca

SEQ ID NO: 104382 - RNA, 32 nt, Homo Sapiens
caucaagaauaaaaugucuagcagcaagaaga

SEQ ID NO: 104383 - RNA, 32 nt, Homo Sapiens
agaugcagcaggggcgggagggcagagugggc

SEQ ID NO: 104384 - RNA, 32 nt, Homo Sapiens
gaaauauugggcucugaggaaauguccauagc

SEQ ID NO: 104385 - RNA, 32 nt, Homo Sapiens
ccacccggcugccaacgaucccucggcggcga

SEQ ID NO: 104386 - RNA, 32 nt, Homo Sapiens
cauguuuguugaaucauuaagaacgagcauuu

SEQ ID NO: 104387 - RNA, 32 nt, Homo Sapiens
accucagcuuccucugucaccauggugccggc

SEQ ID NO: 104388 - RNA, 32 nt, Homo Sapiens
agggaaaugaaagaaaggccagcaaauucgcu

SEQ ID NO: 104389 - RNA, 32 nt, Homo Sapiens
ggacccaaggccacgcgcgccgggcccagcug

SEQ ID NO: 104390 - RNA, 32 nt, Homo Sapiens
ucucuuuccucacccuuccccccgccaccgug

SEQ ID NO: 104391 - RNA, 32 nt, Homo Sapiens
ccuuuacccagcucuuggggugucucuguuuu

SEQ ID NO: 104392 - RNA, 32 nt, Homo Sapiens
cgcgugcacacacacacacacacacacgaguu

SEQ ID NO: 104393 - RNA, 32 nt, Homo Sapiens
cagagcugagcaccuaacccaggcugcaggaa

SEQ ID NO: 104394 - RNA, 32 nt, Homo Sapiens
ucuccuguagauuaaaauaugcacuuuuccua

SEQ ID NO: 104395 - RNA, 32 nt, Homo Sapiens
cuaauuauugaacacgaccagucauuuuacug

SEQ ID NO: 104396 - RNA, 32 nt, Homo Sapiens
cugcuauaaggggcuccaggugggugcugcug

SEQ ID NO: 104397 - RNA, 32 nt, Homo Sapiens
ugggagcccucccugccccaccguccuccaga

SEQ ID NO: 104398 - RNA, 27 nt, Homo Sapiens
aagccauaguccuucagccuccaauug

SEQ ID NO: 104399 - RNA, 32 nt, Homo Sapiens
ugcccucaaaauuuauuccuguucagcuucuc

SEQ ID NO: 104400 - RNA, 30 nt, Homo Sapiens
gcuuuaggcaggccccagagcucccugccu

SEQ ID NO: 104401 - RNA, 32 nt, Homo Sapiens
caaggggaauggggguggauuuggguccaagu

SEQ ID NO: 104402 - RNA, 32 nt, Homo Sapiens
cucucugccccuagcaucuccucccuggcccc

SEQ ID NO: 104403 - RNA, 32 nt, Homo Sapiens
uugucugcuggcagcuaggggcgacgaggcgg

SEQ ID NO: 104404 - RNA, 32 nt, Homo Sapiens
gugccgccgcagcgccagcuccgucgccagcg

SEQ ID NO: 104405 - RNA, 32 nt, Homo Sapiens
gacuccauugucccgcaggggccgaaaugcag

SEQ ID NO: 104406 - RNA, 30 nt, Homo Sapiens
gacggccucugugcugcuggggucacgcga

SEQ ID NO: 104407 - RNA, 32 nt, Homo Sapiens
ccgugaguaacaaacccaggaaagcgaaacug

SEQ ID NO: 104408 - RNA, 32 nt, Homo Sapiens
gaccugcucgggugcuggggccaugccgaguc

SEQ ID NO: 104409 - RNA, 32 nt, Homo Sapiens
uguucacuguaagggagaugacacuuugcuug

SEQ ID NO: 104410 - RNA, 32 nt, Homo Sapiens
gacaggccuccagcaagcaagcgcgggcggca

SEQ ID NO: 104411 - RNA, 32 nt, Homo Sapiens
agcacguugugcuuuucagagacgccauagcu

SEQ ID NO: 104412 - RNA, 32 nt, Homo Sapiens
ugaugcagguacagugcgcccauuccaacugg

SEQ ID NO: 104413 - RNA, 32 nt, Homo Sapiens
ugacaguguuuuuucuuuuguguguuuaauua

SEQ ID NO: 104414 - RNA, 32 nt, Homo Sapiens
uaaaacaaaaacagaaaggaucugagggaaga

SEQ ID NO: 104415 - RNA, 32 nt, Homo Sapiens
guucagcucacuguucuauucaucucaaggaa

SEQ ID NO: 104416 - RNA, 32 nt, Homo Sapiens
uguaaaagauaaugacuguauuaaacuuugua

SEQ ID NO: 104417 - RNA, 32 nt, Homo Sapiens
gugaacacagagaaaacuuauucggacaagua

SEQ ID NO: 104418 - RNA, 32 nt, Homo Sapiens
ggcugcagcccggcccagggcggcucagcgga

SEQ ID NO: 104419 - RNA, 32 nt, Homo Sapiens
ggaggcaacagcggggucugcagacgcccuuc

SEQ ID NO: 104420 - RNA, 32 nt, Homo Sapiens
aauguuaaauacaacuacaauaugagcgagaa

SEQ ID NO: 104421 - RNA, 32 nt, Homo Sapiens
gacggccgcccggcgcgccgcccuagcagacg

SEQ ID NO: 104422 - RNA, 32 nt, Homo Sapiens
aacuguguucucuagucuuucauucgggaaca

SEQ ID NO: 104423 - RNA, 32 nt, Homo Sapiens
accaagggguuuauuuucaaagcgauauuggg

SEQ ID NO: 104424 - RNA, 32 nt, Homo Sapiens
auagauuuuaucaguggagaaauggugauagu

SEQ ID NO: 104425 - RNA, 31 nt, Homo Sapiens
uggagcuggcacugccccccugggggcacug

SEQ ID NO: 104426 - RNA, 32 nt, Homo Sapiens
gaggucaccgacugggccggcccgcggggggc

SEQ ID NO: 104427 - RNA, 32 nt, Homo Sapiens
ggcuccagaaaagaggcuaggagaggccagag

SEQ ID NO: 104428 - RNA, 32 nt, Homo Sapiens
cacggcugucuauaacgugcugccgggucuca

SEQ ID NO: 104429 - RNA, 32 nt, Homo Sapiens
aaaagcaguguguuuucuuuuuuuguuguuuu

SEQ ID NO: 104430 - RNA, 32 nt, Homo Sapiens
uaucaagcauauauuagucuuuaucagaauaa

SEQ ID NO: 104431 - RNA, 32 nt, Homo Sapiens
gcgagaaggcggaugagcugcagcugcaggug

SEQ ID NO: 104432 - RNA, 32 nt, Homo Sapiens
cuuucccgccggggacucggccggugugcuuc

SEQ ID NO: 104433 - RNA, 30 nt, Homo Sapiens
gugcugggugacuugacccaucuugaugua

SEQ ID NO: 104434 - RNA, 32 nt, Homo Sapiens
ggguggaggggaggaaucuggaccucuaaguc

SEQ ID NO: 104435 - RNA, 32 nt, Homo Sapiens
cauaucagucucauugucugguaaaucuaauu

SEQ ID NO: 104436 - RNA, 32 nt, Homo Sapiens
ggcuggggaaaggagguggugucccuaauugu

SEQ ID NO: 104437 - RNA, 32 nt, Homo Sapiens
gauccugcggguggggcuuggggcucacacac

SEQ ID NO: 104438 - RNA, 32 nt, Homo Sapiens
uccaucuuuccaccgcacaccuggaccaggcu

SEQ ID NO: 104439 - RNA, 32 nt, Homo Sapiens
aaugacuccagucuucaaauggcugagcauac

SEQ ID NO: 104440 - RNA, 32 nt, Homo Sapiens
accucagaugacuuugauguuagcuacuuuga

SEQ ID NO: 104441 - RNA, 32 nt, Homo Sapiens
ugcaggcccgcaccccggugcucuguguagcc

SEQ ID NO: 104442 - RNA, 32 nt, Homo Sapiens
cucaccguguggaaggccggccacaaggagga

SEQ ID NO: 104443 - RNA, 32 nt, Homo Sapiens
ggugcuuuggaaagagaugcugccuuggagcu

SEQ ID NO: 104444 - RNA, 32 nt, Homo Sapiens
cuaaguuuugucaucaauccaggauguuauuc

SEQ ID NO: 104445 - RNA, 32 nt, Homo Sapiens
uuuuccucgcaccuccuuacacugugugaccu

SEQ ID NO: 104446 - RNA, 32 nt, Homo Sapiens
aagagcuggcccuggggugcggacagucugau

SEQ ID NO: 104447 - RNA, 32 nt, Homo Sapiens
guuucccccaguguuugaaaacucguccgaau

SEQ ID NO: 104448 - RNA, 32 nt, Homo Sapiens
uuuaccaucccuccuucucuccuuccacagcu

SEQ ID NO: 104449 - RNA, 32 nt, Homo Sapiens
gcaagcgagcguuuggagcccgggccagcaga

SEQ ID NO: 104450 - RNA, 32 nt, Homo Sapiens
uuccccugugaugaaaaugaugugccagcuaa

SEQ ID NO: 104451 - RNA, 32 nt, Homo Sapiens
cuuuccagaaacaaaauuccugcaguggucua

SEQ ID NO: 104452 - RNA, 32 nt, Homo Sapiens
ucccgcgcuccguuccgcccaggccgcgccca

SEQ ID NO: 104453 - RNA, 32 nt, Homo Sapiens
ccuauccccccuccuugcuucugugaaauggg

SEQ ID NO: 104454 - RNA, 32 nt, Homo Sapiens
uuccuggcgggugggaaggaauggcuggggcg

SEQ ID NO: 104455 - RNA, 32 nt, Homo Sapiens
cccgccgcccgugccgccgccauggugauguc

SEQ ID NO: 104456 - RNA, 32 nt, Homo Sapiens
acuggggaggggcauccuggagugcuggucua

SEQ ID NO: 104457 - RNA, 32 nt, Homo Sapiens
ggacccuccaugaaauggauggcacaaaagca

SEQ ID NO: 104458 - RNA, 32 nt, Homo Sapiens
gaaucccggcggccggcggcccgggaggcagu

SEQ ID NO: 104459 - RNA, 32 nt, Homo Sapiens
cucuagucgcccuccgcuggccccgccuucgu

SEQ ID NO: 104460 - RNA, 32 nt, Homo Sapiens
gggucagggagggugggaguugguaaagagua

SEQ ID NO: 104461 - RNA, 32 nt, Homo Sapiens
aaacacccuggccaguucauuucagcaugcuc

SEQ ID NO: 104462 - RNA, 32 nt, Homo Sapiens
ugggguaugaaucguagaaccuugcuuuugca

SEQ ID NO: 104463 - RNA, 32 nt, Homo Sapiens
gcgcccuucucgcgccucggggcugcgaggcu

SEQ ID NO: 104464 - RNA, 32 nt, Homo Sapiens
gaguuaguaaacaugagcgauguaaaaacuuu

SEQ ID NO: 104465 - RNA, 32 nt, Homo Sapiens
aggagcuggcuggcagguguugggaccugcug

SEQ ID NO: 104466 - RNA, 32 nt, Homo Sapiens
auagguuaaauuauagguaaacauuaauagga

SEQ ID NO: 104467 - RNA, 32 nt, Homo Sapiens
uuaaugugccaguugucucugugagucccuca

SEQ ID NO: 104468 - RNA, 32 nt, Homo Sapiens
cuguccccuuagacaugcuagauccuaacuuu

SEQ ID NO: 104469 - RNA, 32 nt, Homo Sapiens
uuaccucucugucaugugcagaugaaggcuca

SEQ ID NO: 104470 - RNA, 32 nt, Homo Sapiens
ggaagaggacaaaggagggugguuggccaaag

SEQ ID NO: 104471 - RNA, 32 nt, Homo Sapiens
uacuaaggaugaauucuccaaaugaucagccg

SEQ ID NO: 104472 - RNA, 32 nt, Homo Sapiens
gaaauacuaaaauaaauugccgacggaauuag

SEQ ID NO: 104473 - RNA, 32 nt, Homo Sapiens
uaccuaaaggauauaaagaaauacuauugcuc

SEQ ID NO: 104474 - RNA, 32 nt, Homo Sapiens
auuguugaugaggagcgccgccgccgccgcug

SEQ ID NO: 104475 - RNA, 32 nt, Homo Sapiens
ggccugucacacgccgggucucaacaacaucg

SEQ ID NO: 104476 - RNA, 32 nt, Homo Sapiens
ccucaccacccaccuuucuccuccuggggagu

SEQ ID NO: 104477 - RNA, 32 nt, Homo Sapiens
agaacccggagaggcucugggcugauucagag

SEQ ID NO: 104478 - RNA, 32 nt, Homo Sapiens
gcuccuuucucuacuuuuuuuuggucugaugg

SEQ ID NO: 104479 - RNA, 32 nt, Homo Sapiens
cauagaauuaggaugauuagauugaaacgcau

SEQ ID NO: 104480 - RNA, 32 nt, Homo Sapiens
uuguuuggcuuugaauucaaaauagauacaaa

SEQ ID NO: 104481 - RNA, 32 nt, Homo Sapiens
uugaaagggaaaugggagaacaauauguguuc

SEQ ID NO: 104482 - RNA, 30 nt, Homo Sapiens
caguuaagugccaugaaaaugugguugaau

SEQ ID NO: 104483 - RNA, 32 nt, Homo Sapiens
uuggcugagagauggaaggcguggugggauuu

SEQ ID NO: 104484 - RNA, 32 nt, Homo Sapiens
cccgagcaauuaacuggaguuaauuguagccu

SEQ ID NO: 104485 - RNA, 32 nt, Homo Sapiens
aggagauccaggcacucacggcacauagagau

SEQ ID NO: 104486 - RNA, 32 nt, Homo Sapiens
cacuguacucccucucccuccccgcaacccug

SEQ ID NO: 104487 - RNA, 32 nt, Homo Sapiens
gaaucaaugucaguuugauuuauuuuguuaca

SEQ ID NO: 104488 - RNA, 32 nt, Homo Sapiens
agagaacccacccagagacugggagugguggc

SEQ ID NO: 104489 - RNA, 32 nt, Homo Sapiens
cgcggccgggucccucuccaccugccgggcgg

SEQ ID NO: 104490 - RNA, 32 nt, Homo Sapiens
auuauaugaucacuaucgauuuccuggagagu

SEQ ID NO: 104491 - RNA, 32 nt, Homo Sapiens
uccuauuauuuccagucauuuaucuagucauu

SEQ ID NO: 104492 - RNA, 32 nt, Homo Sapiens
uuuuuugucacuuuucuuggcucuaucaaauu

SEQ ID NO: 104493 - RNA, 32 nt, Homo Sapiens
aucuccaaacauaugcacaagcagagaucaug

SEQ ID NO: 104494 - RNA, 32 nt, Homo Sapiens
gugcauggcagccucaugugggaaauaccacc

SEQ ID NO: 104495 - RNA, 32 nt, Homo Sapiens
ucagccccaucccacucccuguuucgggccuc

SEQ ID NO: 104496 - RNA, 32 nt, Homo Sapiens
cugaggguggcagugagcuggcacuuuggucu

SEQ ID NO: 104497 - RNA, 32 nt, Homo Sapiens
guuuccguuucuuuuccaucuauugcaacuuu

SEQ ID NO: 104498 - RNA, 32 nt, Homo Sapiens
ugacggcgccucccggccccaagcugccuucc

SEQ ID NO: 104499 - RNA, 32 nt, Homo Sapiens
cucgggaugggguaaccuggggaccagucuag

SEQ ID NO: 104500 - RNA, 32 nt, Homo Sapiens
ccugggguccgccgcuggcccggaggcccuag

SEQ ID NO: 104501 - RNA, 32 nt, Homo Sapiens
cagccagagggaccggcugugucagaggcaag

SEQ ID NO: 104502 - RNA, 32 nt, Homo Sapiens
cuugauaaagaaugucacuuuuuuauuuaacu

SEQ ID NO: 104503 - RNA, 32 nt, Homo Sapiens
ucuccuaaugcucucccucccccagcccccca

SEQ ID NO: 104504 - RNA, 32 nt, Homo Sapiens
ucgcuccgcccugcugcgcagacgccgccuga

SEQ ID NO: 104505 - RNA, 32 nt, Homo Sapiens
cuccugugccuggccccagucugggccaucuc

SEQ ID NO: 104506 - RNA, 32 nt, Homo Sapiens
uaagaacuguuaauaaaaguugucaaguaaaa

SEQ ID NO: 104507 - RNA, 31 nt, Homo Sapiens
uguagucccagcuacucaggagucugagcug

SEQ ID NO: 104508 - RNA, 31 nt, Homo Sapiens
aucaacauggccgcugcaccccggacugugu

SEQ ID NO: 104509 - RNA, 32 nt, Homo Sapiens
accucgccacaguggcccucagcccuccaccu

SEQ ID NO: 104510 - RNA, 32 nt, Homo Sapiens
cgcccgaggggaggcgccggacagaucgcguu

SEQ ID NO: 104511 - RNA, 32 nt, Homo Sapiens
cucuuccuucagguuacuaacaaaauuucgua

SEQ ID NO: 104512 - RNA, 32 nt, Homo Sapiens
cagcagcagcagcagcagcagcaacaacaaca

SEQ ID NO: 104513 - RNA, 32 nt, Homo Sapiens
cugaaagcaaaugcaacagagaagagacacuu

SEQ ID NO: 104514 - RNA, 32 nt, Homo Sapiens
ugaacaccuagcuguuaacauaaagaugagca

SEQ ID NO: 104515 - RNA, 32 nt, Homo Sapiens
cuguucuaggacugggcacagauuuucccauu

SEQ ID NO: 104516 - RNA, 32 nt, Homo Sapiens
gauguccgggccccugagcccgcggcgcugag

SEQ ID NO: 104517 - RNA, 32 nt, Homo Sapiens
agccugugcaccugggguguuucccuggaggu

SEQ ID NO: 104518 - RNA, 32 nt, Homo Sapiens
uuuauuuucuucauuuauuuauuuacagucuu

SEQ ID NO: 104519 - RNA, 32 nt, Homo Sapiens
gcuaugggcuccugcgugaggccugugguaca

SEQ ID NO: 104520 - RNA, 32 nt, Homo Sapiens
aauuaaaauaaucaucuuuagcucuccucuca

SEQ ID NO: 104521 - RNA, 32 nt, Homo Sapiens
agaaggagcagguggacuggccgaaaaggaga

SEQ ID NO: 104522 - RNA, 32 nt, Homo Sapiens
ggaagaguggagaggaccggcgaggcgcgcca

SEQ ID NO: 104523 - RNA, 32 nt, Homo Sapiens
uacacuuauuaucuauuaaccaaagcuuaaaa

SEQ ID NO: 104524 - RNA, 32 nt, Homo Sapiens
auuuagggagaucauguuuucuuaaucaugcu

SEQ ID NO: 104525 - RNA, 32 nt, Homo Sapiens
ggacuuccugugccugcccccaggggcaagac

SEQ ID NO: 104526 - RNA, 32 nt, Homo Sapiens
agugaucuggggaucgcuacggaccuuaaaau

SEQ ID NO: 104527 - RNA, 32 nt, Homo Sapiens
gguggcccagagaggaugccacagggaaagua

SEQ ID NO: 104528 - RNA, 32 nt, Homo Sapiens
cggaugcccccgcgagccccagcgcccuggca

SEQ ID NO: 104529 - RNA, 32 nt, Homo Sapiens
agaggaggggugaagauuggggccaguaucga

SEQ ID NO: 104530 - RNA, 32 nt, Homo Sapiens
gcauguuuuuaaaguuaacuaacagcuguagu

SEQ ID NO: 104531 - RNA, 32 nt, Homo Sapiens
uaagugugaccacuuaaagcugcucguuagca

SEQ ID NO: 104532 - RNA, 32 nt, Homo Sapiens
agcggaggagaguugugcugcagcucauacgg

SEQ ID NO: 104533 - RNA, 32 nt, Homo Sapiens
ccucauccaggcaguuugauauuuggaguaag

SEQ ID NO: 104534 - RNA, 32 nt, Homo Sapiens
cgagggaauacgcagguuccugucccuccggg

SEQ ID NO: 104535 - RNA, 32 nt, Homo Sapiens
ggaagauguugaccaagguggagaagaaucac

SEQ ID NO: 104536 - RNA, 32 nt, Homo Sapiens
uuuuccaaaaggaaaagccuggggccaggcga

SEQ ID NO: 104537 - RNA, 32 nt, Homo Sapiens
ugugauaaauguugauguuuucuguguacaaa

SEQ ID NO: 104538 - RNA, 32 nt, Homo Sapiens
cacgagcugcccacguccucuccaggagggga

SEQ ID NO: 104539 - RNA, 32 nt, Homo Sapiens
acgaacagaaguucugaguugugcuacaaaag

SEQ ID NO: 104540 - RNA, 32 nt, Homo Sapiens
guuucauacucuaauuuuacuuuaaguaaagc

SEQ ID NO: 104541 - RNA, 32 nt, Homo Sapiens
augcauagugggaggagaucagaccuuuacaa

SEQ ID NO: 104542 - RNA, 32 nt, Homo Sapiens
uuccagcuuuaaaggugagauuguagagaugc

SEQ ID NO: 104543 - RNA, 32 nt, Homo Sapiens
agcugaaggggagacgcgucuggguggggcug

SEQ ID NO: 104544 - RNA, 32 nt, Homo Sapiens
ugauuuuuuuuucuuuuuuuuaaaccaugaag

SEQ ID NO: 104545 - RNA, 32 nt, Homo Sapiens
caggacacaagacacgcaucccuugucuggcc

SEQ ID NO: 104546 - RNA, 32 nt, Homo Sapiens
ucccucauuuucugcagugaacuccaguaaag

SEQ ID NO: 104547 - RNA, 32 nt, Homo Sapiens
ucuuacuccaaauauaugaaauuacuauacau

SEQ ID NO: 104548 - RNA, 32 nt, Homo Sapiens
ugugguuaaaaauauagcauucugaccuaaaa

SEQ ID NO: 104549 - RNA, 32 nt, Homo Sapiens
uuagcuacuugaauccgauuuacuucuguuaa

SEQ ID NO: 104550 - RNA, 32 nt, Homo Sapiens
ccgucucuacuaaaauacaaaaaauuagcugg

SEQ ID NO: 104551 - RNA, 32 nt, Homo Sapiens
ccccgcuuuccacacagccuugcuccucccgg

SEQ ID NO: 104552 - RNA, 32 nt, Homo Sapiens
aaacaaacaaacaaacaaaaccuggaaugacg

SEQ ID NO: 104553 - RNA, 32 nt, Homo Sapiens
cacaucgcaccaacaauucucuucaggucuag

SEQ ID NO: 104554 - RNA, 32 nt, Homo Sapiens
gggaagcagugaagaaagggacggagauacug

SEQ ID NO: 104555 - RNA, 32 nt, Homo Sapiens
uucauaucuauuuauuaaauuucuaccgcuuu

SEQ ID NO: 104556 - RNA, 32 nt, Homo Sapiens
cgcuccucgccgcccgcacgcccuccccagcc

SEQ ID NO: 104557 - RNA, 32 nt, Homo Sapiens
aagacuucauagggucacuggaaugcuuugug

SEQ ID NO: 104558 - RNA, 30 nt, Homo Sapiens
ucaguugucugugccccaggagaucccucu

SEQ ID NO: 104559 - RNA, 32 nt, Homo Sapiens
cuuugggcagcuuuugaggaacagcaggguaa

SEQ ID NO: 104560 - RNA, 32 nt, Homo Sapiens
gcucuuaauguuuucuuuguuuuguuuuguuu

SEQ ID NO: 104561 - RNA, 32 nt, Homo Sapiens
uccccagccccuccugccccagcccacccgcu

SEQ ID NO: 104562 - RNA, 32 nt, Homo Sapiens
uuuuuuguuuuuccuuuuagagaugggcuuuu

SEQ ID NO: 104563 - RNA, 32 nt, Homo Sapiens
cuggcauuuuaaaaauaaugugaaugguguau

SEQ ID NO: 104564 - RNA, 32 nt, Homo Sapiens
gccuuuuauuuuuuccuggcaauguccuuaaa

SEQ ID NO: 104565 - RNA, 32 nt, Homo Sapiens
ugucucaauacuuuuuuuuucuuaauugcauu

SEQ ID NO: 104566 - RNA, 29 nt, Homo Sapiens
ggaccuucguguuuuuccggggcucaggu

SEQ ID NO: 104567 - RNA, 32 nt, Homo Sapiens
guuaucuguggcacagucagugcuguguuuga

SEQ ID NO: 104568 - RNA, 32 nt, Homo Sapiens
gccgcgcgccccgaccccggagcgcugacccc

SEQ ID NO: 104569 - RNA, 32 nt, Homo Sapiens
aaaucugcuguagcuagugagagcagcguguu

SEQ ID NO: 104570 - RNA, 32 nt, Homo Sapiens
aaggggauuaaaccauuuaccucauggaguug

SEQ ID NO: 104571 - RNA, 32 nt, Homo Sapiens
cauuuaaaauaauuuuaaaauaaaauggccua

SEQ ID NO: 104572 - RNA, 32 nt, Homo Sapiens
ggcugcgcucgcuacguccgcugcugcugccc

SEQ ID NO: 104573 - RNA, 32 nt, Homo Sapiens
uuuagaaaaaggaaguacaucuauagccaaau

SEQ ID NO: 104574 - RNA, 32 nt, Homo Sapiens
ccucauacaauuuugugagcuggcaguguugc

SEQ ID NO: 104575 - RNA, 32 nt, Homo Sapiens
ucucuuuauccauugcugaacgacugugacua

SEQ ID NO: 104576 - RNA, 32 nt, Homo Sapiens
gaugacggccccgccauggcccgggcgggcag

SEQ ID NO: 104577 - RNA, 32 nt, Homo Sapiens
uagaaugccugccuuuugaagaccacuuuuaa

SEQ ID NO: 104578 - RNA, 32 nt, Homo Sapiens
auggaauaaaggaaagaguuaugggccagggg

SEQ ID NO: 104579 - RNA, 32 nt, Homo Sapiens
cuagaugaagcaagugcguagcacaaaaauag

SEQ ID NO: 104580 - RNA, 32 nt, Homo Sapiens
cagccagcugcgccugcgcugcaggagggcgg

SEQ ID NO: 104581 - RNA, 32 nt, Homo Sapiens
uuccaucuuuuggaaggcagucuuucuauaga

SEQ ID NO: 104582 - RNA, 32 nt, Homo Sapiens
gaaccacaggaacugauguguauauaacuauu

SEQ ID NO: 104583 - RNA, 32 nt, Homo Sapiens
uguaaguagauauugaaaucuugcuuuuucag

SEQ ID NO: 104584 - RNA, 32 nt, Homo Sapiens
cauuuauauggaaggagguugauaaaauagcu

SEQ ID NO: 104585 - RNA, 32 nt, Homo Sapiens
uuacauauaaaucaauuauacacacacagagu

SEQ ID NO: 104586 - RNA, 32 nt, Homo Sapiens
aauuguugacauucaugucucugaguuacaaa

SEQ ID NO: 104587 - RNA, 32 nt, Homo Sapiens
cgcccaagccccacaggaagccuuccuccucu

SEQ ID NO: 104588 - RNA, 32 nt, Homo Sapiens
ggggacacgggcacucacuggauggacagaca

SEQ ID NO: 104589 - RNA, 32 nt, Homo Sapiens
cgagaaaaacacacagaagaagcuaccucagg

SEQ ID NO: 104590 - RNA, 32 nt, Homo Sapiens
caacuguuguuccagccauccacacaggaguc

SEQ ID NO: 104591 - RNA, 32 nt, Homo Sapiens
augguccccucauaggcccagggcuaccaccu

SEQ ID NO: 104592 - RNA, 32 nt, Homo Sapiens
acauggcguggcagcugcgugaauaccaggag

SEQ ID NO: 104593 - RNA, 32 nt, Homo Sapiens
gugcggugcccuucggccggccugagccccag

SEQ ID NO: 104594 - RNA, 32 nt, Homo Sapiens
gcagccagugauuuagauuuacagcuuacucu

SEQ ID NO: 104595 - RNA, 32 nt, Homo Sapiens
auggauaggaggagguugagucauuaauguag

SEQ ID NO: 104596 - RNA, 32 nt, Homo Sapiens
ucuacauagagcaucaugucuucuucauauag

SEQ ID NO: 104597 - RNA, 32 nt, Homo Sapiens
uaugcaaacacuuugauaauauaaacaguuau

SEQ ID NO: 104598 - RNA, 32 nt, Homo Sapiens
agaauucaggugguuauaauuccguaugugcu

SEQ ID NO: 104599 - RNA, 30 nt, Homo Sapiens
gaagcacaucuuguugaagaagcucaagug

SEQ ID NO: 104600 - RNA, 32 nt, Homo Sapiens
aggggaaggggcugcugcuugcaucagcccac

SEQ ID NO: 104601 - RNA, 32 nt, Homo Sapiens
aaugcagaauaaauacauguugccuuaaaggg

SEQ ID NO: 104602 - RNA, 32 nt, Homo Sapiens
gccccaccgacccuucaggugcugcucguggu

SEQ ID NO: 104603 - RNA, 32 nt, Homo Sapiens
acuuguaaaaauuaaaaguuaugguacuaugu

SEQ ID NO: 104604 - RNA, 32 nt, Homo Sapiens
ccucgcccgccgguaccccggcgccaaccccg

SEQ ID NO: 104605 - RNA, 32 nt, Homo Sapiens
agagcugggcauucuccucccccggcagacag

SEQ ID NO: 104606 - RNA, 32 nt, Homo Sapiens
auaauccuauuauuaauucguaugcuuaguca

SEQ ID NO: 104607 - RNA, 32 nt, Homo Sapiens
agugugagccaccacacccagccuaauguaac

SEQ ID NO: 104608 - RNA, 32 nt, Homo Sapiens
ccuucaaccaaccgcguugauggacacccacu

SEQ ID NO: 104609 - RNA, 32 nt, Homo Sapiens
ccggcagaaguccuggcuggugaggcauuucu

SEQ ID NO: 104610 - RNA, 32 nt, Homo Sapiens
gaggacacaggaggaggugugcaugggccaca

SEQ ID NO: 104611 - RNA, 32 nt, Homo Sapiens
aagugguuuuaaaauuuacugaaguuuuuagg

SEQ ID NO: 104612 - RNA, 32 nt, Homo Sapiens
guaucuguaugugaauagacuuugaaaaaaua

SEQ ID NO: 104613 - RNA, 32 nt, Homo Sapiens
aggcccuugugggcacgagagugcggcccuug

SEQ ID NO: 104614 - RNA, 32 nt, Homo Sapiens
aguaccagagcucuucaauaccuugaagaaag

SEQ ID NO: 104615 - RNA, 32 nt, Homo Sapiens
gcugaggauggagcccgccccgggccucgugg

SEQ ID NO: 104616 - RNA, 32 nt, Homo Sapiens
aaacuagccaagggcaagcuauuauucagcag

SEQ ID NO: 104617 - RNA, 32 nt, Homo Sapiens
ugucaaucaaggaaaacaugacagauggugag

SEQ ID NO: 104618 - RNA, 32 nt, Homo Sapiens
cugcaacccaaguggacguuaggccaggccuu

SEQ ID NO: 104619 - RNA, 32 nt, Homo Sapiens
aaacuucaauuucaaaauaaagguuuucaggg

SEQ ID NO: 104620 - RNA, 32 nt, Homo Sapiens
gauauuaggaaaaaccaauucuucuuaaauuu

SEQ ID NO: 104621 - RNA, 32 nt, Homo Sapiens
uuguauuucuuucagcacauccagccaucucc

SEQ ID NO: 104622 - RNA, 32 nt, Homo Sapiens
acuucuaggaauacuaguauaucgcucacacc

SEQ ID NO: 104623 - RNA, 32 nt, Homo Sapiens
aacccuuugggcugccucuggaugucgauaca

SEQ ID NO: 104624 - RNA, 32 nt, Homo Sapiens
augcagauaaaauuauuuuacugaagaucuag

SEQ ID NO: 104625 - RNA, 32 nt, Homo Sapiens
cgguacaguguuuuuguagcuaacuuauuuug

SEQ ID NO: 104626 - RNA, 32 nt, Homo Sapiens
ggauguugucauuucuggcacaaaugaaaagu

SEQ ID NO: 104627 - RNA, 32 nt, Homo Sapiens
uuaaauaaaggcaaaaucacgacucucgugca

SEQ ID NO: 104628 - RNA, 32 nt, Homo Sapiens
aucuuuaaaaauuccucuuaaaugacucugga

SEQ ID NO: 104629 - RNA, 32 nt, Homo Sapiens
cacugcacuccagccugggugacagcgcgaga

SEQ ID NO: 104630 - RNA, 32 nt, Homo Sapiens
cucugccugugcugcaaguguuggccgugggu

SEQ ID NO: 104631 - RNA, 32 nt, Homo Sapiens
ggacauugaaaccugcuuuucuggaucacauu

SEQ ID NO: 104632 - RNA, 32 nt, Homo Sapiens
ccuugccucuuuucccaaauacuguggguuuu

SEQ ID NO: 104633 - RNA, 32 nt, Homo Sapiens
gaacugugaacauguggcucuggauagaguga

SEQ ID NO: 104634 - RNA, 32 nt, Homo Sapiens
acuuugaaaaauuguucguuucaucaggcucu

SEQ ID NO: 104635 - RNA, 32 nt, Homo Sapiens
uucucucaagcaugcaugaaauuuagccuuaa

SEQ ID NO: 104636 - RNA, 32 nt, Homo Sapiens
cagaccugccagcgguagagcugccugccuug

SEQ ID NO: 104637 - RNA, 32 nt, Homo Sapiens
ucuuuguuguacauugucaguguaauaaaaac

SEQ ID NO: 104638 - RNA, 32 nt, Homo Sapiens
uagguggcgggggucgggggucuucuguuuca

SEQ ID NO: 104639 - RNA, 32 nt, Homo Sapiens
auucucccacugacagaaagauuuuccugcuu

SEQ ID NO: 104640 - RNA, 32 nt, Homo Sapiens
gaaagugaaugggagcuacggacaccguaccc

SEQ ID NO: 104641 - RNA, 32 nt, Homo Sapiens
cauccagagcugccucccuuuaauccaggauc

SEQ ID NO: 104642 - RNA, 32 nt, Homo Sapiens
ugacucuugaagcccaaaacuuccucaaauca

SEQ ID NO: 104643 - RNA, 32 nt, Homo Sapiens
ugucaauuuuuuuuuuuuuuuaauacaggguc

SEQ ID NO: 104644 - RNA, 32 nt, Homo Sapiens
auucugauaccaaccucuuuccuuuggaagua

SEQ ID NO: 104645 - RNA, 32 nt, Homo Sapiens
ccccgcaugcgugcaaugccuccagcccccaa

SEQ ID NO: 104646 - RNA, 32 nt, Homo Sapiens
uaaaauauuuccccuaguuuuuuggggggaua

SEQ ID NO: 104647 - RNA, 32 nt, Homo Sapiens
gcuuaucuccuugucuugaaauccauaguaac

SEQ ID NO: 104648 - RNA, 32 nt, Homo Sapiens
uggauaucuaaugugcuucuaguaggcacagg

SEQ ID NO: 104649 - RNA, 32 nt, Homo Sapiens
ugauuuuuuaaugaaaugagauauaucuuuuc

SEQ ID NO: 104650 - RNA, 32 nt, Homo Sapiens
gcugcgggcccgggaucgcggcggcuggacgg

SEQ ID NO: 104651 - RNA, 32 nt, Homo Sapiens
aagaacaauuuaaugauuaaguaaggucagug

SEQ ID NO: 104652 - RNA, 32 nt, Homo Sapiens
ucggggcuagucagcccggccugggcauggag

SEQ ID NO: 104653 - RNA, 30 nt, Homo Sapiens
ucccuggagaagaugggggaggcuguccca

SEQ ID NO: 104654 - RNA, 32 nt, Homo Sapiens
ugcccugacagugucccaugggcccccuucug

SEQ ID NO: 104655 - RNA, 32 nt, Homo Sapiens
augguggaagauguauuucugugugaaaauuu

SEQ ID NO: 104656 - RNA, 32 nt, Homo Sapiens
ucuuggggaaaggucgguuuaccucacauuuu

SEQ ID NO: 104657 - RNA, 32 nt, Homo Sapiens
guucuugguuaaaaaauauauugcuuuguuaa

SEQ ID NO: 104658 - RNA, 32 nt, Homo Sapiens
gggagucacagucaguccccccggccccccuc

SEQ ID NO: 104659 - RNA, 32 nt, Homo Sapiens
caguucccacuuaugaggguacuuuuuugguu

SEQ ID NO: 104660 - RNA, 32 nt, Homo Sapiens
ucaccaaaucauccgaaugacaucaaaagcag

SEQ ID NO: 104661 - RNA, 32 nt, Homo Sapiens
uccuggaagguuugucauuucucuaaaguuug

SEQ ID NO: 104662 - RNA, 32 nt, Homo Sapiens
ucaccccacagcacacagacuuucucuagagu

SEQ ID NO: 104663 - RNA, 32 nt, Homo Sapiens
gacaccagaaaguuggagaacaagacuuugaa

SEQ ID NO: 104664 - RNA, 32 nt, Homo Sapiens
aauuagagaaaacuugacaguagccccuuuuu

SEQ ID NO: 104665 - RNA, 31 nt, Homo Sapiens
caaaggaacauauucaauuuggcuuuuugug

SEQ ID NO: 104666 - RNA, 32 nt, Homo Sapiens
guagacaaaaaagaagcagcagcagcucuuaa

SEQ ID NO: 104667 - RNA, 32 nt, Homo Sapiens
aagcaguggucaccgccuccgggagcccacuu

SEQ ID NO: 104668 - RNA, 32 nt, Homo Sapiens
uauaguggcugcugcauagacacuauucagua

SEQ ID NO: 104669 - RNA, 32 nt, Homo Sapiens
cucucucucccucuaaucuggaguccuccugc

SEQ ID NO: 104670 - RNA, 32 nt, Homo Sapiens
gggugcgucuccccggaguucaguuuuaccag

SEQ ID NO: 104671 - RNA, 32 nt, Homo Sapiens
cauucuucaauacuuuaaaauggcuuuuucca

SEQ ID NO: 104672 - RNA, 32 nt, Homo Sapiens
cauaacauagcgcggucaggcuuguggcacag

SEQ ID NO: 104673 - RNA, 32 nt, Homo Sapiens
gagaagaaaaagaauagaaagaauuauccagu

SEQ ID NO: 104674 - RNA, 32 nt, Homo Sapiens
ggccuccccguccuccugcucccuaguggccc

SEQ ID NO: 104675 - RNA, 32 nt, Homo Sapiens
cuccagcuugcccuuccacugccacucacugg

SEQ ID NO: 104676 - RNA, 32 nt, Homo Sapiens
cuuuuuaaaaacaguauuuuguuauaauuuuc

SEQ ID NO: 104677 - RNA, 32 nt, Homo Sapiens
ucaucucgucuauggaucauguugacaaacua

SEQ ID NO: 104678 - RNA, 32 nt, Homo Sapiens
cccuggggcccggcccucucugcaucucucuc

SEQ ID NO: 104679 - RNA, 32 nt, Homo Sapiens
ugugaaguucaaacagaaaauugucuuaauag

SEQ ID NO: 104680 - RNA, 32 nt, Homo Sapiens
cgccugcugcuucucuaccuccccuccccacc

SEQ ID NO: 104681 - RNA, 32 nt, Homo Sapiens
aaacgaaaaccuuuaagagaauguagaguuua

SEQ ID NO: 104682 - RNA, 32 nt, Homo Sapiens
gcaacagugaccagcucaugggcuucgagaga

SEQ ID NO: 104683 - RNA, 32 nt, Homo Sapiens
guguagacacugccuccgcagggcuggcgcac

SEQ ID NO: 104684 - RNA, 32 nt, Homo Sapiens
uucaaggaaugggaaccuuccuguuaaauucg

SEQ ID NO: 104685 - RNA, 32 nt, Homo Sapiens
ugcccuuauaagacauaaacacaagaaagaau

SEQ ID NO: 104686 - RNA, 32 nt, Homo Sapiens
ggagggcccuuaaaggaaggcagcaggaauca

SEQ ID NO: 104687 - RNA, 32 nt, Homo Sapiens
uccaauaauguuuuauacaucauugucaucaa

SEQ ID NO: 104688 - RNA, 32 nt, Homo Sapiens
ggcgcugaguccuggggucccucccggaguuc

SEQ ID NO: 104689 - RNA, 32 nt, Homo Sapiens
uagaagccacaucguugagacaucaggaaggu

SEQ ID NO: 104690 - RNA, 32 nt, Homo Sapiens
agaagaaauaugaauacggcuccaucaagacc

SEQ ID NO: 104691 - RNA, 32 nt, Homo Sapiens
gcaggggggucauuuuaauguaacaccacacc

SEQ ID NO: 104692 - RNA, 32 nt, Homo Sapiens
gaucauuguuuaguggucuguuuucuacuuca

SEQ ID NO: 104693 - RNA, 32 nt, Homo Sapiens
aaugcauugucaacggaaucuuuuauguuugu

SEQ ID NO: 104694 - RNA, 32 nt, Homo Sapiens
aaagguaggaggagagaaggcuggggagggcu

SEQ ID NO: 104695 - RNA, 32 nt, Homo Sapiens
aaaauggaaauauuugaacuuucuauugaaga

SEQ ID NO: 104696 - RNA, 32 nt, Homo Sapiens
auugaugucagugcaggcccaggcccgccccc

SEQ ID NO: 104697 - RNA, 32 nt, Homo Sapiens
uaaaggggucuggcccgggcauccacguaggg

SEQ ID NO: 104698 - RNA, 32 nt, Homo Sapiens
aaaaggaggggaguuuucaaugagggagguag

SEQ ID NO: 104699 - RNA, 32 nt, Homo Sapiens
ggacgcguuggccggggcgcgcggugcuuggc

SEQ ID NO: 104700 - RNA, 32 nt, Homo Sapiens
gacucuucuguucaccagacacccugcccugc

SEQ ID NO: 104701 - RNA, 32 nt, Homo Sapiens
gucgcagaggccgacggagccggagucgcgga

SEQ ID NO: 104702 - RNA, 32 nt, Homo Sapiens
uagcuggggccuccuuccuucucagggucucc

SEQ ID NO: 104703 - RNA, 32 nt, Homo Sapiens
cauuuuggauuuuuuucuuugaauuauugggc

SEQ ID NO: 104704 - RNA, 32 nt, Homo Sapiens
ugcuuugagguuuggggugcucaggcugggag

SEQ ID NO: 104705 - RNA, 31 nt, Homo Sapiens
gcccccugcccugcccugccccguguccacc

SEQ ID NO: 104706 - RNA, 32 nt, Homo Sapiens
acccaggaagcagugguugagaucacgccauu

SEQ ID NO: 104707 - RNA, 32 nt, Homo Sapiens
ggcggggcaccucgggcaggaccucccugguc

SEQ ID NO: 104708 - RNA, 30 nt, Homo Sapiens
acuauaaauguuaugggggagaucuuauaa

SEQ ID NO: 104709 - RNA, 32 nt, Homo Sapiens
auagagaauauuaauaauggcuuauagagaga

SEQ ID NO: 104710 - RNA, 32 nt, Homo Sapiens
cgccagcuccgcgucccgaccggcccgcggca

SEQ ID NO: 104711 - RNA, 32 nt, Homo Sapiens
cggcugcccucccucuuauucggcccaaggac

SEQ ID NO: 104712 - RNA, 32 nt, Homo Sapiens
aacucagccagguugucuaaccuggggucaag

SEQ ID NO: 104713 - RNA, 32 nt, Homo Sapiens
uccagcaguuuccccagagccccugucugccu

SEQ ID NO: 104714 - RNA, 32 nt, Homo Sapiens
gagagugaggagaggaggagagaggcuuguca

SEQ ID NO: 104715 - RNA, 32 nt, Homo Sapiens
cacauacucaaacaugcguacacacacacaca

SEQ ID NO: 104716 - RNA, 32 nt, Homo Sapiens
agcgaggggcaggaccccugcugcucaugggg

SEQ ID NO: 104717 - RNA, 32 nt, Homo Sapiens
uaauccuuauagauaugaacugauugauauuc

SEQ ID NO: 104718 - RNA, 32 nt, Homo Sapiens
acacaaagggaagucgggcaugguggcucaug

SEQ ID NO: 104719 - RNA, 32 nt, Homo Sapiens
cccccagcguuggcuguuuaacuuuuuagcgu

SEQ ID NO: 104720 - RNA, 32 nt, Homo Sapiens
gcccuucuggaacacagcagggccuacaacga

SEQ ID NO: 104721 - RNA, 32 nt, Homo Sapiens
aagccugcggcgccagccucacggagggccgu

SEQ ID NO: 104722 - RNA, 32 nt, Homo Sapiens
aauuuuuaaaaauuauuaucaggggagaaaaa

SEQ ID NO: 104723 - RNA, 32 nt, Homo Sapiens
ugaaguugcucuuuuccuguguggucuuuggg

SEQ ID NO: 104724 - RNA, 32 nt, Homo Sapiens
gaagggccuuucccuuuccucuuugccugcua

SEQ ID NO: 104725 - RNA, 32 nt, Homo Sapiens
ggacuuggugcccugcaucccagccacuccca

SEQ ID NO: 104726 - RNA, 32 nt, Homo Sapiens
cagaacaugcagcaugggucuucugcacugcc

SEQ ID NO: 104727 - RNA, 32 nt, Homo Sapiens
gaagcccgcucccggggccaugggggcacagg

SEQ ID NO: 104728 - RNA, 32 nt, Homo Sapiens
gaacacuuuuaauaaacuuuuuuuugagaaug

SEQ ID NO: 104729 - RNA, 32 nt, Homo Sapiens
uuuuuacaaaauuuagugcauacaaaauuuuu

SEQ ID NO: 104730 - RNA, 32 nt, Homo Sapiens
uggcaccuuucccucccugguccuguaaaugu

SEQ ID NO: 104731 - RNA, 32 nt, Homo Sapiens
auagcuuucuuugccucucugaggcagacagg

SEQ ID NO: 104732 - RNA, 32 nt, Homo Sapiens
aauugccaguguuguuuaggcaauguaacauu

SEQ ID NO: 104733 - RNA, 32 nt, Homo Sapiens
auaauuauggucagaugugucauguuuuucau

SEQ ID NO: 104734 - RNA, 32 nt, Homo Sapiens
ugcuacuccccauuuuauuguuuuacaucaau

SEQ ID NO: 104735 - RNA, 32 nt, Homo Sapiens
acaauugucuacaaguagaugugcuagacaau

SEQ ID NO: 104736 - RNA, 32 nt, Homo Sapiens
guaaauagccacuauggaggcuaaggaccaga

SEQ ID NO: 104737 - RNA, 32 nt, Homo Sapiens
aaccaacucaccucccuucucuuagcccaagc

SEQ ID NO: 104738 - RNA, 32 nt, Homo Sapiens
cccccuuccuuccucggaagcguccucucacc

SEQ ID NO: 104739 - RNA, 32 nt, Homo Sapiens
aauggccucuaacguugcaaagaauaaugugu

SEQ ID NO: 104740 - RNA, 32 nt, Homo Sapiens
cacacacacaugcauacacacacacacacagc

SEQ ID NO: 104741 - RNA, 32 nt, Homo Sapiens
aucuccugcccucuccugaucuaacucccugc

SEQ ID NO: 104742 - RNA, 32 nt, Homo Sapiens
gcugggcauggcggcgugugucuguaauccca

SEQ ID NO: 104743 - RNA, 32 nt, Homo Sapiens
ggugccucacaggguuccugcugccugguguc

SEQ ID NO: 104744 - RNA, 32 nt, Homo Sapiens
gccuuccaugaaaauugcucucugccaaagag

SEQ ID NO: 104745 - RNA, 32 nt, Homo Sapiens
caagccacgcacccgcuaugccugcacugcag

SEQ ID NO: 104746 - RNA, 32 nt, Homo Sapiens
ugaguguaaaaccauaacuguuagaaucauuu

SEQ ID NO: 104747 - RNA, 32 nt, Homo Sapiens
gccugaaaauuccaauuugggggugggaggug

SEQ ID NO: 104748 - RNA, 32 nt, Homo Sapiens
aauauagguuggguuuuuuucuuauuguuuuc

SEQ ID NO: 104749 - RNA, 32 nt, Homo Sapiens
ggguaguuucagucacucaucggcuuucauua

SEQ ID NO: 104750 - RNA, 32 nt, Homo Sapiens
gggccucugugcuagccuguggucagaugugg

SEQ ID NO: 104751 - RNA, 32 nt, Homo Sapiens
cccuuaagcucccuccgaccucccagaagccu

SEQ ID NO: 104752 - RNA, 32 nt, Homo Sapiens
ugcuucuguucagucuccaucauggcaugcca

SEQ ID NO: 104753 - RNA, 32 nt, Homo Sapiens
aacaauuuaucuuuaaaguuucugaauaugug

SEQ ID NO: 104754 - RNA, 32 nt, Homo Sapiens
cguuagccgggugcagugcuguguguaucuag

SEQ ID NO: 104755 - RNA, 31 nt, Homo Sapiens
aaaaagaaauaaaaguucuuugucagugaca

SEQ ID NO: 104756 - RNA, 32 nt, Homo Sapiens
gggugcugcggugcuagagcgcggcgcgaccg

SEQ ID NO: 104757 - RNA, 32 nt, Homo Sapiens
gccaacccagugaaggagagccaggagcccuu

SEQ ID NO: 104758 - RNA, 32 nt, Homo Sapiens
aagcaugcacguguguaugaaugugcgugugu

SEQ ID NO: 104759 - RNA, 32 nt, Homo Sapiens
gcagagaccaagcccugcugcagauucgucag

SEQ ID NO: 104760 - RNA, 32 nt, Homo Sapiens
gugcugcugguggugcugcugcugcuucugag

SEQ ID NO: 104761 - RNA, 32 nt, Homo Sapiens
gugaggcaaaauacggaacuaauugucacggg

SEQ ID NO: 104762 - RNA, 32 nt, Homo Sapiens
cugcaacaaaauuuaaaaauuagccagacuug

SEQ ID NO: 104763 - RNA, 32 nt, Homo Sapiens
ccaccgccugcuccucgucguccucguccucc

SEQ ID NO: 104764 - RNA, 32 nt, Homo Sapiens
gcgaagugccucacuuccuucucccgggaguc

SEQ ID NO: 104765 - RNA, 32 nt, Homo Sapiens
gaugauaaccuaauuucauugagagaaaccca

SEQ ID NO: 104766 - RNA, 32 nt, Homo Sapiens
gcaggaaggagaguccuguuucccagcggaug

SEQ ID NO: 104767 - RNA, 32 nt, Homo Sapiens
auugacuggaaugcuugugucuguggaaccca

SEQ ID NO: 104768 - RNA, 32 nt, Homo Sapiens
uggggcauuuuucuuuaacaaagaaugguuuc

SEQ ID NO: 104769 - RNA, 32 nt, Homo Sapiens
acaauuuauaugcuucacauagcaugucaacu

SEQ ID NO: 104770 - RNA, 31 nt, Homo Sapiens
gcuaccaugaagcgccuucugcuucuguuuu

SEQ ID NO: 104771 - RNA, 32 nt, Homo Sapiens
uggguucugaagaugcccuucuuaauggagag

SEQ ID NO: 104772 - RNA, 30 nt, Homo Sapiens
acggggcccugcugugagcugcgugccagg

SEQ ID NO: 104773 - RNA, 32 nt, Homo Sapiens
agggugaaugcagcuggucucuggccagugcc

SEQ ID NO: 104774 - RNA, 31 nt, Homo Sapiens
auccccgcaccccagaacugggcuccugaac

SEQ ID NO: 104775 - RNA, 32 nt, Homo Sapiens
uaccuuagaagguauuaagauuauaauuguug

SEQ ID NO: 104776 - RNA, 32 nt, Homo Sapiens
gucucauucacuuguuucagacucuccagaag

SEQ ID NO: 104777 - RNA, 32 nt, Homo Sapiens
gucuggccaaggaaaugaaauugggaguugcu

SEQ ID NO: 104778 - RNA, 32 nt, Homo Sapiens
cacaccccaaccccagcgucucgugaguccga

SEQ ID NO: 104779 - RNA, 32 nt, Homo Sapiens
gaguuucgcucuuguugcccaggcaggaguac

SEQ ID NO: 104780 - RNA, 32 nt, Homo Sapiens
aauaaaauauacaugaaaaggaauugugaaac

SEQ ID NO: 104781 - RNA, 32 nt, Homo Sapiens
acuauuucacaugagucaaaacaaagcagcuu

SEQ ID NO: 104782 - RNA, 32 nt, Homo Sapiens
cauugcacuccagccugggugguagaucaagg

SEQ ID NO: 104783 - RNA, 32 nt, Homo Sapiens
cucaucuagauauacuggucuuccauuaguuc

SEQ ID NO: 104784 - RNA, 32 nt, Homo Sapiens
cccugcccaccucgggccuaccucagcccuca

SEQ ID NO: 104785 - RNA, 32 nt, Homo Sapiens
ugccuccugcagguuccuuuccugggcauggu

SEQ ID NO: 104786 - RNA, 32 nt, Homo Sapiens
ugccaaaaauucuccucuucaacuuauagaau

SEQ ID NO: 104787 - RNA, 32 nt, Homo Sapiens
agcugccuuguauagucguuugaaagaauaug

SEQ ID NO: 104788 - RNA, 32 nt, Homo Sapiens
gguuucgcuguguuggccgggcuggucuccag

SEQ ID NO: 104789 - RNA, 32 nt, Homo Sapiens
gccuaagacaaaugcauauauacacugguaca

SEQ ID NO: 104790 - RNA, 32 nt, Homo Sapiens
gggccgccgcugccuccccgcgggauggcugg

SEQ ID NO: 104791 - RNA, 32 nt, Homo Sapiens
cuugaggaacagaaucaguacuucaguuauug

SEQ ID NO: 104792 - RNA, 32 nt, Homo Sapiens
aagccgggggagaggggacaccugcuuucaga

SEQ ID NO: 104793 - RNA, 32 nt, Homo Sapiens
uucaaaacaaaguaauaagcaaaugauuuuuu

SEQ ID NO: 104794 - RNA, 32 nt, Homo Sapiens
acccugcguggcaaucccugacgcaccgccgu

SEQ ID NO: 104795 - RNA, 32 nt, Homo Sapiens
cccagcucgucugccugcccccggccccgcgc

SEQ ID NO: 104796 - RNA, 32 nt, Homo Sapiens
uuagcuaaauuugacauagaaaguaagaagga

SEQ ID NO: 104797 - RNA, 32 nt, Homo Sapiens
uaaagacccaucagccccgugcucucugacug

SEQ ID NO: 104798 - RNA, 31 nt, Homo Sapiens
ucagcgcugccggcuugcagcgggcugugag

SEQ ID NO: 104799 - RNA, 32 nt, Homo Sapiens
cuuuggugcucugcacgagaaugugguagcag

SEQ ID NO: 104800 - RNA, 32 nt, Homo Sapiens
acaaccagucccagccccugcuuacauuccag

SEQ ID NO: 104801 - RNA, 32 nt, Homo Sapiens
uuacaagagggcugggguguggaagggcaagc

SEQ ID NO: 104802 - RNA, 32 nt, Homo Sapiens
gcagggcaauuuccuccugugacgguugcugu

SEQ ID NO: 104803 - RNA, 31 nt, Homo Sapiens
aaagauguaaaaauaaauuacaauggggguu

SEQ ID NO: 104804 - RNA, 32 nt, Homo Sapiens
uuccacacagccccggccuuucgcggugacac

SEQ ID NO: 104805 - RNA, 32 nt, Homo Sapiens
acgaugaaaccacuacaagaaaacacugggga

SEQ ID NO: 104806 - RNA, 32 nt, Homo Sapiens
ggaucaggaaaagucaucaagggcugggagga

SEQ ID NO: 104807 - RNA, 32 nt, Homo Sapiens
gucggagccaccgccugagcugcucgggucuc

SEQ ID NO: 104808 - RNA, 32 nt, Homo Sapiens
ucuaaggguagggcacaccuccccacagccac

SEQ ID NO: 104809 - RNA, 32 nt, Homo Sapiens
ggaaaauuggaagcaaggaacagcaacagcac

SEQ ID NO: 104810 - RNA, 29 nt, Homo Sapiens
auguacguuuguauguaguccacauuggu

SEQ ID NO: 104811 - RNA, 32 nt, Homo Sapiens
ucaaaagaaauauuuuugaugaacuuaaaaga

SEQ ID NO: 104812 - RNA, 32 nt, Homo Sapiens
uauucccacaucccuuuccuuacuacuugccu

SEQ ID NO: 104813 - RNA, 32 nt, Homo Sapiens
ccuuuuccacuuuaaauuuguuuuuguuuuuu

SEQ ID NO: 104814 - RNA, 32 nt, Homo Sapiens
cuggcccucgcacccaaagaccaucaagggaa

SEQ ID NO: 104815 - RNA, 32 nt, Homo Sapiens
uacagcagggucagcaagacaagcagguugcg

SEQ ID NO: 104816 - RNA, 32 nt, Homo Sapiens
aaccaagaggggcucugccauuaguuggaccc

SEQ ID NO: 104817 - RNA, 32 nt, Homo Sapiens
acggaaccucgcgaaccacugguggcacaucc

SEQ ID NO: 104818 - RNA, 32 nt, Homo Sapiens
gggaggagcaggacgcgccggggccgccuccu

SEQ ID NO: 104819 - RNA, 32 nt, Homo Sapiens
cuugcugcacuauuuuuuuuuaaauauuuauu

SEQ ID NO: 104820 - RNA, 32 nt, Homo Sapiens
auaucuggguuucuggcuucucuucacgggaa

SEQ ID NO: 104821 - RNA, 32 nt, Homo Sapiens
cagacacccucgccggggacucgggaacgccg

SEQ ID NO: 104822 - RNA, 32 nt, Homo Sapiens
caaggcggcgagucgccgucuucgagucccac

SEQ ID NO: 104823 - RNA, 32 nt, Homo Sapiens
aguuggagguggccugaggagcucaguucccu

SEQ ID NO: 104824 - RNA, 32 nt, Homo Sapiens
gacaaaauacucaaaauuuaugucuugguucu

SEQ ID NO: 104825 - RNA, 32 nt, Homo Sapiens
guggcccuggugauggcagagccuugggaugu

SEQ ID NO: 104826 - RNA, 32 nt, Homo Sapiens
cagauauguucccacccaacaaaugugauaag

SEQ ID NO: 104827 - RNA, 32 nt, Homo Sapiens
agcacggcgcccgcaccuccccgcaccgcccg

SEQ ID NO: 104828 - RNA, 32 nt, Homo Sapiens
cuugggaacagaaauguuuuggauuuuggauu

SEQ ID NO: 104829 - RNA, 32 nt, Homo Sapiens
aauaagcauauuaagucuacugauggagccuu

SEQ ID NO: 104830 - RNA, 32 nt, Homo Sapiens
auucuacugugcaacauagugaugauucagaa

SEQ ID NO: 104831 - RNA, 32 nt, Homo Sapiens
augaucuacacacacacacacacacacacgug

SEQ ID NO: 104832 - RNA, 29 nt, Homo Sapiens
acacccaccgggcccucuccggcgucugc

SEQ ID NO: 104833 - RNA, 32 nt, Homo Sapiens
cacaagagggcuuuuccacacucggugugugc

SEQ ID NO: 104834 - RNA, 32 nt, Homo Sapiens
auuuuuucuaguuaaaauuuugcuaucuuuca

SEQ ID NO: 104835 - RNA, 32 nt, Homo Sapiens
accgguuaggaagagacaguuacuacccugaa

SEQ ID NO: 104836 - RNA, 32 nt, Homo Sapiens
gggucccaacuggcgaggcugcugggguugca

SEQ ID NO: 104837 - RNA, 31 nt, Homo Sapiens
ggcacgagggcgggcuggcgugcggcgccgu

SEQ ID NO: 104838 - RNA, 32 nt, Homo Sapiens
agaggaaaaaauuuauuguauaaucagcuucu

SEQ ID NO: 104839 - RNA, 32 nt, Homo Sapiens
aaauacuauuaauugugacauuuuaaaagcgu

SEQ ID NO: 104840 - RNA, 32 nt, Homo Sapiens
uuuauucacauuuuauguuuuguuauggccac

SEQ ID NO: 104841 - RNA, 32 nt, Homo Sapiens
aguuagguacagagaccucccuguucaaggcc

SEQ ID NO: 104842 - RNA, 32 nt, Homo Sapiens
gcguggacaccguggcucuguucuuggccaag

SEQ ID NO: 104843 - RNA, 32 nt, Homo Sapiens
uugugcuauuuuccaauccagaaaaaauauuu

SEQ ID NO: 104844 - RNA, 32 nt, Homo Sapiens
gaaggcacagaaaucgagcaaggaagaaaaua

SEQ ID NO: 104845 - RNA, 32 nt, Homo Sapiens
gcauaugccucuauuuuuccuguccccagugc

SEQ ID NO: 104846 - RNA, 32 nt, Homo Sapiens
uguggcuaucugagaaaucaacuuugggggaa

SEQ ID NO: 104847 - RNA, 32 nt, Homo Sapiens
gcgucucuaggucagaguuaagaggguucggg

SEQ ID NO: 104848 - RNA, 32 nt, Homo Sapiens
uuuuaaauuuaaauacauugaacucuaacaua

SEQ ID NO: 104849 - RNA, 32 nt, Homo Sapiens
gcaggcguugcucuggcacgccgcccuuuugg

SEQ ID NO: 104850 - RNA, 32 nt, Homo Sapiens
gagagcaggggaggugucaggcucuuuaacga

SEQ ID NO: 104851 - RNA, 32 nt, Homo Sapiens
uuauuuccuuuacuuucucaccucuguugaaa

SEQ ID NO: 104852 - RNA, 32 nt, Homo Sapiens
cagaaucaggacuuagaucugccaauuuguag

SEQ ID NO: 104853 - RNA, 32 nt, Homo Sapiens
uugggaugaagaugauagccagggcuguuguu

SEQ ID NO: 104854 - RNA, 32 nt, Homo Sapiens
gagaagcacuguacuaagauuacuguguuguc

SEQ ID NO: 104855 - RNA, 32 nt, Homo Sapiens
ugaacucgcccgcuccggcuugcuucccccgc

SEQ ID NO: 104856 - RNA, 32 nt, Homo Sapiens
accaugucuccaugugacccgauggcacauag

SEQ ID NO: 104857 - RNA, 32 nt, Homo Sapiens
cucaugacugucaggccauuuccaggccuagu

SEQ ID NO: 104858 - RNA, 30 nt, Homo Sapiens
ugucuagggaagcuugggguucugcuccuu

SEQ ID NO: 104859 - RNA, 32 nt, Homo Sapiens
ccgucuacacgguccccucauuugacggguuc

SEQ ID NO: 104860 - RNA, 32 nt, Homo Sapiens
uaacucuuuguugaacuagaguauuuuugcag

SEQ ID NO: 104861 - RNA, 32 nt, Homo Sapiens
ugaagaaacacuuuacaccucauaaaacaauu

SEQ ID NO: 104862 - RNA, 32 nt, Homo Sapiens
gcccggccgggcggggccccgaacgcacugga

SEQ ID NO: 104863 - RNA, 32 nt, Homo Sapiens
gucaggggaggugcuggugcagacgggcucag

SEQ ID NO: 104864 - RNA, 32 nt, Homo Sapiens
gcaugugcucugcgcucccugcaagcugagca

SEQ ID NO: 104865 - RNA, 32 nt, Homo Sapiens
cccucccggacggggcggcuggccgggcacag

SEQ ID NO: 104866 - RNA, 32 nt, Homo Sapiens
gacagaaagagauuuuuguuuucuguuuuaug

SEQ ID NO: 104867 - RNA, 32 nt, Homo Sapiens
ccaccuagguaguuuugaguugcuuugaaguu

SEQ ID NO: 104868 - RNA, 32 nt, Homo Sapiens
auguaaaaaaaguauuugauauuaaaaguuua

SEQ ID NO: 104869 - RNA, 32 nt, Homo Sapiens
cuuggauaucuaggggaaagcuguuuggcaga

SEQ ID NO: 104870 - RNA, 32 nt, Homo Sapiens
cugcugcucucucgcuggccccuggugaggac

SEQ ID NO: 104871 - RNA, 32 nt, Homo Sapiens
augugcaguuauuuaaauuuguuucugucaaa

SEQ ID NO: 104872 - RNA, 32 nt, Homo Sapiens
guuuaagaaagauagaugaagucauuugcaua

SEQ ID NO: 104873 - RNA, 32 nt, Homo Sapiens
ccaguccuugacucguccauggagcugagggu

SEQ ID NO: 104874 - RNA, 32 nt, Homo Sapiens
gcgccuguccagcuucaccgaccuccaugccg

SEQ ID NO: 104875 - RNA, 30 nt, Homo Sapiens
uguggcugcggcggcggcgcaggagcagaa

SEQ ID NO: 104876 - RNA, 32 nt, Homo Sapiens
aggcugcgccuuccccgcaccgggaccuucgc

SEQ ID NO: 104877 - RNA, 32 nt, Homo Sapiens
gcaggccgcaugccuagcgcucaaacaccuca

SEQ ID NO: 104878 - RNA, 31 nt, Homo Sapiens
cccgaccccagccccaccugagggugagcaa

SEQ ID NO: 104879 - RNA, 32 nt, Homo Sapiens
augaggucaggaguuugagaucagccuggcca

SEQ ID NO: 104880 - RNA, 32 nt, Homo Sapiens
aaaaaagguagcugugauacaaaccccaggac

SEQ ID NO: 104881 - RNA, 32 nt, Homo Sapiens
cugacucuugucaggggcuagugcagcuguga

SEQ ID NO: 104882 - RNA, 32 nt, Homo Sapiens
ccuggccuuuccuccgccgggcccgcauuuuu

SEQ ID NO: 104883 - RNA, 30 nt, Homo Sapiens
ugccacagcugugcugaggaggccggggac

SEQ ID NO: 104884 - RNA, 29 nt, Homo Sapiens
cucuagaagaauaaaacugaaaaacucua

SEQ ID NO: 104885 - RNA, 32 nt, Homo Sapiens
caccucuuaguugauuucuguuuucuucucuu

SEQ ID NO: 104886 - RNA, 32 nt, Homo Sapiens
auauaaauggugcuuuauuuaacagaauaccu

SEQ ID NO: 104887 - RNA, 32 nt, Homo Sapiens
ucagauauauugcaaagucuguauuccagcuc

SEQ ID NO: 104888 - RNA, 32 nt, Homo Sapiens
uuugccacuuggaccgucuugguuucagcgag

SEQ ID NO: 104889 - RNA, 32 nt, Homo Sapiens
ucuuguacuuuuugcauaauuuuguaagaguu

SEQ ID NO: 104890 - RNA, 32 nt, Homo Sapiens
ggcggcagcugcagccagaggcgugcggggac

SEQ ID NO: 104891 - RNA, 32 nt, Homo Sapiens
gcagugcaguggcacaagauuaugacucacug

SEQ ID NO: 104892 - RNA, 32 nt, Homo Sapiens
acuuuugugggccaauacuaagaauaacaaga

SEQ ID NO: 104893 - RNA, 32 nt, Homo Sapiens
caaugucacgggccccgccgcgcgccgcgagc

SEQ ID NO: 104894 - RNA, 32 nt, Homo Sapiens
gcaguucggccggggucuccccggcgcugccc

SEQ ID NO: 104895 - RNA, 32 nt, Homo Sapiens
aacccccguggcgggguccgcugcuggucuaa

SEQ ID NO: 104896 - RNA, 32 nt, Homo Sapiens
cgccgcggguggcaacagagagccccaagcaa

SEQ ID NO: 104897 - RNA, 32 nt, Homo Sapiens
aaauuaugacugaaagguuuauuaaaaugauu

SEQ ID NO: 104898 - RNA, 32 nt, Homo Sapiens
cgguuuuugcuguuuacccucuuggaugcugg

SEQ ID NO: 104899 - RNA, 32 nt, Homo Sapiens
gugaacauagcugggggaauuuuaaagguaug

SEQ ID NO: 104900 - RNA, 32 nt, Homo Sapiens
aauugauuuuauggagcuguaacuggccuuga

SEQ ID NO: 104901 - RNA, 29 nt, Homo Sapiens
ucaccaucguguuugugugggcagagccu

SEQ ID NO: 104902 - RNA, 32 nt, Homo Sapiens
gaucuguguuugagauuuuucuuuauuucuuu

SEQ ID NO: 104903 - RNA, 32 nt, Homo Sapiens
uuugaaaaacaaacagaaacccguguaucugg

SEQ ID NO: 104904 - RNA, 32 nt, Homo Sapiens
uuaaauuauaucuggaaaauagaguugauuua

SEQ ID NO: 104905 - RNA, 32 nt, Homo Sapiens
gaucucuauuuucucccuuugccaagguuaau

SEQ ID NO: 104906 - RNA, 32 nt, Homo Sapiens
uacuaaagagcagaagacagaagauacaaaaa

SEQ ID NO: 104907 - RNA, 32 nt, Homo Sapiens
accauugcccggcacuggcccgugcugccuga

SEQ ID NO: 104908 - RNA, 27 nt, Homo Sapiens
uaguagaaaauauuuguggaaucagau

SEQ ID NO: 104909 - RNA, 32 nt, Homo Sapiens
gaccgcagccgccgcccucccaggaccccgag

SEQ ID NO: 104910 - RNA, 32 nt, Homo Sapiens
cgugggcuuucugcagcucgcaaccggccucg

SEQ ID NO: 104911 - RNA, 32 nt, Homo Sapiens
ucgccgagccgcggccgcgggaaguucggcag

SEQ ID NO: 104912 - RNA, 32 nt, Homo Sapiens
cgcugcauggcccuggcccagcuccucgugga

SEQ ID NO: 104913 - RNA, 32 nt, Homo Sapiens
aaaacuuguuggaauuuuuacggcuuuugugu

SEQ ID NO: 104914 - RNA, 32 nt, Homo Sapiens
guauauuccagaaggaaaucauuuuaguuaug

SEQ ID NO: 104915 - RNA, 27 nt, Homo Sapiens
ggaguggucuucuucagccuguuuccc

SEQ ID NO: 104916 - RNA, 32 nt, Homo Sapiens
ggaugauuccuggucuccccagcccucuugac

SEQ ID NO: 104917 - RNA, 29 nt, Homo Sapiens
uguucuguuauccaauccgaaacacggaa

SEQ ID NO: 104918 - RNA, 32 nt, Homo Sapiens
agagcggagaaagccuauuuucuuuucguuua

SEQ ID NO: 104919 - RNA, 32 nt, Homo Sapiens
gaauauuuacuuuuagcucuggacaucauuac

SEQ ID NO: 104920 - RNA, 32 nt, Homo Sapiens
aaauuucuguuguuuaaggcacucaauauuuu

SEQ ID NO: 104921 - RNA, 32 nt, Homo Sapiens
uuuaguauucuacaguuuaaucaaauuacuga

SEQ ID NO: 104922 - RNA, 32 nt, Homo Sapiens
gggcgaagccagugcuugggcucugcugcugg

SEQ ID NO: 104923 - RNA, 32 nt, Homo Sapiens
acaacauacaguucaugacuagguuuaggaau

SEQ ID NO: 104924 - RNA, 32 nt, Homo Sapiens
ccggggugacgguccccccaccccucuccugc

SEQ ID NO: 104925 - RNA, 32 nt, Homo Sapiens
ugaaacugacuucuaggcuaugaaacuuacag

SEQ ID NO: 104926 - RNA, 32 nt, Homo Sapiens
gucaaaauaugaaccauuaugauucaaguuag

SEQ ID NO: 104927 - RNA, 32 nt, Homo Sapiens
gguguugacuugccucuuucagagauaaauga

SEQ ID NO: 104928 - RNA, 32 nt, Homo Sapiens
ccuggcucaggagagcagccgucugaaagaug

SEQ ID NO: 104929 - RNA, 32 nt, Homo Sapiens
uuggccauauccuaacaugcaagggccaagca

SEQ ID NO: 104930 - RNA, 32 nt, Homo Sapiens
uguacccucguagucaauaaggucuugccaca

SEQ ID NO: 104931 - RNA, 32 nt, Homo Sapiens
aggaaaugucuaaaagaucuccuuaaaccaga

SEQ ID NO: 104932 - RNA, 32 nt, Homo Sapiens
ccgccaggccgcgacuuggccccuguuuucca

SEQ ID NO: 104933 - RNA, 32 nt, Homo Sapiens
uacucccgguuggccugggggcggggacagag

SEQ ID NO: 104934 - RNA, 31 nt, Homo Sapiens
uggggcggacggcgagggaguccagagccuu

SEQ ID NO: 104935 - RNA, 32 nt, Homo Sapiens
ccuuguuaaguacuuacuaagugcaagacucc

SEQ ID NO: 104936 - RNA, 32 nt, Homo Sapiens
uuauguggugggaguucaaacacacaaagacc

SEQ ID NO: 104937 - RNA, 29 nt, Homo Sapiens
ccguuuccgguccgguggguacaagauga

SEQ ID NO: 104938 - RNA, 32 nt, Homo Sapiens
ggaugaccuggcaaauaagaucuugaauagcc

SEQ ID NO: 104939 - RNA, 32 nt, Homo Sapiens
aguauucuugaagggcuguuuggaccugcauu

SEQ ID NO: 104940 - RNA, 32 nt, Homo Sapiens
cccacacugagccagcaaguccugcuguccac

SEQ ID NO: 104941 - RNA, 32 nt, Homo Sapiens
gggacuugcgcggccguggcaccgcuggaggg

SEQ ID NO: 104942 - RNA, 32 nt, Homo Sapiens
uaacuggagcuuugggacgcacccuccacagu

SEQ ID NO: 104943 - RNA, 32 nt, Homo Sapiens
cagccagcaccagcgcauccacagcggcgaga

SEQ ID NO: 104944 - RNA, 32 nt, Homo Sapiens
agaaaagagaaucugauagucaacacuguuaa

SEQ ID NO: 104945 - RNA, 30 nt, Homo Sapiens
gaugugugcaaaacugcagaagcucacugc

SEQ ID NO: 104946 - RNA, 32 nt, Homo Sapiens
ugugugucuccaugcacaugcacgccgggauu

SEQ ID NO: 104947 - RNA, 32 nt, Homo Sapiens
gcuuauuaaaaguuucucaucagaauauuuua

SEQ ID NO: 104948 - RNA, 32 nt, Homo Sapiens
gacagucagaucuguggucacauccugcccaa

SEQ ID NO: 104949 - RNA, 32 nt, Homo Sapiens
cuucaaccacugggcaauugccuggcagaugc

SEQ ID NO: 104950 - RNA, 32 nt, Homo Sapiens
cuucuaaaacuuuccuaaaagugucugauguu

SEQ ID NO: 104951 - RNA, 32 nt, Homo Sapiens
aaggaagcggcugaggcgcuuggaacccgaaa

SEQ ID NO: 104952 - RNA, 32 nt, Homo Sapiens
uaauauuuuuaaaauacaaaggaucaccacaa

SEQ ID NO: 104953 - RNA, 32 nt, Homo Sapiens
aaaaaucuauaaguuguuagauuauuuguaaa

SEQ ID NO: 104954 - RNA, 32 nt, Homo Sapiens
agcugcucgauucccaggaucucggcugccuu

SEQ ID NO: 104955 - RNA, 32 nt, Homo Sapiens
uagcaaauauuuacaaauggucaggugauauu

SEQ ID NO: 104956 - RNA, 32 nt, Homo Sapiens
ucauggcagaggggcguggcguggugcuacug

SEQ ID NO: 104957 - RNA, 32 nt, Homo Sapiens
gcucgcgcucgagcugcggcgccggcuccugc

SEQ ID NO: 104958 - RNA, 32 nt, Homo Sapiens
cccagacaccuuugccacauccccucacagcu

SEQ ID NO: 104959 - RNA, 32 nt, Homo Sapiens
cggccgggccgcgcagcuccgccaacucccgg

SEQ ID NO: 104960 - RNA, 29 nt, Homo Sapiens
guaaccuaugaaguuuauuuucuauuuua

SEQ ID NO: 104961 - RNA, 32 nt, Homo Sapiens
acaugcaugcaggccaagacagcaaaugccag

SEQ ID NO: 104962 - RNA, 32 nt, Homo Sapiens
ggggagacgaggaggaggaggacaugacuuuu

SEQ ID NO: 104963 - RNA, 32 nt, Homo Sapiens
auucaucugguaagauucucagucacuggaca

SEQ ID NO: 104964 - RNA, 32 nt, Homo Sapiens
caauuguagaaauauugcugcauaaaauacaa

SEQ ID NO: 104965 - RNA, 32 nt, Homo Sapiens
ugagaaggacaagaccuguuuccuugagacuu

SEQ ID NO: 104966 - RNA, 32 nt, Homo Sapiens
uugcuuugcuguuugguguaguaaaucuaguu

SEQ ID NO: 104967 - RNA, 32 nt, Homo Sapiens
ucagguccauuuucccaacgucaggugugcau

SEQ ID NO: 104968 - RNA, 32 nt, Homo Sapiens
agaggcugccccaccccuccccauuagcuuuc

SEQ ID NO: 104969 - RNA, 32 nt, Homo Sapiens
ugcuggcggccgcgcugcugcuccgcgcgcac

SEQ ID NO: 104970 - RNA, 32 nt, Homo Sapiens
caaggccaguguuucugcaggggugggucaac

SEQ ID NO: 104971 - RNA, 32 nt, Homo Sapiens
uuggccugugcugcaugguuauauacuccugg

SEQ ID NO: 104972 - RNA, 32 nt, Homo Sapiens
cccuagaaaugcucgaaccaggacggcuccug

SEQ ID NO: 104973 - RNA, 32 nt, Homo Sapiens
gcagguagccggccggccgggggucgcgggua

SEQ ID NO: 104974 - RNA, 32 nt, Homo Sapiens
ggaugccucuacuagacaaggcacaccagaaa

SEQ ID NO: 104975 - RNA, 32 nt, Homo Sapiens
gggcgauuacaauccaauuaccuauugucgac

SEQ ID NO: 104976 - RNA, 32 nt, Homo Sapiens
gccaagaagaugcuuuuagaagaaauuaaagc

SEQ ID NO: 104977 - RNA, 32 nt, Homo Sapiens
cccaggauucccccaacacacguucuuuucua

SEQ ID NO: 104978 - RNA, 32 nt, Homo Sapiens
gaaacgcaagcugcagcugggccugcaguucc

SEQ ID NO: 104979 - RNA, 32 nt, Homo Sapiens
aauuuaaaaaauuuaauuuuuaaaauaggaaa

SEQ ID NO: 104980 - RNA, 32 nt, Homo Sapiens
aaagggcucgggcauuuguagaugccuccuuc

SEQ ID NO: 104981 - RNA, 32 nt, Homo Sapiens
ggguggcguggcuacagccugacccaugggca

SEQ ID NO: 104982 - RNA, 31 nt, Homo Sapiens
aucuuggucagggcuggauagauuaucuaag

SEQ ID NO: 104983 - RNA, 32 nt, Homo Sapiens
ucuuaugcuaugauuguuauaugugagcauua

SEQ ID NO: 104984 - RNA, 32 nt, Homo Sapiens
ucagcaagggagccauacauuuuuguaacauu

SEQ ID NO: 104985 - RNA, 32 nt, Homo Sapiens
gacucugugggcucugcguggccgggccuugc

SEQ ID NO: 104986 - RNA, 32 nt, Homo Sapiens
caagccaagcucccaaccuuuagcagcuucua

SEQ ID NO: 104987 - RNA, 32 nt, Homo Sapiens
agcgggcggagaggaaaggccgcucaguaagu

SEQ ID NO: 104988 - RNA, 32 nt, Homo Sapiens
ccccaaaaucuuguauuuuuuauagcaucuuu

SEQ ID NO: 104989 - RNA, 32 nt, Homo Sapiens
gacaucaagaagggagacacuccaucacaguc

SEQ ID NO: 104990 - RNA, 32 nt, Homo Sapiens
uuugccuuggagaagagacugauaaaaccaag

SEQ ID NO: 104991 - RNA, 32 nt, Homo Sapiens
ccccaggccgcuccucgcucccgccccucgag

SEQ ID NO: 104992 - RNA, 32 nt, Homo Sapiens
aacuauuuucuuucuucaccagauuuuguuuu

SEQ ID NO: 104993 - RNA, 32 nt, Homo Sapiens
uaaaauaaaaauuuaauucugguuuuucugau

SEQ ID NO: 104994 - RNA, 32 nt, Homo Sapiens
gaauguugacccucacagggagggauaauuua

SEQ ID NO: 104995 - RNA, 32 nt, Homo Sapiens
guugaggggaaggcuuacacagacacauucuu

SEQ ID NO: 104996 - RNA, 32 nt, Homo Sapiens
gggagagugggaaggaggaauggaaaaccguc

SEQ ID NO: 104997 - RNA, 32 nt, Homo Sapiens
cggauggacaacauuuuaugacaaccucagau

SEQ ID NO: 104998 - RNA, 32 nt, Homo Sapiens
aacuaauuuuuaaaacaaaacaccuuaaaacu

SEQ ID NO: 104999 - RNA, 32 nt, Homo Sapiens
gcuguccagggccagcucuugccucccggcgg

SEQ ID NO: 105000 - RNA, 32 nt, Homo Sapiens
auaucaaaaggugcuaaaaugauucaauuugc

SEQ ID NO: 105001 - RNA, 32 nt, Homo Sapiens
ccugaccagcaccccaccaaguccucaguaag

SEQ ID NO: 105002 - RNA, 32 nt, Homo Sapiens
guaaauagauguuugcuaggcuuguugaaucu

SEQ ID NO: 105003 - RNA, 32 nt, Homo Sapiens
cggugcgcugggagcugcuggugcugcugcug

SEQ ID NO: 105004 - RNA, 32 nt, Homo Sapiens
ugaugcucccagcccacccccaaacagacaca

SEQ ID NO: 105005 - RNA, 32 nt, Homo Sapiens
aagacaggguggcaagucucaacaaggcgggc

SEQ ID NO: 105006 - RNA, 32 nt, Homo Sapiens
aaaauacaaugcaaaacaaaauaaugaaguaa

SEQ ID NO: 105007 - RNA, 32 nt, Homo Sapiens
aggaugguucagcccagcaccauccaaagggu

SEQ ID NO: 105008 - RNA, 31 nt, Homo Sapiens
caaucgguggugccucucagagaccuuuccc

SEQ ID NO: 105009 - RNA, 32 nt, Homo Sapiens
gaaaggcagacacaccgcggccaggcacccau

SEQ ID NO: 105010 - RNA, 32 nt, Homo Sapiens
cugggcugcgcagcccccggcgccacggccac

SEQ ID NO: 105011 - RNA, 32 nt, Homo Sapiens
ucccgucaccgccgcuucucagcgcucguccc

SEQ ID NO: 105012 - RNA, 32 nt, Homo Sapiens
agucaaggugucagacaagagcuuugagacaa

SEQ ID NO: 105013 - RNA, 29 nt, Homo Sapiens
auauugaaugaauccauuuuaacauaaaa

SEQ ID NO: 105014 - RNA, 32 nt, Homo Sapiens
uuuggucgagcggagggcgcgcagcuccaccg

SEQ ID NO: 105015 - RNA, 32 nt, Homo Sapiens
cuagcagucaacaugaaggcucucauuguucu

SEQ ID NO: 105016 - RNA, 32 nt, Homo Sapiens
ccaaagaggaagaugcaaauaggcuuagggag

SEQ ID NO: 105017 - RNA, 32 nt, Homo Sapiens
gguuuaaugaagaaaaucaucuccaucccagc

SEQ ID NO: 105018 - RNA, 32 nt, Homo Sapiens
uaucuuuaggcgugguggagggggccagaacu

SEQ ID NO: 105019 - RNA, 32 nt, Homo Sapiens
ugcaaaaauaacaaaauaguuacugugcccac

SEQ ID NO: 105020 - RNA, 32 nt, Homo Sapiens
agggauagagauuaaaguguugugaaaggcgu

SEQ ID NO: 105021 - RNA, 32 nt, Homo Sapiens
aagccaggcccggcccuggccuuugaggagaa

SEQ ID NO: 105022 - RNA, 32 nt, Homo Sapiens
ggccucuuccuccucagggaccucugacugcu

SEQ ID NO: 105023 - RNA, 31 nt, Homo Sapiens
ucgucugccugcccccggccccgcgccccua

SEQ ID NO: 105024 - RNA, 32 nt, Homo Sapiens
ggugggagaaguagcuuuuguuguguacccaa

SEQ ID NO: 105025 - RNA, 32 nt, Homo Sapiens
gcccacuccccugcugucgcgcggcggcggcg

SEQ ID NO: 105026 - RNA, 32 nt, Homo Sapiens
ggaaaaggaaacacuaugaggacccagguggc

SEQ ID NO: 105027 - RNA, 32 nt, Homo Sapiens
ugagaggagggagaugaaaacacacccaccuc

SEQ ID NO: 105028 - RNA, 32 nt, Homo Sapiens
cugaacccccuuuuccuugagagacgaguugg

SEQ ID NO: 105029 - RNA, 32 nt, Homo Sapiens
aaaugugaaugaagcuaaugugaaugugagug

SEQ ID NO: 105030 - RNA, 32 nt, Homo Sapiens
gauuuaaagcaaguagguuaugcugaaguaua

SEQ ID NO: 105031 - RNA, 32 nt, Homo Sapiens
aacacagugagcggcagcgggcgucccgaagg

SEQ ID NO: 105032 - RNA, 32 nt, Homo Sapiens
guacaccuugucaucaucacccacugcacugg

SEQ ID NO: 105033 - RNA, 32 nt, Homo Sapiens
uucuggcuccaaaugguagugauuccaaauaa

SEQ ID NO: 105034 - RNA, 32 nt, Homo Sapiens
cacgguuaguugccuccaugggugcggaccca

SEQ ID NO: 105035 - RNA, 32 nt, Homo Sapiens
uguucacuugaggcuuuccccagcuggugugu

SEQ ID NO: 105036 - RNA, 32 nt, Homo Sapiens
aguacaacaaaaaaguggaagaguaggauaaa

SEQ ID NO: 105037 - RNA, 31 nt, Homo Sapiens
ucaugucauuugacauuuuuuguuugcugaa

SEQ ID NO: 105038 - RNA, 32 nt, Homo Sapiens
ugccagcauauuucuuuuuggcuccuuaaauu

SEQ ID NO: 105039 - RNA, 32 nt, Homo Sapiens
uaucacagugauuuaguauuuggacuauagau

SEQ ID NO: 105040 - RNA, 32 nt, Homo Sapiens
gcacauuugaaauaaaccacgguugcagccaa

SEQ ID NO: 105041 - RNA, 32 nt, Homo Sapiens
uuuuagaaaaggaaaacgugaacaaacuuaga

SEQ ID NO: 105042 - RNA, 32 nt, Homo Sapiens
gcuccuggaccggggggcgcggagguuggaga

SEQ ID NO: 105043 - RNA, 32 nt, Homo Sapiens
uguguguguuguuugucuuugaugucaugguc

SEQ ID NO: 105044 - RNA, 31 nt, Homo Sapiens
agaggcuagccccagggugagcagggcccuc

SEQ ID NO: 105045 - RNA, 32 nt, Homo Sapiens
gugagaggggaaggggcgccaggcgagcaccc

SEQ ID NO: 105046 - RNA, 28 nt, Homo Sapiens
uauagucugugaauuauguguuuuguau

SEQ ID NO: 105047 - RNA, 32 nt, Homo Sapiens
cgcgcccagcccggcgucccgagcagcgcagg

SEQ ID NO: 105048 - RNA, 32 nt, Homo Sapiens
aagcauuuuuaaaguuucuuuucuaauuuuac

SEQ ID NO: 105049 - RNA, 32 nt, Homo Sapiens
gugcauacaugcggggaccccagacugucagc

SEQ ID NO: 105050 - RNA, 32 nt, Homo Sapiens
auuugucauaugaaugaaaaaauaaacgagug

SEQ ID NO: 105051 - RNA, 32 nt, Homo Sapiens
uuucuuacacugggccauuuuagacccccagg

SEQ ID NO: 105052 - RNA, 32 nt, Homo Sapiens
ccacccugcccggggagggaggaggagcucug

SEQ ID NO: 105053 - RNA, 32 nt, Homo Sapiens
uuuccuuccuggcccucgggggccucucgagg

SEQ ID NO: 105054 - RNA, 32 nt, Homo Sapiens
guauuuaaugcaauuuuuccugcucucaacau

SEQ ID NO: 105055 - RNA, 32 nt, Homo Sapiens
ccuguauguauucaucuaagcauuugggcauu

SEQ ID NO: 105056 - RNA, 32 nt, Homo Sapiens
gggucgcugcagacgcgccaauaaaaacgcac

SEQ ID NO: 105057 - RNA, 32 nt, Homo Sapiens
ggagggccagcaugccccgacugcugcacccc

SEQ ID NO: 105058 - RNA, 32 nt, Homo Sapiens
ucugggaacugggacagugggagagacggaua

SEQ ID NO: 105059 - RNA, 32 nt, Homo Sapiens
uaccucccgcaccuccucccuggggcagcugc

SEQ ID NO: 105060 - RNA, 32 nt, Homo Sapiens
cagaagaggaagagccgggggcugccguagcc

SEQ ID NO: 105061 - RNA, 32 nt, Homo Sapiens
agauguaaaaauuugaguucaucuuuggccaa

SEQ ID NO: 105062 - RNA, 32 nt, Homo Sapiens
uugacagaaggaguucccuucuccuucggagu

SEQ ID NO: 105063 - RNA, 32 nt, Homo Sapiens
cauacacuuuuguaaagaaguauauuuuuaug

SEQ ID NO: 105064 - RNA, 32 nt, Homo Sapiens
guauugccaucggguugcauggaaguuuuauu

SEQ ID NO: 105065 - RNA, 31 nt, Homo Sapiens
gcugcuauugaacacggcagagccuguuggu

SEQ ID NO: 105066 - RNA, 32 nt, Homo Sapiens
gugcaacugcagccagcucaugccuucaagag

SEQ ID NO: 105067 - RNA, 32 nt, Homo Sapiens
ugagcuccauguuucuuuaguuucacaaaaau

SEQ ID NO: 105068 - RNA, 32 nt, Homo Sapiens
uaguuuuuucuuccuugucacugcuguuauau

SEQ ID NO: 105069 - RNA, 32 nt, Homo Sapiens
cccugccccuggagguugucuucaacugugga

SEQ ID NO: 105070 - RNA, 32 nt, Homo Sapiens
ucuucuuugcugugauauaucuccagacuauu

SEQ ID NO: 105071 - RNA, 32 nt, Homo Sapiens
ggugggugaguguguccccucccacacugcuc

SEQ ID NO: 105072 - RNA, 32 nt, Homo Sapiens
ucugcagccagcaagcugggacuggcaggaaa

SEQ ID NO: 105073 - RNA, 32 nt, Homo Sapiens
uuuuuucuuuauuuuucuuuuacauuagaagu

SEQ ID NO: 105074 - RNA, 32 nt, Homo Sapiens
cccccucgccuuccccaccuccccaccgagaa

SEQ ID NO: 105075 - RNA, 32 nt, Homo Sapiens
acaaggcccaucuccuucccuccucaagaagc

SEQ ID NO: 105076 - RNA, 32 nt, Homo Sapiens
ccaagccucagccccagucccagccacauguc

SEQ ID NO: 105077 - RNA, 32 nt, Homo Sapiens
guuaccucagaauggcaagagcauggauggcu

SEQ ID NO: 105078 - RNA, 32 nt, Homo Sapiens
uggucuuagaauuuuucuuuuauggucucaua

SEQ ID NO: 105079 - RNA, 32 nt, Homo Sapiens
aacgucucacuuuaaauuuuuguuuucuuuuc

SEQ ID NO: 105080 - RNA, 31 nt, Homo Sapiens
uggaaucuugguauugaugaguuacagugau

SEQ ID NO: 105081 - RNA, 32 nt, Homo Sapiens
aaguuucccgggcggcagcggcggcugcgccu

SEQ ID NO: 105082 - RNA, 32 nt, Homo Sapiens
aaaacugaaacacacaaacacacacacacaca

SEQ ID NO: 105083 - RNA, 32 nt, Homo Sapiens
gaccuacuugugauauuuaaaugaugcaauaa

SEQ ID NO: 105084 - RNA, 32 nt, Homo Sapiens
ggcggagcgcgggcggccggcgaaacuccaag

SEQ ID NO: 105085 - RNA, 32 nt, Homo Sapiens
cccagaguucccucacugaagaucugagcaug

SEQ ID NO: 105086 - RNA, 32 nt, Homo Sapiens
cccucaggcuugaggggugcuuggggccaggc

SEQ ID NO: 105087 - RNA, 31 nt, Homo Sapiens
agaauaaccaagauuaccugaguccaaguuu

SEQ ID NO: 105088 - RNA, 32 nt, Homo Sapiens
gcauggaaaaugugggaauuaagcaaaaucaa

SEQ ID NO: 105089 - RNA, 32 nt, Homo Sapiens
aggguagcacgcugagcugaaggcugugcgga

SEQ ID NO: 105090 - RNA, 32 nt, Homo Sapiens
gcucacgggucguugaggccggugacaugucu

SEQ ID NO: 105091 - RNA, 32 nt, Homo Sapiens
caauauacuguacauuugauaauaaaauaaua

SEQ ID NO: 105092 - RNA, 32 nt, Homo Sapiens
aacaagagauaaaauuguuacucacacuuaug

SEQ ID NO: 105093 - RNA, 32 nt, Homo Sapiens
gauugucgugaacacuuuaggccauuuguuac

SEQ ID NO: 105094 - RNA, 32 nt, Homo Sapiens
aauaacaagaauaaacaacuuugugaaauauc

SEQ ID NO: 105095 - RNA, 32 nt, Homo Sapiens
auuuacauaaauuuauaguguaucuaugccuu

SEQ ID NO: 105096 - RNA, 32 nt, Homo Sapiens
cauccgagccagcuaugcugcagaagagcgua

SEQ ID NO: 105097 - RNA, 32 nt, Homo Sapiens
ucuuccauuucuuuuucuuuguucccagccau

SEQ ID NO: 105098 - RNA, 32 nt, Homo Sapiens
guuuuaguuuuaucuugcuuuaaccaaauaug

SEQ ID NO: 105099 - RNA, 32 nt, Homo Sapiens
uaucuuugacauuuuuuaaaguguguucauuu

SEQ ID NO: 105100 - RNA, 31 nt, Homo Sapiens
aaagcaauauauuguaacagaauguauaaau

SEQ ID NO: 105101 - RNA, 32 nt, Homo Sapiens
aaguaaucacagugcauuauuccacuaguucu

SEQ ID NO: 105102 - RNA, 29 nt, Homo Sapiens
gcaauguuagugauguuuuaaaaugugau

SEQ ID NO: 105103 - RNA, 32 nt, Homo Sapiens
gacaaaaaccaaucaguuuuuguagcaacuga

SEQ ID NO: 105104 - RNA, 32 nt, Homo Sapiens
agcugucccauggcacuucccgggccggacag

SEQ ID NO: 105105 - RNA, 32 nt, Homo Sapiens
aaaaaugaucauuguuuauuugaagcuugaug

SEQ ID NO: 105106 - RNA, 32 nt, Homo Sapiens
cuggcgcucuagcccacggaguugguuaacuc

SEQ ID NO: 105107 - RNA, 32 nt, Homo Sapiens
auuaauccucugugaauuuucuguaaauaaaa

SEQ ID NO: 105108 - RNA, 32 nt, Homo Sapiens
uaauucugaugaucuaaagauaaugucuuaga

SEQ ID NO: 105109 - RNA, 32 nt, Homo Sapiens
ucugucucuugcuuucaggcuccucccuccca

SEQ ID NO: 105110 - RNA, 32 nt, Homo Sapiens
agagcaaaaacuguaucauuucuuauaugauu

SEQ ID NO: 105111 - RNA, 30 nt, Homo Sapiens
uuguaaugcugaaucacgagaauggaaaga

SEQ ID NO: 105112 - RNA, 32 nt, Homo Sapiens
aacgguggauguggaacacacaggaccagaau

SEQ ID NO: 105113 - RNA, 32 nt, Homo Sapiens
cugaaggcaacgcccucuugcacccucugugc

SEQ ID NO: 105114 - RNA, 32 nt, Homo Sapiens
ugcaacuauuuucucccauuucugaguugucu

SEQ ID NO: 105115 - RNA, 32 nt, Homo Sapiens
uacucuugcgaccauuaggcucuucuugggug

SEQ ID NO: 105116 - RNA, 31 nt, Homo Sapiens
guuauacuugguaauauagaggagaugacca

SEQ ID NO: 105117 - RNA, 32 nt, Homo Sapiens
gucagaagugaagcagcgugcguggggccgag

SEQ ID NO: 105118 - RNA, 32 nt, Homo Sapiens
uacuuuuggauguuaaauucauuggaaaaaca

SEQ ID NO: 105119 - RNA, 32 nt, Homo Sapiens
cgccccuccgcuggggcccacccccuucgugc

SEQ ID NO: 105120 - RNA, 32 nt, Homo Sapiens
gagauuuauuaugagccaaauaugagugacca

SEQ ID NO: 105121 - RNA, 32 nt, Homo Sapiens
ggaaaggacaauuuaauauaaauuucuguuug

SEQ ID NO: 105122 - RNA, 32 nt, Homo Sapiens
ucuagugucacuuuuuacuuccuucugggugg

SEQ ID NO: 105123 - RNA, 32 nt, Homo Sapiens
gcauuuuuacuuuugauagauauuggcaaguu

SEQ ID NO: 105124 - RNA, 32 nt, Homo Sapiens
aacuuuauuucugcuuaaacaauaaauacacc

SEQ ID NO: 105125 - RNA, 32 nt, Homo Sapiens
ggcacuggagcugggaggucucgucccagccc

SEQ ID NO: 105126 - RNA, 32 nt, Homo Sapiens
ugaaugccgaagacagaagauuuggaugauac

SEQ ID NO: 105127 - RNA, 32 nt, Homo Sapiens
gguagauacuauuaugguacuagaauuggaga

SEQ ID NO: 105128 - RNA, 32 nt, Homo Sapiens
auuagggagcuuuuauuuuaaauugaacuuua

SEQ ID NO: 105129 - RNA, 32 nt, Homo Sapiens
uccaaucugaagauugcgguuuacagcuaucg

SEQ ID NO: 105130 - RNA, 32 nt, Homo Sapiens
cuccuccuuucccagcccgccgcggccauggc

SEQ ID NO: 105131 - RNA, 32 nt, Homo Sapiens
gggcagggacgggguacagaggauaguguggg

SEQ ID NO: 105132 - RNA, 32 nt, Homo Sapiens
aaauuaaacacacacacacacacacacacaua

SEQ ID NO: 105133 - RNA, 32 nt, Homo Sapiens
gugauaguguacaccaaaauuaaaagaccuug

SEQ ID NO: 105134 - RNA, 32 nt, Homo Sapiens
caugaaacccucacuguccagcucccguccug

SEQ ID NO: 105135 - RNA, 32 nt, Homo Sapiens
ugucugauccugagacaccuguagauugaguu

SEQ ID NO: 105136 - RNA, 32 nt, Homo Sapiens
gugggcacugcggcugucuccuugaagguucu

SEQ ID NO: 105137 - RNA, 32 nt, Homo Sapiens
gccacuaaaaagcauccugcugcugcggagca

SEQ ID NO: 105138 - RNA, 32 nt, Homo Sapiens
cccccuccgagcccuccuucccggcccaaccu

SEQ ID NO: 105139 - RNA, 32 nt, Homo Sapiens
caaaaccacagugagauauugccucauaggau

SEQ ID NO: 105140 - RNA, 32 nt, Homo Sapiens
ggaggaggaggaggaguucguggaugacacac

SEQ ID NO: 105141 - RNA, 32 nt, Homo Sapiens
cugccccuggggucucaggugugugggcccug

SEQ ID NO: 105142 - RNA, 32 nt, Homo Sapiens
cccuccccaucccagcgcaucgcgucuccgcc

SEQ ID NO: 105143 - RNA, 32 nt, Homo Sapiens
ugcccuggggcagcuuccugggcccgcugcgc

SEQ ID NO: 105144 - RNA, 32 nt, Homo Sapiens
aaagagaagauaaagaacagaacagccaauga

SEQ ID NO: 105145 - RNA, 32 nt, Homo Sapiens
ucugucuuuucuccaguuugagcggggguguc

SEQ ID NO: 105146 - RNA, 30 nt, Homo Sapiens
gaaagacagaagcuuaaaaucugugaagaa

SEQ ID NO: 105147 - RNA, 32 nt, Homo Sapiens
cugugauucuguuuuccaacaccuugccucuu

SEQ ID NO: 105148 - RNA, 32 nt, Homo Sapiens
aaaacaagcugauaugugccuguuucuggaca

SEQ ID NO: 105149 - RNA, 32 nt, Homo Sapiens
cccguugcugcuccuugguuauagaacauggu

SEQ ID NO: 105150 - RNA, 32 nt, Homo Sapiens
gggagucacuacggugaugcagcucccgugga

SEQ ID NO: 105151 - RNA, 32 nt, Homo Sapiens
cugcuucucauuuguuucugcacuaugucaaa

SEQ ID NO: 105152 - RNA, 32 nt, Homo Sapiens
cugaaguaaacacuuuaguugcuuucagggau

SEQ ID NO: 105153 - RNA, 32 nt, Homo Sapiens
uacacgaggauuucagugauacaugcugccuc

SEQ ID NO: 105154 - RNA, 32 nt, Homo Sapiens
uaugggauucucugaaaacagcaaagacaguc

SEQ ID NO: 105155 - RNA, 32 nt, Homo Sapiens
acugauuucagguaaaaacaauaauugaagau

SEQ ID NO: 105156 - RNA, 32 nt, Homo Sapiens
auugcugagaaccugguaccaaaccucuucuu

SEQ ID NO: 105157 - RNA, 32 nt, Homo Sapiens
uacaauguaauaugcucaacuuucucaauuuu

SEQ ID NO: 105158 - RNA, 32 nt, Homo Sapiens
aaagaauggaagcucagaagggagaaucacac

SEQ ID NO: 105159 - RNA, 32 nt, Homo Sapiens
auggaaccuuggauguuugaggggugguugua

SEQ ID NO: 105160 - RNA, 32 nt, Homo Sapiens
aguagcagcuuccugcccuccuucuuggagau

SEQ ID NO: 105161 - RNA, 32 nt, Homo Sapiens
acguccugaaggaaaccaucgacugagcggag

SEQ ID NO: 105162 - RNA, 32 nt, Homo Sapiens
uaucaucucaucaacgaggccuggacaaacaa

SEQ ID NO: 105163 - RNA, 32 nt, Homo Sapiens
gcgucggagaugaggccccggaugcugccagu

SEQ ID NO: 105164 - RNA, 29 nt, Homo Sapiens
gaagcagggggacagcaagggacgcucag

SEQ ID NO: 105165 - RNA, 32 nt, Homo Sapiens
uccucccccacuucuugaauaaaauaauuuaa

SEQ ID NO: 105166 - RNA, 32 nt, Homo Sapiens
auugaaaagcaaacagagcuuaauugacugga

SEQ ID NO: 105167 - RNA, 32 nt, Homo Sapiens
uauuugagaguagaagaaucauuccacaaacu

SEQ ID NO: 105168 - RNA, 32 nt, Homo Sapiens
ggaagcuucaugcccacggguucugccagccc

SEQ ID NO: 105169 - RNA, 32 nt, Homo Sapiens
agagccaguguggucaguauuccaaacucucc

SEQ ID NO: 105170 - RNA, 32 nt, Homo Sapiens
uuuccggggcacaaguuuuuuuguucauacuu

SEQ ID NO: 105171 - RNA, 32 nt, Homo Sapiens
cucucuguggggucuuuuuuugugucucuacu

SEQ ID NO: 105172 - RNA, 32 nt, Homo Sapiens
ugaugggggauagggaggggacacccacaaac

SEQ ID NO: 105173 - RNA, 32 nt, Homo Sapiens
aggccaucuugcuuugucccaacaguacauuu

SEQ ID NO: 105174 - RNA, 32 nt, Homo Sapiens
gguagggcgcgguggacucugccccuguaacc

SEQ ID NO: 105175 - RNA, 32 nt, Homo Sapiens
cucaauaaauacuuagucaucgaugcaaaaaa

SEQ ID NO: 105176 - RNA, 32 nt, Homo Sapiens
uauggaaauaccauguaauagggagaguugaa

SEQ ID NO: 105177 - RNA, 32 nt, Homo Sapiens
agagggagcucuuuggccagggguguucagau

SEQ ID NO: 105178 - RNA, 32 nt, Homo Sapiens
cgccuguaaucccagcacuuugggagggggag

SEQ ID NO: 105179 - RNA, 32 nt, Homo Sapiens
cgucuccaggccccaaacggccuccggucggu

SEQ ID NO: 105180 - RNA, 32 nt, Homo Sapiens
auuucucuugcucaccaagaaguaacaaaagu

SEQ ID NO: 105181 - RNA, 32 nt, Homo Sapiens
uggaggaaaggaguucuuaauuaaaaugaaca

SEQ ID NO: 105182 - RNA, 32 nt, Homo Sapiens
cacugugguugcccucauccacaaugucccca

SEQ ID NO: 105183 - RNA, 32 nt, Homo Sapiens
aguaucggcccggcgcagccgcggcgggcgag

SEQ ID NO: 105184 - RNA, 32 nt, Homo Sapiens
ucuuuucucaguacaacagccauagugauucu

SEQ ID NO: 105185 - RNA, 32 nt, Homo Sapiens
aaauugcgucuuccccaaaaaagauacguugu

SEQ ID NO: 105186 - RNA, 32 nt, Homo Sapiens
uuauauacuuaucccuauuaaaacaggcaguu

SEQ ID NO: 105187 - RNA, 32 nt, Homo Sapiens
gugggaaucugugcagggcccaggcgcauuuc

SEQ ID NO: 105188 - RNA, 32 nt, Homo Sapiens
gugccuuacgcuacaucuuguuuucuaggaag

SEQ ID NO: 105189 - RNA, 32 nt, Homo Sapiens
ccccauccagguagcggcggcuccucagucga

SEQ ID NO: 105190 - RNA, 32 nt, Homo Sapiens
gggcccgcugcggccgcaccgugaggggagga

SEQ ID NO: 105191 - RNA, 32 nt, Homo Sapiens
gcugggauauucuucuucuccugcccuuggac

SEQ ID NO: 105192 - RNA, 32 nt, Homo Sapiens
caguucuuaaaccaaagguccauuaugcuucu

SEQ ID NO: 105193 - RNA, 32 nt, Homo Sapiens
aaggaaaacuuuucuuuuuuaaaauaaauuuu

SEQ ID NO: 105194 - RNA, 29 nt, Homo Sapiens
auagauggaaagcaggcgcugcccucacc

SEQ ID NO: 105195 - RNA, 32 nt, Homo Sapiens
ucccgcuccaugaggcaacaugguacaaauua

SEQ ID NO: 105196 - RNA, 32 nt, Homo Sapiens
uacuaacauauuguuugucauggcauccgaga

SEQ ID NO: 105197 - RNA, 32 nt, Homo Sapiens
gccuggugacuucucccuccccggccucaggu

SEQ ID NO: 105198 - RNA, 32 nt, Homo Sapiens
gggcacaguuuggaggccuugguucagccacu

SEQ ID NO: 105199 - RNA, 32 nt, Homo Sapiens
aauaaauggaaauuauaaagccuucuugucag

SEQ ID NO: 105200 - RNA, 32 nt, Homo Sapiens
guaucuagaacuauagcuaaaaguaucaaugu

SEQ ID NO: 105201 - RNA, 32 nt, Homo Sapiens
acaaaaccagcuugcuuuguugcacgccuggg

SEQ ID NO: 105202 - RNA, 32 nt, Homo Sapiens
augugccuaacgauuuugaugaaaaguuuccc

SEQ ID NO: 105203 - RNA, 32 nt, Homo Sapiens
aagaggaggaggaggagccgugaugggcuagc

SEQ ID NO: 105204 - RNA, 32 nt, Homo Sapiens
cugcagccugagaggcuggcccggggaggagu

SEQ ID NO: 105205 - RNA, 32 nt, Homo Sapiens
gcuccugcgcucccgggcggccucgggcccag

SEQ ID NO: 105206 - RNA, 32 nt, Homo Sapiens
aguuuucugugcuacaugugcaauauuuguua

SEQ ID NO: 105207 - RNA, 32 nt, Homo Sapiens
acucccaguuuagagaaaauucaaggaaugga

SEQ ID NO: 105208 - RNA, 32 nt, Homo Sapiens
auuuucaccauaccuuuuuuuauaucacggua

SEQ ID NO: 105209 - RNA, 32 nt, Homo Sapiens
ucaacggcuucccaucggaggugguuggugca

SEQ ID NO: 105210 - RNA, 32 nt, Homo Sapiens
aauaagauguguauguaaaauaauucaucugu

SEQ ID NO: 105211 - RNA, 32 nt, Homo Sapiens
ccuuuuccgcaugccuccugccuccugggcua

SEQ ID NO: 105212 - RNA, 32 nt, Homo Sapiens
auggcgucacucccuagcucugucccagcuuu

SEQ ID NO: 105213 - RNA, 32 nt, Homo Sapiens
agcgcccccugcggcccgggccguggccgaug

SEQ ID NO: 105214 - RNA, 32 nt, Homo Sapiens
auguggacaauguagugaauauggaaaaaggu

SEQ ID NO: 105215 - RNA, 32 nt, Homo Sapiens
gagaaguagauggcaaugguuaugauaaaaag

SEQ ID NO: 105216 - RNA, 32 nt, Homo Sapiens
cuccgcuuccucuccuaggcgacgagacccag

SEQ ID NO: 105217 - RNA, 29 nt, Homo Sapiens
ggaaggaugaagaaaaggaagaaggagga

SEQ ID NO: 105218 - RNA, 32 nt, Homo Sapiens
gccucauccagggccacguucuccuggcccuu

SEQ ID NO: 105219 - RNA, 32 nt, Homo Sapiens
uuuguaugaaugguuuguauuguacauaguuu

SEQ ID NO: 105220 - RNA, 32 nt, Homo Sapiens
ggcacgagggaugugaggagcggcggguuccg

SEQ ID NO: 105221 - RNA, 32 nt, Homo Sapiens
uguugcaaggaagagauuugugauaguauuuu

SEQ ID NO: 105222 - RNA, 32 nt, Homo Sapiens
uggugaugcagaggcaggcauucugugagaua

SEQ ID NO: 105223 - RNA, 32 nt, Homo Sapiens
gcuuacaauauuaagaagcuggggacuuuuuu

SEQ ID NO: 105224 - RNA, 32 nt, Homo Sapiens
ugcuggcaggcagaaacccacccccaugccag

SEQ ID NO: 105225 - RNA, 32 nt, Homo Sapiens
aacgucucugcguaaucaggacuugcaacacc

SEQ ID NO: 105226 - RNA, 31 nt, Homo Sapiens
aagaagggaaccgcggggacggccuuucccc

SEQ ID NO: 105227 - RNA, 32 nt, Homo Sapiens
cagcgcugaggguggguugggcaacagccuga

SEQ ID NO: 105228 - RNA, 32 nt, Homo Sapiens
ucacgucuagaaggcucuccccugcccaucag

SEQ ID NO: 105229 - RNA, 32 nt, Homo Sapiens
ccauuuucuugucuguucugccgcuguguggg

SEQ ID NO: 105230 - RNA, 32 nt, Homo Sapiens
gggguggcauuugcauccugcuguggaacaca

SEQ ID NO: 105231 - RNA, 32 nt, Homo Sapiens
gccgacugcccuucugcccccaagauguggca

SEQ ID NO: 105232 - RNA, 32 nt, Homo Sapiens
accugaaacuggguaauuuauaaguaaagaaa

SEQ ID NO: 105233 - RNA, 32 nt, Homo Sapiens
ccaugucaaggaagaaaggaaggaaggaaggc

SEQ ID NO: 105234 - RNA, 32 nt, Homo Sapiens
auugguuuuaucgcagauuuuuauguuuugaa

SEQ ID NO: 105235 - RNA, 31 nt, Homo Sapiens
gagccaaauucaucuuugccagaaaagaaau

SEQ ID NO: 105236 - RNA, 32 nt, Homo Sapiens
cuggguggcaugucucucucuaccucauuuuu

SEQ ID NO: 105237 - RNA, 32 nt, Homo Sapiens
auaaaaagguugguggaucguuuuccaaaaaa

SEQ ID NO: 105238 - RNA, 32 nt, Homo Sapiens
aauucaucuauuuauauucauuuugaagauuu

SEQ ID NO: 105239 - RNA, 32 nt, Homo Sapiens
uugaaaagcauaaaaaucaugccuuuauaauc

SEQ ID NO: 105240 - RNA, 32 nt, Homo Sapiens
cccgaacccagcugccgucaacacaagcguca

SEQ ID NO: 105241 - RNA, 32 nt, Homo Sapiens
ggugcuugugucugcugucucagaggccuugg

SEQ ID NO: 105242 - RNA, 32 nt, Homo Sapiens
aacugaaaucaucuaaagaguuaaaauuucag

SEQ ID NO: 105243 - RNA, 32 nt, Homo Sapiens
uugugaauauccaggaagaacuuagaggaccc

SEQ ID NO: 105244 - RNA, 32 nt, Homo Sapiens
gaccgaggcccugcccucuccuuccuuaccca

SEQ ID NO: 105245 - RNA, 32 nt, Homo Sapiens
ucccccugaaccugcaccuccaucacgaccca

SEQ ID NO: 105246 - RNA, 32 nt, Homo Sapiens
cugcugucccaaacccggagaaguguagauuu

SEQ ID NO: 105247 - RNA, 32 nt, Homo Sapiens
cauaauucuuugauucuaggcuggcagaguca

SEQ ID NO: 105248 - RNA, 32 nt, Homo Sapiens
gguuguauuggguagcauugggauaagauuuu

SEQ ID NO: 105249 - RNA, 32 nt, Homo Sapiens
ucagggaacugggaaacuuaggggacugagcu

SEQ ID NO: 105250 - RNA, 32 nt, Homo Sapiens
ucgccccugucgcuggggcugcggcugcugag

SEQ ID NO: 105251 - RNA, 29 nt, Homo Sapiens
ggaucaacaaauaaauauuuuuggucauu

SEQ ID NO: 105252 - RNA, 32 nt, Homo Sapiens
aagaagguacuaguaucccucuagccagauug

SEQ ID NO: 105253 - RNA, 32 nt, Homo Sapiens
uauaaggcaaauuuuauuaaauuuguaacuau

SEQ ID NO: 105254 - RNA, 32 nt, Homo Sapiens
uucgacguuugacuagccaucucaagcaaguu

SEQ ID NO: 105255 - RNA, 32 nt, Homo Sapiens
ccuuuaaaacaucaauguuuggaucaaaacaa

SEQ ID NO: 105256 - RNA, 32 nt, Homo Sapiens
gaaaguaauugugacuaacaaguaugcuuugc

SEQ ID NO: 105257 - RNA, 32 nt, Homo Sapiens
acccagaggaaagcuguugaugcugaaauguu

SEQ ID NO: 105258 - RNA, 32 nt, Homo Sapiens
ggugacaacuggcggcagcgcgccgcgggccc

SEQ ID NO: 105259 - RNA, 32 nt, Homo Sapiens
ggggccgcgggcccugaccaccccccucuggu

SEQ ID NO: 105260 - RNA, 32 nt, Homo Sapiens
caugcccaccaucaagguaugaggaugguaga

SEQ ID NO: 105261 - RNA, 32 nt, Homo Sapiens
ggccgcgaagcagcugcagccgccgccgcgca

SEQ ID NO: 105262 - RNA, 32 nt, Homo Sapiens
aagggguucaacaaauguuguuuuacuuccuc

SEQ ID NO: 105263 - RNA, 32 nt, Homo Sapiens
acuguucugcuuuuccaauaaauacgagcggc

SEQ ID NO: 105264 - RNA, 32 nt, Homo Sapiens
uccacuccccucuacucucucuaggacugggc

SEQ ID NO: 105265 - RNA, 32 nt, Homo Sapiens
auaaaaagacugaugucagggauggagagaua

SEQ ID NO: 105266 - RNA, 32 nt, Homo Sapiens
caggggcgaggggacaugggcgcuugucaacg

SEQ ID NO: 105267 - RNA, 32 nt, Homo Sapiens
cguagaaccgggccgcgcuccuccccuccuag

SEQ ID NO: 105268 - RNA, 32 nt, Homo Sapiens
agaaauaaaaauuuuaaaauagaaaaugcuuu

SEQ ID NO: 105269 - RNA, 32 nt, Homo Sapiens
gguguccacugucuacuuggggccugguguac

SEQ ID NO: 105270 - RNA, 32 nt, Homo Sapiens
cuuccccgugcaggggcggcccggccaguguc

SEQ ID NO: 105271 - RNA, 32 nt, Homo Sapiens
gcagagucagaguucacccauuagcgcaaagc

SEQ ID NO: 105272 - RNA, 32 nt, Homo Sapiens
acugaguccauauggaagaagaacuuccucuu

SEQ ID NO: 105273 - RNA, 32 nt, Homo Sapiens
caagauauauuuuucucuguauuucuauaacu

SEQ ID NO: 105274 - RNA, 32 nt, Homo Sapiens
cucacugucccucuccggcucuagcucucucc

SEQ ID NO: 105275 - RNA, 32 nt, Homo Sapiens
uccccucaguuuuaaccugagcugccgaacgc

SEQ ID NO: 105276 - RNA, 32 nt, Homo Sapiens
cgggaggucccauggaauuuguucugguuucu

SEQ ID NO: 105277 - RNA, 32 nt, Homo Sapiens
ucacaguguuacugaucagggaugugaggcug

SEQ ID NO: 105278 - RNA, 32 nt, Homo Sapiens
aaccuuucugcccccacuuucagacacacccc

SEQ ID NO: 105279 - RNA, 32 nt, Homo Sapiens
uggggcgucccucuccucucuccccagucucu

SEQ ID NO: 105280 - RNA, 32 nt, Homo Sapiens
agcggcggggacuggggaagggcgaguggcgg

SEQ ID NO: 105281 - RNA, 32 nt, Homo Sapiens
uuguuaucuguaaaaaacagaagucauuguaa

SEQ ID NO: 105282 - RNA, 32 nt, Homo Sapiens
ccggcgggagcuagcagcgucugcagccgcgc

SEQ ID NO: 105283 - RNA, 32 nt, Homo Sapiens
uugggcuggaaugcugccccugaggguggggc

SEQ ID NO: 105284 - RNA, 32 nt, Homo Sapiens
acacuugcuggacagcuaucuuccacauacuu

SEQ ID NO: 105285 - RNA, 32 nt, Homo Sapiens
aauuuuccacugaccugguccccauugacaag

SEQ ID NO: 105286 - RNA, 32 nt, Homo Sapiens
ucauaugcaauuugggauuuacuaguagccaa

SEQ ID NO: 105287 - RNA, 32 nt, Homo Sapiens
ccacaauguuccccuccugugagccaaggagg

SEQ ID NO: 105288 - RNA, 32 nt, Homo Sapiens
gaauauuauugaaugaaaauggcugacagaag

SEQ ID NO: 105289 - RNA, 32 nt, Homo Sapiens
uuugaucgucguuagauugaagaaaacaucua

SEQ ID NO: 105290 - RNA, 32 nt, Homo Sapiens
aaucaaacaacaaccauuuccuggguguccug

SEQ ID NO: 105291 - RNA, 32 nt, Homo Sapiens
auaaaucauaguaauaauauugaacauucuac

SEQ ID NO: 105292 - RNA, 32 nt, Homo Sapiens
uuccuuuucauuuaauggggauuccacuaucu

SEQ ID NO: 105293 - RNA, 32 nt, Homo Sapiens
auugcuggaagacuggauuugcuggaagacuu

SEQ ID NO: 105294 - RNA, 32 nt, Homo Sapiens
cucacacucccucuggacuccgggccccacca

SEQ ID NO: 105295 - RNA, 32 nt, Homo Sapiens
cuccccuccuagaggagaggaaagggagucau

SEQ ID NO: 105296 - RNA, 32 nt, Homo Sapiens
gaugaaauuuaaagacaagaaugucuagaguu

SEQ ID NO: 105297 - RNA, 32 nt, Homo Sapiens
gcugugaacaauacauuuccgugguuuuauaa

SEQ ID NO: 105298 - RNA, 32 nt, Homo Sapiens
gaacacgccccuucacccggcgcgggacgcag

SEQ ID NO: 105299 - RNA, 32 nt, Homo Sapiens
accuucggacuguguccugaccuggccuguag

SEQ ID NO: 105300 - RNA, 32 nt, Homo Sapiens
aaaaugguccuagauuaaaugaaaaugacaug

SEQ ID NO: 105301 - RNA, 32 nt, Homo Sapiens
aguugcuccuuggccaaaucuccagcucccuu

SEQ ID NO: 105302 - RNA, 32 nt, Homo Sapiens
ucugcuuccucuaucgcccaaugcaaaaucga

SEQ ID NO: 105303 - RNA, 32 nt, Homo Sapiens
ugcuccaacaacuugaaacaagucacuuuacc

SEQ ID NO: 105304 - RNA, 32 nt, Homo Sapiens
gcucagggggcacugaggaagcagaggccccu

SEQ ID NO: 105305 - RNA, 32 nt, Homo Sapiens
cccuaaguagucaucaaugcaauaagauugcg

SEQ ID NO: 105306 - RNA, 32 nt, Homo Sapiens
uauguuuuaagaaguugagaucuugugaauau

SEQ ID NO: 105307 - RNA, 32 nt, Homo Sapiens
cgcggcgccagcccgcgccugauucgcggcgg

SEQ ID NO: 105308 - RNA, 32 nt, Homo Sapiens
auugguccaacuuuucccuccucccuuuuugc

SEQ ID NO: 105309 - RNA, 32 nt, Homo Sapiens
uugacugacuuauggcaugacucuucaacccc

SEQ ID NO: 105310 - RNA, 32 nt, Homo Sapiens
uaacauggccauuauaagaauaaaauauguag

SEQ ID NO: 105311 - RNA, 32 nt, Homo Sapiens
gauguggcggggggcuggagugggaggacgga

SEQ ID NO: 105312 - RNA, 32 nt, Homo Sapiens
gaaacacgcggaucugaacagcaguaauccug

SEQ ID NO: 105313 - RNA, 32 nt, Homo Sapiens
ucgguucugcaccccugcaggcucuguagggg

SEQ ID NO: 105314 - RNA, 32 nt, Homo Sapiens
guuccuaucuaaauauaaaguauauuagaaac

SEQ ID NO: 105315 - RNA, 32 nt, Homo Sapiens
guccuggcguccccauccuccaaagggccugg

SEQ ID NO: 105316 - RNA, 32 nt, Homo Sapiens
uuuccgagcagagggucauacacagggcugga

SEQ ID NO: 105317 - RNA, 32 nt, Homo Sapiens
caucucuugcuuaaaugauagucuauuuagua

SEQ ID NO: 105318 - RNA, 32 nt, Homo Sapiens
acacagcaaacagauugagggauuguuguggu

SEQ ID NO: 105319 - RNA, 32 nt, Homo Sapiens
ucacaagaacagagccuaccugugauuacuau

SEQ ID NO: 105320 - RNA, 32 nt, Homo Sapiens
aaaaauucuguuugugugaaaaguacaagaau

SEQ ID NO: 105321 - RNA, 32 nt, Homo Sapiens
agugaccccccgcagcuccucgccccucccac

SEQ ID NO: 105322 - RNA, 32 nt, Homo Sapiens
gugcggcggggcgggcgggugccacaccugug

SEQ ID NO: 105323 - RNA, 29 nt, Homo Sapiens
cagccgccagacuuccugccgaaguccga

SEQ ID NO: 105324 - RNA, 32 nt, Homo Sapiens
gcucacagcugacgaugggggaccccagcaag

SEQ ID NO: 105325 - RNA, 32 nt, Homo Sapiens
aaaccuauaauuaagccaaaauucaaauuugu

SEQ ID NO: 105326 - RNA, 32 nt, Homo Sapiens
uaaaucagguauuuguauuaaauugauuaaaa

SEQ ID NO: 105327 - RNA, 32 nt, Homo Sapiens
uuuuuuauaauucaguuuaaucaauaaacaug

SEQ ID NO: 105328 - RNA, 29 nt, Homo Sapiens
ggacaugggcaggaucaaaaauacuggga

SEQ ID NO: 105329 - RNA, 32 nt, Homo Sapiens
ggccaggcgcggugguucaugccuguaauccc

SEQ ID NO: 105330 - RNA, 32 nt, Homo Sapiens
ggccaggcgcgguggcucaugccuguaauccu

SEQ ID NO: 105331 - RNA, 32 nt, Homo Sapiens
ggccaggugcgguggcucaugccuguaauccc

SEQ ID NO: 105332 - RNA, 32 nt, Homo Sapiens
caggaaaacagaaaccacacuaaguauuucaa

SEQ ID NO: 105333 - RNA, 32 nt, Homo Sapiens
cuggagcucccgcuccucagcugccccccgcc

SEQ ID NO: 105334 - RNA, 32 nt, Homo Sapiens
caucccuccucccccaggauccacaugggucg

SEQ ID NO: 105335 - RNA, 32 nt, Homo Sapiens
gaacgaaugaauuggaauuagagcaagguauu

SEQ ID NO: 105336 - RNA, 32 nt, Homo Sapiens
guucucuuucccucucccaacaugccagcccc

SEQ ID NO: 105337 - RNA, 32 nt, Homo Sapiens
cuuauuugagagcuuaccaugugcuaggcaca

SEQ ID NO: 105338 - RNA, 32 nt, Homo Sapiens
agggccacagaaaaugaagcuggcgcaacgac

SEQ ID NO: 105339 - RNA, 32 nt, Homo Sapiens
gcacuguauguggagaaauuccuucuacaaua

SEQ ID NO: 105340 - RNA, 32 nt, Homo Sapiens
uaauuacauuggcacaauguauacuucagugc

SEQ ID NO: 105341 - RNA, 32 nt, Homo Sapiens
gaauccauuggagaagcaguggauuaacuagc

SEQ ID NO: 105342 - RNA, 32 nt, Homo Sapiens
agccaggagagcccgagucaugaggugggcac

SEQ ID NO: 105343 - RNA, 32 nt, Homo Sapiens
ccgccgcauccucggcgccuuugcaguccggc

SEQ ID NO: 105344 - RNA, 32 nt, Homo Sapiens
cagcacccuucggcugccucccgggguggggg

SEQ ID NO: 105345 - RNA, 32 nt, Homo Sapiens
aaugaacauuaacaggcauguuuguacagcua

SEQ ID NO: 105346 - RNA, 32 nt, Homo Sapiens
ccgcccacucauuccuucucgugcacugcuuu

SEQ ID NO: 105347 - RNA, 32 nt, Homo Sapiens
uacagaaaauugaugucacuuacuacagcuga

SEQ ID NO: 105348 - RNA, 32 nt, Homo Sapiens
auuguuaaacaaaugauuuccacaaacagauc

SEQ ID NO: 105349 - RNA, 32 nt, Homo Sapiens
ggucuaaaauaauaugguuaucaauguuuagc

SEQ ID NO: 105350 - RNA, 32 nt, Homo Sapiens
uggugaaaaggggacaguuuuuacccuaaagu

SEQ ID NO: 105351 - RNA, 32 nt, Homo Sapiens
gcucaauacugcugaacuguacacuuaacaug

SEQ ID NO: 105352 - RNA, 32 nt, Homo Sapiens
uuuguacggcucacgccggccggggccgcgag

SEQ ID NO: 105353 - RNA, 32 nt, Homo Sapiens
acuugcaugguggggacaaggcugucguggca

SEQ ID NO: 105354 - RNA, 32 nt, Homo Sapiens
caacagccaaaauagggggguaaugauguagg

SEQ ID NO: 105355 - RNA, 32 nt, Homo Sapiens
gacuccuggggcugcuggccccgggucccagc

SEQ ID NO: 105356 - RNA, 32 nt, Homo Sapiens
agguaaguuggcucacaucauguaauaguggc

SEQ ID NO: 105357 - RNA, 32 nt, Homo Sapiens
ugcagcucuuugaaaaugugauuuacuuguca

SEQ ID NO: 105358 - RNA, 32 nt, Homo Sapiens
accgugaugcccggcccugcuccugacagccu

SEQ ID NO: 105359 - RNA, 32 nt, Homo Sapiens
uggugccauuuucucucucuuaagccccauuu

SEQ ID NO: 105360 - RNA, 32 nt, Homo Sapiens
uuugcaacuguauuuguauaaauaucacuuau

SEQ ID NO: 105361 - RNA, 32 nt, Homo Sapiens
uggggccccucuccuccccagcccuucuccug

SEQ ID NO: 105362 - RNA, 32 nt, Homo Sapiens
cauaacacauauauaugucuguaucuuauauu

SEQ ID NO: 105363 - RNA, 32 nt, Homo Sapiens
uagaauuaugcuguuaaaacuacuuuagguga

SEQ ID NO: 105364 - RNA, 32 nt, Homo Sapiens
caauacaguauuuugauguauugcaaaaauag

SEQ ID NO: 105365 - RNA, 32 nt, Homo Sapiens
cccaaaccucagcauucugcaauauguaacca

SEQ ID NO: 105366 - RNA, 32 nt, Homo Sapiens
aauuucauaaaacuggauuugauuucuuuuua

SEQ ID NO: 105367 - RNA, 32 nt, Homo Sapiens
cauauggccugcaaagucaaaaauauuugcua

SEQ ID NO: 105368 - RNA, 32 nt, Homo Sapiens
aggagauuuuaacuuuauuuaaaaauagguaa

SEQ ID NO: 105369 - RNA, 32 nt, Homo Sapiens
ugaggaagacagcguaaccgccucagaaaaaa

SEQ ID NO: 105370 - RNA, 32 nt, Homo Sapiens
caucgcacuccagccugggugacaagagcaaa

SEQ ID NO: 105371 - RNA, 32 nt, Homo Sapiens
ccucuuacaccugaagaaauaggaagcugugu

SEQ ID NO: 105372 - RNA, 32 nt, Homo Sapiens
auucauaaucccaaucuaauuaugagcuaaaa

SEQ ID NO: 105373 - RNA, 32 nt, Homo Sapiens
uuugaauaaaaugauuucuuaguaugauugua

SEQ ID NO: 105374 - RNA, 32 nt, Homo Sapiens
ggaauuuugaaaaacaauauauuuucaggacu

SEQ ID NO: 105375 - RNA, 32 nt, Homo Sapiens
aggaagaggcgaguccuguucacgcacucagg

SEQ ID NO: 105376 - RNA, 32 nt, Homo Sapiens
aaauaaaucaucaccaauaccuuugagguccc

SEQ ID NO: 105377 - RNA, 32 nt, Homo Sapiens
auuucuauuuguccuuuuuuuguuuucuguuc

SEQ ID NO: 105378 - RNA, 32 nt, Homo Sapiens
aguugugccuacagcuguuaccauaguaaccg

SEQ ID NO: 105379 - RNA, 32 nt, Homo Sapiens
aggccgccugacgcucagugccuuccuccguu

SEQ ID NO: 105380 - RNA, 32 nt, Homo Sapiens
acauuuagacauuuggguucaguugcuuguag

SEQ ID NO: 105381 - RNA, 32 nt, Homo Sapiens
ggacuagccugggcaacauagcaagaucccau

SEQ ID NO: 105382 - RNA, 32 nt, Homo Sapiens
ccuggguccaaauaaaaacuaaauuguaaacu

SEQ ID NO: 105383 - RNA, 32 nt, Homo Sapiens
uguuccccaagccucgcuccaagcccacgcca

SEQ ID NO: 105384 - RNA, 32 nt, Homo Sapiens
uuuuaucccucuucuuuuuucuuaaacauuuu

SEQ ID NO: 105385 - RNA, 32 nt, Homo Sapiens
ucacuggcccauucuuuuuuugacgcagccaa

SEQ ID NO: 105386 - RNA, 32 nt, Homo Sapiens
gacuagcucaggucgcucuaagcacaaacgug

SEQ ID NO: 105387 - RNA, 32 nt, Homo Sapiens
ugugguccguccuuaacccauccacucuucuu

SEQ ID NO: 105388 - RNA, 32 nt, Homo Sapiens
uacggccgccgggaccgcagcauggcgggcau

SEQ ID NO: 105389 - RNA, 32 nt, Homo Sapiens
ccccugugaacaggcauguuguauucuauaac

SEQ ID NO: 105390 - RNA, 31 nt, Homo Sapiens
ugggcggggccccgaucccagaauuaucaac

SEQ ID NO: 105391 - RNA, 32 nt, Homo Sapiens
uccuccacgaccagggugcccgggccaucgca

SEQ ID NO: 105392 - RNA, 32 nt, Homo Sapiens
gucuccugaguaguagcugcgaccacaggcgu

SEQ ID NO: 105393 - RNA, 32 nt, Homo Sapiens
auauuucuaggauaguuauauuuuuugggggu

SEQ ID NO: 105394 - RNA, 32 nt, Homo Sapiens
agggcuggcuuccuccuucuggguuucacagg

SEQ ID NO: 105395 - RNA, 32 nt, Homo Sapiens
gaccuaaaauauauuuaucuucuuugcacacu

SEQ ID NO: 105396 - RNA, 32 nt, Homo Sapiens
uuaaguauucuuaccugcuuuaauuuugaaac

SEQ ID NO: 105397 - RNA, 32 nt, Homo Sapiens
ccuuccuucacagauacuuaagaccuccacca

SEQ ID NO: 105398 - RNA, 32 nt, Homo Sapiens
cuggcagccugccuggcccauagacauccccc

SEQ ID NO: 105399 - RNA, 32 nt, Homo Sapiens
uuuucaugacugcuuuuuccugcccuucugug

SEQ ID NO: 105400 - RNA, 32 nt, Homo Sapiens
ugagaggaaggggacaaguagccaccugaguu

SEQ ID NO: 105401 - RNA, 32 nt, Homo Sapiens
acucacucaugcuuauuuccuguaauggacaa

SEQ ID NO: 105402 - RNA, 32 nt, Homo Sapiens
aaacuguacauuccuucuuccucccccugcuc

SEQ ID NO: 105403 - RNA, 32 nt, Homo Sapiens
uaaaggacagcucugauggggaccacauaaaa

SEQ ID NO: 105404 - RNA, 32 nt, Homo Sapiens
ugccccugcccggcucccgccgggaaguucua

SEQ ID NO: 105405 - RNA, 32 nt, Homo Sapiens
uggcuaauuuauuuuauuucugauuauuuuau

SEQ ID NO: 105406 - RNA, 32 nt, Homo Sapiens
aagaccacagcacucuaugucuacuucuauua

SEQ ID NO: 105407 - RNA, 32 nt, Homo Sapiens
aaagugagacagagacuugacuugauccucug

SEQ ID NO: 105408 - RNA, 32 nt, Homo Sapiens
gcgcccggccccaaucaucuguuuuuaaacaa

SEQ ID NO: 105409 - RNA, 32 nt, Homo Sapiens
guauuccuagcaaaauaaaaucucuaagguac

SEQ ID NO: 105410 - RNA, 32 nt, Homo Sapiens
uucuugaacaauuuacagcauugauuuucaaa

SEQ ID NO: 105411 - RNA, 32 nt, Homo Sapiens
cuuuccauggagcuaacugugcaucuggggag

SEQ ID NO: 105412 - RNA, 31 nt, Homo Sapiens
gcugcugagaaggugcacagagccugggugc

SEQ ID NO: 105413 - RNA, 32 nt, Homo Sapiens
acaccucugaguagaucuucugauggaagaca

SEQ ID NO: 105414 - RNA, 32 nt, Homo Sapiens
auaaauuggggauauaucuauacagugaagua

SEQ ID NO: 105415 - RNA, 32 nt, Homo Sapiens
auauuccaggacuucacauuuguuauuucuuc

SEQ ID NO: 105416 - RNA, 32 nt, Homo Sapiens
aguucugccuaacuuuguguucacugauguua

SEQ ID NO: 105417 - RNA, 32 nt, Homo Sapiens
uauagaguauugaugucauuuauguuucugag

SEQ ID NO: 105418 - RNA, 32 nt, Homo Sapiens
aagaugccauucaaaacaaguauaaaaaguua

SEQ ID NO: 105419 - RNA, 32 nt, Homo Sapiens
cuacuuguuaaaaaagauacaaaccuuguuuu

SEQ ID NO: 105420 - RNA, 32 nt, Homo Sapiens
cugaaccgcccggcugagccgacauugccggc

SEQ ID NO: 105421 - RNA, 32 nt, Homo Sapiens
acuaucugagauuaucuuuguauuuccccacu

SEQ ID NO: 105422 - RNA, 32 nt, Homo Sapiens
auccuucuuagugccucaaacuagauccuguu

SEQ ID NO: 105423 - RNA, 32 nt, Homo Sapiens
gacugagagcagagaccacuuauccucauugc

SEQ ID NO: 105424 - RNA, 31 nt, Homo Sapiens
gcaaccaagcaugaggacugaguuaagcuuu

SEQ ID NO: 105425 - RNA, 32 nt, Homo Sapiens
agauuacuugauauuuaauacacaaugcauca

SEQ ID NO: 105426 - RNA, 32 nt, Homo Sapiens
caggaaccccugaaauaaugcacuauguccau

SEQ ID NO: 105427 - RNA, 32 nt, Homo Sapiens
uggagggacaggggcccggcccuggccggcag

SEQ ID NO: 105428 - RNA, 32 nt, Homo Sapiens
cagccugggcgacagagcaagacacugucuca

SEQ ID NO: 105429 - RNA, 32 nt, Homo Sapiens
agcggggguggcugggaagugaaacggagcca

SEQ ID NO: 105430 - RNA, 32 nt, Homo Sapiens
gguauuuuaaauuuagccuugccguauuauuu

SEQ ID NO: 105431 - RNA, 32 nt, Homo Sapiens
agcaguguuuacuucaauuuuuuauuacucuc

SEQ ID NO: 105432 - RNA, 32 nt, Homo Sapiens
uauaaauugcuagauuugauaaauaccuaaca

SEQ ID NO: 105433 - RNA, 32 nt, Homo Sapiens
aaagcaggggcagaugccacccugcccagggu

SEQ ID NO: 105434 - RNA, 32 nt, Homo Sapiens
ugagaggagaaaauuauaaaucuuaaacuugg

SEQ ID NO: 105435 - RNA, 32 nt, Homo Sapiens
aucggugcuuugcaggaggcaagugaggccua

SEQ ID NO: 105436 - RNA, 32 nt, Homo Sapiens
cccuccuguuuuacuuuauaccucucuauucc

SEQ ID NO: 105437 - RNA, 32 nt, Homo Sapiens
gggggagaaagaagaaagggauugcugucucc

SEQ ID NO: 105438 - RNA, 32 nt, Homo Sapiens
cuccacaucagcucccucuccuccucagcuac

SEQ ID NO: 105439 - RNA, 30 nt, Homo Sapiens
cgaguggcgcccgugucgaugucuucagcc

SEQ ID NO: 105440 - RNA, 32 nt, Homo Sapiens
cuugcccucccccuccucccaccagcuuuaaa

SEQ ID NO: 105441 - RNA, 32 nt, Homo Sapiens
gaugagcaagagaccugaucggaccggcccug

SEQ ID NO: 105442 - RNA, 32 nt, Homo Sapiens
aaucaauccagucagguaauuauuuucuauug

SEQ ID NO: 105443 - RNA, 32 nt, Homo Sapiens
cuccguugugguccagccccaggccuccgucg

SEQ ID NO: 105444 - RNA, 32 nt, Homo Sapiens
ggcagccucgggcccuccugccugcaggauca

SEQ ID NO: 105445 - RNA, 32 nt, Homo Sapiens
ggauuuugguuugcuuggcauaucuaaaggug

SEQ ID NO: 105446 - RNA, 32 nt, Homo Sapiens
gcggcugugaggugggggcggcagcgggaggc

SEQ ID NO: 105447 - RNA, 32 nt, Homo Sapiens
aauaauaagcaaaugaaagauaguucaacuca

SEQ ID NO: 105448 - RNA, 31 nt, Homo Sapiens
guuccugcgcagcgccagccccgcgcuccuc

SEQ ID NO: 105449 - RNA, 32 nt, Homo Sapiens
cugccuacuccagccccuacccugcacccaca

SEQ ID NO: 105450 - RNA, 32 nt, Homo Sapiens
auguggaaaaggaaacguuugcuuccccucca

SEQ ID NO: 105451 - RNA, 32 nt, Homo Sapiens
uguaguagccucauuuaccaucguuuguauua

SEQ ID NO: 105452 - RNA, 32 nt, Homo Sapiens
uuucaagcacuuuuuucuuuuuuaccuuuaag

SEQ ID NO: 105453 - RNA, 32 nt, Homo Sapiens
uguuuagauugugggaaauacuucacucguca

SEQ ID NO: 105454 - RNA, 32 nt, Homo Sapiens
cuuacugaauuuaguucugugcucuuccuuau

SEQ ID NO: 105455 - RNA, 32 nt, Homo Sapiens
uuggugcaaauauauacacacccuuguaagug

SEQ ID NO: 105456 - RNA, 32 nt, Homo Sapiens
uuucuaauggugugcauuugcaugucaaaggu

SEQ ID NO: 105457 - RNA, 32 nt, Homo Sapiens
accgcacccgcggcccagcagggguuccacug

SEQ ID NO: 105458 - RNA, 32 nt, Homo Sapiens
ccagcucugaaucaauccuuucuucauuagca

SEQ ID NO: 105459 - RNA, 32 nt, Homo Sapiens
caucaggagcucggcuucuugcuccagccggg

SEQ ID NO: 105460 - RNA, 32 nt, Homo Sapiens
gaaacauauuuauuuuuuuuuauuuauaaaag

SEQ ID NO: 105461 - RNA, 32 nt, Homo Sapiens
ugccgcccgccugagaggcgccgcccgccagc

SEQ ID NO: 105462 - RNA, 32 nt, Homo Sapiens
cagccacggccugcggcgcccgcggcaccaug

SEQ ID NO: 105463 - RNA, 32 nt, Homo Sapiens
cggcaaggacugccucaggugacgggccguga

SEQ ID NO: 105464 - RNA, 32 nt, Homo Sapiens
aaggacuaaaaaucauucuguuacaaagacac

SEQ ID NO: 105465 - RNA, 32 nt, Homo Sapiens
cuguugguuccuucugauccacagccucauca

SEQ ID NO: 105466 - RNA, 32 nt, Homo Sapiens
cagcgacgcuggcggccgcgggcccaggccuc

SEQ ID NO: 105467 - RNA, 32 nt, Homo Sapiens
cucgauccugccggucucgucccgcagagccg

SEQ ID NO: 105468 - RNA, 32 nt, Homo Sapiens
ucaauaaaucauagaaauuuuuguuuuuacac

SEQ ID NO: 105469 - RNA, 32 nt, Homo Sapiens
uugacuguggaggugcuaguuugaauaaaugu

SEQ ID NO: 105470 - RNA, 32 nt, Homo Sapiens
cugaucuuuuucuaguagacaguugccacaca

SEQ ID NO: 105471 - RNA, 32 nt, Homo Sapiens
gcuuuagaauuuguaaauauuuuuguagaaua

SEQ ID NO: 105472 - RNA, 32 nt, Homo Sapiens
cccaaggaugaaaucagauuuuaacuaauaau

SEQ ID NO: 105473 - RNA, 32 nt, Homo Sapiens
acugcacccacccaagacaagugauuuucauu

SEQ ID NO: 105474 - RNA, 32 nt, Homo Sapiens
gccucucaauuucaggcagguguaacaguucc

SEQ ID NO: 105475 - RNA, 32 nt, Homo Sapiens
gcuuucuuuccgcuccucagccccugacuugu

SEQ ID NO: 105476 - RNA, 32 nt, Homo Sapiens
aaugaagccgcagaccuucguggugaguguua

SEQ ID NO: 105477 - RNA, 32 nt, Homo Sapiens
aucuuuggcauucuaacagugaugucaauaca

SEQ ID NO: 105478 - RNA, 32 nt, Homo Sapiens
cacugggguccuggcacagacccaggcccagg

SEQ ID NO: 105479 - RNA, 32 nt, Homo Sapiens
caucccugacugugucaucacucugagcucug

SEQ ID NO: 105480 - RNA, 32 nt, Homo Sapiens
acagaaaucucuucuuuauaucuauguuuccc

SEQ ID NO: 105481 - RNA, 32 nt, Homo Sapiens
acgcagggcagacacccugacgcaggcggccc

SEQ ID NO: 105482 - RNA, 32 nt, Homo Sapiens
gcgacggccaggcggggcuggggagcugcggc

SEQ ID NO: 105483 - RNA, 32 nt, Homo Sapiens
uaaugauuuguuaaauuccuuagggguagaaa

SEQ ID NO: 105484 - RNA, 32 nt, Homo Sapiens
ugaacugccucuccuccucccugccuggggag

SEQ ID NO: 105485 - RNA, 32 nt, Homo Sapiens
uagaucagagcuccuggaacuuucucaucuuu

SEQ ID NO: 105486 - RNA, 32 nt, Homo Sapiens
ccuuccuccgucaucacagccccuuccuccaa

SEQ ID NO: 105487 - RNA, 32 nt, Homo Sapiens
gccagagccagacgcgccggagcgggcgccuc

SEQ ID NO: 105488 - RNA, 32 nt, Homo Sapiens
aagccauagggcgccucccagcccgucucccc

SEQ ID NO: 105489 - RNA, 32 nt, Homo Sapiens
cccuuuaaacuuuauuuuuuuauucacuguag

SEQ ID NO: 105490 - RNA, 32 nt, Homo Sapiens
gagccaguagccaagacaccauggccgagccu

SEQ ID NO: 105491 - RNA, 32 nt, Homo Sapiens
agccccgccccggccucuggggagccccagga

SEQ ID NO: 105492 - RNA, 32 nt, Homo Sapiens
caacagguaaaauaaaucuacucuguaauagu

SEQ ID NO: 105493 - RNA, 32 nt, Homo Sapiens
ccgcggaggggaggggcgccgacgccgcguuc

SEQ ID NO: 105494 - RNA, 32 nt, Homo Sapiens
gcgggcacugcgcccguuugccugccccucgu

SEQ ID NO: 105495 - RNA, 32 nt, Homo Sapiens
agcaagacucugucucaaaaaauauauaugug

SEQ ID NO: 105496 - RNA, 32 nt, Homo Sapiens
augucuggcuuuccugguggguccaggcucau

SEQ ID NO: 105497 - RNA, 32 nt, Homo Sapiens
auucuuugcuaccuggagaaauuaaaacccuu

SEQ ID NO: 105498 - RNA, 32 nt, Homo Sapiens
agaaugagcaaccucaaggaauugaacacuuc

SEQ ID NO: 105499 - RNA, 32 nt, Homo Sapiens
acuggaacgaaguaugagugcaacucaaaugu

SEQ ID NO: 105500 - RNA, 32 nt, Homo Sapiens
ccgcagcuccggccgcgccauggacggcaacg

SEQ ID NO: 105501 - RNA, 32 nt, Homo Sapiens
gaggcuggagggcuggggcugcgugagggugg

SEQ ID NO: 105502 - RNA, 32 nt, Homo Sapiens
aggaggaugcuguuuaucugucaccuccacuu

SEQ ID NO: 105503 - RNA, 32 nt, Homo Sapiens
uccucacccacguuauuccccagcugcccucu

SEQ ID NO: 105504 - RNA, 32 nt, Homo Sapiens
uacagcuggagacuucauccacagcaggggcu

SEQ ID NO: 105505 - RNA, 32 nt, Homo Sapiens
ccugaccggccgcgucuggcauggucagagaa

SEQ ID NO: 105506 - RNA, 32 nt, Homo Sapiens
aacagcuuuugacaucagauuuucauuugaga

SEQ ID NO: 105507 - RNA, 32 nt, Homo Sapiens
uagacuacuuuuuuuucuuuaagcagcaaaag

SEQ ID NO: 105508 - RNA, 32 nt, Homo Sapiens
cauucugggcacuggugcagcugcuggccagu

SEQ ID NO: 105509 - RNA, 32 nt, Homo Sapiens
uccaccccgcccgacucuacccggcccggucc

SEQ ID NO: 105510 - RNA, 32 nt, Homo Sapiens
ccucauguacuugcuauauugaggaugaaguu

SEQ ID NO: 105511 - RNA, 32 nt, Homo Sapiens
gcuaggaugaggcaggcccaguccuccuccag

SEQ ID NO: 105512 - RNA, 32 nt, Homo Sapiens
caaaguucaguccuugccauuugacugagacc

SEQ ID NO: 105513 - RNA, 32 nt, Homo Sapiens
ggccagcaucaacauguuuccauccuugggga

SEQ ID NO: 105514 - RNA, 32 nt, Homo Sapiens
ugagcacucacagaugcuccaguaagaaucac

SEQ ID NO: 105515 - RNA, 32 nt, Homo Sapiens
guguaggagggggugggcaggggacaagucca

SEQ ID NO: 105516 - RNA, 32 nt, Homo Sapiens
ccaugguaugcaccuuuuuuuuuuuuuuuuuu

SEQ ID NO: 105517 - RNA, 32 nt, Homo Sapiens
auauaugcacaaaauagccugcccuucccaca

SEQ ID NO: 105518 - RNA, 30 nt, Homo Sapiens
gaaaaaccacuugcucagcuucuccuugua

SEQ ID NO: 105519 - RNA, 32 nt, Homo Sapiens
caacaguugcacagugccucaagccccagagu

SEQ ID NO: 105520 - RNA, 32 nt, Homo Sapiens
ugaguuuuuaauguuuacauguuuacaucuuu

SEQ ID NO: 105521 - RNA, 32 nt, Homo Sapiens
ucaaucacagcacuauuuccuauuaagcccac

SEQ ID NO: 105522 - RNA, 32 nt, Homo Sapiens
ccucccggccccaaaccacaggggcucagguc

SEQ ID NO: 105523 - RNA, 32 nt, Homo Sapiens
agcacggucaugcacagagucucggcaccauc

SEQ ID NO: 105524 - RNA, 32 nt, Homo Sapiens
ugcugcaccgcggggcccaggcggcggcuggg

SEQ ID NO: 105525 - RNA, 32 nt, Homo Sapiens
cagaaacagacaccccaaugcuauuuacauac

SEQ ID NO: 105526 - RNA, 32 nt, Homo Sapiens
uucaaauccaacaauguuguccuccauccuac

SEQ ID NO: 105527 - RNA, 32 nt, Homo Sapiens
auggaugggcuggugggcagggggguggcugg

SEQ ID NO: 105528 - RNA, 32 nt, Homo Sapiens
gcccaagcccuguccccucccccgccccggcc

SEQ ID NO: 105529 - RNA, 32 nt, Homo Sapiens
agucauuuaccaggauucccguagggcguuuu

SEQ ID NO: 105530 - RNA, 30 nt, Homo Sapiens
cgguggcgcugcacugaccguccggagggc

SEQ ID NO: 105531 - RNA, 32 nt, Homo Sapiens
uuauuuucaaggauuuuauaaaugauuaucau

SEQ ID NO: 105532 - RNA, 32 nt, Homo Sapiens
caguauccuagaaucuuugugcucucgcugca

SEQ ID NO: 105533 - RNA, 32 nt, Homo Sapiens
augcuucuaaguaaauacaauuuuuaaaaaac

SEQ ID NO: 105534 - RNA, 32 nt, Homo Sapiens
uacagggggguccccaggguguccucuggcag

SEQ ID NO: 105535 - RNA, 32 nt, Homo Sapiens
ggauuccaaucucuuccaaccuuuaaggugau

SEQ ID NO: 105536 - RNA, 32 nt, Homo Sapiens
uuuacuaaaggaaaaaagcuaauuauguccau

SEQ ID NO: 105537 - RNA, 32 nt, Homo Sapiens
uccccccaggccccggccccacuccuggcucu

SEQ ID NO: 105538 - RNA, 32 nt, Homo Sapiens
gccuugcuggaaccaagguuuugaaaucccau

SEQ ID NO: 105539 - RNA, 32 nt, Homo Sapiens
gaggugccaaggccaugguguccgcccugcug

SEQ ID NO: 105540 - RNA, 32 nt, Homo Sapiens
uuacugaggcggagacacgggugaugauuggc

SEQ ID NO: 105541 - RNA, 32 nt, Homo Sapiens
gaagucgaaauuuugauagggauugcauugaa

SEQ ID NO: 105542 - RNA, 30 nt, Homo Sapiens
ugcguggccgcugaguugccggcgccggcu

SEQ ID NO: 105543 - RNA, 32 nt, Homo Sapiens
ugauuugaauguaaaacaggaaauuggaauuc

SEQ ID NO: 105544 - RNA, 32 nt, Homo Sapiens
acaccuccuugacuggucggucuucagcaccg

SEQ ID NO: 105545 - RNA, 32 nt, Homo Sapiens
gugcguuguacauaguucuaaugcauuguauu

SEQ ID NO: 105546 - RNA, 32 nt, Homo Sapiens
uuguauuuacuuugagacuaaagacugaagaa

SEQ ID NO: 105547 - RNA, 32 nt, Homo Sapiens
cccaccugccuuggccugagccucucucccug

SEQ ID NO: 105548 - RNA, 32 nt, Homo Sapiens
aaacaggccaggacaguggugcaugccaguca

SEQ ID NO: 105549 - RNA, 32 nt, Homo Sapiens
gugucuauauauaugcaugcauggauaugcau

SEQ ID NO: 105550 - RNA, 32 nt, Homo Sapiens
ugcugccuucgccgcucgggccgcccggggga

SEQ ID NO: 105551 - RNA, 32 nt, Homo Sapiens
auagcaaaaaguguaguuggacagguugccca

SEQ ID NO: 105552 - RNA, 29 nt, Homo Sapiens
augguuuagacuuuccugcucagugugua

SEQ ID NO: 105553 - RNA, 28 nt, Homo Sapiens
gcacacacaaagcaacauuuggaaaucc

SEQ ID NO: 105554 - RNA, 32 nt, Homo Sapiens
ggaguccuguguugguauuuugcaaaaguucc

SEQ ID NO: 105555 - RNA, 32 nt, Homo Sapiens
gcucuuagguucuaucucuguagaaugucucc

SEQ ID NO: 105556 - RNA, 32 nt, Homo Sapiens
ggacuucaacugaggucuguaagacuuaaagc

SEQ ID NO: 105557 - RNA, 32 nt, Homo Sapiens
agguguucgggaagcugaaggaccuaaacugc

SEQ ID NO: 105558 - RNA, 32 nt, Homo Sapiens
ucugucccuguguugccuuccacagaggagca

SEQ ID NO: 105559 - RNA, 32 nt, Homo Sapiens
cccugagaccucuagagaaaagauguuuguuu

SEQ ID NO: 105560 - RNA, 32 nt, Homo Sapiens
acuauacauuugggggcuaccuggucacauuu

SEQ ID NO: 105561 - RNA, 32 nt, Homo Sapiens
guuuuguagcagccagcagcuguuuccugugg

SEQ ID NO: 105562 - RNA, 32 nt, Homo Sapiens
auaguuuugggucuuucuaugcugguuguauu

SEQ ID NO: 105563 - RNA, 32 nt, Homo Sapiens
cgccccggcggcuucucccagcccucgaggcu

SEQ ID NO: 105564 - RNA, 32 nt, Homo Sapiens
uuuauguuaagaggauugggccaggcacauca

SEQ ID NO: 105565 - RNA, 32 nt, Homo Sapiens
uuuagagccggguaggggagcgcacggccaga

SEQ ID NO: 105566 - RNA, 32 nt, Homo Sapiens
ucguuugcaaaugucaguuuccucuccugucc

SEQ ID NO: 105567 - RNA, 31 nt, Homo Sapiens
aauugucauuucccucaaccaaauaaaguaa

SEQ ID NO: 105568 - RNA, 32 nt, Homo Sapiens
agggcagcauauaaaaacaucagucccgagga

SEQ ID NO: 105569 - RNA, 32 nt, Homo Sapiens
gcggagcccaacugcgcagacccugccacucu

SEQ ID NO: 105570 - RNA, 32 nt, Homo Sapiens
ugagagguugggcuggcagaucaugaggucag

SEQ ID NO: 105571 - RNA, 32 nt, Homo Sapiens
uggaugugauagguggucuuuuccuguuaaca

SEQ ID NO: 105572 - RNA, 32 nt, Homo Sapiens
ggauuuugagggugggggugcucucucugagg

SEQ ID NO: 105573 - RNA, 32 nt, Homo Sapiens
gugauugucugagugagugaaacuacaagagg

SEQ ID NO: 105574 - RNA, 32 nt, Homo Sapiens
uuuuccauuuugucauccaagguagcugugca

SEQ ID NO: 105575 - RNA, 32 nt, Homo Sapiens
gggugggagugggugcgcguguguguauguga

SEQ ID NO: 105576 - RNA, 32 nt, Homo Sapiens
auguccucaauccuuucuuggccucaguuucu

SEQ ID NO: 105577 - RNA, 32 nt, Homo Sapiens
aggugugugaaugggaaccugcagauuaucuc

SEQ ID NO: 105578 - RNA, 32 nt, Homo Sapiens
accucuuccuuccgcuccuuuaccuaccaccu

SEQ ID NO: 105579 - RNA, 32 nt, Homo Sapiens
ccuacucuagaauuucagcagugacauuggag

SEQ ID NO: 105580 - RNA, 32 nt, Homo Sapiens
uucagccuaggucuuuccccuuccguucguuc

SEQ ID NO: 105581 - RNA, 32 nt, Homo Sapiens
agaucacagaggcagccaaggcucaggaaaaa

SEQ ID NO: 105582 - RNA, 32 nt, Homo Sapiens
cauccaaaggugcauccagauaugucuguguu

SEQ ID NO: 105583 - RNA, 32 nt, Homo Sapiens
ggguucaauuuaaaauaggagaggcuuucucu

SEQ ID NO: 105584 - RNA, 32 nt, Homo Sapiens
auccuuagcauuaacuuaaugauggagaagag

SEQ ID NO: 105585 - RNA, 32 nt, Homo Sapiens
ccgagcagcucgccgcgcaggccaggccguac

SEQ ID NO: 105586 - RNA, 32 nt, Homo Sapiens
gcugcuccagcugccuggcgggccccaugcac

SEQ ID NO: 105587 - RNA, 32 nt, Homo Sapiens
uuuaugguagagaauacguugaguuuggcucu

SEQ ID NO: 105588 - RNA, 32 nt, Homo Sapiens
gguaaggauuuucagugccauuuagcaaaacg

SEQ ID NO: 105589 - RNA, 32 nt, Homo Sapiens
uuuaagauggacugggaaaaacaucaacuccu

SEQ ID NO: 105590 - RNA, 32 nt, Homo Sapiens
agugaaccgcccuccaugggcuccacaucuuu

SEQ ID NO: 105591 - RNA, 32 nt, Homo Sapiens
acgggagcgcuuuggggacaaaaauucucccu

SEQ ID NO: 105592 - RNA, 32 nt, Homo Sapiens
cugcgggcgcacggaggcccgcgcugcuaguc

SEQ ID NO: 105593 - RNA, 32 nt, Homo Sapiens
gaugugcccccuucccugugggugcuggguag

SEQ ID NO: 105594 - RNA, 32 nt, Homo Sapiens
ugagccucuucgcagccucguuuucuguugac

SEQ ID NO: 105595 - RNA, 32 nt, Homo Sapiens
ccgcaccgcuuccacaaaauagcaaugugguu

SEQ ID NO: 105596 - RNA, 31 nt, Homo Sapiens
aggcaucuguggacucaaggaguccagguga

SEQ ID NO: 105597 - RNA, 32 nt, Homo Sapiens
aauugagggaaggaagcagauucggaggggug

SEQ ID NO: 105598 - RNA, 32 nt, Homo Sapiens
uucuuauuucuaaaugaucaagaguacacuuc

SEQ ID NO: 105599 - RNA, 32 nt, Homo Sapiens
gcuggguguaaucucagaaaaauacauucagg

SEQ ID NO: 105600 - RNA, 32 nt, Homo Sapiens
ugaguccugggguuggggagggggucgggguc

SEQ ID NO: 105601 - RNA, 32 nt, Homo Sapiens
uuggucguuaggaaacauccacacugaagagg

SEQ ID NO: 105602 - RNA, 32 nt, Homo Sapiens
ccuggacccagcugugcagcuccuuguccuuc

SEQ ID NO: 105603 - RNA, 32 nt, Homo Sapiens
acaagggcacaccaccacgcccagcuaauuuu

SEQ ID NO: 105604 - RNA, 32 nt, Homo Sapiens
cucuggaccgcgagccgcgcgcgccgggaccu

SEQ ID NO: 105605 - RNA, 32 nt, Homo Sapiens
uggguccugguucaugggugacaacuuuggaa

SEQ ID NO: 105606 - RNA, 32 nt, Homo Sapiens
uguauuauuggaaacuaauacuguagaggaga

SEQ ID NO: 105607 - RNA, 32 nt, Homo Sapiens
ggggggaggaggaggaggaggaguucguggau

SEQ ID NO: 105608 - RNA, 32 nt, Homo Sapiens
caacuugaugucaaaucacauuacuggguaau

SEQ ID NO: 105609 - RNA, 32 nt, Homo Sapiens
uggaaacuugaacuaaugauagauaguauuuu

SEQ ID NO: 105610 - RNA, 32 nt, Homo Sapiens
auagcucuauccuuaagaaguauuuccuuucc

SEQ ID NO: 105611 - RNA, 32 nt, Homo Sapiens
ggagccagagcaagucagaauuugguuuauug

SEQ ID NO: 105612 - RNA, 32 nt, Homo Sapiens
aaagagaaauccugcacccaucagccaacacu

SEQ ID NO: 105613 - RNA, 32 nt, Homo Sapiens
uuucuggacucucaugcccccaucuccgaccu

SEQ ID NO: 105614 - RNA, 32 nt, Homo Sapiens
gacuguggaucaguugauguacacuuguauua

SEQ ID NO: 105615 - RNA, 32 nt, Homo Sapiens
uugaauguuuugaacccaacuacuugucauag

SEQ ID NO: 105616 - RNA, 32 nt, Homo Sapiens
cagcuucccguccacgacuguuguccuuacug

SEQ ID NO: 105617 - RNA, 32 nt, Homo Sapiens
acuauccagugauccucaaacacacaaacuau

SEQ ID NO: 105618 - RNA, 32 nt, Homo Sapiens
uccccgccucaccccgccuccuccugcucaug

SEQ ID NO: 105619 - RNA, 31 nt, Homo Sapiens
cccagagcgggcagccugcccccuccaccgc

SEQ ID NO: 105620 - RNA, 32 nt, Homo Sapiens
cccaugugaagcugauguuugauuccaguuuc

SEQ ID NO: 105621 - RNA, 32 nt, Homo Sapiens
uuuuucucauuucuaauugaagaagaaaggga

SEQ ID NO: 105622 - RNA, 32 nt, Homo Sapiens
uauuauuguuuaucauaaaacauauuauguuc

SEQ ID NO: 105623 - RNA, 32 nt, Homo Sapiens
uauauuguuguuuuuucuuaaugugucaaaau

SEQ ID NO: 105624 - RNA, 32 nt, Homo Sapiens
gagcccccgagccccagucucuucagacucau

SEQ ID NO: 105625 - RNA, 32 nt, Homo Sapiens
ccggacaggaaucaagagaaaacuacuuagug

SEQ ID NO: 105626 - RNA, 32 nt, Homo Sapiens
gggaggcuuaggcaggagaauuccuugaaccc

SEQ ID NO: 105627 - RNA, 32 nt, Homo Sapiens
uaaauuuuaagugguuuuuccaaaaaagcaca

SEQ ID NO: 105628 - RNA, 32 nt, Homo Sapiens
aacuuuugccaguggaauggauaaacuauuga

SEQ ID NO: 105629 - RNA, 32 nt, Homo Sapiens
cucucagcccgccccguguggccgcccgggug

SEQ ID NO: 105630 - RNA, 32 nt, Homo Sapiens
ccagggcuccuguggcagcugccccuggcacc

SEQ ID NO: 105631 - RNA, 32 nt, Homo Sapiens
cuuuuuccaacuucucacuccuccuuacuagg

SEQ ID NO: 105632 - RNA, 32 nt, Homo Sapiens
uuguguauauauacauauacaaauacaacauu

SEQ ID NO: 105633 - RNA, 32 nt, Homo Sapiens
uugcauauuuuguugaugugguaaauguaguu

SEQ ID NO: 105634 - RNA, 32 nt, Homo Sapiens
gaaucgcuuuccuuccuccccuuuugcccccg

SEQ ID NO: 105635 - RNA, 32 nt, Homo Sapiens
ccucucaaagugcugggauuaaaggcguaagc

SEQ ID NO: 105636 - RNA, 32 nt, Homo Sapiens
ucauccuuucccucucccaguccauuuccaaa

SEQ ID NO: 105637 - RNA, 32 nt, Homo Sapiens
cugguccucuacaggcucaagcuuaucugggc

SEQ ID NO: 105638 - RNA, 32 nt, Homo Sapiens
ucuuuaaugcuguuuccucauuuauuguguga

SEQ ID NO: 105639 - RNA, 32 nt, Homo Sapiens
gcuccagcauauaaggaaaguguucaaggcca

SEQ ID NO: 105640 - RNA, 32 nt, Homo Sapiens
cuaauauugaaauauaauaugauuugucaggu

SEQ ID NO: 105641 - RNA, 32 nt, Homo Sapiens
ggagugcccuggcgcgaucucggcucaccgca

SEQ ID NO: 105642 - RNA, 32 nt, Homo Sapiens
cccggcaucccgauggccgccgcugggccccg

SEQ ID NO: 105643 - RNA, 32 nt, Homo Sapiens
auuugcuaucaugucagugaacgccaggagug

SEQ ID NO: 105644 - RNA, 32 nt, Homo Sapiens
caaaaagcaaaauaaacuuuucaucuuaaaga

SEQ ID NO: 105645 - RNA, 32 nt, Homo Sapiens
uuguuuuagcuaaagcacuaaucuacugccag

SEQ ID NO: 105646 - RNA, 32 nt, Homo Sapiens
cucuagcucuggugggaggcccggggcccuuc

SEQ ID NO: 105647 - RNA, 32 nt, Homo Sapiens
ugcauuugugucaucuuguugccauggaguug

SEQ ID NO: 105648 - RNA, 32 nt, Homo Sapiens
cuuugagaugacccaugagacccuguacuugg

SEQ ID NO: 105649 - RNA, 32 nt, Homo Sapiens
guagugucugaagugauuaaggagcuugggga

SEQ ID NO: 105650 - RNA, 32 nt, Homo Sapiens
caacucacagcuugcggggagugggccuucuc

SEQ ID NO: 105651 - RNA, 32 nt, Homo Sapiens
ugccuuuucuugggccucccuccagcuccuga

SEQ ID NO: 105652 - RNA, 32 nt, Homo Sapiens
acaggcguccacuaccacgcccggcuaauuuu

SEQ ID NO: 105653 - RNA, 30 nt, Homo Sapiens
cauagaggcaggcaagccguggauuuugca

SEQ ID NO: 105654 - RNA, 32 nt, Homo Sapiens
agucucaacacuguuucuuuuucagaaguuuu

SEQ ID NO: 105655 - RNA, 32 nt, Homo Sapiens
gccggccccugccccacccccacccacgggug

SEQ ID NO: 105656 - RNA, 32 nt, Homo Sapiens
ccacccagcccgcuccugacccuuaucuuccc

SEQ ID NO: 105657 - RNA, 32 nt, Homo Sapiens
ugcgagaagcugaacggaaacaacaauuauau

SEQ ID NO: 105658 - RNA, 32 nt, Homo Sapiens
aggcucuugcuagaucagcaccggagguggaa

SEQ ID NO: 105659 - RNA, 32 nt, Homo Sapiens
uacuauguauguuauaggccuuugaaauggau

SEQ ID NO: 105660 - RNA, 32 nt, Homo Sapiens
aaccccaugugagcgugcccacaccagccgcc

SEQ ID NO: 105661 - RNA, 32 nt, Homo Sapiens
agccaggugccuguggcugugccugggagugg

SEQ ID NO: 105662 - RNA, 32 nt, Homo Sapiens
ugggugggaaagcucacuuccaugaaggaugu

SEQ ID NO: 105663 - RNA, 32 nt, Homo Sapiens
acuuuccuuguacauuuggagaguggcauugc

SEQ ID NO: 105664 - RNA, 32 nt, Homo Sapiens
cccacugcacuccagccugggcgacagaacga

SEQ ID NO: 105665 - RNA, 32 nt, Homo Sapiens
cuuuauuuucuuuuucuuuuuuaaauucuuag

SEQ ID NO: 105666 - RNA, 32 nt, Homo Sapiens
gguaauucucuaggaaaacuacaggggaaagu

SEQ ID NO: 105667 - RNA, 32 nt, Homo Sapiens
gugaacugccccagcgaucucugcugugcuug

SEQ ID NO: 105668 - RNA, 32 nt, Homo Sapiens
caauuuccucaucuugaaaugaggauaauaau

SEQ ID NO: 105669 - RNA, 32 nt, Homo Sapiens
cuacuaaaacaaugaugguuauuuuagaugug

SEQ ID NO: 105670 - RNA, 30 nt, Homo Sapiens
gggccuaaaggugcugcaggagcuuucaca

SEQ ID NO: 105671 - RNA, 32 nt, Homo Sapiens
aacugcaggggagaggguggggcuggaaggaa

SEQ ID NO: 105672 - RNA, 32 nt, Homo Sapiens
ggaauuagcauuaaacuuaaauaaaacaaacc

SEQ ID NO: 105673 - RNA, 32 nt, Homo Sapiens
uuauuuucuggcccuucuuaauauuuaaaaau

SEQ ID NO: 105674 - RNA, 32 nt, Homo Sapiens
guuuguuaagguuuauacuauuuuuggauugu

SEQ ID NO: 105675 - RNA, 32 nt, Homo Sapiens
ccagaaacuggcuuagaggagcuccaaauaug

SEQ ID NO: 105676 - RNA, 32 nt, Homo Sapiens
aacaggaaacaguauuguaugauauauuuaua

SEQ ID NO: 105677 - RNA, 32 nt, Homo Sapiens
uuugucacagaaaucagaggagagaugguguu

SEQ ID NO: 105678 - RNA, 32 nt, Homo Sapiens
acaaauucaaggacaaccugucuuugagccag

SEQ ID NO: 105679 - RNA, 32 nt, Homo Sapiens
gaauuugggaaccugaauagcucugcaaaaaa

SEQ ID NO: 105680 - RNA, 32 nt, Homo Sapiens
gauacgggcugcuggacgccgggcugcuggug

SEQ ID NO: 105681 - RNA, 32 nt, Homo Sapiens
uuggaacauaucuguuuuaacagcaagagauc

SEQ ID NO: 105682 - RNA, 32 nt, Homo Sapiens
gccuggcgcuggcgcuacgcccccgggccccu

SEQ ID NO: 105683 - RNA, 32 nt, Homo Sapiens
cagucaaccagcuguagaugggcuuguuccga

SEQ ID NO: 105684 - RNA, 32 nt, Homo Sapiens
gaaaauggguauauuucuguaaacauacaacc

SEQ ID NO: 105685 - RNA, 32 nt, Homo Sapiens
cuuuuucgguucucuuuugucugaccucucuc

SEQ ID NO: 105686 - RNA, 32 nt, Homo Sapiens
gaggacucuggaccuaggaaaagaggcuuuug

SEQ ID NO: 105687 - RNA, 32 nt, Homo Sapiens
uucuaaccacugaggcucucuaaucuuccucu

SEQ ID NO: 105688 - RNA, 32 nt, Homo Sapiens
acugaucaugugaaguggugucuuaaacaacu

SEQ ID NO: 105689 - RNA, 32 nt, Homo Sapiens
gaggagggcagagggaagauugauuugcucau

SEQ ID NO: 105690 - RNA, 32 nt, Homo Sapiens
guccauacacaucagugagcagauguaguuug

SEQ ID NO: 105691 - RNA, 32 nt, Homo Sapiens
cugcugggauccacuguuuccacacagcggga

SEQ ID NO: 105692 - RNA, 32 nt, Homo Sapiens
gaagcagucuugcucuguuacccaggcuggag

SEQ ID NO: 105693 - RNA, 32 nt, Homo Sapiens
caugaagaguuuaguuuuuuuacuuuauaaac

SEQ ID NO: 105694 - RNA, 32 nt, Homo Sapiens
uucuaucagucgcacuucggucucaaauacua

SEQ ID NO: 105695 - RNA, 32 nt, Homo Sapiens
uuguacagucuagcauaaacagcaaauuuuaa

SEQ ID NO: 105696 - RNA, 32 nt, Homo Sapiens
ucugcaugagagaagaugucaaauggagagcc

SEQ ID NO: 105697 - RNA, 32 nt, Homo Sapiens
auucugaugagcauuacuauucacugaugcag

SEQ ID NO: 105698 - RNA, 30 nt, Homo Sapiens
cguggaggaaggcgcgccgccccgagcugg

SEQ ID NO: 105699 - RNA, 32 nt, Homo Sapiens
uagugacaauguguuuccugugcacucgugaa

SEQ ID NO: 105700 - RNA, 32 nt, Homo Sapiens
gagcccuucuaccuggcucuaucucacuggcu

SEQ ID NO: 105701 - RNA, 32 nt, Homo Sapiens
ugucauggugaaaucugauugaguaaccaagc

SEQ ID NO: 105702 - RNA, 32 nt, Homo Sapiens
aauccuuacaagguuaagaugauucaauauca

SEQ ID NO: 105703 - RNA, 32 nt, Homo Sapiens
cugguccccgucccuuugccgcccucgucagg

SEQ ID NO: 105704 - RNA, 32 nt, Homo Sapiens
ugcucaaguaccuccgccggccugcccugcuc

SEQ ID NO: 105705 - RNA, 32 nt, Homo Sapiens
ugaaauguucuuaucccaugguuagccuuuca

SEQ ID NO: 105706 - RNA, 32 nt, Homo Sapiens
augcaaaaacaguaauccuugugaaauuacgu

SEQ ID NO: 105707 - RNA, 32 nt, Homo Sapiens
ggcuaugggauucugacuaccuugcuuacaga

SEQ ID NO: 105708 - RNA, 32 nt, Homo Sapiens
aauaaguuauuuauguguauauguucaauaaa

SEQ ID NO: 105709 - RNA, 32 nt, Homo Sapiens
uaacugucaagauuaccuuuuguuuucaccug

SEQ ID NO: 105710 - RNA, 32 nt, Homo Sapiens
aauggagucuugcucugucacccaggcuggag

SEQ ID NO: 105711 - RNA, 32 nt, Homo Sapiens
aacggagucucgcucugucacccaggcuggag

SEQ ID NO: 105712 - RNA, 32 nt, Homo Sapiens
gccacaucccggggcucugguaccgggaggca

SEQ ID NO: 105713 - RNA, 32 nt, Homo Sapiens
aucccacucccucucuuuccugcuccauuggu

SEQ ID NO: 105714 - RNA, 32 nt, Homo Sapiens
acccagccaagagcugaggguaagggcaggua

SEQ ID NO: 105715 - RNA, 32 nt, Homo Sapiens
acagcagcucuggaagcagagcccuggaugaa

SEQ ID NO: 105716 - RNA, 32 nt, Homo Sapiens
uucaacuuacacaaaacaagccagcaucugau

SEQ ID NO: 105717 - RNA, 32 nt, Homo Sapiens
caaguaacaaaauaaaaugguggcaagaacua

SEQ ID NO: 105718 - RNA, 32 nt, Homo Sapiens
ugggagaaaauuauaauauuuaguauuuguac

SEQ ID NO: 105719 - RNA, 32 nt, Homo Sapiens
agagagggaagcugaggcccauggccacaucc

SEQ ID NO: 105720 - RNA, 32 nt, Homo Sapiens
gacuccgggcagggcugcucccuccucugcuc

SEQ ID NO: 105721 - RNA, 32 nt, Homo Sapiens
gcagccccgggcggcgggugggaagaggacua

SEQ ID NO: 105722 - RNA, 32 nt, Homo Sapiens
acaacuaugaucuucuaugaaauggugguacc

SEQ ID NO: 105723 - RNA, 32 nt, Homo Sapiens
auuuaaaauaaaugcagauguuuacuuggaaa

SEQ ID NO: 105724 - RNA, 32 nt, Homo Sapiens
auguaaucaucaaaaugaugcauauuguuaca

SEQ ID NO: 105725 - RNA, 32 nt, Homo Sapiens
uugcgccccgcgccugggguggggggugcgaa

SEQ ID NO: 105726 - RNA, 32 nt, Homo Sapiens
agauuugaaaauauauccaugaacauuucaac

SEQ ID NO: 105727 - RNA, 32 nt, Homo Sapiens
uuguaacugucaacuauuaaauacauugauuu

SEQ ID NO: 105728 - RNA, 28 nt, Homo Sapiens
ugucacuugucaggaauguguuuuuacc

SEQ ID NO: 105729 - RNA, 28 nt, Homo Sapiens
cagaugaauuuuccuucuaacagucagg

SEQ ID NO: 105730 - RNA, 32 nt, Homo Sapiens
ccgcccggccccagcccuagcgcuggccgcga

SEQ ID NO: 105731 - RNA, 32 nt, Homo Sapiens
ggagacaaaaauauacaugugaaauaaaacuc

SEQ ID NO: 105732 - RNA, 32 nt, Homo Sapiens
ggcacgaggcccuucccugcccgacacccaga

SEQ ID NO: 105733 - RNA, 32 nt, Homo Sapiens
aguguauagauuagaagugcucauuaccugca

SEQ ID NO: 105734 - RNA, 32 nt, Homo Sapiens
cucaccauaagggucccccacucuaaagcaaa

SEQ ID NO: 105735 - RNA, 32 nt, Homo Sapiens
ccuuggccacccaaaguguugggauuauaggc

SEQ ID NO: 105736 - RNA, 32 nt, Homo Sapiens
uuugaggcccucccucagcucucuguggguag

SEQ ID NO: 105737 - RNA, 32 nt, Homo Sapiens
gacaagcuucagcccacucuugaagccucuga

SEQ ID NO: 105738 - RNA, 32 nt, Homo Sapiens
cugcaugguacauuguugauuguuaugacugg

SEQ ID NO: 105739 - RNA, 32 nt, Homo Sapiens
uccauaaauauguguugaaugguugagaucuu

SEQ ID NO: 105740 - RNA, 32 nt, Homo Sapiens
cucgccggcccgucgcccgcucgccaugcaac

SEQ ID NO: 105741 - RNA, 32 nt, Homo Sapiens
cagggaccccaccacacccucccagcugucuc

SEQ ID NO: 105742 - RNA, 32 nt, Homo Sapiens
cguuggcccggguaucccagcgcggacccacg

SEQ ID NO: 105743 - RNA, 32 nt, Homo Sapiens
augucaaggcugcagugagcugugauugugcc

SEQ ID NO: 105744 - RNA, 32 nt, Homo Sapiens
auucagaaauacccaggaggauuccugcaggc

SEQ ID NO: 105745 - RNA, 32 nt, Homo Sapiens
uauacaaguauuugcuuuuaucaaaauaauuc

SEQ ID NO: 105746 - RNA, 32 nt, Homo Sapiens
acaagcccuccgccuccuugccugcagagggc

SEQ ID NO: 105747 - RNA, 32 nt, Homo Sapiens
uuucuccaccugcuccuccuccucugacucgg

SEQ ID NO: 105748 - RNA, 32 nt, Homo Sapiens
gacuaccaggaaggggagcggcugggauggcg

SEQ ID NO: 105749 - RNA, 32 nt, Homo Sapiens
gaucaacccaagucuagucuaugcagaauccc

SEQ ID NO: 105750 - RNA, 30 nt, Homo Sapiens
cuaagccaaacacagcagcaaacacaggaa

SEQ ID NO: 105751 - RNA, 32 nt, Homo Sapiens
ucucuacaaaaauuuuuuucuaaauuaaccgg

SEQ ID NO: 105752 - RNA, 32 nt, Homo Sapiens
acauuugucaccucucuuucuucccuauccug

SEQ ID NO: 105753 - RNA, 30 nt, Homo Sapiens
agcugcugggcgugcauccgaaaggugaga

SEQ ID NO: 105754 - RNA, 32 nt, Homo Sapiens
ccuguccuguguuccucguggggauggaacga

SEQ ID NO: 105755 - RNA, 27 nt, Homo Sapiens
auaucaccucucuucagccccuagugc

SEQ ID NO: 105756 - RNA, 32 nt, Homo Sapiens
aaguucagucuagauggcacaaaccaccucuc

SEQ ID NO: 105757 - RNA, 32 nt, Homo Sapiens
cuucgaggccccaggggucuccaccccagccc

SEQ ID NO: 105758 - RNA, 32 nt, Homo Sapiens
ucucucuucuuaugccuuguaccugcugguau

SEQ ID NO: 105759 - RNA, 32 nt, Homo Sapiens
ccauuccacgggaacggcuggcagcuggcgug

SEQ ID NO: 105760 - RNA, 32 nt, Homo Sapiens
cccuaagauaucuauuuguauaaucucuggcu

SEQ ID NO: 105761 - RNA, 32 nt, Homo Sapiens
augagaauaauccuaauacccaucauuuauug

SEQ ID NO: 105762 - RNA, 32 nt, Homo Sapiens
uauaacuggggguggggugaggguaggaggca

SEQ ID NO: 105763 - RNA, 32 nt, Homo Sapiens
ugggccaccagaccgaaaugguugcugagaaa

SEQ ID NO: 105764 - RNA, 32 nt, Homo Sapiens
gaggaacaauuuuuaaauauaaaacauuccca

SEQ ID NO: 105765 - RNA, 32 nt, Homo Sapiens
uggagaauugguugaguagccaaggaagguca

SEQ ID NO: 105766 - RNA, 32 nt, Homo Sapiens
uaaguccaaacacagaugacagugcugugugg

SEQ ID NO: 105767 - RNA, 32 nt, Homo Sapiens
cuguagaugggcugaaaauagcaagagaacua

SEQ ID NO: 105768 - RNA, 32 nt, Homo Sapiens
aagagcuuucccucccucacuuuuuccuuugu

SEQ ID NO: 105769 - RNA, 32 nt, Homo Sapiens
acagaaaauaagugucacuacggaugugaaga

SEQ ID NO: 105770 - RNA, 32 nt, Homo Sapiens
cuggacucagaauuguagggauaauaugaaug

SEQ ID NO: 105771 - RNA, 32 nt, Homo Sapiens
auauggucauuuguuuuaaauaacacccaccc

SEQ ID NO: 105772 - RNA, 32 nt, Homo Sapiens
ugcaucauuucuagcacagagcuggaggaaau

SEQ ID NO: 105773 - RNA, 29 nt, Homo Sapiens
agcuauggccccaguuguaaacucugccg

SEQ ID NO: 105774 - RNA, 32 nt, Homo Sapiens
cgcccgggcagguagcggccgcuggaauucua

SEQ ID NO: 105775 - RNA, 32 nt, Homo Sapiens
aauauaagauaaaagaggcugagaauuaccau

SEQ ID NO: 105776 - RNA, 32 nt, Homo Sapiens
uaagagaaaauauuuaugaacuauauuucuca

SEQ ID NO: 105777 - RNA, 32 nt, Homo Sapiens
ccgguggguucguggucuuacuggccucaaga

SEQ ID NO: 105778 - RNA, 29 nt, Homo Sapiens
cagcuagcgggagccgggacgccggugca

SEQ ID NO: 105779 - RNA, 32 nt, Homo Sapiens
uaauaaugacgauaauacuucuuuuccacauc

SEQ ID NO: 105780 - RNA, 32 nt, Homo Sapiens
aaccggagagauuuuccucugugcagugcucu

SEQ ID NO: 105781 - RNA, 32 nt, Homo Sapiens
gcugccaucuugcuuuucuuuggacaacagga

SEQ ID NO: 105782 - RNA, 32 nt, Homo Sapiens
cagagcugcgggcugagguuccuccguucggc

SEQ ID NO: 105783 - RNA, 32 nt, Homo Sapiens
caucagacugcuucaucuuuuaucucagaaau

SEQ ID NO: 105784 - RNA, 32 nt, Homo Sapiens
cagaagccgagaacaccaggcacacggggugg

SEQ ID NO: 105785 - RNA, 32 nt, Homo Sapiens
cccuucgcaccucgccccucaguccccccuug

SEQ ID NO: 105786 - RNA, 30 nt, Homo Sapiens
ccccgccaugcuccugcugcuggggcugug

SEQ ID NO: 105787 - RNA, 32 nt, Homo Sapiens
ccuauggucgccugggucccucugagccccgg

SEQ ID NO: 105788 - RNA, 32 nt, Homo Sapiens
caggaguccuuccugguagccagcucagaaua

SEQ ID NO: 105789 - RNA, 32 nt, Homo Sapiens
aauggaaaagaauuuuacaugcacuuuaaaau

SEQ ID NO: 105790 - RNA, 32 nt, Homo Sapiens
uuuaccaauaaauuauuccaaaugauuuacug

SEQ ID NO: 105791 - RNA, 32 nt, Homo Sapiens
uuggaugagaccagacaagaaaaggauuaaac

SEQ ID NO: 105792 - RNA, 32 nt, Homo Sapiens
gccagggagcccaggugcucggcgucugaacg

SEQ ID NO: 105793 - RNA, 32 nt, Homo Sapiens
gggugguacgauuucaacacugguuaauuuca

SEQ ID NO: 105794 - RNA, 32 nt, Homo Sapiens
cacaaggacauuccugccuggggagccgccuc

SEQ ID NO: 105795 - RNA, 32 nt, Homo Sapiens
ucccuguacuggaaucagguccagggcccccc

SEQ ID NO: 105796 - RNA, 32 nt, Homo Sapiens
ugacagacaacuuuugagagggcagcagacuc

SEQ ID NO: 105797 - RNA, 32 nt, Homo Sapiens
uucuuuuuuuucugcaguccguuguucuacuu

SEQ ID NO: 105798 - RNA, 32 nt, Homo Sapiens
uacugucaaaaaugccucuuggagaaguuaug

SEQ ID NO: 105799 - RNA, 32 nt, Homo Sapiens
cugucgcccugagcugauuuugaaagauggua

SEQ ID NO: 105800 - RNA, 32 nt, Homo Sapiens
gagagccgaaaauggacccaaguggggucaaa

SEQ ID NO: 105801 - RNA, 32 nt, Homo Sapiens
acaauaauauuuuucucuuugucuccaacuaa

SEQ ID NO: 105802 - RNA, 32 nt, Homo Sapiens
ggcugugguccccguggcuggcaucuggcuug

SEQ ID NO: 105803 - RNA, 32 nt, Homo Sapiens
ggccugagaaauauuuuggaaaaguuaaauaa

SEQ ID NO: 105804 - RNA, 32 nt, Homo Sapiens
ggccaccaaucccgcccuccccggcuccuccg

SEQ ID NO: 105805 - RNA, 32 nt, Homo Sapiens
ggguacaggggccagcagcugcgcccgcccca

SEQ ID NO: 105806 - RNA, 32 nt, Homo Sapiens
ggcgcccccuggaggcagagcacugagcugga

SEQ ID NO: 105807 - RNA, 32 nt, Homo Sapiens
accauccuggcuaacacagugaaaccucaucu

SEQ ID NO: 105808 - RNA, 32 nt, Homo Sapiens
cugcgccagggccccaggcuggcgcgcacucc

SEQ ID NO: 105809 - RNA, 32 nt, Homo Sapiens
cugcucacccucgcccaccccugacgccgcgg

SEQ ID NO: 105810 - RNA, 32 nt, Homo Sapiens
auuucuuuuuaaaaagcuuuaggucuugccgg

SEQ ID NO: 105811 - RNA, 32 nt, Homo Sapiens
ugguuguuugaaaagugaaguacugcagcaag

SEQ ID NO: 105812 - RNA, 32 nt, Homo Sapiens
ugugaggcuguuuggcagugcccgccaacccc

SEQ ID NO: 105813 - RNA, 32 nt, Homo Sapiens
gauucucccuauuuauacucagacugaccaag

SEQ ID NO: 105814 - RNA, 32 nt, Homo Sapiens
uuuuauaugagcauauuuuauguuggaauaaa

SEQ ID NO: 105815 - RNA, 29 nt, Homo Sapiens
ccagguucuauccaaaucuaugugggcau

SEQ ID NO: 105816 - RNA, 32 nt, Homo Sapiens
aaauuguggcauguauuuuugggugaagauca

SEQ ID NO: 105817 - RNA, 32 nt, Homo Sapiens
uuccccuagugcccucuuuucccuagggcauu

SEQ ID NO: 105818 - RNA, 32 nt, Homo Sapiens
uaaguguggucaucaggucaaagggaaauagg

SEQ ID NO: 105819 - RNA, 32 nt, Homo Sapiens
aacaaacagaaaacagaaaacaaaaaaaccuc

SEQ ID NO: 105820 - RNA, 32 nt, Homo Sapiens
gucuccuagggucuuugagucagcuuuaugaa

SEQ ID NO: 105821 - RNA, 32 nt, Homo Sapiens
ucuucgcgguagcugggaccgccguucagucg

SEQ ID NO: 105822 - RNA, 32 nt, Homo Sapiens
cccucgggccccagcccucgcugccacccggg

SEQ ID NO: 105823 - RNA, 30 nt, Homo Sapiens
agaugucuggacugcaauccugcacaguuu

SEQ ID NO: 105824 - RNA, 32 nt, Homo Sapiens
ggucauugacuucgggcuggaccguugcccuc

SEQ ID NO: 105825 - RNA, 32 nt, Homo Sapiens
uccuuuuguaaaauuucuuguguugugugauc

SEQ ID NO: 105826 - RNA, 32 nt, Homo Sapiens
uguuuugccucuucuuuuccuacaaguuaaau

SEQ ID NO: 105827 - RNA, 32 nt, Homo Sapiens
ucugcuggauaaaaugagguucaacuguugau

SEQ ID NO: 105828 - RNA, 32 nt, Homo Sapiens
auuguugucaucuauuuacuagauacauguuu

SEQ ID NO: 105829 - RNA, 32 nt, Homo Sapiens
cuaagacgccggaggagguggcggcggcuggg

SEQ ID NO: 105830 - RNA, 32 nt, Homo Sapiens
cgcuguaugcccuuuuuccuucuaagucaugu

SEQ ID NO: 105831 - RNA, 32 nt, Homo Sapiens
cagacucuggcauuuuaacaaucccaggugau

SEQ ID NO: 105832 - RNA, 32 nt, Homo Sapiens
aauaaguuguacauuugaugacaaauaaauca

SEQ ID NO: 105833 - RNA, 32 nt, Homo Sapiens
cacccauuuccagacaacuccacagcccagag

SEQ ID NO: 105834 - RNA, 30 nt, Homo Sapiens
cagccaugcuuugggcacucuggccaaggu

SEQ ID NO: 105835 - RNA, 32 nt, Homo Sapiens
ccgccacccgcggccacaccgcagggacccuc

SEQ ID NO: 105836 - RNA, 32 nt, Homo Sapiens
aauuuaauuuaaaugacaaaacccuaucuagu

SEQ ID NO: 105837 - RNA, 32 nt, Homo Sapiens
cuacggcugccugagaugggugugcacagugu

SEQ ID NO: 105838 - RNA, 32 nt, Homo Sapiens
gagccgcccgucucgccgcgcacgccucggcg

SEQ ID NO: 105839 - RNA, 32 nt, Homo Sapiens
ggagagcucccuccccggccuuguuuugcucu

SEQ ID NO: 105840 - RNA, 32 nt, Homo Sapiens
ggaggcaggcaaccgacccgcgcaccgguggc

SEQ ID NO: 105841 - RNA, 32 nt, Homo Sapiens
accaugcccagaugagagggugcacagaggca

SEQ ID NO: 105842 - RNA, 32 nt, Homo Sapiens
cccggaaguggcggcgcggucagggcuggccu

SEQ ID NO: 105843 - RNA, 32 nt, Homo Sapiens
aaugccaagugucaaaacaaccccauuaaaau

SEQ ID NO: 105844 - RNA, 32 nt, Homo Sapiens
gcuuuggcggcugguguuuuacuuacuuacac

SEQ ID NO: 105845 - RNA, 32 nt, Homo Sapiens
uuuaacuuauugggacugaauaaagaauggag

SEQ ID NO: 105846 - RNA, 32 nt, Homo Sapiens
cucaaucuaacccuccuccccuggggcuuugg

SEQ ID NO: 105847 - RNA, 32 nt, Homo Sapiens
cccgacuuagccagcccuggcuguuguauuac

SEQ ID NO: 105848 - RNA, 32 nt, Homo Sapiens
uucugaaagcugcacaaaacguagaaagaaga

SEQ ID NO: 105849 - RNA, 32 nt, Homo Sapiens
uucuuaacacugguagcuccugucccauucca

SEQ ID NO: 105850 - RNA, 32 nt, Homo Sapiens
uauuauacccaaaguucuuuuaaaaaauauuu

SEQ ID NO: 105851 - RNA, 32 nt, Homo Sapiens
acacggagcagguugggaccgcggcggguacc

SEQ ID NO: 105852 - RNA, 32 nt, Homo Sapiens
cccucccucuucugccuccccuccucagaaug

SEQ ID NO: 105853 - RNA, 32 nt, Homo Sapiens
cgccagcgcgccccgucggcagcucuccaucu

SEQ ID NO: 105854 - RNA, 32 nt, Homo Sapiens
ugccagccaacuuuuccauucuuauuccacuc

SEQ ID NO: 105855 - RNA, 32 nt, Homo Sapiens
ucgcggggggugccuccucccccugcgauggg

SEQ ID NO: 105856 - RNA, 32 nt, Homo Sapiens
caguguacuuugcauuuuauacauuguaguuc

SEQ ID NO: 105857 - RNA, 32 nt, Homo Sapiens
cuggcaaagaugaauaggaaaaacuuugacuc

SEQ ID NO: 105858 - RNA, 32 nt, Homo Sapiens
cucaagcaauccacccaccucagccuuccaag

SEQ ID NO: 105859 - RNA, 32 nt, Homo Sapiens
aauguauauaaaauucucuguuggaauuugcc

SEQ ID NO: 105860 - RNA, 31 nt, Homo Sapiens
uuuaaaaaauaaaaacaaguaucucaugcuc

SEQ ID NO: 105861 - RNA, 32 nt, Homo Sapiens
caucgcaccaaaaaaccugucaauuaugccau

SEQ ID NO: 105862 - RNA, 32 nt, Homo Sapiens
uggagggugcucacugaggagcagccaggugc

SEQ ID NO: 105863 - RNA, 32 nt, Homo Sapiens
ugaagaaaacaaagaugaugauaauguuuuca

SEQ ID NO: 105864 - RNA, 32 nt, Homo Sapiens
aacuggcugaggggauaccauaaaaagaggau

SEQ ID NO: 105865 - RNA, 32 nt, Homo Sapiens
cgguggcguuggugcuguuugcggaugcugau

SEQ ID NO: 105866 - RNA, 32 nt, Homo Sapiens
gcugcggaaugggacccuagugucccaguuuc

SEQ ID NO: 105867 - RNA, 32 nt, Homo Sapiens
cagguaaucccucuccuuccgcuggguccccu

SEQ ID NO: 105868 - RNA, 32 nt, Homo Sapiens
cuguguagaugauuaacugacuuuuuaauauu

SEQ ID NO: 105869 - RNA, 32 nt, Homo Sapiens
gcucggcccccggccgccgccggaccgagagu

SEQ ID NO: 105870 - RNA, 32 nt, Homo Sapiens
gaggguauauugcauuuacauuuguaaaagaa

SEQ ID NO: 105871 - RNA, 32 nt, Homo Sapiens
ccaacagcguggaugucgaugacuucaucaac

SEQ ID NO: 105872 - RNA, 32 nt, Homo Sapiens
agcagcacaucauuuuaucauuuuaucuucuu

SEQ ID NO: 105873 - RNA, 32 nt, Homo Sapiens
ugagcacuuaggagccuucugacuuaggguuu

SEQ ID NO: 105874 - RNA, 32 nt, Homo Sapiens
ugcgacugucuagaccccggcugcgcggcgaa

SEQ ID NO: 105875 - RNA, 32 nt, Homo Sapiens
gugggaaucuugagacucuuuggccauuuccc

SEQ ID NO: 105876 - RNA, 32 nt, Homo Sapiens
ccgaucacgcguuuuucuuuuucaaaaguuuu

SEQ ID NO: 105877 - RNA, 32 nt, Homo Sapiens
gggaauuauucacguggaugaccugauuuuau

SEQ ID NO: 105878 - RNA, 32 nt, Homo Sapiens
cguaugcuugggaugggggccgugccacccgu

SEQ ID NO: 105879 - RNA, 32 nt, Homo Sapiens
ugauuauggaaaugaagaaauaauuccauuaa

SEQ ID NO: 105880 - RNA, 32 nt, Homo Sapiens
agagacgacgcaaaauucugaaguccauuucc

SEQ ID NO: 105881 - RNA, 32 nt, Homo Sapiens
aaaaguggaauuucuuguuucuccagauuuuu

SEQ ID NO: 105882 - RNA, 32 nt, Homo Sapiens
uuucaaacgagggcacugccccugccugcccc

SEQ ID NO: 105883 - RNA, 32 nt, Homo Sapiens
auagaacgaggaaguggugacgcacugggcuc

SEQ ID NO: 105884 - RNA, 32 nt, Homo Sapiens
ccuggcccucuggguuggaaugaugaguugcc

SEQ ID NO: 105885 - RNA, 32 nt, Homo Sapiens
ucugaacucugcaguuaggcacaagaaagcua

SEQ ID NO: 105886 - RNA, 32 nt, Homo Sapiens
uggcgcccgcgcagcccucuuuggacacacac

SEQ ID NO: 105887 - RNA, 32 nt, Homo Sapiens
uggcuuuccaugcuccucucccuccaccuccu

SEQ ID NO: 105888 - RNA, 32 nt, Homo Sapiens
augucucuauauaaguaauauuuacaacccug

SEQ ID NO: 105889 - RNA, 32 nt, Homo Sapiens
ggccaugacagcggcucgggacaggcuccuuu

SEQ ID NO: 105890 - RNA, 32 nt, Homo Sapiens
gaaagacauaugaaaggaauuguaauuggcuu

SEQ ID NO: 105891 - RNA, 32 nt, Homo Sapiens
cuaugugauuauuuuucuuaauuguuauuuuu

SEQ ID NO: 105892 - RNA, 32 nt, Homo Sapiens
gacucgggcugcgucccggcccuuccacaucg

SEQ ID NO: 105893 - RNA, 31 nt, Homo Sapiens
uguacuuugugcucauuucagaaaauaaaac

SEQ ID NO: 105894 - RNA, 32 nt, Homo Sapiens
gccgcugccgcugccgcaccuccguagcugac

SEQ ID NO: 105895 - RNA, 32 nt, Homo Sapiens
aaaugaagugauugcaaugccaguauaacuga

SEQ ID NO: 105896 - RNA, 30 nt, Homo Sapiens
cagcugccgccgcugccgccgccgccacca

SEQ ID NO: 105897 - RNA, 31 nt, Homo Sapiens
uccacgcugccgggcagauaagggcagcugc

SEQ ID NO: 105898 - RNA, 32 nt, Homo Sapiens
ggucaacaccaaucauaugguauuugaaaacu

SEQ ID NO: 105899 - RNA, 32 nt, Homo Sapiens
gccacuaccaccccggccgccgcgcucgccuc

SEQ ID NO: 105900 - RNA, 27 nt, Homo Sapiens
aaguccagcuucuucaucuucccuucu

SEQ ID NO: 105901 - RNA, 32 nt, Homo Sapiens
ccacagcccccggcccggccacugcaggaugc

SEQ ID NO: 105902 - RNA, 32 nt, Homo Sapiens
cccccaacauucugcccucaccucugugccca

SEQ ID NO: 105903 - RNA, 32 nt, Homo Sapiens
cggccauuucccccagugccgcaacuugcugg

SEQ ID NO: 105904 - RNA, 32 nt, Homo Sapiens
ucuuuuagauauaaaaucauagcuagggugaa

SEQ ID NO: 105905 - RNA, 32 nt, Homo Sapiens
ugccugguaugaugaggauagaaaauuuuucc

SEQ ID NO: 105906 - RNA, 32 nt, Homo Sapiens
cugcagagccgucuucucagguugccugucgu

SEQ ID NO: 105907 - RNA, 32 nt, Homo Sapiens
ggaggcuccccggcugcggcgcgcacucccug

SEQ ID NO: 105908 - RNA, 32 nt, Homo Sapiens
uucccuuucuguuaacucugguaaucaacaga

SEQ ID NO: 105909 - RNA, 32 nt, Homo Sapiens
gagggaccagcuucuuuuucaguugucuuuag

SEQ ID NO: 105910 - RNA, 32 nt, Homo Sapiens
aggaaaagcagcagcugccugcucuccagccu

SEQ ID NO: 105911 - RNA, 32 nt, Homo Sapiens
gguucuggagggcaggcagccuugugucgggg

SEQ ID NO: 105912 - RNA, 32 nt, Homo Sapiens
cuggauggagucagggcgggggcacuguccuc

SEQ ID NO: 105913 - RNA, 32 nt, Homo Sapiens
uggacagcucuucuccucucuucaucccaucu

SEQ ID NO: 105914 - RNA, 32 nt, Homo Sapiens
gaagggauuggucuaugaaacaucaguucuug

SEQ ID NO: 105915 - RNA, 32 nt, Homo Sapiens
uugaaagaaccaguuauguccacuuuuggugg

SEQ ID NO: 105916 - RNA, 32 nt, Homo Sapiens
ggcaucaggaccaccgcuacaccucuugccag

SEQ ID NO: 105917 - RNA, 32 nt, Homo Sapiens
agcucaagaaauccaccugccuuagccuccca

SEQ ID NO: 105918 - RNA, 32 nt, Homo Sapiens
ccaaaaagaaucacccauccccugccucccac

SEQ ID NO: 105919 - RNA, 32 nt, Homo Sapiens
ugcccguaaucucagcacuuugggaggccaag

SEQ ID NO: 105920 - RNA, 32 nt, Homo Sapiens
ugccuauaauccuagcacuuugggaggucgag

SEQ ID NO: 105921 - RNA, 32 nt, Homo Sapiens
acuuguuauuauucuacuucucucuucuauga

SEQ ID NO: 105922 - RNA, 32 nt, Homo Sapiens
gguuccugcgcacugccuguuccuccugggug

SEQ ID NO: 105923 - RNA, 32 nt, Homo Sapiens
aagaaagagcugauccucuccucucuugaguu

SEQ ID NO: 105924 - RNA, 32 nt, Homo Sapiens
aauagguagugacuuuuuucuuuuucguggga

SEQ ID NO: 105925 - RNA, 29 nt, Homo Sapiens
gcugauggcugcgccgagggcggggcggg

SEQ ID NO: 105926 - RNA, 32 nt, Homo Sapiens
aggcuccugcacaugaaggugugugccugugg

SEQ ID NO: 105927 - RNA, 32 nt, Homo Sapiens
ggacauggguagcaauucuacccagagccuuc

SEQ ID NO: 105928 - RNA, 32 nt, Homo Sapiens
aagcucagggcaaucccuucccuccugucaac

SEQ ID NO: 105929 - RNA, 32 nt, Homo Sapiens
cggcggucaggaggcccggggucuaagaugua

SEQ ID NO: 105930 - RNA, 32 nt, Homo Sapiens
auuuuaaaacugugucuguuguagucuauagu

SEQ ID NO: 105931 - RNA, 32 nt, Homo Sapiens
ugggcagaauauuaaacuuauuuuguugccaa

SEQ ID NO: 105932 - RNA, 32 nt, Homo Sapiens
uggcaguuguuaauaaagcuugucaggauguu

SEQ ID NO: 105933 - RNA, 32 nt, Homo Sapiens
cacagaugcugauagucuguagagucaggaau

SEQ ID NO: 105934 - RNA, 32 nt, Homo Sapiens
ggacaggcuggagacgaggccggaguuugaga

SEQ ID NO: 105935 - RNA, 31 nt, Homo Sapiens
ccagagcugggucagagcucgagccagcggc

SEQ ID NO: 105936 - RNA, 32 nt, Homo Sapiens
cuucucaaucccagaaauauuuuacuggcaug

SEQ ID NO: 105937 - RNA, 32 nt, Homo Sapiens
gcacacgacugggauuccuuuggauaugagaa

SEQ ID NO: 105938 - RNA, 32 nt, Homo Sapiens
cuuaaggacaugcuucuagaaaacagaaagca

SEQ ID NO: 105939 - RNA, 32 nt, Homo Sapiens
gagaccucacuuuauuacaagaucuuuccaaa

SEQ ID NO: 105940 - RNA, 32 nt, Homo Sapiens
acccucuccagaugggagugcccccaacagca

SEQ ID NO: 105941 - RNA, 32 nt, Homo Sapiens
gaaccaucucaaaauaauuacaaauuuuuaga

SEQ ID NO: 105942 - RNA, 32 nt, Homo Sapiens
gaugcuacuuaaaguaaugaaugacguuuuaa

SEQ ID NO: 105943 - RNA, 32 nt, Homo Sapiens
uugagaaagaaacacuaacaaaaggaacaacg

SEQ ID NO: 105944 - RNA, 32 nt, Homo Sapiens
agaaaccaucuacauuccauggaauguuuuua

SEQ ID NO: 105945 - RNA, 30 nt, Homo Sapiens
gcccuuggcgcgcagcagcaggcgaacucc

SEQ ID NO: 105946 - RNA, 32 nt, Homo Sapiens
ccacacucaaaauaauugaaugguugaguugg

SEQ ID NO: 105947 - RNA, 32 nt, Homo Sapiens
ugagaaaaaugaauucuaucuucagaacugcg

SEQ ID NO: 105948 - RNA, 32 nt, Homo Sapiens
aguuaugaggcccagggccugagcucucuucc

SEQ ID NO: 105949 - RNA, 30 nt, Homo Sapiens
caucauuuuuggaugggggaagaguuauuu

SEQ ID NO: 105950 - RNA, 32 nt, Homo Sapiens
ugaaaaaccaaguuauacuaaaaacauuuuuu

SEQ ID NO: 105951 - RNA, 32 nt, Homo Sapiens
caaaauggcguagaaugaaaugccucucaccc

SEQ ID NO: 105952 - RNA, 32 nt, Homo Sapiens
aggacugcucuggacauucagaagcugagugu

SEQ ID NO: 105953 - RNA, 32 nt, Homo Sapiens
uugucccacacagauagcagccucuugcuugc

SEQ ID NO: 105954 - RNA, 32 nt, Homo Sapiens
agcuacuuggaaaguaucaucucuguucaggu

SEQ ID NO: 105955 - RNA, 32 nt, Homo Sapiens
cguacccagccuggucccauaucauagugaaa

SEQ ID NO: 105956 - RNA, 32 nt, Homo Sapiens
ugcgggcgcccggccccacucuccggaucugg

SEQ ID NO: 105957 - RNA, 32 nt, Homo Sapiens
cccuugagaaaacaacuccaguucucugccug

SEQ ID NO: 105958 - RNA, 32 nt, Homo Sapiens
agaccuuuuacaaaugauaccaauuaaacugc

SEQ ID NO: 105959 - RNA, 32 nt, Homo Sapiens
ucacccccucccucccaccccuggacugggcu

SEQ ID NO: 105960 - RNA, 32 nt, Homo Sapiens
ucucauuuccuggaauuuaucuucccagucuc

SEQ ID NO: 105961 - RNA, 32 nt, Homo Sapiens
ccugaaacagacccagacaaacagacagacag

SEQ ID NO: 105962 - RNA, 32 nt, Homo Sapiens
ccacaggaaggggcucuguucccuguauuguc

SEQ ID NO: 105963 - RNA, 32 nt, Homo Sapiens
caauuuaaaacgcaaguaaaauuguaggcauu

SEQ ID NO: 105964 - RNA, 32 nt, Homo Sapiens
cuuuuaguuacaugcaaauuaaggggcagauu

SEQ ID NO: 105965 - RNA, 32 nt, Homo Sapiens
gcaucacauauaucaugaucuaaugcagauga

SEQ ID NO: 105966 - RNA, 32 nt, Homo Sapiens
gacagagacagagaugacagagacaguaugug

SEQ ID NO: 105967 - RNA, 32 nt, Homo Sapiens
guuuuacaccccacccuaccuuagggaagaag

SEQ ID NO: 105968 - RNA, 32 nt, Homo Sapiens
aaucugaagcaucuugagcugggggugugagg

SEQ ID NO: 105969 - RNA, 32 nt, Homo Sapiens
ugcagaagucaacgcaaaaucaugcugccgug

SEQ ID NO: 105970 - RNA, 32 nt, Homo Sapiens
acucuccuguuuuagggguuauacauuuggac

SEQ ID NO: 105971 - RNA, 32 nt, Homo Sapiens
aaaaauuuuuauuuuucucucuuacugaugua

SEQ ID NO: 105972 - RNA, 32 nt, Homo Sapiens
ugucuuagauauauuuuaaauagaaaauaagc

SEQ ID NO: 105973 - RNA, 32 nt, Homo Sapiens
cuuccuucgccgcucccuccuguccccacuca

SEQ ID NO: 105974 - RNA, 32 nt, Homo Sapiens
aaccagagcugagaccucuucaacaggguuuc

SEQ ID NO: 105975 - RNA, 32 nt, Homo Sapiens
ccagcccauccgccauccccagcccgugguca

SEQ ID NO: 105976 - RNA, 32 nt, Homo Sapiens
cguucucaacgcgcccacccuggacguggaug

SEQ ID NO: 105977 - RNA, 32 nt, Homo Sapiens
auaacugcaguuagcuuaaauuacaauuugaa

SEQ ID NO: 105978 - RNA, 32 nt, Homo Sapiens
gccgaugagcucauuuagauggcugcaugggg

SEQ ID NO: 105979 - RNA, 32 nt, Homo Sapiens
caguggcagggggcccggggcgcacgggcuga

SEQ ID NO: 105980 - RNA, 32 nt, Homo Sapiens
ggaauccaggacucacacuucugacccugccu

SEQ ID NO: 105981 - RNA, 32 nt, Homo Sapiens
ggcuuugcuguaaguuucuuuuucuggacuuu

SEQ ID NO: 105982 - RNA, 32 nt, Homo Sapiens
uugagggugggguguggggcgagggggacagg

SEQ ID NO: 105983 - RNA, 32 nt, Homo Sapiens
ccauauuguauccacaauuuaugauaucacuu

SEQ ID NO: 105984 - RNA, 32 nt, Homo Sapiens
uagaaagggaagacauaagagacuccauuuug

SEQ ID NO: 105985 - RNA, 32 nt, Homo Sapiens
ggggaggagcagcuauccuugcccccagagga

SEQ ID NO: 105986 - RNA, 32 nt, Homo Sapiens
gcuaccgagugucugucuaagaacacagagga

SEQ ID NO: 105987 - RNA, 32 nt, Homo Sapiens
cccggagccaggcucucugugcuacuuacauc

SEQ ID NO: 105988 - RNA, 32 nt, Homo Sapiens
ugugccucccuggcugcugcugcugcaggucu

SEQ ID NO: 105989 - RNA, 32 nt, Homo Sapiens
augcuguaaauaaaaauacaagcuagugcuuu

SEQ ID NO: 105990 - RNA, 32 nt, Homo Sapiens
uuguaaguguccugaggccucccagccaugcu

SEQ ID NO: 105991 - RNA, 32 nt, Homo Sapiens
gaucuuguggagcugggaucauguuugaacuc

SEQ ID NO: 105992 - RNA, 32 nt, Homo Sapiens
cuccuacagucccuuuugucuugucuguccug

SEQ ID NO: 105993 - RNA, 32 nt, Homo Sapiens
ugagugguggccuggggagguugggagcugag

SEQ ID NO: 105994 - RNA, 32 nt, Homo Sapiens
gauccuacaguaaauaaaccagcauccugccg

SEQ ID NO: 105995 - RNA, 32 nt, Homo Sapiens
ucuuuaaaaaauaauuggcagcaacuguauuu

SEQ ID NO: 105996 - RNA, 32 nt, Homo Sapiens
gguucccauucccacacaugugcccagaguag

SEQ ID NO: 105997 - RNA, 32 nt, Homo Sapiens
agccuggccaacaugguaaaaccccgucucua

SEQ ID NO: 105998 - RNA, 32 nt, Homo Sapiens
gaucuguuucuacuauucaguuccucaaacug

SEQ ID NO: 105999 - RNA, 32 nt, Homo Sapiens
uguauacgaaucuauuuauauaaauuguuuuu

SEQ ID NO: 106000 - RNA, 32 nt, Homo Sapiens
cagccugcuucuuccccaggguucuguauugc

SEQ ID NO: 106001 - RNA, 32 nt, Homo Sapiens
uuaaguagauuuaagaucucaaagcuaaagug

SEQ ID NO: 106002 - RNA, 32 nt, Homo Sapiens
acugaagacaccuuuugcaucucccccaucca

SEQ ID NO: 106003 - RNA, 32 nt, Homo Sapiens
auugugcaaaacuuauuugaauccuguucaag

SEQ ID NO: 106004 - RNA, 32 nt, Homo Sapiens
gaagcuugaaagauugacugagauggggagga

SEQ ID NO: 106005 - RNA, 32 nt, Homo Sapiens
caccaacuaacaugugccagccaggcagaguc

SEQ ID NO: 106006 - RNA, 32 nt, Homo Sapiens
ucccagaaguucccuuugcccacgcaccuacc

SEQ ID NO: 106007 - RNA, 32 nt, Homo Sapiens
aaaaggaacaauuuucuaguuuuuccuacgcg

SEQ ID NO: 106008 - RNA, 32 nt, Homo Sapiens
gugcuaggcaaggcuacuucaaugcacagaac

SEQ ID NO: 106009 - RNA, 32 nt, Homo Sapiens
uuucuagugucuauccauuguaccugcucuug

SEQ ID NO: 106010 - RNA, 32 nt, Homo Sapiens
acagcccguggacuuuagccuaaacacggacc

SEQ ID NO: 106011 - RNA, 32 nt, Homo Sapiens
uguggcccuggauguggugguuuucccuuggc

SEQ ID NO: 106012 - RNA, 32 nt, Homo Sapiens
ccugcugguggaucgggacgggcuguacaaga

SEQ ID NO: 106013 - RNA, 32 nt, Homo Sapiens
auaggcaggaggaagaugcggaggaggguggc

SEQ ID NO: 106014 - RNA, 32 nt, Homo Sapiens
auucaguucuuugcccuccuucgcgccugcag

SEQ ID NO: 106015 - RNA, 32 nt, Homo Sapiens
aauguaugacuucaugaguuacacagaugcua

SEQ ID NO: 106016 - RNA, 32 nt, Homo Sapiens
uauuugucuccaugauaccacucaagcagugu

SEQ ID NO: 106017 - RNA, 32 nt, Homo Sapiens
gaguuguggauucugggcucuggucagggcug

SEQ ID NO: 106018 - RNA, 32 nt, Homo Sapiens
gacagacacacacacacacacacacacacaca

SEQ ID NO: 106019 - RNA, 32 nt, Homo Sapiens
gacacacacacagacacacacacacacacaca

SEQ ID NO: 106020 - RNA, 32 nt, Homo Sapiens
ccuggguccccggggcggucgcggcggcugca

SEQ ID NO: 106021 - RNA, 32 nt, Homo Sapiens
uguaaaggaaaugcagguucuucaagaaggug

SEQ ID NO: 106022 - RNA, 32 nt, Homo Sapiens
cggccgagggcucggcgccgccugugagcggg

SEQ ID NO: 106023 - RNA, 32 nt, Homo Sapiens
cuguggcaguugcagggcaauguuauggagca

SEQ ID NO: 106024 - RNA, 32 nt, Homo Sapiens
ucugcuuuuggagccgagccuggacaccuccg

SEQ ID NO: 106025 - RNA, 32 nt, Homo Sapiens
aauuaguuuccacaacgcaacuguguuaacau

SEQ ID NO: 106026 - RNA, 32 nt, Homo Sapiens
aacgucuucuaaacuuccccaucuucuaaacc

SEQ ID NO: 106027 - RNA, 32 nt, Homo Sapiens
ggggcaggugaccugcguccccggggaggugu

SEQ ID NO: 106028 - RNA, 32 nt, Homo Sapiens
cguccuucacuauguguagaaagcugagucuc

SEQ ID NO: 106029 - RNA, 32 nt, Homo Sapiens
cagaacacuguaaaauggaccaauuagugcuc

SEQ ID NO: 106030 - RNA, 32 nt, Homo Sapiens
gccaccuccucugcaccuaacccaguggcagg

SEQ ID NO: 106031 - RNA, 32 nt, Homo Sapiens
ucacagugcguguauuguauguuauuuagugu

SEQ ID NO: 106032 - RNA, 32 nt, Homo Sapiens
cuucuaccgucuccgauuuccuuuguccuuau

SEQ ID NO: 106033 - RNA, 28 nt, Homo Sapiens
uccagaguuacagagaaugaguagaugu

SEQ ID NO: 106034 - RNA, 31 nt, Homo Sapiens
ugcgugggggcgguguggcugcagccucagu

SEQ ID NO: 106035 - RNA, 32 nt, Homo Sapiens
agcucauccacacuuccaaucacuuuccggag

SEQ ID NO: 106036 - RNA, 30 nt, Homo Sapiens
uggcugggccugcuggagcgcgcgcucccg

SEQ ID NO: 106037 - RNA, 32 nt, Homo Sapiens
gggacugggccaaggguggggcugggaagcau

SEQ ID NO: 106038 - RNA, 32 nt, Homo Sapiens
cacgcuccggccugcgcagcccggcccggcca

SEQ ID NO: 106039 - RNA, 32 nt, Homo Sapiens
agauuucaugcugguacagagagugugacagc

SEQ ID NO: 106040 - RNA, 32 nt, Homo Sapiens
aaauauaggauauagaguuuguaccaaauaug

SEQ ID NO: 106041 - RNA, 32 nt, Homo Sapiens
uggcuagauugugguuguuuugguuaagguga

SEQ ID NO: 106042 - RNA, 32 nt, Homo Sapiens
ccccguggccgcggccgucucgugucccaccg

SEQ ID NO: 106043 - RNA, 32 nt, Homo Sapiens
ggcgugucccccugguggcccgcgcucucacu

SEQ ID NO: 106044 - RNA, 32 nt, Homo Sapiens
cagcagccccuacagagguggcacaugcuugg

SEQ ID NO: 106045 - RNA, 32 nt, Homo Sapiens
ucaugggguauggcucucuugaucuccucaau

SEQ ID NO: 106046 - RNA, 32 nt, Homo Sapiens
cggguggggaccuggggugcucaggagggggu

SEQ ID NO: 106047 - RNA, 32 nt, Homo Sapiens
guggguccuuugcauacaugugggcauucauu

SEQ ID NO: 106048 - RNA, 32 nt, Homo Sapiens
ucauauuaaugaacacauuuuuucucaacauu

SEQ ID NO: 106049 - RNA, 32 nt, Homo Sapiens
cacaacaaaaauuugaaccaaaacauuccguu

SEQ ID NO: 106050 - RNA, 32 nt, Homo Sapiens
uuguacacaacaccuaaaaccaguuuugcugc

SEQ ID NO: 106051 - RNA, 32 nt, Homo Sapiens
cugacugcaaggcccaccugccccucccccac

SEQ ID NO: 106052 - RNA, 32 nt, Homo Sapiens
cugguuuuacaaaggaccguguaaagucauug

SEQ ID NO: 106053 - RNA, 32 nt, Homo Sapiens
ugaaauuccagaagaaacuucuuggagucugc

SEQ ID NO: 106054 - RNA, 32 nt, Homo Sapiens
cagagacagugagccagguggcugggagcccc

SEQ ID NO: 106055 - RNA, 32 nt, Homo Sapiens
uccaucucaauccucuucucuucaccaguuuc

SEQ ID NO: 106056 - RNA, 32 nt, Homo Sapiens
cccggaccggagcacgagccugagcgggagag

SEQ ID NO: 106057 - RNA, 32 nt, Homo Sapiens
cuauccuccuuacuuuugggucgggcccuccg

SEQ ID NO: 106058 - RNA, 31 nt, Homo Sapiens
guagagucacggagagguaggauccggaagu

SEQ ID NO: 106059 - RNA, 32 nt, Homo Sapiens
cuauaccuggggacuugauguuccuuccagau

SEQ ID NO: 106060 - RNA, 32 nt, Homo Sapiens
cagccagcccauggcccccaauaaaggcagcu

SEQ ID NO: 106061 - RNA, 32 nt, Homo Sapiens
agcgcaguuuuuuuuucuugucuauaaagcau

SEQ ID NO: 106062 - RNA, 32 nt, Homo Sapiens
ucauaaugucauuucagaauucaguucuguag

SEQ ID NO: 106063 - RNA, 32 nt, Homo Sapiens
uauauuaugcuuuaucauuaguuuauuucugc

SEQ ID NO: 106064 - RNA, 31 nt, Homo Sapiens
ucaguggagccccagaagcuagauggguacc

SEQ ID NO: 106065 - RNA, 32 nt, Homo Sapiens
ggcccuagggaauauuggggaauagaagggau

SEQ ID NO: 106066 - RNA, 32 nt, Homo Sapiens
uuauacccacaccagcacuagugguaauuauu

SEQ ID NO: 106067 - RNA, 32 nt, Homo Sapiens
aucugaaaucaucucuagucuugcuuucacuu

SEQ ID NO: 106068 - RNA, 32 nt, Homo Sapiens
agaaugaacuauuuaugggaccauuaaguuuu

SEQ ID NO: 106069 - RNA, 32 nt, Homo Sapiens
caaggccaauggccuggauuaaggguuaggau

SEQ ID NO: 106070 - RNA, 32 nt, Homo Sapiens
gugcucagcuugaagaauauuccuguuuugga

SEQ ID NO: 106071 - RNA, 32 nt, Homo Sapiens
uuaauaucucucuggaggacaaaugacagaag

SEQ ID NO: 106072 - RNA, 32 nt, Homo Sapiens
gaaucuccagaaugccagccagaagccugauu

SEQ ID NO: 106073 - RNA, 32 nt, Homo Sapiens
auuuauaaaaauuaagagguuaagagguuaua

SEQ ID NO: 106074 - RNA, 32 nt, Homo Sapiens
uauacaguauugaauuuuuacuguauaguaau

SEQ ID NO: 106075 - RNA, 32 nt, Homo Sapiens
ugggcagccuaugggggcucucggaaauggaa

SEQ ID NO: 106076 - RNA, 32 nt, Homo Sapiens
gggcauuccagcagcugaaacucuucaauguu

SEQ ID NO: 106077 - RNA, 30 nt, Homo Sapiens
gggacucugugcuaugguacaaaccugugc

SEQ ID NO: 106078 - RNA, 32 nt, Homo Sapiens
ugcucccacugacucaugcaguggucaggggu

SEQ ID NO: 106079 - RNA, 32 nt, Homo Sapiens
uaguggguuaaacccagcuggcacccucugga

SEQ ID NO: 106080 - RNA, 32 nt, Homo Sapiens
aauggcauuuuaauagacuaguaaaucacagu

SEQ ID NO: 106081 - RNA, 32 nt, Homo Sapiens
cucacucugucgcccaggcuagaguggauugg

SEQ ID NO: 106082 - RNA, 32 nt, Homo Sapiens
agcaugacaaacaaaaucauuuaccuaacuuu

SEQ ID NO: 106083 - RNA, 32 nt, Homo Sapiens
cugucggcacgagucccgcgggcagccucgcc

SEQ ID NO: 106084 - RNA, 32 nt, Homo Sapiens
aguuuuaccauguuggccaggcuggucuugaa

SEQ ID NO: 106085 - RNA, 32 nt, Homo Sapiens
caccugcgagcaucccaccuccuuguuuaagg

SEQ ID NO: 106086 - RNA, 32 nt, Homo Sapiens
ggcacgaggggccggggggcgcagcuagagag

SEQ ID NO: 106087 - RNA, 32 nt, Homo Sapiens
uaaaccucgcugcucagcugcccccacaaguc

SEQ ID NO: 106088 - RNA, 32 nt, Homo Sapiens
ggaagcagggaagaggggcgucaguuuucucu

SEQ ID NO: 106089 - RNA, 32 nt, Homo Sapiens
cugccggcugaacggagcugccgucgccaugu

SEQ ID NO: 106090 - RNA, 32 nt, Homo Sapiens
auuuccucccagccucgugcgggaaauggcuu

SEQ ID NO: 106091 - RNA, 31 nt, Homo Sapiens
uuugagaacauauugaaggcauugacuuuga

SEQ ID NO: 106092 - RNA, 32 nt, Homo Sapiens
ccaaauuguaaaauauggccugaauuuaaguu

SEQ ID NO: 106093 - RNA, 32 nt, Homo Sapiens
acacuagccuccugaggccuggcugagagggc

SEQ ID NO: 106094 - RNA, 32 nt, Homo Sapiens
ccuuugaagcgcagcccucuguggcccgcagc

SEQ ID NO: 106095 - RNA, 32 nt, Homo Sapiens
aggagcugcggcggcccagguacgaagcugca

SEQ ID NO: 106096 - RNA, 32 nt, Homo Sapiens
auuaguguuguauuuuuucauuuacauuaaug

SEQ ID NO: 106097 - RNA, 29 nt, Homo Sapiens
ucaaagaguaucuggccauggcggacacu

SEQ ID NO: 106098 - RNA, 32 nt, Homo Sapiens
uuucacagagaaggagcagagaaauuaagugg

SEQ ID NO: 106099 - RNA, 32 nt, Homo Sapiens
caccccuggagcuucugugaaucugcugugau

SEQ ID NO: 106100 - RNA, 32 nt, Homo Sapiens
caaccgucaauacaaagggauuuuacugagug

SEQ ID NO: 106101 - RNA, 32 nt, Homo Sapiens
gagcggagggacuugcuggggguuggauuggg

SEQ ID NO: 106102 - RNA, 32 nt, Homo Sapiens
gugccugagccuggcguccguguggcuggcgc

SEQ ID NO: 106103 - RNA, 32 nt, Homo Sapiens
gcacuggggcagaugucuccccugccacuccu

SEQ ID NO: 106104 - RNA, 31 nt, Homo Sapiens
cgccggagaggcacccugccccgggagcauc

SEQ ID NO: 106105 - RNA, 32 nt, Homo Sapiens
ucgccuugacauuugcucgguguaugcucacg

SEQ ID NO: 106106 - RNA, 32 nt, Homo Sapiens
cuaucucugcccacccacaccugugauguugu

SEQ ID NO: 106107 - RNA, 32 nt, Homo Sapiens
uuauuaacaaagugccagagucuaggcuaagc

SEQ ID NO: 106108 - RNA, 32 nt, Homo Sapiens
ugugggaaggagacaaaacuagagacucaaag

SEQ ID NO: 106109 - RNA, 32 nt, Homo Sapiens
agcucucuaucucauccauuuauuuucuucuc

SEQ ID NO: 106110 - RNA, 32 nt, Homo Sapiens
gucaaacgguucccggcccagucccguccugc

SEQ ID NO: 106111 - RNA, 27 nt, Homo Sapiens
cucuuucuguccuucagccccuggaag

SEQ ID NO: 106112 - RNA, 32 nt, Homo Sapiens
cggcuccucccucuccuugugccucagcgcca

SEQ ID NO: 106113 - RNA, 32 nt, Homo Sapiens
uguaauuucauauacacagucuauacaaugaa

SEQ ID NO: 106114 - RNA, 32 nt, Homo Sapiens
ccaaaucaaggauuaauccaaaguacuucuaa

SEQ ID NO: 106115 - RNA, 32 nt, Homo Sapiens
ugaugucagagguuguaagggaagaguuuaug

SEQ ID NO: 106116 - RNA, 32 nt, Homo Sapiens
cgcagaggugaagagcuaaaccacuggccugg

SEQ ID NO: 106117 - RNA, 32 nt, Homo Sapiens
uaccccaggcccagcccuucggaccucuagac

SEQ ID NO: 106118 - RNA, 32 nt, Homo Sapiens
gacauuugcuggaaugaguuaagauuuggggg

SEQ ID NO: 106119 - RNA, 32 nt, Homo Sapiens
gcuuuuagaacuuggguucaaggaagauggag

SEQ ID NO: 106120 - RNA, 32 nt, Homo Sapiens
gaucauuauggggcuuccuucuauaucugaga

SEQ ID NO: 106121 - RNA, 32 nt, Homo Sapiens
gugccagaggggccucuggagcaggccuggcu

SEQ ID NO: 106122 - RNA, 32 nt, Homo Sapiens
uucaugcccuccccacugcuccugccaccuuu

SEQ ID NO: 106123 - RNA, 32 nt, Homo Sapiens
gccuguuuuauuuuuucuuaauuuuauuaaag

SEQ ID NO: 106124 - RNA, 32 nt, Homo Sapiens
acagucacuauaagacaccuacuugucgggag

SEQ ID NO: 106125 - RNA, 32 nt, Homo Sapiens
ggccuauuaaaauaaaugucugagaucuggaa

SEQ ID NO: 106126 - RNA, 32 nt, Homo Sapiens
ggccaggcugcaggaagaagacaaaggcagcg

SEQ ID NO: 106127 - RNA, 32 nt, Homo Sapiens
accugggaauacggaggccuuucuuuauggag

SEQ ID NO: 106128 - RNA, 32 nt, Homo Sapiens
gcagggaaucgggcgggaccggugcuaagaac

SEQ ID NO: 106129 - RNA, 32 nt, Homo Sapiens
agggaaggggagagucgagauguguguuaggc

SEQ ID NO: 106130 - RNA, 32 nt, Homo Sapiens
ucuccagggaacccccguggggugugggagga

SEQ ID NO: 106131 - RNA, 32 nt, Homo Sapiens
ugcauagcaagcacucuuucuggguaacuagg

SEQ ID NO: 106132 - RNA, 32 nt, Homo Sapiens
cuccuucccuccccucuccucuucuauuagaa

SEQ ID NO: 106133 - RNA, 29 nt, Homo Sapiens
gugacuucguguuuaggucguauuagggc

SEQ ID NO: 106134 - RNA, 31 nt, Homo Sapiens
cugcugcucugcugccugcccgcacagcagc

SEQ ID NO: 106135 - RNA, 32 nt, Homo Sapiens
uuuucucugcaccuucacgugccaccugucuc

SEQ ID NO: 106136 - RNA, 32 nt, Homo Sapiens
agccacaccguccucuugcccccgucacuugg

SEQ ID NO: 106137 - RNA, 32 nt, Homo Sapiens
gcacuuugggaggccgaggcaguuggauuacu

SEQ ID NO: 106138 - RNA, 32 nt, Homo Sapiens
uuacuccauuuucccucaucacuguuauuauu

SEQ ID NO: 106139 - RNA, 32 nt, Homo Sapiens
ucuggaggaaccacugcccaccccaccacccc

SEQ ID NO: 106140 - RNA, 32 nt, Homo Sapiens
uuuuugguuuuauuuucuuaauaaaagcaggg

SEQ ID NO: 106141 - RNA, 32 nt, Homo Sapiens
gucucaaaaaauaaauaaaauaaaauaaguac

SEQ ID NO: 106142 - RNA, 32 nt, Homo Sapiens
gaaaggagucuuugacuacagcagccacggga

SEQ ID NO: 106143 - RNA, 32 nt, Homo Sapiens
ggguaaguaaagugcaggaugaacugcagcgg

SEQ ID NO: 106144 - RNA, 32 nt, Homo Sapiens
aacucuauuacugauacuacuaaccauaauga

SEQ ID NO: 106145 - RNA, 32 nt, Homo Sapiens
aggcccucugugccgcccucacagugaaccag

SEQ ID NO: 106146 - RNA, 32 nt, Homo Sapiens
ugauaauaucugagcuuuauuaaguacuuacu

SEQ ID NO: 106147 - RNA, 32 nt, Homo Sapiens
gccaggcauuugccgccucugagcgcuucugu

SEQ ID NO: 106148 - RNA, 32 nt, Homo Sapiens
uacuuuagaaacaaaauaguuaguaagauaua

SEQ ID NO: 106149 - RNA, 32 nt, Homo Sapiens
agauuuuucuuugcuuucacuugcauuaaaug

SEQ ID NO: 106150 - RNA, 32 nt, Homo Sapiens
cugccccaaaggcuggcuuccaccauccaggu

SEQ ID NO: 106151 - RNA, 32 nt, Homo Sapiens
uuauggcaguacauuuaucgaaguaggagaau

SEQ ID NO: 106152 - RNA, 31 nt, Homo Sapiens
acagcgcgcugcugccugcaguccgccgggc

SEQ ID NO: 106153 - RNA, 32 nt, Homo Sapiens
aaaagcaguuuaguaggcuuagaucucaaauu

SEQ ID NO: 106154 - RNA, 32 nt, Homo Sapiens
cccaggggcuccugggggccccgcuugucucg

SEQ ID NO: 106155 - RNA, 32 nt, Homo Sapiens
caugcagaaaagaaccacagguauucaguuuc

SEQ ID NO: 106156 - RNA, 32 nt, Homo Sapiens
uaacucauuuuucuaguuuuugacaauugugu

SEQ ID NO: 106157 - RNA, 32 nt, Homo Sapiens
uugcccuuuucucagggaaggaaauggaaaca

SEQ ID NO: 106158 - RNA, 32 nt, Homo Sapiens
ccaacgcccccuccuaaaucugaucaaucgca

SEQ ID NO: 106159 - RNA, 32 nt, Homo Sapiens
cccuucucugacagggggccauccucuaucuu

SEQ ID NO: 106160 - RNA, 32 nt, Homo Sapiens
cggaccacgugucaagguguaaucucgaccuu

SEQ ID NO: 106161 - RNA, 32 nt, Homo Sapiens
gaagaccaaaagauuacaguggaccaugggau

SEQ ID NO: 106162 - RNA, 32 nt, Homo Sapiens
caggauggcgguggagagacaggcccaguccc

SEQ ID NO: 106163 - RNA, 32 nt, Homo Sapiens
cuaugcagaagaaaaaucauugaggaaaauug

SEQ ID NO: 106164 - RNA, 32 nt, Homo Sapiens
agacagggccuugcucugucucccaggcugga

SEQ ID NO: 106165 - RNA, 32 nt, Homo Sapiens
gcagccccugucauguaccgccuguuugcuca

SEQ ID NO: 106166 - RNA, 32 nt, Homo Sapiens
uaaacauaaaaauaaaggaaccaguuuguaga

SEQ ID NO: 106167 - RNA, 32 nt, Homo Sapiens
cggagacucugggggagggagacggcagcggc

SEQ ID NO: 106168 - RNA, 32 nt, Homo Sapiens
uccacggaggggcugcugcccccucugccccc

SEQ ID NO: 106169 - RNA, 32 nt, Homo Sapiens
uuacagcggccacgggaagcugaaacagcagg

SEQ ID NO: 106170 - RNA, 32 nt, Homo Sapiens
ccacccuccacccuucuccccagcgugcugua

SEQ ID NO: 106171 - RNA, 32 nt, Homo Sapiens
caaugguaaugauuuuuaaaguaaauugaagg

SEQ ID NO: 106172 - RNA, 32 nt, Homo Sapiens
cagcuuauauaauaacgcuugaauaucugaau

SEQ ID NO: 106173 - RNA, 31 nt, Homo Sapiens
ucccuuuccacauuguggaagcuuuguuccu

SEQ ID NO: 106174 - RNA, 32 nt, Homo Sapiens
uccaccagcuucccuuccagccgacgccggac

SEQ ID NO: 106175 - RNA, 32 nt, Homo Sapiens
gagauuuuauuacauuaguuaauaagagugug

SEQ ID NO: 106176 - RNA, 32 nt, Homo Sapiens
cauguauggaagagcaagaaaagagaaaauau

SEQ ID NO: 106177 - RNA, 32 nt, Homo Sapiens
ugauaauuauaaaaaugaagugucaaaaaauc

SEQ ID NO: 106178 - RNA, 28 nt, Homo Sapiens
gauaauacagguaacauuauaaaugaca

SEQ ID NO: 106179 - RNA, 32 nt, Homo Sapiens
ugagauaacucacuaccuuuggaccagccauc

SEQ ID NO: 106180 - RNA, 32 nt, Homo Sapiens
ucuuccccacccaaaaauaagcuaccauauag

SEQ ID NO: 106181 - RNA, 32 nt, Homo Sapiens
agauaggguaagguuguuucugaugcagcuga

SEQ ID NO: 106182 - RNA, 32 nt, Homo Sapiens
cacguuuccaucaagcuuuucaguagauucug

SEQ ID NO: 106183 - RNA, 32 nt, Homo Sapiens
gagcagaggcugggccaagcccuuagucagga

SEQ ID NO: 106184 - RNA, 32 nt, Homo Sapiens
uccaagauuuaucaucucucuauuuugcuauu

SEQ ID NO: 106185 - RNA, 32 nt, Homo Sapiens
ccuccguugccaagggcggggcuuaagcucaa

SEQ ID NO: 106186 - RNA, 32 nt, Homo Sapiens
gaaguccccgggagccucuccuugccugguga

SEQ ID NO: 106187 - RNA, 32 nt, Homo Sapiens
gacugggaagcagcaagccaccacuacgaacu

SEQ ID NO: 106188 - RNA, 32 nt, Homo Sapiens
ggucggcagguucaaacugguuucacaggcuu

SEQ ID NO: 106189 - RNA, 32 nt, Homo Sapiens
accaaucgcguguuucccccacuuccuguuga

SEQ ID NO: 106190 - RNA, 29 nt, Homo Sapiens
ggcguuaggaagguggcuccaguaaaggg

SEQ ID NO: 106191 - RNA, 32 nt, Homo Sapiens
gcuucagcugucuaugggaaggcuucacaaga

SEQ ID NO: 106192 - RNA, 32 nt, Homo Sapiens
ucacugcccacccagcgagggcaggcuacccg

SEQ ID NO: 106193 - RNA, 32 nt, Homo Sapiens
uccaagcacuuuaggcagacaccagcuguuug

SEQ ID NO: 106194 - RNA, 32 nt, Homo Sapiens
aagagcucgagcuucuguggucucuggggaga

SEQ ID NO: 106195 - RNA, 32 nt, Homo Sapiens
uaguucuuuauuaccuuacauaaaaaugaaaa

SEQ ID NO: 106196 - RNA, 32 nt, Homo Sapiens
gugguagcuauuucuaauucuguucuucugga

SEQ ID NO: 106197 - RNA, 32 nt, Homo Sapiens
aaaguaauaaaauuuaccauuuaguucaaaaa

SEQ ID NO: 106198 - RNA, 32 nt, Homo Sapiens
aggaagcuccugcuccuccuaaagccgaagcc

SEQ ID NO: 106199 - RNA, 32 nt, Homo Sapiens
gcaagaccugcagcugcugaaaaucagcuuug

SEQ ID NO: 106200 - RNA, 32 nt, Homo Sapiens
cuauauuugaggggggcaugggauaaaaagau

SEQ ID NO: 106201 - RNA, 32 nt, Homo Sapiens
uuccugccugagcccugcacugucccagacca

SEQ ID NO: 106202 - RNA, 32 nt, Homo Sapiens
gucaucgggacauugacaguuuagcucuacag

SEQ ID NO: 106203 - RNA, 32 nt, Homo Sapiens
agaggugggaggaugccuugagcuugagaggu

SEQ ID NO: 106204 - RNA, 32 nt, Homo Sapiens
uuauccuuuguguugcaaaccauccaguucua

SEQ ID NO: 106205 - RNA, 32 nt, Homo Sapiens
gacucuaaaaauuauaaagguuuagacuugga

SEQ ID NO: 106206 - RNA, 32 nt, Homo Sapiens
ccagggaacacuuuaggccauggguguauguu

SEQ ID NO: 106207 - RNA, 32 nt, Homo Sapiens
augucauuuccacagacaucaaaaugcuauuu

SEQ ID NO: 106208 - RNA, 32 nt, Homo Sapiens
cagaggcucccucucaugauguuugaauccca

SEQ ID NO: 106209 - RNA, 32 nt, Homo Sapiens
ucauggaagaguguuuaccaaaauauuaaaaa

SEQ ID NO: 106210 - RNA, 32 nt, Homo Sapiens
uaaaaugacaauuaaaaaauggcauuuagcca

SEQ ID NO: 106211 - RNA, 32 nt, Homo Sapiens
uacuggaguacuuuuucagguuaucuuauuua

SEQ ID NO: 106212 - RNA, 32 nt, Homo Sapiens
gguguauuuuugccuuccuguuggcugucugg

SEQ ID NO: 106213 - RNA, 32 nt, Homo Sapiens
gcaccacaguccccaagauugcagcuucaucc

SEQ ID NO: 106214 - RNA, 32 nt, Homo Sapiens
cuccagacccagggcaugguccugcugcuuca

SEQ ID NO: 106215 - RNA, 32 nt, Homo Sapiens
agcucuccaagcccuuggggugacucggcuuc

SEQ ID NO: 106216 - RNA, 30 nt, Homo Sapiens
gcucauaggaccugcauccuuccuggggac

SEQ ID NO: 106217 - RNA, 32 nt, Homo Sapiens
ucccacgggggaggagggagaggagcauaaau

SEQ ID NO: 106218 - RNA, 32 nt, Homo Sapiens
ggaggggagccuggaccccccucuuucuccuu

SEQ ID NO: 106219 - RNA, 32 nt, Homo Sapiens
ucaucugugaagaggagguagcaagaaugaaa

SEQ ID NO: 106220 - RNA, 32 nt, Homo Sapiens
cuuucaaacugggcauagcugcagagccacag

SEQ ID NO: 106221 - RNA, 32 nt, Homo Sapiens
uacaaauugaaaugucuguacugauccucaac

SEQ ID NO: 106222 - RNA, 32 nt, Homo Sapiens
aguugacaaaguauguauuugcuggugucgug

SEQ ID NO: 106223 - RNA, 32 nt, Homo Sapiens
gcgcgugcucgccuuccacccgccgcccgccg

SEQ ID NO: 106224 - RNA, 31 nt, Homo Sapiens
aaaggcaagccccagaacucagacaacagaa

SEQ ID NO: 106225 - RNA, 30 nt, Homo Sapiens
ccuucucuggacugcacuguagggccugga

SEQ ID NO: 106226 - RNA, 32 nt, Homo Sapiens
ccaaugggcacgcucgggggagccgggcuggc

SEQ ID NO: 106227 - RNA, 32 nt, Homo Sapiens
cgucauccacagggacaacaccaccguggccc

SEQ ID NO: 106228 - RNA, 32 nt, Homo Sapiens
cggacccggggguggggaggggagcacauugu

SEQ ID NO: 106229 - RNA, 32 nt, Homo Sapiens
uggguguccuccugggguucuuuuugccaacu

SEQ ID NO: 106230 - RNA, 32 nt, Homo Sapiens
ugugcaguugcguugugacaaacaugcaaugu

SEQ ID NO: 106231 - RNA, 32 nt, Homo Sapiens
cacugccccucuccccauugccccacaaccuu

SEQ ID NO: 106232 - RNA, 32 nt, Homo Sapiens
aggaggucauaccccaccguuggagcccagcu

SEQ ID NO: 106233 - RNA, 32 nt, Homo Sapiens
ggacagaacacacugccauuucugggaagagu

SEQ ID NO: 106234 - RNA, 32 nt, Homo Sapiens
acuacaugcuaaauuucuuuuuuuuuuuuuuu

SEQ ID NO: 106235 - RNA, 32 nt, Homo Sapiens
aaggggccgcgcugcgccggggccgcuuucuc

SEQ ID NO: 106236 - RNA, 32 nt, Homo Sapiens
guauugauagcuugcuuuauuucugccuuuac

SEQ ID NO: 106237 - RNA, 32 nt, Homo Sapiens
gguugagaaaggaaacaagaguauaggagcuc

SEQ ID NO: 106238 - RNA, 32 nt, Homo Sapiens
uuaauuucacuuucuguauuuuaauuuuguug

SEQ ID NO: 106239 - RNA, 32 nt, Homo Sapiens
uucaaaacauauaaaaugucaaaguuccagau

SEQ ID NO: 106240 - RNA, 32 nt, Homo Sapiens
accacguaguugcaggaaaacaaguucagggc

SEQ ID NO: 106241 - RNA, 32 nt, Homo Sapiens
gcaggcugccugugaggcuccaggcgguggag

SEQ ID NO: 106242 - RNA, 32 nt, Homo Sapiens
cggcggggcuccugucccagggccgggcugga

SEQ ID NO: 106243 - RNA, 32 nt, Homo Sapiens
gcuacauagucaucauuaguuucuauuaauua

SEQ ID NO: 106244 - RNA, 32 nt, Homo Sapiens
ggagagcgcggucccgggucggagccugggac

SEQ ID NO: 106245 - RNA, 30 nt, Homo Sapiens
gcgaaacaacugaugggggaagauaccugg

SEQ ID NO: 106246 - RNA, 32 nt, Homo Sapiens
cuaaggccugaaggaugaugagguaucaggug

SEQ ID NO: 106247 - RNA, 32 nt, Homo Sapiens
uuuggcaaaaauagcaaaacuucaaagacgua

SEQ ID NO: 106248 - RNA, 32 nt, Homo Sapiens
ccuuuuuauuguauuucuuuaaagaauaaaua

SEQ ID NO: 106249 - RNA, 32 nt, Homo Sapiens
ugcugauaaaguguauuagaguaucuccuaaa

SEQ ID NO: 106250 - RNA, 32 nt, Homo Sapiens
gugccuugcauuucaaaaacacugcagauauu

SEQ ID NO: 106251 - RNA, 32 nt, Homo Sapiens
aucagagcagugcagugcucuuccgaggccug

SEQ ID NO: 106252 - RNA, 32 nt, Homo Sapiens
uauucuucacuuucacuugacaucguucuuca

SEQ ID NO: 106253 - RNA, 32 nt, Homo Sapiens
aaaccacuuaccccuauugcucuucuuccuaa

SEQ ID NO: 106254 - RNA, 32 nt, Homo Sapiens
gagaaggagugccauaccuucucccaggccuc

SEQ ID NO: 106255 - RNA, 32 nt, Homo Sapiens
ccucccccacuucuugaauaaaauaauuuaaa

SEQ ID NO: 106256 - RNA, 32 nt, Homo Sapiens
uaauucuccccucccauguggcucgugcuggg

SEQ ID NO: 106257 - RNA, 32 nt, Homo Sapiens
gggaugggccccaacuucgcccugcccacuug

SEQ ID NO: 106258 - RNA, 32 nt, Homo Sapiens
aaaaaauuuacaccaggugcugugaugaaacu

SEQ ID NO: 106259 - RNA, 32 nt, Homo Sapiens
agggaggacaccuuccuaggccuggagagccu

SEQ ID NO: 106260 - RNA, 32 nt, Homo Sapiens
aaaacuugggagaggagcacucagggcuggcc

SEQ ID NO: 106261 - RNA, 32 nt, Homo Sapiens
uucauugccucuccucgcacagaaaugguggg

SEQ ID NO: 106262 - RNA, 32 nt, Homo Sapiens
cugccccgcgcccaccccggcgccucgcccug

SEQ ID NO: 106263 - RNA, 32 nt, Homo Sapiens
aagagcaagggaacuuaaaaaauaucacugug

SEQ ID NO: 106264 - RNA, 32 nt, Homo Sapiens
uuuuccacuuugcuaccacacaucugcagggu

SEQ ID NO: 106265 - RNA, 32 nt, Homo Sapiens
ugaccaaaaauauuuugcuauuucuuucuuug

SEQ ID NO: 106266 - RNA, 32 nt, Homo Sapiens
ggugugggccgcgugcgucucugucguggaca

SEQ ID NO: 106267 - RNA, 32 nt, Homo Sapiens
acccacacuagccccagaauacggucccucuu

SEQ ID NO: 106268 - RNA, 32 nt, Homo Sapiens
aggccuagucaccccaccucgccaccucacca

SEQ ID NO: 106269 - RNA, 32 nt, Homo Sapiens
uaaccucucugucugacuucugcaucuccuuc

SEQ ID NO: 106270 - RNA, 32 nt, Homo Sapiens
ggcggggcgagggcagcuccgccuggcuccca

SEQ ID NO: 106271 - RNA, 32 nt, Homo Sapiens
uagccaccucuuccuuuuccuucuuuauucug

SEQ ID NO: 106272 - RNA, 32 nt, Homo Sapiens
ucagugaaacagaguaaaaauauucaucuacc

SEQ ID NO: 106273 - RNA, 32 nt, Homo Sapiens
ggacccccgaguuccuuccccucccccgagcc

SEQ ID NO: 106274 - RNA, 32 nt, Homo Sapiens
aggcagcgcuggccgcagucugacaggaaagg

SEQ ID NO: 106275 - RNA, 32 nt, Homo Sapiens
agaauagagcagagaccaggaucgccccaggc

SEQ ID NO: 106276 - RNA, 32 nt, Homo Sapiens
gcgccgccuccccccgcgggacccggcaugcu

SEQ ID NO: 106277 - RNA, 32 nt, Homo Sapiens
ccagugcccgcacccugccuucaagccgcugg

SEQ ID NO: 106278 - RNA, 32 nt, Homo Sapiens
guguuucucaguuuccucauccauccaacaau

SEQ ID NO: 106279 - RNA, 32 nt, Homo Sapiens
gacuuuaaaaggaaaaaaguugugggcaaaag

SEQ ID NO: 106280 - RNA, 32 nt, Homo Sapiens
gccuauacagagacauaaccacacacacucag

SEQ ID NO: 106281 - RNA, 32 nt, Homo Sapiens
cagguaacaucuuguuauugcuguuuggggaa

SEQ ID NO: 106282 - RNA, 32 nt, Homo Sapiens
cuaacauuaaaauuauaacuuuuugaaaggua

SEQ ID NO: 106283 - RNA, 32 nt, Homo Sapiens
cagcuuccuacccacaccucugccagaagauc

SEQ ID NO: 106284 - RNA, 32 nt, Homo Sapiens
augcaaaaauccucaacaaaauacgggcaaac

SEQ ID NO: 106285 - RNA, 32 nt, Homo Sapiens
guacccaugacaaagcagagucuuaaagaggu

SEQ ID NO: 106286 - RNA, 32 nt, Homo Sapiens
gagcuguagcagcagcagcagccgccgugccg

SEQ ID NO: 106287 - RNA, 32 nt, Homo Sapiens
cccugacaaccacuaaucuauuugucucuaua

SEQ ID NO: 106288 - RNA, 32 nt, Homo Sapiens
aguguuaguauuuugaauaaacauguuauuac

SEQ ID NO: 106289 - RNA, 32 nt, Homo Sapiens
ggggcuaggcggggagggagcggcgcccagcg

SEQ ID NO: 106290 - RNA, 32 nt, Homo Sapiens
gaggcucugcccaccgccuggaccugcccacc

SEQ ID NO: 106291 - RNA, 32 nt, Homo Sapiens
auccagcagcaccaacaggcugagagauuuua

SEQ ID NO: 106292 - RNA, 31 nt, Homo Sapiens
agcagaguggcaccaggcugaguuaaguggg

SEQ ID NO: 106293 - RNA, 32 nt, Homo Sapiens
guuaaugucugacuguuaauucuuaagcaaga

SEQ ID NO: 106294 - RNA, 32 nt, Homo Sapiens
uguuauggagcagauagcucaagcaguuaaaa

SEQ ID NO: 106295 - RNA, 32 nt, Homo Sapiens
cauuuuaccaaacauaccgagaacgaaaacuu

SEQ ID NO: 106296 - RNA, 32 nt, Homo Sapiens
uccuuuuuucugacugguuuucuucagucccu

SEQ ID NO: 106297 - RNA, 32 nt, Homo Sapiens
cacaggccacaggaccuggaaaacacucuugg

SEQ ID NO: 106298 - RNA, 32 nt, Homo Sapiens
ccagcgggccugccgccucuacggaccagucc

SEQ ID NO: 106299 - RNA, 31 nt, Homo Sapiens
augaaugcaagguuagugagauccuaagcuc

SEQ ID NO: 106300 - RNA, 32 nt, Homo Sapiens
augaaggaaauauuuuauguaaagagcaacuc

SEQ ID NO: 106301 - RNA, 32 nt, Homo Sapiens
ucauuaacccaagugaaccaaccaaagucacc

SEQ ID NO: 106302 - RNA, 32 nt, Homo Sapiens
gagucugggucugggucugcugccgaaacacu

SEQ ID NO: 106303 - RNA, 32 nt, Homo Sapiens
cccacugcuagagcuuccuguuaagcaagugu

SEQ ID NO: 106304 - RNA, 29 nt, Homo Sapiens
cuccucuucuaauauaucagaucuccaaa

SEQ ID NO: 106305 - RNA, 32 nt, Homo Sapiens
cugaggucgccggggcggggcuucagugacag

SEQ ID NO: 106306 - RNA, 32 nt, Homo Sapiens
guauugcucauuuccuucucuacccaaccuga

SEQ ID NO: 106307 - RNA, 32 nt, Homo Sapiens
ucucccgucccuccccgcgccuuggcucgacu

SEQ ID NO: 106308 - RNA, 32 nt, Homo Sapiens
aaacaucaaauaaaaauggaaaaaaugaaaaa

SEQ ID NO: 106309 - RNA, 32 nt, Homo Sapiens
ucguuuuuccaaucuguccgcggcugccgcca

SEQ ID NO: 106310 - RNA, 32 nt, Homo Sapiens
cuguugucauauuuauaugaggcuguugucuu

SEQ ID NO: 106311 - RNA, 32 nt, Homo Sapiens
auguccacgagaugcuuggguugcuuuuccag

SEQ ID NO: 106312 - RNA, 32 nt, Homo Sapiens
accagcuuuuaaaaccuguaacugcaguauga

SEQ ID NO: 106313 - RNA, 32 nt, Homo Sapiens
aaagauuauguuuuuucuuaaaguuagggagg

SEQ ID NO: 106314 - RNA, 32 nt, Homo Sapiens
aaccaguucucacaacuugcuauacauaagau

SEQ ID NO: 106315 - RNA, 32 nt, Homo Sapiens
uucgaauacuuaguaaucgaaaaccauauccu

SEQ ID NO: 106316 - RNA, 32 nt, Homo Sapiens
cuccagcuccaauacuuauuaaggcuguugcu

SEQ ID NO: 106317 - RNA, 32 nt, Homo Sapiens
caggaggaaaagcccagggucuggggcagcag

SEQ ID NO: 106318 - RNA, 32 nt, Homo Sapiens
cgcuucguguuccucgcucgccccacagguau

SEQ ID NO: 106319 - RNA, 32 nt, Homo Sapiens
uucuccccagaggugggcccucuucccccuaa

SEQ ID NO: 106320 - RNA, 32 nt, Homo Sapiens
gccggggacagaggccugcccgggcgcggcca

SEQ ID NO: 106321 - RNA, 32 nt, Homo Sapiens
ggccgcuugcucacugaggaaagcagaggggu

SEQ ID NO: 106322 - RNA, 32 nt, Homo Sapiens
ccaggucucccucugucacuucagccaagcac

SEQ ID NO: 106323 - RNA, 32 nt, Homo Sapiens
acaaugcacugacuuuagaaagauguuaaugu

SEQ ID NO: 106324 - RNA, 32 nt, Homo Sapiens
ucacccagcgguccgcgccggggagagggagc

SEQ ID NO: 106325 - RNA, 32 nt, Homo Sapiens
caucuuuaauuugaaacuuaagaaaaugaauu

SEQ ID NO: 106326 - RNA, 32 nt, Homo Sapiens
cucuuccaucguacacuuccugucucugguuu

SEQ ID NO: 106327 - RNA, 32 nt, Homo Sapiens
caggguuggcuagagagcgaguauugugauuu

SEQ ID NO: 106328 - RNA, 32 nt, Homo Sapiens
cgucugugugcagcuguacaggcagcuuacug

SEQ ID NO: 106329 - RNA, 32 nt, Homo Sapiens
gccaaaaauugauaguuuacuccuaagucaaa

SEQ ID NO: 106330 - RNA, 32 nt, Homo Sapiens
ugugaaugcaccaauggacacucuguaucuag

SEQ ID NO: 106331 - RNA, 32 nt, Homo Sapiens
uuuuacuguauauaaaauuguuaaucugucug

SEQ ID NO: 106332 - RNA, 32 nt, Homo Sapiens
ucaaugugaaauguugucaucaucaucauuaa

SEQ ID NO: 106333 - RNA, 32 nt, Homo Sapiens
aguucucccuccccuccuacuucucucacacu

SEQ ID NO: 106334 - RNA, 32 nt, Homo Sapiens
ggccuggcacgguggcucacgccuguaauccc

SEQ ID NO: 106335 - RNA, 32 nt, Homo Sapiens
ugucucuccuuccucccuuccuuuacaguuua

SEQ ID NO: 106336 - RNA, 32 nt, Homo Sapiens
uuacggguuggcuuguggcuacggugccaccg

SEQ ID NO: 106337 - RNA, 32 nt, Homo Sapiens
cuacccugcccuccccucaaugcuggguggag

SEQ ID NO: 106338 - RNA, 32 nt, Homo Sapiens
cccuuccccucuucuuucuuuguucucuuuca

SEQ ID NO: 106339 - RNA, 32 nt, Homo Sapiens
acgcuguugacuacccuuucugaugugugugg

SEQ ID NO: 106340 - RNA, 32 nt, Homo Sapiens
uaacuaaaaauauuuuucuuucccuuauuuug

SEQ ID NO: 106341 - RNA, 32 nt, Homo Sapiens
agguccgugccgggcgagagagaugcugcccg

SEQ ID NO: 106342 - RNA, 32 nt, Homo Sapiens
aaaugcacuuaaggaaaacaaacaaauuaaag

SEQ ID NO: 106343 - RNA, 32 nt, Homo Sapiens
uccgagccagucuuuuucuggaggaagagcaa

SEQ ID NO: 106344 - RNA, 32 nt, Homo Sapiens
uccucuccuaguccugacguggcggagcugug

SEQ ID NO: 106345 - RNA, 32 nt, Homo Sapiens
acaggcagacauuuggucucagcagccaugcc

SEQ ID NO: 106346 - RNA, 32 nt, Homo Sapiens
guauagaagggagaacaggcaucagauuguuu

SEQ ID NO: 106347 - RNA, 32 nt, Homo Sapiens
gagucguggcuuacagaagagacgaaaugugg

SEQ ID NO: 106348 - RNA, 32 nt, Homo Sapiens
ugccuguaaucccugcacuuugggaagccaag

SEQ ID NO: 106349 - RNA, 32 nt, Homo Sapiens
uggcuuuaaucccagcacuuugggaacccgag

SEQ ID NO: 106350 - RNA, 32 nt, Homo Sapiens
auugcuuuucagaacuguuuaaucaucaauua

SEQ ID NO: 106351 - RNA, 32 nt, Homo Sapiens
auauaugauuguuuuucuuauaacuuuacuau

SEQ ID NO: 106352 - RNA, 32 nt, Homo Sapiens
cagaauaauaauaagaauuucaucuuuaaaaa

SEQ ID NO: 106353 - RNA, 31 nt, Homo Sapiens
ggagcucagccccaggguucggucgucagca

SEQ ID NO: 106354 - RNA, 32 nt, Homo Sapiens
ugauaagcuuauaaaaucaugauugaaucagc

SEQ ID NO: 106355 - RNA, 32 nt, Homo Sapiens
uuuacuauguacuuguuuuugcuggcauucug

SEQ ID NO: 106356 - RNA, 32 nt, Homo Sapiens
agaggggcgcucacgcucucgccacccaccuc

SEQ ID NO: 106357 - RNA, 32 nt, Homo Sapiens
gcuuguucuuugagaucucuguaaagaacccu

SEQ ID NO: 106358 - RNA, 32 nt, Homo Sapiens
uguuucaaagauuucagccacuaugauccugg

SEQ ID NO: 106359 - RNA, 32 nt, Homo Sapiens
cugccuauuuaaaaauauguuugguaguaaaa

SEQ ID NO: 106360 - RNA, 32 nt, Homo Sapiens
gguggaaaacuguuagaaaauuuuaaaguauu

SEQ ID NO: 106361 - RNA, 32 nt, Homo Sapiens
gugcugagacucugggacccaggcagcugcca

SEQ ID NO: 106362 - RNA, 32 nt, Homo Sapiens
auuuuauccgcauuuucuuauauuaaaaaaug

SEQ ID NO: 106363 - RNA, 32 nt, Homo Sapiens
accuucacuauaagaacagaaaaccaaacacc

SEQ ID NO: 106364 - RNA, 27 nt, Homo Sapiens
uccuauuauuaauucguaugcuuaguc

SEQ ID NO: 106365 - RNA, 32 nt, Homo Sapiens
ggaaaaaaaaugacauuuuuuaucuuauaccu

SEQ ID NO: 106366 - RNA, 32 nt, Homo Sapiens
cacauugggaugcacagaaacgugagggcagg

SEQ ID NO: 106367 - RNA, 32 nt, Homo Sapiens
cgguacccacugccggccuccgcgcuacccgg

SEQ ID NO: 106368 - RNA, 32 nt, Homo Sapiens
gcggagugcggggcuccgggggacugagcagc

SEQ ID NO: 106369 - RNA, 32 nt, Homo Sapiens
ucacggauacuucuuuuaccuggcggacagcc

SEQ ID NO: 106370 - RNA, 32 nt, Homo Sapiens
cggagccaacaugccaguggcccggagcuggg

SEQ ID NO: 106371 - RNA, 32 nt, Homo Sapiens
caaggucugcuaaagcucccugggccuuccau

SEQ ID NO: 106372 - RNA, 32 nt, Homo Sapiens
gggaagugcagguugcagugagccaagauugu

SEQ ID NO: 106373 - RNA, 32 nt, Homo Sapiens
ucuuagagguugguuauuguguuuaggauucu

SEQ ID NO: 106374 - RNA, 32 nt, Homo Sapiens
uuuuucuuaucacuuuaccauugguuggacuu

SEQ ID NO: 106375 - RNA, 32 nt, Homo Sapiens
aaauguguuuguuuucuggcgcgugcugcaaa

SEQ ID NO: 106376 - RNA, 32 nt, Homo Sapiens
cgcggagcagaccuccucccccggcccccaaa

SEQ ID NO: 106377 - RNA, 32 nt, Homo Sapiens
ccacgggcggagaucaccugcugccccgcaga

SEQ ID NO: 106378 - RNA, 32 nt, Homo Sapiens
augacuccacuuggaauggguaccacagacca

SEQ ID NO: 106379 - RNA, 32 nt, Homo Sapiens
ccagcugcugcgccccccauguagaaggugca

SEQ ID NO: 106380 - RNA, 32 nt, Homo Sapiens
guaccgguaccugcugugagaagugucacgug

SEQ ID NO: 106381 - RNA, 32 nt, Homo Sapiens
cauauggcaugcuuuucuuaccugucacaucu

SEQ ID NO: 106382 - RNA, 32 nt, Homo Sapiens
aggagguguaagauggucacucuuccauguuu

SEQ ID NO: 106383 - RNA, 32 nt, Homo Sapiens
agggguggacucagcucugucuggcucacccu

SEQ ID NO: 106384 - RNA, 32 nt, Homo Sapiens
uuucuuuaaaaugaguacugaauuguacuggu

SEQ ID NO: 106385 - RNA, 32 nt, Homo Sapiens
auuuuaaggugauuauacuggagauagaaggg

SEQ ID NO: 106386 - RNA, 32 nt, Homo Sapiens
aaggucuagugaaauuggucuuuccauuacau

SEQ ID NO: 106387 - RNA, 32 nt, Homo Sapiens
aacuggcauuucaucaguggcuaaauucacag

SEQ ID NO: 106388 - RNA, 32 nt, Homo Sapiens
ggccaaacugguaaccggcacgcuacuggcaa

SEQ ID NO: 106389 - RNA, 32 nt, Homo Sapiens
guuuugaagaaggaaaaagaaauacuguuuga

SEQ ID NO: 106390 - RNA, 32 nt, Homo Sapiens
ugcaacacaagaucaauguccauagcaauaug

SEQ ID NO: 106391 - RNA, 32 nt, Homo Sapiens
uaauuugcauauuuuaguuguauaaaguuuua

SEQ ID NO: 106392 - RNA, 32 nt, Homo Sapiens
cuacccuggagccaggagcaucaggguuggcu

SEQ ID NO: 106393 - RNA, 32 nt, Homo Sapiens
aaacaagaaauucccuauaccuguaugcauua

SEQ ID NO: 106394 - RNA, 32 nt, Homo Sapiens
gcaggcccugcgccuccuaugcggagaugcua

SEQ ID NO: 106395 - RNA, 32 nt, Homo Sapiens
cccaucggccgccuccucuccugccagccucc

SEQ ID NO: 106396 - RNA, 32 nt, Homo Sapiens
cuccuucauuuucucgcuccuguuagaacacc

SEQ ID NO: 106397 - RNA, 32 nt, Homo Sapiens
ggggacagggugaagaggguugguccccaccu

SEQ ID NO: 106398 - RNA, 32 nt, Homo Sapiens
caguugcccuccccggacgugguguuaugugg

SEQ ID NO: 106399 - RNA, 32 nt, Homo Sapiens
guguguguucuuccccaagguccccccacagc

SEQ ID NO: 106400 - RNA, 32 nt, Homo Sapiens
uguucacacgggggaaaugccguauauauuuu

SEQ ID NO: 106401 - RNA, 32 nt, Homo Sapiens
agguuucuuuuuucuuuuuccuuuuuuuaauu

SEQ ID NO: 106402 - RNA, 32 nt, Homo Sapiens
uuugagaauuguagauaacaucauacauaagu

SEQ ID NO: 106403 - RNA, 32 nt, Homo Sapiens
acgugggauucggcccgggugcucuugugagc

SEQ ID NO: 106404 - RNA, 32 nt, Homo Sapiens
uccucccugccaaccuuccccagcuccaauau

SEQ ID NO: 106405 - RNA, 32 nt, Homo Sapiens
aguggugcgaucucagcucccuuuaaccucca

SEQ ID NO: 106406 - RNA, 32 nt, Homo Sapiens
ccaggccccgcuuuugaguuuuggcagccucu

SEQ ID NO: 106407 - RNA, 32 nt, Homo Sapiens
ucgcgggugcgcgcgggccgugagugugcgcu

SEQ ID NO: 106408 - RNA, 32 nt, Homo Sapiens
uaucuuucuccauguggcgcugaaucacccau

SEQ ID NO: 106409 - RNA, 32 nt, Homo Sapiens
gcuuccuucccggcugucuccagcuuccuuac

SEQ ID NO: 106410 - RNA, 32 nt, Homo Sapiens
ccuuuccccccaucucugcucccuuugccaca

SEQ ID NO: 106411 - RNA, 32 nt, Homo Sapiens
aagagcaugggagaggugggagggguucuugc

SEQ ID NO: 106412 - RNA, 32 nt, Homo Sapiens
acuggaaaaaccacgcagcauaaugcuuauac

SEQ ID NO: 106413 - RNA, 32 nt, Homo Sapiens
aagcggcuguggcggcagcggcagccccagcc

SEQ ID NO: 106414 - RNA, 32 nt, Homo Sapiens
cccuucucuuaaaaauaauaacuuauugccag

SEQ ID NO: 106415 - RNA, 32 nt, Homo Sapiens
gcagcugcuucagauuuuuuacuuuuaaaaaa

SEQ ID NO: 106416 - RNA, 32 nt, Homo Sapiens
ugcaccuguauuacugaauauaggaaagagau

SEQ ID NO: 106417 - RNA, 32 nt, Homo Sapiens
ugcgggcgccggggugugggacaggcugagga

SEQ ID NO: 106418 - RNA, 32 nt, Homo Sapiens
gcaucagcguuugcucaguuaagggagaggua

SEQ ID NO: 106419 - RNA, 32 nt, Homo Sapiens
uuccaaacagccucucuguuucccuccuucuu

SEQ ID NO: 106420 - RNA, 32 nt, Homo Sapiens
uuuaucaaugugauuuucugacccuuacuauu

SEQ ID NO: 106421 - RNA, 32 nt, Homo Sapiens
uuuugaucaaccaauuuuucuaaaaguucagu

SEQ ID NO: 106422 - RNA, 32 nt, Homo Sapiens
ccagggcagggccaccccacucuaccuccuua

SEQ ID NO: 106423 - RNA, 32 nt, Homo Sapiens
acgaucauauuguacuguauuguuauuguaaa

SEQ ID NO: 106424 - RNA, 32 nt, Homo Sapiens
ucccaugcucaccuuucgccacuuccucccug

SEQ ID NO: 106425 - RNA, 32 nt, Homo Sapiens
aguauuguuuuguuaaacccaacguuuaguuu

SEQ ID NO: 106426 - RNA, 32 nt, Homo Sapiens
gguccauaccccuuccucucucccuccuacca

SEQ ID NO: 106427 - RNA, 32 nt, Homo Sapiens
caugaaggaggauggaagggcaggacgaggug

SEQ ID NO: 106428 - RNA, 32 nt, Homo Sapiens
caguggaaagccuggagcuagcaauuaggaga

SEQ ID NO: 106429 - RNA, 32 nt, Homo Sapiens
ccugcccaccauggggacccucagcugcgacu

SEQ ID NO: 106430 - RNA, 32 nt, Homo Sapiens
ccugaggccaagggggccacuggcuaccccua

SEQ ID NO: 106431 - RNA, 31 nt, Homo Sapiens
ccguguagugguccugcaggaguggagccug

SEQ ID NO: 106432 - RNA, 32 nt, Homo Sapiens
gggugggugaggggcgaggcugaggaagaaga

SEQ ID NO: 106433 - RNA, 32 nt, Homo Sapiens
ggcuagggugguguggaggggcugguccccug

SEQ ID NO: 106434 - RNA, 32 nt, Homo Sapiens
auauuaagaacaaagaaauagaaaaugguuua

SEQ ID NO: 106435 - RNA, 32 nt, Homo Sapiens
aauagaggacaaagguugugucuugcuuuugu

SEQ ID NO: 106436 - RNA, 32 nt, Homo Sapiens
uaauugucauuaccacuacucuccauuacuuu

SEQ ID NO: 106437 - RNA, 32 nt, Homo Sapiens
aaacauguaaaaauagguuguauuuuacucua

SEQ ID NO: 106438 - RNA, 32 nt, Homo Sapiens
ccuccgaggucuuaagggggccagaguagcag

SEQ ID NO: 106439 - RNA, 32 nt, Homo Sapiens
ugguuuccaaaauauauuaguauauuguugaa

SEQ ID NO: 106440 - RNA, 32 nt, Homo Sapiens
guugucccuucagcuuuccccagcaguugguu

SEQ ID NO: 106441 - RNA, 32 nt, Homo Sapiens
aaacuccucgaagcgggcgcgcgacgucgcgg

SEQ ID NO: 106442 - RNA, 32 nt, Homo Sapiens
cauugcucauuucacacucuucagaagacauu

SEQ ID NO: 106443 - RNA, 32 nt, Homo Sapiens
gcucuuuauuuaugucuuucuuucucuccagc

SEQ ID NO: 106444 - RNA, 32 nt, Homo Sapiens
uguuggcuuuccaaaucagugggucugacuug

SEQ ID NO: 106445 - RNA, 32 nt, Homo Sapiens
ucuucuuaacucccucaggcaucaucaaauuc

SEQ ID NO: 106446 - RNA, 32 nt, Homo Sapiens
cagcuuccccugggcaucccagcccugggcau

SEQ ID NO: 106447 - RNA, 32 nt, Homo Sapiens
uuaccucaccgguccccacgggcuccgcgcuc

SEQ ID NO: 106448 - RNA, 32 nt, Homo Sapiens
auaguaaggggaggaaagggaagcaccuccac

SEQ ID NO: 106449 - RNA, 32 nt, Homo Sapiens
uuauaagaugacuguguuguaccaaaauucau

SEQ ID NO: 106450 - RNA, 32 nt, Homo Sapiens
cgggccgaggucccgggggcggugccuugcgg

SEQ ID NO: 106451 - RNA, 32 nt, Homo Sapiens
uaggaguggccucaaggccacccagugcugac

SEQ ID NO: 106452 - RNA, 32 nt, Homo Sapiens
uuggcagccacagugaauaaaguaaaagcauu

SEQ ID NO: 106453 - RNA, 32 nt, Homo Sapiens
cguccaugcuccugggccccagccccgcgcag

SEQ ID NO: 106454 - RNA, 32 nt, Homo Sapiens
aaaacugggaggucaauaaaauuuaaacugcu

SEQ ID NO: 106455 - RNA, 27 nt, Homo Sapiens
uuccaaauaaaagauuaaaccaauggc

SEQ ID NO: 106456 - RNA, 32 nt, Homo Sapiens
ccccgcuccaugagcagugacuccccaggccc

SEQ ID NO: 106457 - RNA, 32 nt, Homo Sapiens
acaucuguggggucuccuggguucagcggcug

SEQ ID NO: 106458 - RNA, 32 nt, Homo Sapiens
cgugaugcuccggguucucggcggcggcugug

SEQ ID NO: 106459 - RNA, 32 nt, Homo Sapiens
auaccuguuuagaaccaaaaccaccaugacac

SEQ ID NO: 106460 - RNA, 32 nt, Homo Sapiens
gcagggcuggggugggggccgcagagggcagc

SEQ ID NO: 106461 - RNA, 32 nt, Homo Sapiens
ccccuccccguccacagggcagccugagcgug

SEQ ID NO: 106462 - RNA, 32 nt, Homo Sapiens
auauugaaucuggguucuuuuuugacuuuuuu

SEQ ID NO: 106463 - RNA, 32 nt, Homo Sapiens
cauccugugaauggaguggggcugaggagaug

SEQ ID NO: 106464 - RNA, 32 nt, Homo Sapiens
gagggagcuagcagcuggccuccauggcccca

SEQ ID NO: 106465 - RNA, 32 nt, Homo Sapiens
ggauucucggcacuaacacauagccaguccua

SEQ ID NO: 106466 - RNA, 32 nt, Homo Sapiens
aaugucugucugcaauuuauggagaugaccac

SEQ ID NO: 106467 - RNA, 32 nt, Homo Sapiens
agacccauuccuauuucuuauagucaauguuu

SEQ ID NO: 106468 - RNA, 32 nt, Homo Sapiens
cuaacccccucugcucuguccuccccuauugc

SEQ ID NO: 106469 - RNA, 32 nt, Homo Sapiens
uuauuuuugucaaacauguacuccuuucauac

SEQ ID NO: 106470 - RNA, 32 nt, Homo Sapiens
uuugagaccagccugcccaacauggugaaacc

SEQ ID NO: 106471 - RNA, 32 nt, Homo Sapiens
gauccagaccccaagagaggguucuuggaucu

SEQ ID NO: 106472 - RNA, 32 nt, Homo Sapiens
uuuuggggggacgcuauaggauguggggaagu

SEQ ID NO: 106473 - RNA, 32 nt, Homo Sapiens
caaaaucacaccuuuagagagcaccuugcucu

SEQ ID NO: 106474 - RNA, 32 nt, Homo Sapiens
gggccaaagggaaagcucucucuuggccccca

SEQ ID NO: 106475 - RNA, 31 nt, Homo Sapiens
gacgggguuuccccguguuagccaggauggu

SEQ ID NO: 106476 - RNA, 32 nt, Homo Sapiens
uaagcuagcuaauucuuguuuucugauuuaaa

SEQ ID NO: 106477 - RNA, 32 nt, Homo Sapiens
aggcuuuguccuccuguuuaauccacuuccgu

SEQ ID NO: 106478 - RNA, 31 nt, Homo Sapiens
uucucaaucuugaacucauagauuauuaucu

SEQ ID NO: 106479 - RNA, 32 nt, Homo Sapiens
agcaggcagggacuguucugcuccucauagcu

SEQ ID NO: 106480 - RNA, 32 nt, Homo Sapiens
ugaaaccgucaguucggaaggcugguuagaac

SEQ ID NO: 106481 - RNA, 32 nt, Homo Sapiens
accacagugucugcagcugcugcccuucuccc

SEQ ID NO: 106482 - RNA, 30 nt, Homo Sapiens
agacgaccagcugcugcagaagcucagggc

SEQ ID NO: 106483 - RNA, 32 nt, Homo Sapiens
ugccccgcagccccggcccccugcccaccaug

SEQ ID NO: 106484 - RNA, 31 nt, Homo Sapiens
uuuugugggcacucaaguucggaccucuggg

SEQ ID NO: 106485 - RNA, 32 nt, Homo Sapiens
uagauuggucugaacaccuagcuguuaacaua

SEQ ID NO: 106486 - RNA, 32 nt, Homo Sapiens
ucucauuacauagacgcacaagaauaugucac

SEQ ID NO: 106487 - RNA, 32 nt, Homo Sapiens
uuaauuuugucaacauauuucagcaguucuac

SEQ ID NO: 106488 - RNA, 32 nt, Homo Sapiens
auacaggcauauuuaaugcugaguuuaauuua

SEQ ID NO: 106489 - RNA, 32 nt, Homo Sapiens
aaggggcuccaggugggugcugcuguuaugau

SEQ ID NO: 106490 - RNA, 32 nt, Homo Sapiens
ucuucgugguggccagcagcagcuacaacaug

SEQ ID NO: 106491 - RNA, 32 nt, Homo Sapiens
cuccuccuuaggaugcauaaccuaccuugucu

SEQ ID NO: 106492 - RNA, 32 nt, Homo Sapiens
accuucccuggccagauuccugccugucuccc

SEQ ID NO: 106493 - RNA, 32 nt, Homo Sapiens
cugggacgcggcagccucgccgcauucucgcu

SEQ ID NO: 106494 - RNA, 32 nt, Homo Sapiens
guccucgcuccugagggacccuggacugucac

SEQ ID NO: 106495 - RNA, 32 nt, Homo Sapiens
auuuuggaaaaaacuguuauugugaaauucac

SEQ ID NO: 106496 - RNA, 32 nt, Homo Sapiens
aucucccaagcccacaccacugcccugcucca

SEQ ID NO: 106497 - RNA, 32 nt, Homo Sapiens
uacuguaauucaaaaauaggaaucuuuggcug

SEQ ID NO: 106498 - RNA, 32 nt, Homo Sapiens
gugguugugcgcccggggcuugggagcggccg

SEQ ID NO: 106499 - RNA, 32 nt, Homo Sapiens
uuaaaaaaugaaauccuuuuccuguucauaca

SEQ ID NO: 106500 - RNA, 32 nt, Homo Sapiens
auuguacauaaacaaacaaaaagguagaagcu

SEQ ID NO: 106501 - RNA, 32 nt, Homo Sapiens
auuucaagaacaagauggugaaaguauaccug

SEQ ID NO: 106502 - RNA, 32 nt, Homo Sapiens
uucugaaauuaggaaaguacuugcaugaucuu

SEQ ID NO: 106503 - RNA, 32 nt, Homo Sapiens
aaguauaaaacggcuuacaaagggagacacaa

SEQ ID NO: 106504 - RNA, 32 nt, Homo Sapiens
caauauaaguugaaacaauguacaauauugua

SEQ ID NO: 106505 - RNA, 30 nt, Homo Sapiens
uucagugucuguggcuggagagugugucuu

SEQ ID NO: 106506 - RNA, 32 nt, Homo Sapiens
uuguucuuaugaacgaaaaagagguagcacua

SEQ ID NO: 106507 - RNA, 32 nt, Homo Sapiens
uugugaauaaagaaucaguuuaauuuuucaca

SEQ ID NO: 106508 - RNA, 32 nt, Homo Sapiens
cccaugcccugcacagcccgccugagguuuga

SEQ ID NO: 106509 - RNA, 32 nt, Homo Sapiens
ugccagaggcugccucccggaguugggggcgg

SEQ ID NO: 106510 - RNA, 32 nt, Homo Sapiens
cuucucuuagggcugacgguguccuugucaca

SEQ ID NO: 106511 - RNA, 32 nt, Homo Sapiens
gcgacuggaaagauucuucgacucagaagaug

SEQ ID NO: 106512 - RNA, 32 nt, Homo Sapiens
uaggaaaaacauugcauuucccugccuaagag

SEQ ID NO: 106513 - RNA, 32 nt, Homo Sapiens
uuugcccgguguguauuuuuuacaauugagac

SEQ ID NO: 106514 - RNA, 32 nt, Homo Sapiens
aaaugauugucuuuuuccuaugacucaaagau

SEQ ID NO: 106515 - RNA, 32 nt, Homo Sapiens
acucuuaauuuucauguuggugaugaaauucc

SEQ ID NO: 106516 - RNA, 32 nt, Homo Sapiens
gacuaucaaaaauaguuuagggaaaguauguc

SEQ ID NO: 106517 - RNA, 32 nt, Homo Sapiens
ccccauccccaccccagccgggcccgcucagg

SEQ ID NO: 106518 - RNA, 32 nt, Homo Sapiens
gcuaaacaaacaaacaaacaaacaaacaaaca

SEQ ID NO: 106519 - RNA, 32 nt, Homo Sapiens
uggcuggaggggcuagcgcucccccuucucuu

SEQ ID NO: 106520 - RNA, 32 nt, Homo Sapiens
gcgugcggagccugcgcagagccccggccggg

SEQ ID NO: 106521 - RNA, 32 nt, Homo Sapiens
gcccugauauuuuguguaaauaaaauguuuuu

SEQ ID NO: 106522 - RNA, 32 nt, Homo Sapiens
aagucauaaagugcuucuuuuaagugaaaacc

SEQ ID NO: 106523 - RNA, 32 nt, Homo Sapiens
auaaagaagauaaaauaaauuauauacccgag

SEQ ID NO: 106524 - RNA, 32 nt, Homo Sapiens
agggaagaugcauucuagauucaaagaaauac

SEQ ID NO: 106525 - RNA, 32 nt, Homo Sapiens
aucuucccgcguccgccgauuccuccuccuug

SEQ ID NO: 106526 - RNA, 32 nt, Homo Sapiens
cugcaaaauauguugcagcauugacaagcuug

SEQ ID NO: 106527 - RNA, 32 nt, Homo Sapiens
gcucuuaucacagauuuugaacaauugucugu

SEQ ID NO: 106528 - RNA, 32 nt, Homo Sapiens
cccucucucuucugcagcaccagccucugccc

SEQ ID NO: 106529 - RNA, 32 nt, Homo Sapiens
cuaaaucaggugucaccuucccucagccucgc

SEQ ID NO: 106530 - RNA, 32 nt, Homo Sapiens
cuuacaaaaaauuuaaaauauuaucugggagu

SEQ ID NO: 106531 - RNA, 32 nt, Homo Sapiens
cccugggccacggccagccccaucccauugcu

SEQ ID NO: 106532 - RNA, 32 nt, Homo Sapiens
ggacacaggaagauccagaagcuaguggcaca

SEQ ID NO: 106533 - RNA, 32 nt, Homo Sapiens
auuguucaauguacuauaguaauuguauuuaa

SEQ ID NO: 106534 - RNA, 32 nt, Homo Sapiens
ggucuaguugcauuuucacuggggggaggggg

SEQ ID NO: 106535 - RNA, 32 nt, Homo Sapiens
acauugucugcacuuuaagaacuuuuguggca

SEQ ID NO: 106536 - RNA, 32 nt, Homo Sapiens
cauuuugaaacauuuacugaauguugauagac

SEQ ID NO: 106537 - RNA, 32 nt, Homo Sapiens
aaaacggggaaugaaggcaggaaggaggcugg

SEQ ID NO: 106538 - RNA, 32 nt, Homo Sapiens
uuuguacaagauacacuggagaacaaagggaa

SEQ ID NO: 106539 - RNA, 29 nt, Homo Sapiens
guucaagugauuuuccugccucagccucc

SEQ ID NO: 106540 - RNA, 32 nt, Homo Sapiens
uucugcccgggcugccucucccccgcuagggc

SEQ ID NO: 106541 - RNA, 31 nt, Homo Sapiens
uaaaagugaaacauuuuggcauguuuguuaa

SEQ ID NO: 106542 - RNA, 32 nt, Homo Sapiens
gugaaagagaaagaggggaauauuuugagauc

SEQ ID NO: 106543 - RNA, 32 nt, Homo Sapiens
aggagcugugggagcaggcccagugggaggcu

SEQ ID NO: 106544 - RNA, 32 nt, Homo Sapiens
uuuaccuaggucccucaguaacuguagucaua

SEQ ID NO: 106545 - RNA, 32 nt, Homo Sapiens
ucgacgcggcggcggcagcggcgucggcucgg

SEQ ID NO: 106546 - RNA, 32 nt, Homo Sapiens
gcaggaaccaggcuccaggcgccggcgccggg

SEQ ID NO: 106547 - RNA, 32 nt, Homo Sapiens
gcgacuccagugcucuggcccgggacuccccu

SEQ ID NO: 106548 - RNA, 32 nt, Homo Sapiens
cagaucuggagcuucccagguuuggaccuggg

SEQ ID NO: 106549 - RNA, 32 nt, Homo Sapiens
caaagcuggggccagccugucuucaccggcac

SEQ ID NO: 106550 - RNA, 32 nt, Homo Sapiens
ucauggaagcuacugcuuauguccacagacca

SEQ ID NO: 106551 - RNA, 32 nt, Homo Sapiens
ugaacugcccccagcccccgccccauuaaaga

SEQ ID NO: 106552 - RNA, 32 nt, Homo Sapiens
acgggagcuggccugcuuugcccaggcuguaa

SEQ ID NO: 106553 - RNA, 32 nt, Homo Sapiens
gguucagcugucugcucccuagcagccggccu

SEQ ID NO: 106554 - RNA, 32 nt, Homo Sapiens
gugagaggacgggcuccgcgcgcuccggcagc

SEQ ID NO: 106555 - RNA, 32 nt, Homo Sapiens
uugggugaugaguguugggguuuucuauacuc

SEQ ID NO: 106556 - RNA, 32 nt, Homo Sapiens
ccgaugauuuuuguucucccuucuugaagaau

SEQ ID NO: 106557 - RNA, 32 nt, Homo Sapiens
cugaccaccucaggcacacuuucucaggaccu

SEQ ID NO: 106558 - RNA, 32 nt, Homo Sapiens
ugagaaugccccucccaaccacagcagccaga

SEQ ID NO: 106559 - RNA, 32 nt, Homo Sapiens
gcuucgugcaggagggcacggugggugagcca

SEQ ID NO: 106560 - RNA, 32 nt, Homo Sapiens
uagucaucugacaggcuuaucauucucuuuaa

SEQ ID NO: 106561 - RNA, 32 nt, Homo Sapiens
uaaaauccaccccacccuuguuuccccuuggu

SEQ ID NO: 106562 - RNA, 32 nt, Homo Sapiens
agaacacauuuuauaaauguuaaacacaaaaa

SEQ ID NO: 106563 - RNA, 32 nt, Homo Sapiens
gccgucagaccccaccugccccggugguggga

SEQ ID NO: 106564 - RNA, 32 nt, Homo Sapiens
gcaguccauuuucucuugcaagcccuuuacca

SEQ ID NO: 106565 - RNA, 32 nt, Homo Sapiens
agagugcugggauggaaggccgggauacucac

SEQ ID NO: 106566 - RNA, 30 nt, Homo Sapiens
gggcccugggauguucacgcaggaccgcgu

SEQ ID NO: 106567 - RNA, 32 nt, Homo Sapiens
uuauuuuaucuaagugaucuacuuuauuaagu

SEQ ID NO: 106568 - RNA, 32 nt, Homo Sapiens
uuaagaaaaggaauucuuuuguguaucuauag

SEQ ID NO: 106569 - RNA, 29 nt, Homo Sapiens
aaguuauggaguucauauuuucaaaagau

SEQ ID NO: 106570 - RNA, 32 nt, Homo Sapiens
auaacucacucuucuuuuucucagcauggacu

SEQ ID NO: 106571 - RNA, 32 nt, Homo Sapiens
gaugccccgcggccccgcccgcccucuuaagc

SEQ ID NO: 106572 - RNA, 32 nt, Homo Sapiens
aggcaggggaugcauggguguccccaucuguc

SEQ ID NO: 106573 - RNA, 32 nt, Homo Sapiens
gcagauuucugcaggaugagggguagcggugu

SEQ ID NO: 106574 - RNA, 32 nt, Homo Sapiens
cguguccugcgcgcuacgccgucuguuucuag

SEQ ID NO: 106575 - RNA, 32 nt, Homo Sapiens
aguggggggcucucauccuccucggauucuga

SEQ ID NO: 106576 - RNA, 32 nt, Homo Sapiens
gaccucuucuaaaacauaacugucacuuaccu

SEQ ID NO: 106577 - RNA, 32 nt, Homo Sapiens
guuugauuugauucucagccugguagauguug

SEQ ID NO: 106578 - RNA, 32 nt, Homo Sapiens
uguguuuugccuccuuucccagugucucccca

SEQ ID NO: 106579 - RNA, 32 nt, Homo Sapiens
uggguacccagcugcuguggaacggguaugga

SEQ ID NO: 106580 - RNA, 32 nt, Homo Sapiens
cggggaauggucuggaacacggaccuggugga

SEQ ID NO: 106581 - RNA, 32 nt, Homo Sapiens
caauauuuacugagacuucgaagacccagcag

SEQ ID NO: 106582 - RNA, 32 nt, Homo Sapiens
cucccgcgcgccccaacccugcuuaucccuug

SEQ ID NO: 106583 - RNA, 32 nt, Homo Sapiens
guaucagccccucccauugcgggccugggcua

SEQ ID NO: 106584 - RNA, 32 nt, Homo Sapiens
gguuucaccauguuggucgggcuggucucaaa

SEQ ID NO: 106585 - RNA, 32 nt, Homo Sapiens
uccucuggagacggggcaucucccucugauuu

SEQ ID NO: 106586 - RNA, 32 nt, Homo Sapiens
aaaguugugagaguuaaaugugaucgaugaug

SEQ ID NO: 106587 - RNA, 32 nt, Homo Sapiens
ucugguuucuucccuucccagagggucuuacu

SEQ ID NO: 106588 - RNA, 32 nt, Homo Sapiens
gcagagccgcaggcgcuaggccgcccgacaca

SEQ ID NO: 106589 - RNA, 32 nt, Homo Sapiens
agaucgugccacugcaccacuccagccugggc

SEQ ID NO: 106590 - RNA, 32 nt, Homo Sapiens
auuggggaugcagagcagcggcagcggguaug

SEQ ID NO: 106591 - RNA, 32 nt, Homo Sapiens
gaccacuagcuaauucagaauauuuucauugc

SEQ ID NO: 106592 - RNA, 32 nt, Homo Sapiens
ggaacagccaggcugcgcugggugcugaggcc

SEQ ID NO: 106593 - RNA, 32 nt, Homo Sapiens
guggaggagauggugacagccggcgcuacagc

SEQ ID NO: 106594 - RNA, 32 nt, Homo Sapiens
gagaagugaagauguaacauguuaucugucgc

SEQ ID NO: 106595 - RNA, 32 nt, Homo Sapiens
cacacacucggguuaagaaauaccuuuaaauu

SEQ ID NO: 106596 - RNA, 32 nt, Homo Sapiens
aaaggcuaugauucuagaugagaaguuauauc

SEQ ID NO: 106597 - RNA, 32 nt, Homo Sapiens
uuguuuuguuuuucucuuucacucagccaaau

SEQ ID NO: 106598 - RNA, 32 nt, Homo Sapiens
gcuuguagagcucagucugggcuguaaugugg

SEQ ID NO: 106599 - RNA, 32 nt, Homo Sapiens
uauuauuuccaaaaguuuuuaauacuguauua

SEQ ID NO: 106600 - RNA, 32 nt, Homo Sapiens
ucacaagggcuuuguuuccugcucuccucugc

SEQ ID NO: 106601 - RNA, 32 nt, Homo Sapiens
caaaaaugacaauucugugucuggugggaucu

SEQ ID NO: 106602 - RNA, 32 nt, Homo Sapiens
cagagguaaagugucuuuucaauauaaccagc

SEQ ID NO: 106603 - RNA, 31 nt, Homo Sapiens
auucagaaauaaauaguaauuauucagaaau

SEQ ID NO: 106604 - RNA, 32 nt, Homo Sapiens
ggagcgccccggccguguuggccacggaguuc

SEQ ID NO: 106605 - RNA, 32 nt, Homo Sapiens
ggacgugaggacuccccccaccccuacccucu

SEQ ID NO: 106606 - RNA, 32 nt, Homo Sapiens
cuccauugccccggcguggcaggccauuccaa

SEQ ID NO: 106607 - RNA, 32 nt, Homo Sapiens
uuugguuuggggaagaaaauccucccccuucc

SEQ ID NO: 106608 - RNA, 32 nt, Homo Sapiens
acaggguugcaaagguuaugauuauuucaaca

SEQ ID NO: 106609 - RNA, 32 nt, Homo Sapiens
gucgaggagauuuguaauccacuuuuuagugc

SEQ ID NO: 106610 - RNA, 32 nt, Homo Sapiens
gcuccacuaaccagggucuccuccuccucuuc

SEQ ID NO: 106611 - RNA, 32 nt, Homo Sapiens
cucggcgguuugcggagcugcuaggauggagc

SEQ ID NO: 106612 - RNA, 32 nt, Homo Sapiens
ggauuauggucuuuagauuaauacugauuaua

SEQ ID NO: 106613 - RNA, 32 nt, Homo Sapiens
ucaaggcaccacccucaccaucgggggccucg

SEQ ID NO: 106614 - RNA, 32 nt, Homo Sapiens
cgguauauccugccugcaguucugggaauccu

SEQ ID NO: 106615 - RNA, 32 nt, Homo Sapiens
cguuguuguuguuuucuuucucucuugccaga

SEQ ID NO: 106616 - RNA, 32 nt, Homo Sapiens
gcaagcauauuucuuugaaugacuccaguaaa

SEQ ID NO: 106617 - RNA, 32 nt, Homo Sapiens
agagcugccccuuccacuuccuccccaaaagg

SEQ ID NO: 106618 - RNA, 32 nt, Homo Sapiens
gaucugagauucaacuuuaccauccacaguca

SEQ ID NO: 106619 - RNA, 32 nt, Homo Sapiens
ccacugauaguauuucauauggucccucagua

SEQ ID NO: 106620 - RNA, 32 nt, Homo Sapiens
gugccuguccccagccccaaccccacucaugc

SEQ ID NO: 106621 - RNA, 32 nt, Homo Sapiens
uuuaauuucuuccuuuuuguucuuuuuguuug

SEQ ID NO: 106622 - RNA, 32 nt, Homo Sapiens
acaugggacccugaaccuucuugaauauuccc

SEQ ID NO: 106623 - RNA, 32 nt, Homo Sapiens
ggcacucucguuaccuuucuucuauaccuugg

SEQ ID NO: 106624 - RNA, 32 nt, Homo Sapiens
caggagucgaggaggagguggauguggcagcu

SEQ ID NO: 106625 - RNA, 32 nt, Homo Sapiens
aacugcuuucccuuauguucacugugccauaa

SEQ ID NO: 106626 - RNA, 32 nt, Homo Sapiens
ccagagccagccugcuggccucagcuccgggu

SEQ ID NO: 106627 - RNA, 32 nt, Homo Sapiens
aaugucugcauaauguuagauucuucuccugu

SEQ ID NO: 106628 - RNA, 30 nt, Homo Sapiens
ucagaagauaaaagauaaguaggguaugcu

SEQ ID NO: 106629 - RNA, 32 nt, Homo Sapiens
ucugacgcucacaguguuuuccuuucucucug

SEQ ID NO: 106630 - RNA, 32 nt, Homo Sapiens
uaccuucuaacacuuugccauagcucagacca

SEQ ID NO: 106631 - RNA, 32 nt, Homo Sapiens
auuuucccuucugugcuucaguuucuucaucu

SEQ ID NO: 106632 - RNA, 32 nt, Homo Sapiens
aguuacaguuguaacaagccuacuucauauug

SEQ ID NO: 106633 - RNA, 32 nt, Homo Sapiens
auuaauuaaugauaaaauuggcgcuuguuuua

SEQ ID NO: 106634 - RNA, 32 nt, Homo Sapiens
cucugccuuuuucucuuauauguggguucaug

SEQ ID NO: 106635 - RNA, 32 nt, Homo Sapiens
uuggcauucaauaaggaaaaaguucuaacucc

SEQ ID NO: 106636 - RNA, 32 nt, Homo Sapiens
gcugcugcugcacagagcugugguccucaggc

SEQ ID NO: 106637 - RNA, 32 nt, Homo Sapiens
ggccaauaugcaauauggugacaccccgucuc

SEQ ID NO: 106638 - RNA, 32 nt, Homo Sapiens
aacaauccuugccccaggccugguccuuagaa

SEQ ID NO: 106639 - RNA, 32 nt, Homo Sapiens
gcucccugcccggcccggcccucccuggcaau

SEQ ID NO: 106640 - RNA, 32 nt, Homo Sapiens
cuggccgaagaugaagcagagcaggacagaug

SEQ ID NO: 106641 - RNA, 32 nt, Homo Sapiens
aaaugaucugcauuggauuuacuagacgaaaa

SEQ ID NO: 106642 - RNA, 32 nt, Homo Sapiens
auugauaucugaauuaaaacuaucaacaacaa

SEQ ID NO: 106643 - RNA, 32 nt, Homo Sapiens
cagcuucggccacgcgggcuccgcccgccccg

SEQ ID NO: 106644 - RNA, 32 nt, Homo Sapiens
uauaugauugcauugggaccagucauuuccua

SEQ ID NO: 106645 - RNA, 32 nt, Homo Sapiens
cuucaugguguuccuggaaggcagaugagcug

SEQ ID NO: 106646 - RNA, 32 nt, Homo Sapiens
cgcccgacgcugccgaugucccggggcugagc

SEQ ID NO: 106647 - RNA, 32 nt, Homo Sapiens
gcuggaaacaauuuuauguaauaagcaauggg

SEQ ID NO: 106648 - RNA, 32 nt, Homo Sapiens
ugacuguugugauuccaucaaguuuguacacu

SEQ ID NO: 106649 - RNA, 28 nt, Homo Sapiens
gccgcggggcggccgccaucuggagcac

SEQ ID NO: 106650 - RNA, 32 nt, Homo Sapiens
aggauugcuugagcucaugaguucaagaccag

SEQ ID NO: 106651 - RNA, 32 nt, Homo Sapiens
uggcgguggagacuucccugugcggugcucag

SEQ ID NO: 106652 - RNA, 32 nt, Homo Sapiens
ccucgcuggcuuccccaccucucucaggauga

SEQ ID NO: 106653 - RNA, 32 nt, Homo Sapiens
acuacaguugaaaucauggauacaucaacaaa

SEQ ID NO: 106654 - RNA, 32 nt, Homo Sapiens
aggcccuuuguguaaggugucuuaauacuguc

SEQ ID NO: 106655 - RNA, 32 nt, Homo Sapiens
auaccacucaucaaauggaaugcugaaaguuu

SEQ ID NO: 106656 - RNA, 32 nt, Homo Sapiens
cucagagcgcuguguaaccgcccaagggguuc

SEQ ID NO: 106657 - RNA, 32 nt, Homo Sapiens
uuaggcaucugccuaucugugcauuaaauuaa

SEQ ID NO: 106658 - RNA, 32 nt, Homo Sapiens
uaagcuuuuuacuguccauaaaacaggagcca

SEQ ID NO: 106659 - RNA, 32 nt, Homo Sapiens
aggcaaagguugcgguaagcugcgagcaugcc

SEQ ID NO: 106660 - RNA, 32 nt, Homo Sapiens
uaaguuuaauaaacccgaaauuacugguuaaa

SEQ ID NO: 106661 - RNA, 32 nt, Homo Sapiens
cccucuggagaacacugccucccgcuggccca

SEQ ID NO: 106662 - RNA, 32 nt, Homo Sapiens
cuaaaaucugaccagaccacaaugaaaaguau

SEQ ID NO: 106663 - RNA, 32 nt, Homo Sapiens
ugucaaguaaaucugucuaaauuuauauuuua

SEQ ID NO: 106664 - RNA, 30 nt, Homo Sapiens
uguucagccugugcuggggagccguggucc

SEQ ID NO: 106665 - RNA, 32 nt, Homo Sapiens
gaauauaguauuuggagucagcuuaaaucaag

SEQ ID NO: 106666 - RNA, 32 nt, Homo Sapiens
cagcgagcuccagcccucggcgguggcggcgg

SEQ ID NO: 106667 - RNA, 32 nt, Homo Sapiens
cccucgaagcggggcggggcgaagcggggcgg

SEQ ID NO: 106668 - RNA, 32 nt, Homo Sapiens
uaacacuuaaguuaaaucaugauguaaaauuu

SEQ ID NO: 106669 - RNA, 32 nt, Homo Sapiens
aaugagauauuguguggcuuuuuaguaacaac

SEQ ID NO: 106670 - RNA, 32 nt, Homo Sapiens
uguguugcuuugcacgucaucugguccuucca

SEQ ID NO: 106671 - RNA, 32 nt, Homo Sapiens
gcagaacugacaguugacucuaauucuugcua

SEQ ID NO: 106672 - RNA, 32 nt, Homo Sapiens
cacugcuuuaaaaaacaauuaucccuuacaga

SEQ ID NO: 106673 - RNA, 32 nt, Homo Sapiens
ugccucccccacuugcaaugugaguccuaaga

SEQ ID NO: 106674 - RNA, 32 nt, Homo Sapiens
auguggggcagagcagccacccugcccccagc

SEQ ID NO: 106675 - RNA, 32 nt, Homo Sapiens
ccuccucaguggccauguggugacggcugggu

SEQ ID NO: 106676 - RNA, 32 nt, Homo Sapiens
uggccacgcccugugucagaccaucugggaau

SEQ ID NO: 106677 - RNA, 32 nt, Homo Sapiens
agaugaccaguccuuucugggaccucaauggg

SEQ ID NO: 106678 - RNA, 32 nt, Homo Sapiens
ucccugcucccuccuuccucauccagcaccaa

SEQ ID NO: 106679 - RNA, 32 nt, Homo Sapiens
uucuuuuaaaagacaaguguaauagacaucua

SEQ ID NO: 106680 - RNA, 32 nt, Homo Sapiens
cgcccagucccggccccucucccgccccacac

SEQ ID NO: 106681 - RNA, 32 nt, Homo Sapiens
accacugacagcuggucugaccaccgucacau

SEQ ID NO: 106682 - RNA, 32 nt, Homo Sapiens
uagugauuaucucauaauuuuauuuucuuguu

SEQ ID NO: 106683 - RNA, 32 nt, Homo Sapiens
agaaaugauuuaaugaaucuugcuuucuaaua

SEQ ID NO: 106684 - RNA, 32 nt, Homo Sapiens
uugucauuaaauguuauauuauuucacauaua

SEQ ID NO: 106685 - RNA, 32 nt, Homo Sapiens
agugugugcaggauucuguuacccagcugugc

SEQ ID NO: 106686 - RNA, 32 nt, Homo Sapiens
uguggccucugcugcuggcccuguacaggagc

SEQ ID NO: 106687 - RNA, 32 nt, Homo Sapiens
auaaacucuguuacagaagagaaaaagggccg

SEQ ID NO: 106688 - RNA, 32 nt, Homo Sapiens
ugaugagccaucuuguguagcugaucucucag

SEQ ID NO: 106689 - RNA, 32 nt, Homo Sapiens
auacuuuuuuauauuucacaauauaugcaaua

SEQ ID NO: 106690 - RNA, 32 nt, Homo Sapiens
uguuagugaacaggccuguuuuaaauaucuua

SEQ ID NO: 106691 - RNA, 32 nt, Homo Sapiens
caugguguauaaauucuuuaccaaggcaacuc

SEQ ID NO: 106692 - RNA, 32 nt, Homo Sapiens
gucugcuuuuaaaggagggcauguucaguuuu

SEQ ID NO: 106693 - RNA, 31 nt, Homo Sapiens
accucacguuugacuuuuauuuauaauaaca

SEQ ID NO: 106694 - RNA, 32 nt, Homo Sapiens
ugcagugagucaagaucucaccacugaacucc

SEQ ID NO: 106695 - RNA, 31 nt, Homo Sapiens
uguccuuaggaugaagcucuaacugaacuga

SEQ ID NO: 106696 - RNA, 32 nt, Homo Sapiens
auucuuggaaagauucugaaggcuguguugaa

SEQ ID NO: 106697 - RNA, 32 nt, Homo Sapiens
gugauguacagucuauuccauagaaucacaga

SEQ ID NO: 106698 - RNA, 32 nt, Homo Sapiens
cuucuggaacuucuaaacagcacauccucgag

SEQ ID NO: 106699 - RNA, 31 nt, Homo Sapiens
gaggauggggacagaaagcgcacagaaucuu

SEQ ID NO: 106700 - RNA, 32 nt, Homo Sapiens
cccuggaccucuucugccacgcgcucauuuuc

SEQ ID NO: 106701 - RNA, 32 nt, Homo Sapiens
agggcugcagugagccgagauugugccacugc

SEQ ID NO: 106702 - RNA, 32 nt, Homo Sapiens
agccaggugggcgggggcuagggggagccugg

SEQ ID NO: 106703 - RNA, 32 nt, Homo Sapiens
caaaaugauauguuugaguagacgaacagcug

SEQ ID NO: 106704 - RNA, 32 nt, Homo Sapiens
uaaauaugaucaaggaaaauagcuuccagaau

SEQ ID NO: 106705 - RNA, 32 nt, Homo Sapiens
ccugaaacauuuuuauacuguguuuguuauuc

SEQ ID NO: 106706 - RNA, 32 nt, Homo Sapiens
auaggcgccuccuccgcccgccgcccgggagc

SEQ ID NO: 106707 - RNA, 32 nt, Homo Sapiens
gggagaaagaggccccugcagcuccuucauca

SEQ ID NO: 106708 - RNA, 32 nt, Homo Sapiens
auuucuaggagggcuguuggccugcugcugug

SEQ ID NO: 106709 - RNA, 32 nt, Homo Sapiens
ucaagcaugcaugaaauuuagccuuaauaagu

SEQ ID NO: 106710 - RNA, 32 nt, Homo Sapiens
uucuccugucucuccuucacuuccaaagcaug

SEQ ID NO: 106711 - RNA, 32 nt, Homo Sapiens
gugagaugggggaggagaaagaggggucacuc

SEQ ID NO: 106712 - RNA, 32 nt, Homo Sapiens
uuugacuuuuucuucguugaggcuucugagga

SEQ ID NO: 106713 - RNA, 32 nt, Homo Sapiens
auaagacgauuuaauuuuaauuucauaggauu

SEQ ID NO: 106714 - RNA, 27 nt, Homo Sapiens
ccauggccgagcucccggggcccuuuc

SEQ ID NO: 106715 - RNA, 32 nt, Homo Sapiens
aacuagaaagagaauccacauauucacggacc

SEQ ID NO: 106716 - RNA, 32 nt, Homo Sapiens
cugggagcucagguacucuuuuagucaucuuu

SEQ ID NO: 106717 - RNA, 32 nt, Homo Sapiens
uuuugguuuugugaaacggccgucccaaagcu

SEQ ID NO: 106718 - RNA, 32 nt, Homo Sapiens
uugauaugcaacacacuaaaccacucucaugu

SEQ ID NO: 106719 - RNA, 32 nt, Homo Sapiens
acgugggggcuuuguguuuuguacuuuucacu

SEQ ID NO: 106720 - RNA, 28 nt, Homo Sapiens
cacagaggaagaaaucauuugaagacac

SEQ ID NO: 106721 - RNA, 32 nt, Homo Sapiens
aaucggauggaccuugcccugcuguucacagc

SEQ ID NO: 106722 - RNA, 32 nt, Homo Sapiens
ccgcccuguguguguccccucacgcaagugcc

SEQ ID NO: 106723 - RNA, 31 nt, Homo Sapiens
aacucgucucuggccgcaggagucuauaugu

SEQ ID NO: 106724 - RNA, 29 nt, Homo Sapiens
aggccucggggacugcggacuguggggag

SEQ ID NO: 106725 - RNA, 32 nt, Homo Sapiens
uacuuacguaucacuacaaacuuuacaaaacu

SEQ ID NO: 106726 - RNA, 32 nt, Homo Sapiens
cauguagcauaguggaaaaagucccugagggc

SEQ ID NO: 106727 - RNA, 32 nt, Homo Sapiens
cccagcgcacgugccggcaccuagcccgcaag

SEQ ID NO: 106728 - RNA, 32 nt, Homo Sapiens
caggagcuaaccccaaccagcaggcaacuaac

SEQ ID NO: 106729 - RNA, 32 nt, Homo Sapiens
gguuuccuuuuggggugaugaaauguuaggga

SEQ ID NO: 106730 - RNA, 32 nt, Homo Sapiens
cggcgccaggacauggagcucgagaacaucgu

SEQ ID NO: 106731 - RNA, 32 nt, Homo Sapiens
aauaugugacguaagcaauaaagggaauguua

SEQ ID NO: 106732 - RNA, 32 nt, Homo Sapiens
aucgggucuccucuccucucccacgcggcugg

SEQ ID NO: 106733 - RNA, 32 nt, Homo Sapiens
gugagcugugucgugaggaaggacgaagaguc

SEQ ID NO: 106734 - RNA, 32 nt, Homo Sapiens
gcccuccgcccagagcgccgcccuccgagcuc

SEQ ID NO: 106735 - RNA, 32 nt, Homo Sapiens
cuaacaucccaugccgcucccuccucacgaug

SEQ ID NO: 106736 - RNA, 32 nt, Homo Sapiens
cccaucucgaggggcggaggagagggagcgcc

SEQ ID NO: 106737 - RNA, 32 nt, Homo Sapiens
cugccucccucagccaacccagcccuugggcu

SEQ ID NO: 106738 - RNA, 32 nt, Homo Sapiens
aguggaaguggggcauccuuguccuuugucug

SEQ ID NO: 106739 - RNA, 32 nt, Homo Sapiens
uuuacacauaaaucauacuauuguauauuaaa

SEQ ID NO: 106740 - RNA, 32 nt, Homo Sapiens
uaagaagacaccuucuacucaaguccuuguuc

SEQ ID NO: 106741 - RNA, 29 nt, Homo Sapiens
caagaugaacacacugcagccaaggacaa

SEQ ID NO: 106742 - RNA, 32 nt, Homo Sapiens
uccucgccaugccggcccggcggcugcugcug

SEQ ID NO: 106743 - RNA, 32 nt, Homo Sapiens
acaagcucccucaugcuuccugucccccgcuu

SEQ ID NO: 106744 - RNA, 32 nt, Homo Sapiens
gccccagcagugccuugugcaaugugaaugug

SEQ ID NO: 106745 - RNA, 32 nt, Homo Sapiens
acugaaaucccuccccuuguuacagauggcgu

SEQ ID NO: 106746 - RNA, 32 nt, Homo Sapiens
uuuguauuaagggauuuaguaacaucauuuug

SEQ ID NO: 106747 - RNA, 32 nt, Homo Sapiens
aggcauuggguaagcauagccauuccaagugg

SEQ ID NO: 106748 - RNA, 32 nt, Homo Sapiens
gaaagaaagagcccaggcaaccuagugaaaac

SEQ ID NO: 106749 - RNA, 32 nt, Homo Sapiens
accacuaguguaaaaauaagugaaaaaauauu

SEQ ID NO: 106750 - RNA, 32 nt, Homo Sapiens
agugcccucaccggccgcccagcccacccagc

SEQ ID NO: 106751 - RNA, 32 nt, Homo Sapiens
uuuugagaugaaguuucaugcuugucauccaa

SEQ ID NO: 106752 - RNA, 32 nt, Homo Sapiens
aauccuuauuggauuucuuaauuuucaguuau

SEQ ID NO: 106753 - RNA, 32 nt, Homo Sapiens
gcucuggaaaggccuuccuggguggggaauag

SEQ ID NO: 106754 - RNA, 32 nt, Homo Sapiens
ccccaucucucgcacgcagucuagagauggac

SEQ ID NO: 106755 - RNA, 32 nt, Homo Sapiens
gauucucacuuaugaccauauuuggguuagag

SEQ ID NO: 106756 - RNA, 32 nt, Homo Sapiens
ucuguugccguggcaacuccacugggaugcuc

SEQ ID NO: 106757 - RNA, 32 nt, Homo Sapiens
caagcgauccccccacccccagccccgucucc

SEQ ID NO: 106758 - RNA, 32 nt, Homo Sapiens
cuucaucccuaccccgcucccggagcucggag

SEQ ID NO: 106759 - RNA, 32 nt, Homo Sapiens
ccaccaauggauuguggaaaauggagccauga

SEQ ID NO: 106760 - RNA, 32 nt, Homo Sapiens
cuccgggcccgggcagcccgcuguguggcacc

SEQ ID NO: 106761 - RNA, 32 nt, Homo Sapiens
cgggccccuccugggccuccccggccaggcac

SEQ ID NO: 106762 - RNA, 32 nt, Homo Sapiens
aguucugacuuugaauuuauauaaaguauuuu

SEQ ID NO: 106763 - RNA, 32 nt, Homo Sapiens
uucauuguauuuuuuucuuuuuuucccucauu

SEQ ID NO: 106764 - RNA, 32 nt, Homo Sapiens
cgcgguucugagagugccugaauagaaaacca

SEQ ID NO: 106765 - RNA, 32 nt, Homo Sapiens
caauaaaauggcaaccuguuauaauuugugaa

SEQ ID NO: 106766 - RNA, 32 nt, Homo Sapiens
aggcccuggcgaggcucugggcuucggcuccc

SEQ ID NO: 106767 - RNA, 32 nt, Homo Sapiens
ggcugagagagaaggggaaaagaggauauugc

SEQ ID NO: 106768 - RNA, 32 nt, Homo Sapiens
cggagggaguucggcuucuccagcagggcggc

SEQ ID NO: 106769 - RNA, 32 nt, Homo Sapiens
agaggaugcugcauugcgaggacccagaaauu

SEQ ID NO: 106770 - RNA, 32 nt, Homo Sapiens
uuauagaggaggagaaucuacugcuggcaauu

SEQ ID NO: 106771 - RNA, 32 nt, Homo Sapiens
cccauccgcaccccugaccccggaggucaaca

SEQ ID NO: 106772 - RNA, 32 nt, Homo Sapiens
uucaguuuaaauauuaugaaaaacuuuaaaca

SEQ ID NO: 106773 - RNA, 32 nt, Homo Sapiens
aaagggcaagagccaugcugcagcguagguga

SEQ ID NO: 106774 - RNA, 32 nt, Homo Sapiens
uccuucaaacaguacuucagugagaugcccug

SEQ ID NO: 106775 - RNA, 32 nt, Homo Sapiens
gacaaucaaaguggcagaacugccucaagcag

SEQ ID NO: 106776 - RNA, 32 nt, Homo Sapiens
ucaccuagucauuguauguuggcuguccggaa

SEQ ID NO: 106777 - RNA, 32 nt, Homo Sapiens
cuaacaggaagcauucuuuacaugacaguauc

SEQ ID NO: 106778 - RNA, 32 nt, Homo Sapiens
ucuuguguuguccuuuugucuucucugucuca

SEQ ID NO: 106779 - RNA, 32 nt, Homo Sapiens
aguauuuguggcaacuuucaaggguugaugcu

SEQ ID NO: 106780 - RNA, 32 nt, Homo Sapiens
cugacccaaaacugaggcccggugcaucaucc

SEQ ID NO: 106781 - RNA, 32 nt, Homo Sapiens
aguugggcucuagcuccuggugcuguuccugc

SEQ ID NO: 106782 - RNA, 32 nt, Homo Sapiens
uccaagaagaacucgacuugucugaaauccac

SEQ ID NO: 106783 - RNA, 32 nt, Homo Sapiens
ggagucuacggggaccgccucccgcgccgcca

SEQ ID NO: 106784 - RNA, 32 nt, Homo Sapiens
gaugaagggucguuggugggaaagauggcggc

SEQ ID NO: 106785 - RNA, 32 nt, Homo Sapiens
ccagccaccgcggcgcucucccagcagcggag

SEQ ID NO: 106786 - RNA, 32 nt, Homo Sapiens
auuuuacaacuuucuuuauuaagcauuuuuau

SEQ ID NO: 106787 - RNA, 32 nt, Homo Sapiens
gcacuggagccagcaucaggauguccucucca

SEQ ID NO: 106788 - RNA, 32 nt, Homo Sapiens
guucccagagaucuggggguccuucuuuggag

SEQ ID NO: 106789 - RNA, 32 nt, Homo Sapiens
agaguugggaugcacaacgucaaccacugacu

SEQ ID NO: 106790 - RNA, 32 nt, Homo Sapiens
aagcacuggguagaagaacccacacgcuuccu

SEQ ID NO: 106791 - RNA, 32 nt, Homo Sapiens
cacccucuuuugcugccugucaaaaccgguga

SEQ ID NO: 106792 - RNA, 32 nt, Homo Sapiens
cuuuuccucaaaacgagcugcauaauucuugg

SEQ ID NO: 106793 - RNA, 32 nt, Homo Sapiens
auucaaucuuugcugcuagauaacaacccuuu

SEQ ID NO: 106794 - RNA, 32 nt, Homo Sapiens
agaaauucaugggaaugauguauuuuguggaa

SEQ ID NO: 106795 - RNA, 32 nt, Homo Sapiens
aaugguugcauucuucuggguuucugauuagu

SEQ ID NO: 106796 - RNA, 32 nt, Homo Sapiens
gagccgaugcgcgcccgcugagcgccccagcu

SEQ ID NO: 106797 - RNA, 32 nt, Homo Sapiens
gcagacucauugggcuacauuuaguacaggaa

SEQ ID NO: 106798 - RNA, 32 nt, Homo Sapiens
gccuucgaguccuggggcggcggcggcggcug

SEQ ID NO: 106799 - RNA, 32 nt, Homo Sapiens
cuguucacaugucgcccaggcgggaaaaaugg

SEQ ID NO: 106800 - RNA, 32 nt, Homo Sapiens
uuuuggagcuucaagacuuugcauuuccuagu

SEQ ID NO: 106801 - RNA, 32 nt, Homo Sapiens
uuuacaagucuguuuaucuggaucuggcaaac

SEQ ID NO: 106802 - RNA, 32 nt, Homo Sapiens
ggccagcuggaacgcuggaucgcagugcgccc

SEQ ID NO: 106803 - RNA, 32 nt, Homo Sapiens
uuuaucacauauauauguuuuuuguauaugua

SEQ ID NO: 106804 - RNA, 32 nt, Homo Sapiens
ccuccgcauccgagcaggacgcccgucuccuc

SEQ ID NO: 106805 - RNA, 32 nt, Homo Sapiens
cgaugguuguuuauuuuguuuuuaggugugca

SEQ ID NO: 106806 - RNA, 32 nt, Homo Sapiens
uccuugccccuggucagcgucucccuguucac

SEQ ID NO: 106807 - RNA, 32 nt, Homo Sapiens
gagguaggcagcaagcgccggcugggggucgg

SEQ ID NO: 106808 - RNA, 32 nt, Homo Sapiens
guaacggaggggcugcugguccuguucaggcc

SEQ ID NO: 106809 - RNA, 32 nt, Homo Sapiens
cugaauguauaaaauaagaguaaaugcccuac

SEQ ID NO: 106810 - RNA, 32 nt, Homo Sapiens
uaguagaauuaagaccugaggagaugacucgu

SEQ ID NO: 106811 - RNA, 32 nt, Homo Sapiens
gugcuucaaaaauuucagaaauucagcaguau

SEQ ID NO: 106812 - RNA, 32 nt, Homo Sapiens
gcugcccuuuugagccgagauuuugaagugga

SEQ ID NO: 106813 - RNA, 32 nt, Homo Sapiens
uuucuccugugcuugccuucugaaguggcaca

SEQ ID NO: 106814 - RNA, 32 nt, Homo Sapiens
cagccgucaccccacaccccagcccaucacca

SEQ ID NO: 106815 - RNA, 32 nt, Homo Sapiens
aacugccccucuaaagucuugucuuggaguca

SEQ ID NO: 106816 - RNA, 32 nt, Homo Sapiens
uuuauucugggcggggggugagugggggaaga

SEQ ID NO: 106817 - RNA, 32 nt, Homo Sapiens
accugagguccggagaccagccuggccaacau

SEQ ID NO: 106818 - RNA, 32 nt, Homo Sapiens
ggugagccacuggcagugugcuuaccuguugu

SEQ ID NO: 106819 - RNA, 32 nt, Homo Sapiens
ggcagagaacauaauuacaucuuaggccacau

SEQ ID NO: 106820 - RNA, 32 nt, Homo Sapiens
agguggucaacacaagauggcaaaucaggauc

SEQ ID NO: 106821 - RNA, 32 nt, Homo Sapiens
auguuuuugucaacaccaauuacauuuucagc

SEQ ID NO: 106822 - RNA, 32 nt, Homo Sapiens
ucuaauacccauucuccaacccuccauuuauu

SEQ ID NO: 106823 - RNA, 32 nt, Homo Sapiens
uuuauaggagaaaaaacacuuucagauaagag

SEQ ID NO: 106824 - RNA, 32 nt, Homo Sapiens
uccgcuuccuucccauggauaggaagggacuc

SEQ ID NO: 106825 - RNA, 32 nt, Homo Sapiens
agugaaaaagcaauucaauggaggaagaauag

SEQ ID NO: 106826 - RNA, 32 nt, Homo Sapiens
agcugggcaugguggcacgugccugugguccc

SEQ ID NO: 106827 - RNA, 31 nt, Homo Sapiens
uuuuuccaagaaaacuggugaguuaaguaag

SEQ ID NO: 106828 - RNA, 32 nt, Homo Sapiens
uguuucugaauucugaacaacuauuuauaaaa

SEQ ID NO: 106829 - RNA, 30 nt, Homo Sapiens
cauuaggguuaacggcugccggcgccggcu

SEQ ID NO: 106830 - RNA, 32 nt, Homo Sapiens
gaucuggcaucuucucccacaagcccccuaca

SEQ ID NO: 106831 - RNA, 30 nt, Homo Sapiens
gaccuaaaaguugugggggaagucggaugu

SEQ ID NO: 106832 - RNA, 32 nt, Homo Sapiens
ucaacaacaaagugcaauacaggcugaaccug

SEQ ID NO: 106833 - RNA, 32 nt, Homo Sapiens
auguguaucuacauaucuuuuauuuuuggaaa

SEQ ID NO: 106834 - RNA, 32 nt, Homo Sapiens
cccucguggaagaucugcugcaaccauuaucu

SEQ ID NO: 106835 - RNA, 32 nt, Homo Sapiens
gcaguagaaauccagggccuccccuggggcug

SEQ ID NO: 106836 - RNA, 32 nt, Homo Sapiens
cugaugacccauguaucugauguucaaccaua

SEQ ID NO: 106837 - RNA, 32 nt, Homo Sapiens
gaaucuauaagguauguaaacaguugaaaaaa

SEQ ID NO: 106838 - RNA, 32 nt, Homo Sapiens
guacaauccaaauagaggagcuuaauggaauc

SEQ ID NO: 106839 - RNA, 32 nt, Homo Sapiens
uacugccucacagaagccagccaagugccaag

SEQ ID NO: 106840 - RNA, 30 nt, Homo Sapiens
uauaugcuggacugcauucacacauggcau

SEQ ID NO: 106841 - RNA, 32 nt, Homo Sapiens
gaaugaagaacaaagaauggggauguaaccau

SEQ ID NO: 106842 - RNA, 29 nt, Homo Sapiens
uuaaaauaaaguuaccuauucuacuaaaa

SEQ ID NO: 106843 - RNA, 32 nt, Homo Sapiens
uuuccacaagcacuagauauguuucugugaug

SEQ ID NO: 106844 - RNA, 32 nt, Homo Sapiens
cgccccaacuuggagcugggacaccacguuuc

SEQ ID NO: 106845 - RNA, 32 nt, Homo Sapiens
caagguacuaucuuuuaaaucuguauguaaaa

SEQ ID NO: 106846 - RNA, 32 nt, Homo Sapiens
uaggcccagggucagucucagauggaagcugg

SEQ ID NO: 106847 - RNA, 32 nt, Homo Sapiens
cauuucuuugaugccacuggccacuguaucug

SEQ ID NO: 106848 - RNA, 32 nt, Homo Sapiens
ugggcccaguacuggaggaagacaaggauccc

SEQ ID NO: 106849 - RNA, 32 nt, Homo Sapiens
ggaucacauggucaccugccucauggaaaugc

SEQ ID NO: 106850 - RNA, 32 nt, Homo Sapiens
ucgcgguauauagagauaugcauuuuauuuua

SEQ ID NO: 106851 - RNA, 32 nt, Homo Sapiens
caguccugguugggaucacacccacgggugcu

SEQ ID NO: 106852 - RNA, 32 nt, Homo Sapiens
aucuaaggauuggaaagaaucugugguccagg

SEQ ID NO: 106853 - RNA, 32 nt, Homo Sapiens
ugcccaggguggagugcagcggugcgaucucg

SEQ ID NO: 106854 - RNA, 32 nt, Homo Sapiens
acgcugguggcucccaccuggauuucaugccg

SEQ ID NO: 106855 - RNA, 32 nt, Homo Sapiens
aguauucugaaauuugguaaaacugcacuaau

SEQ ID NO: 106856 - RNA, 32 nt, Homo Sapiens
cacccucauacacauuuaggaaaugguuaaga

SEQ ID NO: 106857 - RNA, 32 nt, Homo Sapiens
cccccaagagaguuuuacaggcugaguguugc

SEQ ID NO: 106858 - RNA, 32 nt, Homo Sapiens
cagccgagccuggcagugcuggcaccgcgagc

SEQ ID NO: 106859 - RNA, 32 nt, Homo Sapiens
cccugcagccucagcccugcagaagaggauuc

SEQ ID NO: 106860 - RNA, 32 nt, Homo Sapiens
ucaugcacaucuguagccccagccauccuugu

SEQ ID NO: 106861 - RNA, 32 nt, Homo Sapiens
auuggaaaaauauuuugccuguaaaaguuagu

SEQ ID NO: 106862 - RNA, 32 nt, Homo Sapiens
acuuucccacccagaaaaggcaacuuagauaa

SEQ ID NO: 106863 - RNA, 32 nt, Homo Sapiens
gcuggacuggaagggaggggacuguccacccc

SEQ ID NO: 106864 - RNA, 32 nt, Homo Sapiens
gcuggagggagcuucgugucugugcuggagcu

SEQ ID NO: 106865 - RNA, 29 nt, Homo Sapiens
caaaguguaaauaaauguuucuuuucauu

SEQ ID NO: 106866 - RNA, 32 nt, Homo Sapiens
aaaggccgcauccuccccgagcccuuauaccu

SEQ ID NO: 106867 - RNA, 30 nt, Homo Sapiens
auggagaauauccuuggaugcugcauucau

SEQ ID NO: 106868 - RNA, 30 nt, Homo Sapiens
aaggcagcagaaagcgcggguccagaugag

SEQ ID NO: 106869 - RNA, 32 nt, Homo Sapiens
gccccaucagaggggacgugcugggugucagc

SEQ ID NO: 106870 - RNA, 32 nt, Homo Sapiens
cucuguuaaguacccaagcugcuugucuucca

SEQ ID NO: 106871 - RNA, 32 nt, Homo Sapiens
uuucauuuuuauuuuuuaauucugagucauug

SEQ ID NO: 106872 - RNA, 32 nt, Homo Sapiens
ccugccacuugcuugucugcaugugugggucc

SEQ ID NO: 106873 - RNA, 32 nt, Homo Sapiens
uugguuuuaaacaauacacuaagaaugacucc

SEQ ID NO: 106874 - RNA, 32 nt, Homo Sapiens
cagauccuuucugccuuaggucuuagggcaga

SEQ ID NO: 106875 - RNA, 32 nt, Homo Sapiens
acugugccaggcccaaaccuagcuucugagug

SEQ ID NO: 106876 - RNA, 27 nt, Homo Sapiens
ccauguccaagccccccgaccuccugc

SEQ ID NO: 106877 - RNA, 32 nt, Homo Sapiens
auccugacgcagacgcgaugcgguguuccauc

SEQ ID NO: 106878 - RNA, 32 nt, Homo Sapiens
gggaguggggucacgcccagcuggagaagcag

SEQ ID NO: 106879 - RNA, 29 nt, Homo Sapiens
uaggaguuggagaccaaccugggcaacau

SEQ ID NO: 106880 - RNA, 32 nt, Homo Sapiens
gauaaaaugacuuuguacuccacaaaauuaug

SEQ ID NO: 106881 - RNA, 32 nt, Homo Sapiens
cagugagaguacaugaugcugcuggugaaaca

SEQ ID NO: 106882 - RNA, 32 nt, Homo Sapiens
uuuuugucuguuaguuauuucuccaggggaaa

SEQ ID NO: 106883 - RNA, 32 nt, Homo Sapiens
auuuaacuagugagaauuguauucaagugaac

SEQ ID NO: 106884 - RNA, 32 nt, Homo Sapiens
auaaaauaaaaagucaauuuagaaugugaaau

SEQ ID NO: 106885 - RNA, 32 nt, Homo Sapiens
ucuguggggagguuuuauggcuuuugucagau

SEQ ID NO: 106886 - RNA, 32 nt, Homo Sapiens
ugucuccaccaaaaauacaaaaaaucugccgg

SEQ ID NO: 106887 - RNA, 31 nt, Homo Sapiens
aacugugaaacagugaaaguguucaccucau

SEQ ID NO: 106888 - RNA, 32 nt, Homo Sapiens
cuggguuggugggacagccaggccagaugacc

SEQ ID NO: 106889 - RNA, 32 nt, Homo Sapiens
ccgcggccgacaucagcccggugugaggaggg

SEQ ID NO: 106890 - RNA, 32 nt, Homo Sapiens
aagccuuggggaucagggucagugugagcagc

SEQ ID NO: 106891 - RNA, 27 nt, Homo Sapiens
ggaugagcgccagcacgggcgguggug

SEQ ID NO: 106892 - RNA, 32 nt, Homo Sapiens
ugagaugucccucauuaaugagcauucucuuc

SEQ ID NO: 106893 - RNA, 32 nt, Homo Sapiens
acauaagauaaaaugauguuauacaucaauau

SEQ ID NO: 106894 - RNA, 32 nt, Homo Sapiens
gccauuauuauuauuauauuuuaaugguaaaa

SEQ ID NO: 106895 - RNA, 32 nt, Homo Sapiens
uacaggacugguuccuuccuuaguuucaaagu

SEQ ID NO: 106896 - RNA, 32 nt, Homo Sapiens
ugucuuggaugcucuugcggggccuaggggag

SEQ ID NO: 106897 - RNA, 32 nt, Homo Sapiens
gggaaaaacuacagaagcuuggugaaggagaa

SEQ ID NO: 106898 - RNA, 32 nt, Homo Sapiens
ccauguccucucagaaccccagccuugaaaau

SEQ ID NO: 106899 - RNA, 30 nt, Homo Sapiens
uugggagaagcugccaugcaaagguggaca

SEQ ID NO: 106900 - RNA, 32 nt, Homo Sapiens
uaucugggccucuggggaagccccacagccuu

SEQ ID NO: 106901 - RNA, 32 nt, Homo Sapiens
gcucggcccugccagggcggcacgggagggcg

SEQ ID NO: 106902 - RNA, 31 nt, Homo Sapiens
cucuuuuucuugggauaauagauacaucaac

SEQ ID NO: 106903 - RNA, 32 nt, Homo Sapiens
gaggaguguaggaugccuuguuuccuucuaua

SEQ ID NO: 106904 - RNA, 30 nt, Homo Sapiens
ugggggcgcguuccgaggcgcccucaggca

SEQ ID NO: 106905 - RNA, 32 nt, Homo Sapiens
uuaaauacaccaacaugagacaucaguaguca

SEQ ID NO: 106906 - RNA, 32 nt, Homo Sapiens
uguugaaaauauugaggccuaguaaauauuau

SEQ ID NO: 106907 - RNA, 32 nt, Homo Sapiens
uuagaaaacaagugggacauauuuuccugaga

SEQ ID NO: 106908 - RNA, 32 nt, Homo Sapiens
aauuugauauuuuuauuuucucuccuuuuaag

SEQ ID NO: 106909 - RNA, 32 nt, Homo Sapiens
ggcacgcgggccauggcucccugggcggaggc

SEQ ID NO: 106910 - RNA, 32 nt, Homo Sapiens
gguggguaguggggcaggggaaggaagguggu

SEQ ID NO: 106911 - RNA, 32 nt, Homo Sapiens
gccgcuuugggauuuggggucuauguaaugcu

SEQ ID NO: 106912 - RNA, 32 nt, Homo Sapiens
ugaagguagcgugggcccgaacaugcacacgu

SEQ ID NO: 106913 - RNA, 32 nt, Homo Sapiens
accugcucaaggaagcagaccucugcuucucc

SEQ ID NO: 106914 - RNA, 32 nt, Homo Sapiens
cauuccuagucuuuugauccugacuucuuauc

SEQ ID NO: 106915 - RNA, 32 nt, Homo Sapiens
guuuaaauauaaacagaaguguaccuuuuaua

SEQ ID NO: 106916 - RNA, 32 nt, Homo Sapiens
cuguggugaagaagaagaaguugugaggacag

SEQ ID NO: 106917 - RNA, 32 nt, Homo Sapiens
uuccggagcugcugggccugggcugcaggagg

SEQ ID NO: 106918 - RNA, 29 nt, Homo Sapiens
cugcacguauguaugucauguauacgagc

SEQ ID NO: 106919 - RNA, 31 nt, Homo Sapiens
aggcuauaaugagccaugauugugccacugc

SEQ ID NO: 106920 - RNA, 32 nt, Homo Sapiens
gcuucgcucggucggucucgcgcgcccccaua

SEQ ID NO: 106921 - RNA, 32 nt, Homo Sapiens
ccucagccugacgguccgccuuucggggcucc

SEQ ID NO: 106922 - RNA, 32 nt, Homo Sapiens
cagagugagagauagaaagggauacuugaaac

SEQ ID NO: 106923 - RNA, 32 nt, Homo Sapiens
cucaauugaugaggaaauaucaacuuuggugc

SEQ ID NO: 106924 - RNA, 32 nt, Homo Sapiens
aacacaugggccgccgcucauccaaaugcugc

SEQ ID NO: 106925 - RNA, 32 nt, Homo Sapiens
guauaguuauuuuuguuuuauuauuacuguua

SEQ ID NO: 106926 - RNA, 32 nt, Homo Sapiens
uauuaggccguucuuggauugcuauaaagaaa

SEQ ID NO: 106927 - RNA, 32 nt, Homo Sapiens
ucuggcagcguuucccagacaccccucugcua

SEQ ID NO: 106928 - RNA, 32 nt, Homo Sapiens
cagcuggagcccagauuucaaguuuugaguaa

SEQ ID NO: 106929 - RNA, 32 nt, Homo Sapiens
ugcacuccacacuccagccugagcaacaagag

SEQ ID NO: 106930 - RNA, 32 nt, Homo Sapiens
ccaccuaaaaacaaagaaaaagggaagaaauc

SEQ ID NO: 106931 - RNA, 32 nt, Homo Sapiens
uauggagaugacccaugauggcugcaguugua

SEQ ID NO: 106932 - RNA, 32 nt, Homo Sapiens
uuccccauuuccccacauccucaccucacagu

SEQ ID NO: 106933 - RNA, 32 nt, Homo Sapiens
caagaugaaacacagaaaaguugaaaccacaa

SEQ ID NO: 106934 - RNA, 32 nt, Homo Sapiens
auacuccugaagaugguggugcuuauugacua

SEQ ID NO: 106935 - RNA, 32 nt, Homo Sapiens
auauugccaagagcuuugagacugaugaacca

SEQ ID NO: 106936 - RNA, 29 nt, Homo Sapiens
uucugugaaacuguauauuuuguaaauaa

SEQ ID NO: 106937 - RNA, 32 nt, Homo Sapiens
augagaaagcacugugaaauugugaaagauuc

SEQ ID NO: 106938 - RNA, 32 nt, Homo Sapiens
ccucaccccccuccccagcuucuggacgcguu

SEQ ID NO: 106939 - RNA, 32 nt, Homo Sapiens
ccccuucucuccuggggagcugucugcauccg

SEQ ID NO: 106940 - RNA, 32 nt, Homo Sapiens
caagaugugaaagugggaaaaagggauagucu

SEQ ID NO: 106941 - RNA, 32 nt, Homo Sapiens
aaacugcuccuagcuuuugauuaggagaauau

SEQ ID NO: 106942 - RNA, 32 nt, Homo Sapiens
cugacgaaaggucuccaugcuuuugcuguuuu

SEQ ID NO: 106943 - RNA, 32 nt, Homo Sapiens
aaaaauacuguaauacuaagaaacuguguuaa

SEQ ID NO: 106944 - RNA, 32 nt, Homo Sapiens
cuucucucagcuccuuggccuacugccguggc

SEQ ID NO: 106945 - RNA, 32 nt, Homo Sapiens
auuguuuacacacuuugaauaacugcaaagga

SEQ ID NO: 106946 - RNA, 32 nt, Homo Sapiens
gcggguggggacgagcgggccccgcggcguca

SEQ ID NO: 106947 - RNA, 32 nt, Homo Sapiens
cugcaguggcucuggguccagccccuuacuua

SEQ ID NO: 106948 - RNA, 32 nt, Homo Sapiens
uuuucaguaacuauuuuuuuuauaguuguagu

SEQ ID NO: 106949 - RNA, 32 nt, Homo Sapiens
uguugcuuugaaaaagccucuaauggacugac

SEQ ID NO: 106950 - RNA, 32 nt, Homo Sapiens
accuccugcccuccccuccccagcaggaggca

SEQ ID NO: 106951 - RNA, 32 nt, Homo Sapiens
ccaugggccccagggcugggccccagggcggg

SEQ ID NO: 106952 - RNA, 32 nt, Homo Sapiens
caugucuggacacuguaaggccugcuggccca

SEQ ID NO: 106953 - RNA, 32 nt, Homo Sapiens
ucuucuaugccaggaagcacaaagacuuuguu

SEQ ID NO: 106954 - RNA, 32 nt, Homo Sapiens
auauacauauauauaacauuagaaugugugua

SEQ ID NO: 106955 - RNA, 32 nt, Homo Sapiens
cugccugucgguugcuuggauucccugacgua

SEQ ID NO: 106956 - RNA, 32 nt, Homo Sapiens
uggugaugcucuuuuuaacuccuuugcccaau

SEQ ID NO: 106957 - RNA, 32 nt, Homo Sapiens
ggccccucuccccacaccucgccccacagagc

SEQ ID NO: 106958 - RNA, 32 nt, Homo Sapiens
ggcgcgagggaucgcgcggccgagcccggguc

SEQ ID NO: 106959 - RNA, 32 nt, Homo Sapiens
ccggagagggcccagcccgcccggggcaggau

SEQ ID NO: 106960 - RNA, 32 nt, Homo Sapiens
uuuucuucugaauaaauagaaaaccaacaguu

SEQ ID NO: 106961 - RNA, 32 nt, Homo Sapiens
auuuuccggaaaaaggcuaaaacuacaaagaa

SEQ ID NO: 106962 - RNA, 32 nt, Homo Sapiens
caguggcuuacuguuuuucuuaaucucuuuua

SEQ ID NO: 106963 - RNA, 32 nt, Homo Sapiens
cuuacuuuguuuacuuauaaaauacaucucag

SEQ ID NO: 106964 - RNA, 32 nt, Homo Sapiens
aguaaauauguuacuuaaauuuucuuuccugu

SEQ ID NO: 106965 - RNA, 28 nt, Homo Sapiens
ucagagguggcuaccucugucauucugu

SEQ ID NO: 106966 - RNA, 32 nt, Homo Sapiens
uugaacccaggcggcagagguugcagugaguc

SEQ ID NO: 106967 - RNA, 32 nt, Homo Sapiens
ccugcuugcuggaagcccagcugggggcugca

SEQ ID NO: 106968 - RNA, 30 nt, Homo Sapiens
uagccaugcgcggcuuggaggagccggggc

SEQ ID NO: 106969 - RNA, 32 nt, Homo Sapiens
uauauacaaaaauauuuuccauuuccguuauu

SEQ ID NO: 106970 - RNA, 32 nt, Homo Sapiens
acggcaauuugcuaucuauccaaaaaucaaua

SEQ ID NO: 106971 - RNA, 32 nt, Homo Sapiens
uugcgcuguggguguccaaggcugggugugca

SEQ ID NO: 106972 - RNA, 32 nt, Homo Sapiens
aaacacuugccauuuuaaucaaaguuguaauu

SEQ ID NO: 106973 - RNA, 32 nt, Homo Sapiens
ccaucucccucaucuccauucucaguuucuuc

SEQ ID NO: 106974 - RNA, 32 nt, Homo Sapiens
uuaccugggaauuuauauaagcccuuaauaau

SEQ ID NO: 106975 - RNA, 32 nt, Homo Sapiens
cauuggcucagguccugcagccgcuccuggau

SEQ ID NO: 106976 - RNA, 32 nt, Homo Sapiens
ccucccucaugaugaagugccauuucuguuac

SEQ ID NO: 106977 - RNA, 32 nt, Homo Sapiens
accucagguguucugcccuccucggccuccca

SEQ ID NO: 106978 - RNA, 30 nt, Homo Sapiens
agauaaugaaaccuuccacauuuaucaacc

SEQ ID NO: 106979 - RNA, 32 nt, Homo Sapiens
ucaaucgugucuguacuuacaggaugucuuag

SEQ ID NO: 106980 - RNA, 32 nt, Homo Sapiens
ccagggcgagagucgguccucccggugcuggg

SEQ ID NO: 106981 - RNA, 32 nt, Homo Sapiens
uuccauaaacuuaucagaagacucacuuuucu

SEQ ID NO: 106982 - RNA, 32 nt, Homo Sapiens
gaccucaggugauccgcccaccucggccuugc

SEQ ID NO: 106983 - RNA, 32 nt, Homo Sapiens
gcaccugcccuucucacccauggcccacccag

SEQ ID NO: 106984 - RNA, 32 nt, Homo Sapiens
gaaagccagccucggcgggcagaaccuagccc

SEQ ID NO: 106985 - RNA, 32 nt, Homo Sapiens
gcgaggcccgcaggaggaggaggaucggcgga

SEQ ID NO: 106986 - RNA, 32 nt, Homo Sapiens
ggccggcaguugcaguguagacagcccgagag

SEQ ID NO: 106987 - RNA, 32 nt, Homo Sapiens
aacuaccacaccauaucagggaucauaaauua

SEQ ID NO: 106988 - RNA, 32 nt, Homo Sapiens
uuuuuaucuacuguguaagaagacccuauaau

SEQ ID NO: 106989 - RNA, 32 nt, Homo Sapiens
ccaaagguuuauuaauaacaguaguaguuaug

SEQ ID NO: 106990 - RNA, 32 nt, Homo Sapiens
acuuugauauuguggcggaaagucuagacuga

SEQ ID NO: 106991 - RNA, 32 nt, Homo Sapiens
agauccaugagcaugcuggauauugaggggau

SEQ ID NO: 106992 - RNA, 32 nt, Homo Sapiens
uucuagcccuuuuagauuuuggcacugugaaa

SEQ ID NO: 106993 - RNA, 32 nt, Homo Sapiens
ugggggacgcccagcccccacccccgucaccc

SEQ ID NO: 106994 - RNA, 32 nt, Homo Sapiens
gguuugggagugcacagcugaacgcuuccugu

SEQ ID NO: 106995 - RNA, 32 nt, Homo Sapiens
agagccgcccguggggagugggcuuggggugg

SEQ ID NO: 106996 - RNA, 27 nt, Homo Sapiens
ccuucucauuaauucuuuguaacagca

SEQ ID NO: 106997 - RNA, 32 nt, Homo Sapiens
gguggggccgggacgcguccccugccccucug

SEQ ID NO: 106998 - RNA, 32 nt, Homo Sapiens
gaguaaccgcgugcagggaaaggcgcacggca

SEQ ID NO: 106999 - RNA, 32 nt, Homo Sapiens
cuauuucgucauaaagguauauguuuaaaauc

SEQ ID NO: 107000 - RNA, 32 nt, Homo Sapiens
aagauuuucccaugcauaauuacaaauaaugc

SEQ ID NO: 107001 - RNA, 32 nt, Homo Sapiens
uccccucuguggaacccaaucugucuuccauc

SEQ ID NO: 107002 - RNA, 32 nt, Homo Sapiens
caucauggcucaggcugcccaaggcuuuucug

SEQ ID NO: 107003 - RNA, 29 nt, Homo Sapiens
guuguuauauguauguacuuuauuguuuu

SEQ ID NO: 107004 - RNA, 32 nt, Homo Sapiens
uaaagacuggaacauucuguggauguugucaa

SEQ ID NO: 107005 - RNA, 32 nt, Homo Sapiens
cuggcaaaauggauuucuuuuccuagacugcu

SEQ ID NO: 107006 - RNA, 32 nt, Homo Sapiens
gaugacuugcuguccaggcagcucccuccugc

SEQ ID NO: 107007 - RNA, 32 nt, Homo Sapiens
cacugcacuccagccuggcgacacagugagac

SEQ ID NO: 107008 - RNA, 32 nt, Homo Sapiens
cucuuucuagcaugaaugaaggaugccaagaa

SEQ ID NO: 107009 - RNA, 32 nt, Homo Sapiens
auuacuuuauggaacaaaucuagaggggaagc

SEQ ID NO: 107010 - RNA, 32 nt, Homo Sapiens
gcuguggacaaaggggggucagcuggcaugag

SEQ ID NO: 107011 - RNA, 32 nt, Homo Sapiens
acugacuaugaugauagacagcuccugauugg

SEQ ID NO: 107012 - RNA, 32 nt, Homo Sapiens
cagcucucuccuccccgagggagccggugacu

SEQ ID NO: 107013 - RNA, 32 nt, Homo Sapiens
ccgcuucccgccgcagcgcccgcgccuccgag

SEQ ID NO: 107014 - RNA, 32 nt, Homo Sapiens
ccucagcucucuuuucagagaagaucaaagcu

SEQ ID NO: 107015 - RNA, 32 nt, Homo Sapiens
ucucuggauaucuuucuguguuccauguaaau

SEQ ID NO: 107016 - RNA, 32 nt, Homo Sapiens
cugggcuggaccgcgcugcgcuccgcggccac

SEQ ID NO: 107017 - RNA, 32 nt, Homo Sapiens
gcacuggaagcaguuccaccacaugugcuacu

SEQ ID NO: 107018 - RNA, 32 nt, Homo Sapiens
aacgugaagaacugcaacagauuuugucgaga

SEQ ID NO: 107019 - RNA, 32 nt, Homo Sapiens
agaagaugaaagaauaauauauuggguacaau

SEQ ID NO: 107020 - RNA, 32 nt, Homo Sapiens
uaucuugggcauggugugaaucacuucauaua

SEQ ID NO: 107021 - RNA, 32 nt, Homo Sapiens
uacaccauaaugcuaauuuaaagagacuccaa

SEQ ID NO: 107022 - RNA, 32 nt, Homo Sapiens
gcacuugaggcacggagaagggaagggaaguc

SEQ ID NO: 107023 - RNA, 30 nt, Homo Sapiens
gcuccaggcaggccugguuauccugcuuga

SEQ ID NO: 107024 - RNA, 32 nt, Homo Sapiens
acuuuaaauaaaugucuauuguaauggcugga

SEQ ID NO: 107025 - RNA, 32 nt, Homo Sapiens
ccggaggcggcggugccuccuccuccucgccc

SEQ ID NO: 107026 - RNA, 32 nt, Homo Sapiens
ucaguuauuauauucauuuagcauuaagucaa

SEQ ID NO: 107027 - RNA, 32 nt, Homo Sapiens
cagagacccuccccugcccccuccacuccggg

SEQ ID NO: 107028 - RNA, 32 nt, Homo Sapiens
ugguuuaaaauguguuauucucuucuuuggga

SEQ ID NO: 107029 - RNA, 32 nt, Homo Sapiens
uguaauguuuuaaaaguuuguugucuuuguau

SEQ ID NO: 107030 - RNA, 32 nt, Homo Sapiens
ugacacauaucugcuuugauaagagacuuccu

SEQ ID NO: 107031 - RNA, 32 nt, Homo Sapiens
gccucaucuccaugaggcuggugcuugcaguu

SEQ ID NO: 107032 - RNA, 32 nt, Homo Sapiens
gaaacuaugaagaucugagauuuuuuugugua

SEQ ID NO: 107033 - RNA, 32 nt, Homo Sapiens
uuguauuugaaauuauuauucaauucacuuau

SEQ ID NO: 107034 - RNA, 32 nt, Homo Sapiens
ucauggcauaaauuauuuaguaagucuagaug

SEQ ID NO: 107035 - RNA, 32 nt, Homo Sapiens
ucgcgcgaaggggaggugucugggcgugcggc

SEQ ID NO: 107036 - RNA, 32 nt, Homo Sapiens
ucuucgcgucuugggcuccggaggaagguucu

SEQ ID NO: 107037 - RNA, 32 nt, Homo Sapiens
cacgcccuucaucauuggggucaacgcggccu

SEQ ID NO: 107038 - RNA, 32 nt, Homo Sapiens
guuagcuuuuaauauuguuuuauauugucauu

SEQ ID NO: 107039 - RNA, 32 nt, Homo Sapiens
aauuuaagaaggaaacuugacuucuuaaccuu

SEQ ID NO: 107040 - RNA, 32 nt, Homo Sapiens
gcaaaaggcucuuaggguaaugagauggaugg

SEQ ID NO: 107041 - RNA, 32 nt, Homo Sapiens
uaaaauuaaaaguuugaaaagcaauauuguau

SEQ ID NO: 107042 - RNA, 32 nt, Homo Sapiens
guguccaagccaagcucugugggcuuucuguu

SEQ ID NO: 107043 - RNA, 32 nt, Homo Sapiens
ggggacuuccggucuggcuccuaacaacgggg

SEQ ID NO: 107044 - RNA, 32 nt, Homo Sapiens
uuuuuuaaaagcuaguuguugaccagcuaccc

SEQ ID NO: 107045 - RNA, 32 nt, Homo Sapiens
auccucuuccaacccacgccacggccaugcug

SEQ ID NO: 107046 - RNA, 32 nt, Homo Sapiens
ccuguggcugggcugggaauggagcugucagc

SEQ ID NO: 107047 - RNA, 32 nt, Homo Sapiens
agucacuguauauggaaguauuuuauuuuuua

SEQ ID NO: 107048 - RNA, 32 nt, Homo Sapiens
cccggcauucccuccucgucccgggcuggccc

SEQ ID NO: 107049 - RNA, 32 nt, Homo Sapiens
cugagacgcggcggcggcggcgcggggagcgc

SEQ ID NO: 107050 - RNA, 32 nt, Homo Sapiens
auauauauuauguacaucgcugucugaaauuu

SEQ ID NO: 107051 - RNA, 32 nt, Homo Sapiens
gccucccaggccccccaccuuaugucaaccug

SEQ ID NO: 107052 - RNA, 31 nt, Homo Sapiens
agaggagcucacacucucagagcauugagca

SEQ ID NO: 107053 - RNA, 32 nt, Homo Sapiens
gcugcccagucgccgcgggaccggggccgcug

SEQ ID NO: 107054 - RNA, 32 nt, Homo Sapiens
aucugcuauccaacugguuuuaccugccuaau

SEQ ID NO: 107055 - RNA, 32 nt, Homo Sapiens
gcuuucuguauauaaacguggagauuagaguu

SEQ ID NO: 107056 - RNA, 32 nt, Homo Sapiens
uuucguuguaaauaucgguggugauuguugcc

SEQ ID NO: 107057 - RNA, 32 nt, Homo Sapiens
uuuucuuuucuuucuuuuuagauuucugacuu

SEQ ID NO: 107058 - RNA, 32 nt, Homo Sapiens
cuccgggggaugcggccaaucuccaagcuccc

SEQ ID NO: 107059 - RNA, 32 nt, Homo Sapiens
ggagacaaaaauacacaugugaaauaaaacuc

SEQ ID NO: 107060 - RNA, 32 nt, Homo Sapiens
acagcgcccaacauugcaggcuccacaacuuu

SEQ ID NO: 107061 - RNA, 32 nt, Homo Sapiens
gcaggaaauggcagagccaggaguuggaccua

SEQ ID NO: 107062 - RNA, 30 nt, Homo Sapiens
aauuuuuaugucuuaaucuaacucuauagu

SEQ ID NO: 107063 - RNA, 32 nt, Homo Sapiens
cacccaaauuugaguagauauuuuaaacaccu

SEQ ID NO: 107064 - RNA, 32 nt, Homo Sapiens
uaguggaggguggggggaugggggccagcagc

SEQ ID NO: 107065 - RNA, 32 nt, Homo Sapiens
cauccagcucuuaugaauaauaaccucauaga

SEQ ID NO: 107066 - RNA, 32 nt, Homo Sapiens
acagacuugaguuguuggauuagaggaacuaa

SEQ ID NO: 107067 - RNA, 32 nt, Homo Sapiens
aaauauccacccaagagaaccaaucauaacac

SEQ ID NO: 107068 - RNA, 32 nt, Homo Sapiens
agaaaacagaguaaguuuuuuuuguagaugca

SEQ ID NO: 107069 - RNA, 32 nt, Homo Sapiens
aaaagaaagauauuuuucuauuuauuuucuac

SEQ ID NO: 107070 - RNA, 32 nt, Homo Sapiens
ggcgggggcuuucucccccaccccagcgccca

SEQ ID NO: 107071 - RNA, 32 nt, Homo Sapiens
auaaaccugcuccuuucuuaauuucauuagcu

SEQ ID NO: 107072 - RNA, 32 nt, Homo Sapiens
cugauugacaacaguguuagacaaggugcaaa

SEQ ID NO: 107073 - RNA, 32 nt, Homo Sapiens
gucaccuuauguagugaguucuuccaaaauau

SEQ ID NO: 107074 - RNA, 32 nt, Homo Sapiens
cgggacgcgcggcugcugcugcuccugccgcc

SEQ ID NO: 107075 - RNA, 32 nt, Homo Sapiens
auaauuauuagaaaagcagagacugaagaaac

SEQ ID NO: 107076 - RNA, 32 nt, Homo Sapiens
uuuuuucaacacacugaaagcccucaauaaac

SEQ ID NO: 107077 - RNA, 28 nt, Homo Sapiens
agugcggggcgcgggccgagguuugcag

SEQ ID NO: 107078 - RNA, 32 nt, Homo Sapiens
gugugugcacuuuuuacccauucuuuguuuug

SEQ ID NO: 107079 - RNA, 30 nt, Homo Sapiens
cggcggcuuccccaaggcggcaggacucgg

SEQ ID NO: 107080 - RNA, 32 nt, Homo Sapiens
gcuccgggaacagugcaugugcaugcauacca

SEQ ID NO: 107081 - RNA, 32 nt, Homo Sapiens
aagaguguggcaaaauaaugauuuuuaaaucu

SEQ ID NO: 107082 - RNA, 32 nt, Homo Sapiens
cgcagcgccagcuccgucgccagcggugagcc

SEQ ID NO: 107083 - RNA, 32 nt, Homo Sapiens
cgguguccgcacucggccgccugccgugcccg

SEQ ID NO: 107084 - RNA, 31 nt, Homo Sapiens
auaugauauauguggcuuauaugauauaccc

SEQ ID NO: 107085 - RNA, 32 nt, Homo Sapiens
aauugcaagcauauuucuuuuaaugacuccag

SEQ ID NO: 107086 - RNA, 32 nt, Homo Sapiens
caucaccaagggugggaugggagggcagggga

SEQ ID NO: 107087 - RNA, 32 nt, Homo Sapiens
aacucauuaguagacauguuucccuauugcuu

SEQ ID NO: 107088 - RNA, 32 nt, Homo Sapiens
ucuuucuguaugacgaacuacauggaaaagac

SEQ ID NO: 107089 - RNA, 32 nt, Homo Sapiens
uuuugcuguguauaaauugauauuuugcuaug

SEQ ID NO: 107090 - RNA, 32 nt, Homo Sapiens
acauccggagagcugucuggugugcaggacug

SEQ ID NO: 107091 - RNA, 32 nt, Homo Sapiens
aaacaagcuuuaaugcaaauaguuuagaaaag

SEQ ID NO: 107092 - RNA, 32 nt, Homo Sapiens
uguuuaaugcugugguugauauuucgaaagcu

SEQ ID NO: 107093 - RNA, 32 nt, Homo Sapiens
gaaggaggcaggcaugggggacacccaaggcc

SEQ ID NO: 107094 - RNA, 32 nt, Homo Sapiens
accaggguucccucuggggucucuggcacaac

SEQ ID NO: 107095 - RNA, 32 nt, Homo Sapiens
uaagucaucagauuuuaagaaaaaagugauga

SEQ ID NO: 107096 - RNA, 32 nt, Homo Sapiens
cagagucugaugcaagagaagauaaggaagac

SEQ ID NO: 107097 - RNA, 32 nt, Homo Sapiens
ucagagggaugacugcuggggguagacugggu

SEQ ID NO: 107098 - RNA, 32 nt, Homo Sapiens
ugacucgauuucgucucggucuuccccagagc

SEQ ID NO: 107099 - RNA, 32 nt, Homo Sapiens
uaggugaggccaauacugcuguuuugggaacu

SEQ ID NO: 107100 - RNA, 32 nt, Homo Sapiens
cagccaccuccggcuccgacugaggggagggc

SEQ ID NO: 107101 - RNA, 32 nt, Homo Sapiens
ugagcuugcacaacucaguccaccgccccuac

SEQ ID NO: 107102 - RNA, 32 nt, Homo Sapiens
ucuugaaccacagauuucugcuaugugucauc

SEQ ID NO: 107103 - RNA, 32 nt, Homo Sapiens
ugcugucagaugaguucuccuuuagcccucuu

SEQ ID NO: 107104 - RNA, 32 nt, Homo Sapiens
ucuaaauacuucuggagggcgacagauucaug

SEQ ID NO: 107105 - RNA, 32 nt, Homo Sapiens
gccauccagcccuguggaccgaauggaguccc

SEQ ID NO: 107106 - RNA, 32 nt, Homo Sapiens
aaucacaaauuuuguagauaacacuuaauacu

SEQ ID NO: 107107 - RNA, 32 nt, Homo Sapiens
uaacucagaaaaaguaaaguccugaaacuuca

SEQ ID NO: 107108 - RNA, 32 nt, Homo Sapiens
cugugaccuuggagguggaggagaaugauggg

SEQ ID NO: 107109 - RNA, 32 nt, Homo Sapiens
uucuguuaauuuaguaaauaaacaagucaaag

SEQ ID NO: 107110 - RNA, 32 nt, Homo Sapiens
gacagugaugacugagaaauauuuagcuauaa

SEQ ID NO: 107111 - RNA, 32 nt, Homo Sapiens
caagugcugaccaagcugggcaguuuuaguua

SEQ ID NO: 107112 - RNA, 32 nt, Homo Sapiens
guuggcagccuggcgggcggcgcggaggagag

SEQ ID NO: 107113 - RNA, 32 nt, Homo Sapiens
agcacacagggccaggagucacaucucucugg

SEQ ID NO: 107114 - RNA, 32 nt, Homo Sapiens
gggcuugagguugccuggcuggccccgcuccc

SEQ ID NO: 107115 - RNA, 32 nt, Homo Sapiens
aucccagcugggucacccgcacugagucaaca

SEQ ID NO: 107116 - RNA, 32 nt, Homo Sapiens
uccuccugccccagccuccugucuaucccagg

SEQ ID NO: 107117 - RNA, 32 nt, Homo Sapiens
cucgcugggcccuggggugugguugcucucag

SEQ ID NO: 107118 - RNA, 32 nt, Homo Sapiens
ccgggaguuggggcuuccccccugcccauccc

SEQ ID NO: 107119 - RNA, 32 nt, Homo Sapiens
cagucaguauuguuuugguuugcuacuucccu

SEQ ID NO: 107120 - RNA, 32 nt, Homo Sapiens
uuucuuuuucuuucuucauaaagaugaguaaa

SEQ ID NO: 107121 - RNA, 32 nt, Homo Sapiens
cgacggcgcuggcggagacgccggcugcuccu

SEQ ID NO: 107122 - RNA, 32 nt, Homo Sapiens
guagauguagguuaaacuuuuacuucauagac

SEQ ID NO: 107123 - RNA, 32 nt, Homo Sapiens
uuucaggaugcaaaggcaauuauucuuuguaa

SEQ ID NO: 107124 - RNA, 32 nt, Homo Sapiens
ggugcccugcgucccgggaucccgagccaacu

SEQ ID NO: 107125 - RNA, 32 nt, Homo Sapiens
auuauuuaccuaaaaugugcuaguagcaucuu

SEQ ID NO: 107126 - RNA, 32 nt, Homo Sapiens
ccccaccccugcgugcgccucuuggugaugcu

SEQ ID NO: 107127 - RNA, 32 nt, Homo Sapiens
agcugugacccccaggcuuccacaugaacuca

SEQ ID NO: 107128 - RNA, 28 nt, Homo Sapiens
ggugggguuacaggcaugagccgcuuua

SEQ ID NO: 107129 - RNA, 32 nt, Homo Sapiens
ccuuauaagcacauuacuuuuacacuuaaugg

SEQ ID NO: 107130 - RNA, 32 nt, Homo Sapiens
agccaccugacagcugaccaggugaagagagg

SEQ ID NO: 107131 - RNA, 32 nt, Homo Sapiens
uguccuuauggacuuuaguauuagccuagauu

SEQ ID NO: 107132 - RNA, 32 nt, Homo Sapiens
ugaguucagcccagcucuguccaccccaaccc

SEQ ID NO: 107133 - RNA, 32 nt, Homo Sapiens
gugcacauuuccucuuuucucaucuccauucu

SEQ ID NO: 107134 - RNA, 32 nt, Homo Sapiens
acccugaccgugcuaacuguguguacauauau

SEQ ID NO: 107135 - RNA, 32 nt, Homo Sapiens
uugggaagcccaacaaggagccccacagcacc

SEQ ID NO: 107136 - RNA, 32 nt, Homo Sapiens
gaaaggcaagggccgugcugcugcugggcggg

SEQ ID NO: 107137 - RNA, 32 nt, Homo Sapiens
accuggagacagaucaagaagcugucacagau

SEQ ID NO: 107138 - RNA, 32 nt, Homo Sapiens
uaaucaucaguuccuuugaucucgcuguaaga

SEQ ID NO: 107139 - RNA, 32 nt, Homo Sapiens
ccucggggaugagcucugcugcugaguaggga

SEQ ID NO: 107140 - RNA, 32 nt, Homo Sapiens
cucaaaaaauggugucaaguuucuuuaauguu

SEQ ID NO: 107141 - RNA, 32 nt, Homo Sapiens
ucccaucuuuuguauggauaaaguuuaugguu

SEQ ID NO: 107142 - RNA, 32 nt, Homo Sapiens
guacaggcccaagaguugaaggugauugguuu

SEQ ID NO: 107143 - RNA, 32 nt, Homo Sapiens
guguggcagcaggcagcggggaggggaggaac

SEQ ID NO: 107144 - RNA, 32 nt, Homo Sapiens
cccagucagguggcgguagugcccuggggguu

SEQ ID NO: 107145 - RNA, 32 nt, Homo Sapiens
ggaagaagagagcagguagaaagggaauuuag

SEQ ID NO: 107146 - RNA, 32 nt, Homo Sapiens
cauaguucugugguuuuagacacgcuuucuug

SEQ ID NO: 107147 - RNA, 32 nt, Homo Sapiens
ucuacaugcaucugcaugagccaggcacuaca

SEQ ID NO: 107148 - RNA, 32 nt, Homo Sapiens
agcugggcgagguggcgggcgccuguauuccc

SEQ ID NO: 107149 - RNA, 32 nt, Homo Sapiens
cuaccccgcgcgccguggcaccccaacaccgg

SEQ ID NO: 107150 - RNA, 32 nt, Homo Sapiens
agacggaagauguggcagaaguccucaauaga

SEQ ID NO: 107151 - RNA, 32 nt, Homo Sapiens
ggagagcacagcugccggcccgcgagccagcc

SEQ ID NO: 107152 - RNA, 32 nt, Homo Sapiens
ccauggaagaggaggaggaggagccgugaugg

SEQ ID NO: 107153 - RNA, 32 nt, Homo Sapiens
cuucagcuucgggagacgcccgggccgggcgg

SEQ ID NO: 107154 - RNA, 32 nt, Homo Sapiens
uccgucuccaggguucaagugauucuccugcc

SEQ ID NO: 107155 - RNA, 32 nt, Homo Sapiens
guauggccuugggucacagcucccuacugggg

SEQ ID NO: 107156 - RNA, 32 nt, Homo Sapiens
cucuugcaggguauguucugucuugugcuuuu

SEQ ID NO: 107157 - RNA, 31 nt, Homo Sapiens
ucauggcugcacacccugccccagcccagcu

SEQ ID NO: 107158 - RNA, 32 nt, Homo Sapiens
aaacacaauuucuuaaauuuuuugguaaucuu

SEQ ID NO: 107159 - RNA, 32 nt, Homo Sapiens
uccuccaggugggugcuaaggaucuuagaauc

SEQ ID NO: 107160 - RNA, 32 nt, Homo Sapiens
ggagaaccaaaggacuuaguuaccuguuucag

SEQ ID NO: 107161 - RNA, 23 nt, Homo Sapiens
gcugggaucugccacaucaaugg

SEQ ID NO: 107162 - RNA, 32 nt, Homo Sapiens
gcaaguagcuccgagcggcugcuucccgguug

SEQ ID NO: 107163 - RNA, 32 nt, Homo Sapiens
ucauuugagcccaggaggucaaggcugcagug

SEQ ID NO: 107164 - RNA, 32 nt, Homo Sapiens
uuauaauggaaaugaaaauucuuaacuaaacu

SEQ ID NO: 107165 - RNA, 32 nt, Homo Sapiens
ggcuggucucaaacuccugaccucaagcaauu

SEQ ID NO: 107166 - RNA, 32 nt, Homo Sapiens
agggagguugcuggagccuguuugaugagagc

SEQ ID NO: 107167 - RNA, 32 nt, Homo Sapiens
gguaugaaggauuuguaaagcuuugcucaaag

SEQ ID NO: 107168 - RNA, 32 nt, Homo Sapiens
gaggauuuuuagagcuuauaguagcaaaaaga

SEQ ID NO: 107169 - RNA, 32 nt, Homo Sapiens
cuggguggcacgugagagcggccagggagaga

SEQ ID NO: 107170 - RNA, 32 nt, Homo Sapiens
ggaacagagcugagaccccggccccccuugga

SEQ ID NO: 107171 - RNA, 32 nt, Homo Sapiens
uauguuuucuuccguuugauaauuaguugguu

SEQ ID NO: 107172 - RNA, 32 nt, Homo Sapiens
uaauuuagagaggagcucuguguccuuggcca

SEQ ID NO: 107173 - RNA, 32 nt, Homo Sapiens
gccuuccgccccauucugucccccucauggcc

SEQ ID NO: 107174 - RNA, 32 nt, Homo Sapiens
aggcugggcaaaguuaagacuugcuugucagu

SEQ ID NO: 107175 - RNA, 32 nt, Homo Sapiens
cucacugaaggaauccugcugcugcugcugcu

SEQ ID NO: 107176 - RNA, 32 nt, Homo Sapiens
uacugggggccuuggucugaaccuggcccuga

SEQ ID NO: 107177 - RNA, 32 nt, Homo Sapiens
cgguuuuauuuuuguacugacauugguaagag

SEQ ID NO: 107178 - RNA, 32 nt, Homo Sapiens
uguucagguuuggggguggguaggaggcagga

SEQ ID NO: 107179 - RNA, 32 nt, Homo Sapiens
aagaguggaaaacagauaguccccauggagua

SEQ ID NO: 107180 - RNA, 32 nt, Homo Sapiens
aauuugcuuuggugaaauguccuguacagaac

SEQ ID NO: 107181 - RNA, 32 nt, Homo Sapiens
uuugaaugucauaauugcagugacaggacauu

SEQ ID NO: 107182 - RNA, 32 nt, Homo Sapiens
cggccgucgacgcgagcgcccuggcguggcgc

SEQ ID NO: 107183 - RNA, 32 nt, Homo Sapiens
cccaaauggugauucagcuguuccauuuccau

SEQ ID NO: 107184 - RNA, 32 nt, Homo Sapiens
cgguuccaggcgaguucgcagcugcgcgccgg

SEQ ID NO: 107185 - RNA, 32 nt, Homo Sapiens
aaugugguauucucuuuuuuuucucucccuuu

SEQ ID NO: 107186 - RNA, 32 nt, Homo Sapiens
aaucacugaaacaaaaauugucuuuaugagcu

SEQ ID NO: 107187 - RNA, 32 nt, Homo Sapiens
aaaaguagugauugcucugccagaagcagcuc

SEQ ID NO: 107188 - RNA, 32 nt, Homo Sapiens
agaucacccuacugcuuaauaauucagaaaau

SEQ ID NO: 107189 - RNA, 32 nt, Homo Sapiens
agugauccccuggccuccccgagccuccuuag

SEQ ID NO: 107190 - RNA, 32 nt, Homo Sapiens
cuggacgugucgcugcugcugcugcugcugcc

SEQ ID NO: 107191 - RNA, 32 nt, Homo Sapiens
auugugccacuacacuccagccuggccacaga

SEQ ID NO: 107192 - RNA, 32 nt, Homo Sapiens
gaaauaaugcaaaagaaggaauggagaagcaa

SEQ ID NO: 107193 - RNA, 32 nt, Homo Sapiens
gacagcucuuugccugcuccuugcuugauguu

SEQ ID NO: 107194 - RNA, 32 nt, Homo Sapiens
ggagcaggauucccggcccagcagcuggcuca

SEQ ID NO: 107195 - RNA, 32 nt, Homo Sapiens
uuguuuccuugaugaaucccaaugugucuacc

SEQ ID NO: 107196 - RNA, 32 nt, Homo Sapiens
auacuuaaugagcaaauugaaguaagcuuuua

SEQ ID NO: 107197 - RNA, 32 nt, Homo Sapiens
acuuuuuucauaucaaguccucacccuccuuc

SEQ ID NO: 107198 - RNA, 32 nt, Homo Sapiens
ugagaguggcagcuggugaccuggccagaggg

SEQ ID NO: 107199 - RNA, 32 nt, Homo Sapiens
cccaaucacaguguuugcugacccuguauuga

SEQ ID NO: 107200 - RNA, 32 nt, Homo Sapiens
uuucgggauaaccaccugauaccugcagaaac

SEQ ID NO: 107201 - RNA, 32 nt, Homo Sapiens
aggccagccggcaggaggagccggacagccuc

SEQ ID NO: 107202 - RNA, 32 nt, Homo Sapiens
uuuuuuuucuuuucuuuuuuuuuuuuuuuuuu

SEQ ID NO: 107203 - RNA, 32 nt, Homo Sapiens
aagaagaaaaagauuuauaauuucugaguccc

SEQ ID NO: 107204 - RNA, 32 nt, Homo Sapiens
guguccagauucaaauguacuguuuuuaaacu

SEQ ID NO: 107205 - RNA, 32 nt, Homo Sapiens
cagagcccugacgcuccggguccccgugccug

SEQ ID NO: 107206 - RNA, 32 nt, Homo Sapiens
ccagaggcuccucagcuggguaaggugagcca

SEQ ID NO: 107207 - RNA, 32 nt, Homo Sapiens
aaaaaaaggaggaaacaaccacauaugucacc

SEQ ID NO: 107208 - RNA, 32 nt, Homo Sapiens
ugugauuuuuuccccugaaaauauuugcuugu

SEQ ID NO: 107209 - RNA, 32 nt, Homo Sapiens
aucccccaaaaauucaagaaaacuaacuuaga

SEQ ID NO: 107210 - RNA, 32 nt, Homo Sapiens
acgcggggccgggaaugcccgcggugcggggc

SEQ ID NO: 107211 - RNA, 32 nt, Homo Sapiens
uugaccuuccaucaguaagacggacuuuucua

SEQ ID NO: 107212 - RNA, 32 nt, Homo Sapiens
ugacccuguauaucaugacuuauuuuuaaucu

SEQ ID NO: 107213 - RNA, 32 nt, Homo Sapiens
gguuaugaacaaauaggaugccuaguugagga

SEQ ID NO: 107214 - RNA, 32 nt, Homo Sapiens
augucauuuacugcuuuuucugaugguaaaaa

SEQ ID NO: 107215 - RNA, 32 nt, Homo Sapiens
caccaguggcuucugcugcugcugcagagcag

SEQ ID NO: 107216 - RNA, 32 nt, Homo Sapiens
uuucuagcagggaauuucuuccacuugcagac

SEQ ID NO: 107217 - RNA, 31 nt, Homo Sapiens
cacugcaagcacugccucccuccggggucug

SEQ ID NO: 107218 - RNA, 32 nt, Homo Sapiens
ggugagcuggccccaccucgccugcagccucc

SEQ ID NO: 107219 - RNA, 32 nt, Homo Sapiens
acugcaaaaaaguuuuaacaaaaccuuugaga

SEQ ID NO: 107220 - RNA, 32 nt, Homo Sapiens
gaaaccccaucucuacuaaaaauagaaaaauc

SEQ ID NO: 107221 - RNA, 32 nt, Homo Sapiens
uaagaucggaaguuaagagagcucccuccgaa

SEQ ID NO: 107222 - RNA, 32 nt, Homo Sapiens
gcuuuuuuuuuuuuuucuuaaaaagaaaaacc

SEQ ID NO: 107223 - RNA, 32 nt, Homo Sapiens
cccacuuggcuaugggagagccagcagggguu

SEQ ID NO: 107224 - RNA, 32 nt, Homo Sapiens
cuuuuuucauacuacuguuaacuuuuuuaaaa

SEQ ID NO: 107225 - RNA, 32 nt, Homo Sapiens
uccccaugcgcacacacauacacacaccccaa

SEQ ID NO: 107226 - RNA, 32 nt, Homo Sapiens
aguccaguaauuuuuuauaaaucuucagauua

SEQ ID NO: 107227 - RNA, 32 nt, Homo Sapiens
aguggauuuuuagccccugaucuacaaaugua

SEQ ID NO: 107228 - RNA, 32 nt, Homo Sapiens
uccuugaacaaagagaagcuucuuuaaaagcu

SEQ ID NO: 107229 - RNA, 32 nt, Homo Sapiens
gcuguggcccagaggucccccugcccccucag

SEQ ID NO: 107230 - RNA, 32 nt, Homo Sapiens
uaguccggugccccccgugccggagcgcagga

SEQ ID NO: 107231 - RNA, 32 nt, Homo Sapiens
agacacuuggauuggacuuaaucuuaaaccuc

SEQ ID NO: 107232 - RNA, 32 nt, Homo Sapiens
aaggguuucacacuuugaaaauuuuuugagca

SEQ ID NO: 107233 - RNA, 32 nt, Homo Sapiens
gugagaauccggauucugucucaguagggcuc

SEQ ID NO: 107234 - RNA, 32 nt, Homo Sapiens
ugugggcccuuaaagucuuagccaagagccaa

SEQ ID NO: 107235 - RNA, 32 nt, Homo Sapiens
cgcucccucccucucucaaggucuccuccuuc

SEQ ID NO: 107236 - RNA, 32 nt, Homo Sapiens
gcugauaccauggaagacaucaccuuggcuuc

SEQ ID NO: 107237 - RNA, 32 nt, Homo Sapiens
ccuccugcugaccccugacagcgucccguggc

SEQ ID NO: 107238 - RNA, 32 nt, Homo Sapiens
cuucagcaguugcuuggaacuuugguucuggc

SEQ ID NO: 107239 - RNA, 32 nt, Homo Sapiens
uggugugacggcagugccuacacgccaaggua

SEQ ID NO: 107240 - RNA, 32 nt, Homo Sapiens
uuuugauaaaauguauuuucagcauuaauaca

SEQ ID NO: 107241 - RNA, 32 nt, Homo Sapiens
uucucucgccuggcaggucaccuggcccacac

SEQ ID NO: 107242 - RNA, 32 nt, Homo Sapiens
gcugguguguaggugguaaaaccuguucucca

SEQ ID NO: 107243 - RNA, 28 nt, Homo Sapiens
caggccgcggggccgccgggcgugguuu

SEQ ID NO: 107244 - RNA, 32 nt, Homo Sapiens
aggcuccagccgucgucuccgcgcucccgggg

SEQ ID NO: 107245 - RNA, 32 nt, Homo Sapiens
cacuggggaagcugcugugaugagacuagaug

SEQ ID NO: 107246 - RNA, 32 nt, Homo Sapiens
ugcucuguuuugcauggaguauuauuauuuua

SEQ ID NO: 107247 - RNA, 30 nt, Homo Sapiens
ccagaugcgcgcgugccgccgccgcgggca

SEQ ID NO: 107248 - RNA, 32 nt, Homo Sapiens
gguggagggaccuugccaggaugaacccccca

SEQ ID NO: 107249 - RNA, 32 nt, Homo Sapiens
cacgacacaacacuuauuauccagcagguaau

SEQ ID NO: 107250 - RNA, 32 nt, Homo Sapiens
accgggaggacacgugucaccgcaccugcuuc

SEQ ID NO: 107251 - RNA, 32 nt, Homo Sapiens
cacacacacacgccaaugcacacacacagaga

SEQ ID NO: 107252 - RNA, 32 nt, Homo Sapiens
caucucagccugccuccgaguagcugggacua

SEQ ID NO: 107253 - RNA, 32 nt, Homo Sapiens
cagaaauaggaagauuaaaaccacagaacagu

SEQ ID NO: 107254 - RNA, 32 nt, Homo Sapiens
gaucaccugagcucaggaguuuaagaccagcc

SEQ ID NO: 107255 - RNA, 32 nt, Homo Sapiens
cuaggagcucugcaggccccagcacccgcaga

SEQ ID NO: 107256 - RNA, 31 nt, Homo Sapiens
gaggaacaguggcuucucagagccuggggca

SEQ ID NO: 107257 - RNA, 32 nt, Homo Sapiens
aaaaggcauauugcuuccagauucugaugugu

SEQ ID NO: 107258 - RNA, 32 nt, Homo Sapiens
ugagauucugaguguguaaauccugggaacuc

SEQ ID NO: 107259 - RNA, 32 nt, Homo Sapiens
ggggggagagguagaucaugauuugggcggca

SEQ ID NO: 107260 - RNA, 32 nt, Homo Sapiens
uguauauagcuaugaagaaaacacaaagugua

SEQ ID NO: 107261 - RNA, 32 nt, Homo Sapiens
cccuccgcgcagcgcucgcgacacgcgugcca

SEQ ID NO: 107262 - RNA, 32 nt, Homo Sapiens
guuuucuuccuccguauugauuuucuccuuuu

SEQ ID NO: 107263 - RNA, 32 nt, Homo Sapiens
cuagagaggagaaaggggugauugaaagaaaa

SEQ ID NO: 107264 - RNA, 32 nt, Homo Sapiens
ucucugaaagacuuuacugaccaaucagccgg

SEQ ID NO: 107265 - RNA, 32 nt, Homo Sapiens
aucuguggcaaacuauuuuccacucaaauccu

SEQ ID NO: 107266 - RNA, 30 nt, Homo Sapiens
ggagcggcgcccgccgcggcucagcgcauu

SEQ ID NO: 107267 - RNA, 32 nt, Homo Sapiens
cccaucucauugagcuuucucagucauuguug

SEQ ID NO: 107268 - RNA, 32 nt, Homo Sapiens
cccacuagacauuugaaguuccacaaugaacc

SEQ ID NO: 107269 - RNA, 32 nt, Homo Sapiens
uuauuccauaaaugcagauagugaggcuaaga

SEQ ID NO: 107270 - RNA, 32 nt, Homo Sapiens
gccagcccugucaccaccuccacugccaugac

SEQ ID NO: 107271 - RNA, 32 nt, Homo Sapiens
uccauguuguaacaaaguuuccuccgcgcccc

SEQ ID NO: 107272 - RNA, 32 nt, Homo Sapiens
gcagcucaucucugucccacuuggcaucagcu

SEQ ID NO: 107273 - RNA, 32 nt, Homo Sapiens
uggugagacaaagggcgcuggcuggcaggaag

SEQ ID NO: 107274 - RNA, 32 nt, Homo Sapiens
ggcaacccuaaaaucagcuguguuagguaaca

SEQ ID NO: 107275 - RNA, 32 nt, Homo Sapiens
ggcaguggugccuagcguugugguuguucuga

SEQ ID NO: 107276 - RNA, 32 nt, Homo Sapiens
gggugccuacagcagccagagcagcagggagu

SEQ ID NO: 107277 - RNA, 32 nt, Homo Sapiens
gugcggauaucccacaguuuccucaucccuuc

SEQ ID NO: 107278 - RNA, 31 nt, Homo Sapiens
augugaagcaacacucuggauuuugaaagac

SEQ ID NO: 107279 - RNA, 32 nt, Homo Sapiens
aauuaaauagagacaguauucagauuagcugu

SEQ ID NO: 107280 - RNA, 32 nt, Homo Sapiens
aaguuuucaagaugaaguuuuuauugacaacu

SEQ ID NO: 107281 - RNA, 32 nt, Homo Sapiens
uuuuagaugaggaaacagggucagaaagguca

SEQ ID NO: 107282 - RNA, 32 nt, Homo Sapiens
gagagcuaggggggcgggggccggggagagug

SEQ ID NO: 107283 - RNA, 32 nt, Homo Sapiens
aggagccgagcgccgccgucuccggcauggau

SEQ ID NO: 107284 - RNA, 32 nt, Homo Sapiens
guacauguaggcauuuaguuaaguauagcaau

SEQ ID NO: 107285 - RNA, 32 nt, Homo Sapiens
agagggcuuaucacuauauccagcuaagauuu

SEQ ID NO: 107286 - RNA, 32 nt, Homo Sapiens
aaugaaacacauuuauaccucuguucaauaaa

SEQ ID NO: 107287 - RNA, 32 nt, Homo Sapiens
agugcgggccugggcccugcuccaccuccaga

SEQ ID NO: 107288 - RNA, 32 nt, Homo Sapiens
uggaaagccgaccuccaccuccuccuccuccu

SEQ ID NO: 107289 - RNA, 32 nt, Homo Sapiens
aaugacagauaaagaagauugucaaagaaaag

SEQ ID NO: 107290 - RNA, 32 nt, Homo Sapiens
ucacagaaacaaaauaaucaauauagguaaua

SEQ ID NO: 107291 - RNA, 32 nt, Homo Sapiens
cucacaauccuccaaaguuugaaaguuauuuu

SEQ ID NO: 107292 - RNA, 32 nt, Homo Sapiens
guagaaugcuccaugcuauuuuauggaaacuu

SEQ ID NO: 107293 - RNA, 32 nt, Homo Sapiens
ugauggcucggcgguccgagcugcugguccca

SEQ ID NO: 107294 - RNA, 32 nt, Homo Sapiens
cuuauagacagagggcacagcuaagcacagcu

SEQ ID NO: 107295 - RNA, 32 nt, Homo Sapiens
caaugcguguccguggaaccagcagcaggccc

SEQ ID NO: 107296 - RNA, 32 nt, Homo Sapiens
agcuaccaaaaauuauuuguuaaaaaaugcaa

SEQ ID NO: 107297 - RNA, 32 nt, Homo Sapiens
ggcagcuuccagcagaagucacgcuccccauc

SEQ ID NO: 107298 - RNA, 32 nt, Homo Sapiens
ugggggaggaagacuuugguauggagcaaaga

SEQ ID NO: 107299 - RNA, 32 nt, Homo Sapiens
agagcgagcuuaggaccgccugcccggggcaa

SEQ ID NO: 107300 - RNA, 32 nt, Homo Sapiens
uuucccaugcuguugacugcuaucccugcaaa

SEQ ID NO: 107301 - RNA, 32 nt, Homo Sapiens
uuuucugucuugccugaauacaaaacacugua

SEQ ID NO: 107302 - RNA, 32 nt, Homo Sapiens
gagguugaugucggugugguguguaagauguu

SEQ ID NO: 107303 - RNA, 32 nt, Homo Sapiens
ugcagaauauugcaacuuuguguuguuuuaug

SEQ ID NO: 107304 - RNA, 32 nt, Homo Sapiens
ggugggaauguuuccccucguuuucuaggaga

SEQ ID NO: 107305 - RNA, 32 nt, Homo Sapiens
aauuuagaugucuauuugguggcuccuguuaa

SEQ ID NO: 107306 - RNA, 32 nt, Homo Sapiens
gcugcccugcagccccagacaccuggaaaauc

SEQ ID NO: 107307 - RNA, 32 nt, Homo Sapiens
aacaacuucagaugaauuuuuacaaguuauac

SEQ ID NO: 107308 - RNA, 32 nt, Homo Sapiens
ucauguuccagaagaggaaauaaugaagauau

SEQ ID NO: 107309 - RNA, 32 nt, Homo Sapiens
gccuggccgaggccucgcugcugcuggugacc

SEQ ID NO: 107310 - RNA, 32 nt, Homo Sapiens
cugauuuccuggcagcugaacucggguagucc

SEQ ID NO: 107311 - RNA, 32 nt, Homo Sapiens
uucauccuuugaaacacaguugugaagugugu

SEQ ID NO: 107312 - RNA, 32 nt, Homo Sapiens
caguagauuucgucauuugucuauuccuuuug

SEQ ID NO: 107313 - RNA, 30 nt, Homo Sapiens
agaagauggcggugcggaagaaggacggcg

SEQ ID NO: 107314 - RNA, 32 nt, Homo Sapiens
auuucaaauauuaaauaagcuuaaaggaacca

SEQ ID NO: 107315 - RNA, 32 nt, Homo Sapiens
acccaggacacagcaccugacugcacacagug

SEQ ID NO: 107316 - RNA, 32 nt, Homo Sapiens
cgggcccugcggccuugcggccgcccgggacu

SEQ ID NO: 107317 - RNA, 32 nt, Homo Sapiens
ggaaucugaucagagguucagaauuggaagua

SEQ ID NO: 107318 - RNA, 32 nt, Homo Sapiens
gaaaaagcacgugauaacuuugaaggaggcug

SEQ ID NO: 107319 - RNA, 32 nt, Homo Sapiens
cacgcuuuuccacagccccugucagguggccu

SEQ ID NO: 107320 - RNA, 32 nt, Homo Sapiens
augcagaggcucccuuucccucagcagccgcc

SEQ ID NO: 107321 - RNA, 32 nt, Homo Sapiens
ugugcaaauguuucuucaguuuuaauaccuca

SEQ ID NO: 107322 - RNA, 32 nt, Homo Sapiens
cucagccccgucccaaacacagaugggaccau

SEQ ID NO: 107323 - RNA, 32 nt, Homo Sapiens
aaaauuguauuguuuggcaaaaucacaaguaa

SEQ ID NO: 107324 - RNA, 32 nt, Homo Sapiens
aaaacgaacucuucagcaaccucuggcgcccu

SEQ ID NO: 107325 - RNA, 32 nt, Homo Sapiens
cacauugauucacacauucagaaaagaggguc

SEQ ID NO: 107326 - RNA, 32 nt, Homo Sapiens
gguggggcucagcgcuggcgccggcgaggacu

SEQ ID NO: 107327 - RNA, 32 nt, Homo Sapiens
uggugguuuuauucuaucgguauaaaggcauu

SEQ ID NO: 107328 - RNA, 32 nt, Homo Sapiens
caucgugggugugccccacguacugguucgga

SEQ ID NO: 107329 - RNA, 32 nt, Homo Sapiens
cacguguucugcugaagugcgucugaaggccg

SEQ ID NO: 107330 - RNA, 32 nt, Homo Sapiens
uacaccaaaaauaaguuauaaagugcuuccuu

SEQ ID NO: 107331 - RNA, 32 nt, Homo Sapiens
gacuuuauguauacuugcaaucaaauaaauau

SEQ ID NO: 107332 - RNA, 32 nt, Homo Sapiens
uccuaccuuggugcuugcuuagauaacuccac

SEQ ID NO: 107333 - RNA, 32 nt, Homo Sapiens
cucugcaacgaaucccaaaaguauguaguuga

SEQ ID NO: 107334 - RNA, 32 nt, Homo Sapiens
uauaacuucuaaaauucauaauuugacuacua

SEQ ID NO: 107335 - RNA, 32 nt, Homo Sapiens
gccuucauuauguaucuucucuugccuucauu

SEQ ID NO: 107336 - RNA, 32 nt, Homo Sapiens
accuuaauuuaaaauaaaucagacuaaaaggu

SEQ ID NO: 107337 - RNA, 32 nt, Homo Sapiens
auaauauccuccuaucucugaaagaacaaguu

SEQ ID NO: 107338 - RNA, 32 nt, Homo Sapiens
ccuucucagccuucuccccgcggccagcuggg

SEQ ID NO: 107339 - RNA, 32 nt, Homo Sapiens
aaggacaugaacucauucuuuuuuauggcugc

SEQ ID NO: 107340 - RNA, 32 nt, Homo Sapiens
guguaaaauggaaaauaagagaucaaaaugaa

SEQ ID NO: 107341 - RNA, 32 nt, Homo Sapiens
uauugaaaccaucagcaggaggaguuuggaua

SEQ ID NO: 107342 - RNA, 32 nt, Homo Sapiens
cuuuccaggcaggccuggccauagggcaagag

SEQ ID NO: 107343 - RNA, 32 nt, Homo Sapiens
cuacuggaauguaaauaugugauaaaauaaua

SEQ ID NO: 107344 - RNA, 32 nt, Homo Sapiens
cucagcccaggcagaagcugcucuaggaccug

SEQ ID NO: 107345 - RNA, 32 nt, Homo Sapiens
agcauauaggucaggaaagaauggagacggca

SEQ ID NO: 107346 - RNA, 32 nt, Homo Sapiens
ugcucugucauucgugaccugcucuuucuaga

SEQ ID NO: 107347 - RNA, 32 nt, Homo Sapiens
auacuauccacccacccuguguaguaccuucc

SEQ ID NO: 107348 - RNA, 32 nt, Homo Sapiens
ggggucccagcgacaccuccccgggagaagca

SEQ ID NO: 107349 - RNA, 32 nt, Homo Sapiens
aaauucuccuugggccucaggcaaauaguuuc

SEQ ID NO: 107350 - RNA, 32 nt, Homo Sapiens
ugagagggccagguguggggcugggguccccu

SEQ ID NO: 107351 - RNA, 32 nt, Homo Sapiens
cccuacccaucccauuccccacaggcccuaca

SEQ ID NO: 107352 - RNA, 32 nt, Homo Sapiens
caucaccccccucgaaggucggacaggacggg

SEQ ID NO: 107353 - RNA, 32 nt, Homo Sapiens
agaaagcagcgagagcgagaccugggagccag

SEQ ID NO: 107354 - RNA, 32 nt, Homo Sapiens
ggcaaggucucacucugucacccaggauggag

SEQ ID NO: 107355 - RNA, 32 nt, Homo Sapiens
agguccuguguuaaacacuacacauuugaaac

SEQ ID NO: 107356 - RNA, 32 nt, Homo Sapiens
cuucucagcaggaccuaggaggccuggcccag

SEQ ID NO: 107357 - RNA, 32 nt, Homo Sapiens
uggggaaguccucgcugcccucucuucucacc

SEQ ID NO: 107358 - RNA, 32 nt, Homo Sapiens
uaaggauguuucauguuuuucuuaaaugacuc

SEQ ID NO: 107359 - RNA, 32 nt, Homo Sapiens
gauugaggaaugcaacaauauaaagaagagaa

SEQ ID NO: 107360 - RNA, 32 nt, Homo Sapiens
ccggagcggagcaucccucgggccgggaaacg

SEQ ID NO: 107361 - RNA, 32 nt, Homo Sapiens
auuaaaaaaaaaaaaaucauagugauugggag

SEQ ID NO: 107362 - RNA, 32 nt, Homo Sapiens
ugacacucagaauaggcuauucccaacagaag

SEQ ID NO: 107363 - RNA, 32 nt, Homo Sapiens
gauuagaauauuaauacaaacgugaaaugcag

SEQ ID NO: 107364 - RNA, 32 nt, Homo Sapiens
uugcucccaagccuaguuaucuccaguuguuu

SEQ ID NO: 107365 - RNA, 32 nt, Homo Sapiens
aucuaccggcgcccacccucacgcccaccccc

SEQ ID NO: 107366 - RNA, 32 nt, Homo Sapiens
agauguugcaggagauggggugggcucucuga

SEQ ID NO: 107367 - RNA, 32 nt, Homo Sapiens
ggcugccgcugccugcaucucgugugccuguu

SEQ ID NO: 107368 - RNA, 32 nt, Homo Sapiens
agacauggaaauugugggaagacaaaaauaug

SEQ ID NO: 107369 - RNA, 32 nt, Homo Sapiens
uauuuuauuuuuuauuuuuuuauaucacuuga

SEQ ID NO: 107370 - RNA, 32 nt, Homo Sapiens
cucucucuuuugcccugcucuccacaccagaa

SEQ ID NO: 107371 - RNA, 32 nt, Homo Sapiens
gcgccucugcccgcagcgcucgccgucgggcu

SEQ ID NO: 107372 - RNA, 32 nt, Homo Sapiens
gcagcaggggagauguuguuaagcaaagggag

SEQ ID NO: 107373 - RNA, 32 nt, Homo Sapiens
gcugugcagcuggagccaaaaaggcaagguag

SEQ ID NO: 107374 - RNA, 32 nt, Homo Sapiens
auaccacaagauacuagauaacauaaaugacc

SEQ ID NO: 107375 - RNA, 32 nt, Homo Sapiens
cacugccuccaagucaggcagaccuuggugaa

SEQ ID NO: 107376 - RNA, 32 nt, Homo Sapiens
aggcacucauuuccuccagggaacagugaaau

SEQ ID NO: 107377 - RNA, 32 nt, Homo Sapiens
guggguccccacuccuggggcccccuaacccc

SEQ ID NO: 107378 - RNA, 32 nt, Homo Sapiens
gcuagucauucacuauagcauuuaucacagug

SEQ ID NO: 107379 - RNA, 32 nt, Homo Sapiens
augugauuauggaaacaagucaugcucaugaa

SEQ ID NO: 107380 - RNA, 32 nt, Homo Sapiens
ggaaaaaagagaaaaaccaaugauucauaaca

SEQ ID NO: 107381 - RNA, 32 nt, Homo Sapiens
guguuaucugugauggagugugaauguguaac

SEQ ID NO: 107382 - RNA, 32 nt, Homo Sapiens
aaugugcugauucuuggaauguuucauucucc

SEQ ID NO: 107383 - RNA, 32 nt, Homo Sapiens
aucagaagauaaaauauuuuuauauuuaugca

SEQ ID NO: 107384 - RNA, 32 nt, Homo Sapiens
ggauucgguguugggaccacuccugcccugac

SEQ ID NO: 107385 - RNA, 32 nt, Homo Sapiens
uuccaaaagaaaaacuaguugcagucagggag

SEQ ID NO: 107386 - RNA, 32 nt, Homo Sapiens
uugguuuaucuaaaguguguucaugaugacug

SEQ ID NO: 107387 - RNA, 32 nt, Homo Sapiens
ugcggcgcguccucucgccggugacccggugu

SEQ ID NO: 107388 - RNA, 32 nt, Homo Sapiens
gguugugauuuaaacuuaugcuauaaacuaaa

SEQ ID NO: 107389 - RNA, 32 nt, Homo Sapiens
ucagcuccaaauagcgggggccugucaggagc

SEQ ID NO: 107390 - RNA, 32 nt, Homo Sapiens
gccagacaaggguggggcuccacaggcagcac

SEQ ID NO: 107391 - RNA, 32 nt, Homo Sapiens
ccugcucagcagugagagcagaugaggugaaa

SEQ ID NO: 107392 - RNA, 32 nt, Homo Sapiens
agccccucugcccagcagccgccccgucugag

SEQ ID NO: 107393 - RNA, 32 nt, Homo Sapiens
agaaaccccugcucagccccugaugagcacau

SEQ ID NO: 107394 - RNA, 32 nt, Homo Sapiens
aaaaagaugauguagauguugcccuacuaccu

SEQ ID NO: 107395 - RNA, 32 nt, Homo Sapiens
cacugcacuccagccugggugacagagacagu

SEQ ID NO: 107396 - RNA, 32 nt, Homo Sapiens
gaaucaaggcgccaggaugggcacucugcccu

SEQ ID NO: 107397 - RNA, 32 nt, Homo Sapiens
gcucgcgcugucagcaucgcagaacuagggcc

SEQ ID NO: 107398 - RNA, 32 nt, Homo Sapiens
ugcccuguacccaagcuucccucccccucucc

SEQ ID NO: 107399 - RNA, 32 nt, Homo Sapiens
gauaaauaucauauacaucguuaugaaaauau

SEQ ID NO: 107400 - RNA, 32 nt, Homo Sapiens
uaauggcuuuuguauuuuuauauuugugcaau

SEQ ID NO: 107401 - RNA, 32 nt, Homo Sapiens
uaagcugacacuaaauauuuuuuacacaaaaa

SEQ ID NO: 107402 - RNA, 32 nt, Homo Sapiens
cguucugugcccccggcccggccaccgacggc

SEQ ID NO: 107403 - RNA, 32 nt, Homo Sapiens
caucagugccagcaaaguccagugggggagag

SEQ ID NO: 107404 - RNA, 32 nt, Homo Sapiens
cccuuccccgucccgagaagguuacauuuggc

SEQ ID NO: 107405 - RNA, 30 nt, Homo Sapiens
agucuuugagggaggaccuauacccauaau

SEQ ID NO: 107406 - RNA, 32 nt, Homo Sapiens
accgggcuaggauacagaauggaagguguaug

SEQ ID NO: 107407 - RNA, 32 nt, Homo Sapiens
ugcggguaguggguuuggagaaguuccgaggc

SEQ ID NO: 107408 - RNA, 32 nt, Homo Sapiens
agauuaauacucaaggaccugacuugauaauu

SEQ ID NO: 107409 - RNA, 32 nt, Homo Sapiens
uuauuccccgcucccgggccaagcccagcugc

SEQ ID NO: 107410 - RNA, 32 nt, Homo Sapiens
cucaguuuucuaaucugaaaaaugagaauauu

SEQ ID NO: 107411 - RNA, 32 nt, Homo Sapiens
acauugcuugaaaaaugaaaguauuuggacau

SEQ ID NO: 107412 - RNA, 32 nt, Homo Sapiens
ggcaucacguaaauugguuuuguuugcuauuc

SEQ ID NO: 107413 - RNA, 29 nt, Homo Sapiens
acaguauaaacuuucagaggcaaaauccu

SEQ ID NO: 107414 - RNA, 32 nt, Homo Sapiens
caucaccaucaucaaacagcugcucaagaaau

SEQ ID NO: 107415 - RNA, 32 nt, Homo Sapiens
ugaguaugugcgagcagggaugcacucaggag

SEQ ID NO: 107416 - RNA, 31 nt, Homo Sapiens
agguggagggcgguuuugcagacaucucagc

SEQ ID NO: 107417 - RNA, 32 nt, Homo Sapiens
agagggagggcaggcgggagggagggcauugg

SEQ ID NO: 107418 - RNA, 32 nt, Homo Sapiens
gagcgcggagagcgcgacacgugcggcccaga

SEQ ID NO: 107419 - RNA, 32 nt, Homo Sapiens
cucugccuggaagagauuacagggaaauucca

SEQ ID NO: 107420 - RNA, 32 nt, Homo Sapiens
ucacuauaaugaucuaagaagcuacagauugu

SEQ ID NO: 107421 - RNA, 32 nt, Homo Sapiens
agacagacaaugucgagggacaaaagauagaa

SEQ ID NO: 107422 - RNA, 32 nt, Homo Sapiens
cccugaaugacugcauggauagaaccacuaag

SEQ ID NO: 107423 - RNA, 32 nt, Homo Sapiens
cauuuucugcuguggguaacugcgugcagugu

SEQ ID NO: 107424 - RNA, 32 nt, Homo Sapiens
agauagucuugcauaucuuaaucgacauuccc

SEQ ID NO: 107425 - RNA, 32 nt, Homo Sapiens
uuuuaggugucuuuuaaugauacugucuaaga

SEQ ID NO: 107426 - RNA, 32 nt, Homo Sapiens
ccugcccucuguucagcccgugaggggcgggg

SEQ ID NO: 107427 - RNA, 32 nt, Homo Sapiens
cuguggguucgcgacccgggggguggcgggcc

SEQ ID NO: 107428 - RNA, 31 nt, Homo Sapiens
cccgcgcaccgcugccugcccugcaguggcu

SEQ ID NO: 107429 - RNA, 32 nt, Homo Sapiens
ccccgacagcagccgccuccugccccccgugc

SEQ ID NO: 107430 - RNA, 32 nt, Homo Sapiens
gcccuagaaguaucuuagaaaguccaagggga

SEQ ID NO: 107431 - RNA, 32 nt, Homo Sapiens
aaaggggagggguggggcuaccagguagcagu

SEQ ID NO: 107432 - RNA, 32 nt, Homo Sapiens
ugggccggagccgggcgagggcugggagcugg

SEQ ID NO: 107433 - RNA, 32 nt, Homo Sapiens
cagacacacagacgugcacacacacacacaca

SEQ ID NO: 107434 - RNA, 32 nt, Homo Sapiens
cacacacacacacacacacacacacacacgug

SEQ ID NO: 107435 - RNA, 32 nt, Homo Sapiens
cccaggcgucuggguccugcuggucuucgccu

SEQ ID NO: 107436 - RNA, 32 nt, Homo Sapiens
auguauaaauuaagcauagcaagagauuaaua

SEQ ID NO: 107437 - RNA, 32 nt, Homo Sapiens
gcaagagcagcaugucagccugccggagcuuu

SEQ ID NO: 107438 - RNA, 32 nt, Homo Sapiens
cacaacauaugaugaaauuuugauuucucuga

SEQ ID NO: 107439 - RNA, 32 nt, Homo Sapiens
aauuggaaacacacugaaauauuucauagucu

SEQ ID NO: 107440 - RNA, 32 nt, Homo Sapiens
guaauaguccuuuuuugguuuuuguuuuguuu

SEQ ID NO: 107441 - RNA, 32 nt, Homo Sapiens
gaaaaggauuggggcgggcaagggggacagcc

SEQ ID NO: 107442 - RNA, 32 nt, Homo Sapiens
ccagccgccccgauguacagcaugaugaugga

SEQ ID NO: 107443 - RNA, 32 nt, Homo Sapiens
gcccuucccuuccccucuaaggaggcagcaac

SEQ ID NO: 107444 - RNA, 32 nt, Homo Sapiens
cccuaauuucucaagcaaaaucucugaggauu

SEQ ID NO: 107445 - RNA, 32 nt, Homo Sapiens
ucggagccugggguugucagagugaucggguc

SEQ ID NO: 107446 - RNA, 32 nt, Homo Sapiens
caauaaugagaggacauuguggcagccaaagc

SEQ ID NO: 107447 - RNA, 32 nt, Homo Sapiens
auaucacuguaaugagucagugaagucuagaa

SEQ ID NO: 107448 - RNA, 32 nt, Homo Sapiens
ucuccuuuuuauuucuguggcuuuuucuauuc

SEQ ID NO: 107449 - RNA, 32 nt, Homo Sapiens
gauugcugcccucuccucucccacagcccuua

SEQ ID NO: 107450 - RNA, 31 nt, Homo Sapiens
gcucaagugcucugccugccucggccuccca

SEQ ID NO: 107451 - RNA, 32 nt, Homo Sapiens
uugccacaaccuggauauugaagcuauccaag

SEQ ID NO: 107452 - RNA, 30 nt, Homo Sapiens
cucugggccacugcugcagaggccguggca

SEQ ID NO: 107453 - RNA, 32 nt, Homo Sapiens
uguaacugcuuaauaaaugacaucucacugaa

SEQ ID NO: 107454 - RNA, 32 nt, Homo Sapiens
aggcuuuggauccagcagcugccgcucccugg

SEQ ID NO: 107455 - RNA, 32 nt, Homo Sapiens
uguuuucuacuuucuuuuuucucuuaucugug

SEQ ID NO: 107456 - RNA, 32 nt, Homo Sapiens
cugaaagaggcuuuuuuuuaaauagaagaaau

SEQ ID NO: 107457 - RNA, 32 nt, Homo Sapiens
uuugaccaggugguuuugccuucuuuuauuug

SEQ ID NO: 107458 - RNA, 32 nt, Homo Sapiens
ugcuuggcucaauaagaaaaccacguuaggag

SEQ ID NO: 107459 - RNA, 32 nt, Homo Sapiens
ccgcggggccccggacaaggguccgcagagcu

SEQ ID NO: 107460 - RNA, 32 nt, Homo Sapiens
cuuuuauugccugaaccuuaugcugaccugga

SEQ ID NO: 107461 - RNA, 32 nt, Homo Sapiens
ucaaacaaaaauauugauuucugcuuuuaggg

SEQ ID NO: 107462 - RNA, 32 nt, Homo Sapiens
uccagagcccagcccagcccuacgcgcgcggc

SEQ ID NO: 107463 - RNA, 32 nt, Homo Sapiens
aaaggacaagauacaaguucacaugaugggaa

SEQ ID NO: 107464 - RNA, 32 nt, Homo Sapiens
gaacugccccagggccgaaagggcgccgcugc

SEQ ID NO: 107465 - RNA, 32 nt, Homo Sapiens
caccccugacccacccaggaguuggaccggga

SEQ ID NO: 107466 - RNA, 32 nt, Homo Sapiens
augucauuaaaauaaauaaaugcaauauguau

SEQ ID NO: 107467 - RNA, 32 nt, Homo Sapiens
uaaauuguuuuaaauacuugagccuuuuucuc

SEQ ID NO: 107468 - RNA, 32 nt, Homo Sapiens
uggggaggacaaagugggcggaucaccugagg

SEQ ID NO: 107469 - RNA, 32 nt, Homo Sapiens
ggaggcuauaucuauuuuguuuugcuuuuugg

SEQ ID NO: 107470 - RNA, 32 nt, Homo Sapiens
auucucgcccagcucacccucuacacagacac

SEQ ID NO: 107471 - RNA, 32 nt, Homo Sapiens
cgcagcuggagaggagcguguccccaagccgg

SEQ ID NO: 107472 - RNA, 32 nt, Homo Sapiens
gggguuucccucaccucggucuucccaagaug

SEQ ID NO: 107473 - RNA, 32 nt, Homo Sapiens
aucuuccaauggaaaaucauuaccuugaagag

SEQ ID NO: 107474 - RNA, 32 nt, Homo Sapiens
gcgccccccgacggacgggaccggcucccugg

SEQ ID NO: 107475 - RNA, 32 nt, Homo Sapiens
ccuccucugaagaucccuguacacgugguguu

SEQ ID NO: 107476 - RNA, 32 nt, Homo Sapiens
uuugguuuccuguuuuuugucuaugucccagc

SEQ ID NO: 107477 - RNA, 32 nt, Homo Sapiens
gucugcaaacucccaccugcagccaaaucugg

SEQ ID NO: 107478 - RNA, 32 nt, Homo Sapiens
uugcgggcugucagcacucacugugggugcgg

SEQ ID NO: 107479 - RNA, 32 nt, Homo Sapiens
agaguccaaaggaauauucuuuuacaccaauu

SEQ ID NO: 107480 - RNA, 32 nt, Homo Sapiens
gcugccaccacuuuugugacugucacccauga

SEQ ID NO: 107481 - RNA, 32 nt, Homo Sapiens
ccucuuaauguuuauacugauuacuguuacau

SEQ ID NO: 107482 - RNA, 32 nt, Homo Sapiens
gaucacuaagcaugcaguggacauagaagaga

SEQ ID NO: 107483 - RNA, 30 nt, Homo Sapiens
uccaaccugcugcugccgccgccgcgcccc

SEQ ID NO: 107484 - RNA, 28 nt, Homo Sapiens
ugucugggugcuuguaggaugaccugcc

SEQ ID NO: 107485 - RNA, 32 nt, Homo Sapiens
uggugccaccagccuuccugugggccccuuag

SEQ ID NO: 107486 - RNA, 32 nt, Homo Sapiens
uccuguuauucguagcucaauguaaugccuca

SEQ ID NO: 107487 - RNA, 32 nt, Homo Sapiens
gacauuuuauuuuuguuaucucucuucucaca

SEQ ID NO: 107488 - RNA, 32 nt, Homo Sapiens
uuaagcuuucugggaaggcaagcaguauugga

SEQ ID NO: 107489 - RNA, 32 nt, Homo Sapiens
auuucccagcgcgggggcucuggcuuacccug

SEQ ID NO: 107490 - RNA, 32 nt, Homo Sapiens
acuccacaagcacucaggguuccccagcagcu

SEQ ID NO: 107491 - RNA, 32 nt, Homo Sapiens
aacuaaucaaggaauaaauccuaauguucugg

SEQ ID NO: 107492 - RNA, 32 nt, Homo Sapiens
ggggggcaggaagagggggcucagcucaugug

SEQ ID NO: 107493 - RNA, 32 nt, Homo Sapiens
ucuggaauuuaugauacaaagaauaauguaua

SEQ ID NO: 107494 - RNA, 32 nt, Homo Sapiens
ccaugcugcugacgucacauggagcacagaaa

SEQ ID NO: 107495 - RNA, 32 nt, Homo Sapiens
cggggcccggcgcaucucccccggccccacgu

SEQ ID NO: 107496 - RNA, 32 nt, Homo Sapiens
ugcagcuccucaugcuggccuauccugcagug

SEQ ID NO: 107497 - RNA, 32 nt, Homo Sapiens
gggcagggccaugucccuuucuccucuccccu

SEQ ID NO: 107498 - RNA, 32 nt, Homo Sapiens
agaaaaaauauagagggaaaaaaugagacuag

SEQ ID NO: 107499 - RNA, 32 nt, Homo Sapiens
agauggggcaacaugauauuuggguagcugau

SEQ ID NO: 107500 - RNA, 32 nt, Homo Sapiens
gucuggggagacgggguuucgccauguuugcc

SEQ ID NO: 107501 - RNA, 32 nt, Homo Sapiens
agggaacaugccagggcuucagagcaccuucc

SEQ ID NO: 107502 - RNA, 32 nt, Homo Sapiens
uuguuccccagugggguaucuauccuugugca

SEQ ID NO: 107503 - RNA, 32 nt, Homo Sapiens
uggugcccgguggaggaugacacacacgugcc

SEQ ID NO: 107504 - RNA, 32 nt, Homo Sapiens
aggaagggaaaggcccccuagugccugcccca

SEQ ID NO: 107505 - RNA, 32 nt, Homo Sapiens
uccuuuagguuucuuuguuuuguuuuugagca

SEQ ID NO: 107506 - RNA, 32 nt, Homo Sapiens
agagggucugggcagaggagggaccacauucc

SEQ ID NO: 107507 - RNA, 32 nt, Homo Sapiens
ggagaucuaagaugucccagguccugggaagu

SEQ ID NO: 107508 - RNA, 32 nt, Homo Sapiens
ggcuuacuauacacuuuguaaaaaugacucca

SEQ ID NO: 107509 - RNA, 32 nt, Homo Sapiens
uaaauuacauuuguaauuuaaggucuguuugc

SEQ ID NO: 107510 - RNA, 32 nt, Homo Sapiens
agcuaucucagccuaaugcucucccauuacga

SEQ ID NO: 107511 - RNA, 32 nt, Homo Sapiens
cucagaaacuucaggagauguuagaacaaguc

SEQ ID NO: 107512 - RNA, 32 nt, Homo Sapiens
gaagaggacuccuuaaauuugggggacuuaca

SEQ ID NO: 107513 - RNA, 25 nt, Homo Sapiens
augguggagaauaaggagaguuguc

SEQ ID NO: 107514 - RNA, 32 nt, Homo Sapiens
gccgcugucucugcuauuuccauccuccccau

SEQ ID NO: 107515 - RNA, 32 nt, Homo Sapiens
ggcgggccgggcccggggccgcuuggaauggc

SEQ ID NO: 107516 - RNA, 32 nt, Homo Sapiens
agcaggcaaagaguacuauccacauggcaggc

SEQ ID NO: 107517 - RNA, 32 nt, Homo Sapiens
cugcggcccagacguccagggagccggccccu

SEQ ID NO: 107518 - RNA, 32 nt, Homo Sapiens
ggggcccgugccagccggcagcccccaagccu

SEQ ID NO: 107519 - RNA, 31 nt, Homo Sapiens
gcccucugucaucccauucaagauugugcca

SEQ ID NO: 107520 - RNA, 32 nt, Homo Sapiens
ugacugcuguaugcccacuccuccuucucuca

SEQ ID NO: 107521 - RNA, 32 nt, Homo Sapiens
ucugggcguuuaggucagaacuaccccgguag

SEQ ID NO: 107522 - RNA, 32 nt, Homo Sapiens
gcgaggccaagagugcugggcagagaaagcuc

SEQ ID NO: 107523 - RNA, 32 nt, Homo Sapiens
ucccgggcgggaagcgcacgcgcaaacgcggg

SEQ ID NO: 107524 - RNA, 32 nt, Homo Sapiens
aaucauuuucuuuucuaacaaagaacagccug

SEQ ID NO: 107525 - RNA, 32 nt, Homo Sapiens
uuucauuuuaguaagcuauugauaaaauaguu

SEQ ID NO: 107526 - RNA, 32 nt, Homo Sapiens
gagcuaaauugucucaaguucuuuuauucaua

SEQ ID NO: 107527 - RNA, 32 nt, Homo Sapiens
uuaaacuaauauuuuuguuuguugcuuuuggg

SEQ ID NO: 107528 - RNA, 32 nt, Homo Sapiens
ugggauugccucuuggagacauggaauugaag

SEQ ID NO: 107529 - RNA, 32 nt, Homo Sapiens
ucagauuaugaguguucagggguuugauaaaa

SEQ ID NO: 107530 - RNA, 29 nt, Homo Sapiens
aauuaaugggguuuauauuuacauuaucu

SEQ ID NO: 107531 - RNA, 32 nt, Homo Sapiens
auagucacuacaggcaaaaaacaguaagagcu

SEQ ID NO: 107532 - RNA, 32 nt, Homo Sapiens
ggccaggaaaccgagacacagagguaaaguaa

SEQ ID NO: 107533 - RNA, 29 nt, Homo Sapiens
ccucaauaaaguuuguguuuaugccaaaa

SEQ ID NO: 107534 - RNA, 32 nt, Homo Sapiens
aaacuacagagcuagggagagaucugaagaaa

SEQ ID NO: 107535 - RNA, 32 nt, Homo Sapiens
auuccaagaacacacuggauacugcucuuaca

SEQ ID NO: 107536 - RNA, 32 nt, Homo Sapiens
auuuaugcuuaaaauauguaugucuaauugag

SEQ ID NO: 107537 - RNA, 32 nt, Homo Sapiens
ucagagggucgcggccggagggucccggccgg

SEQ ID NO: 107538 - RNA, 32 nt, Homo Sapiens
cucuccaggaccaguggagagccccacccccg

SEQ ID NO: 107539 - RNA, 32 nt, Homo Sapiens
gagcaaggugauucgaauucaguuggaacugg

SEQ ID NO: 107540 - RNA, 32 nt, Homo Sapiens
ggaccccgcuugggcuggccucacccgcacac

SEQ ID NO: 107541 - RNA, 32 nt, Homo Sapiens
ugaacugcagcaugcugggacaauuauuugac

SEQ ID NO: 107542 - RNA, 32 nt, Homo Sapiens
guggcacagcugcuugccauugccugccuuau

SEQ ID NO: 107543 - RNA, 32 nt, Homo Sapiens
ccucuccgugcaaugauuaacccggcggggcg

SEQ ID NO: 107544 - RNA, 32 nt, Homo Sapiens
gaacccuauuccgaguagaaguguguugcaug

SEQ ID NO: 107545 - RNA, 32 nt, Homo Sapiens
acaugggagucuuuuaaaugcugaacuguuac

SEQ ID NO: 107546 - RNA, 32 nt, Homo Sapiens
ccucuguguacaccccacagccucuuaugcug

SEQ ID NO: 107547 - RNA, 32 nt, Homo Sapiens
cuuaaagucaaucaaucccaacuccuguaauc

SEQ ID NO: 107548 - RNA, 32 nt, Homo Sapiens
ucuggggccugcccucccggccggggagccuc

SEQ ID NO: 107549 - RNA, 32 nt, Homo Sapiens
gcaugccuugguuuuggugcugcugcugcuuc

SEQ ID NO: 107550 - RNA, 32 nt, Homo Sapiens
uucagauccuaaggcuugcauucuuacaccaa

SEQ ID NO: 107551 - RNA, 32 nt, Homo Sapiens
uucugaucagcucaaaaagauuuggcuuagug

SEQ ID NO: 107552 - RNA, 32 nt, Homo Sapiens
ucugggcccucccgguguccgucucuuccagg

SEQ ID NO: 107553 - RNA, 31 nt, Homo Sapiens
uguaagggggaaaaacaguauaucaccauug

SEQ ID NO: 107554 - RNA, 32 nt, Homo Sapiens
aaauaccagcaggcagaauggccaguuugcuu

SEQ ID NO: 107555 - RNA, 32 nt, Homo Sapiens
guucucgcaccucugcagccccuagauuccug

SEQ ID NO: 107556 - RNA, 32 nt, Homo Sapiens
uagcucuccgcggguggccagccgcccuggag

SEQ ID NO: 107557 - RNA, 32 nt, Homo Sapiens
uaaauguauucauucuuaauuuauguaagguu

SEQ ID NO: 107558 - RNA, 32 nt, Homo Sapiens
auagguaaggguacuauaaauaugagauuccc

SEQ ID NO: 107559 - RNA, 32 nt, Homo Sapiens
ccggccuucagcguccggucagggaagcgugc

SEQ ID NO: 107560 - RNA, 32 nt, Homo Sapiens
cuguuaagggcucuaagggaauguagacagag

SEQ ID NO: 107561 - RNA, 32 nt, Homo Sapiens
augccauaccucuguuugugauagauacccca

SEQ ID NO: 107562 - RNA, 32 nt, Homo Sapiens
uaguguccuuacaagcuuuucuuaaaacguca

SEQ ID NO: 107563 - RNA, 32 nt, Homo Sapiens
guucauccaguguuuaaauuccuagcaaagug

SEQ ID NO: 107564 - RNA, 32 nt, Homo Sapiens
ucuccgggccgcggccgucugcagagcgagcg

SEQ ID NO: 107565 - RNA, 32 nt, Homo Sapiens
ggcgcguacccgccgcgcucccauccccgccg

SEQ ID NO: 107566 - RNA, 32 nt, Homo Sapiens
gagugugugugcuugaaugugaguguguaugu

SEQ ID NO: 107567 - RNA, 30 nt, Homo Sapiens
uugggcccuacagcgcccugagguagcugg

SEQ ID NO: 107568 - RNA, 32 nt, Homo Sapiens
gaggcagccgccccgcgcugcucagcaggaca

SEQ ID NO: 107569 - RNA, 32 nt, Homo Sapiens
ugcucagggcucgcccccggcgugggcugccc

SEQ ID NO: 107570 - RNA, 32 nt, Homo Sapiens
uucgaaacaucuucuuuuuaugcauuaauaaa

SEQ ID NO: 107571 - RNA, 32 nt, Homo Sapiens
guacaacuuuuaaggacuaauuacugugaugg

SEQ ID NO: 107572 - RNA, 32 nt, Homo Sapiens
caccaagcugucucuccaccguggcuucccuu

SEQ ID NO: 107573 - RNA, 32 nt, Homo Sapiens
ccaggcggguccgggucgcaggaccaucccgg

SEQ ID NO: 107574 - RNA, 32 nt, Homo Sapiens
cauaagcacguauugaaauauagaauucccag

SEQ ID NO: 107575 - RNA, 32 nt, Homo Sapiens
agugaaucauggaagcagcauuacuuuauaug

SEQ ID NO: 107576 - RNA, 32 nt, Homo Sapiens
cccgccgugcccuggcaaccacugaucuuuuu

SEQ ID NO: 107577 - RNA, 32 nt, Homo Sapiens
cgcggcgguagcucgggcucuccggaggaggg

SEQ ID NO: 107578 - RNA, 32 nt, Homo Sapiens
ugcgguuuguugauccccuccucccccacucu

SEQ ID NO: 107579 - RNA, 32 nt, Homo Sapiens
uggagucagagguacagaucuauuguugaucu

SEQ ID NO: 107580 - RNA, 32 nt, Homo Sapiens
cugggcuggucagaaugcugcagcgauacuug

SEQ ID NO: 107581 - RNA, 32 nt, Homo Sapiens
cagaacugacuucucaaauaaagaugcuaaaa

SEQ ID NO: 107582 - RNA, 32 nt, Homo Sapiens
aauaauaaaaauuauucuuuaaaguaaugucu

SEQ ID NO: 107583 - RNA, 32 nt, Homo Sapiens
aggcggucuuucugccgagccucggucccggc

SEQ ID NO: 107584 - RNA, 32 nt, Homo Sapiens
ugcucagaugacuaauauuaugcuauaguuaa

SEQ ID NO: 107585 - RNA, 32 nt, Homo Sapiens
cuguacuuaccuguuuucuccucccccauccc

SEQ ID NO: 107586 - RNA, 32 nt, Homo Sapiens
cauucuucccucuggacuagaguagaaaugca

SEQ ID NO: 107587 - RNA, 32 nt, Homo Sapiens
ugccugguccgcgagaacaagaaugugguggu

SEQ ID NO: 107588 - RNA, 32 nt, Homo Sapiens
ugucuuaguacaccauaaacuggguggauuau

SEQ ID NO: 107589 - RNA, 32 nt, Homo Sapiens
ccauuaucccaggggcaaaaccaccugucccc

SEQ ID NO: 107590 - RNA, 29 nt, Homo Sapiens
ggcacugugggcguguaccaugggaaagu

SEQ ID NO: 107591 - RNA, 32 nt, Homo Sapiens
uggagggcuucacaccaauacccuguguauac

SEQ ID NO: 107592 - RNA, 32 nt, Homo Sapiens
cugaagucacuaguccagcugggugcaggagg

SEQ ID NO: 107593 - RNA, 32 nt, Homo Sapiens
ggccgggugcgguggcucaugccuguaauccc

SEQ ID NO: 107594 - RNA, 32 nt, Homo Sapiens
ggcugggcgcggugguucacgccuguaauccc

SEQ ID NO: 107595 - RNA, 32 nt, Homo Sapiens
ggcugggugcgguggcucacgccuguaauccc

SEQ ID NO: 107596 - RNA, 32 nt, Homo Sapiens
agcugggcacgguggcucacgccuguaauccu

SEQ ID NO: 107597 - RNA, 32 nt, Homo Sapiens
ggcugggcgcgguggcucacgccuguaauccu

SEQ ID NO: 107598 - RNA, 32 nt, Homo Sapiens
gcuguguugacagcugcuaaugaguguguugg

SEQ ID NO: 107599 - RNA, 32 nt, Homo Sapiens
ggggagaagcacggaccgcgcaccucugagcu

SEQ ID NO: 107600 - RNA, 32 nt, Homo Sapiens
ugcagcugccagccccccugcccgugcugcgu

SEQ ID NO: 107601 - RNA, 32 nt, Homo Sapiens
uuauuuccaaauauuguuugucugaugacuuc

SEQ ID NO: 107602 - RNA, 29 nt, Homo Sapiens
gccucagugugucugucuauaaaauggau

SEQ ID NO: 107603 - RNA, 32 nt, Homo Sapiens
ucugucuuaagaucgaugcucuguggaaugag

SEQ ID NO: 107604 - RNA, 32 nt, Homo Sapiens
augagcgcgcugcugcggcugcugcgcacggg

SEQ ID NO: 107605 - RNA, 32 nt, Homo Sapiens
uuguguugguuggcagcaaggcugauccagac

SEQ ID NO: 107606 - RNA, 32 nt, Homo Sapiens
ucccuugacugucagauugaaguaagagcagu

SEQ ID NO: 107607 - RNA, 32 nt, Homo Sapiens
cggaugaccagcguucuguuuucucuucucaa

SEQ ID NO: 107608 - RNA, 32 nt, Homo Sapiens
gagaucauauccucagaccagguggaauuacu

SEQ ID NO: 107609 - RNA, 32 nt, Homo Sapiens
uccccuccgcgguuccuccccgagccgccccc

SEQ ID NO: 107610 - RNA, 32 nt, Homo Sapiens
ccccgcuggguccuagcgccggccccuguuug

SEQ ID NO: 107611 - RNA, 32 nt, Homo Sapiens
ugccuuagaaaaagaaucauggagaaguaugu

SEQ ID NO: 107612 - RNA, 32 nt, Homo Sapiens
cccagggacaaagggugcuucugcgccaggcc

SEQ ID NO: 107613 - RNA, 31 nt, Homo Sapiens
gugcagccagggcaaggaggaguccuccccc

SEQ ID NO: 107614 - RNA, 32 nt, Homo Sapiens
aguggcauuauccaggugacaccugggugagu

SEQ ID NO: 107615 - RNA, 32 nt, Homo Sapiens
cugagcuccgcgggaacccggcgcggcugccu

SEQ ID NO: 107616 - RNA, 32 nt, Homo Sapiens
ccaucagucaacaaguggauaaagaaauugug

SEQ ID NO: 107617 - RNA, 32 nt, Homo Sapiens
cugccucuggcgggccggucacucagaagccu

SEQ ID NO: 107618 - RNA, 32 nt, Homo Sapiens
ugauucuucuauauacauuuuauaauaaauac

SEQ ID NO: 107619 - RNA, 32 nt, Homo Sapiens
cuaaaugauaguguuaagguuuuaauucuuuc

SEQ ID NO: 107620 - RNA, 32 nt, Homo Sapiens
cccuggguucugacuucuuccuccccuugcuu

SEQ ID NO: 107621 - RNA, 32 nt, Homo Sapiens
agcugccugccagcguccucggcccggcccug

SEQ ID NO: 107622 - RNA, 32 nt, Homo Sapiens
ucauauaguuugucucuuugccucuagacuag

SEQ ID NO: 107623 - RNA, 32 nt, Homo Sapiens
uacucgcccucccugggaaccagaguucuggc

SEQ ID NO: 107624 - RNA, 32 nt, Homo Sapiens
auuucuugugacgccuuguuggggagggaaau

SEQ ID NO: 107625 - RNA, 32 nt, Homo Sapiens
ugacuuucuucugaauauuuuaucuuuccuug

SEQ ID NO: 107626 - RNA, 32 nt, Homo Sapiens
ccacuuguggcuaucacuaaguauuguggaaa

SEQ ID NO: 107627 - RNA, 32 nt, Homo Sapiens
ugggagugggucuggauuucugguguguggac

SEQ ID NO: 107628 - RNA, 32 nt, Homo Sapiens
aggcuaguguggaagagguccuguccucaggg

SEQ ID NO: 107629 - RNA, 32 nt, Homo Sapiens
ucagaucggcggccuuucgggcgguggcuugc

SEQ ID NO: 107630 - RNA, 32 nt, Homo Sapiens
aacucucacuuaguauggguaagcaaaaaauu

SEQ ID NO: 107631 - RNA, 32 nt, Homo Sapiens
acugauaaaaucaauauuuugcugaaaugagu

SEQ ID NO: 107632 - RNA, 32 nt, Homo Sapiens
cccuggcugugaaggcagcugcacagggcuag

SEQ ID NO: 107633 - RNA, 32 nt, Homo Sapiens
gcguucucugccaucacccuuuccuugccggc

SEQ ID NO: 107634 - RNA, 32 nt, Homo Sapiens
cuaaaguuauuuaugaugcuuagccauaguau

SEQ ID NO: 107635 - RNA, 32 nt, Homo Sapiens
uuuuuaacuuuuuuaaauuuugaugugaaguu

SEQ ID NO: 107636 - RNA, 32 nt, Homo Sapiens
uuugcugggguaaaaaggaugaaaguuugaga

SEQ ID NO: 107637 - RNA, 32 nt, Homo Sapiens
acugacaaggucauuuucuaccagagacaauu

SEQ ID NO: 107638 - RNA, 32 nt, Homo Sapiens
uguuucuccucuaggguauugggaugcauguu

SEQ ID NO: 107639 - RNA, 32 nt, Homo Sapiens
cgcgugaucguagagcacgcccggggcccgcg

SEQ ID NO: 107640 - RNA, 32 nt, Homo Sapiens
cccccaaggacugcgcagcaucagcucuuggu

SEQ ID NO: 107641 - RNA, 32 nt, Homo Sapiens
uuucuauauggacauagcacagaugaaccaaa

SEQ ID NO: 107642 - RNA, 32 nt, Homo Sapiens
gcuggacaggggcuacuggguuuggccuggac

SEQ ID NO: 107643 - RNA, 32 nt, Homo Sapiens
ugcuugauuuuuccuaucaaguuacuuuucaa

SEQ ID NO: 107644 - RNA, 32 nt, Homo Sapiens
agccaagaugguuuuucuuccuucagugagau

SEQ ID NO: 107645 - RNA, 32 nt, Homo Sapiens
guuauuaaacaaauaauuuagauggugaaaaa

SEQ ID NO: 107646 - RNA, 32 nt, Homo Sapiens
ggcccggcgcuccucaagauggcugccgacag

SEQ ID NO: 107647 - RNA, 32 nt, Homo Sapiens
ccauaccacacuggggggucugagccaccccc

SEQ ID NO: 107648 - RNA, 32 nt, Homo Sapiens
uugaugaucagaggucuugaggucuugacauc

SEQ ID NO: 107649 - RNA, 32 nt, Homo Sapiens
guggcaacccucacuguguuggaggauggcac

SEQ ID NO: 107650 - RNA, 32 nt, Homo Sapiens
agaaguagcauuaggaucuucgucccguucuc

SEQ ID NO: 107651 - RNA, 32 nt, Homo Sapiens
ggaagucgacgaaauaaaauuaaagcccuaca

SEQ ID NO: 107652 - RNA, 32 nt, Homo Sapiens
gcaguccuggguccuccuuucugagggcccgu

SEQ ID NO: 107653 - RNA, 32 nt, Homo Sapiens
gcacacacugguucuccucuuuuggguguggg

SEQ ID NO: 107654 - RNA, 32 nt, Homo Sapiens
acuuccacccucaaguggaucgaggugggggu

SEQ ID NO: 107655 - RNA, 32 nt, Homo Sapiens
ggaagcugagcagggcggcggcggcgguggaa

SEQ ID NO: 107656 - RNA, 32 nt, Homo Sapiens
gugcuuagaaaguuauuguguugccuuagcac

SEQ ID NO: 107657 - RNA, 32 nt, Homo Sapiens
cacugcacuccagccugggugaugaagacgag

SEQ ID NO: 107658 - RNA, 32 nt, Homo Sapiens
cuuuuccagaagaucugaaaucauuggaccug

SEQ ID NO: 107659 - RNA, 32 nt, Homo Sapiens
acaugugcugugcuguuugucuccucgacagg

SEQ ID NO: 107660 - RNA, 32 nt, Homo Sapiens
guuuagguuuggugcuggcccucgcacccaaa

SEQ ID NO: 107661 - RNA, 32 nt, Homo Sapiens
ggguagugguggcaggacaagagaaggcauug

SEQ ID NO: 107662 - RNA, 32 nt, Homo Sapiens
cccgccccagcuugugaggggggcgccuccuc

SEQ ID NO: 107663 - RNA, 32 nt, Homo Sapiens
gguuccugcugaccuggaaacaucuuaaaugg

SEQ ID NO: 107664 - RNA, 32 nt, Homo Sapiens
uccuuuuccccauuuuauucaucagaagccag

SEQ ID NO: 107665 - RNA, 32 nt, Homo Sapiens
gaugaggacaaagagggacagagagguuuaga

SEQ ID NO: 107666 - RNA, 32 nt, Homo Sapiens
ggugaguccugccuuuggcaaacacgcaccug

SEQ ID NO: 107667 - RNA, 32 nt, Homo Sapiens
aguuauuaguggcuauggacuugcuugcaagg

SEQ ID NO: 107668 - RNA, 32 nt, Homo Sapiens
ccagccugcaggucuucuucuuuuuugaugua

SEQ ID NO: 107669 - RNA, 32 nt, Homo Sapiens
gcuaggcguggugggcaguauaaagaaaucug

SEQ ID NO: 107670 - RNA, 32 nt, Homo Sapiens
gggucagagccaucguguagauugauucauuc

SEQ ID NO: 107671 - RNA, 32 nt, Homo Sapiens
ucgccccccggagcccgcaccacagcccggcc

SEQ ID NO: 107672 - RNA, 32 nt, Homo Sapiens
agaggucauuuugggggcgugcaccgcuguuc

SEQ ID NO: 107673 - RNA, 32 nt, Homo Sapiens
acaccauacaaagggagaugauggccauuccg

SEQ ID NO: 107674 - RNA, 32 nt, Homo Sapiens
uggugauuuuuuuuuucuuuuuacuguugaac

SEQ ID NO: 107675 - RNA, 32 nt, Homo Sapiens
uuaacaaagggagccgauaccgaccggcgugg

SEQ ID NO: 107676 - RNA, 32 nt, Homo Sapiens
gcuccggaccccgccgagccugaggcucgggg

SEQ ID NO: 107677 - RNA, 32 nt, Homo Sapiens
ggggaugccugccaagguuagccaugggcgag

SEQ ID NO: 107678 - RNA, 32 nt, Homo Sapiens
auacaugccuucuauauggaacauggcagaaa

SEQ ID NO: 107679 - RNA, 32 nt, Homo Sapiens
uggccccggaagcccccacgggcucuaccuga

SEQ ID NO: 107680 - RNA, 32 nt, Homo Sapiens
agaauuucacacugugaauccacguuuacaac

SEQ ID NO: 107681 - RNA, 32 nt, Homo Sapiens
guggcagacaccuguagucccagcuacuugga

SEQ ID NO: 107682 - RNA, 32 nt, Homo Sapiens
uggguccucuaacuaggacucccucauuccua

SEQ ID NO: 107683 - RNA, 32 nt, Homo Sapiens
gcccuccgagucaucuucccagcccucaagga

SEQ ID NO: 107684 - RNA, 31 nt, Homo Sapiens
gauguggagacugauggccaggcaaguggga

SEQ ID NO: 107685 - RNA, 32 nt, Homo Sapiens
gauacugauuggaagcgacuuguggcugcugg

SEQ ID NO: 107686 - RNA, 32 nt, Homo Sapiens
gcguucgggagcggcccgggagcggaaagcgg

SEQ ID NO: 107687 - RNA, 32 nt, Homo Sapiens
uggagucacagaggaaauauuuuucuggcuac

SEQ ID NO: 107688 - RNA, 32 nt, Homo Sapiens
ucuucucaagacguggggggaaauuaucucau

SEQ ID NO: 107689 - RNA, 32 nt, Homo Sapiens
cuucggucugcgcagccgcgggaagccgugcc

SEQ ID NO: 107690 - RNA, 32 nt, Homo Sapiens
uaacaguggucgcuucuccccccuacucccgc

SEQ ID NO: 107691 - RNA, 32 nt, Homo Sapiens
cucagggcccagcagagaguccguaggcuuga

SEQ ID NO: 107692 - RNA, 32 nt, Homo Sapiens
cggacgugguguuauguggucauuucagcccu

SEQ ID NO: 107693 - RNA, 32 nt, Homo Sapiens
uggggugugaggagugguucugcagcuugagu

SEQ ID NO: 107694 - RNA, 32 nt, Homo Sapiens
ccgcgggcuggaagaggcggcggcgugaugcg

SEQ ID NO: 107695 - RNA, 32 nt, Homo Sapiens
ggaaaccugauaugauacauauuuucaguagu

SEQ ID NO: 107696 - RNA, 32 nt, Homo Sapiens
gaggagaucuucaucugagacuugucuuucua

SEQ ID NO: 107697 - RNA, 32 nt, Homo Sapiens
cauguucuuuugguaagcacaccugggggcuc

SEQ ID NO: 107698 - RNA, 32 nt, Homo Sapiens
aaguggaccugcucagcccacccccacccauc

SEQ ID NO: 107699 - RNA, 32 nt, Homo Sapiens
acacaauuucuuaaauuuuuugguaaucuuuu

SEQ ID NO: 107700 - RNA, 32 nt, Homo Sapiens
cagugccucgcaccccagcacgcccgccucug

SEQ ID NO: 107701 - RNA, 32 nt, Homo Sapiens
cagcgcggccuggacgcggggcacucucaggg

SEQ ID NO: 107702 - RNA, 32 nt, Homo Sapiens
uuaaaggaacgacuguuuaauguacuugaugg

SEQ ID NO: 107703 - RNA, 32 nt, Homo Sapiens
cccugggugucgcucuccccuccugcagguca

SEQ ID NO: 107704 - RNA, 32 nt, Homo Sapiens
aacaccgguguugggcagaauucugaggugac

SEQ ID NO: 107705 - RNA, 32 nt, Homo Sapiens
gacucuccgagccgcauccugggcuuguggga

SEQ ID NO: 107706 - RNA, 32 nt, Homo Sapiens
uggaggccaugaacguggggcccccggagcag

SEQ ID NO: 107707 - RNA, 32 nt, Homo Sapiens
cauggcggagccaggaagccgggaguccgaga

SEQ ID NO: 107708 - RNA, 32 nt, Homo Sapiens
ggcccggauggggcugcagaggacgcgcccgc

SEQ ID NO: 107709 - RNA, 32 nt, Homo Sapiens
ggcagcauggugggcuggccuggguguggagu

SEQ ID NO: 107710 - RNA, 32 nt, Homo Sapiens
caguggagccagcagugcccccagcacugucc

SEQ ID NO: 107711 - RNA, 32 nt, Homo Sapiens
ggaggugagcgcgggugccuuggccgccugca

SEQ ID NO: 107712 - RNA, 32 nt, Homo Sapiens
gagacauggaaaugaaaauuauuuuaugucua

SEQ ID NO: 107713 - RNA, 32 nt, Homo Sapiens
gcggcggcccuucucagccccucccuccaugg

SEQ ID NO: 107714 - RNA, 32 nt, Homo Sapiens
gggacccaggggcagcagcaguccaggugcca

SEQ ID NO: 107715 - RNA, 32 nt, Homo Sapiens
ugcaggcaugagccaccacucccggccugcuu

SEQ ID NO: 107716 - RNA, 32 nt, Homo Sapiens
gacagcagcagcagcgcgucuccuucaggugg

SEQ ID NO: 107717 - RNA, 31 nt, Homo Sapiens
gccuugaaauaaaaugguaucuguauccauu

SEQ ID NO: 107718 - RNA, 32 nt, Homo Sapiens
uagaacaaaaguggaauaaauaaaaacuaacu

SEQ ID NO: 107719 - RNA, 32 nt, Homo Sapiens
ugugugugucuguuucugggcugucuauucua

SEQ ID NO: 107720 - RNA, 32 nt, Homo Sapiens
auauaaacccgcgcgcccgccaggcgcugcgg

SEQ ID NO: 107721 - RNA, 32 nt, Homo Sapiens
uuguaaguuuaguauaaauauaucuagacauu

SEQ ID NO: 107722 - RNA, 32 nt, Homo Sapiens
caugugccacuacccggccaauuuuguauuuu

SEQ ID NO: 107723 - RNA, 32 nt, Homo Sapiens
ugcccuggccccagcccuacucuguguaauag

SEQ ID NO: 107724 - RNA, 32 nt, Homo Sapiens
uggcaucuggucuugacacugcagagaaggcc

SEQ ID NO: 107725 - RNA, 32 nt, Homo Sapiens
cuuuugaggacuugauccuucuccaggaagaa

SEQ ID NO: 107726 - RNA, 32 nt, Homo Sapiens
aaagaacucaggacauauuaaaaaauaaacug

SEQ ID NO: 107727 - RNA, 32 nt, Homo Sapiens
caggagugaagaacccugggggccuguagcca

SEQ ID NO: 107728 - RNA, 32 nt, Homo Sapiens
ccaggcgccaaauaaacccugguugggaaaaa

SEQ ID NO: 107729 - RNA, 32 nt, Homo Sapiens
gacagaagaacaaaagcauuuggaaguaacag

SEQ ID NO: 107730 - RNA, 32 nt, Homo Sapiens
uggaaaaaggauucucuaaaaauaaaugacac

SEQ ID NO: 107731 - RNA, 32 nt, Homo Sapiens
ggaaaguagugggauacuuggaaucaaggcau

SEQ ID NO: 107732 - RNA, 32 nt, Homo Sapiens
aagaauaaaagcuggagagagagugaagugaa

SEQ ID NO: 107733 - RNA, 32 nt, Homo Sapiens
gccguuggccacgucuuccuucugccugagcu

SEQ ID NO: 107734 - RNA, 32 nt, Homo Sapiens
guaagugcaauaauaugaaauagccuguacau

SEQ ID NO: 107735 - RNA, 32 nt, Homo Sapiens
gcaggccaggcccccgucuuccgccugccucu

SEQ ID NO: 107736 - RNA, 32 nt, Homo Sapiens
gaaugcauuccuaaguuuucauuugaguaccc

SEQ ID NO: 107737 - RNA, 32 nt, Homo Sapiens
cccaggccccacuuacguaaaacauuucaggg

SEQ ID NO: 107738 - RNA, 32 nt, Homo Sapiens
uccaaacuccucaacugggaaccuucauaugu

SEQ ID NO: 107739 - RNA, 32 nt, Homo Sapiens
ucaugagaguaaacuuuaggccuguugacugu

SEQ ID NO: 107740 - RNA, 32 nt, Homo Sapiens
augaaucucccucucucugggugguuccacau

SEQ ID NO: 107741 - RNA, 32 nt, Homo Sapiens
cugucagcccucacucugaggcgagacggcuc

SEQ ID NO: 107742 - RNA, 31 nt, Homo Sapiens
aaucuguacuguaaauaaaaaauauuaacac

SEQ ID NO: 107743 - RNA, 32 nt, Homo Sapiens
cgggcccaacuucugcuuugcacuauguucac

SEQ ID NO: 107744 - RNA, 32 nt, Homo Sapiens
gugugcaggugccuuuggggccccauagaggc

SEQ ID NO: 107745 - RNA, 32 nt, Homo Sapiens
cccugacccaagucggggugcacucaggacca

SEQ ID NO: 107746 - RNA, 32 nt, Homo Sapiens
gcccgcuaggguggaggagaggagugggguuu

SEQ ID NO: 107747 - RNA, 32 nt, Homo Sapiens
cguuaacguacacacacaaacacacgcccucc

SEQ ID NO: 107748 - RNA, 32 nt, Homo Sapiens
gccgcaguucuuucuuuuuuuuuucuuuauuc

SEQ ID NO: 107749 - RNA, 32 nt, Homo Sapiens
cacacccauuuuccucacuuucccugagucuc

SEQ ID NO: 107750 - RNA, 32 nt, Homo Sapiens
ugcuuuguuuacaacgaaugucuuacaaaugc

SEQ ID NO: 107751 - RNA, 32 nt, Homo Sapiens
cagcccccaagccuagaaggaccucuagucuc

SEQ ID NO: 107752 - RNA, 32 nt, Homo Sapiens
caguggugaagcaaguaggaccacugaugugu

SEQ ID NO: 107753 - RNA, 28 nt, Homo Sapiens
uaucaguugguggauaugugugauagcu

SEQ ID NO: 107754 - RNA, 32 nt, Homo Sapiens
cccgggccugggcuguccuuucugacgcacug

SEQ ID NO: 107755 - RNA, 32 nt, Homo Sapiens
cuacacccacccaaaagucacccagggacacu

SEQ ID NO: 107756 - RNA, 32 nt, Homo Sapiens
acuacggaauaguuggcuaggaccccuccaug

SEQ ID NO: 107757 - RNA, 32 nt, Homo Sapiens
uaugugcuaggauaucauauuuaaaaggacaa

SEQ ID NO: 107758 - RNA, 32 nt, Homo Sapiens
uauuuuauuguacaguuauaaauauguaaaca

SEQ ID NO: 107759 - RNA, 31 nt, Homo Sapiens
cuagugaauaacaugagguguuuuaaaguua

SEQ ID NO: 107760 - RNA, 30 nt, Homo Sapiens
gcaaaugucuguguuaaaacagcucugcug

SEQ ID NO: 107761 - RNA, 32 nt, Homo Sapiens
ugagguccugggggccugaccucccccuccuu

SEQ ID NO: 107762 - RNA, 32 nt, Homo Sapiens
uagcgggucucccggcggcccggccccgcguc

SEQ ID NO: 107763 - RNA, 32 nt, Homo Sapiens
gcuacaacagcgccagccuccacaggcauuag

SEQ ID NO: 107764 - RNA, 32 nt, Homo Sapiens
acuaugccucuguugauucagauagaucaauu

SEQ ID NO: 107765 - RNA, 32 nt, Homo Sapiens
ugcuuuucauuccccacuucucucuucacaau

SEQ ID NO: 107766 - RNA, 32 nt, Homo Sapiens
cgccccgagcagccacgaugcuccuggacgcc

SEQ ID NO: 107767 - RNA, 32 nt, Homo Sapiens
uuaaauuguaaaacuccaaggugauguuguac

SEQ ID NO: 107768 - RNA, 32 nt, Homo Sapiens
uauaaauguauaggaacauuaaaagaaacuug

SEQ ID NO: 107769 - RNA, 32 nt, Homo Sapiens
uucaccauuugugaggagaaauacuaacugga

SEQ ID NO: 107770 - RNA, 32 nt, Homo Sapiens
agcguuuucaguggaguuggcuccuccccgca

SEQ ID NO: 107771 - RNA, 32 nt, Homo Sapiens
caugaccggcgccaucagcuaccacccguacg

SEQ ID NO: 107772 - RNA, 32 nt, Homo Sapiens
augaagaguauguuuuugauugaaaccgaguc

SEQ ID NO: 107773 - RNA, 32 nt, Homo Sapiens
uuuuuccuucuuuguuuuaacaaauggaucca

SEQ ID NO: 107774 - RNA, 32 nt, Homo Sapiens
gggcggacugauaacauuuaaaaaauaauugu

SEQ ID NO: 107775 - RNA, 32 nt, Homo Sapiens
aggcucagggucucaccucacauugucccuac

SEQ ID NO: 107776 - RNA, 32 nt, Homo Sapiens
agaaauaaugaaaaguguguucauccugcagg

SEQ ID NO: 107777 - RNA, 32 nt, Homo Sapiens
cgcccuccgcgcccgcgccgcuagcaugaccg

SEQ ID NO: 107778 - RNA, 30 nt, Homo Sapiens
gguucuggagagagggugggucccgggcca

SEQ ID NO: 107779 - RNA, 32 nt, Homo Sapiens
uggguuaaacacaaauagaacauuccauuuga

SEQ ID NO: 107780 - RNA, 32 nt, Homo Sapiens
uauaacauggugauugaguugaacacaaucaa

SEQ ID NO: 107781 - RNA, 32 nt, Homo Sapiens
aguugaccuucacagcaccugccccucacacc

SEQ ID NO: 107782 - RNA, 32 nt, Homo Sapiens
uauguaccaagagcuuuuaaucuaugcaaacc

SEQ ID NO: 107783 - RNA, 32 nt, Homo Sapiens
guacccugccccaccaggguccuuagggaugc

SEQ ID NO: 107784 - RNA, 32 nt, Homo Sapiens
aaaccaggucucacuauguugcccaggccggu

SEQ ID NO: 107785 - RNA, 32 nt, Homo Sapiens
agagcuggaauuugaggugcugaucugugguc

SEQ ID NO: 107786 - RNA, 29 nt, Homo Sapiens
cuuuauaugacuuucucugaguugggcaa

SEQ ID NO: 107787 - RNA, 32 nt, Homo Sapiens
cccaaauguuuauguauuagaaacuuaauccc

SEQ ID NO: 107788 - RNA, 32 nt, Homo Sapiens
guacugugucucauggauuuggcacuagccaa

SEQ ID NO: 107789 - RNA, 32 nt, Homo Sapiens
uaaauuaauggacuuguuaaacuuuuggaaaa

SEQ ID NO: 107790 - RNA, 32 nt, Homo Sapiens
ccggggugcuuggagcgggggacgccaggcgu

SEQ ID NO: 107791 - RNA, 32 nt, Homo Sapiens
aagagcuucuguggccuucucugaggauuguc

SEQ ID NO: 107792 - RNA, 32 nt, Homo Sapiens
augacaaaaugaaaaggcaaccuacgggaugg

SEQ ID NO: 107793 - RNA, 32 nt, Homo Sapiens
agaugcgaaaaccugaugagggcaaaccaguu

SEQ ID NO: 107794 - RNA, 32 nt, Homo Sapiens
agcccagucagcagaccaccccggcccuggua

SEQ ID NO: 107795 - RNA, 32 nt, Homo Sapiens
gcguacacaauucccuggccaagccuggcucg

SEQ ID NO: 107796 - RNA, 32 nt, Homo Sapiens
auuuuugugugucaauuacaauuaaaagcaca

SEQ ID NO: 107797 - RNA, 32 nt, Homo Sapiens
auaugacaguccagcaucgaugccugugcccu

SEQ ID NO: 107798 - RNA, 32 nt, Homo Sapiens
auagaaaaucauguauaguauuucauaguaau

SEQ ID NO: 107799 - RNA, 32 nt, Homo Sapiens
uuugucccacuuuucuuuguuucuucucacua

SEQ ID NO: 107800 - RNA, 30 nt, Homo Sapiens
ggacguccgugugugccgccucuguuuccu

SEQ ID NO: 107801 - RNA, 32 nt, Homo Sapiens
ucuucuucuugcucuuuuuuuuuuacuugaau

SEQ ID NO: 107802 - RNA, 32 nt, Homo Sapiens
ucuggaaaauuccagagcuauuauuuacuccu

SEQ ID NO: 107803 - RNA, 32 nt, Homo Sapiens
uuccccuagguggucucauaauuccauuugug

SEQ ID NO: 107804 - RNA, 32 nt, Homo Sapiens
ucccacguuaaauaaacuuuggcuguugucua

SEQ ID NO: 107805 - RNA, 32 nt, Homo Sapiens
auuauaggaagacauaauuccagugccuuuau

SEQ ID NO: 107806 - RNA, 32 nt, Homo Sapiens
gguccggauggaguuuccccucugcggcugcc

SEQ ID NO: 107807 - RNA, 32 nt, Homo Sapiens
agcuaaaccaaaucauuuuaugguaugcagag

SEQ ID NO: 107808 - RNA, 32 nt, Homo Sapiens
ccuggagcaccguggggugcugcuggaggaga

SEQ ID NO: 107809 - RNA, 32 nt, Homo Sapiens
ugguuuuaugaugggagggagcuccucagccu

SEQ ID NO: 107810 - RNA, 32 nt, Homo Sapiens
cucuggugcgcaguugguuuugaccgugggac

SEQ ID NO: 107811 - RNA, 32 nt, Homo Sapiens
gaccuggagagccgggaggccaugguggcauu

SEQ ID NO: 107812 - RNA, 32 nt, Homo Sapiens
aauccagcccucgcagggccuggagugaccua

SEQ ID NO: 107813 - RNA, 32 nt, Homo Sapiens
aucugucugaugcauguaaaccacugaagaag

SEQ ID NO: 107814 - RNA, 32 nt, Homo Sapiens
cucccaggccccagcgucuucuccccagcccc

SEQ ID NO: 107815 - RNA, 32 nt, Homo Sapiens
ucauguugcugaaagcuguuuggaagaaacag

SEQ ID NO: 107816 - RNA, 32 nt, Homo Sapiens
uccaaagggcaguaaaguuuucgugccgguuu

SEQ ID NO: 107817 - RNA, 32 nt, Homo Sapiens
gggcuuuuguuaccaaaggugggguagggacg

SEQ ID NO: 107818 - RNA, 32 nt, Homo Sapiens
gcugggucuucagaccccuggcucaccaugug

SEQ ID NO: 107819 - RNA, 32 nt, Homo Sapiens
caggucgagaaaaugucuuuccuuucacuugc

SEQ ID NO: 107820 - RNA, 32 nt, Homo Sapiens
accaggccaccucuccuucaguguccuuuuuc

SEQ ID NO: 107821 - RNA, 32 nt, Homo Sapiens
gcaaucauuuccccucccgucuuccuccuccc

SEQ ID NO: 107822 - RNA, 32 nt, Homo Sapiens
cuccuuccuguaguaacagccgccgcugccgc

SEQ ID NO: 107823 - RNA, 32 nt, Homo Sapiens
ccccagauauuguugaauauucaacaauaaca

SEQ ID NO: 107824 - RNA, 32 nt, Homo Sapiens
ccuucuagcucuaagacuuugcagcauucagc

SEQ ID NO: 107825 - RNA, 32 nt, Homo Sapiens
aagguggcaauuggggcggagccccggcucuu

SEQ ID NO: 107826 - RNA, 32 nt, Homo Sapiens
cccucacgcccggcgagcccgcgaggucacua

SEQ ID NO: 107827 - RNA, 32 nt, Homo Sapiens
ggcguguaccaugggaaagugauucaacacag

SEQ ID NO: 107828 - RNA, 25 nt, Homo Sapiens
augcacgcccacugccugcccuucc

SEQ ID NO: 107829 - RNA, 32 nt, Homo Sapiens
agaguauuccuccuuuuuucaugcucagacug

SEQ ID NO: 107830 - RNA, 32 nt, Homo Sapiens
aggguugggccugcuguuguggaccggggguc

SEQ ID NO: 107831 - RNA, 32 nt, Homo Sapiens
cagcuccacucauagauuuaaacuuuuauuuu

SEQ ID NO: 107832 - RNA, 32 nt, Homo Sapiens
cucccuacggugccgccgcuccuccugcagcc

SEQ ID NO: 107833 - RNA, 32 nt, Homo Sapiens
caggggucugugcgguggggcugggggauucc

SEQ ID NO: 107834 - RNA, 32 nt, Homo Sapiens
auagugggcucuggcuuuucuugaauagauau

SEQ ID NO: 107835 - RNA, 32 nt, Homo Sapiens
ggaccuuggaggagauugccugcugcaccccu

SEQ ID NO: 107836 - RNA, 32 nt, Homo Sapiens
ugacacccaagccggacagggucacacugggu

SEQ ID NO: 107837 - RNA, 32 nt, Homo Sapiens
uuggcaaauaagguuuggaagcagaagagcaa

SEQ ID NO: 107838 - RNA, 32 nt, Homo Sapiens
uccccgaggugccacaccccucccugggaacc

SEQ ID NO: 107839 - RNA, 32 nt, Homo Sapiens
auuuccccccaacugccaggaccuccaaacgg

SEQ ID NO: 107840 - RNA, 32 nt, Homo Sapiens
gcgcgccggccgccagacucggccugugggcg

SEQ ID NO: 107841 - RNA, 32 nt, Homo Sapiens
gacgcugcacgagccguggaccaagaggcuga

SEQ ID NO: 107842 - RNA, 32 nt, Homo Sapiens
guuaagaagacuauuuaaaaauaguaauuaca

SEQ ID NO: 107843 - RNA, 32 nt, Homo Sapiens
agagaugcucaccaagcuucuauuuaucuaau

SEQ ID NO: 107844 - RNA, 32 nt, Homo Sapiens
uauauuauagucaucuguuaugcugugaaauu

SEQ ID NO: 107845 - RNA, 32 nt, Homo Sapiens
uaugaucugcaccccccuccucccucuaccuc

SEQ ID NO: 107846 - RNA, 32 nt, Homo Sapiens
uggcuccgacguagcucgcagcuccccagucu

SEQ ID NO: 107847 - RNA, 32 nt, Homo Sapiens
accugcccccucccacacccgccccggguccg

SEQ ID NO: 107848 - RNA, 32 nt, Homo Sapiens
ccccaggcucgcugccucuccuccccaacugc

SEQ ID NO: 107849 - RNA, 32 nt, Homo Sapiens
ucuuucauucucugugugacagcccucugaau

SEQ ID NO: 107850 - RNA, 32 nt, Homo Sapiens
uugagguuuuuauuuuuguuuacuucagauac

SEQ ID NO: 107851 - RNA, 32 nt, Homo Sapiens
uucuaccggacuuuuccucuucugccagaggu

SEQ ID NO: 107852 - RNA, 32 nt, Homo Sapiens
cagaaaaaaugaaugaacucaccuugacguca

SEQ ID NO: 107853 - RNA, 32 nt, Homo Sapiens
uugccuucugaagaggagggaguauuagauua

SEQ ID NO: 107854 - RNA, 28 nt, Homo Sapiens
caucagucugcaggaccaagcgguggug

SEQ ID NO: 107855 - RNA, 32 nt, Homo Sapiens
agaaaaguuguguaagcgccugcguucuucug

SEQ ID NO: 107856 - RNA, 32 nt, Homo Sapiens
auuuggcugugcucaguuacuauauuaagauc

SEQ ID NO: 107857 - RNA, 32 nt, Homo Sapiens
acuaaauuugucuuucaagugaaaccagcuuc

SEQ ID NO: 107858 - RNA, 32 nt, Homo Sapiens
uauggcgggaggugagacauguuugcagcaau

SEQ ID NO: 107859 - RNA, 32 nt, Homo Sapiens
guauaguacauuuucccuuccauuuaaaaugu

SEQ ID NO: 107860 - RNA, 32 nt, Homo Sapiens
guccuuucccuacuccaugggcuggcauggug

SEQ ID NO: 107861 - RNA, 32 nt, Homo Sapiens
ugccauuacgggagcuguggacagagcucccu

SEQ ID NO: 107862 - RNA, 32 nt, Homo Sapiens
cucaccaaagauuuccaugaaauguaauugcu

SEQ ID NO: 107863 - RNA, 32 nt, Homo Sapiens
uagagaguauuagaugcuguuaaaagaggagg

SEQ ID NO: 107864 - RNA, 32 nt, Homo Sapiens
gguugcucuggggauggguuuauuuaagggag

SEQ ID NO: 107865 - RNA, 32 nt, Homo Sapiens
gcccagggcagacagaccucacgacagcacug

SEQ ID NO: 107866 - RNA, 32 nt, Homo Sapiens
aacacuuuuuguugucuguguugagucacuga

SEQ ID NO: 107867 - RNA, 32 nt, Homo Sapiens
auuuuuguccaaaccaaccgcacaugcagaug

SEQ ID NO: 107868 - RNA, 32 nt, Homo Sapiens
cguggcugcaagaugguggcagcagcuccaac

SEQ ID NO: 107869 - RNA, 32 nt, Homo Sapiens
uugcaggcgugugccaccacgcccggcuaauu

SEQ ID NO: 107870 - RNA, 32 nt, Homo Sapiens
cgauggcaagcaggcggcguugcugggacugu

SEQ ID NO: 107871 - RNA, 32 nt, Homo Sapiens
ugucaccccccucucccuccagcaugggccug

SEQ ID NO: 107872 - RNA, 32 nt, Homo Sapiens
uucauuucccucacugggaacaggaugccuag

SEQ ID NO: 107873 - RNA, 32 nt, Homo Sapiens
gcugucuagguccguccggugugucagauuuc

SEQ ID NO: 107874 - RNA, 32 nt, Homo Sapiens
cacuucccgggcacguucgggcggggcgauug

SEQ ID NO: 107875 - RNA, 32 nt, Homo Sapiens
ucgcucuggugcccgucugugugggagccccc

SEQ ID NO: 107876 - RNA, 32 nt, Homo Sapiens
cacauaauuccauuuugaaaauccauucuuaa

SEQ ID NO: 107877 - RNA, 32 nt, Homo Sapiens
uaaaaggaaggggauaugcuaaggcucagcaa

SEQ ID NO: 107878 - RNA, 32 nt, Homo Sapiens
acuuugauuucuuuaaaaaacaucuuuucaau

SEQ ID NO: 107879 - RNA, 32 nt, Homo Sapiens
cccugugguggagggcgggcugccuuuccagg

SEQ ID NO: 107880 - RNA, 32 nt, Homo Sapiens
uggcuaagcugggaccggcaguccucacaggg

SEQ ID NO: 107881 - RNA, 32 nt, Homo Sapiens
guauugagcacuguaggcaagagggaagaaag

SEQ ID NO: 107882 - RNA, 32 nt, Homo Sapiens
cccggaugugaauggcaugcugaaacucgaag

SEQ ID NO: 107883 - RNA, 32 nt, Homo Sapiens
acuccagacuguccuccaccccagacuuccgc

SEQ ID NO: 107884 - RNA, 32 nt, Homo Sapiens
augguuacaucauuugaacucucugacaacac

SEQ ID NO: 107885 - RNA, 32 nt, Homo Sapiens
uagacaucaacaagagccaggugcuggaggag

SEQ ID NO: 107886 - RNA, 32 nt, Homo Sapiens
acucagauuuugugaggggugcuugaggucau

SEQ ID NO: 107887 - RNA, 32 nt, Homo Sapiens
uggguccucccucuagccgaggaggccaccug

SEQ ID NO: 107888 - RNA, 32 nt, Homo Sapiens
aaaauacuuugucacuuuauaagcaaaaugca

SEQ ID NO: 107889 - RNA, 32 nt, Homo Sapiens
guagcugauuuucagcuuucuguggauucuuu

SEQ ID NO: 107890 - RNA, 32 nt, Homo Sapiens
agcagcaaguaacccuucuccucccucccccc

SEQ ID NO: 107891 - RNA, 32 nt, Homo Sapiens
cggagguccccuuuuccaagaugcagauacuu

SEQ ID NO: 107892 - RNA, 32 nt, Homo Sapiens
uaugauucagauuguuaucuaucaacuauaag

SEQ ID NO: 107893 - RNA, 32 nt, Homo Sapiens
caaaaagaaagucuucugggauuuauagauca

SEQ ID NO: 107894 - RNA, 32 nt, Homo Sapiens
agugugggacacgguuuaacugucccagcgac

SEQ ID NO: 107895 - RNA, 32 nt, Homo Sapiens
agggcuuauauggccuggcccagggcgccaug

SEQ ID NO: 107896 - RNA, 32 nt, Homo Sapiens
ccucccgauggaagaucugauggacguggaca

SEQ ID NO: 107897 - RNA, 32 nt, Homo Sapiens
aucacugauuuucagucuuuuccauuucuuuc

SEQ ID NO: 107898 - RNA, 32 nt, Homo Sapiens
uuaaugccaaguaacaaugcaugcuuuggaaa

SEQ ID NO: 107899 - RNA, 32 nt, Homo Sapiens
uucuaaagcugauaaaguguguagccagaaga

SEQ ID NO: 107900 - RNA, 32 nt, Homo Sapiens
uguacagcuaaaucaaauguaauuuauagagu

SEQ ID NO: 107901 - RNA, 32 nt, Homo Sapiens
gaugaggacagagggcacaugaacagcuugcc

SEQ ID NO: 107902 - RNA, 32 nt, Homo Sapiens
ggcacccugugcugcagggagaaagggcugau

SEQ ID NO: 107903 - RNA, 32 nt, Homo Sapiens
ccgcacugggaaacacagaugaggaaagucaa

SEQ ID NO: 107904 - RNA, 32 nt, Homo Sapiens
gagucguguuccugacaggaccacgugggcuu

SEQ ID NO: 107905 - RNA, 32 nt, Homo Sapiens
ggaagcugacuucugaagaugacugccucacc

SEQ ID NO: 107906 - RNA, 32 nt, Homo Sapiens
cuuccaacccucaccuucccccggccuggccc

SEQ ID NO: 107907 - RNA, 32 nt, Homo Sapiens
ggaaacuguugagaaaccgaaacuacugggga

SEQ ID NO: 107908 - RNA, 32 nt, Homo Sapiens
cuuuuacgucugcuucaugacucccuaaugcc

SEQ ID NO: 107909 - RNA, 32 nt, Homo Sapiens
agccgcugcaguuucucugcucauggaggucu

SEQ ID NO: 107910 - RNA, 32 nt, Homo Sapiens
gaggagaguggaacagaagggguggaguuuug

SEQ ID NO: 107911 - RNA, 32 nt, Homo Sapiens
cacccggguugggccaggaucccggcaggcug

SEQ ID NO: 107912 - RNA, 31 nt, Homo Sapiens
agaaagacaaauugggauaaacaggaaagag

SEQ ID NO: 107913 - RNA, 32 nt, Homo Sapiens
ugugcccuuacuguuggagaauuuuugcacag

SEQ ID NO: 107914 - RNA, 32 nt, Homo Sapiens
acuuccuuucccuugcucacucuggauccagu

SEQ ID NO: 107915 - RNA, 32 nt, Homo Sapiens
uccaggcugggugugccuggaauucaaaauuc

SEQ ID NO: 107916 - RNA, 32 nt, Homo Sapiens
cuaaaaucuugccugugagguuuuguucauau

SEQ ID NO: 107917 - RNA, 32 nt, Homo Sapiens
ccccagccugcagcugacugaggaccacgagu

SEQ ID NO: 107918 - RNA, 32 nt, Homo Sapiens
uuuguugaaauaaauuuguaauuguugcuguu

SEQ ID NO: 107919 - RNA, 32 nt, Homo Sapiens
gaggccuaugacagagcccccaucaccucagg

SEQ ID NO: 107920 - RNA, 32 nt, Homo Sapiens
guaggcauuuaguuaaguauagcaauucaaac

SEQ ID NO: 107921 - RNA, 32 nt, Homo Sapiens
auggauuccccuuuuccauguuccuaagaaug

SEQ ID NO: 107922 - RNA, 32 nt, Homo Sapiens
agauguacuuggagucggauauacaauuuauc

SEQ ID NO: 107923 - RNA, 32 nt, Homo Sapiens
acggcugcagccagcaggccccggugacgaga

SEQ ID NO: 107924 - RNA, 32 nt, Homo Sapiens
cggcgccgagcgcggggucuugguccaccuuc

SEQ ID NO: 107925 - RNA, 32 nt, Homo Sapiens
ccaagucagaguauuaaugaucaugagaauug

SEQ ID NO: 107926 - RNA, 30 nt, Homo Sapiens
cugugacaauaaaaccugccccgugucugg

SEQ ID NO: 107927 - RNA, 32 nt, Homo Sapiens
ugcagauuguauguaaugaauuuuuguaaaca

SEQ ID NO: 107928 - RNA, 32 nt, Homo Sapiens
cccggggacacacacccaugacaugagccagc

SEQ ID NO: 107929 - RNA, 32 nt, Homo Sapiens
accccauugauucuuggugccuuugggaucga

SEQ ID NO: 107930 - RNA, 32 nt, Homo Sapiens
acauuucauugaaaaugugagaguugauauac

SEQ ID NO: 107931 - RNA, 32 nt, Homo Sapiens
uuguuacuuguacagccaagaaaguaucuguu

SEQ ID NO: 107932 - RNA, 32 nt, Homo Sapiens
aaggaagauaugcuaacaaacaacaaaacugg

SEQ ID NO: 107933 - RNA, 32 nt, Homo Sapiens
ccaagaguugcgggagacccaggagcaccugg

SEQ ID NO: 107934 - RNA, 32 nt, Homo Sapiens
guguagugcaugggacccacgaaacugcccug

SEQ ID NO: 107935 - RNA, 32 nt, Homo Sapiens
ucaaaggacgucuggggugggaaugggggacu

SEQ ID NO: 107936 - RNA, 32 nt, Homo Sapiens
ugcccgcacugacccaugacggccgcuacacg

SEQ ID NO: 107937 - RNA, 29 nt, Homo Sapiens
ucacuguguuuauaaauugaaaagguacc

SEQ ID NO: 107938 - RNA, 32 nt, Homo Sapiens
ggggcaggggguggagguuggggucaccggcc

SEQ ID NO: 107939 - RNA, 32 nt, Homo Sapiens
gcaccacaguggugggggcccauggccucgag

SEQ ID NO: 107940 - RNA, 32 nt, Homo Sapiens
auuauaugaaguugguacauaauucugaugag

SEQ ID NO: 107941 - RNA, 32 nt, Homo Sapiens
ggcugcgggcuaagccagacaguguuugccuc

SEQ ID NO: 107942 - RNA, 32 nt, Homo Sapiens
cucugaggcucggcggggcugcggcugccugg

SEQ ID NO: 107943 - RNA, 32 nt, Homo Sapiens
ggagcagccagcccucugccccugcccagggc

SEQ ID NO: 107944 - RNA, 32 nt, Homo Sapiens
gcccuggaugucauauuggcaguuggaggaca

SEQ ID NO: 107945 - RNA, 32 nt, Homo Sapiens
ucuuggugggagcggagaaggggccucccacc

SEQ ID NO: 107946 - RNA, 32 nt, Homo Sapiens
ggaggggagcagccuaguuggucuuggagaga

SEQ ID NO: 107947 - RNA, 32 nt, Homo Sapiens
agaauaaaauaauacauuuaugcuggauuuua

SEQ ID NO: 107948 - RNA, 32 nt, Homo Sapiens
ugcccucacaccaugaaaguuaccacauaaaa

SEQ ID NO: 107949 - RNA, 32 nt, Homo Sapiens
aaggcccggagugggaguggggaccaggaaga

SEQ ID NO: 107950 - RNA, 32 nt, Homo Sapiens
aacaaacagcauuaacgucaccugggaacuug

SEQ ID NO: 107951 - RNA, 32 nt, Homo Sapiens
auugguuuuuuacuuaaaucaaugaaaacuuu

SEQ ID NO: 107952 - RNA, 32 nt, Homo Sapiens
uagguuuaaacacacagagacacacacacacg

SEQ ID NO: 107953 - RNA, 32 nt, Homo Sapiens
cuuuuguagaccacaauucacuuuuuaguuuu

SEQ ID NO: 107954 - RNA, 32 nt, Homo Sapiens
ugguagugugugccuguaguucagcuacucag

SEQ ID NO: 107955 - RNA, 32 nt, Homo Sapiens
cagugucagaccucagucccaguguccauauc

SEQ ID NO: 107956 - RNA, 32 nt, Homo Sapiens
uguaauaauucacaccaauuuuauuaaaugua

SEQ ID NO: 107957 - RNA, 32 nt, Homo Sapiens
gucucacugugugccgcccaccuggcccaucc

SEQ ID NO: 107958 - RNA, 32 nt, Homo Sapiens
cuagugccucuugcccucuccucaccuccuuu

SEQ ID NO: 107959 - RNA, 32 nt, Homo Sapiens
caaauggacuucccugaugagaccaaaauggu

SEQ ID NO: 107960 - RNA, 30 nt, Homo Sapiens
gguauacaugcaauaaauggagguguugag

SEQ ID NO: 107961 - RNA, 32 nt, Homo Sapiens
uuguuauaaaauuuauuccucaauaaauauaa

SEQ ID NO: 107962 - RNA, 32 nt, Homo Sapiens
uuauccaucuuauccuucucagcagguaccua

SEQ ID NO: 107963 - RNA, 32 nt, Homo Sapiens
gcuaagccgcagagacccucucagcccccacc

SEQ ID NO: 107964 - RNA, 32 nt, Homo Sapiens
gcgaguggcuggcugggaaguucuaugaugaa

SEQ ID NO: 107965 - RNA, 32 nt, Homo Sapiens
cucugaagaugugauugauauuaagccagaac

SEQ ID NO: 107966 - RNA, 31 nt, Homo Sapiens
acugggacgcgcagcgcgacggccuuccggg

SEQ ID NO: 107967 - RNA, 32 nt, Homo Sapiens
ccuggcccuggccagucacccucuaucaccca

SEQ ID NO: 107968 - RNA, 31 nt, Homo Sapiens
aaggcacaauggguacuacagaauuaaaaug

SEQ ID NO: 107969 - RNA, 31 nt, Homo Sapiens
uuucagaaauaaagaggcauucaugaaggcu

SEQ ID NO: 107970 - RNA, 32 nt, Homo Sapiens
ucuuuuuacauuagcuuuuguuuucuaaaugu

SEQ ID NO: 107971 - RNA, 32 nt, Homo Sapiens
ggacagccugccagcgucaccgucacauucaa

SEQ ID NO: 107972 - RNA, 32 nt, Homo Sapiens
uuguuacauuguucuuuuugauguaauuugua

SEQ ID NO: 107973 - RNA, 31 nt, Homo Sapiens
gccauugagugcagcagugugcuguugcccu

SEQ ID NO: 107974 - RNA, 32 nt, Homo Sapiens
auagauguguuuuuagaggaaaugcuguuacu

SEQ ID NO: 107975 - RNA, 32 nt, Homo Sapiens
ugaacauacaaaugcaucuuugauguguuguu

SEQ ID NO: 107976 - RNA, 32 nt, Homo Sapiens
gagcuauccacucaggccccagugccucuauu

SEQ ID NO: 107977 - RNA, 32 nt, Homo Sapiens
cugaugaucuaaagauaaugucuuagacaauu

SEQ ID NO: 107978 - RNA, 32 nt, Homo Sapiens
ugauagcuccuccauguugguaaaauccucuc

SEQ ID NO: 107979 - RNA, 32 nt, Homo Sapiens
uaaauuuguauauaaucuaaugucuucauuau

SEQ ID NO: 107980 - RNA, 32 nt, Homo Sapiens
gugauuccugacaccugcugccugcaggcauu

SEQ ID NO: 107981 - RNA, 32 nt, Homo Sapiens
ugcaucuuucccuuuccuauaauguauuucuu

SEQ ID NO: 107982 - RNA, 32 nt, Homo Sapiens
auaucucugugucucuccaucauuccaaagcu

SEQ ID NO: 107983 - RNA, 32 nt, Homo Sapiens
ccugaaagggagaagagggaaaaggaagcacg

SEQ ID NO: 107984 - RNA, 32 nt, Homo Sapiens
aaccucagaaaagaaaaauaaaaggauaauuu

SEQ ID NO: 107985 - RNA, 32 nt, Homo Sapiens
cagcaucucgguucugcgccacuuccuuugug

SEQ ID NO: 107986 - RNA, 32 nt, Homo Sapiens
guugaaaugcaaaaauacuaauuagagaauaa

SEQ ID NO: 107987 - RNA, 32 nt, Homo Sapiens
cuguccuuggggcuggcccauagcagugccug

SEQ ID NO: 107988 - RNA, 32 nt, Homo Sapiens
cagcucugguggggcggguggggccauaaacg

SEQ ID NO: 107989 - RNA, 32 nt, Homo Sapiens
cugcggcgugaaaucuauuucacugcucuaaa

SEQ ID NO: 107990 - RNA, 32 nt, Homo Sapiens
uacuugcaaaaauuacuaaugcuucaguuuuu

SEQ ID NO: 107991 - RNA, 32 nt, Homo Sapiens
uucuugagcccauuuuaaacaacccuuguuuc

SEQ ID NO: 107992 - RNA, 32 nt, Homo Sapiens
ggucgagccucccucccucccgcggccagccc

SEQ ID NO: 107993 - RNA, 32 nt, Homo Sapiens
accccgcugcacccucagaagagggguugaga

SEQ ID NO: 107994 - RNA, 25 nt, Homo Sapiens
augucgucgucgucgccgccggcgg

SEQ ID NO: 107995 - RNA, 32 nt, Homo Sapiens
uucauuuucuuacuuacuagaccauuucugca

SEQ ID NO: 107996 - RNA, 32 nt, Homo Sapiens
cuggauucuccuugcacuuuaccuguucuuuu

SEQ ID NO: 107997 - RNA, 32 nt, Homo Sapiens
uucaauaccauucacagcauucaucaccaacu

SEQ ID NO: 107998 - RNA, 29 nt, Homo Sapiens
caagcuccucaauaaacuugucuccacuu

SEQ ID NO: 107999 - RNA, 32 nt, Homo Sapiens
ucaagagaauaaauguuuacaaauauaaaaaa

SEQ ID NO: 108000 - RNA, 32 nt, Homo Sapiens
cagugaaggggaacagaaggggguagcaaagu

SEQ ID NO: 108001 - RNA, 32 nt, Homo Sapiens
cugccagaaaucagcccucacaguacaucgga

SEQ ID NO: 108002 - RNA, 32 nt, Homo Sapiens
caagggaggggaggccgagagucagacugaua

SEQ ID NO: 108003 - RNA, 32 nt, Homo Sapiens
guggguguggcagacaguccgcagccauggcg

SEQ ID NO: 108004 - RNA, 32 nt, Homo Sapiens
guuuccccaggagagaguggucuggugggcuu

SEQ ID NO: 108005 - RNA, 32 nt, Homo Sapiens
aagccccuggaaagaugcugcguuccgaaccu

SEQ ID NO: 108006 - RNA, 32 nt, Homo Sapiens
cuccucuccagcccuucuccugugugccugcc

SEQ ID NO: 108007 - RNA, 32 nt, Homo Sapiens
gagcaggcaggggagacugagauggaaauaaa

SEQ ID NO: 108008 - RNA, 32 nt, Homo Sapiens
ugcgacccgcaccgcacccccacccgggcccg

SEQ ID NO: 108009 - RNA, 32 nt, Homo Sapiens
cagucgggccgcgccgcgccucagcucugguu

SEQ ID NO: 108010 - RNA, 32 nt, Homo Sapiens
ugagggaggccagguagccgagggaucaggau

SEQ ID NO: 108011 - RNA, 32 nt, Homo Sapiens
ucaacgaggugcuggaggaguaccccaugaug

SEQ ID NO: 108012 - RNA, 32 nt, Homo Sapiens
cuauccugcccccacuguccacuguaggguca

SEQ ID NO: 108013 - RNA, 32 nt, Homo Sapiens
ugaugggaguugaaggagcugcagguccagcu

SEQ ID NO: 108014 - RNA, 32 nt, Homo Sapiens
aauuuuuucuaaaaacauuagacuuuuguuaa

SEQ ID NO: 108015 - RNA, 32 nt, Homo Sapiens
uccuuccuggcggccgccugcugcccugacgc

SEQ ID NO: 108016 - RNA, 32 nt, Homo Sapiens
cuccaggucccgcugccucggcguggaucucg

SEQ ID NO: 108017 - RNA, 32 nt, Homo Sapiens
cuuuucccacuggggccggggagggaggcggg

SEQ ID NO: 108018 - RNA, 32 nt, Homo Sapiens
cauaaccccucccccuccgccccgccccgccc

SEQ ID NO: 108019 - RNA, 32 nt, Homo Sapiens
ccuggugauugaauucuuaccaugaaauccag

SEQ ID NO: 108020 - RNA, 31 nt, Homo Sapiens
gggaugacagcguguaacauaugauacaagg

SEQ ID NO: 108021 - RNA, 32 nt, Homo Sapiens
ccucccggccucgcuccccccggagugggggc

SEQ ID NO: 108022 - RNA, 32 nt, Homo Sapiens
ugcggcuccuccccgcgccgcgaggccgcgac

SEQ ID NO: 108023 - RNA, 32 nt, Homo Sapiens
gaaguauuuaauagaucuaaucaaauauguug

SEQ ID NO: 108024 - RNA, 32 nt, Homo Sapiens
uuggacuuauuccccaccugauaccuuauaga

SEQ ID NO: 108025 - RNA, 32 nt, Homo Sapiens
cucaguaaauguuuaggaggauuguugugaua

SEQ ID NO: 108026 - RNA, 32 nt, Homo Sapiens
agccuagggcuuugugccuacaccucacuaag

SEQ ID NO: 108027 - RNA, 32 nt, Homo Sapiens
ccaaggguuggcugcgcgugcggcgggaguag

SEQ ID NO: 108028 - RNA, 32 nt, Homo Sapiens
gccucacaaccuguggauacagcuguuggggc

SEQ ID NO: 108029 - RNA, 32 nt, Homo Sapiens
ccuguagguucaguagguagagaccaagcauc

SEQ ID NO: 108030 - RNA, 32 nt, Homo Sapiens
augaggauccuccaggggaaaagcucacuacc

SEQ ID NO: 108031 - RNA, 32 nt, Homo Sapiens
agccauucaaccagagaacaagcuagaauuua

SEQ ID NO: 108032 - RNA, 32 nt, Homo Sapiens
ggacauccagauugcucacaugugcugaccac

SEQ ID NO: 108033 - RNA, 32 nt, Homo Sapiens
gucuccagucucuggaggugaagcagggacaa

SEQ ID NO: 108034 - RNA, 32 nt, Homo Sapiens
agcuccuggccacaauagccucaucaacaugg

SEQ ID NO: 108035 - RNA, 32 nt, Homo Sapiens
caaugcugcugacuuugauauguaugacucag

SEQ ID NO: 108036 - RNA, 32 nt, Homo Sapiens
aguggcggggacuggggaagggcgagcagcgg

SEQ ID NO: 108037 - RNA, 32 nt, Homo Sapiens
ucaaauggguguaguagauauuacugaaaacc

SEQ ID NO: 108038 - RNA, 32 nt, Homo Sapiens
ccagcauccaggugcacccccgcggccacggc

SEQ ID NO: 108039 - RNA, 28 nt, Homo Sapiens
gcaaugacaauaaaguuugagaagcuga

SEQ ID NO: 108040 - RNA, 32 nt, Homo Sapiens
agcaaaugggagaguugcuuuauucuuugugu

SEQ ID NO: 108041 - RNA, 32 nt, Homo Sapiens
ucuggaaaaaacaaaucugcucauagacaaug

SEQ ID NO: 108042 - RNA, 32 nt, Homo Sapiens
ggaucacaggcgagugggauuccuccugcgac

SEQ ID NO: 108043 - RNA, 32 nt, Homo Sapiens
accccgucccgacccuggccgccccgagcgga

SEQ ID NO: 108044 - RNA, 32 nt, Homo Sapiens
aauuucaaaaauauaaagguguuugcuacuca

SEQ ID NO: 108045 - RNA, 32 nt, Homo Sapiens
cugguuucuccucuuggcccuccccuacagac

SEQ ID NO: 108046 - RNA, 32 nt, Homo Sapiens
cccuccugccugcuauccaaguauccugugga

SEQ ID NO: 108047 - RNA, 32 nt, Homo Sapiens
uaugagcuacugcauguaauucuuaaacuggg

SEQ ID NO: 108048 - RNA, 32 nt, Homo Sapiens
uauaaggaaauaagagacuuuuuuacauuuuc

SEQ ID NO: 108049 - RNA, 32 nt, Homo Sapiens
aggauggaaggcagaggguggguguggggccu

SEQ ID NO: 108050 - RNA, 32 nt, Homo Sapiens
gucccggcccccauccuccccgccccaucggu

SEQ ID NO: 108051 - RNA, 32 nt, Homo Sapiens
aaaguugcuggugauggggugggcggugucag

SEQ ID NO: 108052 - RNA, 32 nt, Homo Sapiens
ccccucccuccaggccagcagggagcucaggg

SEQ ID NO: 108053 - RNA, 32 nt, Homo Sapiens
agccuucccucauauuuucuugagaucaaacu

SEQ ID NO: 108054 - RNA, 32 nt, Homo Sapiens
aggaggacaaccaugcaaauugugaaauaguc

SEQ ID NO: 108055 - RNA, 32 nt, Homo Sapiens
ugggcagaugacuugggauuggauucuauaca

SEQ ID NO: 108056 - RNA, 32 nt, Homo Sapiens
uccuguugccccaccugugguugcuguggacu

SEQ ID NO: 108057 - RNA, 32 nt, Homo Sapiens
ggagggauagcauugggagauauaccuaaugc

SEQ ID NO: 108058 - RNA, 32 nt, Homo Sapiens
uaaggacucaaguguagaagaaaauauccccu

SEQ ID NO: 108059 - RNA, 32 nt, Homo Sapiens
uagcuguaguuuccgcuuugcuugcuuguuua

SEQ ID NO: 108060 - RNA, 28 nt, Homo Sapiens
ucucgaguggcuaccuguugggcuugug

SEQ ID NO: 108061 - RNA, 32 nt, Homo Sapiens
cugccuggcaaccugaucucgacguuauauga

SEQ ID NO: 108062 - RNA, 32 nt, Homo Sapiens
uuauaaccugaaauuucuuuuuuaauugcaug

SEQ ID NO: 108063 - RNA, 32 nt, Homo Sapiens
gaggcuuccagaagcggaugucuucuagaaag

SEQ ID NO: 108064 - RNA, 32 nt, Homo Sapiens
agaucccugaacuuaugccuccuaacugaaau

SEQ ID NO: 108065 - RNA, 32 nt, Homo Sapiens
guggguaccaugggugcccaccccuccaccac

SEQ ID NO: 108066 - RNA, 32 nt, Homo Sapiens
aaguguaaauaugcugccccuggagugguuug

SEQ ID NO: 108067 - RNA, 32 nt, Homo Sapiens
uuacauaaaaauuauuucgccaucagccaaaa

SEQ ID NO: 108068 - RNA, 32 nt, Homo Sapiens
cguucggcagcugugcuucagccccggcccca

SEQ ID NO: 108069 - RNA, 32 nt, Homo Sapiens
ugcucagacucuagaggcguggaccaaggggc

SEQ ID NO: 108070 - RNA, 32 nt, Homo Sapiens
cacgcgcugccuugcgggagggggucgagaaa

SEQ ID NO: 108071 - RNA, 27 nt, Homo Sapiens
ccuacuuccuucuugggacacccacug

SEQ ID NO: 108072 - RNA, 32 nt, Homo Sapiens
ugaaaaacagcugagggugagugggugaauaa

SEQ ID NO: 108073 - RNA, 32 nt, Homo Sapiens
cugcugugaugacuugccauuaaaagcauugu

SEQ ID NO: 108074 - RNA, 32 nt, Homo Sapiens
aggagggugccugggaggugggugugggggug

SEQ ID NO: 108075 - RNA, 32 nt, Homo Sapiens
aaauauguaauauaucaaaaaauacuucugau

SEQ ID NO: 108076 - RNA, 32 nt, Homo Sapiens
aaccgucgggccgcagccgccggcaaugccgc

SEQ ID NO: 108077 - RNA, 32 nt, Homo Sapiens
gcagagauggcaacaccuggaacuacuuuuca

SEQ ID NO: 108078 - RNA, 32 nt, Homo Sapiens
uccuguaacagaccucuuuuugguuauggaug

SEQ ID NO: 108079 - RNA, 32 nt, Homo Sapiens
agggagaagcaagaagcaucaguugacagagg

SEQ ID NO: 108080 - RNA, 31 nt, Homo Sapiens
gacauaacaaauuauggcuuuguuuucaugc

SEQ ID NO: 108081 - RNA, 32 nt, Homo Sapiens
cauccagaaguggcacaaaaccccucugcugg

SEQ ID NO: 108082 - RNA, 32 nt, Homo Sapiens
caucgcgcccccuaccgccccaucccuggcuc

SEQ ID NO: 108083 - RNA, 32 nt, Homo Sapiens
gaaaccccaucccugcuccuaaucucuacugc

SEQ ID NO: 108084 - RNA, 32 nt, Homo Sapiens
caucuuuaauuucuaaacuaauguagagagaa

SEQ ID NO: 108085 - RNA, 32 nt, Homo Sapiens
aacaggaucuugcucugucacccaggcuugag

SEQ ID NO: 108086 - RNA, 29 nt, Homo Sapiens
aggacagaacagagacuagguuuggugag

SEQ ID NO: 108087 - RNA, 32 nt, Homo Sapiens
cagaggaggaggaggcaugagcgaggcgggcg

SEQ ID NO: 108088 - RNA, 32 nt, Homo Sapiens
agcgggacuauaaugggcccaaggcugaggga

SEQ ID NO: 108089 - RNA, 32 nt, Homo Sapiens
ccgcccgcgccggccucccaauagccgccgcc

SEQ ID NO: 108090 - RNA, 32 nt, Homo Sapiens
uggcggcgagcgccgagccgggcgcgcagcga

SEQ ID NO: 108091 - RNA, 32 nt, Homo Sapiens
ggaacucgucccaagccccccaucuccacuuc

SEQ ID NO: 108092 - RNA, 32 nt, Homo Sapiens
cauuuuugaggggagggaaaggugagguuagg

SEQ ID NO: 108093 - RNA, 32 nt, Homo Sapiens
auccacccucucgcugccccagccugugcucc

SEQ ID NO: 108094 - RNA, 32 nt, Homo Sapiens
gggagugcagaggcaaccaaaaaggaacccac

SEQ ID NO: 108095 - RNA, 32 nt, Homo Sapiens
agaagacagcccuaugcugagcuuguagccuu

SEQ ID NO: 108096 - RNA, 32 nt, Homo Sapiens
gacgggaggggaggcauugacauaggucauaa

SEQ ID NO: 108097 - RNA, 32 nt, Homo Sapiens
cuguccacgcaccaccuggggucugccgccua

SEQ ID NO: 108098 - RNA, 32 nt, Homo Sapiens
gagggcagagguugggcgggguggggacagua

SEQ ID NO: 108099 - RNA, 32 nt, Homo Sapiens
agcucuucucccugcugacaucgucccuuagu

SEQ ID NO: 108100 - RNA, 32 nt, Homo Sapiens
aggcagaugaaugguuucugacccucaccagg

SEQ ID NO: 108101 - RNA, 32 nt, Homo Sapiens
guucugcgacuuccgugugaccucugcaguac

SEQ ID NO: 108102 - RNA, 29 nt, Homo Sapiens
cauucuuuaaaccaauacccaggucaggg

SEQ ID NO: 108103 - RNA, 32 nt, Homo Sapiens
cccauaaaaugaaaagagaagauugaccuuaa

SEQ ID NO: 108104 - RNA, 32 nt, Homo Sapiens
cccgcugcccuugaccucccgccccgcgagcc

SEQ ID NO: 108105 - RNA, 32 nt, Homo Sapiens
agccugagguuuauuucagggauugccgucug

SEQ ID NO: 108106 - RNA, 32 nt, Homo Sapiens
cagauucuuuggcugcagaguggccuggccaa

SEQ ID NO: 108107 - RNA, 32 nt, Homo Sapiens
ugaagccccauuaggaaaaaauuuaaaugguu

SEQ ID NO: 108108 - RNA, 32 nt, Homo Sapiens
caucccaccgaaucugaugcugcugcugccuu

SEQ ID NO: 108109 - RNA, 32 nt, Homo Sapiens
gcccggcuggaggcugcuccggaccgggacgc

SEQ ID NO: 108110 - RNA, 32 nt, Homo Sapiens
accccacccagcucauuacccucuuuuaacuu

SEQ ID NO: 108111 - RNA, 32 nt, Homo Sapiens
gccuccaaagauuggguuuuuguguagaagga

SEQ ID NO: 108112 - RNA, 32 nt, Homo Sapiens
cugggagugggcugggggaggggaacaggaug

SEQ ID NO: 108113 - RNA, 32 nt, Homo Sapiens
accuccugggcuuucuugccuuuguccugauc

SEQ ID NO: 108114 - RNA, 32 nt, Homo Sapiens
agaugauuuuuagaaccuuugccuauauuagg

SEQ ID NO: 108115 - RNA, 31 nt, Homo Sapiens
uaccaagaagcgugaaucauaugauaauuac

SEQ ID NO: 108116 - RNA, 32 nt, Homo Sapiens
aaucucggcucacugcaacuucugccuccuag

SEQ ID NO: 108117 - RNA, 31 nt, Homo Sapiens
cacggcgcuccaggccugccccgcgcgccga

SEQ ID NO: 108118 - RNA, 32 nt, Homo Sapiens
uaucaagaugcaugaaaagagaaacaucaaac

SEQ ID NO: 108119 - RNA, 32 nt, Homo Sapiens
aaacaaauguuuagcuuuuucauuugcgaccu

SEQ ID NO: 108120 - RNA, 32 nt, Homo Sapiens
agaaaauaaagaacugagaacaaucucuuaua

SEQ ID NO: 108121 - RNA, 32 nt, Homo Sapiens
auugaugugaaugcugcugcaggugccaaggc

SEQ ID NO: 108122 - RNA, 32 nt, Homo Sapiens
cgggugucugcgcagaacacggcuccuuugag

SEQ ID NO: 108123 - RNA, 32 nt, Homo Sapiens
gauagaguacaugcaacaaagaucuguucugc

SEQ ID NO: 108124 - RNA, 32 nt, Homo Sapiens
guccagagaagaaauaauccccugcccugugg

SEQ ID NO: 108125 - RNA, 32 nt, Homo Sapiens
uggccacccuccccccgccagcuccaucccca

SEQ ID NO: 108126 - RNA, 32 nt, Homo Sapiens
auauuuuaauuuuauuuacauaaaaaugcugu

SEQ ID NO: 108127 - RNA, 32 nt, Homo Sapiens
aaagcugcccucucccucucccaccacacucc

SEQ ID NO: 108128 - RNA, 32 nt, Homo Sapiens
ucaacuauuauuucuuuuuagguuucucuuca

SEQ ID NO: 108129 - RNA, 32 nt, Homo Sapiens
uggccuugcccccaauuccaucagaccaaggc

SEQ ID NO: 108130 - RNA, 32 nt, Homo Sapiens
uggucauuucaauauuuuguaccuguuuuaaa

SEQ ID NO: 108131 - RNA, 32 nt, Homo Sapiens
guucaucugaaguugagguuaaaggcgcgcca

SEQ ID NO: 108132 - RNA, 32 nt, Homo Sapiens
aguggggcaagauuuuccuuuuuuauacacau

SEQ ID NO: 108133 - RNA, 32 nt, Homo Sapiens
gggaacccuggcugcuggccuucugggucccc

SEQ ID NO: 108134 - RNA, 32 nt, Homo Sapiens
agccuacacggcaugagcgggcaggcuggggg

SEQ ID NO: 108135 - RNA, 32 nt, Homo Sapiens
gggcaaguccuggccuggcacccgcagccguc

SEQ ID NO: 108136 - RNA, 32 nt, Homo Sapiens
caugucacuccagcagcacaggggacgcaaug

SEQ ID NO: 108137 - RNA, 32 nt, Homo Sapiens
gugggcguguggggcggggcggggcagggcag

SEQ ID NO: 108138 - RNA, 32 nt, Homo Sapiens
uauaaccuuaggauuccugaaaagaauuucaa

SEQ ID NO: 108139 - RNA, 32 nt, Homo Sapiens
gggaucaggaccagccucgcaagcauuuuaau

SEQ ID NO: 108140 - RNA, 32 nt, Homo Sapiens
aauacugcaugauuccauuuaaaugaggggcc

SEQ ID NO: 108141 - RNA, 32 nt, Homo Sapiens
gggaaauugaguuuuugacugaaacauggagc

SEQ ID NO: 108142 - RNA, 32 nt, Homo Sapiens
cgugaaacagaaaagggacauuagagaaaaaa

SEQ ID NO: 108143 - RNA, 32 nt, Homo Sapiens
agaauugggacucaccccuacugcacuaccaa

SEQ ID NO: 108144 - RNA, 32 nt, Homo Sapiens
gucucaaaacaaaaaacaaaaccacuuauauu

SEQ ID NO: 108145 - RNA, 32 nt, Homo Sapiens
caagggagggcuuuagaacaucugagaaaugu

SEQ ID NO: 108146 - RNA, 32 nt, Homo Sapiens
ucacccggccccaucuguugccccgguccagc

SEQ ID NO: 108147 - RNA, 32 nt, Homo Sapiens
uaauuuaggaaaaagcaacauuugagcagaca

SEQ ID NO: 108148 - RNA, 32 nt, Homo Sapiens
ccgcggcggcggcggcggcggcuggguagagu

SEQ ID NO: 108149 - RNA, 32 nt, Homo Sapiens
cuucuuacugguuugugagaaauguucaugca

SEQ ID NO: 108150 - RNA, 32 nt, Homo Sapiens
aauggggagcagguaagagcagagcaccuccc

SEQ ID NO: 108151 - RNA, 32 nt, Homo Sapiens
gaaaggaagucugcucaggaaauaaccuugga

SEQ ID NO: 108152 - RNA, 32 nt, Homo Sapiens
ccuggagaugauggaggcucacagucauggcc

SEQ ID NO: 108153 - RNA, 32 nt, Homo Sapiens
uuagcaauuauguacggauauuauacagagga

SEQ ID NO: 108154 - RNA, 32 nt, Homo Sapiens
aaugaugcaggcugcuccuauuuuggaaauuu

SEQ ID NO: 108155 - RNA, 32 nt, Homo Sapiens
agaguauaaaaagccaaaggucaaagucaaag

SEQ ID NO: 108156 - RNA, 32 nt, Homo Sapiens
acuagggggcccggccucuggcgcuaccaugg

SEQ ID NO: 108157 - RNA, 32 nt, Homo Sapiens
gugccugucggggcucacuugaagccugucag

SEQ ID NO: 108158 - RNA, 32 nt, Homo Sapiens
agcuaagcugggugcaguggcucaugccaguu

SEQ ID NO: 108159 - RNA, 32 nt, Homo Sapiens
uuugacgagucaccuuccaggaccccugggua

SEQ ID NO: 108160 - RNA, 32 nt, Homo Sapiens
gggcagugcggagaccgcggcgcugaggacgc

SEQ ID NO: 108161 - RNA, 32 nt, Homo Sapiens
cccuuuacugaauaguuugauggggcgccggg

SEQ ID NO: 108162 - RNA, 32 nt, Homo Sapiens
caggagccuuccuuccucccccaaugaggaaa

SEQ ID NO: 108163 - RNA, 32 nt, Homo Sapiens
gcugggagcccccggcagagcugggguugaag

SEQ ID NO: 108164 - RNA, 32 nt, Homo Sapiens
cccugucucccaccagcuggguuccuggguca

SEQ ID NO: 108165 - RNA, 32 nt, Homo Sapiens
cuuuuggccaguaggucgugcccgccuggugc

SEQ ID NO: 108166 - RNA, 32 nt, Homo Sapiens
uuucauucucaaacagauauauaggguagcuu

SEQ ID NO: 108167 - RNA, 32 nt, Homo Sapiens
gagacugaagacucagcccggguggggcugca

SEQ ID NO: 108168 - RNA, 32 nt, Homo Sapiens
agauaccucuggagcagauuugaaagccagga

SEQ ID NO: 108169 - RNA, 32 nt, Homo Sapiens
uguacuggccccauccucuccucacuguaaug

SEQ ID NO: 108170 - RNA, 32 nt, Homo Sapiens
aggacuccccaggcuugugcucucucagcuug

SEQ ID NO: 108171 - RNA, 32 nt, Homo Sapiens
aucauuacuauaagaacuuugagcuacugccg

SEQ ID NO: 108172 - RNA, 32 nt, Homo Sapiens
uuucguuuagucuuuauuaaaauuuauaauug

SEQ ID NO: 108173 - RNA, 32 nt, Homo Sapiens
cgccccaccgaggaagccccgccccggugccu

SEQ ID NO: 108174 - RNA, 32 nt, Homo Sapiens
cagcaguucuuuguagucauuccaagugguac

SEQ ID NO: 108175 - RNA, 32 nt, Homo Sapiens
caggcgccgacugccuggcgucguccgugacu

SEQ ID NO: 108176 - RNA, 32 nt, Homo Sapiens
ggcgacgccccgucggccccagcugccccagg

SEQ ID NO: 108177 - RNA, 32 nt, Homo Sapiens
cgcacggacggggcgggcggcgcggacaggcc

SEQ ID NO: 108178 - RNA, 32 nt, Homo Sapiens
caugcuugauucacccugcccuuccuuuccuc

SEQ ID NO: 108179 - RNA, 32 nt, Homo Sapiens
cuggaaacagaaaaauauuuaaagaaaacuua

SEQ ID NO: 108180 - RNA, 32 nt, Homo Sapiens
gcgggggcgggggccgccgggcgggggaauau

SEQ ID NO: 108181 - RNA, 32 nt, Homo Sapiens
uaaugagaugugaaaagagagaauugaugucc

SEQ ID NO: 108182 - RNA, 32 nt, Homo Sapiens
gaaaacaaagccaaacaaaacugaaccacaaa

SEQ ID NO: 108183 - RNA, 32 nt, Homo Sapiens
aggaaguuuuucugcagagagugcugguaaag

SEQ ID NO: 108184 - RNA, 32 nt, Homo Sapiens
gcagaguuuguaguccaaaaaauaucaccuag

SEQ ID NO: 108185 - RNA, 32 nt, Homo Sapiens
ggauuggagaggagacaaaaccaggagcagca

SEQ ID NO: 108186 - RNA, 30 nt, Homo Sapiens
guucaagcuaucccugccucuucuucgccc

SEQ ID NO: 108187 - RNA, 32 nt, Homo Sapiens
cuguagaagggacaauuaacuccauccuucuc

SEQ ID NO: 108188 - RNA, 32 nt, Homo Sapiens
aguuugccucaggaugaaacaaaccuuugagu

SEQ ID NO: 108189 - RNA, 32 nt, Homo Sapiens
gcgauggugacacaugcggcggcggccgcgcg

SEQ ID NO: 108190 - RNA, 32 nt, Homo Sapiens
uuauuggaaugggagagugaugauccaaauag

SEQ ID NO: 108191 - RNA, 32 nt, Homo Sapiens
gcuaauaaaaauuuuaagguugacuaaauuaa

SEQ ID NO: 108192 - RNA, 32 nt, Homo Sapiens
gucagcccacguugcuggccuuuggggucaag

SEQ ID NO: 108193 - RNA, 32 nt, Homo Sapiens
ccccagccugacgggccgcuuaccauccccuc

SEQ ID NO: 108194 - RNA, 32 nt, Homo Sapiens
augugccgcucuucuauuucuauggauaguac

SEQ ID NO: 108195 - RNA, 32 nt, Homo Sapiens
uaauuuuguuguuuuacccauucguuaucugu

SEQ ID NO: 108196 - RNA, 32 nt, Homo Sapiens
caggcaguggucccagccccagcucuacccca

SEQ ID NO: 108197 - RNA, 32 nt, Homo Sapiens
guucagagaaaguugcagagaucaggggccaa

SEQ ID NO: 108198 - RNA, 32 nt, Homo Sapiens
caaggaugaaaaaauaagugaagaaugugaua

SEQ ID NO: 108199 - RNA, 32 nt, Homo Sapiens
accacaaacuggguggcuuuaaacaacagaaa

SEQ ID NO: 108200 - RNA, 32 nt, Homo Sapiens
cuguuucccuucccucccccauaccuagcccg

SEQ ID NO: 108201 - RNA, 32 nt, Homo Sapiens
gcgagucucugcccccucccccuggagcuccc

SEQ ID NO: 108202 - RNA, 32 nt, Homo Sapiens
uguaaggcauacugccuuguuuaaugguaguu

SEQ ID NO: 108203 - RNA, 32 nt, Homo Sapiens
aggauugauggaaucuaauaauaaaaacugua

SEQ ID NO: 108204 - RNA, 32 nt, Homo Sapiens
cuggaggcggccucggccugccuggaugaggc

SEQ ID NO: 108205 - RNA, 32 nt, Homo Sapiens
augccggggaugcgcgucccccggcccugcgg

SEQ ID NO: 108206 - RNA, 32 nt, Homo Sapiens
uaggcccuggggcuacagcugcugcugccucu

SEQ ID NO: 108207 - RNA, 32 nt, Homo Sapiens
aacagcuugcugcuccuccugagcucugccgu

SEQ ID NO: 108208 - RNA, 32 nt, Homo Sapiens
agcccgaggucggggcguuaccccaagggccc

SEQ ID NO: 108209 - RNA, 32 nt, Homo Sapiens
ggcugagccaaagccuaagcugcgaauugagu

SEQ ID NO: 108210 - RNA, 32 nt, Homo Sapiens
gugucucuuccuuuuucuuucuuuucuucuuu

SEQ ID NO: 108211 - RNA, 32 nt, Homo Sapiens
ugcaggucucuguuuugaaaaagcagagauac

SEQ ID NO: 108212 - RNA, 32 nt, Homo Sapiens
auuucauuuucuaggcacaacuucuggcuguc

SEQ ID NO: 108213 - RNA, 32 nt, Homo Sapiens
ugaguuugacuucuaaggauacauuugguaaa

SEQ ID NO: 108214 - RNA, 32 nt, Homo Sapiens
aucucuuuccccaaggacccagcccucgccuc

SEQ ID NO: 108215 - RNA, 32 nt, Homo Sapiens
ucagacucuggggcagcagacaugcugcuucc

SEQ ID NO: 108216 - RNA, 32 nt, Homo Sapiens
gaaauccggccuuuugaccagaacgcacaccu

SEQ ID NO: 108217 - RNA, 32 nt, Homo Sapiens
augacugcugaccuaaagaucccuggcauugg

SEQ ID NO: 108218 - RNA, 32 nt, Homo Sapiens
gcaacauaaugaaacuuccuuuccagggagga

SEQ ID NO: 108219 - RNA, 32 nt, Homo Sapiens
cuuccggguagaagguggagcggcagggugua

SEQ ID NO: 108220 - RNA, 32 nt, Homo Sapiens
cuucaagcugggugcaguggcucacgccugua

SEQ ID NO: 108221 - RNA, 32 nt, Homo Sapiens
cccgcccgcuccccgacuuaggauccgaugcc

SEQ ID NO: 108222 - RNA, 30 nt, Homo Sapiens
cagggaaguaugggcaugcaggggcaagug

SEQ ID NO: 108223 - RNA, 32 nt, Homo Sapiens
aagaagagugaggacaaaauaguaguucuuug

SEQ ID NO: 108224 - RNA, 32 nt, Homo Sapiens
cuaucugaaaacaguggagucagugaccccag

SEQ ID NO: 108225 - RNA, 32 nt, Homo Sapiens
gggccaggaacgccagccguucacgcguucgg

SEQ ID NO: 108226 - RNA, 32 nt, Homo Sapiens
aggucaccgacugggccggcccgcggggggcg

SEQ ID NO: 108227 - RNA, 30 nt, Homo Sapiens
ggauuugcagguggcaggccagggauuugu

SEQ ID NO: 108228 - RNA, 32 nt, Homo Sapiens
ggccagggcuuccaauauuauguugaauagga

SEQ ID NO: 108229 - RNA, 32 nt, Homo Sapiens
uguucccacucugggguucucaaguccaugaa

SEQ ID NO: 108230 - RNA, 32 nt, Homo Sapiens
cugccgcagccgcugcgccgccgccuagacua

SEQ ID NO: 108231 - RNA, 32 nt, Homo Sapiens
gaggagccggugccgccugaaugccgagcuaa

SEQ ID NO: 108232 - RNA, 32 nt, Homo Sapiens
aaccucccacccaaacaaugggccugguggac

SEQ ID NO: 108233 - RNA, 32 nt, Homo Sapiens
cuuuuagaaugggaauguugauccaaugccua

SEQ ID NO: 108234 - RNA, 32 nt, Homo Sapiens
uggugucagaggaaacagccucuggguguggg

SEQ ID NO: 108235 - RNA, 32 nt, Homo Sapiens
aaggaugaaaauaccuuccaaaggcucuucca

SEQ ID NO: 108236 - RNA, 32 nt, Homo Sapiens
uggcugcaguacaggaucugacucuggcucag

SEQ ID NO: 108237 - RNA, 32 nt, Homo Sapiens
ggccacggcagccugcccggcuccucccgccg

SEQ ID NO: 108238 - RNA, 32 nt, Homo Sapiens
gagcuggguugagaaaagucuguuacaguugc

SEQ ID NO: 108239 - RNA, 32 nt, Homo Sapiens
uggugccuucuggccuguggccucccugccca

SEQ ID NO: 108240 - RNA, 32 nt, Homo Sapiens
aagcuggggcuuggggauugccacuaaguaca

SEQ ID NO: 108241 - RNA, 32 nt, Homo Sapiens
gguuaacggccgcggaccuggcaguucucagg

SEQ ID NO: 108242 - RNA, 32 nt, Homo Sapiens
acauuuguucuuccuuccucaggguuagugau

SEQ ID NO: 108243 - RNA, 32 nt, Homo Sapiens
uauuuuuaaugauuugagugcauguuuuaaac

SEQ ID NO: 108244 - RNA, 32 nt, Homo Sapiens
uauguauguauaauucaacaauuuuagauuau

SEQ ID NO: 108245 - RNA, 32 nt, Homo Sapiens
gugcacauuuucuguucagggauuaagaccag

SEQ ID NO: 108246 - RNA, 32 nt, Homo Sapiens
ccugcaugccuggcccggggcacuagcccuug

SEQ ID NO: 108247 - RNA, 30 nt, Homo Sapiens
cggcggcgcgcgccaugucguucagugaaa

SEQ ID NO: 108248 - RNA, 32 nt, Homo Sapiens
gcccuucuuccccaucucucccccgggccugc

SEQ ID NO: 108249 - RNA, 32 nt, Homo Sapiens
auuugugcucuuuuuuuuuuuauggugcuuga

SEQ ID NO: 108250 - RNA, 32 nt, Homo Sapiens
ggcaaagcagaugugggagauuuuaagaagaa

SEQ ID NO: 108251 - RNA, 32 nt, Homo Sapiens
cagagauaaccacuguauguuuauuuacauua

SEQ ID NO: 108252 - RNA, 32 nt, Homo Sapiens
aaaggccgugcagagaugaacgggcgcaucgu

SEQ ID NO: 108253 - RNA, 32 nt, Homo Sapiens
aaauuuucaauuuuaauaacauuugaauggaa

SEQ ID NO: 108254 - RNA, 32 nt, Homo Sapiens
auaaaucugacagcagugccaaggcugagacc

SEQ ID NO: 108255 - RNA, 32 nt, Homo Sapiens
aggauaaaauuugaauagugaauauuaacauc

SEQ ID NO: 108256 - RNA, 32 nt, Homo Sapiens
uuuugaggaaaguuaaaguacuuuuuucccua

SEQ ID NO: 108257 - RNA, 32 nt, Homo Sapiens
gugucuucauuaccauuaccucuacacugcag

SEQ ID NO: 108258 - RNA, 31 nt, Homo Sapiens
accccggagccccagccccaccaugacccuc

SEQ ID NO: 108259 - RNA, 32 nt, Homo Sapiens
ccucuucagccaguggaaauguuccauaaggg

SEQ ID NO: 108260 - RNA, 32 nt, Homo Sapiens
gcucuuaccaaguuuaaacacaaaauuuauca

SEQ ID NO: 108261 - RNA, 32 nt, Homo Sapiens
ggaacaccacuacuuuacccagacgccacagg

SEQ ID NO: 108262 - RNA, 32 nt, Homo Sapiens
gagaggcugcgggcugcccgcggacgaugugg

SEQ ID NO: 108263 - RNA, 32 nt, Homo Sapiens
cauauuaaaaagacaagcacaaguaaaucauu

SEQ ID NO: 108264 - RNA, 32 nt, Homo Sapiens
ccucagcagggugggggucuuccuccuuacuc

SEQ ID NO: 108265 - RNA, 30 nt, Homo Sapiens
uauuuccucugugcuuucucagcuucuuug

SEQ ID NO: 108266 - RNA, 32 nt, Homo Sapiens
uaacauugaagaaggaaaacaauauguagaaa

SEQ ID NO: 108267 - RNA, 32 nt, Homo Sapiens
cagagcgucucucucuguuacccaggcuagag

SEQ ID NO: 108268 - RNA, 32 nt, Homo Sapiens
aacuuagaccuuucuguaaauuaucuuuuaau

SEQ ID NO: 108269 - RNA, 32 nt, Homo Sapiens
uuauuauauaauuuuuuuuucuuaggcaagaa

SEQ ID NO: 108270 - RNA, 32 nt, Homo Sapiens
ucaccagugaccagcuagacugugauuuugau

SEQ ID NO: 108271 - RNA, 32 nt, Homo Sapiens
aaugaguagguagaaaaggaaaaggaauaauc

SEQ ID NO: 108272 - RNA, 32 nt, Homo Sapiens
uugcaaaguucuauggcugucaccuuaauuac

SEQ ID NO: 108273 - RNA, 32 nt, Homo Sapiens
uuuugagacaccuacaggguguagaaaagaag

SEQ ID NO: 108274 - RNA, 32 nt, Homo Sapiens
ccucagaguauguaggaguaaauaguauauaa

SEQ ID NO: 108275 - RNA, 32 nt, Homo Sapiens
acccugaccaacauagagaaaccccgucucca

SEQ ID NO: 108276 - RNA, 32 nt, Homo Sapiens
cuggcgugcaggugugggcucuccacauuggg

SEQ ID NO: 108277 - RNA, 32 nt, Homo Sapiens
agcucuuucccucucuacacagaaauauuuuu

SEQ ID NO: 108278 - RNA, 32 nt, Homo Sapiens
ggaauuuaauaaagcaaagaaacuuuuuaaaa

SEQ ID NO: 108279 - RNA, 32 nt, Homo Sapiens
aaguucaauaaaccucuuuguuuuguaaauug

SEQ ID NO: 108280 - RNA, 32 nt, Homo Sapiens
uguauauaauguauuucuuuuguacagugaag

SEQ ID NO: 108281 - RNA, 32 nt, Homo Sapiens
aauguuggguauacagaugcuucucaacuuau

SEQ ID NO: 108282 - RNA, 32 nt, Homo Sapiens
agcauuccagaggaguuccgagggaucacugu

SEQ ID NO: 108283 - RNA, 32 nt, Homo Sapiens
aaagucccccggcucuggggccccggugaccc

SEQ ID NO: 108284 - RNA, 32 nt, Homo Sapiens
auugacuguauuagaugaaaugugaggaucuu

SEQ ID NO: 108285 - RNA, 32 nt, Homo Sapiens
gaugcuccugcuucggccuccugaguagcugg

SEQ ID NO: 108286 - RNA, 32 nt, Homo Sapiens
uuugagaaucccaauuauuuauuuuaauguau

SEQ ID NO: 108287 - RNA, 32 nt, Homo Sapiens
augcaacaacagggaaaagagaauuucagaca

SEQ ID NO: 108288 - RNA, 32 nt, Homo Sapiens
gaagaucuaugaaaauguguuuugaccaaacu

SEQ ID NO: 108289 - RNA, 29 nt, Homo Sapiens
aucaugccauaauuguaauguugaaucgg

SEQ ID NO: 108290 - RNA, 32 nt, Homo Sapiens
agcuauugaaacaaaaguggcacugauguugc

SEQ ID NO: 108291 - RNA, 32 nt, Homo Sapiens
ccguccguccaccgcgcggucgcagucagagc

SEQ ID NO: 108292 - RNA, 32 nt, Homo Sapiens
cugccuugccuugccuucccggcagcauccca

SEQ ID NO: 108293 - RNA, 32 nt, Homo Sapiens
gaauggguauaaaacauauaauuuagagguag

SEQ ID NO: 108294 - RNA, 32 nt, Homo Sapiens
gcacagggacagagacagcagcuggacucucg

SEQ ID NO: 108295 - RNA, 32 nt, Homo Sapiens
cagaaaauaaaagaaggaaaggcuaccagacu

SEQ ID NO: 108296 - RNA, 32 nt, Homo Sapiens
cugggggguuugaggcugggcugggaggggga

SEQ ID NO: 108297 - RNA, 32 nt, Homo Sapiens
gccuaccacgggggcguccuguacuaugccag

SEQ ID NO: 108298 - RNA, 32 nt, Homo Sapiens
aaauagaccugacugaggaaaacacauugaug

SEQ ID NO: 108299 - RNA, 32 nt, Homo Sapiens
ccccucugagccuuccuccccccucagaccug

SEQ ID NO: 108300 - RNA, 32 nt, Homo Sapiens
ccuugguacuucugagguauuuucaugauccc

SEQ ID NO: 108301 - RNA, 32 nt, Homo Sapiens
auacgagagacugaaucuauuuuuguuucggg

SEQ ID NO: 108302 - RNA, 32 nt, Homo Sapiens
aacggcugcaccugugugcuuauuugugccag

SEQ ID NO: 108303 - RNA, 32 nt, Homo Sapiens
agucucucaaaaaacuuuauuuagauugucaa

SEQ ID NO: 108304 - RNA, 32 nt, Homo Sapiens
gaacuaccuacagcuagcacaaaaggcagucg

SEQ ID NO: 108305 - RNA, 32 nt, Homo Sapiens
acgaaaugguuugaaguauuuucauguuugga

SEQ ID NO: 108306 - RNA, 32 nt, Homo Sapiens
ccaggacucuggcuucucuccucagacuucua

SEQ ID NO: 108307 - RNA, 32 nt, Homo Sapiens
gagccucaggagggcucugcuccacccacuug

SEQ ID NO: 108308 - RNA, 32 nt, Homo Sapiens
uggauuuuuuaaaagauguauuuugggcucuu

SEQ ID NO: 108309 - RNA, 32 nt, Homo Sapiens
aaguuaaggccuuuguccguugaggucaggac

SEQ ID NO: 108310 - RNA, 32 nt, Homo Sapiens
cuccggccgcgcccgcgcuggccgcugauagc

SEQ ID NO: 108311 - RNA, 32 nt, Homo Sapiens
ugaagaauuuaagaaacuuauucgcaauagac

SEQ ID NO: 108312 - RNA, 32 nt, Homo Sapiens
cauccuucuuuuucuuuuuccauuggucuaau

SEQ ID NO: 108313 - RNA, 32 nt, Homo Sapiens
acaaaaaugaaaaguaggaugaaaauaauaga

SEQ ID NO: 108314 - RNA, 32 nt, Homo Sapiens
ucuuuuuugaucgaugaagcacuuuuuuauua

SEQ ID NO: 108315 - RNA, 32 nt, Homo Sapiens
uuuucuuccaccgucauuucuaacucuuaaaa

SEQ ID NO: 108316 - RNA, 32 nt, Homo Sapiens
uuuucuuaugcaaagaugguaaaacacuguug

SEQ ID NO: 108317 - RNA, 32 nt, Homo Sapiens
gggacuccgggcggcccugccuggugccauug

SEQ ID NO: 108318 - RNA, 32 nt, Homo Sapiens
auccgcugucuacuccacugucuccucugcag

SEQ ID NO: 108319 - RNA, 32 nt, Homo Sapiens
ucuuugauauuguguaagcgaaauucuccaau

SEQ ID NO: 108320 - RNA, 32 nt, Homo Sapiens
uuuuuaaauaccauauucaagggagucugcug

SEQ ID NO: 108321 - RNA, 30 nt, Homo Sapiens
agaguaggcaggcgcgguggcacaugccug

SEQ ID NO: 108322 - RNA, 31 nt, Homo Sapiens
gaccuucuacccugguggcaaacacaugaaa

SEQ ID NO: 108323 - RNA, 32 nt, Homo Sapiens
gaggcguacaccuuucccaaauguagacuaga

SEQ ID NO: 108324 - RNA, 32 nt, Homo Sapiens
cuucucugcugugacaaacgacccugucuguc

SEQ ID NO: 108325 - RNA, 32 nt, Homo Sapiens
augauccuuuuuauuucuuugguaacaguugu

SEQ ID NO: 108326 - RNA, 32 nt, Homo Sapiens
ggaaaagguaaccugcgccgccggcggggcug

SEQ ID NO: 108327 - RNA, 31 nt, Homo Sapiens
ggcccgcuggccccacagcaggcaagcugag

SEQ ID NO: 108328 - RNA, 32 nt, Homo Sapiens
gcgggcuucagcgagccgcaggaggcacaggc

SEQ ID NO: 108329 - RNA, 32 nt, Homo Sapiens
cuauauaaaaauuauauuaaauagaugcugcu

SEQ ID NO: 108330 - RNA, 30 nt, Homo Sapiens
ggggaauggcacugccugcgugugcagucc

SEQ ID NO: 108331 - RNA, 32 nt, Homo Sapiens
guuuucagcucuuuuuauauuguacauagucu

SEQ ID NO: 108332 - RNA, 32 nt, Homo Sapiens
cuauccgccagaccccaagggccugccaggga

SEQ ID NO: 108333 - RNA, 32 nt, Homo Sapiens
cugcugagcuggaagcugugggggaaggaguu

SEQ ID NO: 108334 - RNA, 32 nt, Homo Sapiens
gaauccaucagagagauggaucaauaagaugg

SEQ ID NO: 108335 - RNA, 32 nt, Homo Sapiens
uucuccucucugccugccuccucccucaccga

SEQ ID NO: 108336 - RNA, 32 nt, Homo Sapiens
cacugccuguguuugucuggccaagacauuug

SEQ ID NO: 108337 - RNA, 32 nt, Homo Sapiens
gagggaaagauaaguuaaauuucaaggggguc

SEQ ID NO: 108338 - RNA, 32 nt, Homo Sapiens
gugugaggguggggugggagggggcccagcaa

SEQ ID NO: 108339 - RNA, 32 nt, Homo Sapiens
cccuucccaguccaaugccaucucccacuaga

SEQ ID NO: 108340 - RNA, 32 nt, Homo Sapiens
ucuuucaguuauuaaaugauagauaaugccuu

SEQ ID NO: 108341 - RNA, 32 nt, Homo Sapiens
cugcagguucccucuggccccaccaggagaag

SEQ ID NO: 108342 - RNA, 30 nt, Homo Sapiens
uugauagguuugugcgcgggucccucgugc

SEQ ID NO: 108343 - RNA, 32 nt, Homo Sapiens
cccuggccugcuguccaggcuccagcuccccu

SEQ ID NO: 108344 - RNA, 32 nt, Homo Sapiens
auuucauacuuugaauuucaguaaaaaucaaa

SEQ ID NO: 108345 - RNA, 32 nt, Homo Sapiens
uggugcuuucucaugccuuguuuucuuucauc

SEQ ID NO: 108346 - RNA, 32 nt, Homo Sapiens
cagcccuuccccagccccuccucuuguuucuu

SEQ ID NO: 108347 - RNA, 32 nt, Homo Sapiens
cuuuggggcuugcugcagaaaccuggccuacg

SEQ ID NO: 108348 - RNA, 32 nt, Homo Sapiens
ugcugugagccgaagcucucccugccccgccc

SEQ ID NO: 108349 - RNA, 29 nt, Homo Sapiens
guuuucuuguguuucagacuuuaugcagc

SEQ ID NO: 108350 - RNA, 32 nt, Homo Sapiens
uauauuaaacacacccauacaaacauugguaa

SEQ ID NO: 108351 - RNA, 32 nt, Homo Sapiens
cuucuagauugagcucauugcuuaauuucuag

SEQ ID NO: 108352 - RNA, 32 nt, Homo Sapiens
aacccaggcagacuuauuuuggcggauuucca

SEQ ID NO: 108353 - RNA, 32 nt, Homo Sapiens
aagccucuugguaagaggcauuuguuaaaagu

SEQ ID NO: 108354 - RNA, 32 nt, Homo Sapiens
cccccaccucaccaccugagggccccugggag

SEQ ID NO: 108355 - RNA, 32 nt, Homo Sapiens
aaagaucuuuugcagcuuugcagauacccaga

SEQ ID NO: 108356 - RNA, 32 nt, Homo Sapiens
agggaaagugaccgcaucucggccaaaagggc

SEQ ID NO: 108357 - RNA, 32 nt, Homo Sapiens
ggaggcacgggguugcggaucccgcggccgcg

SEQ ID NO: 108358 - RNA, 32 nt, Homo Sapiens
agaggcuggugcugugucgggaggaaggucag

SEQ ID NO: 108359 - RNA, 32 nt, Homo Sapiens
aucaguguuaauucuaaauccuugauccucug

SEQ ID NO: 108360 - RNA, 32 nt, Homo Sapiens
cuggcuaucucaccagggccuuaaauuuaaua

SEQ ID NO: 108361 - RNA, 28 nt, Homo Sapiens
ugagugauuugcuguauguguuuguuuc

SEQ ID NO: 108362 - RNA, 32 nt, Homo Sapiens
ucccugcccucccgucauuugcccugggucuc

SEQ ID NO: 108363 - RNA, 32 nt, Homo Sapiens
ccucuagagaguuuauacuuugaccucgugac

SEQ ID NO: 108364 - RNA, 32 nt, Homo Sapiens
ccugcccugcuggaggccccagcccuccgugg

SEQ ID NO: 108365 - RNA, 32 nt, Homo Sapiens
caagccuuggaaagacagugcaaccacagaag

SEQ ID NO: 108366 - RNA, 32 nt, Homo Sapiens
ccaccuuggccgcgcggcagggggcgcgcaga

SEQ ID NO: 108367 - RNA, 32 nt, Homo Sapiens
uccuuggaccucugaaggaauagaacggucaa

SEQ ID NO: 108368 - RNA, 32 nt, Homo Sapiens
gugacaguucuauuugauugccuccgguacug

SEQ ID NO: 108369 - RNA, 32 nt, Homo Sapiens
ucaucuuccuuccucccuaucucuguguaucu

SEQ ID NO: 108370 - RNA, 32 nt, Homo Sapiens
ucuuuauucugucauugggguaugggauagaa

SEQ ID NO: 108371 - RNA, 32 nt, Homo Sapiens
aaauuaaauaauccauccuccuacuccaggcg

SEQ ID NO: 108372 - RNA, 32 nt, Homo Sapiens
caacggcagcagcagcagcagcagcagcagca

SEQ ID NO: 108373 - RNA, 32 nt, Homo Sapiens
cagcagcagcagcagcagcaacagcaacagca

SEQ ID NO: 108374 - RNA, 32 nt, Homo Sapiens
guugguugcaaacucucaacccuaacggcucu

SEQ ID NO: 108375 - RNA, 32 nt, Homo Sapiens
gcuguccuucgacuuucaguacacucguuuua

SEQ ID NO: 108376 - RNA, 32 nt, Homo Sapiens
aggcgggagcgcgggcugggccgggcugggcu

SEQ ID NO: 108377 - RNA, 32 nt, Homo Sapiens
gaggguguccccgugcgucaucgguggagugg

SEQ ID NO: 108378 - RNA, 32 nt, Homo Sapiens
guuuucccaugcaugaaaaauaaaauaaaaua

SEQ ID NO: 108379 - RNA, 32 nt, Homo Sapiens
uguuaucccuccccuagcccuccauccccuga

SEQ ID NO: 108380 - RNA, 32 nt, Homo Sapiens
ccaagaggcugacuucaggguugccacagaag

SEQ ID NO: 108381 - RNA, 32 nt, Homo Sapiens
agccugaggaagagggcggcgacggugguggu

SEQ ID NO: 108382 - RNA, 32 nt, Homo Sapiens
gacgaggauacaaaagugaaagcaucaucccc

SEQ ID NO: 108383 - RNA, 32 nt, Homo Sapiens
guuuggggguugaucacagaccaagagugacg

SEQ ID NO: 108384 - RNA, 32 nt, Homo Sapiens
aaagccgcacuuuacacccccaccugccucuu

SEQ ID NO: 108385 - RNA, 32 nt, Homo Sapiens
uuuauccacccuccccacugggaacugggcac

SEQ ID NO: 108386 - RNA, 32 nt, Homo Sapiens
ugauguagucaugaguuuuucuuuguuugcau

SEQ ID NO: 108387 - RNA, 32 nt, Homo Sapiens
cagguuuauuucuuccuuucugauguggaugu

SEQ ID NO: 108388 - RNA, 32 nt, Homo Sapiens
cucuuccuucgcuaacgccucccggcucucgu

SEQ ID NO: 108389 - RNA, 32 nt, Homo Sapiens
cuguccugcucugucacccauccuggagugca

SEQ ID NO: 108390 - RNA, 32 nt, Homo Sapiens
auuugcccuggaguuuuagaaaauaguuucug

SEQ ID NO: 108391 - RNA, 32 nt, Homo Sapiens
uaauccacaguauguuacaugcauucuaccac

SEQ ID NO: 108392 - RNA, 32 nt, Homo Sapiens
uacuuggaccucaggaccuggaaucugagagg

SEQ ID NO: 108393 - RNA, 32 nt, Homo Sapiens
ggagcuaggggcgggggcggaggaggacacga

SEQ ID NO: 108394 - RNA, 32 nt, Homo Sapiens
agguagggggagaggaggaguuaagggcuccg

SEQ ID NO: 108395 - RNA, 32 nt, Homo Sapiens
gagggcugggcugggcugggcugggcugggcu

SEQ ID NO: 108396 - RNA, 32 nt, Homo Sapiens
ugggugggaccugugugcugcuuuugucaucc

SEQ ID NO: 108397 - RNA, 32 nt, Homo Sapiens
gcgcugcggggcggggagcggcucggacgcag

SEQ ID NO: 108398 - RNA, 32 nt, Homo Sapiens
gccugaguuggcagcaaagugaggcucccaug

SEQ ID NO: 108399 - RNA, 32 nt, Homo Sapiens
aagauuugcccauuuacacuuuugagacuuuu

SEQ ID NO: 108400 - RNA, 32 nt, Homo Sapiens
guugcuccugaacaaccuguuucaaauugguu

SEQ ID NO: 108401 - RNA, 32 nt, Homo Sapiens
guucauaucccacuucuuuguuuacaccgaug

SEQ ID NO: 108402 - RNA, 32 nt, Homo Sapiens
acgggcggggcggcggcccauggcgacaccag

SEQ ID NO: 108403 - RNA, 32 nt, Homo Sapiens
ccuccggaggccggggacggaaggcgggcccg

SEQ ID NO: 108404 - RNA, 32 nt, Homo Sapiens
cuccuauuuucaggagucaaauguagccauaa

SEQ ID NO: 108405 - RNA, 32 nt, Homo Sapiens
agaggacgucucuaugccggugacuggacaua

SEQ ID NO: 108406 - RNA, 32 nt, Homo Sapiens
uuucccgcggccccgcugccugcccugcucca

SEQ ID NO: 108407 - RNA, 32 nt, Homo Sapiens
ucuuugauagcaugcagaauugacaacaguuu

SEQ ID NO: 108408 - RNA, 32 nt, Homo Sapiens
gagaagaggguggcuguggugggcgugcucau

SEQ ID NO: 108409 - RNA, 32 nt, Homo Sapiens
uucuacaucagcccuuguuuuguuuuauggcu

SEQ ID NO: 108410 - RNA, 32 nt, Homo Sapiens
aaaaguaaacuuauaagcagaacuuuuacaau

SEQ ID NO: 108411 - RNA, 32 nt, Homo Sapiens
aagauguugcuguucacugguuauuugaaggc

SEQ ID NO: 108412 - RNA, 32 nt, Homo Sapiens
ccggguuauuguaggaaccauccggccccgcg

SEQ ID NO: 108413 - RNA, 32 nt, Homo Sapiens
gaagauguaaaccauuuuauucuguaggcuuu

SEQ ID NO: 108414 - RNA, 31 nt, Homo Sapiens
acaaugcuuaugcuguuuccaaggguagguu

SEQ ID NO: 108415 - RNA, 32 nt, Homo Sapiens
gaguggguggagcgggucuuccuggaagggug

SEQ ID NO: 108416 - RNA, 32 nt, Homo Sapiens
caaaaaacaaaguugggaagggccaaguaaga

SEQ ID NO: 108417 - RNA, 32 nt, Homo Sapiens
cguguuaagcagcugacagaugaugcaaaaaa

SEQ ID NO: 108418 - RNA, 32 nt, Homo Sapiens
ugccuugccgcuccccuuggaccuccaggggc

SEQ ID NO: 108419 - RNA, 32 nt, Homo Sapiens
cacacaccaguaaaauguacagugcaugcuuu

SEQ ID NO: 108420 - RNA, 32 nt, Homo Sapiens
uguucagggcaucggcagcugaacccugcucc

SEQ ID NO: 108421 - RNA, 32 nt, Homo Sapiens
uuauuacugagccaaaugaggcacauaccgag

SEQ ID NO: 108422 - RNA, 32 nt, Homo Sapiens
ugauagcuaaguuuauuauacucuauauuaaa

SEQ ID NO: 108423 - RNA, 32 nt, Homo Sapiens
aucuguauguucugacagacgucuugucuucu

SEQ ID NO: 108424 - RNA, 32 nt, Homo Sapiens
uauuauuuuuaaaaauacagacuaacugaugu

SEQ ID NO: 108425 - RNA, 32 nt, Homo Sapiens
guguccucaggguggggcagguuggcacuucc

SEQ ID NO: 108426 - RNA, 32 nt, Homo Sapiens
auuuugaaagacuauugcugcugcaaauaguu

SEQ ID NO: 108427 - RNA, 32 nt, Homo Sapiens
gagcuagcagcagccaggugcacggagccaca

SEQ ID NO: 108428 - RNA, 32 nt, Homo Sapiens
uuuucuuuuucuucuuuuuuuucgucuucccu

SEQ ID NO: 108429 - RNA, 32 nt, Homo Sapiens
ugguuuuguuuuuauuaagccacugaccagug

SEQ ID NO: 108430 - RNA, 32 nt, Homo Sapiens
uguuuguaaaauuuauacuucuuaagauaaaa

SEQ ID NO: 108431 - RNA, 32 nt, Homo Sapiens
acuaaauuuacaugcauauacauauacauaca

SEQ ID NO: 108432 - RNA, 32 nt, Homo Sapiens
cuggagcucccucuaucuucucugcugucaca

SEQ ID NO: 108433 - RNA, 32 nt, Homo Sapiens
aaacuuaaaaacaagagaaaagaaaaaucaau

SEQ ID NO: 108434 - RNA, 32 nt, Homo Sapiens
caggcaggggagacagguuuagggcucugaca

SEQ ID NO: 108435 - RNA, 32 nt, Homo Sapiens
ggccuguccgcuggcgucauggcaccgaaaaa

SEQ ID NO: 108436 - RNA, 32 nt, Homo Sapiens
guuguacaaauguauuuugaagaauauuuaag

SEQ ID NO: 108437 - RNA, 32 nt, Homo Sapiens
uguauucacaugccaucuccucugugaagccu

SEQ ID NO: 108438 - RNA, 32 nt, Homo Sapiens
auuauaggccagcuuuccauuuagucaauaaa

SEQ ID NO: 108439 - RNA, 32 nt, Homo Sapiens
guuaaaagugaacauuuugaagguuuuuaacu

SEQ ID NO: 108440 - RNA, 32 nt, Homo Sapiens
uuugagggcagagcucgggcaccuuucaucuu

SEQ ID NO: 108441 - RNA, 32 nt, Homo Sapiens
auaacuccauucaaauuuuacauuauaaagca

SEQ ID NO: 108442 - RNA, 32 nt, Homo Sapiens
cagccaacccaccacgaguaaaacgcccugug

SEQ ID NO: 108443 - RNA, 32 nt, Homo Sapiens
cuaaaaaacauuuggaauauaugcuaucuaua

SEQ ID NO: 108444 - RNA, 32 nt, Homo Sapiens
agggaacaggcagggaaauguuaggaggucag

SEQ ID NO: 108445 - RNA, 32 nt, Homo Sapiens
ccucaggcugccccucucuccuccaugcugcc

SEQ ID NO: 108446 - RNA, 32 nt, Homo Sapiens
gcacugugggagccccuuucagggcuggccaa

SEQ ID NO: 108447 - RNA, 32 nt, Homo Sapiens
gguuagccacuacuggugacucuucaaauauu

SEQ ID NO: 108448 - RNA, 32 nt, Homo Sapiens
uuuaagauacuuauucgacuuaucuuaacuaa

SEQ ID NO: 108449 - RNA, 32 nt, Homo Sapiens
gcgucugcggcucuccgccguccccagcccug

SEQ ID NO: 108450 - RNA, 32 nt, Homo Sapiens
ccacccccaagcccugccugccucccauugcc

SEQ ID NO: 108451 - RNA, 32 nt, Homo Sapiens
ugaaaauuucaucaccugagaccuagaggauc

SEQ ID NO: 108452 - RNA, 32 nt, Homo Sapiens
ucuuuccucuccacuccuaagaagcaauuuuc

SEQ ID NO: 108453 - RNA, 32 nt, Homo Sapiens
gccccuguggggaggagcugccaugccggccg

SEQ ID NO: 108454 - RNA, 29 nt, Homo Sapiens
ugacuuaguaaauaaacuuguguuggguu

SEQ ID NO: 108455 - RNA, 32 nt, Homo Sapiens
acuggaacuaaaucaaaugauuacuaguguua

SEQ ID NO: 108456 - RNA, 32 nt, Homo Sapiens
cgcgguuccagauguggauuuggcaaaaccuc

SEQ ID NO: 108457 - RNA, 31 nt, Homo Sapiens
cgcacaauugcuaucuauccauagaccauuc

SEQ ID NO: 108458 - RNA, 32 nt, Homo Sapiens
agucucaaacuccuggguucaagcaauccucc

SEQ ID NO: 108459 - RNA, 32 nt, Homo Sapiens
cacagccggcgccgcgccaugcuccaccuuag

SEQ ID NO: 108460 - RNA, 32 nt, Homo Sapiens
ccccuacucuucaccccuuguuuucaccuauu

SEQ ID NO: 108461 - RNA, 32 nt, Homo Sapiens
agacauggguggcaauguguacauccucacgg

SEQ ID NO: 108462 - RNA, 32 nt, Homo Sapiens
cugcuaaaguggugauuuauccauucaaaaua

SEQ ID NO: 108463 - RNA, 32 nt, Homo Sapiens
gucuuuuuucuuucuuuuuucuuuuuuuguuu

SEQ ID NO: 108464 - RNA, 32 nt, Homo Sapiens
uuuuuuggggguaaaaaauauagccuuuacau

SEQ ID NO: 108465 - RNA, 32 nt, Homo Sapiens
ucagcucgguccccuccgccugacgcuccucu

SEQ ID NO: 108466 - RNA, 32 nt, Homo Sapiens
uuuuuucuuugacuagaaacucaacuucaacc

SEQ ID NO: 108467 - RNA, 32 nt, Homo Sapiens
cggcagugucccuccccuccccccacuccucu

SEQ ID NO: 108468 - RNA, 32 nt, Homo Sapiens
cagaccgggcgcugccaccgccgcccuccccc

SEQ ID NO: 108469 - RNA, 32 nt, Homo Sapiens
gaaaauauucucuauuugaauuauuucuguca

SEQ ID NO: 108470 - RNA, 32 nt, Homo Sapiens
gggaaggugcaucgccaucuacaggagcagaa

SEQ ID NO: 108471 - RNA, 32 nt, Homo Sapiens
cugccuaaaagcacucuagagcuacuuguuca

SEQ ID NO: 108472 - RNA, 31 nt, Homo Sapiens
ugaacccgcgucugccugccgccccgccaug

SEQ ID NO: 108473 - RNA, 32 nt, Homo Sapiens
cucucccuccgccgaggcgcgagguugcggcg

SEQ ID NO: 108474 - RNA, 32 nt, Homo Sapiens
caucugaucugucaucucccaagcuccugaag

SEQ ID NO: 108475 - RNA, 32 nt, Homo Sapiens
uagguccgcuggucacagcacacacacgcucc

SEQ ID NO: 108476 - RNA, 32 nt, Homo Sapiens
cuuugcccucagcuuuccccagccccuccggc

SEQ ID NO: 108477 - RNA, 32 nt, Homo Sapiens
aggccugggacgggcucucccucacagccucc

SEQ ID NO: 108478 - RNA, 32 nt, Homo Sapiens
caccacuuacacaacaaaagaucuaagucgaa

SEQ ID NO: 108479 - RNA, 32 nt, Homo Sapiens
uggcagcuuggccacuggcccggcuccugucu

SEQ ID NO: 108480 - RNA, 32 nt, Homo Sapiens
aaauccagggauuuagguuuuguuugggauuu

SEQ ID NO: 108481 - RNA, 32 nt, Homo Sapiens
cuucagcccucccuuuacuccggugcuuuaua

SEQ ID NO: 108482 - RNA, 32 nt, Homo Sapiens
uccuuuuucuuauugguugaaaauuaccuggu

SEQ ID NO: 108483 - RNA, 32 nt, Homo Sapiens
aaaaagguaacauugauuuauguaucucuuuc

SEQ ID NO: 108484 - RNA, 32 nt, Homo Sapiens
aaacacuggagcucagagcggggggcgcggag

SEQ ID NO: 108485 - RNA, 32 nt, Homo Sapiens
uugcacagugacuuuguuuuuaucugugcuca

SEQ ID NO: 108486 - RNA, 32 nt, Homo Sapiens
gggcuccagcgcgggucggagucuggggguuc

SEQ ID NO: 108487 - RNA, 32 nt, Homo Sapiens
aauuuagguucagauaauaguaaaagucauca

SEQ ID NO: 108488 - RNA, 32 nt, Homo Sapiens
cuaacaccgcacaacuaacaacuaacaccgca

SEQ ID NO: 108489 - RNA, 32 nt, Homo Sapiens
agcucaugaaugccucuuaucuuccuaagcgg

SEQ ID NO: 108490 - RNA, 32 nt, Homo Sapiens
aucacuuaaaauugaauucauccauuuuuaaa

SEQ ID NO: 108491 - RNA, 27 nt, Homo Sapiens
aaucuguccuucuuccaaguuccuaga

SEQ ID NO: 108492 - RNA, 32 nt, Homo Sapiens
ucuuauuuucauagcagagacuugauacuguc

SEQ ID NO: 108493 - RNA, 32 nt, Homo Sapiens
cggcgagggggcccggggaggggacagagcug

SEQ ID NO: 108494 - RNA, 32 nt, Homo Sapiens
cccccuuugaagaucuccagguggacuucaca

SEQ ID NO: 108495 - RNA, 32 nt, Homo Sapiens
cacaaggggagaaaugggugauaaagaaucca

SEQ ID NO: 108496 - RNA, 32 nt, Homo Sapiens
acucugauucagaaacacacuucuaccucuuu

SEQ ID NO: 108497 - RNA, 32 nt, Homo Sapiens
gccuggcacccuggacagcaucauuuacuauc

SEQ ID NO: 108498 - RNA, 32 nt, Homo Sapiens
cccccuucccucuuuucuuaaacuucuggcau

SEQ ID NO: 108499 - RNA, 32 nt, Homo Sapiens
cuaccucagggggacucauggcagcuuugcaa

SEQ ID NO: 108500 - RNA, 32 nt, Homo Sapiens
ugacacaggguggucuuaaaagaguccuaguc

SEQ ID NO: 108501 - RNA, 32 nt, Homo Sapiens
ugaggaaguggcguuuggaagaacgagaauga

SEQ ID NO: 108502 - RNA, 32 nt, Homo Sapiens
cacacacaggucgccagugacuucacacacac

SEQ ID NO: 108503 - RNA, 32 nt, Homo Sapiens
ucucaauagcaccuccucccuuuucucccuau

SEQ ID NO: 108504 - RNA, 32 nt, Homo Sapiens
caucuggcccucccuugucacgugucaggcau

SEQ ID NO: 108505 - RNA, 32 nt, Homo Sapiens
ccgucguccccucuccuccucugacccugacc

SEQ ID NO: 108506 - RNA, 32 nt, Homo Sapiens
ugccccagacaggaagcagagucaccacgcag

SEQ ID NO: 108507 - RNA, 32 nt, Homo Sapiens
cccugcucauucugcuucugcugcugaucaag

SEQ ID NO: 108508 - RNA, 32 nt, Homo Sapiens
auaucucaugguuuccuuuuccucuugacugu

SEQ ID NO: 108509 - RNA, 32 nt, Homo Sapiens
acuugaggcuggaacagugaccaaguguaauu

SEQ ID NO: 108510 - RNA, 32 nt, Homo Sapiens
gauggauuccuccaaggaguccuuuacuagcc

SEQ ID NO: 108511 - RNA, 32 nt, Homo Sapiens
cgucgccugcgagccugcggccugcuggagcc

SEQ ID NO: 108512 - RNA, 32 nt, Homo Sapiens
uauuuuaaggauuguuuuguuuuguaaucagu

SEQ ID NO: 108513 - RNA, 32 nt, Homo Sapiens
cacuguggaacgucuguaaauauguuuuuaua

SEQ ID NO: 108514 - RNA, 32 nt, Homo Sapiens
gucguccccccgcuucucagcccccucugggg

SEQ ID NO: 108515 - RNA, 32 nt, Homo Sapiens
agcauccagcuccccacccccaggcuggcagu

SEQ ID NO: 108516 - RNA, 32 nt, Homo Sapiens
uuaguucuauaagugaggaagaguuuauggca

SEQ ID NO: 108517 - RNA, 32 nt, Homo Sapiens
ucagcccaccgcagcccuccaggcccccgccu

SEQ ID NO: 108518 - RNA, 32 nt, Homo Sapiens
cguccugccccggcuuccccagccucccagca

SEQ ID NO: 108519 - RNA, 32 nt, Homo Sapiens
ugcucuuacacagcauuguuuugucaaucaac

SEQ ID NO: 108520 - RNA, 32 nt, Homo Sapiens
aacacuuucucuucuuagucucucucuuuauu

SEQ ID NO: 108521 - RNA, 32 nt, Homo Sapiens
gagcuggcacgcuggacccaggccuucugggc

SEQ ID NO: 108522 - RNA, 32 nt, Homo Sapiens
uguuccuccuaagguuauguccuaauaacuau

SEQ ID NO: 108523 - RNA, 32 nt, Homo Sapiens
auuucuuuguuaaauuuuucugauuguuuccu

SEQ ID NO: 108524 - RNA, 32 nt, Homo Sapiens
cuacaccugugcuguaagaagcugaaaauuuu

SEQ ID NO: 108525 - RNA, 32 nt, Homo Sapiens
cugcagcccagcugguggugcugcccuaucag

SEQ ID NO: 108526 - RNA, 31 nt, Homo Sapiens
ucuuggucccuccagaaccaccccggccccc

SEQ ID NO: 108527 - RNA, 32 nt, Homo Sapiens
ccugugaggacgggguucccccugccucgugg

SEQ ID NO: 108528 - RNA, 32 nt, Homo Sapiens
ugauaaacacuacucaguccaccaacaacaaa

SEQ ID NO: 108529 - RNA, 32 nt, Homo Sapiens
caccugcugagcaggaccgggugugaaggaag

SEQ ID NO: 108530 - RNA, 32 nt, Homo Sapiens
acgucccuucccagucuuucccggcccccagg

SEQ ID NO: 108531 - RNA, 32 nt, Homo Sapiens
ugaaugacugaauaguuuaguccagauuuuua

SEQ ID NO: 108532 - RNA, 32 nt, Homo Sapiens
cccaaaacuacuacuauauagacagaauggaa

SEQ ID NO: 108533 - RNA, 32 nt, Homo Sapiens
caccgcacccucggacugccccaaggcccccg

SEQ ID NO: 108534 - RNA, 32 nt, Homo Sapiens
auuaugcaaaaauuuuguacaguguuaaggcc

SEQ ID NO: 108535 - RNA, 30 nt, Homo Sapiens
ggccugcccuuggccacccacuuggucccc

SEQ ID NO: 108536 - RNA, 32 nt, Homo Sapiens
ucuguccagguugaggaaugggcugaacgugu

SEQ ID NO: 108537 - RNA, 32 nt, Homo Sapiens
gauucagugaacaagacugaaaagguaccugu

SEQ ID NO: 108538 - RNA, 32 nt, Homo Sapiens
gcggugccugcgcuguggccaugucuguguac

SEQ ID NO: 108539 - RNA, 32 nt, Homo Sapiens
gguagcacaaucuacuaauguugugugauuug

SEQ ID NO: 108540 - RNA, 32 nt, Homo Sapiens
cuggggugacggcagggcagggggcgccuggc

SEQ ID NO: 108541 - RNA, 32 nt, Homo Sapiens
ucuucuucccugcugugucuccaggcccgacu

SEQ ID NO: 108542 - RNA, 32 nt, Homo Sapiens
agucguucaaaaggagcaagaauggccugcgg

SEQ ID NO: 108543 - RNA, 32 nt, Homo Sapiens
guaaagauauuuucuuuuuguuauuagaagga

SEQ ID NO: 108544 - RNA, 32 nt, Homo Sapiens
caaauauuuucauguauuuuacacaaauguga

SEQ ID NO: 108545 - RNA, 32 nt, Homo Sapiens
gaaccaacuccggccgcaccuuguucucggcc

SEQ ID NO: 108546 - RNA, 32 nt, Homo Sapiens
aaguguauuuuuccguauucuggaagauguuu

SEQ ID NO: 108547 - RNA, 32 nt, Homo Sapiens
ucacauguguuuacuacugcuggggccuuccu

SEQ ID NO: 108548 - RNA, 32 nt, Homo Sapiens
acgccgccgcggagccgaggcggagccgcugu

SEQ ID NO: 108549 - RNA, 31 nt, Homo Sapiens
ucacacggggcucaguggacggccuuggacu

SEQ ID NO: 108550 - RNA, 32 nt, Homo Sapiens
gacacacugggcuggagcugccggcuggcacg

SEQ ID NO: 108551 - RNA, 32 nt, Homo Sapiens
caccucagaaugaaaguucauguugguucuga

SEQ ID NO: 108552 - RNA, 32 nt, Homo Sapiens
gccccgcgccccccgcgccgggauuucagccc

SEQ ID NO: 108553 - RNA, 32 nt, Homo Sapiens
acugcccgcugugugccaguacucaggcagcu

SEQ ID NO: 108554 - RNA, 32 nt, Homo Sapiens
gguucuggguucuagaugucaauucuaaauaa

SEQ ID NO: 108555 - RNA, 32 nt, Homo Sapiens
guccucagcccauuucagacugcagaugccgc

SEQ ID NO: 108556 - RNA, 32 nt, Homo Sapiens
acuuggcuugguuuuucugaacuuuugccucu

SEQ ID NO: 108557 - RNA, 32 nt, Homo Sapiens
uuucugcaugaauaauaaccaacaaugugugu

SEQ ID NO: 108558 - RNA, 32 nt, Homo Sapiens
caggggaccccauauccacugguagccaccuc

SEQ ID NO: 108559 - RNA, 32 nt, Homo Sapiens
cgccgaggugacugaggagagaggcgccuccu

SEQ ID NO: 108560 - RNA, 29 nt, Homo Sapiens
ggaaaagucagauuucauuuucuacccug

SEQ ID NO: 108561 - RNA, 32 nt, Homo Sapiens
gguagaagagauuuuucaguugcuauuucucu

SEQ ID NO: 108562 - RNA, 32 nt, Homo Sapiens
gccucuuucuuacuuugccauccacacugcuc

SEQ ID NO: 108563 - RNA, 32 nt, Homo Sapiens
cuguuucuggcacacccgggcuccucugugug

SEQ ID NO: 108564 - RNA, 32 nt, Homo Sapiens
uagaaaggcgugauuggauuugaaaugugagg

SEQ ID NO: 108565 - RNA, 32 nt, Homo Sapiens
ucggagggaaaggauuauuuggccccauuaag

SEQ ID NO: 108566 - RNA, 28 nt, Homo Sapiens
aggauggccaaggggcuccuggugaccu

SEQ ID NO: 108567 - RNA, 32 nt, Homo Sapiens
gacacaaaacaucuaaugccaauauauacaug

SEQ ID NO: 108568 - RNA, 32 nt, Homo Sapiens
aagucuggcccaggguauuuuccuccuuuccu

SEQ ID NO: 108569 - RNA, 32 nt, Homo Sapiens
gguccgggcauccagccuugaagaugcacaag

SEQ ID NO: 108570 - RNA, 32 nt, Homo Sapiens
accgccccaguggucagcugccgcgcuguugc

SEQ ID NO: 108571 - RNA, 32 nt, Homo Sapiens
cgucucucgcccgcugccccgcgagcccgcgg

SEQ ID NO: 108572 - RNA, 32 nt, Homo Sapiens
auucuauuaguuacaaaacucaaucauuuuau

SEQ ID NO: 108573 - RNA, 31 nt, Homo Sapiens
ggccggacggcggugucccggcguggcggga

SEQ ID NO: 108574 - RNA, 32 nt, Homo Sapiens
uguagauacgacugccuauaaucaggggacuc

SEQ ID NO: 108575 - RNA, 32 nt, Homo Sapiens
aauuaauguuucccuuggauguuuugacaaaa

SEQ ID NO: 108576 - RNA, 32 nt, Homo Sapiens
ugccacagagcccacacccaugcccaccagug

SEQ ID NO: 108577 - RNA, 32 nt, Homo Sapiens
gugucuagcauuaacuuauugucuaggccaga

SEQ ID NO: 108578 - RNA, 32 nt, Homo Sapiens
ugugcagucccgcucccucacccagcuccuca

SEQ ID NO: 108579 - RNA, 32 nt, Homo Sapiens
guucuugguuauaaaaauguuaauucagaauu

SEQ ID NO: 108580 - RNA, 32 nt, Homo Sapiens
ccggcuuggaauuuuuaauagugguuacaaug

SEQ ID NO: 108581 - RNA, 32 nt, Homo Sapiens
uagcuggggaauggugcugcgcggcgggcggg

SEQ ID NO: 108582 - RNA, 32 nt, Homo Sapiens
aaaauggguaguucuucagacacaauguaacu

SEQ ID NO: 108583 - RNA, 32 nt, Homo Sapiens
ggacugagccuggggacgcccacccacaccca

SEQ ID NO: 108584 - RNA, 32 nt, Homo Sapiens
uuuucugguauuguauauaugcacuuuaauau

SEQ ID NO: 108585 - RNA, 32 nt, Homo Sapiens
gggcugcaggugaugcauugcacgggacacca

SEQ ID NO: 108586 - RNA, 32 nt, Homo Sapiens
agaaugcuuucaaggguaaccagauuuaagaa

SEQ ID NO: 108587 - RNA, 32 nt, Homo Sapiens
auuuguuagaaccagucuuuugaaagaaaagu

SEQ ID NO: 108588 - RNA, 32 nt, Homo Sapiens
cccgggcgcuccagaccaguguccuuguagga

SEQ ID NO: 108589 - RNA, 32 nt, Homo Sapiens
uuuucucaaaauaccauacuaacugcuaaagc

SEQ ID NO: 108590 - RNA, 32 nt, Homo Sapiens
acccucauucuauacaaccuauggauuucaug

SEQ ID NO: 108591 - RNA, 32 nt, Homo Sapiens
gcucccucuacccggccggacccggcucugcc

SEQ ID NO: 108592 - RNA, 32 nt, Homo Sapiens
ggaacggccagguccagcgucuccucguugcu

SEQ ID NO: 108593 - RNA, 32 nt, Homo Sapiens
cauaaaccagcuggagcagacccuuuucaucu

SEQ ID NO: 108594 - RNA, 32 nt, Homo Sapiens
ggacaugaggacccgucuuuuugcagugccag

SEQ ID NO: 108595 - RNA, 32 nt, Homo Sapiens
caaaaaucuauuauguaccuaauauugugccu

SEQ ID NO: 108596 - RNA, 32 nt, Homo Sapiens
agauaggagcugaacagaagacuuuauucaaa

SEQ ID NO: 108597 - RNA, 31 nt, Homo Sapiens
ggagaacaagagguuugguucacaucauaaa

SEQ ID NO: 108598 - RNA, 32 nt, Homo Sapiens
aauaauaggggguggggggaggggcgguggga

SEQ ID NO: 108599 - RNA, 32 nt, Homo Sapiens
gaacuccaggcccuccucucccauccuugaug

SEQ ID NO: 108600 - RNA, 32 nt, Homo Sapiens
guagugcaaguaaaauuucacuuuuugaaacu

SEQ ID NO: 108601 - RNA, 29 nt, Homo Sapiens
aagcuuauuaaguauuauuuucuaaaaga

SEQ ID NO: 108602 - RNA, 32 nt, Homo Sapiens
ucuaauuguauuacagcacaaacaaaacugac

SEQ ID NO: 108603 - RNA, 32 nt, Homo Sapiens
aaugaugcgcucagccaacaauucauuacacu

SEQ ID NO: 108604 - RNA, 32 nt, Homo Sapiens
gcuucagagguaguaacugucauucuucaauc

SEQ ID NO: 108605 - RNA, 32 nt, Homo Sapiens
aagacuugcucccgagauggagugggcguggu

SEQ ID NO: 108606 - RNA, 32 nt, Homo Sapiens
gcgcgggcucagugcuggcgcgugaggcggag

SEQ ID NO: 108607 - RNA, 32 nt, Homo Sapiens
ugugucagugcacuggucccagcccuggccgc

SEQ ID NO: 108608 - RNA, 32 nt, Homo Sapiens
ucacucugcacccugaugugggaggcuuuggc

SEQ ID NO: 108609 - RNA, 32 nt, Homo Sapiens
ccugagccgccgccgagcgcccggggccaugc

SEQ ID NO: 108610 - RNA, 32 nt, Homo Sapiens
uguuuugccauguuggccaggcuggucuugaa

SEQ ID NO: 108611 - RNA, 32 nt, Homo Sapiens
ggcgugugcgguugugggggagcucgccgugg

SEQ ID NO: 108612 - RNA, 32 nt, Homo Sapiens
aagaagggaagcuguuuugggguguggggccu

SEQ ID NO: 108613 - RNA, 32 nt, Homo Sapiens
gccugcucaggguggccuggaacuuggaggug

SEQ ID NO: 108614 - RNA, 32 nt, Homo Sapiens
uuguuacaggggugcuggccuucccuggcgcc

SEQ ID NO: 108615 - RNA, 32 nt, Homo Sapiens
acugccucucugcggaaggaggacugcauugu

SEQ ID NO: 108616 - RNA, 32 nt, Homo Sapiens
augacucuggcucaucuaguccugcuccuugu

SEQ ID NO: 108617 - RNA, 32 nt, Homo Sapiens
aacccuuaacuccugcugaggucauaacaacc

SEQ ID NO: 108618 - RNA, 32 nt, Homo Sapiens
gccccucgcccucccccucgcggccauugggc

SEQ ID NO: 108619 - RNA, 32 nt, Homo Sapiens
cagugcaaacuuaaaaaugauuuuccuucuag

SEQ ID NO: 108620 - RNA, 32 nt, Homo Sapiens
ggcgccauuuaaaagaacaggaugagaaucua

SEQ ID NO: 108621 - RNA, 32 nt, Homo Sapiens
ugcugaaagagaaaaagauaugguuugugaac

SEQ ID NO: 108622 - RNA, 32 nt, Homo Sapiens
ggauuucaaggauuuggauuuggagauggugg

SEQ ID NO: 108623 - RNA, 32 nt, Homo Sapiens
guauccucagguccgagccccuggacagcagc

SEQ ID NO: 108624 - RNA, 32 nt, Homo Sapiens
ccuguaggacucaaagggagccaggaccccau

SEQ ID NO: 108625 - RNA, 32 nt, Homo Sapiens
ggguauuuauaucugaaccagacagacgcuug

SEQ ID NO: 108626 - RNA, 32 nt, Homo Sapiens
gucucuggacgcugcgcggcgcuccuaggagc

SEQ ID NO: 108627 - RNA, 32 nt, Homo Sapiens
auuauugccaaaaaguuuuuuuuaaucugucu

SEQ ID NO: 108628 - RNA, 32 nt, Homo Sapiens
ccuccccugcggaucacucugcucucccuaac

SEQ ID NO: 108629 - RNA, 32 nt, Homo Sapiens
uagccgggacuacaggcgcgcgccaccauggc

SEQ ID NO: 108630 - RNA, 32 nt, Homo Sapiens
gacagggaauggggagaagaaagacccccauu

SEQ ID NO: 108631 - RNA, 32 nt, Homo Sapiens
gucucuuuucccuuuucccuuaccaccuggaa

SEQ ID NO: 108632 - RNA, 32 nt, Homo Sapiens
gaggggaagaaaaacucuauuuuuguaaaaag

SEQ ID NO: 108633 - RNA, 32 nt, Homo Sapiens
cuagcccaggagagagaaagccaggcagguag

SEQ ID NO: 108634 - RNA, 32 nt, Homo Sapiens
ccguuuauuguacagaugucggugcagaucuc

SEQ ID NO: 108635 - RNA, 32 nt, Homo Sapiens
agggucuuuccaccugcgcggcugcagccggc

SEQ ID NO: 108636 - RNA, 32 nt, Homo Sapiens
uugagcugcggccagaacccccugcccaucua

SEQ ID NO: 108637 - RNA, 32 nt, Homo Sapiens
cucuuuuugaacagagaauugauucaagauug

SEQ ID NO: 108638 - RNA, 32 nt, Homo Sapiens
auagauucuaaagauucuauaguucuagacau

SEQ ID NO: 108639 - RNA, 32 nt, Homo Sapiens
uugaagaaucaucaaagagcaaugcaaaugaa

SEQ ID NO: 108640 - RNA, 32 nt, Homo Sapiens
ucuauuaaauguuuagugaauaaacucuguga

SEQ ID NO: 108641 - RNA, 32 nt, Homo Sapiens
caucuuuauuaagaugucuuucauguguauau

SEQ ID NO: 108642 - RNA, 32 nt, Homo Sapiens
cccuucugccuuggcuuggacaaaccuagaau

SEQ ID NO: 108643 - RNA, 32 nt, Homo Sapiens
aaagccgcccucggggcgcucauggcgggacg

SEQ ID NO: 108644 - RNA, 32 nt, Homo Sapiens
ggaaguucaaggaagaauaaaguugaaauuuu

SEQ ID NO: 108645 - RNA, 32 nt, Homo Sapiens
caagguuuguagcuugccaauauguucauuac

SEQ ID NO: 108646 - RNA, 32 nt, Homo Sapiens
ccuguucucucccacacgccccucuccucuac

SEQ ID NO: 108647 - RNA, 32 nt, Homo Sapiens
cccacuguccagcugcagaaauucguugccaa

SEQ ID NO: 108648 - RNA, 32 nt, Homo Sapiens
acagaacuuggaaauauugagaauaauuucuu

SEQ ID NO: 108649 - RNA, 32 nt, Homo Sapiens
uccccucaaacacaaaaguacaauaugaagcc

SEQ ID NO: 108650 - RNA, 29 nt, Homo Sapiens
aggggaggacuucucaguucuaacaagcu

SEQ ID NO: 108651 - RNA, 32 nt, Homo Sapiens
uguggcccuggccgugaucuccaccuuucugu

SEQ ID NO: 108652 - RNA, 32 nt, Homo Sapiens
uugccucacacccacccacaucacaggaugga

SEQ ID NO: 108653 - RNA, 28 nt, Homo Sapiens
agcaugucugcacauuccaugcucugug

SEQ ID NO: 108654 - RNA, 32 nt, Homo Sapiens
caggaguggaggaggccugggggcagggagag

SEQ ID NO: 108655 - RNA, 32 nt, Homo Sapiens
gaauugaaauaccagcaucagguuuaaugccu

SEQ ID NO: 108656 - RNA, 32 nt, Homo Sapiens
agauaaaugugcuguuucuaguuucuuaaaua

SEQ ID NO: 108657 - RNA, 32 nt, Homo Sapiens
cauaacaauaaaaauacaaaaacauacagauu

SEQ ID NO: 108658 - RNA, 32 nt, Homo Sapiens
aagaaagcucuuuccagcuguuuuuauggauu

SEQ ID NO: 108659 - RNA, 32 nt, Homo Sapiens
uuugaggcaucuaauauuuacauauuugccuu

SEQ ID NO: 108660 - RNA, 26 nt, Homo Sapiens
caugggacuuuggggacaaagcgucc

SEQ ID NO: 108661 - RNA, 32 nt, Homo Sapiens
cguuagaggauauagaaaaauauaaguacaau

SEQ ID NO: 108662 - RNA, 32 nt, Homo Sapiens
uccucugcuucuuccugaggucuagaacaagg

SEQ ID NO: 108663 - RNA, 32 nt, Homo Sapiens
cccauguugagccgcuccugauggcugacggg

SEQ ID NO: 108664 - RNA, 32 nt, Homo Sapiens
cucuacagacccgcucagcaguucuuuccaac

SEQ ID NO: 108665 - RNA, 32 nt, Homo Sapiens
aguggcugggagccccacacagaugcugggcu

SEQ ID NO: 108666 - RNA, 32 nt, Homo Sapiens
uugucagagcuauguggagucuguggguggca

SEQ ID NO: 108667 - RNA, 32 nt, Homo Sapiens
gauuuauagaaaaacugggaaauacagguacc

SEQ ID NO: 108668 - RNA, 31 nt, Homo Sapiens
uccgggaugagcucagccgcggccgaccacu

SEQ ID NO: 108669 - RNA, 32 nt, Homo Sapiens
uaaaacauucaaacuuguuuucuuuuuucugu

SEQ ID NO: 108670 - RNA, 32 nt, Homo Sapiens
aaaugacucuucugccucagccucaccaaagu

SEQ ID NO: 108671 - RNA, 32 nt, Homo Sapiens
aguuuccuauagaagaaacuucacauaguggc

SEQ ID NO: 108672 - RNA, 25 nt, Homo Sapiens
auggcuuggcagggcuggcccgcgg

SEQ ID NO: 108673 - RNA, 32 nt, Homo Sapiens
ccaguuucccucugcuguggguucugggcugu

SEQ ID NO: 108674 - RNA, 29 nt, Homo Sapiens
gccgcgcggggacagggcugcugagcagc

SEQ ID NO: 108675 - RNA, 32 nt, Homo Sapiens
ucuuuuguauaaauaaaauuucacaggcuuca

SEQ ID NO: 108676 - RNA, 32 nt, Homo Sapiens
gcacagaguggaagguagaaacaggguagugu

SEQ ID NO: 108677 - RNA, 32 nt, Homo Sapiens
gguugagaccagaaaggugaccaagacagauu

SEQ ID NO: 108678 - RNA, 32 nt, Homo Sapiens
ugagcgcgggcggcgcggacggcagcgguugg

SEQ ID NO: 108679 - RNA, 32 nt, Homo Sapiens
aguguuauauccuccaggaauacuggccagag

SEQ ID NO: 108680 - RNA, 32 nt, Homo Sapiens
cgaguggggcuggaaacagacccggcgcccag

SEQ ID NO: 108681 - RNA, 32 nt, Homo Sapiens
gaagcccccacugaggccgccgcugccgggcc

SEQ ID NO: 108682 - RNA, 32 nt, Homo Sapiens
cccuagugggagaggcggcggcggcggccgag

SEQ ID NO: 108683 - RNA, 32 nt, Homo Sapiens
cuuggaagaagaaagaaacaaaaacugagauu

SEQ ID NO: 108684 - RNA, 32 nt, Homo Sapiens
cuugcucagaaaaacaaacaaacaaacaguuu

SEQ ID NO: 108685 - RNA, 32 nt, Homo Sapiens
uugacuugguagaguuccuuucugggaagaaa

SEQ ID NO: 108686 - RNA, 32 nt, Homo Sapiens
gccagaguggaggucggugaaauaaagugaug

SEQ ID NO: 108687 - RNA, 32 nt, Homo Sapiens
uaaaaucaagauauuucuuugcugaaguauuu

SEQ ID NO: 108688 - RNA, 32 nt, Homo Sapiens
cucaagcccgaauucguagacaucaucaaugc

SEQ ID NO: 108689 - RNA, 32 nt, Homo Sapiens
cacuucauuguacagacuuuuauaauaaaaga

SEQ ID NO: 108690 - RNA, 32 nt, Homo Sapiens
aggcuggauauacaaagagacaauggcaugac

SEQ ID NO: 108691 - RNA, 32 nt, Homo Sapiens
ccucucccugcccccagcgccaggcgcgggcu

SEQ ID NO: 108692 - RNA, 32 nt, Homo Sapiens
gcauugcagcggggcacugggcugcaaugggc

SEQ ID NO: 108693 - RNA, 32 nt, Homo Sapiens
uuauccuucuauuggaauucuaguauucugua

SEQ ID NO: 108694 - RNA, 32 nt, Homo Sapiens
gcagauggucccacuuauucuagggucuuacu

SEQ ID NO: 108695 - RNA, 32 nt, Homo Sapiens
cgcagccccauggccccguccaggcugcagcu

SEQ ID NO: 108696 - RNA, 32 nt, Homo Sapiens
gcucuggccaagggcugucuucugugcacaua

SEQ ID NO: 108697 - RNA, 32 nt, Homo Sapiens
ggcagcagccccggugcggccgcgcgcgccuu

SEQ ID NO: 108698 - RNA, 32 nt, Homo Sapiens
ccacuggaauaaugcuccugccugauuguauc

SEQ ID NO: 108699 - RNA, 32 nt, Homo Sapiens
gcagcagcggcgccgccucccagaguucagac

SEQ ID NO: 108700 - RNA, 32 nt, Homo Sapiens
gacuuuuaaaagacacuauauuggagucucuu

SEQ ID NO: 108701 - RNA, 32 nt, Homo Sapiens
ucaccucccauucccaggggcaucaucauguu

SEQ ID NO: 108702 - RNA, 32 nt, Homo Sapiens
ggcucucgacagggcauugagaugcaucucuu

SEQ ID NO: 108703 - RNA, 32 nt, Homo Sapiens
uagggguuucgcccauagccagcccuccguca

SEQ ID NO: 108704 - RNA, 32 nt, Homo Sapiens
ccgagugaugccccgcuauugcgcggcgauuu

SEQ ID NO: 108705 - RNA, 32 nt, Homo Sapiens
acaacuguccaagcucucagccccacagggaa

SEQ ID NO: 108706 - RNA, 32 nt, Homo Sapiens
cccuucgccucggcccggcccaauccaggccc

SEQ ID NO: 108707 - RNA, 29 nt, Homo Sapiens
cauuuauuagauuuucauuuucuauuaac

SEQ ID NO: 108708 - RNA, 32 nt, Homo Sapiens
ggaagcugcuacucgugagcgccagugcgggu

SEQ ID NO: 108709 - RNA, 32 nt, Homo Sapiens
agcccugaaaaauaaaaacaaacuuauuuuua

SEQ ID NO: 108710 - RNA, 32 nt, Homo Sapiens
uauuuuccuuuucaacacaucuauugaaagug

SEQ ID NO: 108711 - RNA, 32 nt, Homo Sapiens
cagugugauaucuauuauguagauaaauauau

SEQ ID NO: 108712 - RNA, 32 nt, Homo Sapiens
ucccccagccccagccccuggcauccacccuu

SEQ ID NO: 108713 - RNA, 32 nt, Homo Sapiens
aguucaaggcugcagugagcugugauuugauu

SEQ ID NO: 108714 - RNA, 32 nt, Homo Sapiens
uaaagaguacuggugaaaaacacauaguaaau

SEQ ID NO: 108715 - RNA, 32 nt, Homo Sapiens
cagaacuuugccugcccucccuugguuccagu

SEQ ID NO: 108716 - RNA, 32 nt, Homo Sapiens
caggcgccccuggggaaaugggaccagccuaa

SEQ ID NO: 108717 - RNA, 32 nt, Homo Sapiens
caaaaaccugguuuucuuuuuugguuucuuca

SEQ ID NO: 108718 - RNA, 32 nt, Homo Sapiens
guucuacgacguggccagacauggcauucugc

SEQ ID NO: 108719 - RNA, 32 nt, Homo Sapiens
gaaggugagcgcggccgagcugggccgccagg

SEQ ID NO: 108720 - RNA, 32 nt, Homo Sapiens
aggaauguaccuuagucacuugaaacugcugu

SEQ ID NO: 108721 - RNA, 32 nt, Homo Sapiens
auagugauuaugaaguaauuucagaugauauu

SEQ ID NO: 108722 - RNA, 32 nt, Homo Sapiens
caugacauuuuuccucucugcaaauggcuuag

SEQ ID NO: 108723 - RNA, 32 nt, Homo Sapiens
agcucaugggccgggcacgugcacugacucac

SEQ ID NO: 108724 - RNA, 32 nt, Homo Sapiens
augaaauguuuuuucuuacacuuugucauggu

SEQ ID NO: 108725 - RNA, 32 nt, Homo Sapiens
gcgaagcugaaugauuugauauuucaugaaau

SEQ ID NO: 108726 - RNA, 32 nt, Homo Sapiens
gagagcucagagcaauuaaaccacuauuccau

SEQ ID NO: 108727 - RNA, 32 nt, Homo Sapiens
gcgccuccuccgccgccgcggacuccggcagc

SEQ ID NO: 108728 - RNA, 32 nt, Homo Sapiens
cuccacuccccugcuuaauaaacucuaaaaau

SEQ ID NO: 108729 - RNA, 32 nt, Homo Sapiens
uccuuuagaaaugcucuagaagaucuguauug

SEQ ID NO: 108730 - RNA, 32 nt, Homo Sapiens
acaaacuuguaaauuucuuuguauauaaacua

SEQ ID NO: 108731 - RNA, 32 nt, Homo Sapiens
ugcaugacggcaagcccuccgagggcuccuac

SEQ ID NO: 108732 - RNA, 32 nt, Homo Sapiens
aaaagcugcggcgccgccgccggaggccgcgc

SEQ ID NO: 108733 - RNA, 32 nt, Homo Sapiens
gucaauacuuuuuuguaaauggcaaugcagaa

SEQ ID NO: 108734 - RNA, 30 nt, Homo Sapiens
cccccauggaggaggaggagggggcggugg

SEQ ID NO: 108735 - RNA, 32 nt, Homo Sapiens
ccugggcgccacaugcucauggccagaaucuu

SEQ ID NO: 108736 - RNA, 32 nt, Homo Sapiens
uugcugccucuaucuuguuuuuuguuuuuucu

SEQ ID NO: 108737 - RNA, 32 nt, Homo Sapiens
cagcccagcccaacccaacccggagcagauca

SEQ ID NO: 108738 - RNA, 32 nt, Homo Sapiens
ugacuucacaggcuuaaaauguugcuguaaug

SEQ ID NO: 108739 - RNA, 32 nt, Homo Sapiens
ugauugucaguaaauuuucgaagaacauuaaa

SEQ ID NO: 108740 - RNA, 32 nt, Homo Sapiens
ucauaaaggagauaaauuauacaaaugugaag

SEQ ID NO: 108741 - RNA, 32 nt, Homo Sapiens
acuuugacuucaucauuaaacaucuuauaaug

SEQ ID NO: 108742 - RNA, 32 nt, Homo Sapiens
cugucaaaaugaaggugaacuggcauggcccg

SEQ ID NO: 108743 - RNA, 32 nt, Homo Sapiens
ccacgcguccgggugaugaugccacuggcaga

SEQ ID NO: 108744 - RNA, 32 nt, Homo Sapiens
auuccucuauuugggagagaucuuccaaucca

SEQ ID NO: 108745 - RNA, 32 nt, Homo Sapiens
gcccccgcguccugucccgggggcucuccuag

SEQ ID NO: 108746 - RNA, 32 nt, Homo Sapiens
gguugcuggugcuacauggcggcagcuuugac

SEQ ID NO: 108747 - RNA, 32 nt, Homo Sapiens
cgggaacaggugccggcgccuccgccccaucc

SEQ ID NO: 108748 - RNA, 32 nt, Homo Sapiens
aauguacagcuauuauuugccauggaaaaggu

SEQ ID NO: 108749 - RNA, 32 nt, Homo Sapiens
uaccuguuaaaauuauuuaagccugacccaaa

SEQ ID NO: 108750 - RNA, 32 nt, Homo Sapiens
gcgggaggggguagaguuggcagguuugacuc

SEQ ID NO: 108751 - RNA, 32 nt, Homo Sapiens
cucugugaccccagccucccugcccauccuuc

SEQ ID NO: 108752 - RNA, 32 nt, Homo Sapiens
gggcaaaugcacccucauguggcccggaacgc

SEQ ID NO: 108753 - RNA, 32 nt, Homo Sapiens
agccgggcaugguggcacgugccuguaaucuc

SEQ ID NO: 108754 - RNA, 31 nt, Homo Sapiens
cgcgaguugccggucccgcggggccugggcu

SEQ ID NO: 108755 - RNA, 32 nt, Homo Sapiens
uguaguuggaccugaggucagaggcggggcau

SEQ ID NO: 108756 - RNA, 32 nt, Homo Sapiens
ccauguacuagggauuaacauaaaaacaacaa

SEQ ID NO: 108757 - RNA, 32 nt, Homo Sapiens
uuuuaaaucaguagucguugaagcguuccgcu

SEQ ID NO: 108758 - RNA, 32 nt, Homo Sapiens
ccagacagacugcuuuuccccagucgguccgg

SEQ ID NO: 108759 - RNA, 32 nt, Homo Sapiens
gucccgggcacaguucacgccggagcgaagcc

SEQ ID NO: 108760 - RNA, 32 nt, Homo Sapiens
gcgauccugccagcagugggugggcagccuga

SEQ ID NO: 108761 - RNA, 32 nt, Homo Sapiens
acagccgccucccucgcgucccccacuccccc

SEQ ID NO: 108762 - RNA, 32 nt, Homo Sapiens
cuucucugaccacaucgucaggauagaauucu

SEQ ID NO: 108763 - RNA, 32 nt, Homo Sapiens
gacgcguccacuugcaacacccgccucacugu

SEQ ID NO: 108764 - RNA, 32 nt, Homo Sapiens
uauuacuuuuugcaauaagaaacaaguaaccu

SEQ ID NO: 108765 - RNA, 32 nt, Homo Sapiens
cauaacagugacuaaucagggauuaucauaga

SEQ ID NO: 108766 - RNA, 32 nt, Homo Sapiens
gcccuucaaaacaauccuaggcagagucugag

SEQ ID NO: 108767 - RNA, 32 nt, Homo Sapiens
caggugccccuguucucccuucccucccccag

SEQ ID NO: 108768 - RNA, 32 nt, Homo Sapiens
aucccagcccuggccuguggccuuucuuguga

SEQ ID NO: 108769 - RNA, 32 nt, Homo Sapiens
acucaaaccaaccuuuggauagaaaaguguuu

SEQ ID NO: 108770 - RNA, 32 nt, Homo Sapiens
uucuggugagcauuauuaaaucuuguuuguaa

SEQ ID NO: 108771 - RNA, 32 nt, Homo Sapiens
cggcgcgagaggaggcagagggggcgucaggc

SEQ ID NO: 108772 - RNA, 32 nt, Homo Sapiens
uggauccuccccacccccuccugcuccugggg

SEQ ID NO: 108773 - RNA, 32 nt, Homo Sapiens
caaaagcagccuucggggcaaccccgugagcg

SEQ ID NO: 108774 - RNA, 32 nt, Homo Sapiens
cuggacccagggugggguggggcagggcgggc

SEQ ID NO: 108775 - RNA, 32 nt, Homo Sapiens
ucagacacccucacaaacacaguagucuauag

SEQ ID NO: 108776 - RNA, 32 nt, Homo Sapiens
gcugaggccgcgcugcggggcugggacagcac

SEQ ID NO: 108777 - RNA, 32 nt, Homo Sapiens
gggcuuggcaggggucccugcugcugaccucc

SEQ ID NO: 108778 - RNA, 27 nt, Homo Sapiens
cuccccuucugccacagcccccuuugg

SEQ ID NO: 108779 - RNA, 32 nt, Homo Sapiens
cgcgccacucgcccgcgcagcaacggccucaa

SEQ ID NO: 108780 - RNA, 32 nt, Homo Sapiens
gccuuucaggugggccgcuuccuuggcuaccu

SEQ ID NO: 108781 - RNA, 32 nt, Homo Sapiens
ggauauuugucaacagauuuaaagaaaaccac

SEQ ID NO: 108782 - RNA, 32 nt, Homo Sapiens
uuccaccuccgcccagccuguaauguuuauau

SEQ ID NO: 108783 - RNA, 32 nt, Homo Sapiens
gggaacgugccaggcuuggggcugcuccaugg

SEQ ID NO: 108784 - RNA, 32 nt, Homo Sapiens
ugaccaaugaauugacuucuaauaaaaucuag

SEQ ID NO: 108785 - RNA, 32 nt, Homo Sapiens
uacuacuugaaacuuaaaaaacucgccaagug

SEQ ID NO: 108786 - RNA, 32 nt, Homo Sapiens
uuuccagaacgaauuccuauccagucccaacc

SEQ ID NO: 108787 - RNA, 32 nt, Homo Sapiens
cacaucuugugcuucuuuguagcaggguaaau

SEQ ID NO: 108788 - RNA, 32 nt, Homo Sapiens
cagaaaacaucaucaccucugccgcgcuagaa

SEQ ID NO: 108789 - RNA, 32 nt, Homo Sapiens
gauuauagugacaaugaagaugaugcuauuaa

SEQ ID NO: 108790 - RNA, 32 nt, Homo Sapiens
cagcuucuuucugcccucaggagccuuguucu

SEQ ID NO: 108791 - RNA, 32 nt, Homo Sapiens
caacucacucaggcaucuucuuucucuaaaua

SEQ ID NO: 108792 - RNA, 32 nt, Homo Sapiens
cugauccuugagcuuuucugugcuucucuguu

SEQ ID NO: 108793 - RNA, 32 nt, Homo Sapiens
uaugcacucuuuguguuuuucuugaaacuugc

SEQ ID NO: 108794 - RNA, 32 nt, Homo Sapiens
cuguacccagcugacagccugucucuauggcg

SEQ ID NO: 108795 - RNA, 32 nt, Homo Sapiens
ucgcguccugcaaaggccgccgggcccugucg

SEQ ID NO: 108796 - RNA, 32 nt, Homo Sapiens
ucccagcugaaacucggaaggcuggucaggcc

SEQ ID NO: 108797 - RNA, 32 nt, Homo Sapiens
gcuggauggggagacaggucagggccccccac

SEQ ID NO: 108798 - RNA, 32 nt, Homo Sapiens
caagguucaguaguggcagaucaugacuacau

SEQ ID NO: 108799 - RNA, 29 nt, Homo Sapiens
gcuccgaugggacgagggacgccggcccc

SEQ ID NO: 108800 - RNA, 32 nt, Homo Sapiens
cugccuguggagguggacgugugguugguguu

SEQ ID NO: 108801 - RNA, 32 nt, Homo Sapiens
agaagcagauauaaagaccugaagauagucuu

SEQ ID NO: 108802 - RNA, 32 nt, Homo Sapiens
aguauuuauuaaugcagauaucagugcuacag

SEQ ID NO: 108803 - RNA, 32 nt, Homo Sapiens
ucugaagagauuaccuagagcuacauaacccu

SEQ ID NO: 108804 - RNA, 32 nt, Homo Sapiens
uggauucuuuugcuuugaacggucuuauggaa

SEQ ID NO: 108805 - RNA, 31 nt, Homo Sapiens
uucaacauggcgagacugagagugcaauuac

SEQ ID NO: 108806 - RNA, 32 nt, Homo Sapiens
aggagauuuaggaugaggaaucugguuuaugu

SEQ ID NO: 108807 - RNA, 32 nt, Homo Sapiens
acaaucugacaguagcaguguagaauuuguuc

SEQ ID NO: 108808 - RNA, 32 nt, Homo Sapiens
gaguucuacacucuccuucuugguacacaucc

SEQ ID NO: 108809 - RNA, 32 nt, Homo Sapiens
ccagacuuuaccacuaugcaauauaucaaugu

SEQ ID NO: 108810 - RNA, 32 nt, Homo Sapiens
agucugcuuccacggugaucagagcccacuag

SEQ ID NO: 108811 - RNA, 32 nt, Homo Sapiens
accgaacccugccugauguggcucugggaauu

SEQ ID NO: 108812 - RNA, 32 nt, Homo Sapiens
aaauugcugcuuggagucgugcauagacuugc

SEQ ID NO: 108813 - RNA, 32 nt, Homo Sapiens
auuaaaaucuucaauaguuguuauucuguagu

SEQ ID NO: 108814 - RNA, 32 nt, Homo Sapiens
caguauuuguggccuguacuggaugugaacug

SEQ ID NO: 108815 - RNA, 32 nt, Homo Sapiens
caagagcagaaucuccguguugcaaucugguu

SEQ ID NO: 108816 - RNA, 32 nt, Homo Sapiens
ccauauugccccucccucccccaucaaacuuc

SEQ ID NO: 108817 - RNA, 32 nt, Homo Sapiens
ucuccuccuguccuaaagagccagcuuggaac

SEQ ID NO: 108818 - RNA, 32 nt, Homo Sapiens
ucucucugucucccuugccucccccaucacgu

SEQ ID NO: 108819 - RNA, 32 nt, Homo Sapiens
ugcuuucauuuaauguuugcuuuaugcauuuc

SEQ ID NO: 108820 - RNA, 32 nt, Homo Sapiens
agacuauuuauucaaaugauauuuuacucuug

SEQ ID NO: 108821 - RNA, 32 nt, Homo Sapiens
uucacgcugccucggcggcccggcccggcucg

SEQ ID NO: 108822 - RNA, 32 nt, Homo Sapiens
uauaauauguugcauuuguacuuaagucauuc

SEQ ID NO: 108823 - RNA, 32 nt, Homo Sapiens
accugagacuggguaauugauaaagaaaaagg

SEQ ID NO: 108824 - RNA, 32 nt, Homo Sapiens
cacggcugccugaguggccccggagcagcugg

SEQ ID NO: 108825 - RNA, 32 nt, Homo Sapiens
cacuucugucccaccagcaucagaccaggccg

SEQ ID NO: 108826 - RNA, 32 nt, Homo Sapiens
gguguugagauuucuuugaauuuucuaagagu

SEQ ID NO: 108827 - RNA, 32 nt, Homo Sapiens
cagcuaaagggagaagagaugggggcuugaac

SEQ ID NO: 108828 - RNA, 32 nt, Homo Sapiens
acugugccuuuaacuauagacaacuuuuuauu

SEQ ID NO: 108829 - RNA, 32 nt, Homo Sapiens
ccuuuagauugugcgacuuuuguuuuuguuuu

SEQ ID NO: 108830 - RNA, 32 nt, Homo Sapiens
agcagcaggaccaguaccugggucaucugcag

SEQ ID NO: 108831 - RNA, 32 nt, Homo Sapiens
uccccuccucugaauuuaauucuuucaacuug

SEQ ID NO: 108832 - RNA, 32 nt, Homo Sapiens
agcauuuugacaaagacagaggacuuggacca

SEQ ID NO: 108833 - RNA, 32 nt, Homo Sapiens
ugagaaccaucugaguagcgcuugucacacuu

SEQ ID NO: 108834 - RNA, 32 nt, Homo Sapiens
cucgugaguucuuccgcccaacccagaggaag

SEQ ID NO: 108835 - RNA, 32 nt, Homo Sapiens
ugucauagcuuauauaaauguacaguauucaa

SEQ ID NO: 108836 - RNA, 30 nt, Homo Sapiens
gccgaggccgggcgcgcgacccucguccuu

SEQ ID NO: 108837 - RNA, 32 nt, Homo Sapiens
acagacaaacauugcauguucucaauuauuug

SEQ ID NO: 108838 - RNA, 32 nt, Homo Sapiens
cgggauauuaaaccucuuuccccagcaaaaaa

SEQ ID NO: 108839 - RNA, 32 nt, Homo Sapiens
ugagacagaaccaggcugagccaggccuccac

SEQ ID NO: 108840 - RNA, 32 nt, Homo Sapiens
uuuuugugucauuguauguaaguuuacuuuuu

SEQ ID NO: 108841 - RNA, 32 nt, Homo Sapiens
uacccaauuugauuugaauauuuuaaauuaug

SEQ ID NO: 108842 - RNA, 32 nt, Homo Sapiens
agaucaccggggccgccgcgggccgucugcac

SEQ ID NO: 108843 - RNA, 32 nt, Homo Sapiens
cucaggcgccgaccagacccgcgccgaccacc

SEQ ID NO: 108844 - RNA, 32 nt, Homo Sapiens
ggccaucuucuauggucgagacuguagggaug

SEQ ID NO: 108845 - RNA, 32 nt, Homo Sapiens
ugggcuccaucccaacuccccaucaacugauc

SEQ ID NO: 108846 - RNA, 32 nt, Homo Sapiens
uauuuuuguuuccauuuucuucaucucgaagg

SEQ ID NO: 108847 - RNA, 32 nt, Homo Sapiens
ccuagaguagccaccuaguagugagugacagc

SEQ ID NO: 108848 - RNA, 32 nt, Homo Sapiens
guaaaccuggaaguagucuacuuuuuagauaa

SEQ ID NO: 108849 - RNA, 32 nt, Homo Sapiens
gugcacgccgacguuugggaaccgugcacgcc

SEQ ID NO: 108850 - RNA, 32 nt, Homo Sapiens
aacuucugucgugggaacgaaaaagaaagagg

SEQ ID NO: 108851 - RNA, 32 nt, Homo Sapiens
agaauaaccaagaaaacaaaaugcuggaguuu

SEQ ID NO: 108852 - RNA, 32 nt, Homo Sapiens
agcgugaaaaagaaaguuaauaaacuauaaua

SEQ ID NO: 108853 - RNA, 32 nt, Homo Sapiens
uccacuacuuuuuggacaaagugauggcagaa

SEQ ID NO: 108854 - RNA, 32 nt, Homo Sapiens
ccugcucagaacaaagugacuucccugaacac

SEQ ID NO: 108855 - RNA, 32 nt, Homo Sapiens
uuugaagauagccuuuuuuauguuucucuauu

SEQ ID NO: 108856 - RNA, 32 nt, Homo Sapiens
agaagacccaagugaguuugaaacaccugcuc

SEQ ID NO: 108857 - RNA, 32 nt, Homo Sapiens
ccauagcgucuuaauuguuuaauuguacaaug

SEQ ID NO: 108858 - RNA, 32 nt, Homo Sapiens
ugagugcuuugguugacuucaaaccugugugu

SEQ ID NO: 108859 - RNA, 32 nt, Homo Sapiens
uggccuggcagagccaguggggacacagcaau

SEQ ID NO: 108860 - RNA, 32 nt, Homo Sapiens
gcuguugcuucagaggguucaagccccaagcu

SEQ ID NO: 108861 - RNA, 32 nt, Homo Sapiens
uaaccaaugaaaucgggcuuguccugaagacc

SEQ ID NO: 108862 - RNA, 32 nt, Homo Sapiens
uacagugaaauuuuuggugaauguggguaguc

SEQ ID NO: 108863 - RNA, 32 nt, Homo Sapiens
cucagugacgguugaaggaaucggagaaauaa

SEQ ID NO: 108864 - RNA, 32 nt, Homo Sapiens
cauaccaaagucacugguccuuucucagccuc

SEQ ID NO: 108865 - RNA, 32 nt, Homo Sapiens
aacugguuucacaggcuuuucagauaaugggg

SEQ ID NO: 108866 - RNA, 32 nt, Homo Sapiens
uaacaauaauguuuggaaauaaagaagugcuc

SEQ ID NO: 108867 - RNA, 32 nt, Homo Sapiens
ucgcagccgccgccgcgccgccgucgcucucc

SEQ ID NO: 108868 - RNA, 32 nt, Homo Sapiens
auacggguuuuugaauugcagcagccaauaaa

SEQ ID NO: 108869 - RNA, 32 nt, Homo Sapiens
uggccucugcacccccuucugccauccacuua

SEQ ID NO: 108870 - RNA, 32 nt, Homo Sapiens
ugguggagggggcgcuaggcugccgggccagg

SEQ ID NO: 108871 - RNA, 32 nt, Homo Sapiens
gagggucggcggugggaaggcgauggcggauu

SEQ ID NO: 108872 - RNA, 32 nt, Homo Sapiens
aaacagccuggcuuagcaaggagccaacauaa

SEQ ID NO: 108873 - RNA, 32 nt, Homo Sapiens
aauccauuguguuuguuaucuauugcugcaua

SEQ ID NO: 108874 - RNA, 32 nt, Homo Sapiens
gcauuaguuuuggcugucaucaacuuauuaua

SEQ ID NO: 108875 - RNA, 32 nt, Homo Sapiens
ugagaagucccagcuuucccagccccagcguu

SEQ ID NO: 108876 - RNA, 32 nt, Homo Sapiens
aaaacaagugagcauugugaaaaggaaaaaau

SEQ ID NO: 108877 - RNA, 32 nt, Homo Sapiens
ggaauaucaaggaugguggcagaauuaaaggg

SEQ ID NO: 108878 - RNA, 32 nt, Homo Sapiens
agagacaaacuccuaugucaugagaauaaccg

SEQ ID NO: 108879 - RNA, 32 nt, Homo Sapiens
auguuuaaaaauaccucaggcuauacugaaag

SEQ ID NO: 108880 - RNA, 32 nt, Homo Sapiens
uggggugagcuuugaagugcuggugguccaga

SEQ ID NO: 108881 - RNA, 31 nt, Homo Sapiens
cccuggcccagaagacuguccacuccagcaa

SEQ ID NO: 108882 - RNA, 29 nt, Homo Sapiens
ggccacuccccuuucagaggaaaccaacu

SEQ ID NO: 108883 - RNA, 32 nt, Homo Sapiens
agaucccccuccccccagguuccuccuucccc

SEQ ID NO: 108884 - RNA, 32 nt, Homo Sapiens
ggugggaacuuuguacagcaagggaaaggagc

SEQ ID NO: 108885 - RNA, 32 nt, Homo Sapiens
uaauggaccccucuccucugcugccauacucc

SEQ ID NO: 108886 - RNA, 32 nt, Homo Sapiens
cuacugauuuuuccuguugauucaaauagacu

SEQ ID NO: 108887 - RNA, 32 nt, Homo Sapiens
ugccuggcccuccucccccuccgcccccaaug

SEQ ID NO: 108888 - RNA, 32 nt, Homo Sapiens
ugaggaccuuggccgcucuguaagcaucugac

SEQ ID NO: 108889 - RNA, 32 nt, Homo Sapiens
caauuacuguucaugauucagagagugaugau

SEQ ID NO: 108890 - RNA, 32 nt, Homo Sapiens
gcaccgugcgagcuccaggagccccgggucca

SEQ ID NO: 108891 - RNA, 32 nt, Homo Sapiens
ucaaaaucaucaaagucuaaauuuagaaucuu

SEQ ID NO: 108892 - RNA, 32 nt, Homo Sapiens
ucagcgucuccauggcagcuccacgggucguu

SEQ ID NO: 108893 - RNA, 32 nt, Homo Sapiens
uucaugcauuagcucgcuuaguccucacaaac

SEQ ID NO: 108894 - RNA, 32 nt, Homo Sapiens
cugcuaguccaagcgaacagcaaccuccugcu

SEQ ID NO: 108895 - RNA, 25 nt, Homo Sapiens
augggaccugugcgguugggaauau

SEQ ID NO: 108896 - RNA, 32 nt, Homo Sapiens
uugguugcuuucuuggagguaaggagguauau

SEQ ID NO: 108897 - RNA, 32 nt, Homo Sapiens
cgcgcgcugccgcgacgagacgcaccgagcac

SEQ ID NO: 108898 - RNA, 32 nt, Homo Sapiens
uacgcccgagcggaagaagcgggcucugagcc

SEQ ID NO: 108899 - RNA, 32 nt, Homo Sapiens
uaaaagaugcaaacauuacaaaaaggcaaaug

SEQ ID NO: 108900 - RNA, 32 nt, Homo Sapiens
aaauacagaaaaggugagaggaagcaacuuuc

SEQ ID NO: 108901 - RNA, 32 nt, Homo Sapiens
ugcaucuguccucauguguugauguaaccgau

SEQ ID NO: 108902 - RNA, 32 nt, Homo Sapiens
agcuaguuuuauucuugguuuucccuuugccu

SEQ ID NO: 108903 - RNA, 32 nt, Homo Sapiens
aacuuauugacugugcaugacccagugguuug

SEQ ID NO: 108904 - RNA, 32 nt, Homo Sapiens
cccccgcucccucuggcccuucucuguuuagu

SEQ ID NO: 108905 - RNA, 32 nt, Homo Sapiens
agaacuuccagccccaggagacuauuagucca

SEQ ID NO: 108906 - RNA, 32 nt, Homo Sapiens
aaauuuguuucauucagugaauccccaguuug

SEQ ID NO: 108907 - RNA, 32 nt, Homo Sapiens
gaagucacccggccccgaugcaaggugcccac

SEQ ID NO: 108908 - RNA, 32 nt, Homo Sapiens
gcuuucucugguuuccuuccugagucuggcac

SEQ ID NO: 108909 - RNA, 32 nt, Homo Sapiens
ucagccugacuuccagcggucccaagaacacc

SEQ ID NO: 108910 - RNA, 31 nt, Homo Sapiens
cugagcugucacugccuccucccgagcuccc

SEQ ID NO: 108911 - RNA, 32 nt, Homo Sapiens
ccccgcgcuuccggccccgcccgcccccgcgc

SEQ ID NO: 108912 - RNA, 32 nt, Homo Sapiens
aaguagagggucacuccagguagagcccuauc

SEQ ID NO: 108913 - RNA, 32 nt, Homo Sapiens
acuuccgccuccuggggucaagcaguucugcc

SEQ ID NO: 108914 - RNA, 32 nt, Homo Sapiens
agcagggagcccugcaccuuguguccuggccc

SEQ ID NO: 108915 - RNA, 32 nt, Homo Sapiens
aagugacacugacuacagcuagaaagccaggc

SEQ ID NO: 108916 - RNA, 32 nt, Homo Sapiens
acaucaacgaagcuucaaaaacaucaagcuuc

SEQ ID NO: 108917 - RNA, 28 nt, Homo Sapiens
cccaggaaagauuauaccuaugacucgg

SEQ ID NO: 108918 - RNA, 32 nt, Homo Sapiens
cgccccgccgucugcgagccucccgagagccg

SEQ ID NO: 108919 - RNA, 32 nt, Homo Sapiens
auaacaaauauuaaagauuuccuuggagucaa

SEQ ID NO: 108920 - RNA, 32 nt, Homo Sapiens
agccucaguucccuccugugucaaguagcuaa

SEQ ID NO: 108921 - RNA, 32 nt, Homo Sapiens
cuucaugaaaauaaaccaggcagucacuaaaa

SEQ ID NO: 108922 - RNA, 32 nt, Homo Sapiens
gauucuccugugggguuucucaucuccauggc

SEQ ID NO: 108923 - RNA, 32 nt, Homo Sapiens
uucaaucucaaauauauaaggugucugcucuu

SEQ ID NO: 108924 - RNA, 32 nt, Homo Sapiens
gacggaucggcagggcggggcggaacggugag

SEQ ID NO: 108925 - RNA, 32 nt, Homo Sapiens
uuuugguguguaugcaccuuggcagccagcag

SEQ ID NO: 108926 - RNA, 32 nt, Homo Sapiens
guccugaaaagaccuuuugagcaggcagaaac

SEQ ID NO: 108927 - RNA, 32 nt, Homo Sapiens
uaauuuuccccaucugauuuuaucucugcguu

SEQ ID NO: 108928 - RNA, 32 nt, Homo Sapiens
cugggccccaugaccuccugcugcaugucccu

SEQ ID NO: 108929 - RNA, 32 nt, Homo Sapiens
cgagagcagaggaggaggaggcaugagugagg

SEQ ID NO: 108930 - RNA, 32 nt, Homo Sapiens
cauccuagcaggguccccgagcagcagguugu

SEQ ID NO: 108931 - RNA, 32 nt, Homo Sapiens
gaagagaaggcacagcuccucuagcccaaaaa

SEQ ID NO: 108932 - RNA, 32 nt, Homo Sapiens
agcuuuuuuuuuuuuuuuuuuaaauuggcuuu

SEQ ID NO: 108933 - RNA, 30 nt, Homo Sapiens
cuguggcugccuaugggggacugugccuga

SEQ ID NO: 108934 - RNA, 32 nt, Homo Sapiens
ccaguuuuuaacuuaagccugauuuuaacaac

SEQ ID NO: 108935 - RNA, 32 nt, Homo Sapiens
uagguuugacccuacaagaacuguauugccac

SEQ ID NO: 108936 - RNA, 32 nt, Homo Sapiens
guuuuauguuauuauuauuuuaauccacauaa

SEQ ID NO: 108937 - RNA, 32 nt, Homo Sapiens
caaccucgccccaccccauccuccugccuucc

SEQ ID NO: 108938 - RNA, 32 nt, Homo Sapiens
uuuuuccuacgguuaucacuuacugcauucug

SEQ ID NO: 108939 - RNA, 32 nt, Homo Sapiens
aaccuagaaguauuuuugucucuuagaaauac

SEQ ID NO: 108940 - RNA, 28 nt, Homo Sapiens
gugaugcaguugccccccgcgcugugcg

SEQ ID NO: 108941 - RNA, 32 nt, Homo Sapiens
gccuuccagcaucagucacauguaauuaacag

SEQ ID NO: 108942 - RNA, 30 nt, Homo Sapiens
ccucagaucuucguuggcggccauggcuuc

SEQ ID NO: 108943 - RNA, 32 nt, Homo Sapiens
ugacugugguucccagcuccagcccuagucag

SEQ ID NO: 108944 - RNA, 32 nt, Homo Sapiens
cccugccccccucccccgcagcagcgggccuu

SEQ ID NO: 108945 - RNA, 32 nt, Homo Sapiens
auacagcaggcacaacucucacuuuaacacag

SEQ ID NO: 108946 - RNA, 32 nt, Homo Sapiens
gacccuucucuucgcggaccccacgccaagca

SEQ ID NO: 108947 - RNA, 32 nt, Homo Sapiens
cagcuacuagagaggcugaggcaggagaaucg

SEQ ID NO: 108948 - RNA, 32 nt, Homo Sapiens
uuaauggcuuauauguuuuuuaugcuguaugu

SEQ ID NO: 108949 - RNA, 32 nt, Homo Sapiens
ugagguuauuucuuccuuuacucuucaaaaug

SEQ ID NO: 108950 - RNA, 32 nt, Homo Sapiens
aaaaaagaaauauuucaagcuuggccaucccc

SEQ ID NO: 108951 - RNA, 32 nt, Homo Sapiens
caaauuuuacucaaguuuaaauuguauaaaac

SEQ ID NO: 108952 - RNA, 32 nt, Homo Sapiens
guauugcacacuuuuccucuuugaaaucaaac

SEQ ID NO: 108953 - RNA, 32 nt, Homo Sapiens
ccuuuuuccaguuggauuuguuuuucuguucu

SEQ ID NO: 108954 - RNA, 32 nt, Homo Sapiens
ucggugcccaaguucacgaugacccgagagaa

SEQ ID NO: 108955 - RNA, 32 nt, Homo Sapiens
aucaagucugcguggccauccuccccccacca

SEQ ID NO: 108956 - RNA, 32 nt, Homo Sapiens
uuaauucugacucugcuucugucaagaggguu

SEQ ID NO: 108957 - RNA, 32 nt, Homo Sapiens
ggucucaaacuccugaccucaggcgauccgcc

SEQ ID NO: 108958 - RNA, 32 nt, Homo Sapiens
ugggucgacccacgcguccgcggagccgggcg

SEQ ID NO: 108959 - RNA, 32 nt, Homo Sapiens
ggucucaaacuccugaccucaagcgauccacc

SEQ ID NO: 108960 - RNA, 32 nt, Homo Sapiens
auugcaugccuauaucaaaacaucucauguac

SEQ ID NO: 108961 - RNA, 32 nt, Homo Sapiens
aaggccuguggggagccacgggcgucagagag

SEQ ID NO: 108962 - RNA, 32 nt, Homo Sapiens
uguuguacagaaaagaaauccagagaaucaaa

SEQ ID NO: 108963 - RNA, 32 nt, Homo Sapiens
cuugcaugaccaacugaugaccagauggggag

SEQ ID NO: 108964 - RNA, 32 nt, Homo Sapiens
uuauguuaaccuucagguauuaaacuugcugc

SEQ ID NO: 108965 - RNA, 32 nt, Homo Sapiens
caggguuugggggaaacgugcucacccgacgg

SEQ ID NO: 108966 - RNA, 32 nt, Homo Sapiens
cucuccggcagcacaggccuagcugguucugg

SEQ ID NO: 108967 - RNA, 32 nt, Homo Sapiens
guuguuugauucagcaaaaaucucccagugac

SEQ ID NO: 108968 - RNA, 32 nt, Homo Sapiens
cguggucccggcccccuccacccgccgucucg

SEQ ID NO: 108969 - RNA, 32 nt, Homo Sapiens
acgguauaauuucaugcuccuaggcuacaaag

SEQ ID NO: 108970 - RNA, 32 nt, Homo Sapiens
gaggcagaggggcugugccgugcuagaguccu

SEQ ID NO: 108971 - RNA, 32 nt, Homo Sapiens
cugugauguaaauuaugaucauuauuuaagaa

SEQ ID NO: 108972 - RNA, 32 nt, Homo Sapiens
acucugugaacauguggaagcauaaugacagu

SEQ ID NO: 108973 - RNA, 32 nt, Homo Sapiens
uuuuggcuaaaauaaauguagcaucuaauuuu

SEQ ID NO: 108974 - RNA, 32 nt, Homo Sapiens
caucgcugucucuaguccucugugauaguuca

SEQ ID NO: 108975 - RNA, 32 nt, Homo Sapiens
aagcuuuuauuugccauuuggaugccuucguu

SEQ ID NO: 108976 - RNA, 31 nt, Homo Sapiens
aaaacugagccccaggaaaaccuaaccacug

SEQ ID NO: 108977 - RNA, 32 nt, Homo Sapiens
aaagcuaaacucccggaaucaaugggaaugaa

SEQ ID NO: 108978 - RNA, 32 nt, Homo Sapiens
uucauacauauuuuuguagcacugacagauuu

SEQ ID NO: 108979 - RNA, 32 nt, Homo Sapiens
gguuuaucuuccaaaugggaacuaucuccaaa

SEQ ID NO: 108980 - RNA, 32 nt, Homo Sapiens
aggcuguaaggucaucguauaauccugaccac

SEQ ID NO: 108981 - RNA, 32 nt, Homo Sapiens
uugaucaaauuugaacuucauuuugggggaua

SEQ ID NO: 108982 - RNA, 32 nt, Homo Sapiens
gacccugcacgccgcccgcgggcccaugugag

SEQ ID NO: 108983 - RNA, 32 nt, Homo Sapiens
ucagcccagacaccccugcccagcccacagcu

SEQ ID NO: 108984 - RNA, 32 nt, Homo Sapiens
agagcugucauaugcugggucuguaaauugac

SEQ ID NO: 108985 - RNA, 32 nt, Homo Sapiens
gcucugagagugccggccgcggggcccucgca

SEQ ID NO: 108986 - RNA, 32 nt, Homo Sapiens
aauuaucuaauagaaauaaacagugucacuaa

SEQ ID NO: 108987 - RNA, 32 nt, Homo Sapiens
accacauuuuaaaacuguaauucaguuaagcc

SEQ ID NO: 108988 - RNA, 32 nt, Homo Sapiens
acguuucuuuaaccuuguauaaauuauucagu

SEQ ID NO: 108989 - RNA, 32 nt, Homo Sapiens
ggcaccgcucccucaggagucgccuaggccgc

SEQ ID NO: 108990 - RNA, 32 nt, Homo Sapiens
cacagggaggggcugauccugccucagcugug

SEQ ID NO: 108991 - RNA, 32 nt, Homo Sapiens
gauacuuauugcauuucuuuuauuagugguga

SEQ ID NO: 108992 - RNA, 32 nt, Homo Sapiens
uuucaguagagacgagguuuugccauguuggc

SEQ ID NO: 108993 - RNA, 32 nt, Homo Sapiens
cugggaugggcucccacccuccccugaggaug

SEQ ID NO: 108994 - RNA, 32 nt, Homo Sapiens
aacugcucgcucacucaccucccuccucagca

SEQ ID NO: 108995 - RNA, 32 nt, Homo Sapiens
ucauuucaccccaccccacccaaacugagugg

SEQ ID NO: 108996 - RNA, 32 nt, Homo Sapiens
ucaaggaguuuugggauacuugccauaagcca

SEQ ID NO: 108997 - RNA, 32 nt, Homo Sapiens
ggcggggaccccugggucugccgucagccagc

SEQ ID NO: 108998 - RNA, 32 nt, Homo Sapiens
guugcuucccggcgugucccuaccuccuccuc

SEQ ID NO: 108999 - RNA, 32 nt, Homo Sapiens
aggggaugcaacaaaaugauccuuaugauguc

SEQ ID NO: 109000 - RNA, 32 nt, Homo Sapiens
cgcgacccggcccuggcgcccgagaggauucc

SEQ ID NO: 109001 - RNA, 32 nt, Homo Sapiens
gccacggguaaaaauaacagaaauguaugguu

SEQ ID NO: 109002 - RNA, 32 nt, Homo Sapiens
cagcgcgaacagcagcggcggcgucccgagug

SEQ ID NO: 109003 - RNA, 32 nt, Homo Sapiens
cccgagggugcaggaggcucugaagcggcugc

SEQ ID NO: 109004 - RNA, 32 nt, Homo Sapiens
cugaucuaucaugggaauugcaguuagagaga

SEQ ID NO: 109005 - RNA, 32 nt, Homo Sapiens
cgccacccucucucgcugcagccugcugugcg

SEQ ID NO: 109006 - RNA, 32 nt, Homo Sapiens
uuauaaucuauucauggaucuccacuuugauu

SEQ ID NO: 109007 - RNA, 32 nt, Homo Sapiens
cccuggcuuucugcagcuuugagaugcaaaaa

SEQ ID NO: 109008 - RNA, 32 nt, Homo Sapiens
aguccuggggccagcgggagguggggagcaua

SEQ ID NO: 109009 - RNA, 32 nt, Homo Sapiens
aacacacuguguaucugacaauguucuaagac

SEQ ID NO: 109010 - RNA, 32 nt, Homo Sapiens
aucucuuauacguagaauaaauuugaaagacu

SEQ ID NO: 109011 - RNA, 32 nt, Homo Sapiens
aaucagccacuuugugcucaccaccucugggg

SEQ ID NO: 109012 - RNA, 32 nt, Homo Sapiens
gccgcagcgaccauuucagauaccguccacag

SEQ ID NO: 109013 - RNA, 32 nt, Homo Sapiens
ggcuuccagagguagagcugcccaaaguguca

SEQ ID NO: 109014 - RNA, 32 nt, Homo Sapiens
ccuuggcuuuugcugcagccgucaacgaccua

SEQ ID NO: 109015 - RNA, 28 nt, Homo Sapiens
gagucaauuaaaccucuuuucuuuauaa

SEQ ID NO: 109016 - RNA, 32 nt, Homo Sapiens
aaguuagcugggucuggugccucugugguucc

SEQ ID NO: 109017 - RNA, 32 nt, Homo Sapiens
ggccauggcuuucuucucggcccccaaaugcc

SEQ ID NO: 109018 - RNA, 32 nt, Homo Sapiens
aaagaaaugaacuuguagauuaccaagcaguu

SEQ ID NO: 109019 - RNA, 32 nt, Homo Sapiens
uaagcuagaaaagaagaaugaggcccggggac

SEQ ID NO: 109020 - RNA, 32 nt, Homo Sapiens
uuuugacuuauugagaagaaauccaaucucag

SEQ ID NO: 109021 - RNA, 32 nt, Homo Sapiens
agcucacucugguuacaagcccuguucuuccu

SEQ ID NO: 109022 - RNA, 32 nt, Homo Sapiens
auagugauucucuuguguacaugcuugugaau

SEQ ID NO: 109023 - RNA, 32 nt, Homo Sapiens
gacuuccuuuuaggaaucaacuuccaugagaa

SEQ ID NO: 109024 - RNA, 32 nt, Homo Sapiens
uacaaugacaggaucucggcucacugcaagcu

SEQ ID NO: 109025 - RNA, 32 nt, Homo Sapiens
auaugugaacaaagauguagacuaguaaggua

SEQ ID NO: 109026 - RNA, 32 nt, Homo Sapiens
caaagggauauuugguuuggccaucucuggau

SEQ ID NO: 109027 - RNA, 32 nt, Homo Sapiens
ugagcuucaguggagaauaaaccagcugagaa

SEQ ID NO: 109028 - RNA, 32 nt, Homo Sapiens
gauaucugagaaaacuuuuaugaaauguccau

SEQ ID NO: 109029 - RNA, 32 nt, Homo Sapiens
auuuaugggaaacaacccgcucccgaaaacgg

SEQ ID NO: 109030 - RNA, 32 nt, Homo Sapiens
acuuaauaaaacaaaauucauuuaugguuguu

SEQ ID NO: 109031 - RNA, 32 nt, Homo Sapiens
auggaugugaugcacagccccauccuccaacu

SEQ ID NO: 109032 - RNA, 32 nt, Homo Sapiens
uuuauugccuucugagaggugggugaggacaa

SEQ ID NO: 109033 - RNA, 32 nt, Homo Sapiens
augcaaucagcauuagaauuuguaaggaagga

SEQ ID NO: 109034 - RNA, 32 nt, Homo Sapiens
auuuguaugcacuuauuuuaaaaagaaaaaaa

SEQ ID NO: 109035 - RNA, 32 nt, Homo Sapiens
gccaguggcguuccuggcuccucgggauuuuc

SEQ ID NO: 109036 - RNA, 32 nt, Homo Sapiens
gaguuuuggcgcccggccgcgccccgcgccgc

SEQ ID NO: 109037 - RNA, 32 nt, Homo Sapiens
gaccccggcccggcucccgcuccgggcucugc

SEQ ID NO: 109038 - RNA, 32 nt, Homo Sapiens
aaaccuuuccuuaauaucuacucuuuagcacu

SEQ ID NO: 109039 - RNA, 32 nt, Homo Sapiens
aacugauguuuaucuucauugacaaauuuacc

SEQ ID NO: 109040 - RNA, 32 nt, Homo Sapiens
uggcuguagcagcccuugcugcuccacaccau

SEQ ID NO: 109041 - RNA, 32 nt, Homo Sapiens
auauucauuuaaaauuaguguuuagaguccuu

SEQ ID NO: 109042 - RNA, 32 nt, Homo Sapiens
cuacuucuuauauauauuauacauacauauug

SEQ ID NO: 109043 - RNA, 32 nt, Homo Sapiens
ugccaugacacaagcaaugccugugaagugcc

SEQ ID NO: 109044 - RNA, 32 nt, Homo Sapiens
gaucauugaaauugaugccauuugcgcaugag

SEQ ID NO: 109045 - RNA, 32 nt, Homo Sapiens
acuuaagaauccagaguauuagugucuugggu

SEQ ID NO: 109046 - RNA, 32 nt, Homo Sapiens
cauuaggcugggcgcaguggcucacaccugua

SEQ ID NO: 109047 - RNA, 32 nt, Homo Sapiens
cucgccuucccucucuucugucccggccagga

SEQ ID NO: 109048 - RNA, 32 nt, Homo Sapiens
uacccccuuccccugugcccacuuccuguccu

SEQ ID NO: 109049 - RNA, 32 nt, Homo Sapiens
uaggaugaaaauuuuaucgucaauuauaagcc

SEQ ID NO: 109050 - RNA, 29 nt, Homo Sapiens
uuacagagaagcauauauuuuuuauuaac

SEQ ID NO: 109051 - RNA, 32 nt, Homo Sapiens
aaaauguagagggauaccugucugcauaauaa

SEQ ID NO: 109052 - RNA, 32 nt, Homo Sapiens
cagaauaaacauugauuuugguuggggcugca

SEQ ID NO: 109053 - RNA, 32 nt, Homo Sapiens
uaaaggagcagcuggaggaggagcagggaggc

SEQ ID NO: 109054 - RNA, 32 nt, Homo Sapiens
uggcuaauuuuuugaauuuuuguagugauggg

SEQ ID NO: 109055 - RNA, 32 nt, Homo Sapiens
ggggauuggagaagucagacucacuagacuuu

SEQ ID NO: 109056 - RNA, 32 nt, Homo Sapiens
aaaucuguaaauaguauacacuuuuuacuuuu

SEQ ID NO: 109057 - RNA, 32 nt, Homo Sapiens
ccaauuaaaaauuugcuggcauuaaaaauaag

SEQ ID NO: 109058 - RNA, 32 nt, Homo Sapiens
gagcgcuccuguaugccaugggcuguauucag

SEQ ID NO: 109059 - RNA, 29 nt, Homo Sapiens
caccaugacccugggcagcugcugcugcg

SEQ ID NO: 109060 - RNA, 32 nt, Homo Sapiens
ccuccugugucugaaauaguguccugguucug

SEQ ID NO: 109061 - RNA, 32 nt, Homo Sapiens
ggcagaggguggcaguggcacauaggcaagug

SEQ ID NO: 109062 - RNA, 32 nt, Homo Sapiens
gcccucuggguuggccugcugucagugcuucu

SEQ ID NO: 109063 - RNA, 32 nt, Homo Sapiens
cuucaggaugagcccaagcuggaccggaucgu

SEQ ID NO: 109064 - RNA, 32 nt, Homo Sapiens
uauacuugcauuugauuuauuuaugaaagcau

SEQ ID NO: 109065 - RNA, 32 nt, Homo Sapiens
auuuugcucgggccucccuggcacugaaccuu

SEQ ID NO: 109066 - RNA, 32 nt, Homo Sapiens
gcgucggcgcccgacgcggagucagcaggggc

SEQ ID NO: 109067 - RNA, 32 nt, Homo Sapiens
gaaguuaaugugggucaccauuuuggucagaa

SEQ ID NO: 109068 - RNA, 32 nt, Homo Sapiens
ugaguaguguaaaacaaagagaauuaaugaug

SEQ ID NO: 109069 - RNA, 32 nt, Homo Sapiens
uacaggcgugcgccaccaaaucuggcuauuuu

SEQ ID NO: 109070 - RNA, 32 nt, Homo Sapiens
uuuucuguaugucauguuauaauuacagguca

SEQ ID NO: 109071 - RNA, 32 nt, Homo Sapiens
cgaagucgggccuccccgcgggcgucacccag

SEQ ID NO: 109072 - RNA, 32 nt, Homo Sapiens
auuccagcacuggaggacccccugccacggcg

SEQ ID NO: 109073 - RNA, 32 nt, Homo Sapiens
aguguuugcuccauuuuaagaugcauagcuac

SEQ ID NO: 109074 - RNA, 32 nt, Homo Sapiens
gcaaacuugggcucgcgcuucccggcccggcg

SEQ ID NO: 109075 - RNA, 32 nt, Homo Sapiens
ugaguuuagaaaguaauccaaaacuaaacuug

SEQ ID NO: 109076 - RNA, 32 nt, Homo Sapiens
aguauuucacuuugcguagagcccccucgggc

SEQ ID NO: 109077 - RNA, 32 nt, Homo Sapiens
ccuaaugaaaauacauacuucuucauucggag

SEQ ID NO: 109078 - RNA, 32 nt, Homo Sapiens
ucuugaguaaucuuguaagcauuaagugaaug

SEQ ID NO: 109079 - RNA, 32 nt, Homo Sapiens
gcgaggcgccgggaccaugggcugggggagcc

SEQ ID NO: 109080 - RNA, 32 nt, Homo Sapiens
gugccugagugcaugagauagaauagagacca

SEQ ID NO: 109081 - RNA, 32 nt, Homo Sapiens
cagcaguuugcaagcacaguuuugcaaggcug

SEQ ID NO: 109082 - RNA, 32 nt, Homo Sapiens
uggggggcacuguuggcccauaaucaggcaaa

SEQ ID NO: 109083 - RNA, 32 nt, Homo Sapiens
cccucccgacagaggccccaggugcgcuggca

SEQ ID NO: 109084 - RNA, 32 nt, Homo Sapiens
uuuuuguuaaacuuaugagaauguauuaagaa

SEQ ID NO: 109085 - RNA, 32 nt, Homo Sapiens
ccgcgcccagcuccagucuccccuccccgggg

SEQ ID NO: 109086 - RNA, 32 nt, Homo Sapiens
aauucagacauuuuuuccuguggauauuucuc

SEQ ID NO: 109087 - RNA, 32 nt, Homo Sapiens
aagaugcuggccccaaacccugaguuugucau

SEQ ID NO: 109088 - RNA, 32 nt, Homo Sapiens
acccccacccugagcccgcagugucagcaacg

SEQ ID NO: 109089 - RNA, 32 nt, Homo Sapiens
aagucagauuaaaaaucagggaguguuuuccc

SEQ ID NO: 109090 - RNA, 32 nt, Homo Sapiens
guucuggggcccagcccaacaccuggcuuggg

SEQ ID NO: 109091 - RNA, 32 nt, Homo Sapiens
aauacaaauaaaaugagauacaugcaaaauaa

SEQ ID NO: 109092 - RNA, 31 nt, Homo Sapiens
gugacucugaacuuauugccaaauaaaaguu

SEQ ID NO: 109093 - RNA, 32 nt, Homo Sapiens
gcugggggagggugggggcagggcuggcuggg

SEQ ID NO: 109094 - RNA, 30 nt, Homo Sapiens
acgggguuucaccauguuagccaggauggu

SEQ ID NO: 109095 - RNA, 32 nt, Homo Sapiens
gaagaaagcugggagcacuuugaacuugaaaa

SEQ ID NO: 109096 - RNA, 29 nt, Homo Sapiens
cuuuugugaugguuuuauuuucuguuaac

SEQ ID NO: 109097 - RNA, 32 nt, Homo Sapiens
agauuugacaaccaccagagcacaugugcucu

SEQ ID NO: 109098 - RNA, 32 nt, Homo Sapiens
ggaaggcggcgcggccgggucccgaaacuccu

SEQ ID NO: 109099 - RNA, 32 nt, Homo Sapiens
ggcccaaacucauacucccagcccuuuuccug

SEQ ID NO: 109100 - RNA, 32 nt, Homo Sapiens
aggcacccugaggccuccaugggggaacugag

SEQ ID NO: 109101 - RNA, 32 nt, Homo Sapiens
ccguaguccccgccccaccucccaggaaguag

SEQ ID NO: 109102 - RNA, 32 nt, Homo Sapiens
ucauaaauuguaaauauauauuuuaaaagcac

SEQ ID NO: 109103 - RNA, 32 nt, Homo Sapiens
aauugaaugcaaaagaagguaagagauccagc

SEQ ID NO: 109104 - RNA, 32 nt, Homo Sapiens
agcccagcgcggugcuaucggacagagccugg

SEQ ID NO: 109105 - RNA, 32 nt, Homo Sapiens
aaauuaaguuugggagaggaucugugugugau

SEQ ID NO: 109106 - RNA, 32 nt, Homo Sapiens
gcaauucagagaauacaaaaccacauucauua

SEQ ID NO: 109107 - RNA, 32 nt, Homo Sapiens
gacgccggguggccggagccguggagcggcgg

SEQ ID NO: 109108 - RNA, 32 nt, Homo Sapiens
aacacugcccuucucuucccugcccgcccgca

SEQ ID NO: 109109 - RNA, 32 nt, Homo Sapiens
uugugccuggugacuuccugucccugggacag

SEQ ID NO: 109110 - RNA, 32 nt, Homo Sapiens
gccaccacacccagcccaggcucauucuuuua

SEQ ID NO: 109111 - RNA, 32 nt, Homo Sapiens
acgaagcagauugaaaauguugugaaaauguu

SEQ ID NO: 109112 - RNA, 32 nt, Homo Sapiens
ggucagcagaauccuugccuaauuccucuucc

SEQ ID NO: 109113 - RNA, 32 nt, Homo Sapiens
aaguuugggagaugaguccuggcauuaugucu

SEQ ID NO: 109114 - RNA, 32 nt, Homo Sapiens
cagcggagggugguugggguuggggcuggggg

SEQ ID NO: 109115 - RNA, 32 nt, Homo Sapiens
gcccucuccgcgggggucugcggccaaggagg

SEQ ID NO: 109116 - RNA, 32 nt, Homo Sapiens
ggggccggccccagcagccgccaguccccacc

SEQ ID NO: 109117 - RNA, 29 nt, Homo Sapiens
gcccccagguguuucagaacaaggccucg

SEQ ID NO: 109118 - RNA, 32 nt, Homo Sapiens
cuuuuggggaagagccggcagcuccuccucau

SEQ ID NO: 109119 - RNA, 32 nt, Homo Sapiens
aaaaaaguguauguuaaccuagccucaccccc

SEQ ID NO: 109120 - RNA, 32 nt, Homo Sapiens
cucaagcgaugcucccaccuccaccucccaaa

SEQ ID NO: 109121 - RNA, 30 nt, Homo Sapiens
guagaggccaccccuccacucugggagagg

SEQ ID NO: 109122 - RNA, 32 nt, Homo Sapiens
cccacgggcuggaugucacuuccccgacuguc

SEQ ID NO: 109123 - RNA, 32 nt, Homo Sapiens
cugggugcaacaauggcaauggcuguccucau

SEQ ID NO: 109124 - RNA, 32 nt, Homo Sapiens
ugucccccgaacugacaggugcucccagcaac

SEQ ID NO: 109125 - RNA, 32 nt, Homo Sapiens
accaugcuguucucaugguaagaacuggaguu

SEQ ID NO: 109126 - RNA, 32 nt, Homo Sapiens
ccuagacuggugcuaaugucaaaccacuggcc

SEQ ID NO: 109127 - RNA, 32 nt, Homo Sapiens
ccgacccuuuggccucucccccuccuuccauc

SEQ ID NO: 109128 - RNA, 32 nt, Homo Sapiens
uaaauggaaugggacaguaauugauugauagu

SEQ ID NO: 109129 - RNA, 32 nt, Homo Sapiens
cuuucagaacuacgacuugaaugugaucgauu

SEQ ID NO: 109130 - RNA, 32 nt, Homo Sapiens
aaauaacgauaucuaaagcuuaccagcaaaag

SEQ ID NO: 109131 - RNA, 32 nt, Homo Sapiens
auuaaguaguggggggacaguccaugccagga

SEQ ID NO: 109132 - RNA, 32 nt, Homo Sapiens
acgccuucagcaugccugaacuacauaacuuc

SEQ ID NO: 109133 - RNA, 32 nt, Homo Sapiens
gggagucaggugguugacuugugccuggcugc

SEQ ID NO: 109134 - RNA, 32 nt, Homo Sapiens
gccucgcgggcuccccgccugggucgggacag

SEQ ID NO: 109135 - RNA, 31 nt, Homo Sapiens
aggaaggagccccuucagaagcagugggcgg

SEQ ID NO: 109136 - RNA, 31 nt, Homo Sapiens
ucaccggcgucacccccgccccgcgcccugc

SEQ ID NO: 109137 - RNA, 32 nt, Homo Sapiens
aggaagugucagccgggcgcggugccucaugc

SEQ ID NO: 109138 - RNA, 32 nt, Homo Sapiens
cgcuccggacgucgcccucccguucugcuugg

SEQ ID NO: 109139 - RNA, 32 nt, Homo Sapiens
gcuuccccccuccccgggagccaggugggaaa

SEQ ID NO: 109140 - RNA, 32 nt, Homo Sapiens
ucugaccuuguaccucucuuugaugguaacca

SEQ ID NO: 109141 - RNA, 32 nt, Homo Sapiens
gggagcacagggugcaggagcggcggcgaaga

SEQ ID NO: 109142 - RNA, 31 nt, Homo Sapiens
aaugaugcagcccuccugccccagugucagg

SEQ ID NO: 109143 - RNA, 32 nt, Homo Sapiens
uucuucuccugaggucuuugcacuauaagcgc

SEQ ID NO: 109144 - RNA, 32 nt, Homo Sapiens
gagcccagguugaugagcauuuagagggaagc

SEQ ID NO: 109145 - RNA, 32 nt, Homo Sapiens
agagggaggcgagagcccggcagccgcuucgc

SEQ ID NO: 109146 - RNA, 32 nt, Homo Sapiens
aaauaauaugaauaaauauuugaaaguuguau

SEQ ID NO: 109147 - RNA, 32 nt, Homo Sapiens
aaaguuuguguucacgauauucacuccugccc

SEQ ID NO: 109148 - RNA, 32 nt, Homo Sapiens
gaaggacccugggagcucugggaauuuggagu

SEQ ID NO: 109149 - RNA, 32 nt, Homo Sapiens
uguggccgccucaccugcucccccugucucuu

SEQ ID NO: 109150 - RNA, 32 nt, Homo Sapiens
uuuaaaguaacccuacaaaaccacuggaaagu

SEQ ID NO: 109151 - RNA, 32 nt, Homo Sapiens
gggacagcucacgaggcuuggaccugcugugg

SEQ ID NO: 109152 - RNA, 32 nt, Homo Sapiens
aaacggcagacacaacauguuccuccacgcgg

SEQ ID NO: 109153 - RNA, 32 nt, Homo Sapiens
uuguauuguaauuuauuuuuuauuaugcuuua

SEQ ID NO: 109154 - RNA, 29 nt, Homo Sapiens
cagucugugacuuucccguugcagugaga

SEQ ID NO: 109155 - RNA, 32 nt, Homo Sapiens
uggggaugguggcucacgcuuguaaucccagu

SEQ ID NO: 109156 - RNA, 32 nt, Homo Sapiens
guuucuaugagcaucucuguuugguaaggagg

SEQ ID NO: 109157 - RNA, 32 nt, Homo Sapiens
ugcaaccuaaaauaaauaaauauuaaagugug

SEQ ID NO: 109158 - RNA, 32 nt, Homo Sapiens
gggaccccugcgccccuccccuccccccugac

SEQ ID NO: 109159 - RNA, 32 nt, Homo Sapiens
uucucagaauaaauguuuuucacagauugaaa

SEQ ID NO: 109160 - RNA, 32 nt, Homo Sapiens
uagaggucugagaacaagguguuaucaggguu

SEQ ID NO: 109161 - RNA, 32 nt, Homo Sapiens
cuggcugagcugcccaggauucuggcugacuc

SEQ ID NO: 109162 - RNA, 32 nt, Homo Sapiens
agacaauuuguuguacccaugacuguugccug

SEQ ID NO: 109163 - RNA, 32 nt, Homo Sapiens
gauccacccgccuuggccuccugggugcuggg

SEQ ID NO: 109164 - RNA, 32 nt, Homo Sapiens
ggccgggacuccccgggcucucgcccuucagg

SEQ ID NO: 109165 - RNA, 32 nt, Homo Sapiens
gugggaagcguccgccauguucugcgaaaaag

SEQ ID NO: 109166 - RNA, 32 nt, Homo Sapiens
gaaggacaaaaacaagcaaacaaaaaccccug

SEQ ID NO: 109167 - RNA, 31 nt, Homo Sapiens
agcgccauggcccgcgcacgccaggagggca

SEQ ID NO: 109168 - RNA, 32 nt, Homo Sapiens
ggucccggcggugcgacacggccgggaggagg

SEQ ID NO: 109169 - RNA, 32 nt, Homo Sapiens
uuaauuaacuuaaagacugauuuuaaucugac

SEQ ID NO: 109170 - RNA, 32 nt, Homo Sapiens
aaccgagauugugccauugcacuacagccugg

SEQ ID NO: 109171 - RNA, 29 nt, Homo Sapiens
aagaagaagaagguggccaagacccaggg

SEQ ID NO: 109172 - RNA, 32 nt, Homo Sapiens
augugauacugauugccacauuaagguugaac

SEQ ID NO: 109173 - RNA, 32 nt, Homo Sapiens
uaaaguucaaacucacaggugacucuaagguu

SEQ ID NO: 109174 - RNA, 32 nt, Homo Sapiens
guguguauauauacauauguauguuuauauac

SEQ ID NO: 109175 - RNA, 32 nt, Homo Sapiens
ucucccucaucccaccccaaauacuuaaaaug

SEQ ID NO: 109176 - RNA, 32 nt, Homo Sapiens
aacaauuauccuuguuacugcuuugccaguuc

SEQ ID NO: 109177 - RNA, 32 nt, Homo Sapiens
guacuugauucuucagaaaaccuccaaaguag

SEQ ID NO: 109178 - RNA, 32 nt, Homo Sapiens
gcgaguggccccagcguccucgcgcggcuguu

SEQ ID NO: 109179 - RNA, 32 nt, Homo Sapiens
gccuaccccaucaccgcggccggcgccgggcc

SEQ ID NO: 109180 - RNA, 32 nt, Homo Sapiens
gcacccggcgcauguuuuuucuucauuccuau

SEQ ID NO: 109181 - RNA, 32 nt, Homo Sapiens
cucaguuucugcaccugucaaauaggguuuau

SEQ ID NO: 109182 - RNA, 32 nt, Homo Sapiens
cuguacuguguugggggaagauccucaaauuc

SEQ ID NO: 109183 - RNA, 32 nt, Homo Sapiens
aacacccauacccaccagcugggcguugggac

SEQ ID NO: 109184 - RNA, 32 nt, Homo Sapiens
ugcagugggaaacaaccgcacccgcggcccag

SEQ ID NO: 109185 - RNA, 32 nt, Homo Sapiens
ugggugggggagagggccgaggcccgggggca

SEQ ID NO: 109186 - RNA, 32 nt, Homo Sapiens
ggcccauaacaaaggaucuuaaaccaugcagu

SEQ ID NO: 109187 - RNA, 32 nt, Homo Sapiens
gaccugccacgggcagcccccggccgcggguc

SEQ ID NO: 109188 - RNA, 32 nt, Homo Sapiens
auguacaguaacgcgucaggcuugugacauuu

SEQ ID NO: 109189 - RNA, 32 nt, Homo Sapiens
ccuuauaaauguuauagcuaugauuguuuuua

SEQ ID NO: 109190 - RNA, 32 nt, Homo Sapiens
auggggccuuugauaaccccagccagcagaug

SEQ ID NO: 109191 - RNA, 32 nt, Homo Sapiens
gucugagccuggcgcggaggcuaugggcagcc

SEQ ID NO: 109192 - RNA, 32 nt, Homo Sapiens
ggugaaaucugcucuucuuccaaauauauaaa

SEQ ID NO: 109193 - RNA, 32 nt, Homo Sapiens
ggaaggcucaccacgcagaugcgcucauccgc

SEQ ID NO: 109194 - RNA, 32 nt, Homo Sapiens
gagguggaggccgcggacauuuuggugccaag

SEQ ID NO: 109195 - RNA, 32 nt, Homo Sapiens
uuagacaucagcuugcuuuuuaucuccuuuuu

SEQ ID NO: 109196 - RNA, 32 nt, Homo Sapiens
uuuuugaauguucuuuuuaucuuaccgaccua

SEQ ID NO: 109197 - RNA, 32 nt, Homo Sapiens
cuucagaugucuuuaagcagauuggaaguaug

SEQ ID NO: 109198 - RNA, 32 nt, Homo Sapiens
uucuuuuccgcacuaccugaacauuguaauac

SEQ ID NO: 109199 - RNA, 32 nt, Homo Sapiens
gccugaugaccugcagccuggaccuggacucu

SEQ ID NO: 109200 - RNA, 32 nt, Homo Sapiens
aguuauaauaauaaauaauugaaacaaucuga

SEQ ID NO: 109201 - RNA, 32 nt, Homo Sapiens
aaauucucuuuccuagucaaaaauugcccaaa

SEQ ID NO: 109202 - RNA, 32 nt, Homo Sapiens
cucucugcugcggucuccgagggccgaccgcu

SEQ ID NO: 109203 - RNA, 32 nt, Homo Sapiens
aagcugagcugagggcccgcggcggccgcggc

SEQ ID NO: 109204 - RNA, 32 nt, Homo Sapiens
aagcaggacagacaccguggacagcgcuguau

SEQ ID NO: 109205 - RNA, 32 nt, Homo Sapiens
guaugugaaaacaguaaagcaagugccuggau

SEQ ID NO: 109206 - RNA, 32 nt, Homo Sapiens
ucugugcgcucccuccuugccucccccuccag

SEQ ID NO: 109207 - RNA, 32 nt, Homo Sapiens
cucccccgcagcagcgggccuugccgucgagu

SEQ ID NO: 109208 - RNA, 32 nt, Homo Sapiens
uuuugaaucauccugacgcagaugcaccagaa

SEQ ID NO: 109209 - RNA, 32 nt, Homo Sapiens
cuuuaaaauaguaaaauggaaagugaauuuuu

SEQ ID NO: 109210 - RNA, 32 nt, Homo Sapiens
cuuuuuuauguugggcacggagggauccaggg

SEQ ID NO: 109211 - RNA, 32 nt, Homo Sapiens
acacucccauucucacagcccugcuggaccaa

SEQ ID NO: 109212 - RNA, 32 nt, Homo Sapiens
ggcgcgcugugucgcgggucggagcucggucc

SEQ ID NO: 109213 - RNA, 32 nt, Homo Sapiens
uaugaaauacuuaaaauguaaaggagauaaug

SEQ ID NO: 109214 - RNA, 32 nt, Homo Sapiens
ucuugcuugcugucaaacuuuagaacaccaug

SEQ ID NO: 109215 - RNA, 32 nt, Homo Sapiens
ucacuguaucaucuuggucuuguucuggcugu

SEQ ID NO: 109216 - RNA, 32 nt, Homo Sapiens
gccuguugccacgugacagucucacaagcuca

SEQ ID NO: 109217 - RNA, 32 nt, Homo Sapiens
aagagugcaauaaggauccaaauacagugacu

SEQ ID NO: 109218 - RNA, 32 nt, Homo Sapiens
aguccaaaauuuuugcucauaauccuggacug

SEQ ID NO: 109219 - RNA, 32 nt, Homo Sapiens
uguuauuggacucuuuuuuuuauuuuaagacu

SEQ ID NO: 109220 - RNA, 32 nt, Homo Sapiens
uucugugggucugucggugccgagggcaggau

SEQ ID NO: 109221 - RNA, 32 nt, Homo Sapiens
uacaggugaguguacuugggguuccuucaagg

SEQ ID NO: 109222 - RNA, 32 nt, Homo Sapiens
uugggaaagggagauggagaagaacucaagga

SEQ ID NO: 109223 - RNA, 32 nt, Homo Sapiens
cgauuggcucugcagcccccuaaccugccucu

SEQ ID NO: 109224 - RNA, 32 nt, Homo Sapiens
cuggggagacagagcgagauucugugucaaaa

SEQ ID NO: 109225 - RNA, 32 nt, Homo Sapiens
ggcgcggcgcggugcauuuccaggcgcugcuc

SEQ ID NO: 109226 - RNA, 32 nt, Homo Sapiens
cccuuucauuggcaugacggaaugaaaggaug

SEQ ID NO: 109227 - RNA, 32 nt, Homo Sapiens
ggccaugcggaggcccacgaggaggccggcgg

SEQ ID NO: 109228 - RNA, 32 nt, Homo Sapiens
augugauccgcucacugacacucuguaaaggc

SEQ ID NO: 109229 - RNA, 32 nt, Homo Sapiens
uaugagaggacuggcucccaucuuuuguuacu

SEQ ID NO: 109230 - RNA, 32 nt, Homo Sapiens
ccaucucggggagagcgaagggugaggcuggg

SEQ ID NO: 109231 - RNA, 32 nt, Homo Sapiens
gacaguuuacaugguuuuaucuagcuuucuua

SEQ ID NO: 109232 - RNA, 32 nt, Homo Sapiens
gcugcaacgucuccccaguucuccucucagaa

SEQ ID NO: 109233 - RNA, 32 nt, Homo Sapiens
agacuagccuacuucaucucaggacccgccca

SEQ ID NO: 109234 - RNA, 32 nt, Homo Sapiens
gacaggacccacugggagacaagcauuuauac

SEQ ID NO: 109235 - RNA, 32 nt, Homo Sapiens
aguggggaauaauaauaauguauaauaaucaa

SEQ ID NO: 109236 - RNA, 32 nt, Homo Sapiens
guguuuucugagguacuuuagaugaacaguaa

SEQ ID NO: 109237 - RNA, 30 nt, Homo Sapiens
ccucuugucugugguaaggaaggagucuug

SEQ ID NO: 109238 - RNA, 32 nt, Homo Sapiens
ggcacuuaccacacucugaggaagccugacuc

SEQ ID NO: 109239 - RNA, 32 nt, Homo Sapiens
gcguggcggcccccacccggccucggcucuuu

SEQ ID NO: 109240 - RNA, 32 nt, Homo Sapiens
aguagggcuuggugaaugcugcugagugaaug

SEQ ID NO: 109241 - RNA, 32 nt, Homo Sapiens
aguguagaaaucugaauuuuuaaaagagcugu

SEQ ID NO: 109242 - RNA, 32 nt, Homo Sapiens
ucuaguuugucuuuggcaaaaaaaaaaaaaaa

SEQ ID NO: 109243 - RNA, 32 nt, Homo Sapiens
ugguccuuuagguuugggcacaaaauauaauu

SEQ ID NO: 109244 - RNA, 32 nt, Homo Sapiens
ccuacuguaguagauacgcaacagauaaugug

SEQ ID NO: 109245 - RNA, 32 nt, Homo Sapiens
ccccucgcgggccccgcaccucgcgucccgga

SEQ ID NO: 109246 - RNA, 32 nt, Homo Sapiens
cguagcuggucccagggccccgggggucgcca

SEQ ID NO: 109247 - RNA, 32 nt, Homo Sapiens
ggcaugucuucaggcugagcuccuccccgcgu

SEQ ID NO: 109248 - RNA, 32 nt, Homo Sapiens
uucuagcucaucucacucugguaaugucuuug

SEQ ID NO: 109249 - RNA, 32 nt, Homo Sapiens
agaguccccgucccugcucugccacugugcuc

SEQ ID NO: 109250 - RNA, 32 nt, Homo Sapiens
auccgcggccucgagcuugcuaccucagccca

SEQ ID NO: 109251 - RNA, 32 nt, Homo Sapiens
aguggguucccgcccacucacccaggagcugg

SEQ ID NO: 109252 - RNA, 32 nt, Homo Sapiens
uggggaggcaagagggcggcgaggaggugaug

SEQ ID NO: 109253 - RNA, 32 nt, Homo Sapiens
cagccccgcagagcgcccacggacagugucca

SEQ ID NO: 109254 - RNA, 32 nt, Homo Sapiens
guuauaguuucugcauggaaagcacuuggaac

SEQ ID NO: 109255 - RNA, 32 nt, Homo Sapiens
auuaauaucucacagauugaauaucuuaugga

SEQ ID NO: 109256 - RNA, 32 nt, Homo Sapiens
cuggaguggggccuggacuugcucuccccugc

SEQ ID NO: 109257 - RNA, 32 nt, Homo Sapiens
aacuccaaguccaugcagaacucuggaaggcc

SEQ ID NO: 109258 - RNA, 32 nt, Homo Sapiens
gaauucaucuugaguuaucuuuuauuuagaua

SEQ ID NO: 109259 - RNA, 32 nt, Homo Sapiens
gcagaucaacugaguucaggaguuugagacca

SEQ ID NO: 109260 - RNA, 32 nt, Homo Sapiens
cuaauauuaaaccuuucaguacucuuauuagg

SEQ ID NO: 109261 - RNA, 32 nt, Homo Sapiens
gggccagccugucuguugugcagacgccuccu

SEQ ID NO: 109262 - RNA, 32 nt, Homo Sapiens
guuaacugggccuauguaguagccucauuuac

SEQ ID NO: 109263 - RNA, 32 nt, Homo Sapiens
aucgcgccacuacuccagccugggugacaaag

SEQ ID NO: 109264 - RNA, 32 nt, Homo Sapiens
guuuaauauugucaaggacaguacaacugcaa

SEQ ID NO: 109265 - RNA, 32 nt, Homo Sapiens
gccugaaaccucuggcugguggcaccuuuacc

SEQ ID NO: 109266 - RNA, 32 nt, Homo Sapiens
caggugguggcagcaaugguguuguaagauuu

SEQ ID NO: 109267 - RNA, 32 nt, Homo Sapiens
cgacccgggcuucugggggaccgcgggggccg

SEQ ID NO: 109268 - RNA, 32 nt, Homo Sapiens
aaucuuauuauguacuucugugugaaaaaguc

SEQ ID NO: 109269 - RNA, 32 nt, Homo Sapiens
gguccaggccggcaucguccuggccacccccc

SEQ ID NO: 109270 - RNA, 32 nt, Homo Sapiens
cauugcuucugcuaaauuuaauaaaaacuuca

SEQ ID NO: 109271 - RNA, 32 nt, Homo Sapiens
aggaaagagagaaaaucacugcuguauacuaa

SEQ ID NO: 109272 - RNA, 32 nt, Homo Sapiens
guggggcgccucggacgggcccgggagggcug

SEQ ID NO: 109273 - RNA, 32 nt, Homo Sapiens
gugugaaaaagaugccaauuauuguuacacau

SEQ ID NO: 109274 - RNA, 32 nt, Homo Sapiens
gauuuccaguugcacuauuuccaguugccucu

SEQ ID NO: 109275 - RNA, 32 nt, Homo Sapiens
gacacacacccaggcaaccccugggcuguggg

SEQ ID NO: 109276 - RNA, 32 nt, Homo Sapiens
uuguggauguuuuuauuucuuggauuuauagu

SEQ ID NO: 109277 - RNA, 32 nt, Homo Sapiens
augucagcauucugacuacuuaccacaucaaa

SEQ ID NO: 109278 - RNA, 32 nt, Homo Sapiens
cccugucucuacuaaaaacauaaaaauuagcu

SEQ ID NO: 109279 - RNA, 32 nt, Homo Sapiens
cuuuuuucuaacuuguuaauuuuaugaauuuu

SEQ ID NO: 109280 - RNA, 32 nt, Homo Sapiens
agggguugauuucuucuuguugugaccuacag

SEQ ID NO: 109281 - RNA, 32 nt, Homo Sapiens
cugcggacgagcgggcggcaggagccggcgcg

SEQ ID NO: 109282 - RNA, 32 nt, Homo Sapiens
augcugcccucggccuguucagauggggauug

SEQ ID NO: 109283 - RNA, 32 nt, Homo Sapiens
gcagccuccacccgcgcucgccgcccuccggg

SEQ ID NO: 109284 - RNA, 32 nt, Homo Sapiens
aagacgcugcacgaccccgcgcccgcuugucg

SEQ ID NO: 109285 - RNA, 32 nt, Homo Sapiens
cagcagcagcagcagcacuugcaccgccagcu

SEQ ID NO: 109286 - RNA, 32 nt, Homo Sapiens
aaaagaaaaccgaaacaaaaccagacccagcc

SEQ ID NO: 109287 - RNA, 32 nt, Homo Sapiens
gccuuguaaguucuggggagcauuccaaagca

SEQ ID NO: 109288 - RNA, 32 nt, Homo Sapiens
auuuccuaucuugacauggauuuuuucacaaa

SEQ ID NO: 109289 - RNA, 32 nt, Homo Sapiens
aguggggaggggcuacuuuguuucaggguuuu

SEQ ID NO: 109290 - RNA, 32 nt, Homo Sapiens
uuaaguauguugcaguuguaaauauuagaguu

SEQ ID NO: 109291 - RNA, 32 nt, Homo Sapiens
auauaaaccuuacauuuauauagugcaccuau

SEQ ID NO: 109292 - RNA, 32 nt, Homo Sapiens
gcgugguggcucauguauguaauccuagcacu

SEQ ID NO: 109293 - RNA, 32 nt, Homo Sapiens
augacugggaaauuguggccaugugagaugug

SEQ ID NO: 109294 - RNA, 32 nt, Homo Sapiens
aaaaccuagaacuuggucaucccuuuauagga

SEQ ID NO: 109295 - RNA, 32 nt, Homo Sapiens
cccuguaaacacagugcugcgagaucgcuggc

SEQ ID NO: 109296 - RNA, 32 nt, Homo Sapiens
acgugaacaaauaauaaaccguuguuguuaua

SEQ ID NO: 109297 - RNA, 29 nt, Homo Sapiens
gcagcaucgguccgggaggucucuaggcu

SEQ ID NO: 109298 - RNA, 32 nt, Homo Sapiens
ugcccaggccccugggcccagcccuggcuugg

SEQ ID NO: 109299 - RNA, 32 nt, Homo Sapiens
ccucccaggcccuguccccagccccuccugcc

SEQ ID NO: 109300 - RNA, 32 nt, Homo Sapiens
accugccccucuaacccacuucaaauuacaag

SEQ ID NO: 109301 - RNA, 32 nt, Homo Sapiens
cuuggauuuacuagacuuuguaaugaguaauu

SEQ ID NO: 109302 - RNA, 32 nt, Homo Sapiens
gcgcuccagcccagcccgcugcucacuuucca

SEQ ID NO: 109303 - RNA, 32 nt, Homo Sapiens
aagggcagggcaccgccuccucuguuuucuag

SEQ ID NO: 109304 - RNA, 32 nt, Homo Sapiens
guuuugcucuggcaucgccgccgggggaggga

SEQ ID NO: 109305 - RNA, 32 nt, Homo Sapiens
gcuaggauagugauuuuaaauaaucacuaaaa

SEQ ID NO: 109306 - RNA, 32 nt, Homo Sapiens
ggccgguacccuuugggaccgcagcuguggcc

SEQ ID NO: 109307 - RNA, 32 nt, Homo Sapiens
aaguuauggaaauggaaauaaucuuuccuaaa

SEQ ID NO: 109308 - RNA, 32 nt, Homo Sapiens
ggagggccuguccacacccuggauccccguac

SEQ ID NO: 109309 - RNA, 32 nt, Homo Sapiens
ccuagaaugggauauagccagagaacaauucu

SEQ ID NO: 109310 - RNA, 32 nt, Homo Sapiens
aauuuccauaauuuaaauuuguauagaauuca

SEQ ID NO: 109311 - RNA, 32 nt, Homo Sapiens
uauacaaaaagauguacggucuggccaaacca

SEQ ID NO: 109312 - RNA, 32 nt, Homo Sapiens
ugaccuuguaaauuuguauauaugcacuaaua

SEQ ID NO: 109313 - RNA, 32 nt, Homo Sapiens
uggcauuguuggauugacauaguucuugcuga

SEQ ID NO: 109314 - RNA, 32 nt, Homo Sapiens
ggggacagcccgauuggggacaauggcgucuc

SEQ ID NO: 109315 - RNA, 32 nt, Homo Sapiens
cagaaguggagauguuggggccaggcacagug

SEQ ID NO: 109316 - RNA, 32 nt, Homo Sapiens
uauuuugguaucacuuuuuuccuuccaaaaaa

SEQ ID NO: 109317 - RNA, 32 nt, Homo Sapiens
gggucacauaguugguuugggguagggcugau

SEQ ID NO: 109318 - RNA, 32 nt, Homo Sapiens
accaaagacaaaugcaacugauauggcaaacu

SEQ ID NO: 109319 - RNA, 32 nt, Homo Sapiens
ggccagggcgggggcggggugcauuuccaucc

SEQ ID NO: 109320 - RNA, 32 nt, Homo Sapiens
cacagucagaggucagcaggaagcugagucau

SEQ ID NO: 109321 - RNA, 32 nt, Homo Sapiens
agaucgcuggaacucaggaggcagagguugca

SEQ ID NO: 109322 - RNA, 32 nt, Homo Sapiens
cgguggccuccgcuccugcucgcagccccugu

SEQ ID NO: 109323 - RNA, 29 nt, Homo Sapiens
aaucuuuggggacaguguagcccaucugc

SEQ ID NO: 109324 - RNA, 32 nt, Homo Sapiens
gagauggucuuggagaauugugaauguaugua

SEQ ID NO: 109325 - RNA, 32 nt, Homo Sapiens
guccugguauugauacaagacccagcugguga

SEQ ID NO: 109326 - RNA, 32 nt, Homo Sapiens
agacaguugcaaauacauuauauugagggauc

SEQ ID NO: 109327 - RNA, 32 nt, Homo Sapiens
acacucucauuucaguagaauuuggaaaacua

SEQ ID NO: 109328 - RNA, 32 nt, Homo Sapiens
gugcaugcugugaugccugugacuccuucauc

SEQ ID NO: 109329 - RNA, 32 nt, Homo Sapiens
uuuggaggcagggugguggggguguauuagca

SEQ ID NO: 109330 - RNA, 32 nt, Homo Sapiens
gugaccgcgcuccagacacagcucugcguccu

SEQ ID NO: 109331 - RNA, 32 nt, Homo Sapiens
uaaaagucuacaaucuaauuaauagcaauacu

SEQ ID NO: 109332 - RNA, 32 nt, Homo Sapiens
uuaaagagucgacuauacaaagaucaaucacc

SEQ ID NO: 109333 - RNA, 32 nt, Homo Sapiens
cuauucagaaaaggugaauaaaauugggauau

SEQ ID NO: 109334 - RNA, 32 nt, Homo Sapiens
gggauuguuucuucuuuuccuugucuuugaac

SEQ ID NO: 109335 - RNA, 32 nt, Homo Sapiens
caauguaggcaggcacuauccaaucaccugag

SEQ ID NO: 109336 - RNA, 32 nt, Homo Sapiens
ugcaggagcugaugcaugacucucaguuccac

SEQ ID NO: 109337 - RNA, 32 nt, Homo Sapiens
ggcuggucucaaacuccugaccucaggugauc

SEQ ID NO: 109338 - RNA, 32 nt, Homo Sapiens
acauacuuuuuggcagggaagugaauccccua

SEQ ID NO: 109339 - RNA, 32 nt, Homo Sapiens
uuccuccgaggacuucuauccuccccaggccu

SEQ ID NO: 109340 - RNA, 32 nt, Homo Sapiens
augacaaccaaaguuuuagaaaacauuaaaca

SEQ ID NO: 109341 - RNA, 32 nt, Homo Sapiens
uccuggcucccucacuccuggguuccagguca

SEQ ID NO: 109342 - RNA, 32 nt, Homo Sapiens
cacguggagaaaguagaugucuuauccugggu

SEQ ID NO: 109343 - RNA, 32 nt, Homo Sapiens
aaagaaacuugguaccuauuaaacaauaacuc

SEQ ID NO: 109344 - RNA, 32 nt, Homo Sapiens
uuugucaaauaguaaaugauauuugcccuugc

SEQ ID NO: 109345 - RNA, 32 nt, Homo Sapiens
uccaaaagauaaaaugaugagagagauucgag

SEQ ID NO: 109346 - RNA, 32 nt, Homo Sapiens
ggauaagcugaaugcaaaguuauuugcagguu

SEQ ID NO: 109347 - RNA, 32 nt, Homo Sapiens
aauaacgggcuuuauuguuuauuuuaaaagcu

SEQ ID NO: 109348 - RNA, 32 nt, Homo Sapiens
agccgggaggggcugccggcgcugacagcaga

SEQ ID NO: 109349 - RNA, 32 nt, Homo Sapiens
aauuugcaauuucaggaauuuaauuuauaggc

SEQ ID NO: 109350 - RNA, 32 nt, Homo Sapiens
ggauggaggcugugcccagagccccaggaaaa

SEQ ID NO: 109351 - RNA, 32 nt, Homo Sapiens
gacggagucucgcucugucacccaggcugggg

SEQ ID NO: 109352 - RNA, 32 nt, Homo Sapiens
gacagaaucucacucugucacccaggcuggag

SEQ ID NO: 109353 - RNA, 32 nt, Homo Sapiens
uuaugguucucagaagccaaaauacacaacuu

SEQ ID NO: 109354 - RNA, 31 nt, Homo Sapiens
acuuuugaaacucagacuucaguguauaccc

SEQ ID NO: 109355 - RNA, 32 nt, Homo Sapiens
aaacauucuuccuguuuggacucaggaaaggg

SEQ ID NO: 109356 - RNA, 32 nt, Homo Sapiens
gugggaguguugcgaguguuggaugucagcau

SEQ ID NO: 109357 - RNA, 32 nt, Homo Sapiens
gcugauuaaaacauaaaugcugcuuuuagguu

SEQ ID NO: 109358 - RNA, 32 nt, Homo Sapiens
gaauggacuccauggacagaaaagcuacgaau

SEQ ID NO: 109359 - RNA, 32 nt, Homo Sapiens
gccuggugccccaaggggcagagcuggcagag

SEQ ID NO: 109360 - RNA, 30 nt, Homo Sapiens
cggccaugcgcugggugcgccacgacgcgc

SEQ ID NO: 109361 - RNA, 32 nt, Homo Sapiens
gcuucauaucucucucccguccuccuguuuua

SEQ ID NO: 109362 - RNA, 32 nt, Homo Sapiens
accagcuucaggggcuaugacuucuacggucu

SEQ ID NO: 109363 - RNA, 32 nt, Homo Sapiens
uauuuuaugcccacuuuacaauaaaaagggua

SEQ ID NO: 109364 - RNA, 32 nt, Homo Sapiens
gcuguuuuggaccuccuucauggcaucagaau

SEQ ID NO: 109365 - RNA, 32 nt, Homo Sapiens
agaauuucuucaucuacuucugcagucuuaac

SEQ ID NO: 109366 - RNA, 32 nt, Homo Sapiens
ugguuuaauuguaaguauugucuuaaccucca

SEQ ID NO: 109367 - RNA, 28 nt, Homo Sapiens
gauaacagcuugaacauuaugaaaugcu

SEQ ID NO: 109368 - RNA, 32 nt, Homo Sapiens
uuuuuuuuacacaaucauuaaugagauuuguc

SEQ ID NO: 109369 - RNA, 32 nt, Homo Sapiens
uagcuuacuauaauuucuuuauaaaccuuuua

SEQ ID NO: 109370 - RNA, 32 nt, Homo Sapiens
gcuggaagagaauccacugccuuaaagagaag

SEQ ID NO: 109371 - RNA, 32 nt, Homo Sapiens
caaggaagaaaugguucagaaaauauuuucag

SEQ ID NO: 109372 - RNA, 32 nt, Homo Sapiens
cuccaugugauguuugcuugguugccuguucc

SEQ ID NO: 109373 - RNA, 32 nt, Homo Sapiens
ccgggagugggaagaguuggccggaaggggau

SEQ ID NO: 109374 - RNA, 32 nt, Homo Sapiens
ggugugugcccuccugguaacagugaaauuga

SEQ ID NO: 109375 - RNA, 32 nt, Homo Sapiens
ccgugagcugggugacuccagccucaccugca

SEQ ID NO: 109376 - RNA, 32 nt, Homo Sapiens
cugcgaccgcucagaagcacaaaugcugucca

SEQ ID NO: 109377 - RNA, 32 nt, Homo Sapiens
aacauaaauuuaauaguuuucauccuuuuuua

SEQ ID NO: 109378 - RNA, 32 nt, Homo Sapiens
cugcucacccucacaccguguuagagacuacu

SEQ ID NO: 109379 - RNA, 32 nt, Homo Sapiens
aaaauccuucuccaccgcacagacugggaacc

SEQ ID NO: 109380 - RNA, 32 nt, Homo Sapiens
uuuuacuuucccuuuuuugggucaaauuuuuc

SEQ ID NO: 109381 - RNA, 32 nt, Homo Sapiens
uucaucacagaaaagaugaaaagagaaaagaa

SEQ ID NO: 109382 - RNA, 32 nt, Homo Sapiens
cuucuuuuuuaaauuuuaugucuagcuucuga

SEQ ID NO: 109383 - RNA, 32 nt, Homo Sapiens
cuccuuugcucuugccaaaaaauagcacacuu

SEQ ID NO: 109384 - RNA, 32 nt, Homo Sapiens
accguuucuuccugccagcaggggugugaugu

SEQ ID NO: 109385 - RNA, 32 nt, Homo Sapiens
ggggccagcucaguggagcagcugcggaagga

SEQ ID NO: 109386 - RNA, 32 nt, Homo Sapiens
cgggauccagcaucagggucucuauaccccag

SEQ ID NO: 109387 - RNA, 32 nt, Homo Sapiens
augcagccugcccuccaucauccaccccagaa

SEQ ID NO: 109388 - RNA, 32 nt, Homo Sapiens
aggcugcuuaaaccucugucucugacgguccc

SEQ ID NO: 109389 - RNA, 32 nt, Homo Sapiens
gagcucccucugcuugcuuuccaggucuugaa

SEQ ID NO: 109390 - RNA, 32 nt, Homo Sapiens
acucucguuugugaaaugaaugguugcagauu

SEQ ID NO: 109391 - RNA, 32 nt, Homo Sapiens
gauaggggaggggucuuaguuccuuuuucugu

SEQ ID NO: 109392 - RNA, 32 nt, Homo Sapiens
cucauccgacagacgcuguggaugaggagggg

SEQ ID NO: 109393 - RNA, 32 nt, Homo Sapiens
gagcugacauucaaauggauucuuuaauaaua

SEQ ID NO: 109394 - RNA, 32 nt, Homo Sapiens
gagaagacacucuggagacagaggaggaaaca

SEQ ID NO: 109395 - RNA, 32 nt, Homo Sapiens
gacgaagucugcuaagagagauggaggcugug

SEQ ID NO: 109396 - RNA, 32 nt, Homo Sapiens
gagccgccuaccugcagccgccgcccacggca

SEQ ID NO: 109397 - RNA, 32 nt, Homo Sapiens
ggagggaaauguuugccuguugaacuucuuuc

SEQ ID NO: 109398 - RNA, 32 nt, Homo Sapiens
augucuucgucucuuccaaccuaucuguucug

SEQ ID NO: 109399 - RNA, 32 nt, Homo Sapiens
cccagagaaggagugggguggggggugguuaa

SEQ ID NO: 109400 - RNA, 32 nt, Homo Sapiens
gacauuguucuucuuggaacauguuaagacau

SEQ ID NO: 109401 - RNA, 32 nt, Homo Sapiens
cuuuccccaagcccucuuaaucccugagcuau

SEQ ID NO: 109402 - RNA, 32 nt, Homo Sapiens
ggcaauaggccugggaaagucgcacuuucauc

SEQ ID NO: 109403 - RNA, 32 nt, Homo Sapiens
aaguguguacaaaacucaaaacaugaacaaca

SEQ ID NO: 109404 - RNA, 32 nt, Homo Sapiens
augcccgccccauugcugccaaugcuggcagc

SEQ ID NO: 109405 - RNA, 32 nt, Homo Sapiens
ucauccgcacgcugcggccaggcaccuuuggg

SEQ ID NO: 109406 - RNA, 32 nt, Homo Sapiens
uuaaaagucaaaacagaacaaaacaaaguaug

SEQ ID NO: 109407 - RNA, 32 nt, Homo Sapiens
cugaguaugaaauaagaaaaguuagggcacuc

SEQ ID NO: 109408 - RNA, 32 nt, Homo Sapiens
gcagagcaggauguuguaacgggaaaugucag

SEQ ID NO: 109409 - RNA, 32 nt, Homo Sapiens
ugcaaucuuuauuuauuguaaaauuuuuuaag

SEQ ID NO: 109410 - RNA, 32 nt, Homo Sapiens
gacuaggcuugccuaugugcuuauguguagcu

SEQ ID NO: 109411 - RNA, 32 nt, Homo Sapiens
uuggcucaggauguguucugggcuugcaagcc

SEQ ID NO: 109412 - RNA, 32 nt, Homo Sapiens
guucugcccccgcuuuccucuguuugauacua

SEQ ID NO: 109413 - RNA, 31 nt, Homo Sapiens
agcgggaacauaucuugcauggacuuuagca

SEQ ID NO: 109414 - RNA, 32 nt, Homo Sapiens
cuauaccgcugcggcgaccaaccccgccacuu

SEQ ID NO: 109415 - RNA, 32 nt, Homo Sapiens
ucuggggaaaggaaaaccagggguuuuagcuc

SEQ ID NO: 109416 - RNA, 32 nt, Homo Sapiens
aaggcagagcuuugggccaaaagcaggcguug

SEQ ID NO: 109417 - RNA, 32 nt, Homo Sapiens
acugaaggacuaccagaauaaaacagggucua

SEQ ID NO: 109418 - RNA, 32 nt, Homo Sapiens
cucagugaagagcuuaaaauuguucuccucgu

SEQ ID NO: 109419 - RNA, 32 nt, Homo Sapiens
cuuuaaugaucaaggaagggugucuuuaccuu

SEQ ID NO: 109420 - RNA, 32 nt, Homo Sapiens
cuccuauaauccuagcacuuugggaggccgag

SEQ ID NO: 109421 - RNA, 32 nt, Homo Sapiens
cgcccggauggcgaccccagccucggccccag

SEQ ID NO: 109422 - RNA, 32 nt, Homo Sapiens
ggagagaauacuuuuuaaggcuuuugaacuau

SEQ ID NO: 109423 - RNA, 32 nt, Homo Sapiens
accaccagccgccgcugcccuucacccuacag

SEQ ID NO: 109424 - RNA, 32 nt, Homo Sapiens
guggccugguggggcucugcaggcucccucgg

SEQ ID NO: 109425 - RNA, 32 nt, Homo Sapiens
uauugggaaaagacuugccuucugccagaacu

SEQ ID NO: 109426 - RNA, 32 nt, Homo Sapiens
ggcaggugcaggucuuugugcauucucagagg

SEQ ID NO: 109427 - RNA, 31 nt, Homo Sapiens
gauagccccggaccccugccccgcccgaccc

SEQ ID NO: 109428 - RNA, 32 nt, Homo Sapiens
ccucagcauccuccuguccccagcugugucca

SEQ ID NO: 109429 - RNA, 32 nt, Homo Sapiens
ugucucggggcacgcuccaguaugccaguccu

SEQ ID NO: 109430 - RNA, 31 nt, Homo Sapiens
ugguuaccuuucugccugcccugugucguaa

SEQ ID NO: 109431 - RNA, 32 nt, Homo Sapiens
agcagaugaugaugaagaaaaugaaaguccug

SEQ ID NO: 109432 - RNA, 32 nt, Homo Sapiens
aguuugcugcagaaauacaauuuccuacacuu

SEQ ID NO: 109433 - RNA, 32 nt, Homo Sapiens
ugcagagauauacacacacuuuuuguacagaa

SEQ ID NO: 109434 - RNA, 32 nt, Homo Sapiens
gguagaugcugccucgcccaggcgcugaguga

SEQ ID NO: 109435 - RNA, 32 nt, Homo Sapiens
ucccgggccuggcccaggggccccuuuacaug

SEQ ID NO: 109436 - RNA, 31 nt, Homo Sapiens
ugugaauauauggcaaaguccacccucaggc

SEQ ID NO: 109437 - RNA, 32 nt, Homo Sapiens
cgcccgcaccuggcugcccacccagccgcaga

SEQ ID NO: 109438 - RNA, 32 nt, Homo Sapiens
uacccuggcugauguuaaacauuggcuccugu

SEQ ID NO: 109439 - RNA, 32 nt, Homo Sapiens
aaacugcauccccugaucccccgggggcugau

SEQ ID NO: 109440 - RNA, 32 nt, Homo Sapiens
guauaguuacucauuuagaugacuccaaaacu

SEQ ID NO: 109441 - RNA, 32 nt, Homo Sapiens
uacauacuguaccccagauuuugauuucagaa

SEQ ID NO: 109442 - RNA, 32 nt, Homo Sapiens
agcaccagggacauggcagggcccgagggcgc

SEQ ID NO: 109443 - RNA, 32 nt, Homo Sapiens
gguggggcgcgguggcgguggcgcggagccac

SEQ ID NO: 109444 - RNA, 32 nt, Homo Sapiens
uaaauuggcuuuucaugcguguguguugucug

SEQ ID NO: 109445 - RNA, 32 nt, Homo Sapiens
gacgcuucugcucaugguccaaggcuguguug

SEQ ID NO: 109446 - RNA, 32 nt, Homo Sapiens
aaucucugaauuugagauacaaacauguuccu

SEQ ID NO: 109447 - RNA, 32 nt, Homo Sapiens
uuuguugagguugaagaauugcuggcaauuaa

SEQ ID NO: 109448 - RNA, 32 nt, Homo Sapiens
agaggccauagccccaggcucagaggcccagg

SEQ ID NO: 109449 - RNA, 32 nt, Homo Sapiens
cacaaagcauauauguaauauuaaaauugaau

SEQ ID NO: 109450 - RNA, 32 nt, Homo Sapiens
gcacacugccccucucacacauguggggccgg

SEQ ID NO: 109451 - RNA, 32 nt, Homo Sapiens
auuauauuuacuaaguuaagagcuaguuuuua

SEQ ID NO: 109452 - RNA, 32 nt, Homo Sapiens
uuugggaggggaggagugucauuuuugagaau

SEQ ID NO: 109453 - RNA, 32 nt, Homo Sapiens
uaccacgauguaaacaaacaaacaaaaaacuc

SEQ ID NO: 109454 - RNA, 32 nt, Homo Sapiens
uaguuguucagcaauaauucauagucugugau

SEQ ID NO: 109455 - RNA, 32 nt, Homo Sapiens
uucugugguaguguaauuugaggaauacagug

SEQ ID NO: 109456 - RNA, 32 nt, Homo Sapiens
uccaauuuuuucugccauuuuuggcucuaguu

SEQ ID NO: 109457 - RNA, 32 nt, Homo Sapiens
ucuuacuguucucugcaucucuaauacacaac

SEQ ID NO: 109458 - RNA, 32 nt, Homo Sapiens
gagacagagucuuucucugucacccaggcugg

SEQ ID NO: 109459 - RNA, 32 nt, Homo Sapiens
caacuaauagucugcuguugaccagaagccuu

SEQ ID NO: 109460 - RNA, 32 nt, Homo Sapiens
agccugauuuuaacauuuuacauauuacauug

SEQ ID NO: 109461 - RNA, 32 nt, Homo Sapiens
ugugugcucagacuugaccauguuugggcaug

SEQ ID NO: 109462 - RNA, 32 nt, Homo Sapiens
cuuugaugcagacaaaaugcugcugcugcugc

SEQ ID NO: 109463 - RNA, 32 nt, Homo Sapiens
gcuuucgugaucacgugaccauccucuucccc

SEQ ID NO: 109464 - RNA, 29 nt, Homo Sapiens
uuaccuucuaucccuuccuccacgugagg

SEQ ID NO: 109465 - RNA, 32 nt, Homo Sapiens
aauuauguuugauuuuuaaacuauuuaguacu

SEQ ID NO: 109466 - RNA, 32 nt, Homo Sapiens
augaagauguucuuguauggauuauaguaucu

SEQ ID NO: 109467 - RNA, 32 nt, Homo Sapiens
uacccaagagucaacacuuauuauaaaccggg

SEQ ID NO: 109468 - RNA, 32 nt, Homo Sapiens
aauaugaaaauaaauuucuuuuuuaugucgug

SEQ ID NO: 109469 - RNA, 32 nt, Homo Sapiens
uagauaaacuuugaaaaugauuuguagagaug

SEQ ID NO: 109470 - RNA, 32 nt, Homo Sapiens
cuucauuaauuacuucuggcaagauguucugc

SEQ ID NO: 109471 - RNA, 32 nt, Homo Sapiens
gugaagcucuuccuacccuccucccccaaaaa

SEQ ID NO: 109472 - RNA, 32 nt, Homo Sapiens
guccuuuuaauuuuugcuuagaauagaaugga

SEQ ID NO: 109473 - RNA, 32 nt, Homo Sapiens
gcaguccccggcaggcgugcgccgggcagcag

SEQ ID NO: 109474 - RNA, 32 nt, Homo Sapiens
accaggccacaccggagcagugcucacacagg

SEQ ID NO: 109475 - RNA, 32 nt, Homo Sapiens
ucaccuaguucaauuuccauuaacucagauca

SEQ ID NO: 109476 - RNA, 31 nt, Homo Sapiens
cucucucaggccaccacagagggcaggggau

SEQ ID NO: 109477 - RNA, 32 nt, Homo Sapiens
gagauaggaagcugccucggggccaccccuug

SEQ ID NO: 109478 - RNA, 32 nt, Homo Sapiens
caggcauagccuucggcacagccccggcuccg

SEQ ID NO: 109479 - RNA, 32 nt, Homo Sapiens
acuccugugcaaacauauauuauuaaauuuuu

SEQ ID NO: 109480 - RNA, 32 nt, Homo Sapiens
gcauaauuuuucuuuauugcuuacuguguuaa

SEQ ID NO: 109481 - RNA, 30 nt, Homo Sapiens
uucugaugacccggccgccgccgccgcccu

SEQ ID NO: 109482 - RNA, 32 nt, Homo Sapiens
augccuauaauccuaacacuuuaggaggccga

SEQ ID NO: 109483 - RNA, 32 nt, Homo Sapiens
ggggacuuucagucacaggauuucauaauugu

SEQ ID NO: 109484 - RNA, 32 nt, Homo Sapiens
ggacucaggaccaucugccuccuuuauuccag

SEQ ID NO: 109485 - RNA, 32 nt, Homo Sapiens
uuuauuuucucaaaauucuggaugcuagaagu

SEQ ID NO: 109486 - RNA, 32 nt, Homo Sapiens
uacaggcgugagccaccacaccuggcuacccu

SEQ ID NO: 109487 - RNA, 29 nt, Homo Sapiens
ugaagcaugaagauuccuggggugggggg

SEQ ID NO: 109488 - RNA, 32 nt, Homo Sapiens
ggcugggcagugugcuggccgggcugcuggga

SEQ ID NO: 109489 - RNA, 31 nt, Homo Sapiens
gacacgauguucccuuucuacagcugcugga

SEQ ID NO: 109490 - RNA, 30 nt, Homo Sapiens
caaggagugcaagugccgccagaggccaga

SEQ ID NO: 109491 - RNA, 32 nt, Homo Sapiens
gaaagcugcccucucccucucccaccacacuc

SEQ ID NO: 109492 - RNA, 32 nt, Homo Sapiens
ggugggcccucccucccacagccccagggaga

SEQ ID NO: 109493 - RNA, 32 nt, Homo Sapiens
ugcaacaugucauuuugaaacuggauugauuu

SEQ ID NO: 109494 - RNA, 32 nt, Homo Sapiens
gcugcugcgggggucccggcgcugagccgggc

SEQ ID NO: 109495 - RNA, 32 nt, Homo Sapiens
aaugauguauuuuguggaaucaagaacaaaau

SEQ ID NO: 109496 - RNA, 29 nt, Homo Sapiens
cggcauggcuuccccgcggagcuccgggc

SEQ ID NO: 109497 - RNA, 29 nt, Homo Sapiens
uuggaauaaaguucuguuuucuguaaaaa

SEQ ID NO: 109498 - RNA, 32 nt, Homo Sapiens
uggacugaacuauuucccuccucccccaaucc

SEQ ID NO: 109499 - RNA, 32 nt, Homo Sapiens
uuuaagaugaauuguuauacaagaggugcuua

SEQ ID NO: 109500 - RNA, 32 nt, Homo Sapiens
auuugccaguuuccucccacugagaggaugga

SEQ ID NO: 109501 - RNA, 32 nt, Homo Sapiens
agaacauguugguauuuaucuauuguaagaua

SEQ ID NO: 109502 - RNA, 32 nt, Homo Sapiens
gccccccaucccucacuucugggcugucaugc

SEQ ID NO: 109503 - RNA, 32 nt, Homo Sapiens
cgacugugaagauaaaguucaaaaguauuuuu

SEQ ID NO: 109504 - RNA, 32 nt, Homo Sapiens
ucuuuacuuugugcuuguuuuuauccccuugg

SEQ ID NO: 109505 - RNA, 32 nt, Homo Sapiens
acuggggugggggaagggaaaaaggaaaguau

SEQ ID NO: 109506 - RNA, 32 nt, Homo Sapiens
ucagaagggcuucugggaccaauuccagcucc

SEQ ID NO: 109507 - RNA, 29 nt, Homo Sapiens
ccagaugggggaaccccgggcuggggccg

SEQ ID NO: 109508 - RNA, 32 nt, Homo Sapiens
ggucccagaagucuucuguucucuggccucac

SEQ ID NO: 109509 - RNA, 32 nt, Homo Sapiens
uccuuccugucuccucaagucaccuuauuauc

SEQ ID NO: 109510 - RNA, 32 nt, Homo Sapiens
ucagucggaucuucucuucucugggaggcuuu

SEQ ID NO: 109511 - RNA, 32 nt, Homo Sapiens
caagggauaaaguuaagagguucaccagggcc

SEQ ID NO: 109512 - RNA, 32 nt, Homo Sapiens
aaacuuuugugauuuaauaauacuauuucugu

SEQ ID NO: 109513 - RNA, 32 nt, Homo Sapiens
cuuguaaauaucgcucgguauuauaggccaau

SEQ ID NO: 109514 - RNA, 32 nt, Homo Sapiens
uucugcguaggaaaaugaauugguuggggaaa

SEQ ID NO: 109515 - RNA, 32 nt, Homo Sapiens
uuacaagaacuaauuaaauguuucauugcauu

SEQ ID NO: 109516 - RNA, 32 nt, Homo Sapiens
accaugagaacauuucuguuuuggauggggau

SEQ ID NO: 109517 - RNA, 32 nt, Homo Sapiens
gcuggagaaaaaacacacuccuuugcuuagcc

SEQ ID NO: 109518 - RNA, 32 nt, Homo Sapiens
cucccgugccggccggccggccgggggaacag

SEQ ID NO: 109519 - RNA, 32 nt, Homo Sapiens
gcuguuuuuccacaucauuucagagccguucu

SEQ ID NO: 109520 - RNA, 31 nt, Homo Sapiens
uggcggggacugcucacgccaagggccacag

SEQ ID NO: 109521 - RNA, 32 nt, Homo Sapiens
ucagcacagccaagggaaaaacaaaaacccca

SEQ ID NO: 109522 - RNA, 32 nt, Homo Sapiens
uccaugauggacgaucuugcucccaggaccug

SEQ ID NO: 109523 - RNA, 32 nt, Homo Sapiens
ggagcagcgucccggcuccuccccugcucauu

SEQ ID NO: 109524 - RNA, 32 nt, Homo Sapiens
aacaguagaaauaagcaaacaauauaaagaga

SEQ ID NO: 109525 - RNA, 27 nt, Homo Sapiens
gcucuauucuucuucaccucucaggaa

SEQ ID NO: 109526 - RNA, 32 nt, Homo Sapiens
agacguuugugaugaaggaacugcucaucuaa

SEQ ID NO: 109527 - RNA, 32 nt, Homo Sapiens
ucacuucaacugaaacuucaaccucuaccacu

SEQ ID NO: 109528 - RNA, 32 nt, Homo Sapiens
ugcggugacuccgaagcuccccggcuguggcc

SEQ ID NO: 109529 - RNA, 32 nt, Homo Sapiens
gaucuguaagaaguacaaugccaucugucugc

SEQ ID NO: 109530 - RNA, 32 nt, Homo Sapiens
agucaggugguggucauguuucccuucuaguu

SEQ ID NO: 109531 - RNA, 32 nt, Homo Sapiens
uccuuugcuguggucagaucaggcucugcacu

SEQ ID NO: 109532 - RNA, 32 nt, Homo Sapiens
agaaaguacuucuuuuuuuuuauuuuuagaca

SEQ ID NO: 109533 - RNA, 32 nt, Homo Sapiens
ucuagaauaaaaguacaaaaaauuagaauaag

SEQ ID NO: 109534 - RNA, 32 nt, Homo Sapiens
auggaaggcuucuccgcccauucugacccagg

SEQ ID NO: 109535 - RNA, 32 nt, Homo Sapiens
auuauuuacaauaacauggaguggauugacac

SEQ ID NO: 109536 - RNA, 32 nt, Homo Sapiens
gggcaggaggagguggggaggggcacugccug

SEQ ID NO: 109537 - RNA, 32 nt, Homo Sapiens
cauuuccugaccugccucccccuccccgcccg

SEQ ID NO: 109538 - RNA, 32 nt, Homo Sapiens
cccugcucugugacgcgcggcccgaggcgcac

SEQ ID NO: 109539 - RNA, 32 nt, Homo Sapiens
cacacuucauucucccucucccugcugcuuca

SEQ ID NO: 109540 - RNA, 32 nt, Homo Sapiens
uucuuuuaaaaauuauauucaucucagcuuuc

SEQ ID NO: 109541 - RNA, 32 nt, Homo Sapiens
ggcagcccggcgacgaggagcgcggacaguga

SEQ ID NO: 109542 - RNA, 32 nt, Homo Sapiens
cuaagaaagcugggagauagggaacagaagag

SEQ ID NO: 109543 - RNA, 32 nt, Homo Sapiens
aggauauuccaagggcuuagagaugaaugccc

SEQ ID NO: 109544 - RNA, 32 nt, Homo Sapiens
ggaagcuggagccacggcuggugcuggaccag

SEQ ID NO: 109545 - RNA, 32 nt, Homo Sapiens
cccaaaguugucaaccggccccgcccccaccc

SEQ ID NO: 109546 - RNA, 32 nt, Homo Sapiens
gugcauagaugggagagccuucugcucagagg

SEQ ID NO: 109547 - RNA, 32 nt, Homo Sapiens
cagaagucgccgcgacagggaauugcggugug

SEQ ID NO: 109548 - RNA, 32 nt, Homo Sapiens
aaacaaaaaaaauuaaggggaaaauuauuuaa

SEQ ID NO: 109549 - RNA, 32 nt, Homo Sapiens
ggagacaugcauuugcuaacucauggaacugc

SEQ ID NO: 109550 - RNA, 32 nt, Homo Sapiens
gaccuuugacuucugacccucucauccuggau

SEQ ID NO: 109551 - RNA, 32 nt, Homo Sapiens
cuccagagaagcuucgcgaguggcuagagacg

SEQ ID NO: 109552 - RNA, 32 nt, Homo Sapiens
cgaugcuucuuauugaucuuaauaguaugccc

SEQ ID NO: 109553 - RNA, 29 nt, Homo Sapiens
guaauugugacuuguucuccccggcuggc

SEQ ID NO: 109554 - RNA, 32 nt, Homo Sapiens
cguggcagcacggcccggccccucacccucug

SEQ ID NO: 109555 - RNA, 32 nt, Homo Sapiens
uuccuccaaccacccaggauagcaggaccgag

SEQ ID NO: 109556 - RNA, 32 nt, Homo Sapiens
ucuguccccuccccaagaccccaccucauauc

SEQ ID NO: 109557 - RNA, 32 nt, Homo Sapiens
cagggcuugcuggccugugccgauggacgcug

SEQ ID NO: 109558 - RNA, 32 nt, Homo Sapiens
gaagcuccgagaccaacggaucgcccagccca

SEQ ID NO: 109559 - RNA, 32 nt, Homo Sapiens
gcaguccgcgcgcccgcaacgcaggaccgugg

SEQ ID NO: 109560 - RNA, 32 nt, Homo Sapiens
cuguccccgcggcuuggcgggcuagggcaggg

SEQ ID NO: 109561 - RNA, 32 nt, Homo Sapiens
cccguauccaacaggcacaucuccuccuuugu

SEQ ID NO: 109562 - RNA, 32 nt, Homo Sapiens
uuuaaauaaauuacaguaugucuauaugauga

SEQ ID NO: 109563 - RNA, 32 nt, Homo Sapiens
aaugucuccaugauaugaagccaaauauucaa

SEQ ID NO: 109564 - RNA, 32 nt, Homo Sapiens
uuuuugucguagauuugucuguaaaagugcag

SEQ ID NO: 109565 - RNA, 32 nt, Homo Sapiens
gugguaccugguugggggaggggggcgugcac

SEQ ID NO: 109566 - RNA, 32 nt, Homo Sapiens
ggagacccuguccccgccccagccguccuccu

SEQ ID NO: 109567 - RNA, 32 nt, Homo Sapiens
acuaauuuuuauuuccuuucuagauuugccca

SEQ ID NO: 109568 - RNA, 32 nt, Homo Sapiens
aauaugaacuguauuuuaaauuuguuaggucu

SEQ ID NO: 109569 - RNA, 32 nt, Homo Sapiens
cuguauguauuguacauaguggaguaguuagu

SEQ ID NO: 109570 - RNA, 32 nt, Homo Sapiens
gagaggcauucugacugguuggcugcccugga

SEQ ID NO: 109571 - RNA, 30 nt, Homo Sapiens
uuucagcugauuuggggggaaaugccuuaa

SEQ ID NO: 109572 - RNA, 30 nt, Homo Sapiens
accgcccagcuggcaagggaaaccuucuga

SEQ ID NO: 109573 - RNA, 32 nt, Homo Sapiens
uuguuuccaaaaaugaaauucaaccucaaagc

SEQ ID NO: 109574 - RNA, 32 nt, Homo Sapiens
ucauuuugaucugcuuuucagaauggaaauuu

SEQ ID NO: 109575 - RNA, 32 nt, Homo Sapiens
cuaguacuuuuauggguuucauuuucauauug

SEQ ID NO: 109576 - RNA, 32 nt, Homo Sapiens
gaauccuaacaauaaugccaugugacaaccua

SEQ ID NO: 109577 - RNA, 32 nt, Homo Sapiens
gaauggcccuguggcccucccugggccuuuug

SEQ ID NO: 109578 - RNA, 30 nt, Homo Sapiens
uuucggggagguggguggggugcggagcgg

SEQ ID NO: 109579 - RNA, 32 nt, Homo Sapiens
agccucaucucggggaaccugcaccgcaucgg

SEQ ID NO: 109580 - RNA, 32 nt, Homo Sapiens
ugugccacacgucacugcuacgcacugugagg

SEQ ID NO: 109581 - RNA, 32 nt, Homo Sapiens
uggggccugcuuccuucgccacggggaccagu

SEQ ID NO: 109582 - RNA, 32 nt, Homo Sapiens
uaccagcuuaauguauucuuuacaauggaauu

SEQ ID NO: 109583 - RNA, 32 nt, Homo Sapiens
aguucuaaacacauucuugaucaccaaacaac

SEQ ID NO: 109584 - RNA, 32 nt, Homo Sapiens
ccucgucuuugacuaggaaccggacucuuaau

SEQ ID NO: 109585 - RNA, 32 nt, Homo Sapiens
aguuguuuagaucuuaggcaugugcugguauc

SEQ ID NO: 109586 - RNA, 32 nt, Homo Sapiens
augagauuuguguggggacauggccaaacaau

SEQ ID NO: 109587 - RNA, 32 nt, Homo Sapiens
ggagaggguucaggggcccacccgccuaaggg

SEQ ID NO: 109588 - RNA, 32 nt, Homo Sapiens
ugcugggagagucagaguggauguagagcgcg

SEQ ID NO: 109589 - RNA, 32 nt, Homo Sapiens
uuugcugagggcauucacuccauggugcucau

SEQ ID NO: 109590 - RNA, 32 nt, Homo Sapiens
cuccccgcucgcuuccucccccaccaucgcag

SEQ ID NO: 109591 - RNA, 32 nt, Homo Sapiens
auuguaucuuuuuuaaugguacggcauaaaaa

SEQ ID NO: 109592 - RNA, 32 nt, Homo Sapiens
cagucuugacucacugcaauucugccuccugg

SEQ ID NO: 109593 - RNA, 32 nt, Homo Sapiens
ucugguguuggcggcccggcuggguaaggcgc

SEQ ID NO: 109594 - RNA, 32 nt, Homo Sapiens
gaaagaauguuacugccuuaauaaaaaaugaa

SEQ ID NO: 109595 - RNA, 32 nt, Homo Sapiens
gagaaguagcagucgcuggcagagcacacagg

SEQ ID NO: 109596 - RNA, 32 nt, Homo Sapiens
ugcuagaaaccuucuuuuuuuaauguuaaaua

SEQ ID NO: 109597 - RNA, 32 nt, Homo Sapiens
accccccgccccaugccuuccuggucccucug

SEQ ID NO: 109598 - RNA, 32 nt, Homo Sapiens
acgcugcuccccaccccccaccuccaugccuc

SEQ ID NO: 109599 - RNA, 32 nt, Homo Sapiens
agcagagagaaaaauaacagugaaugugcucc

SEQ ID NO: 109600 - RNA, 32 nt, Homo Sapiens
gcgggccuagggaggaggagcgagaaucagcc

SEQ ID NO: 109601 - RNA, 32 nt, Homo Sapiens
ucuccggcgggcgggagccaggcgcugacggg

SEQ ID NO: 109602 - RNA, 32 nt, Homo Sapiens
ccgcgucugccgccagcgcgggccccgauccu

SEQ ID NO: 109603 - RNA, 32 nt, Homo Sapiens
aaaucaucaucacuauaauauuucauauuugc

SEQ ID NO: 109604 - RNA, 32 nt, Homo Sapiens
gaaaaagaguauuucuccaaaaauaagaaacu

SEQ ID NO: 109605 - RNA, 32 nt, Homo Sapiens
auaaaagaaaauuuauccgaaaaaaaaaaaaa

SEQ ID NO: 109606 - RNA, 32 nt, Homo Sapiens
uucaggcugacaguccaauuaaggguagccaa

SEQ ID NO: 109607 - RNA, 32 nt, Homo Sapiens
ccagcuuuuccacacucucuuuaugcgcagga

SEQ ID NO: 109608 - RNA, 32 nt, Homo Sapiens
uuauuuguguauuugucuuuuuauuuuaucug

SEQ ID NO: 109609 - RNA, 32 nt, Homo Sapiens
gcaagaccucgucuuugcuuguccugcucaga

SEQ ID NO: 109610 - RNA, 32 nt, Homo Sapiens
aguggaggcuagagccggagcggcggcggcgg

SEQ ID NO: 109611 - RNA, 32 nt, Homo Sapiens
auaucagaaauauuuuccaaacacuuuccuuu

SEQ ID NO: 109612 - RNA, 32 nt, Homo Sapiens
ccaaacugggacucacagcuuuauugggcuuu

SEQ ID NO: 109613 - RNA, 32 nt, Homo Sapiens
gcucggugcugauggacggugcugguggccag

SEQ ID NO: 109614 - RNA, 32 nt, Homo Sapiens
ccugugauguguuuuacccagcaccuccggac

SEQ ID NO: 109615 - RNA, 30 nt, Homo Sapiens
guguaugucugugugggugcucugucccug

SEQ ID NO: 109616 - RNA, 32 nt, Homo Sapiens
agucaccccaaaaccgcugugcagcuugggaa

SEQ ID NO: 109617 - RNA, 32 nt, Homo Sapiens
uccucuucauucucccuccuucgaggacacaa

SEQ ID NO: 109618 - RNA, 32 nt, Homo Sapiens
uguuggcuacgcugcgcccgacccuccagcca

SEQ ID NO: 109619 - RNA, 32 nt, Homo Sapiens
ccugaugugucugaggaauaaugucggaagug

SEQ ID NO: 109620 - RNA, 32 nt, Homo Sapiens
cccacagcccugcucauuccucacgcccuuca

SEQ ID NO: 109621 - RNA, 32 nt, Homo Sapiens
uaucucauguaugcuuuaaauagagaauuuau

SEQ ID NO: 109622 - RNA, 32 nt, Homo Sapiens
acuacugcuaggugugugggguguuucgccug

SEQ ID NO: 109623 - RNA, 32 nt, Homo Sapiens
agacccccauccccaccccuccuggucuguau

SEQ ID NO: 109624 - RNA, 32 nt, Homo Sapiens
uuucuaggucagucccugcagacucuucucaa

SEQ ID NO: 109625 - RNA, 32 nt, Homo Sapiens
cgcggccuugcagcugaagcugcgucggcggc

SEQ ID NO: 109626 - RNA, 28 nt, Homo Sapiens
cuuuuaagggcuaccaagauguacaaca

SEQ ID NO: 109627 - RNA, 32 nt, Homo Sapiens
gcgcccuucgacagcucuggccccucaaaccu

SEQ ID NO: 109628 - RNA, 32 nt, Homo Sapiens
uacacacaugcacacacguguacaccacaaac

SEQ ID NO: 109629 - RNA, 32 nt, Homo Sapiens
aaaagcagcccggcuagacuccccucacccug

SEQ ID NO: 109630 - RNA, 32 nt, Homo Sapiens
gugcaagauaaaaacuauuuucucuuccaaau

SEQ ID NO: 109631 - RNA, 32 nt, Homo Sapiens
uuauuuuuauuuucucuuuguuuuuaaaacuc

SEQ ID NO: 109632 - RNA, 32 nt, Homo Sapiens
uccauaaaugcaauaauaugcauguuaacaac

SEQ ID NO: 109633 - RNA, 32 nt, Homo Sapiens
uuuuucuauuaagaccaaguauaauguuuguu

SEQ ID NO: 109634 - RNA, 32 nt, Homo Sapiens
acagugauauuuuuggaugcuuugucugcaau

SEQ ID NO: 109635 - RNA, 32 nt, Homo Sapiens
gguuguuuagauccuacagaugaccucugcua

SEQ ID NO: 109636 - RNA, 32 nt, Homo Sapiens
caucaaaugguuuugaguaucguaucauaauc

SEQ ID NO: 109637 - RNA, 32 nt, Homo Sapiens
augaacccgggcggcagcggcggcgcgcgaug

SEQ ID NO: 109638 - RNA, 32 nt, Homo Sapiens
gcgggcaagggcggggcgggaaggugcgcagg

SEQ ID NO: 109639 - RNA, 32 nt, Homo Sapiens
gcuggcgcacccagccccuccuuccauuccuu

SEQ ID NO: 109640 - RNA, 32 nt, Homo Sapiens
uagucauuguccauuuacuauaauuuaucuga

SEQ ID NO: 109641 - RNA, 32 nt, Homo Sapiens
auuugggaggucaguuguucuaccucacugag

SEQ ID NO: 109642 - RNA, 32 nt, Homo Sapiens
uuccuagacaccugguugauuguccugauccc

SEQ ID NO: 109643 - RNA, 32 nt, Homo Sapiens
uguaacauaaaacuuuacuuuagaaguuguga

SEQ ID NO: 109644 - RNA, 32 nt, Homo Sapiens
aguuugagaagcuaaggcagguggaucacuug

SEQ ID NO: 109645 - RNA, 32 nt, Homo Sapiens
ggacucaguuguucuguuuacauccugguggc

SEQ ID NO: 109646 - RNA, 32 nt, Homo Sapiens
cuucccccucugagccuggcacauagcaccca

SEQ ID NO: 109647 - RNA, 32 nt, Homo Sapiens
gaaaaguauuaauagcuucauuucauauaaac

SEQ ID NO: 109648 - RNA, 32 nt, Homo Sapiens
ggccaguagacugggaaguauuaaacuaacca

SEQ ID NO: 109649 - RNA, 31 nt, Homo Sapiens
ccugguucagugccagcuccaagggcuauug

SEQ ID NO: 109650 - RNA, 32 nt, Homo Sapiens
uccucuuggggauggauuauggaauuuaaacc

SEQ ID NO: 109651 - RNA, 32 nt, Homo Sapiens
uuuucuguuuuaaucauagaugaaucuuggac

SEQ ID NO: 109652 - RNA, 32 nt, Homo Sapiens
ccucccuugucccuggccuuuggacccaggca

SEQ ID NO: 109653 - RNA, 32 nt, Homo Sapiens
gacacaguguagggcccggcccguguuggccc

SEQ ID NO: 109654 - RNA, 32 nt, Homo Sapiens
ccuuuccugccagcuuccagggcucuuugugu

SEQ ID NO: 109655 - RNA, 32 nt, Homo Sapiens
uuuucucucccgcgccagggaaggagcggcug

SEQ ID NO: 109656 - RNA, 32 nt, Homo Sapiens
gagucggagagccgaggcggccagaccgugcg

SEQ ID NO: 109657 - RNA, 32 nt, Homo Sapiens
guguuguauuuuuuuuuuuuuauugaccaugg

SEQ ID NO: 109658 - RNA, 32 nt, Homo Sapiens
uaaguuuuucuuuuuauguuuuaaaacuuagu

SEQ ID NO: 109659 - RNA, 32 nt, Homo Sapiens
gugagcgagcgcggggcaguagcggccugcga

SEQ ID NO: 109660 - RNA, 32 nt, Homo Sapiens
caacagcuucgagaggcuucugcugcacgcug

SEQ ID NO: 109661 - RNA, 30 nt, Homo Sapiens
ggacgcggcggcggcggcggcgacugcagu

SEQ ID NO: 109662 - RNA, 32 nt, Homo Sapiens
auccuguccaaguuugggcgcagaugguggag

SEQ ID NO: 109663 - RNA, 32 nt, Homo Sapiens
uggcgacguggcgguuccccgcccgccgcgac

SEQ ID NO: 109664 - RNA, 32 nt, Homo Sapiens
cuuuagaaacaaaauaguuaguaagauauaua

SEQ ID NO: 109665 - RNA, 32 nt, Homo Sapiens
uacuuuugcagauauagugaggauuaaauaag

SEQ ID NO: 109666 - RNA, 32 nt, Homo Sapiens
agaaguuccuuuaaaaggucuuguucuugugu

SEQ ID NO: 109667 - RNA, 32 nt, Homo Sapiens
ugugugggagggaccuagggccucuuuggaug

SEQ ID NO: 109668 - RNA, 32 nt, Homo Sapiens
acagacacuauaauuggaagugcugagcucug

SEQ ID NO: 109669 - RNA, 32 nt, Homo Sapiens
uauuguuucaagaauaguccaauauagcauuc

SEQ ID NO: 109670 - RNA, 32 nt, Homo Sapiens
uacacuugaccccaagucccccggcccugccu

SEQ ID NO: 109671 - RNA, 32 nt, Homo Sapiens
ccguguagacauuugcuuggagaguccacuug

SEQ ID NO: 109672 - RNA, 32 nt, Homo Sapiens
aacagcacuggagccaugcugcuaucucauaa

SEQ ID NO: 109673 - RNA, 32 nt, Homo Sapiens
cugccacggacuacaauucuaucccucccaga

SEQ ID NO: 109674 - RNA, 32 nt, Homo Sapiens
aacauuauuuuuccuuuguuagguccucgauc

SEQ ID NO: 109675 - RNA, 32 nt, Homo Sapiens
uagccugcggagcccguccgugcuguucugcg

SEQ ID NO: 109676 - RNA, 32 nt, Homo Sapiens
aucgccgccgccucgucccgcuucucggcuga

SEQ ID NO: 109677 - RNA, 32 nt, Homo Sapiens
gagcaguaaaagacugaagauaauguuugaac

SEQ ID NO: 109678 - RNA, 32 nt, Homo Sapiens
ggcggcagccccagccucccgggaauccaggg

SEQ ID NO: 109679 - RNA, 32 nt, Homo Sapiens
uuuuaagaucagcucaucuauaaggcugaccu

SEQ ID NO: 109680 - RNA, 32 nt, Homo Sapiens
acagaagcucugcagcaggggcugggagagca

SEQ ID NO: 109681 - RNA, 32 nt, Homo Sapiens
gugugcccugugacaaggcuucacccuugcuc

SEQ ID NO: 109682 - RNA, 32 nt, Homo Sapiens
uugucccacuuuuguucgccucucuucggucc

SEQ ID NO: 109683 - RNA, 32 nt, Homo Sapiens
gaguuaaaacaaugcuguaauaaauaaagugu

SEQ ID NO: 109684 - RNA, 32 nt, Homo Sapiens
gccgaggcggguggaucacgaggucaggagau

SEQ ID NO: 109685 - RNA, 32 nt, Homo Sapiens
uuccagaagggagaaaggcagaagccugugug

SEQ ID NO: 109686 - RNA, 32 nt, Homo Sapiens
aaagaacaggguccucaggcccugcccgcuuc

SEQ ID NO: 109687 - RNA, 32 nt, Homo Sapiens
agggcagcuguggcuucuagggcccgcguggc

SEQ ID NO: 109688 - RNA, 32 nt, Homo Sapiens
ugacuacugaugcacaauucagaauggcagaa

SEQ ID NO: 109689 - RNA, 32 nt, Homo Sapiens
cgcgcuggccgcugauagcgggcucacaacga

SEQ ID NO: 109690 - RNA, 32 nt, Homo Sapiens
ugccugcugucugccaguacaaugaaggaagu

SEQ ID NO: 109691 - RNA, 32 nt, Homo Sapiens
auauaauaaauauacugcaucuuuuuaagaug

SEQ ID NO: 109692 - RNA, 32 nt, Homo Sapiens
auuaggaucacacagaguuaaauauagaaaaa

SEQ ID NO: 109693 - RNA, 32 nt, Homo Sapiens
gccccgcgcgcccccagcccuuuaagccagau

SEQ ID NO: 109694 - RNA, 32 nt, Homo Sapiens
caucugaaccagcagagcuguguuauauuuuc

SEQ ID NO: 109695 - RNA, 32 nt, Homo Sapiens
caagacagcagcucccaaguuccuccuguuua

SEQ ID NO: 109696 - RNA, 32 nt, Homo Sapiens
auucuaaauuuucaucuaugagaaauaacaaa

SEQ ID NO: 109697 - RNA, 32 nt, Homo Sapiens
gaggaaaggcccccuggggcccugccccacag

SEQ ID NO: 109698 - RNA, 32 nt, Homo Sapiens
ugauuuuuacuuuucuuucuaacauaucaaug

SEQ ID NO: 109699 - RNA, 32 nt, Homo Sapiens
guuaauaaauauuuuuaaaucuugcuuuucag

SEQ ID NO: 109700 - RNA, 32 nt, Homo Sapiens
auucugccuggcggccaggccuccagcuuccc

SEQ ID NO: 109701 - RNA, 32 nt, Homo Sapiens
aagaagguguugggguaggauucuucagaggu

SEQ ID NO: 109702 - RNA, 32 nt, Homo Sapiens
guaaacugaaaauuauugcuuaaucaaacugc

SEQ ID NO: 109703 - RNA, 32 nt, Homo Sapiens
uauucaccauauuuauacuguggauucacagc

SEQ ID NO: 109704 - RNA, 32 nt, Homo Sapiens
cuauucaauauuuagaagacaguuauaaacaa

SEQ ID NO: 109705 - RNA, 32 nt, Homo Sapiens
uuuggauaacgguuauuaauucuuugagaccu

SEQ ID NO: 109706 - RNA, 32 nt, Homo Sapiens
accugaaugcccccggccccggcuccuccgac

SEQ ID NO: 109707 - RNA, 32 nt, Homo Sapiens
uucaaccuuucugcauaaaacuguauuaugag

SEQ ID NO: 109708 - RNA, 32 nt, Homo Sapiens
guguaauuuauuauuuuuucaucguaaugcag

SEQ ID NO: 109709 - RNA, 32 nt, Homo Sapiens
uggaacuuaaaaccaguguacuguauguaugc

SEQ ID NO: 109710 - RNA, 32 nt, Homo Sapiens
ggcggcgaaggcgggcggcggccuacaguggu

SEQ ID NO: 109711 - RNA, 32 nt, Homo Sapiens
ucccuguccacugccaggccgacuacaaaccc

SEQ ID NO: 109712 - RNA, 32 nt, Homo Sapiens
auaucugaucccauuccucaucucccacccuu

SEQ ID NO: 109713 - RNA, 32 nt, Homo Sapiens
uaaacaaaugaggcacuucaucugaagaaugu

SEQ ID NO: 109714 - RNA, 32 nt, Homo Sapiens
uacauguucuccagauuagccacacaugcaaa

SEQ ID NO: 109715 - RNA, 32 nt, Homo Sapiens
gguugcacacgcgccucuucacgagguggaaa

SEQ ID NO: 109716 - RNA, 32 nt, Homo Sapiens
ggagcaaauggauuguuuaauaccauagucuc

SEQ ID NO: 109717 - RNA, 32 nt, Homo Sapiens
cuguauacuguaaaaguuauaauaacugaacu

SEQ ID NO: 109718 - RNA, 32 nt, Homo Sapiens
uuuuaacaaacaaugcaaacaucuucagugca

SEQ ID NO: 109719 - RNA, 32 nt, Homo Sapiens
guggcagggggauauagugaggguggaccagg

SEQ ID NO: 109720 - RNA, 32 nt, Homo Sapiens
gggagggagggagagaagagggggcuaaauuu

SEQ ID NO: 109721 - RNA, 32 nt, Homo Sapiens
ggcguccuccgcgacccgcccgcgccccucgc

SEQ ID NO: 109722 - RNA, 32 nt, Homo Sapiens
uugugaggccacagcaaugcugucccaagugu

SEQ ID NO: 109723 - RNA, 32 nt, Homo Sapiens
cacgccggccucagccagucugcgaaccucuc

SEQ ID NO: 109724 - RNA, 32 nt, Homo Sapiens
ccugccgagacauggagaagugugaggcggca

SEQ ID NO: 109725 - RNA, 32 nt, Homo Sapiens
caaguuuucauuuacauuccaagcugucagga

SEQ ID NO: 109726 - RNA, 32 nt, Homo Sapiens
cgagggccaaccccagcccggaaacucugccc

SEQ ID NO: 109727 - RNA, 32 nt, Homo Sapiens
gcgcccgcuccucggcucggcccgggguaguu

SEQ ID NO: 109728 - RNA, 32 nt, Homo Sapiens
ugggcggccccgagaccccaacacaugcuucu

SEQ ID NO: 109729 - RNA, 32 nt, Homo Sapiens
cagcaaggagccacaagaaaucacucauaggc

SEQ ID NO: 109730 - RNA, 32 nt, Homo Sapiens
uuccggcggaguggagauccuauucagagggg

SEQ ID NO: 109731 - RNA, 32 nt, Homo Sapiens
gcagcuggaaaaggugagaggaaaaccuagag

SEQ ID NO: 109732 - RNA, 28 nt, Homo Sapiens
gccaugggcccggcccagccccgacucc

SEQ ID NO: 109733 - RNA, 32 nt, Homo Sapiens
aaacucgcgagccccagagcucgcucagccgc

SEQ ID NO: 109734 - RNA, 32 nt, Homo Sapiens
aacucgggagccugcgccuuuccuccucccaa

SEQ ID NO: 109735 - RNA, 32 nt, Homo Sapiens
cucagaagugaagcugcagaucuucguguugg

SEQ ID NO: 109736 - RNA, 32 nt, Homo Sapiens
gucauuaagauuuauuuuuaaauugagaaugg

SEQ ID NO: 109737 - RNA, 32 nt, Homo Sapiens
aauucccauccccacaccaacacaguucucaa

SEQ ID NO: 109738 - RNA, 32 nt, Homo Sapiens
uuucacguugguuuuuuuaaucugcgccugga

SEQ ID NO: 109739 - RNA, 32 nt, Homo Sapiens
ucaugcauccacuuucuguuuuccuguuucag

SEQ ID NO: 109740 - RNA, 32 nt, Homo Sapiens
cgagcgcggccggggccugaggaggcuacgcg

SEQ ID NO: 109741 - RNA, 32 nt, Homo Sapiens
agacaggaaaagaacugaaaauggcacccuuc

SEQ ID NO: 109742 - RNA, 32 nt, Homo Sapiens
uauauaaugauggcuuuaaauaaaauuaggag

SEQ ID NO: 109743 - RNA, 32 nt, Homo Sapiens
aaugauugucauuguagcuuauuguuuaucag

SEQ ID NO: 109744 - RNA, 32 nt, Homo Sapiens
gaaagauuaguaauaaaacaugccauauuuaa

SEQ ID NO: 109745 - RNA, 32 nt, Homo Sapiens
cguucccggaggucggccgccguuacccgcuc

SEQ ID NO: 109746 - RNA, 32 nt, Homo Sapiens
auaugucaaauuauuuucuuaguguacgcaac

SEQ ID NO: 109747 - RNA, 32 nt, Homo Sapiens
uggcucacaccugugaucccaacauuuuggag

SEQ ID NO: 109748 - RNA, 32 nt, Homo Sapiens
acucuggggaucuggagcugcaggcaggaggu

SEQ ID NO: 109749 - RNA, 32 nt, Homo Sapiens
cauucaccuggcccaaacccuuuuugucucuu

SEQ ID NO: 109750 - RNA, 31 nt, Homo Sapiens
uaauaaaaauugaauuauguauaucacuguu

SEQ ID NO: 109751 - RNA, 31 nt, Homo Sapiens
uuuuuaacuauuuggaacucgagguccccag

SEQ ID NO: 109752 - RNA, 32 nt, Homo Sapiens
agaacuguuuuuuuuucuuuuguuuacuuuua

SEQ ID NO: 109753 - RNA, 32 nt, Homo Sapiens
ggcgcguguggcccugcccggcguggacguga

SEQ ID NO: 109754 - RNA, 32 nt, Homo Sapiens
ugcaggccuuggagcccgcggcagguggacgc

SEQ ID NO: 109755 - RNA, 32 nt, Homo Sapiens
aaauuggacaauuuaggaauuuuaaacuuuag

SEQ ID NO: 109756 - RNA, 32 nt, Homo Sapiens
cugugagauaaggaagaugaugaaaaccuccc

SEQ ID NO: 109757 - RNA, 32 nt, Homo Sapiens
uuuguucauagauuaaauaaaaguauguuuuc

SEQ ID NO: 109758 - RNA, 32 nt, Homo Sapiens
uccccagcaccagaguugcugcugcuuccccu

SEQ ID NO: 109759 - RNA, 32 nt, Homo Sapiens
gagcguguggucucugccccagccuguccuug

SEQ ID NO: 109760 - RNA, 32 nt, Homo Sapiens
gcugaggaacagagacuucaacccuucuucuc

SEQ ID NO: 109761 - RNA, 32 nt, Homo Sapiens
agguauuagugucauauugaucagaauucaac

SEQ ID NO: 109762 - RNA, 32 nt, Homo Sapiens
cugcucugaaaacacucuuuaacgguauaagg

SEQ ID NO: 109763 - RNA, 32 nt, Homo Sapiens
ccuggcauauuucuaacacuaauggcaauuua

SEQ ID NO: 109764 - RNA, 32 nt, Homo Sapiens
ugacgaaacacugaagucugcguaagagagac

SEQ ID NO: 109765 - RNA, 32 nt, Homo Sapiens
ugaugggaugccuauuaauguuggagauggug

SEQ ID NO: 109766 - RNA, 32 nt, Homo Sapiens
gugacagagcucaaagggcccugggccuuccc

SEQ ID NO: 109767 - RNA, 32 nt, Homo Sapiens
aucgggucacuaaacaaaucccagagggccca

SEQ ID NO: 109768 - RNA, 32 nt, Homo Sapiens
gcugguggcuguggagacaaaucuagcaucuc

SEQ ID NO: 109769 - RNA, 32 nt, Homo Sapiens
ugcgugaagggagagggaaauguggaggaggg

SEQ ID NO: 109770 - RNA, 32 nt, Homo Sapiens
uuuauaaucuucuguaggcuaucuuucaaaca

SEQ ID NO: 109771 - RNA, 32 nt, Homo Sapiens
aggggccggcuggccuggaggcucagcccacc

SEQ ID NO: 109772 - RNA, 32 nt, Homo Sapiens
acugcccaccccucuuuuuuuuuuucuucuaa

SEQ ID NO: 109773 - RNA, 32 nt, Homo Sapiens
uuaauuuaagaaacagaagagugagugcuaau

SEQ ID NO: 109774 - RNA, 32 nt, Homo Sapiens
uagaguuggccauauuuaccucagccugggcg

SEQ ID NO: 109775 - RNA, 30 nt, Homo Sapiens
caaucauggcuuguggucuggucgccagca

SEQ ID NO: 109776 - RNA, 32 nt, Homo Sapiens
uagcagcaccagccggccccaccccugcucgc

SEQ ID NO: 109777 - RNA, 32 nt, Homo Sapiens
gccagagcagugccaguucuccuaggagcugg

SEQ ID NO: 109778 - RNA, 32 nt, Homo Sapiens
cuuaacucuaaugccuggacuggccauguucu

SEQ ID NO: 109779 - RNA, 32 nt, Homo Sapiens
cucgcccucggaaaacaaaaccagacaugauc

SEQ ID NO: 109780 - RNA, 32 nt, Homo Sapiens
aaacugcuucaagaauuguaucuuuaaguacu

SEQ ID NO: 109781 - RNA, 32 nt, Homo Sapiens
accaucaugaauggacauggugguggucgaag

SEQ ID NO: 109782 - RNA, 32 nt, Homo Sapiens
gcggucccggcggcgccaggugcguucacucu

SEQ ID NO: 109783 - RNA, 32 nt, Homo Sapiens
uaacccuugugcuguguauucucugagccucu

SEQ ID NO: 109784 - RNA, 32 nt, Homo Sapiens
ugaagaaccaaaacagaaggaauauguacaaa

SEQ ID NO: 109785 - RNA, 32 nt, Homo Sapiens
aagcgaguccgcgugcggagccaggaggcagc

SEQ ID NO: 109786 - RNA, 32 nt, Homo Sapiens
ugggccggguucugaggccuugcuucucuuua

SEQ ID NO: 109787 - RNA, 32 nt, Homo Sapiens
guuuuaaacacuguuauaaaauguagccaaag

SEQ ID NO: 109788 - RNA, 32 nt, Homo Sapiens
ccugggagggaagaaaguagaggggcaaaugc

SEQ ID NO: 109789 - RNA, 32 nt, Homo Sapiens
auuccuucagggugaugccaaguucuauuugg

SEQ ID NO: 109790 - RNA, 32 nt, Homo Sapiens
uauguuccuaggcucuggauauuaucuaaacc

SEQ ID NO: 109791 - RNA, 32 nt, Homo Sapiens
uaagaauacaugccacuguacauucagauauu

SEQ ID NO: 109792 - RNA, 32 nt, Homo Sapiens
cagaacaagauggccgacgcggcggccacagc

SEQ ID NO: 109793 - RNA, 32 nt, Homo Sapiens
gcauggugcaaagcugcagucagugagccugg

SEQ ID NO: 109794 - RNA, 32 nt, Homo Sapiens
ugugcauguacuuggacuuguuuaauugaaua

SEQ ID NO: 109795 - RNA, 30 nt, Homo Sapiens
aagaccauacuagccacccacacuuacuuc

SEQ ID NO: 109796 - RNA, 32 nt, Homo Sapiens
aaacagaacccauuuugagccuuagaagaguc

SEQ ID NO: 109797 - RNA, 32 nt, Homo Sapiens
uucuuucuauagaauuauuuuaucaauauuug

SEQ ID NO: 109798 - RNA, 32 nt, Homo Sapiens
gaccucggcgccgacaucgcgacagcgaagcg

SEQ ID NO: 109799 - RNA, 32 nt, Homo Sapiens
cuggggccucacuuccccuccucccccuuccc

SEQ ID NO: 109800 - RNA, 32 nt, Homo Sapiens
uauuccaaauguuugugaugcugagaagugaa

SEQ ID NO: 109801 - RNA, 32 nt, Homo Sapiens
aggcgggcagaucaccugaggucaagaguuca

SEQ ID NO: 109802 - RNA, 32 nt, Homo Sapiens
uguuuggguagucugcugaaaaacuccacucu

SEQ ID NO: 109803 - RNA, 32 nt, Homo Sapiens
gucuugcaguuaucuuagcauuguauaaacag

SEQ ID NO: 109804 - RNA, 32 nt, Homo Sapiens
aggcccuaagaccuccuccuccaggucaggcu

SEQ ID NO: 109805 - RNA, 32 nt, Homo Sapiens
ucaaauacaacauaacuagauacaucaaucua

SEQ ID NO: 109806 - RNA, 32 nt, Homo Sapiens
gguuuuucucacacgggaagugagaggcacag

SEQ ID NO: 109807 - RNA, 32 nt, Homo Sapiens
aaacuagcucuuuuguuaguaucgucucacaa

SEQ ID NO: 109808 - RNA, 32 nt, Homo Sapiens
gugcuucccagccccaggguuucccuccuuca

SEQ ID NO: 109809 - RNA, 32 nt, Homo Sapiens
uggcugcuaauggcagaagugccugugcuaga

SEQ ID NO: 109810 - RNA, 32 nt, Homo Sapiens
aguccccccucccccucuucccucccaggcuu

SEQ ID NO: 109811 - RNA, 32 nt, Homo Sapiens
agcucagcucugagucggcagacuggggcuuc

SEQ ID NO: 109812 - RNA, 32 nt, Homo Sapiens
uuucuugagagaagauuuuaacuuauuguuuu

SEQ ID NO: 109813 - RNA, 32 nt, Homo Sapiens
aggcgcaaggcacacugauggacagucacgga

SEQ ID NO: 109814 - RNA, 32 nt, Homo Sapiens
uacucccguuugcuuccugugaaguaguuacu

SEQ ID NO: 109815 - RNA, 32 nt, Homo Sapiens
uguaauaauaauaaauuguauuggagaaaccu

SEQ ID NO: 109816 - RNA, 32 nt, Homo Sapiens
ucagccaauuucacccucuccucccccugcca

SEQ ID NO: 109817 - RNA, 32 nt, Homo Sapiens
cagcucagaccauguggaccgcggaugagauu

SEQ ID NO: 109818 - RNA, 32 nt, Homo Sapiens
aauaauaaauguuucugagcugccuguguucu

SEQ ID NO: 109819 - RNA, 32 nt, Homo Sapiens
uuauuaacacaagcuacacagaaacacauguu

SEQ ID NO: 109820 - RNA, 32 nt, Homo Sapiens
auugcaaaagguuuuucagaaaacuuuuuaaa

SEQ ID NO: 109821 - RNA, 32 nt, Homo Sapiens
uucgucaguauaaaagauuaaacucuacagaa

SEQ ID NO: 109822 - RNA, 32 nt, Homo Sapiens
ggcuggaaccccggaaugagccuucgacccug

SEQ ID NO: 109823 - RNA, 32 nt, Homo Sapiens
guaaagucugaugaaggcagggguggugauuc

SEQ ID NO: 109824 - RNA, 32 nt, Homo Sapiens
gcugaauggcguaagaucucuacuaagaucca

SEQ ID NO: 109825 - RNA, 32 nt, Homo Sapiens
guggagguuucaauguauuuuucaguuggcuc

SEQ ID NO: 109826 - RNA, 32 nt, Homo Sapiens
acuuaagguaaagagggauaaaggugacacua

SEQ ID NO: 109827 - RNA, 29 nt, Homo Sapiens
guguauguguguauguacgcacgcaugug

SEQ ID NO: 109828 - RNA, 32 nt, Homo Sapiens
ggacuauagaaggauaauauuuuuuaguucau

SEQ ID NO: 109829 - RNA, 32 nt, Homo Sapiens
uaaagaaggaaauuauuuuugccuggcuauug

SEQ ID NO: 109830 - RNA, 32 nt, Homo Sapiens
cagcugagccaggaaagugcugcugaggcaag

SEQ ID NO: 109831 - RNA, 32 nt, Homo Sapiens
agacauaagaaacuccauuuugaucuguacua

SEQ ID NO: 109832 - RNA, 32 nt, Homo Sapiens
ggguuucugucaguuucuggggugaagcugcg

SEQ ID NO: 109833 - RNA, 32 nt, Homo Sapiens
ccgggccgcagcauggggcgcuuccgcggggg

SEQ ID NO: 109834 - RNA, 32 nt, Homo Sapiens
aaugugugguuucuccuucccugcccccaccc

SEQ ID NO: 109835 - RNA, 32 nt, Homo Sapiens
gcggagagugguagaagaggugcggaagauga

SEQ ID NO: 109836 - RNA, 32 nt, Homo Sapiens
uuggauuguuauuuuuuguuugcaauggggaa

SEQ ID NO: 109837 - RNA, 32 nt, Homo Sapiens
cuggcuccggugcgcgcggcugagcgcgugcg

SEQ ID NO: 109838 - RNA, 32 nt, Homo Sapiens
uuacgucgcgguuuucuuaacuuuagagccug

SEQ ID NO: 109839 - RNA, 32 nt, Homo Sapiens
cacucuguuuucugcugugccuuuggaagcuu

SEQ ID NO: 109840 - RNA, 32 nt, Homo Sapiens
agggagucgggcggaugcgcaacaucuccgca

SEQ ID NO: 109841 - RNA, 30 nt, Homo Sapiens
ccagggcccugcagaggggaaaccagugua

SEQ ID NO: 109842 - RNA, 32 nt, Homo Sapiens
cgcucaccugcgcugugaugccugcagagcug

SEQ ID NO: 109843 - RNA, 32 nt, Homo Sapiens
guagcugggauuacaggcacccgccaccacgu

SEQ ID NO: 109844 - RNA, 32 nt, Homo Sapiens
uaauugcuugccagugccaauugagggcauua

SEQ ID NO: 109845 - RNA, 32 nt, Homo Sapiens
auuaauuuuuauuccuuaagcauuuuaaaaac

SEQ ID NO: 109846 - RNA, 32 nt, Homo Sapiens
gccaacaucgccaucccacagugcggggugcu

SEQ ID NO: 109847 - RNA, 32 nt, Homo Sapiens
uacccagcaauuuuuauagcugcacaaaaugg

SEQ ID NO: 109848 - RNA, 32 nt, Homo Sapiens
accggaagaacaagucuauaaaaauaaaaaug

SEQ ID NO: 109849 - RNA, 32 nt, Homo Sapiens
gaauagaguauuuugauauuguucauucagag

SEQ ID NO: 109850 - RNA, 32 nt, Homo Sapiens
agcagcccauccccacccgggucugcaagguc

SEQ ID NO: 109851 - RNA, 32 nt, Homo Sapiens
acugccuaccuggccuggggcugucugcccac

SEQ ID NO: 109852 - RNA, 32 nt, Homo Sapiens
cuagaaaaacaucguucucuuuuucguaaugu

SEQ ID NO: 109853 - RNA, 32 nt, Homo Sapiens
aagauaccaaaauaucauaugguugaaauauu

SEQ ID NO: 109854 - RNA, 32 nt, Homo Sapiens
agcaaggggaagaagugcugcagagacuggac

SEQ ID NO: 109855 - RNA, 32 nt, Homo Sapiens
gcccccugccuccgccauguuccgcagggcac

SEQ ID NO: 109856 - RNA, 32 nt, Homo Sapiens
ggcucuggagggcgccuaggagucggugucgc

SEQ ID NO: 109857 - RNA, 32 nt, Homo Sapiens
cugucuugugugagguguucugccgggauaga

SEQ ID NO: 109858 - RNA, 32 nt, Homo Sapiens
cauuccucucuguacaucaggcuagaugccuc

SEQ ID NO: 109859 - RNA, 30 nt, Homo Sapiens
gcugggacagguggcacccagaucuuccag

SEQ ID NO: 109860 - RNA, 32 nt, Homo Sapiens
auauaagugcuguucuaucuguauuuuuucac

SEQ ID NO: 109861 - RNA, 32 nt, Homo Sapiens
gaauuggugaagaucuugcucuucagugcuga

SEQ ID NO: 109862 - RNA, 32 nt, Homo Sapiens
gccugcagccuggccugggccuggccaccccu

SEQ ID NO: 109863 - RNA, 32 nt, Homo Sapiens
caccaccaccgccuccuccacccccugcccug

SEQ ID NO: 109864 - RNA, 32 nt, Homo Sapiens
cagccacccagcugugugagaugagcccuugu

SEQ ID NO: 109865 - RNA, 32 nt, Homo Sapiens
gcaaguuuuaaauuuccaaccuuaagugaauu

SEQ ID NO: 109866 - RNA, 32 nt, Homo Sapiens
uuuaaaaaaaauuuuuaaaaagguuuuuugag

SEQ ID NO: 109867 - RNA, 32 nt, Homo Sapiens
auagaagcaaagaggacuaaagggcaaaauuc

SEQ ID NO: 109868 - RNA, 32 nt, Homo Sapiens
gcagccuccaccucacaagaccuggccuggua

SEQ ID NO: 109869 - RNA, 32 nt, Homo Sapiens
caggaggaggguggaggcuaagaacacagaaa

SEQ ID NO: 109870 - RNA, 32 nt, Homo Sapiens
gcacauccugucaugccaugcgccgaggcacu

SEQ ID NO: 109871 - RNA, 32 nt, Homo Sapiens
aaaagcaccguaaagcaugauuggcuccauuc

SEQ ID NO: 109872 - RNA, 32 nt, Homo Sapiens
uccgagaucacggaagaugauaugccauuugc

SEQ ID NO: 109873 - RNA, 32 nt, Homo Sapiens
acccauuaucacucugaguuucgucgugcccu

SEQ ID NO: 109874 - RNA, 32 nt, Homo Sapiens
ugauuuacucugaagaaacaaacaaugguauc

SEQ ID NO: 109875 - RNA, 32 nt, Homo Sapiens
ucacugauauauauuuguuugacugcauuccc

SEQ ID NO: 109876 - RNA, 32 nt, Homo Sapiens
uuacaggugugagccacugcacccagccugug

SEQ ID NO: 109877 - RNA, 32 nt, Homo Sapiens
uccccuuggacacuugguuagacgccuuccag

SEQ ID NO: 109878 - RNA, 32 nt, Homo Sapiens
ggggcacacuacagagcagcuccccaggagcu

SEQ ID NO: 109879 - RNA, 32 nt, Homo Sapiens
cgggccggggguaccuagcgccacccgcuucg

SEQ ID NO: 109880 - RNA, 32 nt, Homo Sapiens
cgcgugcggccauggcuucgcugcugggagcc

SEQ ID NO: 109881 - RNA, 32 nt, Homo Sapiens
caggguagcuccagguguccuucccgcagcug

SEQ ID NO: 109882 - RNA, 32 nt, Homo Sapiens
uuagccaauauuuuucuuacugauuuuuaagu

SEQ ID NO: 109883 - RNA, 32 nt, Homo Sapiens
uugacccccuccccgucagcccuucugaugac

SEQ ID NO: 109884 - RNA, 32 nt, Homo Sapiens
gccgucaggggcucuuccugucagugccucau

SEQ ID NO: 109885 - RNA, 32 nt, Homo Sapiens
uuucccaaaccucaaaaacgucuuggaaaaau

SEQ ID NO: 109886 - RNA, 32 nt, Homo Sapiens
agcccaaauaauaucuggggaaguuaaagucc

SEQ ID NO: 109887 - RNA, 32 nt, Homo Sapiens
cucguuggccccacagggagccagccucuggc

SEQ ID NO: 109888 - RNA, 32 nt, Homo Sapiens
agugucuccguugcuuccugugccuuggccuu

SEQ ID NO: 109889 - RNA, 32 nt, Homo Sapiens
gacugcgcucgccucccuccucacgcgggcgg

SEQ ID NO: 109890 - RNA, 32 nt, Homo Sapiens
ggaugaaauuccagggaagauuggggugguga

SEQ ID NO: 109891 - RNA, 32 nt, Homo Sapiens
ccagcuggucagagagucagugcuguggcucu

SEQ ID NO: 109892 - RNA, 32 nt, Homo Sapiens
cggcaggcaaucuggucacuaggucuuuguga

SEQ ID NO: 109893 - RNA, 32 nt, Homo Sapiens
cacuccacuuccaugccuggaggaagccugca

SEQ ID NO: 109894 - RNA, 32 nt, Homo Sapiens
guauuuauuguguauuugauacauugcuugaa

SEQ ID NO: 109895 - RNA, 32 nt, Homo Sapiens
ucuuccuucccucucucuggccgcaaagaauc

SEQ ID NO: 109896 - RNA, 32 nt, Homo Sapiens
ugaaauacuuucaaaucuguaaauagaucuau

SEQ ID NO: 109897 - RNA, 32 nt, Homo Sapiens
uuugugcugugacugcaucaccuuuauggagu

SEQ ID NO: 109898 - RNA, 32 nt, Homo Sapiens
gauucucaugucucagccuccucaguagcuag

SEQ ID NO: 109899 - RNA, 32 nt, Homo Sapiens
gucauugccucuguauuuaagccaacagaguu

SEQ ID NO: 109900 - RNA, 32 nt, Homo Sapiens
guaguauuugauuaggauaacuuuacaaauuc

SEQ ID NO: 109901 - RNA, 32 nt, Homo Sapiens
ccuugacucacuuuucuggcuuguacucacag

SEQ ID NO: 109902 - RNA, 32 nt, Homo Sapiens
gccgggacucgcgguguccgggugaccgcggc

SEQ ID NO: 109903 - RNA, 32 nt, Homo Sapiens
cugaugcacaaagauuugaaaacuuacccaag

SEQ ID NO: 109904 - RNA, 32 nt, Homo Sapiens
cgagcaggggcuggaccccagcccuugcagcc

SEQ ID NO: 109905 - RNA, 32 nt, Homo Sapiens
gcuccauccucaaccucagccacagcccugug

SEQ ID NO: 109906 - RNA, 32 nt, Homo Sapiens
ccgcccagggugguaucgcccggagcgcgggc

SEQ ID NO: 109907 - RNA, 32 nt, Homo Sapiens
gaaaaaccaaaaugaacacugaacuuggccac

SEQ ID NO: 109908 - RNA, 32 nt, Homo Sapiens
ucaugacaugaguagggugugcucuucuguca

SEQ ID NO: 109909 - RNA, 32 nt, Homo Sapiens
aagcucaggccauaguuucagagaaucacccu

SEQ ID NO: 109910 - RNA, 32 nt, Homo Sapiens
ugcaaauccaauucgauagacacacagcagca

SEQ ID NO: 109911 - RNA, 32 nt, Homo Sapiens
uuaugucugcugucaugucugggucuuuaggg

SEQ ID NO: 109912 - RNA, 32 nt, Homo Sapiens
uguccaagccccagagucccucuggaccaacc

SEQ ID NO: 109913 - RNA, 32 nt, Homo Sapiens
cuggagcccacagcugaacuggcugcccacuc

SEQ ID NO: 109914 - RNA, 31 nt, Homo Sapiens
cagugagcgcccugccugccuaugcauuuug

SEQ ID NO: 109915 - RNA, 32 nt, Homo Sapiens
ggucacuguggcaacagcaggcucuaggggaa

SEQ ID NO: 109916 - RNA, 32 nt, Homo Sapiens
ugcccgcuucuguggacuguucgaacgcccag

SEQ ID NO: 109917 - RNA, 32 nt, Homo Sapiens
cugccccgugcagacuggaggggacgcuggua

SEQ ID NO: 109918 - RNA, 32 nt, Homo Sapiens
ugucuuguguggaauauuguccauuguccaau

SEQ ID NO: 109919 - RNA, 32 nt, Homo Sapiens
ugccuggauguggccccucccccuccuucuca

SEQ ID NO: 109920 - RNA, 32 nt, Homo Sapiens
gggaggccgagaggcacagaccaaguccccgg

SEQ ID NO: 109921 - RNA, 32 nt, Homo Sapiens
cguggcuggggaguugggaagaggaacaaagg

SEQ ID NO: 109922 - RNA, 32 nt, Homo Sapiens
cagugucugaugcucccgauuagaugguaaag

SEQ ID NO: 109923 - RNA, 32 nt, Homo Sapiens
uaccacaacggaagagaccucccgcuggggcc

SEQ ID NO: 109924 - RNA, 32 nt, Homo Sapiens
gaagaagcacugggcuggccugcggccuucuu

SEQ ID NO: 109925 - RNA, 32 nt, Homo Sapiens
uccucgucaaacugccuaaguagggguucguu

SEQ ID NO: 109926 - RNA, 32 nt, Homo Sapiens
ggugaccuggcaucccggggcuccccacgggc

SEQ ID NO: 109927 - RNA, 32 nt, Homo Sapiens
aacuggacaguuuucccuuaguuuacaguuuc

SEQ ID NO: 109928 - RNA, 32 nt, Homo Sapiens
gggggaaaaugaauuuuguaugcugaauuucu

SEQ ID NO: 109929 - RNA, 32 nt, Homo Sapiens
agcccacagcccggcgcucccugccgcgccgc

SEQ ID NO: 109930 - RNA, 32 nt, Homo Sapiens
ugccauuaaacuaaacauuucuguuaaauuac

SEQ ID NO: 109931 - RNA, 32 nt, Homo Sapiens
uuuucuuguaaauuuguuugaguucauuguag

SEQ ID NO: 109932 - RNA, 32 nt, Homo Sapiens
cuucaugcugcccugcugcugcuggaaggaug

SEQ ID NO: 109933 - RNA, 32 nt, Homo Sapiens
acaccaauuccacuugaccuccucuuucuaac

SEQ ID NO: 109934 - RNA, 32 nt, Homo Sapiens
aggacgacugagggcucaaacacaccacacuu

SEQ ID NO: 109935 - RNA, 32 nt, Homo Sapiens
ccaacccaagacuauuguaacacauaaagaca

SEQ ID NO: 109936 - RNA, 32 nt, Homo Sapiens
uaugugaaggcacguucuccagccaucagagg

SEQ ID NO: 109937 - RNA, 32 nt, Homo Sapiens
gacucccuaucccacaaacacaugcucccucu

SEQ ID NO: 109938 - RNA, 32 nt, Homo Sapiens
gagcccgaggcugagacucaccggaggaagcg

SEQ ID NO: 109939 - RNA, 32 nt, Homo Sapiens
cccucucccggccggccuccgccccgcagcca

SEQ ID NO: 109940 - RNA, 32 nt, Homo Sapiens
gcucccaaacuuaacagcagguaaucugcuuc

SEQ ID NO: 109941 - RNA, 32 nt, Homo Sapiens
accucgcggggcgcgggaaagaggcagagcgc

SEQ ID NO: 109942 - RNA, 32 nt, Homo Sapiens
ucagaucuuguucagugaccugcuacaguuau

SEQ ID NO: 109943 - RNA, 32 nt, Homo Sapiens
cccucccuuucugugcacuggggacgcugaug

SEQ ID NO: 109944 - RNA, 32 nt, Homo Sapiens
aggggcuuggagaggucaaaacauccaccuac

SEQ ID NO: 109945 - RNA, 32 nt, Homo Sapiens
aagucuuguaagucuaauguggcuauccuacu

SEQ ID NO: 109946 - RNA, 32 nt, Homo Sapiens
caacauccugcaaugcaugggacaggcccugc

SEQ ID NO: 109947 - RNA, 32 nt, Homo Sapiens
cgucucgaaggccuucaucagcuccuccugcu

SEQ ID NO: 109948 - RNA, 32 nt, Homo Sapiens
auuuuguuauauuuuguuuuuaucuggauugu

SEQ ID NO: 109949 - RNA, 32 nt, Homo Sapiens
cugggaaaaugaauuuuugaauaguauguuac

SEQ ID NO: 109950 - RNA, 32 nt, Homo Sapiens
ucguccaaucccauaauccaugaugaaaggug

SEQ ID NO: 109951 - RNA, 32 nt, Homo Sapiens
ugcuuuuaaaacuacaguuuuaaagauuuaug

SEQ ID NO: 109952 - RNA, 32 nt, Homo Sapiens
cuguccauacccauguaagguguucaauaaag

SEQ ID NO: 109953 - RNA, 31 nt, Homo Sapiens
gguauggcgucgaggcuuccauggggugggg

SEQ ID NO: 109954 - RNA, 32 nt, Homo Sapiens
ggugaggcuacagacaggggacuugcaagcag

SEQ ID NO: 109955 - RNA, 32 nt, Homo Sapiens
ggaggcuucugggccacggacugccggaccgu

SEQ ID NO: 109956 - RNA, 32 nt, Homo Sapiens
cuuggcucagagagggcagagccccuggguca

SEQ ID NO: 109957 - RNA, 32 nt, Homo Sapiens
gaguggagcugcuggucccaaccacucuggca

SEQ ID NO: 109958 - RNA, 32 nt, Homo Sapiens
gaggaaaaggguuugggcguugcuaggcugaa

SEQ ID NO: 109959 - RNA, 32 nt, Homo Sapiens
cauguggcaaagugcuauuuauagggugccca

SEQ ID NO: 109960 - RNA, 28 nt, Homo Sapiens
uccagaaucgcaggaccaaguggaagaa

SEQ ID NO: 109961 - RNA, 32 nt, Homo Sapiens
uucacagaugaagaaacaaaauguaggcaaug

SEQ ID NO: 109962 - RNA, 32 nt, Homo Sapiens
ggcggaggcccggcgcgcagcccgccgcccgc

SEQ ID NO: 109963 - RNA, 32 nt, Homo Sapiens
gcgucuccgcuucugcugccugccgggcgggc

SEQ ID NO: 109964 - RNA, 32 nt, Homo Sapiens
auuuguauuuaguccugcuugcucucauaaaa

SEQ ID NO: 109965 - RNA, 32 nt, Homo Sapiens
gcuuaagaacauugccucugggugucaugugg

SEQ ID NO: 109966 - RNA, 32 nt, Homo Sapiens
acgggugaauccagcccucgcagggccuggag

SEQ ID NO: 109967 - RNA, 32 nt, Homo Sapiens
cugggccgagcccucccggucggcuaagauug

SEQ ID NO: 109968 - RNA, 32 nt, Homo Sapiens
gaauucagauaaaauuugcuaauguucugcua

SEQ ID NO: 109969 - RNA, 32 nt, Homo Sapiens
cccccucccucuggggccuugggccaacuuac

SEQ ID NO: 109970 - RNA, 32 nt, Homo Sapiens
guuuucugucuccucuaaccucuuuccuuacu

SEQ ID NO: 109971 - RNA, 32 nt, Homo Sapiens
cuugcugugagcgcggagucgcggcggguagg

SEQ ID NO: 109972 - RNA, 32 nt, Homo Sapiens
uugguccccaagccagagagccagaagccauc

SEQ ID NO: 109973 - RNA, 32 nt, Homo Sapiens
aaggaauguauaaaguuccacauggaagcugg

SEQ ID NO: 109974 - RNA, 32 nt, Homo Sapiens
uuuacaggaaaugugacauaacucauacaucg

SEQ ID NO: 109975 - RNA, 32 nt, Homo Sapiens
auccugcugcugggaaaaccacagcauuuuau

SEQ ID NO: 109976 - RNA, 32 nt, Homo Sapiens
acccggccuggaugccagcuguguccuucggg

SEQ ID NO: 109977 - RNA, 32 nt, Homo Sapiens
cgucccauaccuuguuuuuaaucuccuguuug

SEQ ID NO: 109978 - RNA, 32 nt, Homo Sapiens
cugguuuugaguuuucuaagcucagggucuuc

SEQ ID NO: 109979 - RNA, 32 nt, Homo Sapiens
uuaaucauuugagucauguuuuugcuuugcag

SEQ ID NO: 109980 - RNA, 32 nt, Homo Sapiens
gugagggaggccgggcccgggcaccugagggc

SEQ ID NO: 109981 - RNA, 32 nt, Homo Sapiens
uggauguuuuuauauuuuaauagaaucauuua

SEQ ID NO: 109982 - RNA, 32 nt, Homo Sapiens
ggggccagaucuucagagcugcacuggaggug

SEQ ID NO: 109983 - RNA, 32 nt, Homo Sapiens
cugaugugauaaaacauuuugugguuucucug

SEQ ID NO: 109984 - RNA, 32 nt, Homo Sapiens
uacugugacuucaugcccuuuugggauaagaa

SEQ ID NO: 109985 - RNA, 32 nt, Homo Sapiens
auaguugcuucagaucuuaggucucaagggca

SEQ ID NO: 109986 - RNA, 32 nt, Homo Sapiens
gacccugcaccucggccucccaaaguguuagg

SEQ ID NO: 109987 - RNA, 32 nt, Homo Sapiens
ccggcgcagggagggaggagccgcccgggcug

SEQ ID NO: 109988 - RNA, 26 nt, Homo Sapiens
ugauaauaaaaugcuuucuaugaaau

SEQ ID NO: 109989 - RNA, 32 nt, Homo Sapiens
aacuacuuauuagcuguagaguccuuggcaaa

SEQ ID NO: 109990 - RNA, 32 nt, Homo Sapiens
auuuacuacaucggucacuucuccaggcugcc

SEQ ID NO: 109991 - RNA, 32 nt, Homo Sapiens
uguuuggauggucagcugggaguguccaucau

SEQ ID NO: 109992 - RNA, 32 nt, Homo Sapiens
auauuuaauuuaaugaucauuauauauguggg

SEQ ID NO: 109993 - RNA, 32 nt, Homo Sapiens
gagagcaucauucuuuuaauaaaacagaagag

SEQ ID NO: 109994 - RNA, 32 nt, Homo Sapiens
ggccgaagccucagccccuccagacaggccgc

SEQ ID NO: 109995 - RNA, 32 nt, Homo Sapiens
aaauuuuccucagguuuuuuuauuuuaaaaaa

SEQ ID NO: 109996 - RNA, 32 nt, Homo Sapiens
aaagaagguguaucauauuuuauauugucacu

SEQ ID NO: 109997 - RNA, 32 nt, Homo Sapiens
gaugagcagcuagcagcugacaguuggaggga

SEQ ID NO: 109998 - RNA, 32 nt, Homo Sapiens
cccaauuccugccccuauucucugccugggag

SEQ ID NO: 109999 - RNA, 32 nt, Homo Sapiens
uuugggcaguggugggggagggggccagagag

SEQ ID NO: 110000 - RNA, 32 nt, Homo Sapiens
aaagccuuuccuauuauuucucuucuuagcuu

SEQ ID NO: 110001 - RNA, 32 nt, Homo Sapiens
gguuguuauuaugcaaagccacagcauuaagg

SEQ ID NO: 110002 - RNA, 32 nt, Homo Sapiens
uguuuggcagugccaggccucuugccccuuug

SEQ ID NO: 110003 - RNA, 32 nt, Homo Sapiens
ucacuguggcagccuccucccuggauccuuag

SEQ ID NO: 110004 - RNA, 32 nt, Homo Sapiens
ccuucccaggccccgcuuuugcuuuuggcggc

SEQ ID NO: 110005 - RNA, 30 nt, Homo Sapiens
aggagguggggcgaggcagccagagcccuu

SEQ ID NO: 110006 - RNA, 32 nt, Homo Sapiens
ucaagcuccuuaaauguucgugcugugucugc

SEQ ID NO: 110007 - RNA, 32 nt, Homo Sapiens
aagugacuauacauuuguuuuugugugcucaa

SEQ ID NO: 110008 - RNA, 32 nt, Homo Sapiens
uugggguuagugugugucaucacauucgagug

SEQ ID NO: 110009 - RNA, 32 nt, Homo Sapiens
ggcuguuuguauauuuaauuaagggaugggag

SEQ ID NO: 110010 - RNA, 32 nt, Homo Sapiens
uaaaaacgcuuuaauuuuuauguauguuaaaa

SEQ ID NO: 110011 - RNA, 32 nt, Homo Sapiens
ugggagaaggagccccaccucucccaggcgag

SEQ ID NO: 110012 - RNA, 32 nt, Homo Sapiens
ugugagcaucucugccucagaaugggguuuug

SEQ ID NO: 110013 - RNA, 32 nt, Homo Sapiens
gaagacggggcugcaagacggugcuggcaaag

SEQ ID NO: 110014 - RNA, 32 nt, Homo Sapiens
cuaaggguccugaaagaguguggggagaaaua

SEQ ID NO: 110015 - RNA, 32 nt, Homo Sapiens
gcugaccgaggggcggacgcgcggcggggcag

SEQ ID NO: 110016 - RNA, 32 nt, Homo Sapiens
uaaauguguugucaguauuuaacauuuaguua

SEQ ID NO: 110017 - RNA, 32 nt, Homo Sapiens
acugaggcaccagugggcuuggcacuccaccu

SEQ ID NO: 110018 - RNA, 32 nt, Homo Sapiens
agcucagcguguggcuaccuggaccaauucug

SEQ ID NO: 110019 - RNA, 32 nt, Homo Sapiens
aaaggucucuacaggucccuccucguuaguau

SEQ ID NO: 110020 - RNA, 31 nt, Homo Sapiens
gcguaguggcagauccugccccagacaccag

SEQ ID NO: 110021 - RNA, 32 nt, Homo Sapiens
ggcgcaccgggcucggugcugcaccugccucc

SEQ ID NO: 110022 - RNA, 32 nt, Homo Sapiens
cucugugaccugugggguuagaccagagaggg

SEQ ID NO: 110023 - RNA, 32 nt, Homo Sapiens
gaugauaauaauaacuacguccauugagcacu

SEQ ID NO: 110024 - RNA, 32 nt, Homo Sapiens
agcagcuuccgucuuuggguucuugcugccuc

SEQ ID NO: 110025 - RNA, 32 nt, Homo Sapiens
gacagauuacacaaauguaagugauaagaaua

SEQ ID NO: 110026 - RNA, 32 nt, Homo Sapiens
uucuaugaauaaaauaucacauguacaaaaag

SEQ ID NO: 110027 - RNA, 32 nt, Homo Sapiens
gcauuuugcuucuggggugucuuccuuagcca

SEQ ID NO: 110028 - RNA, 32 nt, Homo Sapiens
gcaugucaucacaaacauuugcucuuaaguua

SEQ ID NO: 110029 - RNA, 32 nt, Homo Sapiens
ugauaaugaugaugaauuugguuccuagucuc

SEQ ID NO: 110030 - RNA, 32 nt, Homo Sapiens
agaagaaaaaauacuguaauacuaagaaacug

SEQ ID NO: 110031 - RNA, 32 nt, Homo Sapiens
uaaacaauuaacaaauacuuugaaaaaaaaaa

SEQ ID NO: 110032 - RNA, 32 nt, Homo Sapiens
ccuaugccuuggcuuuuccccgggccuuccag

SEQ ID NO: 110033 - RNA, 32 nt, Homo Sapiens
gcaggcugggagaggcgcugcgugcuuggaaa

SEQ ID NO: 110034 - RNA, 32 nt, Homo Sapiens
ucugaaggggaagagggugaccucagcggcuu

SEQ ID NO: 110035 - RNA, 32 nt, Homo Sapiens
cuguaugaguggaaauuaagacuuuauguagu

SEQ ID NO: 110036 - RNA, 32 nt, Homo Sapiens
cacuaaggagggaggggcugucugcagcagcu

SEQ ID NO: 110037 - RNA, 32 nt, Homo Sapiens
gggggugcugcggcgccguuugcuuugccaaa

SEQ ID NO: 110038 - RNA, 32 nt, Homo Sapiens
cagccugggucacagugccuguuuucaaauag

SEQ ID NO: 110039 - RNA, 32 nt, Homo Sapiens
aaaauauaaaaauuaacuagggguuguggugu

SEQ ID NO: 110040 - RNA, 32 nt, Homo Sapiens
cggggucccggccgccaggccggagcgcgaau

SEQ ID NO: 110041 - RNA, 32 nt, Homo Sapiens
ggacggaaggcugaggcgacgccucgacgaca

SEQ ID NO: 110042 - RNA, 29 nt, Homo Sapiens
ggcgcccggggacaggagggauguccugc

SEQ ID NO: 110043 - RNA, 32 nt, Homo Sapiens
cauuuauuuuuuauguuuacccauugguuagg

SEQ ID NO: 110044 - RNA, 32 nt, Homo Sapiens
ugguguauagcuuuaaacuguauaaaguuuug

SEQ ID NO: 110045 - RNA, 32 nt, Homo Sapiens
gcaaagacaaaauaauguuaaacaauucugua

SEQ ID NO: 110046 - RNA, 32 nt, Homo Sapiens
gacccgggcccggcccggcgagaucacugacu

SEQ ID NO: 110047 - RNA, 32 nt, Homo Sapiens
gcggccaccugccuccaccuucugccuggagg

SEQ ID NO: 110048 - RNA, 32 nt, Homo Sapiens
cucccagugugagcgacacagaagacagguga

SEQ ID NO: 110049 - RNA, 32 nt, Homo Sapiens
ugccauggacauuuguccucgggcucagaggc

SEQ ID NO: 110050 - RNA, 32 nt, Homo Sapiens
aggagggggccgccgcgcccccgggaccaccu

SEQ ID NO: 110051 - RNA, 32 nt, Homo Sapiens
agaggacaccaauuaauuuccuggucuuuagu

SEQ ID NO: 110052 - RNA, 32 nt, Homo Sapiens
gucuccagcuuccagcccuccuccccuaagcc

SEQ ID NO: 110053 - RNA, 32 nt, Homo Sapiens
aguuuaaagacuuuaaaaauaauuaggaaaaa

SEQ ID NO: 110054 - RNA, 32 nt, Homo Sapiens
acauuuucuaugauuaaucugcuguuaccugu

SEQ ID NO: 110055 - RNA, 32 nt, Homo Sapiens
ugggucuuauguuuggggggagguuuauucuu

SEQ ID NO: 110056 - RNA, 32 nt, Homo Sapiens
gcuuggauagaguugaggagugugaggcuguu

SEQ ID NO: 110057 - RNA, 32 nt, Homo Sapiens
agucccugcggccuccagcagugaagaguucc

SEQ ID NO: 110058 - RNA, 32 nt, Homo Sapiens
aggcgcccggcgguauuuguugggucggcggc

SEQ ID NO: 110059 - RNA, 32 nt, Homo Sapiens
agcccaccccgagggcccgcaggccgcugccc

SEQ ID NO: 110060 - RNA, 32 nt, Homo Sapiens
cuguccaccugggggcagcagacccucacaca

SEQ ID NO: 110061 - RNA, 32 nt, Homo Sapiens
cccacccuccuccucuucuccuucaagaccca

SEQ ID NO: 110062 - RNA, 32 nt, Homo Sapiens
cuuggcaggaccaugacuggugcacugucuuc

SEQ ID NO: 110063 - RNA, 32 nt, Homo Sapiens
ccucaauaauuucuuuuucuucgagacagggu

SEQ ID NO: 110064 - RNA, 32 nt, Homo Sapiens
uguuguuugaaaccuuuguaacuuguuuguau

SEQ ID NO: 110065 - RNA, 32 nt, Homo Sapiens
uguguaugcagggcuaugcaccugcaggcacg

SEQ ID NO: 110066 - RNA, 32 nt, Homo Sapiens
aaguugaacaaucccgguacuguaccauauca

SEQ ID NO: 110067 - RNA, 32 nt, Homo Sapiens
ggccgcgggaggagggagccgucaccgaggag

SEQ ID NO: 110068 - RNA, 32 nt, Homo Sapiens
gaauggggaaaagaaucuuucaagggcaaaga

SEQ ID NO: 110069 - RNA, 32 nt, Homo Sapiens
ccaucauuccuuuuccccuuggcacucaugag

SEQ ID NO: 110070 - RNA, 32 nt, Homo Sapiens
auuguaacaauauauuuaccccaguaugucca

SEQ ID NO: 110071 - RNA, 32 nt, Homo Sapiens
gaagccuuuaucaugugguugcuggugugugu

SEQ ID NO: 110072 - RNA, 32 nt, Homo Sapiens
cucagcagcccaccgggucccuccaggcugcu

SEQ ID NO: 110073 - RNA, 32 nt, Homo Sapiens
cucucauuucuggggcucccagcccucccucu

SEQ ID NO: 110074 - RNA, 32 nt, Homo Sapiens
gggagaggccagagaagcugcagaagacacag

SEQ ID NO: 110075 - RNA, 32 nt, Homo Sapiens
gaagaggauccacaacuccuuggagaaacacc

SEQ ID NO: 110076 - RNA, 32 nt, Homo Sapiens
gcccccacccccggcccuuuguuugcuugcgu

SEQ ID NO: 110077 - RNA, 32 nt, Homo Sapiens
auaaaaccauuggccugguugagggcgugacc

SEQ ID NO: 110078 - RNA, 32 nt, Homo Sapiens
augaaauuccuccuuccccccaucucugagug

SEQ ID NO: 110079 - RNA, 32 nt, Homo Sapiens
ugaaucccaguccccaggaaccuagcucuuua

SEQ ID NO: 110080 - RNA, 32 nt, Homo Sapiens
acagaauacuguccuuuuuuuuuuucuuucuu

SEQ ID NO: 110081 - RNA, 32 nt, Homo Sapiens
gggaguagccgcucuguaaauccuuguugaaa

SEQ ID NO: 110082 - RNA, 32 nt, Homo Sapiens
aggccaaguauaauaaaguaaaucagucuuac

SEQ ID NO: 110083 - RNA, 32 nt, Homo Sapiens
uuuccuguucauagcaauauuaaaucaggaaa

SEQ ID NO: 110084 - RNA, 32 nt, Homo Sapiens
gagcagccugacguccugccagccccagagac

SEQ ID NO: 110085 - RNA, 32 nt, Homo Sapiens
augucuuguauuaaauguuuccucuguauucu

SEQ ID NO: 110086 - RNA, 32 nt, Homo Sapiens
aaagaugugcuaaaugacuuuuuuggccaaag

SEQ ID NO: 110087 - RNA, 32 nt, Homo Sapiens
agcaagcuuuuuuauuuuuuauacaggggaau

SEQ ID NO: 110088 - RNA, 32 nt, Homo Sapiens
agaacaggacccccaugcugcacagcccugcu

SEQ ID NO: 110089 - RNA, 32 nt, Homo Sapiens
gcauauaugucuucuuuugaaauguguucaug

SEQ ID NO: 110090 - RNA, 32 nt, Homo Sapiens
uagcaguagaaaggucuuggggucugaaugac

SEQ ID NO: 110091 - RNA, 32 nt, Homo Sapiens
cuccagcagcgccagcaggcgggaucgaggcc

SEQ ID NO: 110092 - RNA, 32 nt, Homo Sapiens
ccagcaccagaguugcugcugcuuccccucgc

SEQ ID NO: 110093 - RNA, 32 nt, Homo Sapiens
aaugugucccacuuacugugccacgugcgagg

SEQ ID NO: 110094 - RNA, 32 nt, Homo Sapiens
agguggggagggaacccgaggacccugccuau

SEQ ID NO: 110095 - RNA, 32 nt, Homo Sapiens
acaguuuggccauaauccuagaugcacgcuuc

SEQ ID NO: 110096 - RNA, 32 nt, Homo Sapiens
gggcacaggaggaacaggcacggcugguggug

SEQ ID NO: 110097 - RNA, 32 nt, Homo Sapiens
gagcuaaaugcuucauugaaagcuucaaaguu

SEQ ID NO: 110098 - RNA, 32 nt, Homo Sapiens
cugcaagucugagucuaacaguuuuuggcuua

SEQ ID NO: 110099 - RNA, 32 nt, Homo Sapiens
uauuucuacuaaaagccacauucugagacuuc

SEQ ID NO: 110100 - RNA, 32 nt, Homo Sapiens
auauaacuguuuuguuauuugaaucuuggaaa

SEQ ID NO: 110101 - RNA, 32 nt, Homo Sapiens
gucccuggauggaaucaagauuuuaaauucaa

SEQ ID NO: 110102 - RNA, 32 nt, Homo Sapiens
gcucagccccagcuuaucuccuccuccgccug

SEQ ID NO: 110103 - RNA, 32 nt, Homo Sapiens
aucaaauguuauuuuuaagaaaauggaaaaua

SEQ ID NO: 110104 - RNA, 32 nt, Homo Sapiens
uaugacaaacuuauacaucugcuucuaacaua

SEQ ID NO: 110105 - RNA, 32 nt, Homo Sapiens
ugccuguaaucccagcacuuugggaggcagag

SEQ ID NO: 110106 - RNA, 32 nt, Homo Sapiens
agaaagagaaagauccucagaaguggauuguc

SEQ ID NO: 110107 - RNA, 32 nt, Homo Sapiens
ucuguuaauuuucagguuuugaaagacauuaa

SEQ ID NO: 110108 - RNA, 32 nt, Homo Sapiens
ggccuggcaagcacggggucuuucuugcugga

SEQ ID NO: 110109 - RNA, 32 nt, Homo Sapiens
ccaguuuuuuauucagaauuuuucucagauau

SEQ ID NO: 110110 - RNA, 32 nt, Homo Sapiens
uucagagugacguuuuuccucacaagcagaag

SEQ ID NO: 110111 - RNA, 32 nt, Homo Sapiens
aaauaggggguuguucaauauugucuucaaug

SEQ ID NO: 110112 - RNA, 32 nt, Homo Sapiens
uggucccuaaacuuaaauuucaagacgguaua

SEQ ID NO: 110113 - RNA, 32 nt, Homo Sapiens
auucagaaaaucaacacauuuuuaaaugacua

SEQ ID NO: 110114 - RNA, 32 nt, Homo Sapiens
ccuauucccagaggcagguggugcugacccug

SEQ ID NO: 110115 - RNA, 32 nt, Homo Sapiens
guacuggcaucugcuugguuucuggggaggcc

SEQ ID NO: 110116 - RNA, 32 nt, Homo Sapiens
gaguuuuucuuuagaaacagugccaagaauga

SEQ ID NO: 110117 - RNA, 32 nt, Homo Sapiens
cccccagccuacucuccuaauggucugugucu

SEQ ID NO: 110118 - RNA, 32 nt, Homo Sapiens
ugaucuccccagcuuuuccccagcucugcccc

SEQ ID NO: 110119 - RNA, 32 nt, Homo Sapiens
agcggcuagaggaucggggagaaggagcauuc

SEQ ID NO: 110120 - RNA, 32 nt, Homo Sapiens
uccuguccuugauauuuuuagcaguuccaaau

SEQ ID NO: 110121 - RNA, 32 nt, Homo Sapiens
uuaugaagaaaguuaaaacaugaaucuuggga

SEQ ID NO: 110122 - RNA, 32 nt, Homo Sapiens
aaucuuuauuuuuuaaauaaaugggaucauau

SEQ ID NO: 110123 - RNA, 32 nt, Homo Sapiens
gcgggcacgccagcuggagcugggcgccgagc

SEQ ID NO: 110124 - RNA, 32 nt, Homo Sapiens
aaggaaacagaaaaaaggucccugcccuucug

SEQ ID NO: 110125 - RNA, 32 nt, Homo Sapiens
uccccauccaaaucucauguugaaauguaauc

SEQ ID NO: 110126 - RNA, 32 nt, Homo Sapiens
ggcaggaaguuucuggguugcaucuuagccgg

SEQ ID NO: 110127 - RNA, 32 nt, Homo Sapiens
uacaugggauaugguccaaugaauuuaagccc

SEQ ID NO: 110128 - RNA, 32 nt, Homo Sapiens
ccguggagccccacaaggccccugcccuagag

SEQ ID NO: 110129 - RNA, 32 nt, Homo Sapiens
uuuagccugucauuuuaauucuucaagagauu

SEQ ID NO: 110130 - RNA, 32 nt, Homo Sapiens
acugcuugaugcuggucucuauacuggagaag

SEQ ID NO: 110131 - RNA, 32 nt, Homo Sapiens
acaagcccaugaccaauguguccuaaaccacc

SEQ ID NO: 110132 - RNA, 32 nt, Homo Sapiens
cugucaggauguguccugggggcugggaagga

SEQ ID NO: 110133 - RNA, 32 nt, Homo Sapiens
agauucccagagaggagaggaggcuguuggua

SEQ ID NO: 110134 - RNA, 32 nt, Homo Sapiens
gaguagauuggggacaggguugaggggaacaa

SEQ ID NO: 110135 - RNA, 32 nt, Homo Sapiens
cccauaccugagaggaagaaauguagacaggc

SEQ ID NO: 110136 - RNA, 32 nt, Homo Sapiens
gauugaauauaaaugccuaauuucauucuuug

SEQ ID NO: 110137 - RNA, 32 nt, Homo Sapiens
cugagagucuucaguuacuagauccagacacg

SEQ ID NO: 110138 - RNA, 32 nt, Homo Sapiens
gccugagcggggauguagaggcggcggcagca

SEQ ID NO: 110139 - RNA, 32 nt, Homo Sapiens
aagucucuuuguuccuucuccaaacucaguaa

SEQ ID NO: 110140 - RNA, 32 nt, Homo Sapiens
auuccugucuucugccugcucccucaugucag

SEQ ID NO: 110141 - RNA, 32 nt, Homo Sapiens
aauuaauacuacuagcuuccagacaaucaugu

SEQ ID NO: 110142 - RNA, 32 nt, Homo Sapiens
guguggaaacucagcgcaaacaacccuguuug

SEQ ID NO: 110143 - RNA, 32 nt, Homo Sapiens
cucagucuuucccccacccugucucuuccuug

SEQ ID NO: 110144 - RNA, 32 nt, Homo Sapiens
acaccugaaaaacaagacacaguguuuaacua

SEQ ID NO: 110145 - RNA, 32 nt, Homo Sapiens
uguaaggaaguaccaauauacuuuuuaaaauu

SEQ ID NO: 110146 - RNA, 32 nt, Homo Sapiens
gugcuccggagcggcccgggcaccgggggcac

SEQ ID NO: 110147 - RNA, 32 nt, Homo Sapiens
uccagugcucucuuccugccuccagcucugcc

SEQ ID NO: 110148 - RNA, 32 nt, Homo Sapiens
ccccagcccucccaccugccacucccuggccc

SEQ ID NO: 110149 - RNA, 32 nt, Homo Sapiens
uacuuugugaguuuuccaggauguguguaaac

SEQ ID NO: 110150 - RNA, 32 nt, Homo Sapiens
augugaauugguuuuuaggggccccacuuccc

SEQ ID NO: 110151 - RNA, 32 nt, Homo Sapiens
ggacuagaaaaguguguggucuguggggcgga

SEQ ID NO: 110152 - RNA, 32 nt, Homo Sapiens
guuuggaagauaauuaccaaaaggguccauua

SEQ ID NO: 110153 - RNA, 32 nt, Homo Sapiens
cggccgccagcuaggggcgcgggaaggcgggg

SEQ ID NO: 110154 - RNA, 32 nt, Homo Sapiens
gacggccgcgggggucccagcuccucagcucg

SEQ ID NO: 110155 - RNA, 28 nt, Homo Sapiens
aaauugugcuuacauauguguuugauau

SEQ ID NO: 110156 - RNA, 32 nt, Homo Sapiens
agugcugagauuacaggcauaaaccacaaugc

SEQ ID NO: 110157 - RNA, 32 nt, Homo Sapiens
ggcuucaaggcgcugcugcugcucgggguccu

SEQ ID NO: 110158 - RNA, 32 nt, Homo Sapiens
cuuaguuucugaauuucuuuuaaauuacaguu

SEQ ID NO: 110159 - RNA, 32 nt, Homo Sapiens
uuauuuggaaauuuuucucacucuaccuuccu

SEQ ID NO: 110160 - RNA, 32 nt, Homo Sapiens
uucucuccuggcggcggcgccaccugcaguag

SEQ ID NO: 110161 - RNA, 32 nt, Homo Sapiens
gccacuguugucccaccgaauggacagcuuug

SEQ ID NO: 110162 - RNA, 32 nt, Homo Sapiens
uguaaugcuuuuuaaauagaaaaauguauaaa

SEQ ID NO: 110163 - RNA, 32 nt, Homo Sapiens
uccuuuucuugcuccuucuucaacuccuggug

SEQ ID NO: 110164 - RNA, 32 nt, Homo Sapiens
ggccugugccgacgccuaccucacgcccgcca

SEQ ID NO: 110165 - RNA, 32 nt, Homo Sapiens
gcuugccuuucugagugaggcggcagcucgga

SEQ ID NO: 110166 - RNA, 32 nt, Homo Sapiens
gcgcgccgggcggcuccgcgaauccuccggca

SEQ ID NO: 110167 - RNA, 32 nt, Homo Sapiens
ugauuucucugcuuauaaaugaaagauugaaa

SEQ ID NO: 110168 - RNA, 32 nt, Homo Sapiens
uuguacagaaaauaucaaccucuucccuuuug

SEQ ID NO: 110169 - RNA, 32 nt, Homo Sapiens
gaagcuacuuuuuaauuugauguaacuuuucu

SEQ ID NO: 110170 - RNA, 32 nt, Homo Sapiens
aaagaaaagcauguggaaaagcagaagcuuag

SEQ ID NO: 110171 - RNA, 28 nt, Homo Sapiens
uccucggggcggcgacggggcucacgcg

SEQ ID NO: 110172 - RNA, 32 nt, Homo Sapiens
aucagugguacgcagccaggauggcuggcugg

SEQ ID NO: 110173 - RNA, 28 nt, Homo Sapiens
gcugggauuacaggagugaaccaccaug

SEQ ID NO: 110174 - RNA, 32 nt, Homo Sapiens
ccccgcccagccccugcccccagccugugugc

SEQ ID NO: 110175 - RNA, 32 nt, Homo Sapiens
cacccccuuugauccuuucuacuuccacggug

SEQ ID NO: 110176 - RNA, 32 nt, Homo Sapiens
ggcugacgagcagggcgggccuggcucacgug

SEQ ID NO: 110177 - RNA, 32 nt, Homo Sapiens
ccuccagggaaguuaagaguuuugacuuucgg

SEQ ID NO: 110178 - RNA, 32 nt, Homo Sapiens
guauucuacagcuuugccugaacucuccuuuu

SEQ ID NO: 110179 - RNA, 32 nt, Homo Sapiens
gucugguuacagcuuuuuccuccaacucaagg

SEQ ID NO: 110180 - RNA, 30 nt, Homo Sapiens
gaaaugggagguggcgggggggcguggggg

SEQ ID NO: 110181 - RNA, 32 nt, Homo Sapiens
uugcuuuguaaauuagggcccaauuaauaauc

SEQ ID NO: 110182 - RNA, 32 nt, Homo Sapiens
uaggucagaaugcaagugacuuaaucacaguc

SEQ ID NO: 110183 - RNA, 32 nt, Homo Sapiens
gcuguuacuuuuuaaaaaaugaauuaucuuuc

SEQ ID NO: 110184 - RNA, 32 nt, Homo Sapiens
acaaauauuaaguacucuugauacaaaauaua

SEQ ID NO: 110185 - RNA, 32 nt, Homo Sapiens
gucccgauccuguugcugcugcugcaccgccc

SEQ ID NO: 110186 - RNA, 32 nt, Homo Sapiens
auauauuuucauaauuaguuguuuaugacacc

SEQ ID NO: 110187 - RNA, 32 nt, Homo Sapiens
agcaacuugaguuuguugccacugagaagcag

SEQ ID NO: 110188 - RNA, 32 nt, Homo Sapiens
gccacccaccuccuccuccccaggccacccaa

SEQ ID NO: 110189 - RNA, 32 nt, Homo Sapiens
cagaacucauuucgugcaaugaacauaaggaa

SEQ ID NO: 110190 - RNA, 32 nt, Homo Sapiens
gcuccggagccgcgacugcgcucgccuaggug

SEQ ID NO: 110191 - RNA, 32 nt, Homo Sapiens
gugugcauuuaauaagaggaugaccuuucagu

SEQ ID NO: 110192 - RNA, 32 nt, Homo Sapiens
gaaguccuaaauuuauauuagaaaaauguaaa

SEQ ID NO: 110193 - RNA, 32 nt, Homo Sapiens
cccagccugcccuuccuuccuccagcuggcug

SEQ ID NO: 110194 - RNA, 32 nt, Homo Sapiens
uggcggcggcggugagaagagcgaggcggagg

SEQ ID NO: 110195 - RNA, 32 nt, Homo Sapiens
cccugcaccacccacagccgggaguaccccau

SEQ ID NO: 110196 - RNA, 32 nt, Homo Sapiens
caccaaccaaaauuaaucccuuuugucauauu

SEQ ID NO: 110197 - RNA, 32 nt, Homo Sapiens
aaacugaagguuuaguugugagcuucagauuu

SEQ ID NO: 110198 - RNA, 32 nt, Homo Sapiens
cucaaaaaugaaaucauaauguacauugcuuu

SEQ ID NO: 110199 - RNA, 32 nt, Homo Sapiens
aacaaaaugucaaaauaauguuuuaaguauaa

SEQ ID NO: 110200 - RNA, 32 nt, Homo Sapiens
auuagccaauaggaauuuuaaaauaacaugga

SEQ ID NO: 110201 - RNA, 32 nt, Homo Sapiens
acgcaaugggaggcagggacaccuggacaaua

SEQ ID NO: 110202 - RNA, 32 nt, Homo Sapiens
auuuuguacuuuucagaauauuaucgugacac

SEQ ID NO: 110203 - RNA, 32 nt, Homo Sapiens
cuugauaauuuuccuuuaauaugaaauuuuuu

SEQ ID NO: 110204 - RNA, 27 nt, Homo Sapiens
ccccuccccauccccagcccccgggga

SEQ ID NO: 110205 - RNA, 32 nt, Homo Sapiens
aaaucacagcuguuuauuuucuguaaaucaau

SEQ ID NO: 110206 - RNA, 32 nt, Homo Sapiens
gugcuuuuuuauggccuuuucuuaaaauaacc

SEQ ID NO: 110207 - RNA, 32 nt, Homo Sapiens
auugugaucauuuccuaagaaaagguaaaauu

SEQ ID NO: 110208 - RNA, 32 nt, Homo Sapiens
agauguaggcccuuaagauaucugcaaagaag

SEQ ID NO: 110209 - RNA, 32 nt, Homo Sapiens
aguaguuuacuuuggacuaaagaauauauugg

SEQ ID NO: 110210 - RNA, 32 nt, Homo Sapiens
aucugguuacugcuguaacaugacuaauaaaa

SEQ ID NO: 110211 - RNA, 32 nt, Homo Sapiens
ugagcugaggagacacugggacaggcuggccu

SEQ ID NO: 110212 - RNA, 32 nt, Homo Sapiens
cacccccaaucaagaagcuggucccacggaaa

SEQ ID NO: 110213 - RNA, 32 nt, Homo Sapiens
gcagggcuccgucugcacguggacuugcccug

SEQ ID NO: 110214 - RNA, 32 nt, Homo Sapiens
gguuuagcacuuaagaucagauucaagagaau

SEQ ID NO: 110215 - RNA, 32 nt, Homo Sapiens
aaauaaaaaaaauuaauggcaauuguuuagug

SEQ ID NO: 110216 - RNA, 32 nt, Homo Sapiens
gaggugccggcggcuggcggccgcggagucuu

SEQ ID NO: 110217 - RNA, 32 nt, Homo Sapiens
gggacagagguagaaaaguaaacauuaagcag

SEQ ID NO: 110218 - RNA, 30 nt, Homo Sapiens
uauauucuaaucuuuuauuaaaauuugcac

SEQ ID NO: 110219 - RNA, 32 nt, Homo Sapiens
auuccuuuccuccaaugaaccaaacgccuccc

SEQ ID NO: 110220 - RNA, 32 nt, Homo Sapiens
cccuuuauuuuugucggcucuugacugggagg

SEQ ID NO: 110221 - RNA, 32 nt, Homo Sapiens
auaagacauucaggcauuuucccuuuaugaag

SEQ ID NO: 110222 - RNA, 32 nt, Homo Sapiens
gcaagcuccgccuccuggguucacgccaugag

SEQ ID NO: 110223 - RNA, 32 nt, Homo Sapiens
gggggcuacacuggggaggugugugucagggc

SEQ ID NO: 110224 - RNA, 32 nt, Homo Sapiens
ugggucaguuacuuaaacuuccuaagccuuag

SEQ ID NO: 110225 - RNA, 32 nt, Homo Sapiens
cccuccuguuccuccuucuccaucccccaugg

SEQ ID NO: 110226 - RNA, 32 nt, Homo Sapiens
caauccugucuccccagcggcucuguuuccuc

SEQ ID NO: 110227 - RNA, 32 nt, Homo Sapiens
acagcccaaaaauaauguuaaaaugacucaag

SEQ ID NO: 110228 - RNA, 32 nt, Homo Sapiens
agggggcaucccacccaagaccucugauuccg

SEQ ID NO: 110229 - RNA, 32 nt, Homo Sapiens
augugcaggauacaguguguuucaucuguucc

SEQ ID NO: 110230 - RNA, 32 nt, Homo Sapiens
uuacggacucauccccagcugcacugaaggca

SEQ ID NO: 110231 - RNA, 32 nt, Homo Sapiens
uccccaaggcccugccccccagccccacccac

SEQ ID NO: 110232 - RNA, 32 nt, Homo Sapiens
agcugaaucugccgcaggcccgcgggccgccc

SEQ ID NO: 110233 - RNA, 32 nt, Homo Sapiens
ucaguggaucuggucugaguuucaaucugcca

SEQ ID NO: 110234 - RNA, 32 nt, Homo Sapiens
gcaccagaggccccaugacccuggacagacca

SEQ ID NO: 110235 - RNA, 32 nt, Homo Sapiens
gacugcuucugggaagaccagaggcaucaccu

SEQ ID NO: 110236 - RNA, 32 nt, Homo Sapiens
gcagagcgaggguguguggagggccggcgggg

SEQ ID NO: 110237 - RNA, 32 nt, Homo Sapiens
uaugccauuguuaaauuuucuuuaaguaauuu

SEQ ID NO: 110238 - RNA, 32 nt, Homo Sapiens
cggauucggaccggcucuguguucacuacacu

SEQ ID NO: 110239 - RNA, 32 nt, Homo Sapiens
gaaccagaugcaacccggcagcccagagaacu

SEQ ID NO: 110240 - RNA, 32 nt, Homo Sapiens
uuugagcaguggccuacaaaucaguaauuuuc

SEQ ID NO: 110241 - RNA, 32 nt, Homo Sapiens
cgggaagcagaggccgccgccggccacagucg

SEQ ID NO: 110242 - RNA, 32 nt, Homo Sapiens
uggucaaacugggcuauaguuaaagcagccuc

SEQ ID NO: 110243 - RNA, 32 nt, Homo Sapiens
gacccgggccgugacugccccucccccaccac

SEQ ID NO: 110244 - RNA, 32 nt, Homo Sapiens
ugccucggcggaccggggagggggcccaccgc

SEQ ID NO: 110245 - RNA, 32 nt, Homo Sapiens
ccaggcgguagcgggggcggugguucuguugu

SEQ ID NO: 110246 - RNA, 32 nt, Homo Sapiens
auauucuaguuccuuuauguccuguacaucau

SEQ ID NO: 110247 - RNA, 32 nt, Homo Sapiens
gauacauggcucuuucuguuuauuuugggagu

SEQ ID NO: 110248 - RNA, 32 nt, Homo Sapiens
uuggucuccccggcugcucugcgggggcuuca

SEQ ID NO: 110249 - RNA, 32 nt, Homo Sapiens
guccugccacuacuggugaaccacugacccuu

SEQ ID NO: 110250 - RNA, 32 nt, Homo Sapiens
aaaauacaaaaauuagcuuggugugguggugg

SEQ ID NO: 110251 - RNA, 31 nt, Homo Sapiens
guguucccacccuccaguguuggcacaggcc

SEQ ID NO: 110252 - RNA, 32 nt, Homo Sapiens
accaggcccaacccugugcuggucaagccagg

SEQ ID NO: 110253 - RNA, 32 nt, Homo Sapiens
uaaaccacauaaaaaggccagacagggcgggg

SEQ ID NO: 110254 - RNA, 32 nt, Homo Sapiens
ccuuccuuuaccauuuccuccuuggaauugug

SEQ ID NO: 110255 - RNA, 32 nt, Homo Sapiens
gaaugaaacuauuguuccuguuucacacagaa

SEQ ID NO: 110256 - RNA, 32 nt, Homo Sapiens
cacacugagugaggaagggaauggaccaggga

SEQ ID NO: 110257 - RNA, 32 nt, Homo Sapiens
guggcccuggucuguggugucccggccaugga

SEQ ID NO: 110258 - RNA, 32 nt, Homo Sapiens
cccagucuaagggcagguucugucccauuguu

SEQ ID NO: 110259 - RNA, 32 nt, Homo Sapiens
auggcaugugacuugucuccuaagucagugag

SEQ ID NO: 110260 - RNA, 32 nt, Homo Sapiens
uggcuccccuccccuccggagcucgcggggau

SEQ ID NO: 110261 - RNA, 32 nt, Homo Sapiens
uuauuuguuuugcaauaaaggauaugaaggug

SEQ ID NO: 110262 - RNA, 32 nt, Homo Sapiens
ccagggggaaaggucagcagcguccuggagcc

SEQ ID NO: 110263 - RNA, 32 nt, Homo Sapiens
caggacgccccagcuggcccagccccuccucu

SEQ ID NO: 110264 - RNA, 32 nt, Homo Sapiens
cucuccagacccccagcuggccauguggugag

SEQ ID NO: 110265 - RNA, 32 nt, Homo Sapiens
uuuaaacacacagagacacacacacacguuuc

SEQ ID NO: 110266 - RNA, 32 nt, Homo Sapiens
ugccuaaugcaaggcaguggcucagcagcaag

SEQ ID NO: 110267 - RNA, 32 nt, Homo Sapiens
auagaggaaaagacacacauaaacucgcuucu

SEQ ID NO: 110268 - RNA, 32 nt, Homo Sapiens
uggaagugaagaagauccacuucuuucuccug

SEQ ID NO: 110269 - RNA, 32 nt, Homo Sapiens
ccuuagcccucccgccuucggcauuggggucc

SEQ ID NO: 110270 - RNA, 32 nt, Homo Sapiens
cuucuucagccuguuuccccagccacaggccu

SEQ ID NO: 110271 - RNA, 29 nt, Homo Sapiens
ucaucaauaaggacauauuuucuucuguc

SEQ ID NO: 110272 - RNA, 32 nt, Homo Sapiens
cuguuggcccugggcuuugucaugucucuggu

SEQ ID NO: 110273 - RNA, 31 nt, Homo Sapiens
ccguuucauagucuuugucuaacugcuagua

SEQ ID NO: 110274 - RNA, 31 nt, Homo Sapiens
acugaugaaaauaaauuuuuugcauaaugug

SEQ ID NO: 110275 - RNA, 32 nt, Homo Sapiens
cguuguauaugauuuuguauuuuuuaauucau

SEQ ID NO: 110276 - RNA, 32 nt, Homo Sapiens
cauuugaaggcacagugcaggggcucagauug

SEQ ID NO: 110277 - RNA, 32 nt, Homo Sapiens
gagggcgaggccagcuguacccggccccagug

SEQ ID NO: 110278 - RNA, 32 nt, Homo Sapiens
cguuuggaaaaugaaacagcugucugagagau

SEQ ID NO: 110279 - RNA, 32 nt, Homo Sapiens
agaccauucgccccaacauucccggccucucu

SEQ ID NO: 110280 - RNA, 32 nt, Homo Sapiens
auaccugaaaauaauaagugucaucuaugaca

SEQ ID NO: 110281 - RNA, 32 nt, Homo Sapiens
ugcaguaggagagacuccuuaugaggcuuagc

SEQ ID NO: 110282 - RNA, 32 nt, Homo Sapiens
guccgccgccgccgcugccucagccagcaaug

SEQ ID NO: 110283 - RNA, 32 nt, Homo Sapiens
agccuggcuuuaaagauuggagaagagcuucu

SEQ ID NO: 110284 - RNA, 32 nt, Homo Sapiens
uguuuuugggggugccuggagaugaacuggau

SEQ ID NO: 110285 - RNA, 32 nt, Homo Sapiens
cacaguagacggagcgcgcccggccgagcggg

SEQ ID NO: 110286 - RNA, 32 nt, Homo Sapiens
aguaugaguuuuuuguuguuuuuguuuuacuu

SEQ ID NO: 110287 - RNA, 32 nt, Homo Sapiens
ucugcucucgccgcgcuggguuuuagagccgu

SEQ ID NO: 110288 - RNA, 32 nt, Homo Sapiens
uuacaaacucuguaccucucggugcgcggcag

SEQ ID NO: 110289 - RNA, 32 nt, Homo Sapiens
ccagcuugaggaugaaguuccugcagauggcc

SEQ ID NO: 110290 - RNA, 32 nt, Homo Sapiens
acacaaaugaucauccugaggaucugagcuuc

SEQ ID NO: 110291 - RNA, 32 nt, Homo Sapiens
aaggacaucgccaccuggugcucaugaggugu

SEQ ID NO: 110292 - RNA, 32 nt, Homo Sapiens
ggccaaucaaugcacugucuguccucuccuuu

SEQ ID NO: 110293 - RNA, 32 nt, Homo Sapiens
aaacuacuucauuugauucagagaaauagagc

SEQ ID NO: 110294 - RNA, 32 nt, Homo Sapiens
aggguggggacggaagcggggagccuggggcu

SEQ ID NO: 110295 - RNA, 32 nt, Homo Sapiens
aguguuaagugucaaggugagaaagccucaca

SEQ ID NO: 110296 - RNA, 32 nt, Homo Sapiens
cagcuucgggguccugucaucacauccccugg

SEQ ID NO: 110297 - RNA, 32 nt, Homo Sapiens
ggaaaaaauuauuuauucuaugacacuacagg

SEQ ID NO: 110298 - RNA, 32 nt, Homo Sapiens
aacuagugagaguaauaucuaauuaucucauu

SEQ ID NO: 110299 - RNA, 31 nt, Homo Sapiens
cgcagagggucccagauucagaaucugccga

SEQ ID NO: 110300 - RNA, 32 nt, Homo Sapiens
cuaaaacggaggacauuuccuaccucagcaca

SEQ ID NO: 110301 - RNA, 32 nt, Homo Sapiens
aggaggaggcgagaguuggagcgcgugggagc

SEQ ID NO: 110302 - RNA, 32 nt, Homo Sapiens
aaguccagcuggaagcuugguggcaccagggc

SEQ ID NO: 110303 - RNA, 32 nt, Homo Sapiens
guguucuccugacaccaggaaaagagagggau

SEQ ID NO: 110304 - RNA, 32 nt, Homo Sapiens
uguccucuccugagguucugccugcagccccc

SEQ ID NO: 110305 - RNA, 32 nt, Homo Sapiens
uguuuaucugaggcgcgugcggcggccacccc

SEQ ID NO: 110306 - RNA, 32 nt, Homo Sapiens
uuauaauaagcaaaaagauuguguguauguau

SEQ ID NO: 110307 - RNA, 32 nt, Homo Sapiens
aagaagcacagacuucggauguacaaaacaaa

SEQ ID NO: 110308 - RNA, 32 nt, Homo Sapiens
gauuccuucccucuccagaacucuguacuugc

SEQ ID NO: 110309 - RNA, 32 nt, Homo Sapiens
aucuugucccguuuccucccaauauuccuucu

SEQ ID NO: 110310 - RNA, 32 nt, Homo Sapiens
ggcgggcugugcggcccggcucuccggcggca

SEQ ID NO: 110311 - RNA, 32 nt, Homo Sapiens
agcucacaagauacccacuuuucaggauggga

SEQ ID NO: 110312 - RNA, 32 nt, Homo Sapiens
cuucagcccccucccccaaaggucuggguccc

SEQ ID NO: 110313 - RNA, 32 nt, Homo Sapiens
auaagugaaaauuuagaaaauuaaaagcaauu

SEQ ID NO: 110314 - RNA, 32 nt, Homo Sapiens
cgaacggaacagaguuuucucaaccuuugcua

SEQ ID NO: 110315 - RNA, 32 nt, Homo Sapiens
gagcccagggaaugaaacucuccaucaaguca

SEQ ID NO: 110316 - RNA, 32 nt, Homo Sapiens
gucccgccuuccccggcgcgccauggagcccc

SEQ ID NO: 110317 - RNA, 32 nt, Homo Sapiens
uaguugaagagaaaugcucacugcacaaggag

SEQ ID NO: 110318 - RNA, 30 nt, Homo Sapiens
ggacgugucuguguguggaaguuuuauccg

SEQ ID NO: 110319 - RNA, 32 nt, Homo Sapiens
aaauagagcauaucuuuuuuuccacuaacaau

SEQ ID NO: 110320 - RNA, 32 nt, Homo Sapiens
agcuucaggacacgcaggccgcagcgagggcc

SEQ ID NO: 110321 - RNA, 32 nt, Homo Sapiens
agauaacuuauauguauaaaauuaaagcauau

SEQ ID NO: 110322 - RNA, 30 nt, Homo Sapiens
cugggcccccggguuccgccggcacucucg

SEQ ID NO: 110323 - RNA, 32 nt, Homo Sapiens
gauugucuaauuuuguaauauguuguuuuuua

SEQ ID NO: 110324 - RNA, 32 nt, Homo Sapiens
agcauggacuacugucuuugagggaucagagc

SEQ ID NO: 110325 - RNA, 32 nt, Homo Sapiens
acuuuagcaugcuaugucuuuaccauuuuugc

SEQ ID NO: 110326 - RNA, 32 nt, Homo Sapiens
aguuacauccgaaagugucuggagaagcugga

SEQ ID NO: 110327 - RNA, 32 nt, Homo Sapiens
acugaauacacgauugagucuggcccagugaa

SEQ ID NO: 110328 - RNA, 32 nt, Homo Sapiens
acauuauggaaauaguuugacguuuuugaccu

SEQ ID NO: 110329 - RNA, 31 nt, Homo Sapiens
guacauggaggcuauuuuaauccuucuaacu

SEQ ID NO: 110330 - RNA, 32 nt, Homo Sapiens
ugcagugagcucagaucucaccauugcacucc

SEQ ID NO: 110331 - RNA, 32 nt, Homo Sapiens
gagggcacggagaggaggacgguggcugacga

SEQ ID NO: 110332 - RNA, 32 nt, Homo Sapiens
gcagaagaagccgaaccccggcagcguggagc

SEQ ID NO: 110333 - RNA, 32 nt, Homo Sapiens
uugaauagugguuuuucucuagcuuuuugcca

SEQ ID NO: 110334 - RNA, 32 nt, Homo Sapiens
uucacccccugcaaaaaucggggcgacaauag

SEQ ID NO: 110335 - RNA, 32 nt, Homo Sapiens
agaugcuacggacgcuuuuccuccccuguccc

SEQ ID NO: 110336 - RNA, 32 nt, Homo Sapiens
cacggcggcuucggaccaacucccucacuccc

SEQ ID NO: 110337 - RNA, 32 nt, Homo Sapiens
uagcuauuuuucugccaugagacuagagguug

SEQ ID NO: 110338 - RNA, 32 nt, Homo Sapiens
uuaguguuauuuaaguagauuuaagaucucaa

SEQ ID NO: 110339 - RNA, 32 nt, Homo Sapiens
ggauuguauuuugguuuauagugacguaaacu

SEQ ID NO: 110340 - RNA, 32 nt, Homo Sapiens
cacaguuuuuaaaaauguuuauuguaguauau

SEQ ID NO: 110341 - RNA, 32 nt, Homo Sapiens
ugggaaccaauauguacauguuugcaauuaug

SEQ ID NO: 110342 - RNA, 32 nt, Homo Sapiens
gacacaauaaaauuauuauaaauaaaagcuua

SEQ ID NO: 110343 - RNA, 32 nt, Homo Sapiens
gcugucccuugacuugggggugaauuucaggc

SEQ ID NO: 110344 - RNA, 32 nt, Homo Sapiens
cagggaaaugaaaacuuuucuuauucaccuug

SEQ ID NO: 110345 - RNA, 32 nt, Homo Sapiens
guuaagcaagaacuacagacuccaucuuuuca

SEQ ID NO: 110346 - RNA, 32 nt, Homo Sapiens
auugcaggggagacagaggaggggcucggccu

SEQ ID NO: 110347 - RNA, 28 nt, Homo Sapiens
gugugggggcggcugccugugucagcca

SEQ ID NO: 110348 - RNA, 32 nt, Homo Sapiens
auuauuuguaaaucauguggcaucuauguaua

SEQ ID NO: 110349 - RNA, 32 nt, Homo Sapiens
ccucugcgcgccccuccccgucugcuagaaug

SEQ ID NO: 110350 - RNA, 32 nt, Homo Sapiens
ugcugcuagagauggauuugugucacagaaaa

SEQ ID NO: 110351 - RNA, 32 nt, Homo Sapiens
cuucccuugcugucagauuaauccacugaagu

SEQ ID NO: 110352 - RNA, 32 nt, Homo Sapiens
aguacuucgaauuauuucucuuuaagauaaaa

SEQ ID NO: 110353 - RNA, 32 nt, Homo Sapiens
aaggagacaccucaccucuccuuccccauugu

SEQ ID NO: 110354 - RNA, 32 nt, Homo Sapiens
gcggucgggccccgacgcgcgcgggucucguu

SEQ ID NO: 110355 - RNA, 32 nt, Homo Sapiens
accugcagugggaaccggcagcaucccagcca

SEQ ID NO: 110356 - RNA, 32 nt, Homo Sapiens
agugggaacauagaagaagagaguugaaaaua

SEQ ID NO: 110357 - RNA, 32 nt, Homo Sapiens
cagauacucugauaauauuacacucuaauaag

SEQ ID NO: 110358 - RNA, 32 nt, Homo Sapiens
cuuggaaaguuuucauuuuuuauauuuugcug

SEQ ID NO: 110359 - RNA, 31 nt, Homo Sapiens
ucccccugcgcaggaaaguccguuccucaag

SEQ ID NO: 110360 - RNA, 32 nt, Homo Sapiens
uccaugguguucucugugucucucuuugugcc

SEQ ID NO: 110361 - RNA, 32 nt, Homo Sapiens
aaaagaacacccaaauguguaauaugccauuu

SEQ ID NO: 110362 - RNA, 32 nt, Homo Sapiens
ccaggggccuccugggccacgggcuggagggg

SEQ ID NO: 110363 - RNA, 32 nt, Homo Sapiens
aaagucuuuaauccuggcagggauucacgggc

SEQ ID NO: 110364 - RNA, 32 nt, Homo Sapiens
acagaauauucauucagaagucgcguuucugu

SEQ ID NO: 110365 - RNA, 32 nt, Homo Sapiens
uugauuuguuuuauauaaaauaauuuauuuuu

SEQ ID NO: 110366 - RNA, 32 nt, Homo Sapiens
auaauuaccaaguuuuggccgggcacaguggc

SEQ ID NO: 110367 - RNA, 29 nt, Homo Sapiens
ucuuagauauguauguagcauauuuuaua

SEQ ID NO: 110368 - RNA, 32 nt, Homo Sapiens
ugauacgugugagagagaaauaaaaucagauu

SEQ ID NO: 110369 - RNA, 32 nt, Homo Sapiens
guucugagccccacagguggaaucccaaacca

SEQ ID NO: 110370 - RNA, 29 nt, Homo Sapiens
auauugacgcaaauagcaauuuauuuugu

SEQ ID NO: 110371 - RNA, 32 nt, Homo Sapiens
aaguuuucccaucaguugucuaucauuaaacu

SEQ ID NO: 110372 - RNA, 32 nt, Homo Sapiens
uggcuccccagcuuccucuccucggaaggcaa

SEQ ID NO: 110373 - RNA, 32 nt, Homo Sapiens
ugugccagaagagagguaaaacuauugucuaa

SEQ ID NO: 110374 - RNA, 32 nt, Homo Sapiens
cggaacaagcaucuuugcagucggaaaacaca

SEQ ID NO: 110375 - RNA, 32 nt, Homo Sapiens
uguguaguccugcuccccuacccaggcacagg

SEQ ID NO: 110376 - RNA, 32 nt, Homo Sapiens
ugcuuauauuugcucagggaagaguaggaaaa

SEQ ID NO: 110377 - RNA, 32 nt, Homo Sapiens
gaaaauagcccuaauuuacuuauucuuuaaug

SEQ ID NO: 110378 - RNA, 32 nt, Homo Sapiens
cgacgcuugcucuguuuguggggugacgggac

SEQ ID NO: 110379 - RNA, 32 nt, Homo Sapiens
ugacuuuuaaacacugcaugaaacagaggccu

SEQ ID NO: 110380 - RNA, 32 nt, Homo Sapiens
ggaaguacaagcauuuaaaauauguaguuccc

SEQ ID NO: 110381 - RNA, 32 nt, Homo Sapiens
agcugcggcgccggcuccugccgccugggccc

SEQ ID NO: 110382 - RNA, 32 nt, Homo Sapiens
gcaccucccucauggcugucugcaccugccca

SEQ ID NO: 110383 - RNA, 32 nt, Homo Sapiens
uucuuugguaugaccuguguuaacucagauuc

SEQ ID NO: 110384 - RNA, 32 nt, Homo Sapiens
gcuuccaggggccccaggcccugcuggaugug

SEQ ID NO: 110385 - RNA, 32 nt, Homo Sapiens
gcccagucugugaaagcuacagagcaccaacc

SEQ ID NO: 110386 - RNA, 32 nt, Homo Sapiens
ccggguccgggcaggugaccgcccgccucugu

SEQ ID NO: 110387 - RNA, 32 nt, Homo Sapiens
acgggcgccauugugcggcgcgcgccggagua

SEQ ID NO: 110388 - RNA, 32 nt, Homo Sapiens
gcaugaaguauuuuauagcucuuguuuuauau

SEQ ID NO: 110389 - RNA, 32 nt, Homo Sapiens
ccgaggaggaggagaagcuggcggagcuugcc

SEQ ID NO: 110390 - RNA, 32 nt, Homo Sapiens
gccacugcacugcagcccgggcgacagagaga

SEQ ID NO: 110391 - RNA, 32 nt, Homo Sapiens
guggauggcugauuuuaaccugaaauucuaaa

SEQ ID NO: 110392 - RNA, 32 nt, Homo Sapiens
cagaggaguuucuucaggaagaaccagggcag

SEQ ID NO: 110393 - RNA, 32 nt, Homo Sapiens
uuggaaugcacacagcggcugccuccugaugu

SEQ ID NO: 110394 - RNA, 32 nt, Homo Sapiens
cagagaagcaacaugcacuggcucauuuuaug

SEQ ID NO: 110395 - RNA, 31 nt, Homo Sapiens
gacaaagaaaagaaaaucaauguuaaaccau

SEQ ID NO: 110396 - RNA, 32 nt, Homo Sapiens
ccgacgaccccggccccgucccgcagcccuca

SEQ ID NO: 110397 - RNA, 32 nt, Homo Sapiens
gcgccugcugcauggagcugcccgccgcggcc

SEQ ID NO: 110398 - RNA, 32 nt, Homo Sapiens
ccucccuggcuguuaguaccuucuuucccgga

SEQ ID NO: 110399 - RNA, 32 nt, Homo Sapiens
acuuugcaugcgcgccgcggguaggacuggac

SEQ ID NO: 110400 - RNA, 32 nt, Homo Sapiens
acuuuaagaauauuuuugaagcauauguaaua

SEQ ID NO: 110401 - RNA, 32 nt, Homo Sapiens
ugauucucggaacccgaggagaagcggcgucc

SEQ ID NO: 110402 - RNA, 32 nt, Homo Sapiens
caagggaaguuucauuccauuuauacuucucc

SEQ ID NO: 110403 - RNA, 32 nt, Homo Sapiens
aaguuguuuguaaauauaauguaaucuucaug

SEQ ID NO: 110404 - RNA, 32 nt, Homo Sapiens
ucaccugccaggcuuccuuuugggcagggagg

SEQ ID NO: 110405 - RNA, 32 nt, Homo Sapiens
uguacauagcauguccuccuccccucagcuuu

SEQ ID NO: 110406 - RNA, 32 nt, Homo Sapiens
gacuuagauuuuucauuuacuuucucucucuu

SEQ ID NO: 110407 - RNA, 32 nt, Homo Sapiens
cucugucugauccuuuggucuuugcuaccagg

SEQ ID NO: 110408 - RNA, 32 nt, Homo Sapiens
auaaaacccuuaaauucaucuaguagcuguuc

SEQ ID NO: 110409 - RNA, 32 nt, Homo Sapiens
cauuaaaaauuccaaaggcauuaguuguuuuu

SEQ ID NO: 110410 - RNA, 32 nt, Homo Sapiens
aagaccucauuuucauaacauaacuacucuug

SEQ ID NO: 110411 - RNA, 32 nt, Homo Sapiens
uguuugcucaggccucuuucuuaguguugcuu

SEQ ID NO: 110412 - RNA, 32 nt, Homo Sapiens
gaugucugcuccagugauggcaggaggaugga

SEQ ID NO: 110413 - RNA, 32 nt, Homo Sapiens
uggcauccacuacugcugccuuucauuuauaa

SEQ ID NO: 110414 - RNA, 32 nt, Homo Sapiens
cauuaaaaaaauuuuauaauacacccacuacc

SEQ ID NO: 110415 - RNA, 32 nt, Homo Sapiens
ucauccucuaugucccacugucucucuccuuc

SEQ ID NO: 110416 - RNA, 32 nt, Homo Sapiens
aguggcucaugacuguaaucccaguacuuugg

SEQ ID NO: 110417 - RNA, 32 nt, Homo Sapiens
agcacccuggcuguuuucuucuggggcuuagu

SEQ ID NO: 110418 - RNA, 32 nt, Homo Sapiens
gucuguggcuuaaauaauauguuguuauuuga

SEQ ID NO: 110419 - RNA, 32 nt, Homo Sapiens
auuucauaaaggggcuacuuugaaggaguuaa

SEQ ID NO: 110420 - RNA, 32 nt, Homo Sapiens
uuuggauuucauguuucuuaauauucauucuu

SEQ ID NO: 110421 - RNA, 32 nt, Homo Sapiens
cuuggcgacgccauguuucaagggcagcgcgg

SEQ ID NO: 110422 - RNA, 32 nt, Homo Sapiens
cagagccucacagaugauguccauguuuugug

SEQ ID NO: 110423 - RNA, 32 nt, Homo Sapiens
aguccaggcuuagacugcaguuccucgcuuac

SEQ ID NO: 110424 - RNA, 32 nt, Homo Sapiens
ccucaauuuaugaccgacaauuauguucgugu

SEQ ID NO: 110425 - RNA, 32 nt, Homo Sapiens
ggagccagacagaggcugggggugauggcgga

SEQ ID NO: 110426 - RNA, 32 nt, Homo Sapiens
ugccauaaaaauacgacucugaaagcuacaug

SEQ ID NO: 110427 - RNA, 32 nt, Homo Sapiens
cucaaacuaugaagagaagauuugggaggagu

SEQ ID NO: 110428 - RNA, 32 nt, Homo Sapiens
ccuccuucuccagccucuucucccgggaacuc

SEQ ID NO: 110429 - RNA, 32 nt, Homo Sapiens
aagauacccugggcuguguccuccccugggga

SEQ ID NO: 110430 - RNA, 32 nt, Homo Sapiens
caagguacccagaauuuuuagaagccuucaga

SEQ ID NO: 110431 - RNA, 32 nt, Homo Sapiens
gccccacagcguguuccagcggacuucaccag

SEQ ID NO: 110432 - RNA, 32 nt, Homo Sapiens
accccagaauguuuguuuuaaauggagaaagc

SEQ ID NO: 110433 - RNA, 32 nt, Homo Sapiens
gaggguggggauugcaccuuccaaaucuguuu

SEQ ID NO: 110434 - RNA, 32 nt, Homo Sapiens
ugcuguugaaaagaaagaagaaggaggcggaa

SEQ ID NO: 110435 - RNA, 32 nt, Homo Sapiens
acccucuccgacccggccgccgccgccaugca

SEQ ID NO: 110436 - RNA, 32 nt, Homo Sapiens
cccgugcacucauuggccccgccccgugagac

SEQ ID NO: 110437 - RNA, 32 nt, Homo Sapiens
ucagggcuucugcuguuuuuuauuuuuaacau

SEQ ID NO: 110438 - RNA, 32 nt, Homo Sapiens
accucugccucccagguucacgccauucuccu

SEQ ID NO: 110439 - RNA, 32 nt, Homo Sapiens
gccagaagagcuugcuugauuuugguccuagg

SEQ ID NO: 110440 - RNA, 32 nt, Homo Sapiens
acaaaucuguaaguuucuuuucuguagugcaa

SEQ ID NO: 110441 - RNA, 32 nt, Homo Sapiens
agaagauauagagaccccaccaacaagaaaca

SEQ ID NO: 110442 - RNA, 32 nt, Homo Sapiens
ucuugguauuuucucuuguaucuauguaucua

SEQ ID NO: 110443 - RNA, 32 nt, Homo Sapiens
cuuacagucccuaagaggaaugccugcuggcu

SEQ ID NO: 110444 - RNA, 32 nt, Homo Sapiens
uucauaugauucacccuaauagauaccuccau

SEQ ID NO: 110445 - RNA, 32 nt, Homo Sapiens
gaacaacccaaguguccagcuacagaugaacg

SEQ ID NO: 110446 - RNA, 32 nt, Homo Sapiens
agggagugcagggcuuggggugggccuagucc

SEQ ID NO: 110447 - RNA, 32 nt, Homo Sapiens
cacagaccaucucaucucacuccaccaucacu

SEQ ID NO: 110448 - RNA, 32 nt, Homo Sapiens
aaaggucgcugcugcuuugaggaggcgugacu

SEQ ID NO: 110449 - RNA, 32 nt, Homo Sapiens
augaggugcccacuuccccuuuccaaagcaac

SEQ ID NO: 110450 - RNA, 32 nt, Homo Sapiens
cgaugccccccaguaugggaaccagcaccucc

SEQ ID NO: 110451 - RNA, 32 nt, Homo Sapiens
ugauucaaaacaucacagguauuuauguguuu

SEQ ID NO: 110452 - RNA, 32 nt, Homo Sapiens
gcgccacugcaccccagcaugagcgacagaau

SEQ ID NO: 110453 - RNA, 32 nt, Homo Sapiens
ccuccaucuucagaauaucuacuuuuucaaac

SEQ ID NO: 110454 - RNA, 32 nt, Homo Sapiens
ugggugaugguaugcaguguccuccuucaccu

SEQ ID NO: 110455 - RNA, 32 nt, Homo Sapiens
aggaugaagaagauucuucaaauaaugccgac

SEQ ID NO: 110456 - RNA, 32 nt, Homo Sapiens
cuugagauauguugcaaugcaagugcccauug

SEQ ID NO: 110457 - RNA, 32 nt, Homo Sapiens
gagggaagcucuuuucuaggagugucucaguu

SEQ ID NO: 110458 - RNA, 32 nt, Homo Sapiens
ccuuugguaauaacccuuggcacacaaauaua

SEQ ID NO: 110459 - RNA, 32 nt, Homo Sapiens
ugucccccauucucugaaugcugcuuucucug

SEQ ID NO: 110460 - RNA, 32 nt, Homo Sapiens
ccucuguugcuguuugcagcaagaguacaguu

SEQ ID NO: 110461 - RNA, 32 nt, Homo Sapiens
aacuaagacagagauguaucaaaacauggaug

SEQ ID NO: 110462 - RNA, 32 nt, Homo Sapiens
ugccuguaaucccagcacuuugggaggcuacg

SEQ ID NO: 110463 - RNA, 32 nt, Homo Sapiens
cuaaguaacuaaaauggaggcagaaaauguuu

SEQ ID NO: 110464 - RNA, 32 nt, Homo Sapiens
ccgcccacucugcggaacuggcacagcaggac

SEQ ID NO: 110465 - RNA, 32 nt, Homo Sapiens
uaaaaguaaaaauuaucagcuuuaaccuucuc

SEQ ID NO: 110466 - RNA, 32 nt, Homo Sapiens
uacauuaggcauuuggggugaucauggaaaau

SEQ ID NO: 110467 - RNA, 32 nt, Homo Sapiens
cuguggcucaaauaaugaugauuauggaauga

SEQ ID NO: 110468 - RNA, 32 nt, Homo Sapiens
aaucucauccugaauucccaugcguuguggga

SEQ ID NO: 110469 - RNA, 32 nt, Homo Sapiens
gcgcucugccgcgggggcgcgggcacagcagg

SEQ ID NO: 110470 - RNA, 32 nt, Homo Sapiens
uaaacccggcgccaggcacagaggucuccguc

SEQ ID NO: 110471 - RNA, 32 nt, Homo Sapiens
cucagacuuuaguaggaaacauggcacaguuc

SEQ ID NO: 110472 - RNA, 32 nt, Homo Sapiens
uuacugcauauguuaucaugacaacuugugag

SEQ ID NO: 110473 - RNA, 32 nt, Homo Sapiens
uucaacaguguucuuucauauuuacucugcaa

SEQ ID NO: 110474 - RNA, 32 nt, Homo Sapiens
gaggcggccacuggcucuguguccuuggggaa

SEQ ID NO: 110475 - RNA, 32 nt, Homo Sapiens
uggagaucaacuucaaaagagcuaaccccuuc

SEQ ID NO: 110476 - RNA, 32 nt, Homo Sapiens
uuucucagccuauuuuguguccuaaugauucg

SEQ ID NO: 110477 - RNA, 32 nt, Homo Sapiens
gugauccccccgccauuaucucccccuaguua

SEQ ID NO: 110478 - RNA, 32 nt, Homo Sapiens
ucuugggagagaggcacagaccugucuccugg

SEQ ID NO: 110479 - RNA, 32 nt, Homo Sapiens
gaaaggggagguggcggguggucucacuggac

SEQ ID NO: 110480 - RNA, 32 nt, Homo Sapiens
cgcggcggccgugugggccggaggcugccugc

SEQ ID NO: 110481 - RNA, 32 nt, Homo Sapiens
gcauaaagcugugcauuggaaacuaugugacu

SEQ ID NO: 110482 - RNA, 32 nt, Homo Sapiens
ugguuuuggccauaccguauuauaccauauac

SEQ ID NO: 110483 - RNA, 32 nt, Homo Sapiens
acucgucgcggccgaggcgcacgcgguccgcg

SEQ ID NO: 110484 - RNA, 31 nt, Homo Sapiens
cugaauggcaagucucucagacucuuggucu

SEQ ID NO: 110485 - RNA, 32 nt, Homo Sapiens
ucaagcaauuuaacuuuuucuuguaaugucau

SEQ ID NO: 110486 - RNA, 32 nt, Homo Sapiens
gcaccccugccaguccugcucugccgccugcc

SEQ ID NO: 110487 - RNA, 32 nt, Homo Sapiens
caugaaauucagaacacacuauuaagcagggc

SEQ ID NO: 110488 - RNA, 32 nt, Homo Sapiens
gucauuuguuuuuauuacaugugauuauuuua

SEQ ID NO: 110489 - RNA, 32 nt, Homo Sapiens
gccccgagguugcuccucuccgaggucucccg

SEQ ID NO: 110490 - RNA, 32 nt, Homo Sapiens
gccugucucugaauuguucccucccccgcaau

SEQ ID NO: 110491 - RNA, 32 nt, Homo Sapiens
acuaaacugugcuaguacuaaaagaaaacagg

SEQ ID NO: 110492 - RNA, 32 nt, Homo Sapiens
acuggccuuucugccaauaaaguugcauggua

SEQ ID NO: 110493 - RNA, 32 nt, Homo Sapiens
gagggagaugacuugagugguuggcuuuuauc

SEQ ID NO: 110494 - RNA, 32 nt, Homo Sapiens
agcaggcugcacugaggaccgugagcuccagg

SEQ ID NO: 110495 - RNA, 32 nt, Homo Sapiens
caccacggcacuacaaccuugguggcacagug

SEQ ID NO: 110496 - RNA, 32 nt, Homo Sapiens
uagccugagcuccccuggccccaggugccucc

SEQ ID NO: 110497 - RNA, 32 nt, Homo Sapiens
auuauuuuuuaaaugcaguggacuuuucaaaa

SEQ ID NO: 110498 - RNA, 32 nt, Homo Sapiens
uugaggaccgcuuauuccacuuuaaggacagc

SEQ ID NO: 110499 - RNA, 32 nt, Homo Sapiens
cccagucacguuccucaugcuuacuugaucua

SEQ ID NO: 110500 - RNA, 32 nt, Homo Sapiens
gggcaagagucuuuuaagcggaacuucaauuc

SEQ ID NO: 110501 - RNA, 32 nt, Homo Sapiens
aagcagcagcgggugugcccaggcacccagau

SEQ ID NO: 110502 - RNA, 32 nt, Homo Sapiens
cugaccggaaccugggcggugcaugcacugug

SEQ ID NO: 110503 - RNA, 32 nt, Homo Sapiens
gaacccagauacuacuaauuuuuagauacucc

SEQ ID NO: 110504 - RNA, 32 nt, Homo Sapiens
cggcgcugggacccgguagcccccggagaaca

SEQ ID NO: 110505 - RNA, 32 nt, Homo Sapiens
ugaccuggccccagugcugcguccuuaucagc

SEQ ID NO: 110506 - RNA, 32 nt, Homo Sapiens
uaucuaauauuuugauuguuuucuuaacuuuc

SEQ ID NO: 110507 - RNA, 32 nt, Homo Sapiens
uauggagaaagaaaccugaggagauugaaguu

SEQ ID NO: 110508 - RNA, 32 nt, Homo Sapiens
gaacggagcgaauaauauaaaaaaggauuucc

SEQ ID NO: 110509 - RNA, 32 nt, Homo Sapiens
guuagcagucaguaccacccccgccccacaau

SEQ ID NO: 110510 - RNA, 32 nt, Homo Sapiens
cgcgugcagcggggugggugcccugguccgcg

SEQ ID NO: 110511 - RNA, 32 nt, Homo Sapiens
uuauguuugcacuaagauuugcugggaguggu

SEQ ID NO: 110512 - RNA, 32 nt, Homo Sapiens
ggcccagcccccagcccccagccccgcacugc

SEQ ID NO: 110513 - RNA, 32 nt, Homo Sapiens
uacccaaaauucaaaugugggucucucugcuu

SEQ ID NO: 110514 - RNA, 32 nt, Homo Sapiens
aaaaaguuucuuccucaugaugcuaauaguuu

SEQ ID NO: 110515 - RNA, 32 nt, Homo Sapiens
guuaagagaaugcuuugaaagcuuauuugaua

SEQ ID NO: 110516 - RNA, 32 nt, Homo Sapiens
gguccugcuacauugcccaggcuggucucaaa

SEQ ID NO: 110517 - RNA, 32 nt, Homo Sapiens
agacagucaucuccugaagagaugccgaacaa

SEQ ID NO: 110518 - RNA, 32 nt, Homo Sapiens
uacagaugcgugccaccacaccugacuaaucu

SEQ ID NO: 110519 - RNA, 32 nt, Homo Sapiens
cacuuugcacugccacaggggugacgauggaa

SEQ ID NO: 110520 - RNA, 32 nt, Homo Sapiens
aggaggccgccggucccaacccggcccaggag

SEQ ID NO: 110521 - RNA, 32 nt, Homo Sapiens
aauuauuuuuauuuucucccugcucuguauug

SEQ ID NO: 110522 - RNA, 32 nt, Homo Sapiens
acugggagcugauguggugcuucaccuacaag

SEQ ID NO: 110523 - RNA, 32 nt, Homo Sapiens
gcucgcccguccggcgcacgcuccgccuccgu

SEQ ID NO: 110524 - RNA, 32 nt, Homo Sapiens
cccagagacagccuggcagagaagccauacug

SEQ ID NO: 110525 - RNA, 32 nt, Homo Sapiens
ggcuuuaaaauguuuucuugcauaaaauucaa

SEQ ID NO: 110526 - RNA, 32 nt, Homo Sapiens
caggcagcgugcuggccccugcggcugcguua

SEQ ID NO: 110527 - RNA, 32 nt, Homo Sapiens
ccauguucuuccugccgaggugccagggggag

SEQ ID NO: 110528 - RNA, 32 nt, Homo Sapiens
cuaacaguucccuccucaaaggccaccuuggu

SEQ ID NO: 110529 - RNA, 32 nt, Homo Sapiens
uuugaaaagagauaaacugacugcuugauaau

SEQ ID NO: 110530 - RNA, 32 nt, Homo Sapiens
ucucaauauuccagagaagaggaugaguguga

SEQ ID NO: 110531 - RNA, 31 nt, Homo Sapiens
cuggggaacauaugagaccccugccaucuca

SEQ ID NO: 110532 - RNA, 32 nt, Homo Sapiens
cacguucacaccugguggcaggcuucacugua

SEQ ID NO: 110533 - RNA, 32 nt, Homo Sapiens
ugaugugggcccagcccugaagcuggucuaca

SEQ ID NO: 110534 - RNA, 32 nt, Homo Sapiens
aguuuugcugaauaaucacgugugaaucgagg

SEQ ID NO: 110535 - RNA, 32 nt, Homo Sapiens
gugcagagccugguugucacccauuaaaggau

SEQ ID NO: 110536 - RNA, 32 nt, Homo Sapiens
cagagcggacugacgcuccuccccuuucucuu

SEQ ID NO: 110537 - RNA, 32 nt, Homo Sapiens
gcuaugaccugccgcccugaccaggauagggc

SEQ ID NO: 110538 - RNA, 32 nt, Homo Sapiens
cuuuaaauaaggaaaccaauauaaucucaugu

SEQ ID NO: 110539 - RNA, 32 nt, Homo Sapiens
gccucaugccaaggcgggaggugaggcugcac

SEQ ID NO: 110540 - RNA, 32 nt, Homo Sapiens
cauuucuccuucucuauaaauagugcagaagu

SEQ ID NO: 110541 - RNA, 32 nt, Homo Sapiens
cucagaugguucaggagaaauaugcguguguc

SEQ ID NO: 110542 - RNA, 32 nt, Homo Sapiens
uauacccaaguagauuuacauguauaugaagc

SEQ ID NO: 110543 - RNA, 32 nt, Homo Sapiens
caaaugucaguuuccucuccuguccguguuug

SEQ ID NO: 110544 - RNA, 32 nt, Homo Sapiens
gaugaugaugguuuuuuuuauugggcugaguu

SEQ ID NO: 110545 - RNA, 32 nt, Homo Sapiens
gacuugaacaacauuauaaggcaaauugaccu

SEQ ID NO: 110546 - RNA, 32 nt, Homo Sapiens
ucuuuuuuguuuuaauggagaauagaaaauaa

SEQ ID NO: 110547 - RNA, 32 nt, Homo Sapiens
cugccgcccgggcuugcgcugggccaggcgcg

SEQ ID NO: 110548 - RNA, 32 nt, Homo Sapiens
cugauucagaagcaucacuucuuggauaacua

SEQ ID NO: 110549 - RNA, 32 nt, Homo Sapiens
auggguucuguuucuuuuuuuaagaauuaaaa

SEQ ID NO: 110550 - RNA, 32 nt, Homo Sapiens
aaaaugaaacaaaacaaacaaacaagcaaaca

SEQ ID NO: 110551 - RNA, 32 nt, Homo Sapiens
aacaggacuggcaccugcugcagagguuauac

SEQ ID NO: 110552 - RNA, 32 nt, Homo Sapiens
ccuugccaugcccacaccuacgcccuccccuc

SEQ ID NO: 110553 - RNA, 32 nt, Homo Sapiens
ccaagcaaucccaaccuggugcuaggucauuu

SEQ ID NO: 110554 - RNA, 32 nt, Homo Sapiens
uuaagagagaggggccccggccugcucucccu

SEQ ID NO: 110555 - RNA, 32 nt, Homo Sapiens
caggacuccagccuggccgccggcgcccgcag

SEQ ID NO: 110556 - RNA, 32 nt, Homo Sapiens
cgugcauugguaguaucaacaaauuugcaaua

SEQ ID NO: 110557 - RNA, 31 nt, Homo Sapiens
gaccuacccacuguacaguccacuucacagg

SEQ ID NO: 110558 - RNA, 32 nt, Homo Sapiens
uaaaauuguaaaaauuguugaguucuguuuaa

SEQ ID NO: 110559 - RNA, 32 nt, Homo Sapiens
gcccagcacccgcuccaccccagccagcuggg

SEQ ID NO: 110560 - RNA, 32 nt, Homo Sapiens
uucuucuugacagcugacggagccuugaaauu

SEQ ID NO: 110561 - RNA, 32 nt, Homo Sapiens
guuuugauucaggcuuuuuuuugguuucauuu

SEQ ID NO: 110562 - RNA, 32 nt, Homo Sapiens
cugggagaaggggcuccugggugucuguauac

SEQ ID NO: 110563 - RNA, 32 nt, Homo Sapiens
acaagcggggccugggucccccauggaugaaa

SEQ ID NO: 110564 - RNA, 32 nt, Homo Sapiens
ccggagcgccgaggcccggccauggccaccac

SEQ ID NO: 110565 - RNA, 32 nt, Homo Sapiens
gacaaccuugucccaaccaaucagcaggaugu

SEQ ID NO: 110566 - RNA, 32 nt, Homo Sapiens
cuucucccccauccccuucucuggggggccca

SEQ ID NO: 110567 - RNA, 32 nt, Homo Sapiens
aaaacagugacgagacagauaguuagagcaga

SEQ ID NO: 110568 - RNA, 32 nt, Homo Sapiens
ugaguagaaaauuuuaggucaguuuugggugc

SEQ ID NO: 110569 - RNA, 32 nt, Homo Sapiens
uucccacggacgggggcucgggcgcggacuaa

SEQ ID NO: 110570 - RNA, 32 nt, Homo Sapiens
ugugguuuccgucccuuggggaccacaggcau

SEQ ID NO: 110571 - RNA, 32 nt, Homo Sapiens
ggcccacucugggggccuggaaaugcugcagu

SEQ ID NO: 110572 - RNA, 32 nt, Homo Sapiens
uguguugugugaaauaaauuggacuugaaaca

SEQ ID NO: 110573 - RNA, 32 nt, Homo Sapiens
auauaccuaaucuuguuuacauuaacauuucu

SEQ ID NO: 110574 - RNA, 32 nt, Homo Sapiens
aggcgcggcgcaggcugcugcaggcccaggug

SEQ ID NO: 110575 - RNA, 32 nt, Homo Sapiens
cuugaagaacaagaaaguuguucuugugauua

SEQ ID NO: 110576 - RNA, 32 nt, Homo Sapiens
cacagccccagccccagccccuggagauugcu

SEQ ID NO: 110577 - RNA, 32 nt, Homo Sapiens
uacagacgcucgccgacaaccuggccggcggc

SEQ ID NO: 110578 - RNA, 32 nt, Homo Sapiens
gaacgggacaucuggaaagcaggcccaggaau

SEQ ID NO: 110579 - RNA, 32 nt, Homo Sapiens
cauggagaauaaacgcgggaaaaaagaucuua

SEQ ID NO: 110580 - RNA, 32 nt, Homo Sapiens
ucuucuguucccacccacuucugauaaguacc

SEQ ID NO: 110581 - RNA, 32 nt, Homo Sapiens
uggcuuuggaaugguagcaaaagccuuuccug

SEQ ID NO: 110582 - RNA, 32 nt, Homo Sapiens
gaaaggaagcuacuguccucacacuccuggau

SEQ ID NO: 110583 - RNA, 32 nt, Homo Sapiens
cccaaagggagaggaguggaagaccuucuggu

SEQ ID NO: 110584 - RNA, 32 nt, Homo Sapiens
agaaaagagcuccagaaaucugcacaggguuc

SEQ ID NO: 110585 - RNA, 32 nt, Homo Sapiens
gcuugcaaggaccaagggaggccagcaggugg

SEQ ID NO: 110586 - RNA, 32 nt, Homo Sapiens
cuuugaccuucuaaguuuugauuuuaaagaaa

SEQ ID NO: 110587 - RNA, 32 nt, Homo Sapiens
aacccaacucgacccucccuccccucaccccc

SEQ ID NO: 110588 - RNA, 32 nt, Homo Sapiens
cuaucugagaaucauaaugaaaaguuacuaca

SEQ ID NO: 110589 - RNA, 32 nt, Homo Sapiens
auccagaaaacaaaaaguaggauacuuacaau

SEQ ID NO: 110590 - RNA, 32 nt, Homo Sapiens
cagucguuuaaauaaacuuguaaauacauuga

SEQ ID NO: 110591 - RNA, 32 nt, Homo Sapiens
cauccuaucuucuggccuccauguuuucugcu

SEQ ID NO: 110592 - RNA, 30 nt, Homo Sapiens
uuaugcagcuugcacacccaucaucuuuaa

SEQ ID NO: 110593 - RNA, 32 nt, Homo Sapiens
aauuaaaacaaugcauauuuuacuacaguaca

SEQ ID NO: 110594 - RNA, 32 nt, Homo Sapiens
acgaauccaaucauauccuugugcagcugaac

SEQ ID NO: 110595 - RNA, 32 nt, Homo Sapiens
cugcccgcgaguuuccuccgaguucccaguug

SEQ ID NO: 110596 - RNA, 32 nt, Homo Sapiens
auaacuuuucuuuuucccaggccagagaauuc

SEQ ID NO: 110597 - RNA, 32 nt, Homo Sapiens
ccucuguggugcacagcccaccccccagccau

SEQ ID NO: 110598 - RNA, 32 nt, Homo Sapiens
agcuaggaaugggagauggcaacaaucccugu

SEQ ID NO: 110599 - RNA, 32 nt, Homo Sapiens
ggauaagccuguuuuaaccugcuaugaugggu

SEQ ID NO: 110600 - RNA, 32 nt, Homo Sapiens
aacuuccuuucugugccucaucaugcaaggau

SEQ ID NO: 110601 - RNA, 32 nt, Homo Sapiens
uacaauucucagacaaaugaaauuggcuugau

SEQ ID NO: 110602 - RNA, 32 nt, Homo Sapiens
gaagguuagagugaaaaaugacaguaugagga

SEQ ID NO: 110603 - RNA, 32 nt, Homo Sapiens
aacccaaaguaccccagucgaccuaagucagu

SEQ ID NO: 110604 - RNA, 32 nt, Homo Sapiens
cuguggguuuuuucuuuuuucuuuuaccagua

SEQ ID NO: 110605 - RNA, 32 nt, Homo Sapiens
aacugugcuuuaaauuauauuuucauauguuu

SEQ ID NO: 110606 - RNA, 32 nt, Homo Sapiens
aaaaaaaaauaauuauacuacugauccucuuu

SEQ ID NO: 110607 - RNA, 31 nt, Homo Sapiens
acuccccagccccaggugggccuugugcaca

SEQ ID NO: 110608 - RNA, 32 nt, Homo Sapiens
ugccccaggucuuuggguacaggcuugguggg

SEQ ID NO: 110609 - RNA, 32 nt, Homo Sapiens
uacagugaacuguguccauuuaagcuguauuc

SEQ ID NO: 110610 - RNA, 32 nt, Homo Sapiens
accagcuaagggaaaauaaaauuuuggaggaa

SEQ ID NO: 110611 - RNA, 32 nt, Homo Sapiens
aauaagagaaauagggugaauaccgucuaccc

SEQ ID NO: 110612 - RNA, 32 nt, Homo Sapiens
ggcggcuugggcagcccgcgggcgccucaggu

SEQ ID NO: 110613 - RNA, 32 nt, Homo Sapiens
aguggugaacucugaagauguuuccuggugaa

SEQ ID NO: 110614 - RNA, 32 nt, Homo Sapiens
gucaaaauauauuuuaauuaucuauugcuaaa

SEQ ID NO: 110615 - RNA, 32 nt, Homo Sapiens
aucuccugauauuugauugcuuucucaguaug

SEQ ID NO: 110616 - RNA, 32 nt, Homo Sapiens
uugugucgccauggcggcggcagcggcgacga

SEQ ID NO: 110617 - RNA, 32 nt, Homo Sapiens
cuuggauuuaagucaagguacuguauagaagu

SEQ ID NO: 110618 - RNA, 32 nt, Homo Sapiens
uaagcuauugcagcacuuucugaggcuuucac

SEQ ID NO: 110619 - RNA, 32 nt, Homo Sapiens
gaaaacaguauuuuccaaacuaccuuccaguu

SEQ ID NO: 110620 - RNA, 32 nt, Homo Sapiens
aaagcugaacagaggcggccguggccuuggcc

SEQ ID NO: 110621 - RNA, 32 nt, Homo Sapiens
cagcaagcggcuaccccccgaucugcaaaagg

SEQ ID NO: 110622 - RNA, 32 nt, Homo Sapiens
aguccaccaaggggacugcagcuccuagaaca

SEQ ID NO: 110623 - RNA, 32 nt, Homo Sapiens
uaauguuucuuacaucuuguuuuuacucauuu

SEQ ID NO: 110624 - RNA, 32 nt, Homo Sapiens
cuguugggggugagcgccgcgcggcugcagca

SEQ ID NO: 110625 - RNA, 32 nt, Homo Sapiens
uauucuuuuaaauaaacauuuacaauguuucc

SEQ ID NO: 110626 - RNA, 28 nt, Homo Sapiens
agaacaaaagauuaauugugaauuagcg

SEQ ID NO: 110627 - RNA, 32 nt, Homo Sapiens
uuccagcccugcgccugcuccggagcaccggg

SEQ ID NO: 110628 - RNA, 32 nt, Homo Sapiens
uccccagcugucauccauuugcuaucuccaac

SEQ ID NO: 110629 - RNA, 32 nt, Homo Sapiens
uauuuuuuguacuagucaguuuauugacacua

SEQ ID NO: 110630 - RNA, 32 nt, Homo Sapiens
ugcuauguauauguacuuuucuuaaaaugcca

SEQ ID NO: 110631 - RNA, 32 nt, Homo Sapiens
ggcuaaugcaagaucuugcuggcuugccacgu

SEQ ID NO: 110632 - RNA, 32 nt, Homo Sapiens
gcggcggcggcggcguuugaguggaggaagau

SEQ ID NO: 110633 - RNA, 32 nt, Homo Sapiens
ccuaaggcucaccgugaaaaucauuacguggc

SEQ ID NO: 110634 - RNA, 30 nt, Homo Sapiens
aagaugggcaaaagacgggaagcaagaugu

SEQ ID NO: 110635 - RNA, 32 nt, Homo Sapiens
cccccuguccugcaugagacauugggcgcaga

SEQ ID NO: 110636 - RNA, 32 nt, Homo Sapiens
aucuaggcaguagcaguuacuuggcagcuagg

SEQ ID NO: 110637 - RNA, 32 nt, Homo Sapiens
gcuuuuauuaauuuauaauuaaaauaacuugu

SEQ ID NO: 110638 - RNA, 32 nt, Homo Sapiens
uguguauucuaaauaaaaugcaaaugucaaga

SEQ ID NO: 110639 - RNA, 32 nt, Homo Sapiens
ggaauacuccauguguauuggcacauaucaaa

SEQ ID NO: 110640 - RNA, 32 nt, Homo Sapiens
cucucucugcccgcguccguccgugaaauugc

SEQ ID NO: 110641 - RNA, 32 nt, Homo Sapiens
guccggcuccccagcccuuccuuagggccagg

SEQ ID NO: 110642 - RNA, 32 nt, Homo Sapiens
ggguauuuuaguacuuuuuuuuauauuaaaag

SEQ ID NO: 110643 - RNA, 32 nt, Homo Sapiens
gggaagagacaaaguggguguguggccucccu

SEQ ID NO: 110644 - RNA, 28 nt, Homo Sapiens
ugacuaguggcuaccauauuagacagug

SEQ ID NO: 110645 - RNA, 32 nt, Homo Sapiens
uggaugugagugaaaugaaaugucuggaauuu

SEQ ID NO: 110646 - RNA, 32 nt, Homo Sapiens
aggggcggggcuccugugcugcugcgcgcgcu

SEQ ID NO: 110647 - RNA, 32 nt, Homo Sapiens
aagagccacaggagccaauuauagcaccugac

SEQ ID NO: 110648 - RNA, 32 nt, Homo Sapiens
uugcaaccuggcgcugcauccgggccacuguc

SEQ ID NO: 110649 - RNA, 32 nt, Homo Sapiens
aguggcaaauuacauguagagugucuccuucc

SEQ ID NO: 110650 - RNA, 32 nt, Homo Sapiens
guggcgcugccagccuggcugcuacugcccac

SEQ ID NO: 110651 - RNA, 32 nt, Homo Sapiens
ggaacgacgcagagcggccguccucaaggugc

SEQ ID NO: 110652 - RNA, 31 nt, Homo Sapiens
ccagcucauggcagccaauguaggcccaaaa

SEQ ID NO: 110653 - RNA, 32 nt, Homo Sapiens
aaaagagcguggcuuauucaucuuucaaucuu

SEQ ID NO: 110654 - RNA, 32 nt, Homo Sapiens
acugccauauuuucuuuuaacuggaaauuuuu

SEQ ID NO: 110655 - RNA, 32 nt, Homo Sapiens
acucuaaguccucccucccccuucuccuucac

SEQ ID NO: 110656 - RNA, 32 nt, Homo Sapiens
ccgccagagucccagacaccgguuuuccuaga

SEQ ID NO: 110657 - RNA, 32 nt, Homo Sapiens
ccagaaguagauacuauaaaucuuguuauuuu

SEQ ID NO: 110658 - RNA, 32 nt, Homo Sapiens
uuuuuugcaacuuugggagauuuuugagggga

SEQ ID NO: 110659 - RNA, 32 nt, Homo Sapiens
cccaggcacugugagggcuucuccagggggca

SEQ ID NO: 110660 - RNA, 32 nt, Homo Sapiens
cucccagcucuuugcugucuccgguugucucu

SEQ ID NO: 110661 - RNA, 32 nt, Homo Sapiens
cccucuccccuguccugauggcacucuguugu

SEQ ID NO: 110662 - RNA, 32 nt, Homo Sapiens
accguggaggaggaaggcaagaggggguggag

SEQ ID NO: 110663 - RNA, 32 nt, Homo Sapiens
ugauuuaugucauauugauuguuuuuaauaag

SEQ ID NO: 110664 - RNA, 32 nt, Homo Sapiens
gagguugggaaaaucuggagagcugagaguug

SEQ ID NO: 110665 - RNA, 32 nt, Homo Sapiens
guguucugaagauaaaugccaaaaauuucagc

SEQ ID NO: 110666 - RNA, 32 nt, Homo Sapiens
caggaaccccauccuugcuucaucucaguucu

SEQ ID NO: 110667 - RNA, 32 nt, Homo Sapiens
ggaucauuacccaaaaaucuggcagggagcug

SEQ ID NO: 110668 - RNA, 32 nt, Homo Sapiens
auucuuccaaauauuuggaacacucuuagaau

SEQ ID NO: 110669 - RNA, 32 nt, Homo Sapiens
cccagccagcccugcaccccagagcucccugc

SEQ ID NO: 110670 - RNA, 32 nt, Homo Sapiens
aucugugcccuucauuggggacauuccucuag

SEQ ID NO: 110671 - RNA, 32 nt, Homo Sapiens
gaaggaaacaacauuuucuugaaaggggaaac

SEQ ID NO: 110672 - RNA, 32 nt, Homo Sapiens
uucccgguuucacuccuucucagccugggcuc

SEQ ID NO: 110673 - RNA, 32 nt, Homo Sapiens
agaccuugucuccuuagaaaugccccagaaau

SEQ ID NO: 110674 - RNA, 32 nt, Homo Sapiens
aguuuuuuacccaaucccccgauuuuguagga

SEQ ID NO: 110675 - RNA, 26 nt, Homo Sapiens
cauggacgcucgccgcgugccgcaga

SEQ ID NO: 110676 - RNA, 32 nt, Homo Sapiens
aacuuuugaacaaaagcaugcuaaagaaugug

SEQ ID NO: 110677 - RNA, 32 nt, Homo Sapiens
uuuuauauguuaacgucauauuauguuaaugu

SEQ ID NO: 110678 - RNA, 32 nt, Homo Sapiens
gcgcgugcgcgcgcucugcuacgucaucagug

SEQ ID NO: 110679 - RNA, 32 nt, Homo Sapiens
uauuuguuaguuucguuugagaucucaaaugu

SEQ ID NO: 110680 - RNA, 32 nt, Homo Sapiens
aaacuguuugcccuucacaaguaguucuucuu

SEQ ID NO: 110681 - RNA, 32 nt, Homo Sapiens
ggucucccacccaacuccacccgguccucuga

SEQ ID NO: 110682 - RNA, 32 nt, Homo Sapiens
gcgaggcccgcccuucgcgaggucccagagaa

SEQ ID NO: 110683 - RNA, 32 nt, Homo Sapiens
uguggggagauguaauaaaacaauauuaacuu

SEQ ID NO: 110684 - RNA, 32 nt, Homo Sapiens
ucauagaacauugagaggccccugccacuuuc

SEQ ID NO: 110685 - RNA, 32 nt, Homo Sapiens
cguccacgagcuauauaucuauauauuucucu

SEQ ID NO: 110686 - RNA, 32 nt, Homo Sapiens
aaaccugagagaaugcuagucauaacuguacu

SEQ ID NO: 110687 - RNA, 30 nt, Homo Sapiens
augaggaucacacagaccaagaguaucuuu

SEQ ID NO: 110688 - RNA, 31 nt, Homo Sapiens
guaacuauggagaauauggcggaggaggagc

SEQ ID NO: 110689 - RNA, 32 nt, Homo Sapiens
augcugagauucaaauucagggcauccaacau

SEQ ID NO: 110690 - RNA, 32 nt, Homo Sapiens
uggggggacggcuccacccagccugcgccacu

SEQ ID NO: 110691 - RNA, 29 nt, Homo Sapiens
uuggcuguagguuuuuauuuucuacaaga

SEQ ID NO: 110692 - RNA, 32 nt, Homo Sapiens
ugaagccacucugggcggccagccagcccugg

SEQ ID NO: 110693 - RNA, 32 nt, Homo Sapiens
aacagccgcccaagccgccuuccggcucgcgg

SEQ ID NO: 110694 - RNA, 32 nt, Homo Sapiens
aauguuuguaaauguacaaguaucaaaguucu

SEQ ID NO: 110695 - RNA, 30 nt, Homo Sapiens
ugaaucuuccaggcgccgggucccaaaugu

SEQ ID NO: 110696 - RNA, 32 nt, Homo Sapiens
uauccaggggcaacagauuuucacagcucauc

SEQ ID NO: 110697 - RNA, 32 nt, Homo Sapiens
cacaaguugaauugauaguauuuuuucauuaa

SEQ ID NO: 110698 - RNA, 32 nt, Homo Sapiens
ggagagaguuugauggagauacaacaggaacu

SEQ ID NO: 110699 - RNA, 32 nt, Homo Sapiens
gccucuaucugaaaaacaaauggaaaucuuuu

SEQ ID NO: 110700 - RNA, 32 nt, Homo Sapiens
uuugcuaaaucuuuaaauucuguuaagauccu

SEQ ID NO: 110701 - RNA, 32 nt, Homo Sapiens
guuugaaguauuuucauguuuggauuuuaaua

SEQ ID NO: 110702 - RNA, 32 nt, Homo Sapiens
aucuccugccagcccagcuggccuggccccca

SEQ ID NO: 110703 - RNA, 32 nt, Homo Sapiens
acacccgggcgcccagcaucguucuaauugcc

SEQ ID NO: 110704 - RNA, 32 nt, Homo Sapiens
auucuguucucccagagcugcaccugccucgc

SEQ ID NO: 110705 - RNA, 32 nt, Homo Sapiens
ggugcuauguggagcaggugggaugccaaggc

SEQ ID NO: 110706 - RNA, 32 nt, Homo Sapiens
gcccucagucuccucaguucacuguuuccccc

SEQ ID NO: 110707 - RNA, 32 nt, Homo Sapiens
cagccccucagucucuucuccuuccccugccu

SEQ ID NO: 110708 - RNA, 32 nt, Homo Sapiens
gagcggcucgccauggcuggcccgcagcagca

SEQ ID NO: 110709 - RNA, 32 nt, Homo Sapiens
aggcccccacccaagccugcgucagcggaacu

SEQ ID NO: 110710 - RNA, 32 nt, Homo Sapiens
uucaagcagggccccuccuuccuccugucuuu

SEQ ID NO: 110711 - RNA, 32 nt, Homo Sapiens
aauuaaaugaaauggauccaucaucaaagucu

SEQ ID NO: 110712 - RNA, 32 nt, Homo Sapiens
cacaucgugucugaagagauggcaccagggaa

SEQ ID NO: 110713 - RNA, 32 nt, Homo Sapiens
uccccccgcugcccccucccccgagcaucgag

SEQ ID NO: 110714 - RNA, 32 nt, Homo Sapiens
gauucuuugucaacauuaguaacugauacaua

SEQ ID NO: 110715 - RNA, 32 nt, Homo Sapiens
ccucuggcauguuuuucuuuguguauuuccug

SEQ ID NO: 110716 - RNA, 32 nt, Homo Sapiens
uucagcaccacacacacgcacacacacacaca

SEQ ID NO: 110717 - RNA, 32 nt, Homo Sapiens
ucuucauguuuccuucuuguuauuuaugcuau

SEQ ID NO: 110718 - RNA, 32 nt, Homo Sapiens
gccccugaaugggaacucuaggucccaaggcc

SEQ ID NO: 110719 - RNA, 29 nt, Homo Sapiens
auuccuucuauccaugugccaaaugggug

SEQ ID NO: 110720 - RNA, 32 nt, Homo Sapiens
ugccacuuuugcauaaauaaaacucuagacaa

SEQ ID NO: 110721 - RNA, 32 nt, Homo Sapiens
caaaaguuucucuuuuucaaaacauuuuacuu

SEQ ID NO: 110722 - RNA, 32 nt, Homo Sapiens
ccuggcuuucccuuggccuuccucagcuucac

SEQ ID NO: 110723 - RNA, 32 nt, Homo Sapiens
uuuaaaguuaaauaucacuagaaaaaucagug

SEQ ID NO: 110724 - RNA, 32 nt, Homo Sapiens
ggaggcugaggcaggagaagggcgugaacccg

SEQ ID NO: 110725 - RNA, 32 nt, Homo Sapiens
aagccgcgagcaggugugaaugagcccaggga

SEQ ID NO: 110726 - RNA, 32 nt, Homo Sapiens
uuaacaccuaccucacaggguuguugugagga

SEQ ID NO: 110727 - RNA, 32 nt, Homo Sapiens
gucuaccccacuuuaucacauguacagaucac

SEQ ID NO: 110728 - RNA, 32 nt, Homo Sapiens
cccuccgccaggacccgcacagauaaacucau

SEQ ID NO: 110729 - RNA, 32 nt, Homo Sapiens
gugugaugucauuuuucccccugcuucagguu

SEQ ID NO: 110730 - RNA, 32 nt, Homo Sapiens
acuacaaaaagagaagguaauuccuagggaag

SEQ ID NO: 110731 - RNA, 32 nt, Homo Sapiens
agcaccuucccuuuuuucagccaacugcucgc

SEQ ID NO: 110732 - RNA, 32 nt, Homo Sapiens
gagcucuuggggucccuggcgaggcagacgcu

SEQ ID NO: 110733 - RNA, 32 nt, Homo Sapiens
gcaaucagagaaaaaagauaacugagguccua

SEQ ID NO: 110734 - RNA, 32 nt, Homo Sapiens
ucuuaauuugaauaauaaaaccagaggaaaug

SEQ ID NO: 110735 - RNA, 32 nt, Homo Sapiens
caggaaagauuagaaaaggaacccaaaaaacc

SEQ ID NO: 110736 - RNA, 32 nt, Homo Sapiens
agauaaauagaaguacagugaggucuauagcc

SEQ ID NO: 110737 - RNA, 29 nt, Homo Sapiens
gccacucggggacagaugggcacaaggga

SEQ ID NO: 110738 - RNA, 32 nt, Homo Sapiens
uccacccucaugaacacagggauuggggaggg

SEQ ID NO: 110739 - RNA, 32 nt, Homo Sapiens
ugauugauuuaguugugauggagucucgcugu

SEQ ID NO: 110740 - RNA, 32 nt, Homo Sapiens
cugcugccucagcuggacccagggcuuugaca

SEQ ID NO: 110741 - RNA, 32 nt, Homo Sapiens
ccggacgcaccucaccucgcagucuccucacu

SEQ ID NO: 110742 - RNA, 32 nt, Homo Sapiens
cuuugaagauaguaacuguagauggaaaaacu

SEQ ID NO: 110743 - RNA, 32 nt, Homo Sapiens
gcuucggcagaauggagagcugaggugucccu

SEQ ID NO: 110744 - RNA, 32 nt, Homo Sapiens
ccgcgccgcgcgcagugucugcagugccggag

SEQ ID NO: 110745 - RNA, 32 nt, Homo Sapiens
ucuuaaaucccgaagaaaaauauaaguguucc

SEQ ID NO: 110746 - RNA, 32 nt, Homo Sapiens
caagccagcugagaaccuaggaaggaguagua

SEQ ID NO: 110747 - RNA, 32 nt, Homo Sapiens
uucacaugcacuaaaaaaccaggcaaacaucc

SEQ ID NO: 110748 - RNA, 32 nt, Homo Sapiens
ggggaccagcucugagugggguugcugccugu

SEQ ID NO: 110749 - RNA, 30 nt, Homo Sapiens
aaccugggagguggagguugcgagaucaca

SEQ ID NO: 110750 - RNA, 32 nt, Homo Sapiens
ccucccgcgcucuggccaccccggcgggaaaa

SEQ ID NO: 110751 - RNA, 32 nt, Homo Sapiens
agauuuucaaggaugcucuucauccagcugaa

SEQ ID NO: 110752 - RNA, 32 nt, Homo Sapiens
ugccuguuuuaaauaacauacauauuaacaau

SEQ ID NO: 110753 - RNA, 32 nt, Homo Sapiens
ccuccgcgagugcauugcucacgccaagcuuu

SEQ ID NO: 110754 - RNA, 32 nt, Homo Sapiens
aguaccugccccaccaggacagccuggcucag

SEQ ID NO: 110755 - RNA, 32 nt, Homo Sapiens
uuguuguggaaugguuauuccagucaucucuu

SEQ ID NO: 110756 - RNA, 32 nt, Homo Sapiens
ugugggggcuagaaaaaacauaaaaugaggca

SEQ ID NO: 110757 - RNA, 32 nt, Homo Sapiens
aucugccuuuaccuacauaggcaaauuggaaa

SEQ ID NO: 110758 - RNA, 32 nt, Homo Sapiens
cuguccuuuuucuccugcuccuuguuuuccca

SEQ ID NO: 110759 - RNA, 32 nt, Homo Sapiens
accuuuaaaaauacacuaauaaagauuauugu

SEQ ID NO: 110760 - RNA, 32 nt, Homo Sapiens
auucugcuuuguuuuauuuucuguaaauuuug

SEQ ID NO: 110761 - RNA, 32 nt, Homo Sapiens
ucugcucaaaguuuucaacauaaagaaaaaag

SEQ ID NO: 110762 - RNA, 32 nt, Homo Sapiens
ggcacccgcgcgcuccuagcgccccagacccg

SEQ ID NO: 110763 - RNA, 32 nt, Homo Sapiens
cuucaggcuggguauuagggcuggcugggucu

SEQ ID NO: 110764 - RNA, 32 nt, Homo Sapiens
cuccauugauuuaguagcugcuccaucaucua

SEQ ID NO: 110765 - RNA, 29 nt, Homo Sapiens
ggcaacauagugagacugucucuaaaaua

SEQ ID NO: 110766 - RNA, 32 nt, Homo Sapiens
aggcccuccagcugcguggucuccgcagacca

SEQ ID NO: 110767 - RNA, 32 nt, Homo Sapiens
ugcaguacagaauuggauacaguacggauuug

SEQ ID NO: 110768 - RNA, 31 nt, Homo Sapiens
cuuuguguaccaguuuccugagccacgccca

SEQ ID NO: 110769 - RNA, 32 nt, Homo Sapiens
cgacggccgcggucagccggcauuccggagca

SEQ ID NO: 110770 - RNA, 32 nt, Homo Sapiens
cccaguguggaggcagggacagucaugggaau

SEQ ID NO: 110771 - RNA, 32 nt, Homo Sapiens
gcguacuaucccagccccccagguucgccuaa

SEQ ID NO: 110772 - RNA, 32 nt, Homo Sapiens
uacuuaaugaauuauuuauacagagcauuugu

SEQ ID NO: 110773 - RNA, 32 nt, Homo Sapiens
agaucaaguaugaggagcugcagacgcuggcu

SEQ ID NO: 110774 - RNA, 32 nt, Homo Sapiens
acaggaggagucggggauaaacaucaaacauc

SEQ ID NO: 110775 - RNA, 32 nt, Homo Sapiens
guccagcacuagcuccacggccccagacaccu

SEQ ID NO: 110776 - RNA, 32 nt, Homo Sapiens
caucccacucaagacacaaaacauuuucuuaa

SEQ ID NO: 110777 - RNA, 32 nt, Homo Sapiens
cccaugggagggggcugcugcccaccagccau

SEQ ID NO: 110778 - RNA, 32 nt, Homo Sapiens
ccagcgccugcccucccugggguccuugcugc

SEQ ID NO: 110779 - RNA, 32 nt, Homo Sapiens
uuguguaugcuucaucaccuauauuaggcaaa

SEQ ID NO: 110780 - RNA, 32 nt, Homo Sapiens
uggccaugccacucaugguugcuauggccgga

SEQ ID NO: 110781 - RNA, 32 nt, Homo Sapiens
cuaaaacccuguguucacaaaggcagagaguc

SEQ ID NO: 110782 - RNA, 32 nt, Homo Sapiens
auaacggagagccuaucaccacaugccuuugu

SEQ ID NO: 110783 - RNA, 32 nt, Homo Sapiens
agggcgggggcggagggauccuugauuucccu

SEQ ID NO: 110784 - RNA, 32 nt, Homo Sapiens
cugcggcggcgccgccgcaagccccggugcag

SEQ ID NO: 110785 - RNA, 32 nt, Homo Sapiens
guuaaauuggauaaaaucaugacuauuauuga

SEQ ID NO: 110786 - RNA, 32 nt, Homo Sapiens
cccaaccauuuucccugcuacuacagauucaa

SEQ ID NO: 110787 - RNA, 32 nt, Homo Sapiens
agguccacacccaaaagugucaauguuugccc

SEQ ID NO: 110788 - RNA, 31 nt, Homo Sapiens
agcggggcugcccagaacccugccaaccaag

SEQ ID NO: 110789 - RNA, 32 nt, Homo Sapiens
ugaaguuggggauucuuguggaggauggugcc

SEQ ID NO: 110790 - RNA, 32 nt, Homo Sapiens
ucagagguuuugggguucagggugcugugucu

SEQ ID NO: 110791 - RNA, 32 nt, Homo Sapiens
uugaaugcacaaguaaaugcaagacgucugga

SEQ ID NO: 110792 - RNA, 32 nt, Homo Sapiens
ucauugcuucauaaguuuuuaaauuauuuuaa

SEQ ID NO: 110793 - RNA, 32 nt, Homo Sapiens
uguuugucauauuuuucuucauuucacaaagg

SEQ ID NO: 110794 - RNA, 32 nt, Homo Sapiens
ccguucccgcggcccccucggcuuugccagcg

SEQ ID NO: 110795 - RNA, 32 nt, Homo Sapiens
uguuguuguuguuuucugagauggagucuugc

SEQ ID NO: 110796 - RNA, 32 nt, Homo Sapiens
uugacuugaaggugggggguagguugguuguu

SEQ ID NO: 110797 - RNA, 32 nt, Homo Sapiens
caaaauuuaggccuuacaaauaauacuccaau

SEQ ID NO: 110798 - RNA, 32 nt, Homo Sapiens
aggcagucccaggcucucuggauacuaggggc

SEQ ID NO: 110799 - RNA, 31 nt, Homo Sapiens
gucaucugacccaguuauuccacucccagau

SEQ ID NO: 110800 - RNA, 32 nt, Homo Sapiens
cugaacagcucuuccucuagcugucuggcugu

SEQ ID NO: 110801 - RNA, 32 nt, Homo Sapiens
acaaggcgguagccauggcggaggcggcggcu

SEQ ID NO: 110802 - RNA, 32 nt, Homo Sapiens
agcuucccguccccaccccccagccccuuggc

SEQ ID NO: 110803 - RNA, 32 nt, Homo Sapiens
gcaaaguugaguauuagagagcuugucuuuca

SEQ ID NO: 110804 - RNA, 32 nt, Homo Sapiens
gcaucucuguggagcugccauccacuguauaa

SEQ ID NO: 110805 - RNA, 32 nt, Homo Sapiens
aagccuuugucaauuaaucuuuacugaauaaa

SEQ ID NO: 110806 - RNA, 32 nt, Homo Sapiens
gagauauauguagaaauaagauauauauuauc

SEQ ID NO: 110807 - RNA, 32 nt, Homo Sapiens
ccuugggauccggaguauagugcuugauucua

SEQ ID NO: 110808 - RNA, 32 nt, Homo Sapiens
aggaucagcugcuggaggaggcggagaggcag

SEQ ID NO: 110809 - RNA, 32 nt, Homo Sapiens
ggccaguauuguccucaccaaccccagcugug

SEQ ID NO: 110810 - RNA, 32 nt, Homo Sapiens
gacgcggcgcgcacgcuccggccugcgcagcc

SEQ ID NO: 110811 - RNA, 32 nt, Homo Sapiens
auuucgucugaauaaguacaguagccaaggaa

SEQ ID NO: 110812 - RNA, 31 nt, Homo Sapiens
gccauuucugucccagcuccaagggucucuc

SEQ ID NO: 110813 - RNA, 32 nt, Homo Sapiens
ggcucacuacagccucgcucucccgggcucca

SEQ ID NO: 110814 - RNA, 32 nt, Homo Sapiens
ggcugucucggugaugagcacacgcgugcugg

SEQ ID NO: 110815 - RNA, 32 nt, Homo Sapiens
guugguguuucaugacauguggacuucuuuug

SEQ ID NO: 110816 - RNA, 32 nt, Homo Sapiens
cgccgcgcuccagccucgcucuccgccgcccg

SEQ ID NO: 110817 - RNA, 32 nt, Homo Sapiens
uucuacauuuugcaugaggccugcagguggcc

SEQ ID NO: 110818 - RNA, 32 nt, Homo Sapiens
ugcaaaacaaggaaauaaaggcuuacuucuuu

SEQ ID NO: 110819 - RNA, 32 nt, Homo Sapiens
ccccucccacccacagccauagaccuacagac

SEQ ID NO: 110820 - RNA, 30 nt, Homo Sapiens
ucagcaugauucuucagaggcucuucaggu

SEQ ID NO: 110821 - RNA, 32 nt, Homo Sapiens
ucuguggccuacuggccccuugagaagggacu

SEQ ID NO: 110822 - RNA, 32 nt, Homo Sapiens
cagcugagugcccuguccucagauggggaggg

SEQ ID NO: 110823 - RNA, 32 nt, Homo Sapiens
gcuuuaccaauaugauuuacauuuguuaacuu

SEQ ID NO: 110824 - RNA, 32 nt, Homo Sapiens
cuccugagagacugaagaaucucugucaaggc

SEQ ID NO: 110825 - RNA, 32 nt, Homo Sapiens
auuuuugguaguguuucaaacguucuuuaucc

SEQ ID NO: 110826 - RNA, 32 nt, Homo Sapiens
aggaaaaaacaaaacaaaaacaaaauguagaa

SEQ ID NO: 110827 - RNA, 32 nt, Homo Sapiens
uccagcgccggagcgucgcgggccgcuggggc

SEQ ID NO: 110828 - RNA, 32 nt, Homo Sapiens
ggauugcccaucuuaagagaucuugcaggaag

SEQ ID NO: 110829 - RNA, 32 nt, Homo Sapiens
guuuugcaagagaaugaauuuuuuauucugua

SEQ ID NO: 110830 - RNA, 32 nt, Homo Sapiens
uccagccugaccagcccuggccuagucguggg

SEQ ID NO: 110831 - RNA, 32 nt, Homo Sapiens
cuuaaguguucauuuuaaguaacgugcucacu

SEQ ID NO: 110832 - RNA, 32 nt, Homo Sapiens
ggggugggagaaugccagcccagagucagucc

SEQ ID NO: 110833 - RNA, 31 nt, Homo Sapiens
uuuuaauggagccccauuuuagaauuauuuu

SEQ ID NO: 110834 - RNA, 32 nt, Homo Sapiens
gaaacauggcccuugaucaaguuuacaacucu

SEQ ID NO: 110835 - RNA, 32 nt, Homo Sapiens
aaggaauaaugcaguuuuuauguaucugauuu

SEQ ID NO: 110836 - RNA, 32 nt, Homo Sapiens
aaaaggaaguauuuaaaggaugauagagacca

SEQ ID NO: 110837 - RNA, 32 nt, Homo Sapiens
cucgccagcggcucccccuucuccucggcggg

SEQ ID NO: 110838 - RNA, 32 nt, Homo Sapiens
agcaaaagucaacuauuccauuuuauaaauga

SEQ ID NO: 110839 - RNA, 32 nt, Homo Sapiens
ccuuaugaucccaauuuuuaugaugaaaccua

SEQ ID NO: 110840 - RNA, 32 nt, Homo Sapiens
gccuagagaugggaagugacuugcucaagguc

SEQ ID NO: 110841 - RNA, 32 nt, Homo Sapiens
aggaacaaauuuaaggcuuaaaaaauacuuua

SEQ ID NO: 110842 - RNA, 32 nt, Homo Sapiens
cggcccccggcgggggucacccugcucccucg

SEQ ID NO: 110843 - RNA, 32 nt, Homo Sapiens
caaagaaaaaaaaaaggccuagcagggaagca

SEQ ID NO: 110844 - RNA, 32 nt, Homo Sapiens
ccuccucucagaccacccagauucuacucauu

SEQ ID NO: 110845 - RNA, 32 nt, Homo Sapiens
uguggcggccggaaccgcgaccuuggccggac

SEQ ID NO: 110846 - RNA, 32 nt, Homo Sapiens
uucucgaguccuccccgacgcguccucuaggc

SEQ ID NO: 110847 - RNA, 32 nt, Homo Sapiens
caaaagaugugaaagcacuaaaaauaccauuu

SEQ ID NO: 110848 - RNA, 32 nt, Homo Sapiens
aauagaggucuaggaauuaucaaagguacugc

SEQ ID NO: 110849 - RNA, 32 nt, Homo Sapiens
ggcgccccacccagucucauccgggggacuuc

SEQ ID NO: 110850 - RNA, 32 nt, Homo Sapiens
ugaaucugcggagcuuaaguugugagaagaaa

SEQ ID NO: 110851 - RNA, 32 nt, Homo Sapiens
cgcagucugcagagccgccgccgccgcccgaa

SEQ ID NO: 110852 - RNA, 32 nt, Homo Sapiens
uaaucccauaguccagaggaggcaucccuagg

SEQ ID NO: 110853 - RNA, 31 nt, Homo Sapiens
gaaugaacaaauugaauaaauacuguuaaac

SEQ ID NO: 110854 - RNA, 32 nt, Homo Sapiens
ggggcgccgcagagccggauuaacugugcuga

SEQ ID NO: 110855 - RNA, 32 nt, Homo Sapiens
gcccuacccacccacccaccuuuguagagucc

SEQ ID NO: 110856 - RNA, 32 nt, Homo Sapiens
aauuugaaaaagauaauuauaaugccugcaau

SEQ ID NO: 110857 - RNA, 32 nt, Homo Sapiens
caccuacaacugaagacaaugcacuuuacaga

SEQ ID NO: 110858 - RNA, 32 nt, Homo Sapiens
uuucaggauuuuagguaauuugaaaggaguuu

SEQ ID NO: 110859 - RNA, 32 nt, Homo Sapiens
agaggagggugcggcccuccucagcgaccccu

SEQ ID NO: 110860 - RNA, 32 nt, Homo Sapiens
uucuaguuuuuagagacuuccuuuuggcuccc

SEQ ID NO: 110861 - RNA, 32 nt, Homo Sapiens
agccaguuuccauggcaacguguagacacccu

SEQ ID NO: 110862 - RNA, 32 nt, Homo Sapiens
acccucuucccucuccuuucauaccagucacu

SEQ ID NO: 110863 - RNA, 32 nt, Homo Sapiens
uccugccuguguuccagcaugcuuauuucaaa

SEQ ID NO: 110864 - RNA, 32 nt, Homo Sapiens
ggaaggaauauucagaauaaaacgguugagaa

SEQ ID NO: 110865 - RNA, 32 nt, Homo Sapiens
cucaugauaaggaaaagagucuauguauuuuc

SEQ ID NO: 110866 - RNA, 32 nt, Homo Sapiens
agccgguggugcccgugcccgcaggaacuggg

SEQ ID NO: 110867 - RNA, 32 nt, Homo Sapiens
ugguggcuucuuguccuucucuuugacuucug

SEQ ID NO: 110868 - RNA, 32 nt, Homo Sapiens
caguuuacuagauuaccaaguguuacaucaua

SEQ ID NO: 110869 - RNA, 32 nt, Homo Sapiens
uccaguggcagggacaggucuugggucuuugu

SEQ ID NO: 110870 - RNA, 32 nt, Homo Sapiens
uucugauuauuaaauauucucuguaaaucagu

SEQ ID NO: 110871 - RNA, 32 nt, Homo Sapiens
cuuugucucaaaaacaaacaaacaaacaaaca

SEQ ID NO: 110872 - RNA, 32 nt, Homo Sapiens
ugugggcgcucugugguccuccccuccugacc

SEQ ID NO: 110873 - RNA, 32 nt, Homo Sapiens
acaaguguccagcccucggugcuggaguggac

SEQ ID NO: 110874 - RNA, 32 nt, Homo Sapiens
caauggcagcgacagcagcaacagcagcagau

SEQ ID NO: 110875 - RNA, 32 nt, Homo Sapiens
ccaggagugcccuaaggguaagagggaggcca

SEQ ID NO: 110876 - RNA, 32 nt, Homo Sapiens
cguggggcaggagaugggaggggagagaccag

SEQ ID NO: 110877 - RNA, 32 nt, Homo Sapiens
uugaagaaaauauuauuuuaacaauguaaagc

SEQ ID NO: 110878 - RNA, 32 nt, Homo Sapiens
ugaugaaaaagcccagaagagaaggaagagga

SEQ ID NO: 110879 - RNA, 32 nt, Homo Sapiens
cccacacacgugcuggugucccgggaagaguu

SEQ ID NO: 110880 - RNA, 32 nt, Homo Sapiens
uggugcugacaguguggacuugagcacacuua

SEQ ID NO: 110881 - RNA, 32 nt, Homo Sapiens
cuguggaagggccaauggagaaaaugaaugga

SEQ ID NO: 110882 - RNA, 32 nt, Homo Sapiens
gccuccucgccucuccuggacuggcuuccucu

SEQ ID NO: 110883 - RNA, 32 nt, Homo Sapiens
gacaggcccaaguugcagucagcagaggcaac

SEQ ID NO: 110884 - RNA, 32 nt, Homo Sapiens
aaggcuuugugauuuucuacaugaaucaaaca

SEQ ID NO: 110885 - RNA, 32 nt, Homo Sapiens
cuccagggccgcgucuugccucgccucgccuc

SEQ ID NO: 110886 - RNA, 32 nt, Homo Sapiens
gacacugggcaggucaugggucgggggccucc

SEQ ID NO: 110887 - RNA, 32 nt, Homo Sapiens
uauacaucuuugagaggaaccacagaaaugua

SEQ ID NO: 110888 - RNA, 32 nt, Homo Sapiens
cuuuuuuucaaaaaaagcacaaauuaaaguag

SEQ ID NO: 110889 - RNA, 32 nt, Homo Sapiens
uccuccguccauaucagaacugugccacaaug

SEQ ID NO: 110890 - RNA, 32 nt, Homo Sapiens
agaaauaaagcaugaucugcaauggaaagguu

SEQ ID NO: 110891 - RNA, 32 nt, Homo Sapiens
gugcuuuggccucuggcacaccuaacuagcau

SEQ ID NO: 110892 - RNA, 32 nt, Homo Sapiens
caaauguguggccuuugacugaaucagccagc

SEQ ID NO: 110893 - RNA, 32 nt, Homo Sapiens
aacuacucagaauuuuaaaccauguaagcucu

SEQ ID NO: 110894 - RNA, 30 nt, Homo Sapiens
uuguaugucuguguauguauaggggaaaga

SEQ ID NO: 110895 - RNA, 32 nt, Homo Sapiens
guaacuuuuuugcaagcaguuuauugacuguu

SEQ ID NO: 110896 - RNA, 30 nt, Homo Sapiens
ggaugaugggagaagggggaaaccuguguu

SEQ ID NO: 110897 - RNA, 32 nt, Homo Sapiens
uuuuucaaaaagaugagauacuacacucauuu

SEQ ID NO: 110898 - RNA, 32 nt, Homo Sapiens
acuuaccugggauuucacuugccgggcuucac

SEQ ID NO: 110899 - RNA, 32 nt, Homo Sapiens
ggaaaaucggugggaauaaaauuaagguggau

SEQ ID NO: 110900 - RNA, 32 nt, Homo Sapiens
cugugugugaauguguguauaugagucuuuga

SEQ ID NO: 110901 - RNA, 32 nt, Homo Sapiens
uuuauuauaacacuaaacacuccuuuuuugac

SEQ ID NO: 110902 - RNA, 32 nt, Homo Sapiens
gacguaaugggcccgccuggcccugggcgccg

SEQ ID NO: 110903 - RNA, 32 nt, Homo Sapiens
gguaauaauuaaaguaucauauuuucaugugg

SEQ ID NO: 110904 - RNA, 32 nt, Homo Sapiens
ccugucucagcaaaacaaaacaagcacaggcc

SEQ ID NO: 110905 - RNA, 32 nt, Homo Sapiens
uguagaugaugagaagaaauguuaaagugcuu

SEQ ID NO: 110906 - RNA, 29 nt, Homo Sapiens
cucuguauguguauguaucuuuguaugca

SEQ ID NO: 110907 - RNA, 32 nt, Homo Sapiens
gaugcauuucaguaauaauguagaaaaacauu

SEQ ID NO: 110908 - RNA, 32 nt, Homo Sapiens
aauuaaaauggcauucuuaaagauuuucuuca

SEQ ID NO: 110909 - RNA, 32 nt, Homo Sapiens
cucugugccugcgagcuccugcgcucuugugc

SEQ ID NO: 110910 - RNA, 32 nt, Homo Sapiens
uuuaauuguaaaaauggcaggggguggaauua

SEQ ID NO: 110911 - RNA, 32 nt, Homo Sapiens
guuucuuuaugaaaaaugggugcuagugguaa

SEQ ID NO: 110912 - RNA, 32 nt, Homo Sapiens
gacaaagaaauauuucaucuggccuuuacuga

SEQ ID NO: 110913 - RNA, 32 nt, Homo Sapiens
uaccuguauuuauaguuuaugguuaucaggaa

SEQ ID NO: 110914 - RNA, 32 nt, Homo Sapiens
cagguuuugagagguuccugugagccaggccc

SEQ ID NO: 110915 - RNA, 32 nt, Homo Sapiens
gaauuauuuuaaaagcuguacucuuaaauugu

SEQ ID NO: 110916 - RNA, 32 nt, Homo Sapiens
aucauaagaauaaaagugugucuuuuuaaaaa

SEQ ID NO: 110917 - RNA, 32 nt, Homo Sapiens
uuguggauccuguugggaccagccacucacca

SEQ ID NO: 110918 - RNA, 32 nt, Homo Sapiens
gacaauggaaaaccauuaacuuuacuucauug

SEQ ID NO: 110919 - RNA, 32 nt, Homo Sapiens
gcauauauuuccccugcuuguuguacaaguaa

SEQ ID NO: 110920 - RNA, 32 nt, Homo Sapiens
cacuaaagauaaaaagggaugucuuggcuucu

SEQ ID NO: 110921 - RNA, 32 nt, Homo Sapiens
cuuuaaguguuuucuuuuucagauuuaugaau

SEQ ID NO: 110922 - RNA, 32 nt, Homo Sapiens
ucaaagacucuguuaccucuaauguagccuga

SEQ ID NO: 110923 - RNA, 32 nt, Homo Sapiens
ucagagcacaccccugccccccagggagggcc

SEQ ID NO: 110924 - RNA, 32 nt, Homo Sapiens
ggcugucggagagccuggccucguccgccgcc

SEQ ID NO: 110925 - RNA, 32 nt, Homo Sapiens
aggagggacagucagauaugucuuagagauga

SEQ ID NO: 110926 - RNA, 32 nt, Homo Sapiens
cagaaguaaaaugaguacuguguuuacuaauu

SEQ ID NO: 110927 - RNA, 32 nt, Homo Sapiens
gucaugcuaauucuaucuccaaguaucuugug

SEQ ID NO: 110928 - RNA, 32 nt, Homo Sapiens
cagcuaacguaucacuuuuucuuauuuuguau

SEQ ID NO: 110929 - RNA, 27 nt, Homo Sapiens
aguugcuucuucuucagccuucuuucc

SEQ ID NO: 110930 - RNA, 32 nt, Homo Sapiens
cucuccagcaaagcuuccaggugugucucagg

SEQ ID NO: 110931 - RNA, 32 nt, Homo Sapiens
ccaagaucaugcuacugcacuccagcuuaggu

SEQ ID NO: 110932 - RNA, 32 nt, Homo Sapiens
cugaaguucuccucgaucccccggugagcuuc

SEQ ID NO: 110933 - RNA, 32 nt, Homo Sapiens
acugaguggccaagaagcuccauggugagcac

SEQ ID NO: 110934 - RNA, 32 nt, Homo Sapiens
aagcauucacccaaacaaaaaaaucacaggua

SEQ ID NO: 110935 - RNA, 32 nt, Homo Sapiens
agaugaaaaaaguuccuguggauguuuugugu

SEQ ID NO: 110936 - RNA, 32 nt, Homo Sapiens
ucaaaaccaaccccuaggccaauugccuggau

SEQ ID NO: 110937 - RNA, 32 nt, Homo Sapiens
cguguggauggacgaugugggguguggaggag

SEQ ID NO: 110938 - RNA, 32 nt, Homo Sapiens
gaaguuaguauuuugcuauugaucacugaaua

SEQ ID NO: 110939 - RNA, 32 nt, Homo Sapiens
guccaccugaacgugccuggaaaugucucccg

SEQ ID NO: 110940 - RNA, 32 nt, Homo Sapiens
gguuggccaaacugauugccaucaggucagac

SEQ ID NO: 110941 - RNA, 32 nt, Homo Sapiens
agcccuauacccuaacucacuccaccccauuu

SEQ ID NO: 110942 - RNA, 32 nt, Homo Sapiens
uaguuccacaauguccacgggcggagacuucg

SEQ ID NO: 110943 - RNA, 32 nt, Homo Sapiens
cccaacuaccgucucgagugccugcaguggcu

SEQ ID NO: 110944 - RNA, 32 nt, Homo Sapiens
gccgcgagaugcagccuccgggcccgcccccg

SEQ ID NO: 110945 - RNA, 32 nt, Homo Sapiens
aaaagaaaaaauuuauaaauacuuuaucaucc

SEQ ID NO: 110946 - RNA, 32 nt, Homo Sapiens
caccacagcgucaggguggagaucuggguuuc

SEQ ID NO: 110947 - RNA, 32 nt, Homo Sapiens
gcuaauauauuuaucucauuguuuacauaagc

SEQ ID NO: 110948 - RNA, 32 nt, Homo Sapiens
gcgugcauuaggaugucgcuggccuuugcuca

SEQ ID NO: 110949 - RNA, 32 nt, Homo Sapiens
uagugaaguuuugaaaauacuuugaaaaagag

SEQ ID NO: 110950 - RNA, 32 nt, Homo Sapiens
cucuuuuuucauggacacuuugaaauguguuu

SEQ ID NO: 110951 - RNA, 32 nt, Homo Sapiens
gggguaggcuggcccaugugugaucuuguggg

SEQ ID NO: 110952 - RNA, 32 nt, Homo Sapiens
uucauuguacauaagaaaaugcucuuaggaau

SEQ ID NO: 110953 - RNA, 32 nt, Homo Sapiens
uuccggaggcggagggccgggggccgagggag

SEQ ID NO: 110954 - RNA, 32 nt, Homo Sapiens
cuauuuuuuuuuucuuuuuuuucuuuuccuag

SEQ ID NO: 110955 - RNA, 32 nt, Homo Sapiens
uaauuuucaaagcagggcugguuuuccaaccc

SEQ ID NO: 110956 - RNA, 31 nt, Homo Sapiens
cucucuuaggacacucucugggagcuugaag

SEQ ID NO: 110957 - RNA, 32 nt, Homo Sapiens
gggccugagaagaucugguccucaaucccaag

SEQ ID NO: 110958 - RNA, 32 nt, Homo Sapiens
gugcccugccccacccuggagcuucaaauaaa

SEQ ID NO: 110959 - RNA, 32 nt, Homo Sapiens
agcuuuucucugauuuccaggaugguaauagg

SEQ ID NO: 110960 - RNA, 32 nt, Homo Sapiens
uaaacauacuaaaaugaauuauauaaugcagc

SEQ ID NO: 110961 - RNA, 32 nt, Homo Sapiens
agaccagccugggcaaaauagcaagaccgugc

SEQ ID NO: 110962 - RNA, 32 nt, Homo Sapiens
ucuucucaaaagacaucugaaccuagcacagg

SEQ ID NO: 110963 - RNA, 32 nt, Homo Sapiens
gcgaccucugcccucccugccucuccucaccc

SEQ ID NO: 110964 - RNA, 32 nt, Homo Sapiens
gggcuggcacugaagcaagggugcuggggccc

SEQ ID NO: 110965 - RNA, 32 nt, Homo Sapiens
cggcggccgugguugcggcgcgggaaguuugg

SEQ ID NO: 110966 - RNA, 32 nt, Homo Sapiens
aaaugcuaaaugucaauuuaucacugcgcaug

SEQ ID NO: 110967 - RNA, 32 nt, Homo Sapiens
uguccauuuacuagauucaaucgucucugagu

SEQ ID NO: 110968 - RNA, 32 nt, Homo Sapiens
aaaaaaaaugccaagcucacccagaaauaacc

SEQ ID NO: 110969 - RNA, 32 nt, Homo Sapiens
cuuggauacgcuuuugaguggucccagucguc

SEQ ID NO: 110970 - RNA, 32 nt, Homo Sapiens
aguuccugcaugccggugaucccuagcuguga

SEQ ID NO: 110971 - RNA, 29 nt, Homo Sapiens
caacaugaaagaugaaguguugaaucuga

SEQ ID NO: 110972 - RNA, 32 nt, Homo Sapiens
ggcaaacgccaggugcuuuuucugggagagcc

SEQ ID NO: 110973 - RNA, 32 nt, Homo Sapiens
uguuuuuauaauuugugguuuucaugaaacau

SEQ ID NO: 110974 - RNA, 32 nt, Homo Sapiens
aacucaucauaaguacuugcugauggaagaau

SEQ ID NO: 110975 - RNA, 30 nt, Homo Sapiens
gaacguggggcaggcgcgggugggcccagc

SEQ ID NO: 110976 - RNA, 32 nt, Homo Sapiens
uucuuuugacauuaugugaauauuuuacugga

SEQ ID NO: 110977 - RNA, 32 nt, Homo Sapiens
agguaauccgucugccuuggccucccaaaugc

SEQ ID NO: 110978 - RNA, 32 nt, Homo Sapiens
ggcgggaccuggggcgggggacgggacuuaaa

SEQ ID NO: 110979 - RNA, 32 nt, Homo Sapiens
guagauaguuuaucucauguaaagacccaccc

SEQ ID NO: 110980 - RNA, 32 nt, Homo Sapiens
gccggccggacuuugcgccgcguccggcgcug

SEQ ID NO: 110981 - RNA, 32 nt, Homo Sapiens
ccugcagagcucgcgccgcggcagcccagccg

SEQ ID NO: 110982 - RNA, 32 nt, Homo Sapiens
uuucguacugaaacaucgucuuuacccacuuc

SEQ ID NO: 110983 - RNA, 32 nt, Homo Sapiens
uggcgcgccccucccauuugccuguccugguc

SEQ ID NO: 110984 - RNA, 32 nt, Homo Sapiens
auuuguauaacuguguaaaauaaaaaaggaau

SEQ ID NO: 110985 - RNA, 32 nt, Homo Sapiens
cgggcgggguggcgcgcaccuguaaucccagc

SEQ ID NO: 110986 - RNA, 32 nt, Homo Sapiens
ugaacucauccuuuuuuauggcugcauaauau

SEQ ID NO: 110987 - RNA, 27 nt, Homo Sapiens
caaugggccagagcuucucaugcagcc

SEQ ID NO: 110988 - RNA, 32 nt, Homo Sapiens
ggaaugguuacauuuuugcagcccuuuguauu

SEQ ID NO: 110989 - RNA, 32 nt, Homo Sapiens
agaaggcaagauacacuugaauuuaaauggac

SEQ ID NO: 110990 - RNA, 32 nt, Homo Sapiens
ccucgugcuuggauugucccgggggcuccucu

SEQ ID NO: 110991 - RNA, 32 nt, Homo Sapiens
gguauuuguggugaugggaggaugcuguuacu

SEQ ID NO: 110992 - RNA, 32 nt, Homo Sapiens
cuggugaugggguuacguggggugcgggauac

SEQ ID NO: 110993 - RNA, 32 nt, Homo Sapiens
gcgaccaccgacauggagugggcucgggcggc

SEQ ID NO: 110994 - RNA, 32 nt, Homo Sapiens
uaaauuggucuccauuauuaccuggucacacc

SEQ ID NO: 110995 - RNA, 32 nt, Homo Sapiens
gagagaaaguaaaagcacuucacaaaaaaaug

SEQ ID NO: 110996 - RNA, 28 nt, Homo Sapiens
cuuuguuuuuaaaggauguguuuguaug

SEQ ID NO: 110997 - RNA, 32 nt, Homo Sapiens
ucguggccugucugaaauccaaauggagcugg

SEQ ID NO: 110998 - RNA, 32 nt, Homo Sapiens
cggccgggauggcuaccacggccgagcucuuc

SEQ ID NO: 110999 - RNA, 32 nt, Homo Sapiens
ccuuguuaacucccucgucugcauccaauucc

SEQ ID NO: 111000 - RNA, 32 nt, Homo Sapiens
ucacuguguucugacagccaugugucacuaug

SEQ ID NO: 111001 - RNA, 32 nt, Homo Sapiens
gcagccaggaccagcaccuguagucaccccac

SEQ ID NO: 111002 - RNA, 32 nt, Homo Sapiens
caccuucagauccugugccccaucccacagug

SEQ ID NO: 111003 - RNA, 28 nt, Homo Sapiens
acugugaagauucuaaagugcuuccuag

SEQ ID NO: 111004 - RNA, 32 nt, Homo Sapiens
uuaggugauguguagcccccuccaccuuucca

SEQ ID NO: 111005 - RNA, 32 nt, Homo Sapiens
gaagauaugggugacccccaccccccaucugu

SEQ ID NO: 111006 - RNA, 32 nt, Homo Sapiens
uaaaaucugcaacacuccugcuguuggcugga

SEQ ID NO: 111007 - RNA, 32 nt, Homo Sapiens
ugcuuucuuucuuuucccgggcugcguucgga

SEQ ID NO: 111008 - RNA, 32 nt, Homo Sapiens
aguacuccaaaaauauuauauuuaagaugcuc

SEQ ID NO: 111009 - RNA, 32 nt, Homo Sapiens
acaucugccgcggccacacgcgguggcaugca

SEQ ID NO: 111010 - RNA, 32 nt, Homo Sapiens
cuagccccgggcggguucccgggaagccgcgg

SEQ ID NO: 111011 - RNA, 32 nt, Homo Sapiens
accaccgugcauggggcagcaaacacgugggg

SEQ ID NO: 111012 - RNA, 32 nt, Homo Sapiens
cucagugccugccucugacaaaauuaaagcau

SEQ ID NO: 111013 - RNA, 32 nt, Homo Sapiens
ugucugcggagcuucuugggcugccccauuuc

SEQ ID NO: 111014 - RNA, 32 nt, Homo Sapiens
uuuacagaaaucaaaccuauuuacaggguggc

SEQ ID NO: 111015 - RNA, 32 nt, Homo Sapiens
ggcccagacagaggcagagaguccggauagaa

SEQ ID NO: 111016 - RNA, 32 nt, Homo Sapiens
agacuuggcuccaaacaucuccccucccaaga

SEQ ID NO: 111017 - RNA, 32 nt, Homo Sapiens
ccgagccggcguuucuggcccgcuucaaggaa

SEQ ID NO: 111018 - RNA, 32 nt, Homo Sapiens
agggauagcauuaggagaaauaccuaauguag

SEQ ID NO: 111019 - RNA, 32 nt, Homo Sapiens
cugagguuuuuaaauauuucuuucucuaaccc

SEQ ID NO: 111020 - RNA, 32 nt, Homo Sapiens
guucacaccaaaaugugacaguucuuucaugu

SEQ ID NO: 111021 - RNA, 32 nt, Homo Sapiens
gucaugcaguaguaguaaaaacaucaaagaug

SEQ ID NO: 111022 - RNA, 32 nt, Homo Sapiens
accaauaucucauaagacuacugcaaaguuga

SEQ ID NO: 111023 - RNA, 32 nt, Homo Sapiens
ugcuguugccgccgcugcucucgcugcaguca

SEQ ID NO: 111024 - RNA, 32 nt, Homo Sapiens
uuggggagaugggaaaaaugcucaccucuuca

SEQ ID NO: 111025 - RNA, 32 nt, Homo Sapiens
uccuauggguguuaucaccuagcugaauguuu

SEQ ID NO: 111026 - RNA, 32 nt, Homo Sapiens
agggggcuuaguggagauugggguuaguccca

SEQ ID NO: 111027 - RNA, 32 nt, Homo Sapiens
cauuuggagaaucuuccuucauccagacaacu

SEQ ID NO: 111028 - RNA, 32 nt, Homo Sapiens
gucccagcugaagagaggcaugggacugaacc

SEQ ID NO: 111029 - RNA, 32 nt, Homo Sapiens
gcagaggcucggagaggaacccugccccuccg

SEQ ID NO: 111030 - RNA, 32 nt, Homo Sapiens
uccucugaaaacaguaugaaacaugaccaagu

SEQ ID NO: 111031 - RNA, 32 nt, Homo Sapiens
ccauccugcccuaugguucucuagccaccugu

SEQ ID NO: 111032 - RNA, 32 nt, Homo Sapiens
gugugaugauagaaugaugacauucugcauuu

SEQ ID NO: 111033 - RNA, 32 nt, Homo Sapiens
gagucuauauuuucuauauaauguagauaguc

SEQ ID NO: 111034 - RNA, 32 nt, Homo Sapiens
gcccugucuccucagcuucaggcaccaccacu

SEQ ID NO: 111035 - RNA, 32 nt, Homo Sapiens
cagguuggcagccucugcccgugaggcugauc

SEQ ID NO: 111036 - RNA, 32 nt, Homo Sapiens
aggcucggcaccggcccucccagcccggccag

SEQ ID NO: 111037 - RNA, 32 nt, Homo Sapiens
aaauucuugguccaagucugugcccuaagcuu

SEQ ID NO: 111038 - RNA, 32 nt, Homo Sapiens
cagccgggccgcgggaggagggagccgucacc

SEQ ID NO: 111039 - RNA, 32 nt, Homo Sapiens
cgccaguuuccgggcccgggcugcucucggag

SEQ ID NO: 111040 - RNA, 32 nt, Homo Sapiens
ggguugaagcuacuuuguuaggcuugaauuca

SEQ ID NO: 111041 - RNA, 32 nt, Homo Sapiens
cccugucugcccuucucccuccugcuucugag

SEQ ID NO: 111042 - RNA, 32 nt, Homo Sapiens
aggacaaugccgugagaagcacuucaugguga

SEQ ID NO: 111043 - RNA, 32 nt, Homo Sapiens
uggcacugaagaagugugaaugugaaggcggc

SEQ ID NO: 111044 - RNA, 32 nt, Homo Sapiens
uuuauuuuucccuuuucagaaaguccuuagug

SEQ ID NO: 111045 - RNA, 32 nt, Homo Sapiens
auucagugucauuagugaaaucuuauuuuugu

SEQ ID NO: 111046 - RNA, 32 nt, Homo Sapiens
uauuuguguacaaaaugaugucguuuugaggg

SEQ ID NO: 111047 - RNA, 32 nt, Homo Sapiens
agaaaaacaccagcuaaaaaauguagaaggaa

SEQ ID NO: 111048 - RNA, 31 nt, Homo Sapiens
gaugugguauugaaccuucaagauccuuuuc

SEQ ID NO: 111049 - RNA, 32 nt, Homo Sapiens
ucgcugucaaggaaccguuucuauacauuuuu

SEQ ID NO: 111050 - RNA, 32 nt, Homo Sapiens
ccuauuuuguaaauaaauaaaaccauagauuu

SEQ ID NO: 111051 - RNA, 32 nt, Homo Sapiens
uggccucggcacacgcucaccuuuucuguugg

SEQ ID NO: 111052 - RNA, 29 nt, Homo Sapiens
gagcggcucggacgcaggacgccgcgggc

SEQ ID NO: 111053 - RNA, 32 nt, Homo Sapiens
cuuccacugcauucccccggcgcgugugggac

SEQ ID NO: 111054 - RNA, 32 nt, Homo Sapiens
uugggggagggagggacaaacacucccaauca

SEQ ID NO: 111055 - RNA, 32 nt, Homo Sapiens
acucagcccuguacucacuucuucacucgcug

SEQ ID NO: 111056 - RNA, 32 nt, Homo Sapiens
uguuccuuucugcaugagaaucuaggagagaa

SEQ ID NO: 111057 - RNA, 32 nt, Homo Sapiens
ggugugauccugcugcggcuggaccggcuccg

SEQ ID NO: 111058 - RNA, 32 nt, Homo Sapiens
ccucgcggaccuggcggugccggcgcccggag

SEQ ID NO: 111059 - RNA, 32 nt, Homo Sapiens
aggggccaccuuguaagagacaucauuacuac

SEQ ID NO: 111060 - RNA, 32 nt, Homo Sapiens
uacagcuucuacccggccccaaggcuacccag

SEQ ID NO: 111061 - RNA, 32 nt, Homo Sapiens
uggaucagauggagaccccccugugcugacuc

SEQ ID NO: 111062 - RNA, 32 nt, Homo Sapiens
aacaacagugauugcgauuguuuucuagaaac

SEQ ID NO: 111063 - RNA, 32 nt, Homo Sapiens
ucuacaacagagcagcuucccagacuucucca

SEQ ID NO: 111064 - RNA, 32 nt, Homo Sapiens
cguguguggcucuggguccagcucuguucagg

SEQ ID NO: 111065 - RNA, 32 nt, Homo Sapiens
gggagagaauauuugagggagggcugggucuu

SEQ ID NO: 111066 - RNA, 32 nt, Homo Sapiens
auugaaaguauuuugugcaagucauaccuccc

SEQ ID NO: 111067 - RNA, 32 nt, Homo Sapiens
uggaugagugaccagggccagccucugucuca

SEQ ID NO: 111068 - RNA, 32 nt, Homo Sapiens
gcuuuuccaguugugacccguuuuccaaccag

SEQ ID NO: 111069 - RNA, 32 nt, Homo Sapiens
ggagcugugggaauuggauuuguuggcucuuc

SEQ ID NO: 111070 - RNA, 32 nt, Homo Sapiens
caagaucucaugcuccuccccacagcccucuu

SEQ ID NO: 111071 - RNA, 32 nt, Homo Sapiens
agccgucccucgcgccucgggcgcgccaccau

SEQ ID NO: 111072 - RNA, 32 nt, Homo Sapiens
ucagaggugucugcugcuuuuugccugugccu

SEQ ID NO: 111073 - RNA, 32 nt, Homo Sapiens
acacaggcccaggggagccccuggagggaaau

SEQ ID NO: 111074 - RNA, 32 nt, Homo Sapiens
guguuuauagagauacacacacauauauaugu

SEQ ID NO: 111075 - RNA, 32 nt, Homo Sapiens
caccagucaaguugacacguaaaauuaaccau

SEQ ID NO: 111076 - RNA, 32 nt, Homo Sapiens
agcagggaaaugcaaaucaaaacuacaaugac

SEQ ID NO: 111077 - RNA, 32 nt, Homo Sapiens
cagagccgguuccgccgccgcugcuggcgccg

SEQ ID NO: 111078 - RNA, 32 nt, Homo Sapiens
aucuccccaccgagagaagcgggcuccuaaug

SEQ ID NO: 111079 - RNA, 32 nt, Homo Sapiens
accuuuucauauauuuauaacuuuuaaugucu

SEQ ID NO: 111080 - RNA, 32 nt, Homo Sapiens
aggggagccagagggacaaagcacacuggaag

SEQ ID NO: 111081 - RNA, 32 nt, Homo Sapiens
uucccuggugucuucauuuuccuccgucuccc

SEQ ID NO: 111082 - RNA, 32 nt, Homo Sapiens
ucuauuucuccuucggccgccgccgccacugc

SEQ ID NO: 111083 - RNA, 32 nt, Homo Sapiens
auauuuuaauuuaaucucugucaauggccauc

SEQ ID NO: 111084 - RNA, 32 nt, Homo Sapiens
uuacuuaugagcagauacagauauauccaaac

SEQ ID NO: 111085 - RNA, 32 nt, Homo Sapiens
cgauccgacgaaaagcccaguucucagugaug

SEQ ID NO: 111086 - RNA, 32 nt, Homo Sapiens
caagcacagaggccagcgugucccgcguggga

SEQ ID NO: 111087 - RNA, 32 nt, Homo Sapiens
cgucucugagaaaaaaggauggaacuaugggu

SEQ ID NO: 111088 - RNA, 32 nt, Homo Sapiens
aagcuauaguggcauagaaaaaguauaaagcu

SEQ ID NO: 111089 - RNA, 32 nt, Homo Sapiens
agcagguggaggcauccagugauuucuacccu

SEQ ID NO: 111090 - RNA, 32 nt, Homo Sapiens
ugggcaguacaggguaacuggaggcggggcca

SEQ ID NO: 111091 - RNA, 32 nt, Homo Sapiens
ugccuguaaucccagcacuuuggggaggccga

SEQ ID NO: 111092 - RNA, 32 nt, Homo Sapiens
aacaguuuuaucagugauccauuacauuaauc

SEQ ID NO: 111093 - RNA, 32 nt, Homo Sapiens
aauguaaaacaaaaacaaaacaaacagucuuc

SEQ ID NO: 111094 - RNA, 32 nt, Homo Sapiens
cucaaauaaucccagcacuuugggaggcugag

SEQ ID NO: 111095 - RNA, 32 nt, Homo Sapiens
gcucuggcuggucagagacaaggcagaacuuu

SEQ ID NO: 111096 - RNA, 32 nt, Homo Sapiens
gccaccuaugccccacaagacggaacccggga

SEQ ID NO: 111097 - RNA, 31 nt, Homo Sapiens
agccuccaggaaaucuugagagccugucuug

SEQ ID NO: 111098 - RNA, 32 nt, Homo Sapiens
accgacgagacuggaggaaacaacaccaaaua

SEQ ID NO: 111099 - RNA, 32 nt, Homo Sapiens
uccguccucuuggcucucccagcccuaucaca

SEQ ID NO: 111100 - RNA, 32 nt, Homo Sapiens
gaaauucccacauuuuaauuuugcagcagaau

SEQ ID NO: 111101 - RNA, 32 nt, Homo Sapiens
gcuucuagucuuucaagaaguucauacuuuau

SEQ ID NO: 111102 - RNA, 32 nt, Homo Sapiens
cauuuccauuuucauuuucgagccaucaguuu

SEQ ID NO: 111103 - RNA, 32 nt, Homo Sapiens
uuaacaggggauguuaauccuuugcauuugaa

SEQ ID NO: 111104 - RNA, 32 nt, Homo Sapiens
gaugucugccacaccucuccaagcccuccuac

SEQ ID NO: 111105 - RNA, 32 nt, Homo Sapiens
cuccccacgaccccccuuccccggccccccuu

SEQ ID NO: 111106 - RNA, 32 nt, Homo Sapiens
aaaugagcucuccuuucaacccuuguuaacaa

SEQ ID NO: 111107 - RNA, 32 nt, Homo Sapiens
cucccagcucccagcccuuccuagugcccaug

SEQ ID NO: 111108 - RNA, 32 nt, Homo Sapiens
caugccgccccggcgcccagccgcgccuggcg

SEQ ID NO: 111109 - RNA, 32 nt, Homo Sapiens
aaucuuuaucccuuuuguuaaaacaggaggca

SEQ ID NO: 111110 - RNA, 32 nt, Homo Sapiens
uuuuauuggaaugguaacuggagaaccaagaa

SEQ ID NO: 111111 - RNA, 32 nt, Homo Sapiens
acuaacuugauuucuagagaaauauccacacu

SEQ ID NO: 111112 - RNA, 32 nt, Homo Sapiens
ggcacgaggcgcccccgagcagcgcccgcgcc

SEQ ID NO: 111113 - RNA, 32 nt, Homo Sapiens
acaaguuuuacaccucucuggauucgaaguuu

SEQ ID NO: 111114 - RNA, 32 nt, Homo Sapiens
uucgccagacgagagcgauggcugagaacgcc

SEQ ID NO: 111115 - RNA, 32 nt, Homo Sapiens
cuaguuuauugaguguuuuaugaugaaacggu

SEQ ID NO: 111116 - RNA, 32 nt, Homo Sapiens
cauuaacaugaaaaagucuuuuaucauuagcu

SEQ ID NO: 111117 - RNA, 32 nt, Homo Sapiens
gaaugucaagacauuuucugucagggcagcca

SEQ ID NO: 111118 - RNA, 29 nt, Homo Sapiens
uauaaguaaaguuuguaaaauucauacuu

SEQ ID NO: 111119 - RNA, 32 nt, Homo Sapiens
aaauguuuuuauuuuuguuuuauuuuugacag

SEQ ID NO: 111120 - RNA, 32 nt, Homo Sapiens
ccggcccgaugagcugcagcggcuccggcgcg

SEQ ID NO: 111121 - RNA, 32 nt, Homo Sapiens
uggucccgugcagcuucuguccugcgucgaag

SEQ ID NO: 111122 - RNA, 32 nt, Homo Sapiens
gaggcuguguucuaaucagaaggucuggguuc

SEQ ID NO: 111123 - RNA, 32 nt, Homo Sapiens
guaguggccuagggucucuccucccugcugaa

SEQ ID NO: 111124 - RNA, 27 nt, Homo Sapiens
gccccuuuccucuucagcccugggguc

SEQ ID NO: 111125 - RNA, 32 nt, Homo Sapiens
ggacaguuaaaugcuaauuauauacaucugua

SEQ ID NO: 111126 - RNA, 32 nt, Homo Sapiens
aaaaugugaaaagucaaaaauauuuucagcau

SEQ ID NO: 111127 - RNA, 31 nt, Homo Sapiens
guaccguguaaauauaaacacauccuaucag

SEQ ID NO: 111128 - RNA, 32 nt, Homo Sapiens
ugucaugaaacacuugccauuuuaaucaaagu

SEQ ID NO: 111129 - RNA, 32 nt, Homo Sapiens
uuuagccgccuccgggggagcggccgccuauu

SEQ ID NO: 111130 - RNA, 32 nt, Homo Sapiens
caacauccugaagauuauuaaaaggaaaagau

SEQ ID NO: 111131 - RNA, 32 nt, Homo Sapiens
uuccuucaaauuaaugaccuuggauuacauaa

SEQ ID NO: 111132 - RNA, 32 nt, Homo Sapiens
guccaaggguauauuuguguuauuuucuggcu

SEQ ID NO: 111133 - RNA, 32 nt, Homo Sapiens
uuugggggcucuguccacggacuccuccccac

SEQ ID NO: 111134 - RNA, 32 nt, Homo Sapiens
gcagccuuccccccugccccagcaaggcagag

SEQ ID NO: 111135 - RNA, 32 nt, Homo Sapiens
gccuuuguaaaacagugcauuuuucagauuug

SEQ ID NO: 111136 - RNA, 32 nt, Homo Sapiens
cagcucuuucagcuccuucuugcucagcuugu

SEQ ID NO: 111137 - RNA, 30 nt, Homo Sapiens
ugaccgcaguuugcugcagaggcugugaaa

SEQ ID NO: 111138 - RNA, 32 nt, Homo Sapiens
gggccccuuagccccagcgccagggccuccca

SEQ ID NO: 111139 - RNA, 32 nt, Homo Sapiens
ccugcccagcaugacggcccccugcccgccgc

SEQ ID NO: 111140 - RNA, 32 nt, Homo Sapiens
ugcccagccugccucauggagaggaugaauug

SEQ ID NO: 111141 - RNA, 32 nt, Homo Sapiens
gccuggcaaccuggagaauccacauaccuugu

SEQ ID NO: 111142 - RNA, 32 nt, Homo Sapiens
uuguuugguuuacuuucaaaagaguagaaagc

SEQ ID NO: 111143 - RNA, 32 nt, Homo Sapiens
gaaagaaucuucugauguuuguauuauccuuc

SEQ ID NO: 111144 - RNA, 32 nt, Homo Sapiens
uucuccauguaguuccucuccuacaagccagg

SEQ ID NO: 111145 - RNA, 32 nt, Homo Sapiens
ggcuauagucucuggcacccuguccgucucca

SEQ ID NO: 111146 - RNA, 32 nt, Homo Sapiens
gauuuccccgguuucccugaacccagcccagc

SEQ ID NO: 111147 - RNA, 32 nt, Homo Sapiens
ugugauugucacugcuuuccuguccuuccuuu

SEQ ID NO: 111148 - RNA, 32 nt, Homo Sapiens
ccgcugacgggucggcgggcggguuuguguga

SEQ ID NO: 111149 - RNA, 32 nt, Homo Sapiens
aagucuucaaccagauauccucggcaacccac

SEQ ID NO: 111150 - RNA, 32 nt, Homo Sapiens
gccagcacugcagaguuugggugcugguggug

SEQ ID NO: 111151 - RNA, 32 nt, Homo Sapiens
ggggugcugcuggaggagaagcugcguggcgg

SEQ ID NO: 111152 - RNA, 32 nt, Homo Sapiens
aaguuuagugcacauagcuaaaucacaaaaca

SEQ ID NO: 111153 - RNA, 32 nt, Homo Sapiens
cugaaaaaccagaaaguaccuuuuacuguuga

SEQ ID NO: 111154 - RNA, 32 nt, Homo Sapiens
caugcccugugcuguuacagaggagaacaaaa

SEQ ID NO: 111155 - RNA, 32 nt, Homo Sapiens
caguggggauccugggggcuuucuggggugua

SEQ ID NO: 111156 - RNA, 30 nt, Homo Sapiens
gcaguuccguucucgggggaaagcccaucc

SEQ ID NO: 111157 - RNA, 32 nt, Homo Sapiens
gcgcgggcccguccggccgccggacaacaugg

SEQ ID NO: 111158 - RNA, 32 nt, Homo Sapiens
gaggcgcagggccgguguccgcgggagggugg

SEQ ID NO: 111159 - RNA, 32 nt, Homo Sapiens
gcaagaaaggagcugucugcaaaccaggaagu

SEQ ID NO: 111160 - RNA, 32 nt, Homo Sapiens
gccccuaggagaaaacuuaauaauugugccua

SEQ ID NO: 111161 - RNA, 32 nt, Homo Sapiens
cucgccuucacccccacccccaccacuucgcc

SEQ ID NO: 111162 - RNA, 32 nt, Homo Sapiens
gagcuacuguaguaggcauugccgacuguuug

SEQ ID NO: 111163 - RNA, 32 nt, Homo Sapiens
gggucugguacuuuuaaaauuguacagauguu

SEQ ID NO: 111164 - RNA, 32 nt, Homo Sapiens
augaccuauuaaaagaaaaucuaaacucaaau

SEQ ID NO: 111165 - RNA, 32 nt, Homo Sapiens
uuauguuauuuuucagcuuuucugucuccugg

SEQ ID NO: 111166 - RNA, 32 nt, Homo Sapiens
cuauacauuuauauuucuaauaauacaguuau

SEQ ID NO: 111167 - RNA, 32 nt, Homo Sapiens
gccagcagcugcuccuucagccaggccagcag

SEQ ID NO: 111168 - RNA, 32 nt, Homo Sapiens
gagaccccaaggagcugcagcugaacugcagg

SEQ ID NO: 111169 - RNA, 32 nt, Homo Sapiens
aggucuccaagccccaaaugaguccuugugaa

SEQ ID NO: 111170 - RNA, 32 nt, Homo Sapiens
cuagcuguggagguccucaggaguggagagaa

SEQ ID NO: 111171 - RNA, 32 nt, Homo Sapiens
ggucucacuccagcaucuccccaggcaaggcu

SEQ ID NO: 111172 - RNA, 32 nt, Homo Sapiens
uucuccaaaccucucuuuuggccauugugugu

SEQ ID NO: 111173 - RNA, 32 nt, Homo Sapiens
agaauaacauguuuuaagauaauuaaguuuaa

SEQ ID NO: 111174 - RNA, 32 nt, Homo Sapiens
cagguagcauucaaaauaagaaacuguucucu

SEQ ID NO: 111175 - RNA, 32 nt, Homo Sapiens
accuccguguaguugcugaugaucugcagccu

SEQ ID NO: 111176 - RNA, 32 nt, Homo Sapiens
uugguuccuaacaugccuccaacagcaucuau

SEQ ID NO: 111177 - RNA, 32 nt, Homo Sapiens
ugccucccuuuucuucccccagcccugccuga

SEQ ID NO: 111178 - RNA, 32 nt, Homo Sapiens
gggggagcugguuuuucuggagguucccccag

SEQ ID NO: 111179 - RNA, 32 nt, Homo Sapiens
uccagugccgcuccugcuuccccucccuaccc

SEQ ID NO: 111180 - RNA, 32 nt, Homo Sapiens
ugccauauuuuuccugaaaggaauugcuggac

SEQ ID NO: 111181 - RNA, 32 nt, Homo Sapiens
gagagccgccacggcguccggcugcacgugac

SEQ ID NO: 111182 - RNA, 32 nt, Homo Sapiens
ugugugaaaagucagcaguucuuucguuuagc

SEQ ID NO: 111183 - RNA, 32 nt, Homo Sapiens
gcuguccgcaaggucucuggcuccuuagugca

SEQ ID NO: 111184 - RNA, 32 nt, Homo Sapiens
cccgagagcggcggcgcgacucaccgcggagg

SEQ ID NO: 111185 - RNA, 32 nt, Homo Sapiens
gcccuggccccggugcugggcacgugggggac

SEQ ID NO: 111186 - RNA, 32 nt, Homo Sapiens
ugaggcgagaggaaaagucuuuagucggccuu

SEQ ID NO: 111187 - RNA, 29 nt, Homo Sapiens
acuggaauaaguguuuauuuucuauuaau

SEQ ID NO: 111188 - RNA, 32 nt, Homo Sapiens
ucacaaaaugucauucuugugauacucucauu

SEQ ID NO: 111189 - RNA, 32 nt, Homo Sapiens
gaacuuuguaaaaaugauguguggaggcuauu

SEQ ID NO: 111190 - RNA, 32 nt, Homo Sapiens
acgggcgggcccugcccuccccaugccuccug

SEQ ID NO: 111191 - RNA, 32 nt, Homo Sapiens
cagcgacaggccuccagcaagcaagcgcgggc

SEQ ID NO: 111192 - RNA, 32 nt, Homo Sapiens
gagacacguuuaauuuuuccuccuagaucaga

SEQ ID NO: 111193 - RNA, 32 nt, Homo Sapiens
caaaaauaaaacaaaauauugcauucuuuguu

SEQ ID NO: 111194 - RNA, 32 nt, Homo Sapiens
uuguuggucauuugucaauauucagucaccaa

SEQ ID NO: 111195 - RNA, 32 nt, Homo Sapiens
ugcugcccaagcccauccugggccccacccuc

SEQ ID NO: 111196 - RNA, 32 nt, Homo Sapiens
ucuccgcccgcuguccucccccuggaggcggc

SEQ ID NO: 111197 - RNA, 32 nt, Homo Sapiens
gacauuguucuuuuccugagucuuuugaaugg

SEQ ID NO: 111198 - RNA, 32 nt, Homo Sapiens
gaggcagaggcaguccuggggcucuggggcuc

SEQ ID NO: 111199 - RNA, 32 nt, Homo Sapiens
gucuucucugcagacaccagccugguguccuc

SEQ ID NO: 111200 - RNA, 32 nt, Homo Sapiens
gaacugcagcccugggucuucccuuagggagg

SEQ ID NO: 111201 - RNA, 32 nt, Homo Sapiens
ccggggcugggccagcgcccccugcgucccca

SEQ ID NO: 111202 - RNA, 32 nt, Homo Sapiens
cuacucuaaaauuaauagagccuuuccaucaa

SEQ ID NO: 111203 - RNA, 32 nt, Homo Sapiens
caagagggagguugagguggggcuagaguggc

SEQ ID NO: 111204 - RNA, 32 nt, Homo Sapiens
uuucccaccuucccaaaccuaauucuuguaga

SEQ ID NO: 111205 - RNA, 32 nt, Homo Sapiens
ccgggcgccaggggcgggggaccuagggcgac

SEQ ID NO: 111206 - RNA, 32 nt, Homo Sapiens
auacuccaaagaugacuuccccugccuccuac

SEQ ID NO: 111207 - RNA, 32 nt, Homo Sapiens
gguaucuacuguauuucuuuucaaggugcaau

SEQ ID NO: 111208 - RNA, 32 nt, Homo Sapiens
cucaacagccuggcccuuucuggggccacccu

SEQ ID NO: 111209 - RNA, 32 nt, Homo Sapiens
cacacgccacacgccacacgugcaggauugcu

SEQ ID NO: 111210 - RNA, 32 nt, Homo Sapiens
gugaccuccgcggcggaccgccugaguccgga

SEQ ID NO: 111211 - RNA, 32 nt, Homo Sapiens
aaagcgugaacaugaauguuuaaaguggcauu

SEQ ID NO: 111212 - RNA, 32 nt, Homo Sapiens
aacaaaagcacuuuuccaucuuguacacgaga

SEQ ID NO: 111213 - RNA, 32 nt, Homo Sapiens
ccacgaagccugcgaggcgcggggccggcgcc

SEQ ID NO: 111214 - RNA, 32 nt, Homo Sapiens
ucuucaucaguaaaaugggauaaugauggugc

SEQ ID NO: 111215 - RNA, 32 nt, Homo Sapiens
gcuagcgggcggugggggcgccagcagcgcgg

SEQ ID NO: 111216 - RNA, 32 nt, Homo Sapiens
aggguuucaauaaaauuuuaaauaaaaacagc

SEQ ID NO: 111217 - RNA, 32 nt, Homo Sapiens
uuggaaaguauuuacauaaguuauaucacaau

SEQ ID NO: 111218 - RNA, 32 nt, Homo Sapiens
gauccuaugguagcaauucugugcugguauaa

SEQ ID NO: 111219 - RNA, 32 nt, Homo Sapiens
aaugggacuuggauaaugacuuaagcuuuaua

SEQ ID NO: 111220 - RNA, 32 nt, Homo Sapiens
gggcgcugcccccacagauccauccuuuugcu

SEQ ID NO: 111221 - RNA, 32 nt, Homo Sapiens
uguacuguguacaaucucuauaggucagguuu

SEQ ID NO: 111222 - RNA, 32 nt, Homo Sapiens
uucuaugaaaaacaacagaaagcauuucauuu

SEQ ID NO: 111223 - RNA, 32 nt, Homo Sapiens
uuuaugaggggagagggcagagcccccuccuc

SEQ ID NO: 111224 - RNA, 32 nt, Homo Sapiens
cuuccuucuuuacuggaaggaccuccacauuc

SEQ ID NO: 111225 - RNA, 32 nt, Homo Sapiens
uuucaccguuugcgggaucuggaaccgaguua

SEQ ID NO: 111226 - RNA, 32 nt, Homo Sapiens
acaucaacccccugggguggaggaggggcaau

SEQ ID NO: 111227 - RNA, 32 nt, Homo Sapiens
acacaucacauuuuucuggaaaacagacggau

SEQ ID NO: 111228 - RNA, 32 nt, Homo Sapiens
guccuuuggcacagcucugcuccuccccugcc

SEQ ID NO: 111229 - RNA, 32 nt, Homo Sapiens
acaacuucuaacuuauaucuuuauagaggauu

SEQ ID NO: 111230 - RNA, 32 nt, Homo Sapiens
aggauaugagaaaauuuuaaauuauaugcauc

SEQ ID NO: 111231 - RNA, 32 nt, Homo Sapiens
ccaguugucaggcuccucccagguuauguuuu

SEQ ID NO: 111232 - RNA, 32 nt, Homo Sapiens
gacggugccugggccuguggccgccagagcug

SEQ ID NO: 111233 - RNA, 32 nt, Homo Sapiens
ucuucuccaccucggagccccacgaccucaga

SEQ ID NO: 111234 - RNA, 32 nt, Homo Sapiens
uccuacgccggguucacacguguguucacaga

SEQ ID NO: 111235 - RNA, 32 nt, Homo Sapiens
gucaguguggaauugaauaccauacuaugccc

SEQ ID NO: 111236 - RNA, 32 nt, Homo Sapiens
cccggcucgccagcuccacgcucggcuccaga

SEQ ID NO: 111237 - RNA, 32 nt, Homo Sapiens
ucagggguucccuuuuuuggcugcugaaggcu

SEQ ID NO: 111238 - RNA, 32 nt, Homo Sapiens
ggguuuugacuucuauuacuuuuggcagccug

SEQ ID NO: 111239 - RNA, 32 nt, Homo Sapiens
caccauucuccugccucagccuccucaguagc

SEQ ID NO: 111240 - RNA, 32 nt, Homo Sapiens
ucgccugaaagcaaccguaaccacgacaacaa

SEQ ID NO: 111241 - RNA, 32 nt, Homo Sapiens
auaaacuggcuugccuguggacccuccccggc

SEQ ID NO: 111242 - RNA, 32 nt, Homo Sapiens
uugggaacaaagugaauaaucagaggcugugg

SEQ ID NO: 111243 - RNA, 32 nt, Homo Sapiens
augcugccagcgccugguauggugcggcguga

SEQ ID NO: 111244 - RNA, 32 nt, Homo Sapiens
ugggagaggugacacagaguauuuuaaaagag

SEQ ID NO: 111245 - RNA, 32 nt, Homo Sapiens
gcuuaggaaaauuauuuggaacuuaguaacca

SEQ ID NO: 111246 - RNA, 32 nt, Homo Sapiens
gugacuucucaucacucuggaccuccauuccu

SEQ ID NO: 111247 - RNA, 32 nt, Homo Sapiens
agcucugcgaggggccggagcgcggcggagcc

SEQ ID NO: 111248 - RNA, 32 nt, Homo Sapiens
auucugugucucucaccucaauguccacaaca

SEQ ID NO: 111249 - RNA, 32 nt, Homo Sapiens
gacagccuccuacugcuucucuaucauguggc

SEQ ID NO: 111250 - RNA, 32 nt, Homo Sapiens
cucugcauugaaccugaaaugccgggucaccc

SEQ ID NO: 111251 - RNA, 32 nt, Homo Sapiens
ggcuggcucagcugcuggccggugagaggcac

SEQ ID NO: 111252 - RNA, 32 nt, Homo Sapiens
ucccaggagagaacggagagccagugugcugu

SEQ ID NO: 111253 - RNA, 32 nt, Homo Sapiens
uuucuauuucuccgugucagaaugggaauguc

SEQ ID NO: 111254 - RNA, 32 nt, Homo Sapiens
aggaauuuggcuguggaguaagagggaaugcg

SEQ ID NO: 111255 - RNA, 32 nt, Homo Sapiens
uuguugagguuuaugccuggacuuugauugau

SEQ ID NO: 111256 - RNA, 32 nt, Homo Sapiens
aggaaggggucgaggagaagcuugguccacgc

SEQ ID NO: 111257 - RNA, 32 nt, Homo Sapiens
gucuccucgugccuccucccagaucacccuuc

SEQ ID NO: 111258 - RNA, 32 nt, Homo Sapiens
acacuggaaaauaaaaauaauuagauuugaaa

SEQ ID NO: 111259 - RNA, 32 nt, Homo Sapiens
acucaccccugacggcuccauccaccucacca

SEQ ID NO: 111260 - RNA, 32 nt, Homo Sapiens
ccuaggcggccacuuuuaaauugggaagcaaa

SEQ ID NO: 111261 - RNA, 32 nt, Homo Sapiens
aauauaaacaugccauaguuaacaaaugauaa

SEQ ID NO: 111262 - RNA, 32 nt, Homo Sapiens
aaacugcuuaugucauauuuggauuuuaaguu

SEQ ID NO: 111263 - RNA, 32 nt, Homo Sapiens
acuucagauauuauauccuuuagcuauagguu

SEQ ID NO: 111264 - RNA, 32 nt, Homo Sapiens
ccuggagggagcaucucgggcugggggcccac

SEQ ID NO: 111265 - RNA, 30 nt, Homo Sapiens
gcuuuucagauaauggggguauaaaugaag

SEQ ID NO: 111266 - RNA, 32 nt, Homo Sapiens
uuuccuacaguguuguucccucccucaaggcu

SEQ ID NO: 111267 - RNA, 32 nt, Homo Sapiens
cccacucccuugcuggccccagcccugcuggg

SEQ ID NO: 111268 - RNA, 32 nt, Homo Sapiens
acaucucaccaacggggaccuccggagagaga

SEQ ID NO: 111269 - RNA, 32 nt, Homo Sapiens
ggagcgauuccauuuuaugacuguuguuuuuc

SEQ ID NO: 111270 - RNA, 32 nt, Homo Sapiens
guauguaugaauaugaaagugcuuuguuuugu

SEQ ID NO: 111271 - RNA, 32 nt, Homo Sapiens
auguuagaauaaaaaaguaggcucaaggaaaa

SEQ ID NO: 111272 - RNA, 32 nt, Homo Sapiens
ccacaggcaccagcugguugggaccagcagcc

SEQ ID NO: 111273 - RNA, 32 nt, Homo Sapiens
gugcccucacccagcccggcccccacccuguc

SEQ ID NO: 111274 - RNA, 32 nt, Homo Sapiens
aggcaccucuucugccuuuacuuggucuccaa

SEQ ID NO: 111275 - RNA, 32 nt, Homo Sapiens
uuauuauuuccuucuuuuucuugcuuuuggua

SEQ ID NO: 111276 - RNA, 32 nt, Homo Sapiens
ccccccucaggacaaaucuacuccagccacga

SEQ ID NO: 111277 - RNA, 32 nt, Homo Sapiens
ccaucauccgcuggugcuuuaagggacucucu

SEQ ID NO: 111278 - RNA, 32 nt, Homo Sapiens
cuuccaaacaucugcaccuugaccggacucgc

SEQ ID NO: 111279 - RNA, 32 nt, Homo Sapiens
ccaacucgggggucccggagcggcgcggggcg

SEQ ID NO: 111280 - RNA, 31 nt, Homo Sapiens
agggaggcgcgcugugcgccccgcggagccc

SEQ ID NO: 111281 - RNA, 32 nt, Homo Sapiens
ugaccugauguaaacagugucuucuuaaaugu

SEQ ID NO: 111282 - RNA, 32 nt, Homo Sapiens
caauaugauuauuauuuuuuuauucccccaaa

SEQ ID NO: 111283 - RNA, 32 nt, Homo Sapiens
uuuaggaagaagcccgggaucccgguaguuua

SEQ ID NO: 111284 - RNA, 30 nt, Homo Sapiens
gacggguuucaucauguuagccaggauggu

SEQ ID NO: 111285 - RNA, 32 nt, Homo Sapiens
agagagccggagcccugcuugcuguauucucu

SEQ ID NO: 111286 - RNA, 32 nt, Homo Sapiens
ggauuaacggccuggauuuaucauuggguugg

SEQ ID NO: 111287 - RNA, 32 nt, Homo Sapiens
ccccuugcucauuguauguugaugaguugauu

SEQ ID NO: 111288 - RNA, 32 nt, Homo Sapiens
aauggucaucuuaucaauaauaauaauauuga

SEQ ID NO: 111289 - RNA, 32 nt, Homo Sapiens
augcugugccuugucacccauugagcugcaag

SEQ ID NO: 111290 - RNA, 32 nt, Homo Sapiens
agccaggcgaggggggcuugggggcauggggc

SEQ ID NO: 111291 - RNA, 32 nt, Homo Sapiens
ggcccugccugccagccgggaaggaggcgugg

SEQ ID NO: 111292 - RNA, 32 nt, Homo Sapiens
gcaaaucaucaucaauaguauuacauuagcaa

SEQ ID NO: 111293 - RNA, 32 nt, Homo Sapiens
aaugcaucguucccacuccccaucccacuugg

SEQ ID NO: 111294 - RNA, 32 nt, Homo Sapiens
cugcucagcccugcaccaugcugcuggggaag

SEQ ID NO: 111295 - RNA, 32 nt, Homo Sapiens
uggcuuuauuucuagcuucucuacucuguccc

SEQ ID NO: 111296 - RNA, 32 nt, Homo Sapiens
uagcauuguaauggaaauacagguguguuuuc

SEQ ID NO: 111297 - RNA, 32 nt, Homo Sapiens
gcggcgggggcucggcggccaccgcugccuca

SEQ ID NO: 111298 - RNA, 32 nt, Homo Sapiens
ugccacagccccacccuugggcugagaggacc

SEQ ID NO: 111299 - RNA, 32 nt, Homo Sapiens
ugcuuaacauccuguugcaugucuagcgugau

SEQ ID NO: 111300 - RNA, 32 nt, Homo Sapiens
gacaaaaguuuaaugucagcuuaagugcuuaa

SEQ ID NO: 111301 - RNA, 32 nt, Homo Sapiens
acugcccugagcgugugcacaccuggccaggc

SEQ ID NO: 111302 - RNA, 32 nt, Homo Sapiens
acaccuuugcccuuuuugaugccccuucugcc

SEQ ID NO: 111303 - RNA, 32 nt, Homo Sapiens
gccaaggacuuccugugggucccaggucaggg

SEQ ID NO: 111304 - RNA, 32 nt, Homo Sapiens
caacccgugccccugggauccgagggccccuc

SEQ ID NO: 111305 - RNA, 32 nt, Homo Sapiens
ggcugucucccuugaggacaccaucuauguca

SEQ ID NO: 111306 - RNA, 32 nt, Homo Sapiens
ucuggagaaguauuuuugacauugagcucugg

SEQ ID NO: 111307 - RNA, 32 nt, Homo Sapiens
guccgugugcggggcuggcccggcugauaaag

SEQ ID NO: 111308 - RNA, 27 nt, Homo Sapiens
ucucccuacucccucagccccuggaac

SEQ ID NO: 111309 - RNA, 32 nt, Homo Sapiens
uaucuuuuaucuuuaaaguguuuaacauuggu

SEQ ID NO: 111310 - RNA, 32 nt, Homo Sapiens
auauauaaauuuuagguacugaaggcuuuaaa

SEQ ID NO: 111311 - RNA, 32 nt, Homo Sapiens
cccaggcgcugccagccuccuccugcgcacag

SEQ ID NO: 111312 - RNA, 32 nt, Homo Sapiens
agggaggccaagggggcacugaggguggcaca

SEQ ID NO: 111313 - RNA, 30 nt, Homo Sapiens
cuccgggcgcccgcguuagcggccgggugg

SEQ ID NO: 111314 - RNA, 32 nt, Homo Sapiens
cgcagcucagggaucuccgagucaggacgguc

SEQ ID NO: 111315 - RNA, 32 nt, Homo Sapiens
uuucugccucuguggaaaacuacuuugggauu

SEQ ID NO: 111316 - RNA, 32 nt, Homo Sapiens
gguucgagucccgccccgccuggggcgaagcc

SEQ ID NO: 111317 - RNA, 32 nt, Homo Sapiens
gaaaaaacuaauuuauacuuaucugaagguua

SEQ ID NO: 111318 - RNA, 32 nt, Homo Sapiens
aggcucacagaaaagacacacugaaccauccu

SEQ ID NO: 111319 - RNA, 32 nt, Homo Sapiens
ucccuggcuuaugagguggcaacaucuuguac

SEQ ID NO: 111320 - RNA, 32 nt, Homo Sapiens
gcggccgcggaggcccggcuggaggggcgaca

SEQ ID NO: 111321 - RNA, 32 nt, Homo Sapiens
gcggccgcggcgcggcgggaccauggagcuca

SEQ ID NO: 111322 - RNA, 32 nt, Homo Sapiens
aagugcccccccacccccggcgcagggugcac

SEQ ID NO: 111323 - RNA, 32 nt, Homo Sapiens
cacagccucuccaaggacccaggcgccagcag

SEQ ID NO: 111324 - RNA, 32 nt, Homo Sapiens
acaguggagagcccgacccacugucucagccc

SEQ ID NO: 111325 - RNA, 32 nt, Homo Sapiens
acuagcccgccagcugugggccccagaaagcc

SEQ ID NO: 111326 - RNA, 32 nt, Homo Sapiens
uaacuauuuuaacuuuguucaaguauguggua

SEQ ID NO: 111327 - RNA, 32 nt, Homo Sapiens
uauauuguucuuccuccuuagaauuuagagau

SEQ ID NO: 111328 - RNA, 32 nt, Homo Sapiens
uccuucaucgcagcugucugaacucuugauca

SEQ ID NO: 111329 - RNA, 32 nt, Homo Sapiens
ggcaagaggaggaggagagccugccguuccaa

SEQ ID NO: 111330 - RNA, 32 nt, Homo Sapiens
cccagacgucccgcuucgccccgaggcgccgc

SEQ ID NO: 111331 - RNA, 32 nt, Homo Sapiens
cuucaucugaagauguccugggcguucauaug

SEQ ID NO: 111332 - RNA, 32 nt, Homo Sapiens
ccaggagcauccaccuccuucucugucucaug

SEQ ID NO: 111333 - RNA, 32 nt, Homo Sapiens
ucaacaguaaaaagacaacccaauuaaaaaau

SEQ ID NO: 111334 - RNA, 32 nt, Homo Sapiens
ugaauaaauagcugcagacauggccaacaaca

SEQ ID NO: 111335 - RNA, 32 nt, Homo Sapiens
aggccauuucuuuucaagauagauacaaagaa

SEQ ID NO: 111336 - RNA, 32 nt, Homo Sapiens
augggagcgccuggcugcuuggauuuagccug

SEQ ID NO: 111337 - RNA, 32 nt, Homo Sapiens
cuuaggccauucuccuucucuuccauggagaa

SEQ ID NO: 111338 - RNA, 32 nt, Homo Sapiens
ccccagcccuccccucccaucugugccucugu

SEQ ID NO: 111339 - RNA, 32 nt, Homo Sapiens
gugguugcaaaaaagucuuccacauauuuuga

SEQ ID NO: 111340 - RNA, 32 nt, Homo Sapiens
caaacaaaaguacuguacucacacacauaagg

SEQ ID NO: 111341 - RNA, 32 nt, Homo Sapiens
cauugauaaauuucaauaaaucuuuuuauaca

SEQ ID NO: 111342 - RNA, 32 nt, Homo Sapiens
cucaaggaaggguggggcaggcaguaccccca

SEQ ID NO: 111343 - RNA, 32 nt, Homo Sapiens
cguagcguggaggugaccaagaugucaugcca

SEQ ID NO: 111344 - RNA, 32 nt, Homo Sapiens
uuauauguuguaauaggaauuaucugaucaau

SEQ ID NO: 111345 - RNA, 32 nt, Homo Sapiens
ggguaggcgugguggcucaggccaguaauuuc

SEQ ID NO: 111346 - RNA, 32 nt, Homo Sapiens
cccuuuggcugucuggccccagccucugcacu

SEQ ID NO: 111347 - RNA, 32 nt, Homo Sapiens
cccaaguacgcgccgggcuucuccaugacagc

SEQ ID NO: 111348 - RNA, 32 nt, Homo Sapiens
ugacuaugaugauagacagcuccugauuggca

SEQ ID NO: 111349 - RNA, 32 nt, Homo Sapiens
acugggcgccaggccuggcccggcugggccac

SEQ ID NO: 111350 - RNA, 32 nt, Homo Sapiens
cuguacucccccugcccuccccgacccgccca

SEQ ID NO: 111351 - RNA, 32 nt, Homo Sapiens
uccucccagacaugcauaggaauggccacagg

SEQ ID NO: 111352 - RNA, 32 nt, Homo Sapiens
auaggucauucauacaucacauuuuaaauugg

SEQ ID NO: 111353 - RNA, 32 nt, Homo Sapiens
gguccagacagcacugauggcgagcuuugggu

SEQ ID NO: 111354 - RNA, 32 nt, Homo Sapiens
cucgugcgccgcgcuuugaggugagccucucu

SEQ ID NO: 111355 - RNA, 32 nt, Homo Sapiens
gccucuucaucuccuggugccuugguugacua

SEQ ID NO: 111356 - RNA, 32 nt, Homo Sapiens
ugaguccggccgggcgggagccggggugacca

SEQ ID NO: 111357 - RNA, 32 nt, Homo Sapiens
aauaugacuuuaggcccggcgcaguggcucau

SEQ ID NO: 111358 - RNA, 32 nt, Homo Sapiens
acugcaaacuguccagcuuccacagcgccaug

SEQ ID NO: 111359 - RNA, 32 nt, Homo Sapiens
uucucagagucuuuuuuuuuuuuuuugagaca

SEQ ID NO: 111360 - RNA, 32 nt, Homo Sapiens
gaacuuaaaaauuuguucacauuacaugaaag

SEQ ID NO: 111361 - RNA, 32 nt, Homo Sapiens
gucaggguccaagaggaauggguguucugugg

SEQ ID NO: 111362 - RNA, 32 nt, Homo Sapiens
acacaauuugaaauuuaugauuggaugacuuu

SEQ ID NO: 111363 - RNA, 32 nt, Homo Sapiens
ccgauccuguugcugcugcugcaccgcccgcc

SEQ ID NO: 111364 - RNA, 32 nt, Homo Sapiens
caaccucaauuucagcuggcaaugccaccaca

SEQ ID NO: 111365 - RNA, 32 nt, Homo Sapiens
gagucaagauuuuccauuuggaucuauuuuaa

SEQ ID NO: 111366 - RNA, 32 nt, Homo Sapiens
gaggucacuugccugccuucucuggacugcac

SEQ ID NO: 111367 - RNA, 32 nt, Homo Sapiens
gauuaaaaaaauuuuuuuugaaaaaaacaagg

SEQ ID NO: 111368 - RNA, 32 nt, Homo Sapiens
cggucacucagccuauggagaugaagaaacug

SEQ ID NO: 111369 - RNA, 32 nt, Homo Sapiens
uuucuucacuucccuuugcaucugagauccug

SEQ ID NO: 111370 - RNA, 32 nt, Homo Sapiens
cguccagcccgggccucuccaaggcugcccgu

SEQ ID NO: 111371 - RNA, 32 nt, Homo Sapiens
aucuuugcuaaaaauaaaugugacccuguuua

SEQ ID NO: 111372 - RNA, 32 nt, Homo Sapiens
gcuccugacgcacuuucugcgggugggagggg

SEQ ID NO: 111373 - RNA, 32 nt, Homo Sapiens
ggugcccugaccucagccuccuccccaaaccc

SEQ ID NO: 111374 - RNA, 32 nt, Homo Sapiens
ccacagagagggagagcagagaaagaaguccu

SEQ ID NO: 111375 - RNA, 32 nt, Homo Sapiens
acauuuguguuuccaauugugauaaaaaaugc

SEQ ID NO: 111376 - RNA, 32 nt, Homo Sapiens
cuaauguggcccugagggccggagcccgcacc

SEQ ID NO: 111377 - RNA, 32 nt, Homo Sapiens
gggagaaggaggagcggacgcaucguagaaag

SEQ ID NO: 111378 - RNA, 32 nt, Homo Sapiens
gucccgaugcaggcccgaggggggccaugggg

SEQ ID NO: 111379 - RNA, 30 nt, Homo Sapiens
agccaugucugugcucaggaagagggaagg

SEQ ID NO: 111380 - RNA, 32 nt, Homo Sapiens
gaaucaaggauuuauuugauaucauccucggu

SEQ ID NO: 111381 - RNA, 32 nt, Homo Sapiens
uugccacagacccagcacccagcaaaucccuc

SEQ ID NO: 111382 - RNA, 32 nt, Homo Sapiens
uagguaaaaaguucuuuuuguuguaaucgucc

SEQ ID NO: 111383 - RNA, 32 nt, Homo Sapiens
acagcgggacgcggccggcggccucagagucc

SEQ ID NO: 111384 - RNA, 32 nt, Homo Sapiens
ugccaugugggaagagcaggggagguuuaguu

SEQ ID NO: 111385 - RNA, 32 nt, Homo Sapiens
gagcugaugaacuggauuaacucuaacacucc

SEQ ID NO: 111386 - RNA, 32 nt, Homo Sapiens
uaaaacucguuuguuuucaaaggucuggacua

SEQ ID NO: 111387 - RNA, 32 nt, Homo Sapiens
cuacaaccaaccagaaucauggaacagccaac

SEQ ID NO: 111388 - RNA, 32 nt, Homo Sapiens
cuuuggggcagggccuggcccuggacuggguu

SEQ ID NO: 111389 - RNA, 32 nt, Homo Sapiens
agaggcacucaugggaaaauugguuuugcuuu

SEQ ID NO: 111390 - RNA, 32 nt, Homo Sapiens
uuuuccagagacccagcugugauucacaggug

SEQ ID NO: 111391 - RNA, 30 nt, Homo Sapiens
agggcuggccacaugacccaucuggucaaa

SEQ ID NO: 111392 - RNA, 32 nt, Homo Sapiens
aggaugaagaucugccagcucugaggauucug

SEQ ID NO: 111393 - RNA, 32 nt, Homo Sapiens
cggacagcaaaguggaaaguuagaccagcugg

SEQ ID NO: 111394 - RNA, 32 nt, Homo Sapiens
guucgugcgcgucugguggcggcggcgugaug

SEQ ID NO: 111395 - RNA, 32 nt, Homo Sapiens
uuaguuccauuacuauuaauagcaauuagaua

SEQ ID NO: 111396 - RNA, 32 nt, Homo Sapiens
gcaccagaauuuccaaaaaagacaaaaaauuu

SEQ ID NO: 111397 - RNA, 32 nt, Homo Sapiens
aaaccagcagguccuccagcauccccugcagc

SEQ ID NO: 111398 - RNA, 32 nt, Homo Sapiens
ccuaugaaaaaauuaguugagaaagaagagaa

SEQ ID NO: 111399 - RNA, 32 nt, Homo Sapiens
uaagauggguccguggcccacacucggucaug

SEQ ID NO: 111400 - RNA, 32 nt, Homo Sapiens
acuuguggucauuguucauucagccuccuuug

SEQ ID NO: 111401 - RNA, 32 nt, Homo Sapiens
gagaauuucagcaaagauguuuuaaauauaua

SEQ ID NO: 111402 - RNA, 32 nt, Homo Sapiens
cagaaauaauuuccucacaauuguguuuauuc

SEQ ID NO: 111403 - RNA, 32 nt, Homo Sapiens
cggccccaccgaggcgucggccgcccgaagag

SEQ ID NO: 111404 - RNA, 32 nt, Homo Sapiens
guacuagcaccuucaucacuccccucagggca

SEQ ID NO: 111405 - RNA, 30 nt, Homo Sapiens
aggucuucucuugccacgucuuggucucca

SEQ ID NO: 111406 - RNA, 32 nt, Homo Sapiens
auauucuuguaaucugcauucuccaggaguuu

SEQ ID NO: 111407 - RNA, 32 nt, Homo Sapiens
uacucucugaagauggcagaagcucaccaagc

SEQ ID NO: 111408 - RNA, 32 nt, Homo Sapiens
ugcccggaaugggggcuguggacgcuccugcc

SEQ ID NO: 111409 - RNA, 32 nt, Homo Sapiens
auaagauucagagcacuugggauuguaaguua

SEQ ID NO: 111410 - RNA, 30 nt, Homo Sapiens
uugccaggcaggcaccugggcuuucuggaa

SEQ ID NO: 111411 - RNA, 32 nt, Homo Sapiens
caccccuagacaauccuaccuggucccaucug

SEQ ID NO: 111412 - RNA, 32 nt, Homo Sapiens
uuggaacucuccaucacucaucuuuaaauuag

SEQ ID NO: 111413 - RNA, 32 nt, Homo Sapiens
aaguuuuguaccauuuauuuuaugacauuuua

SEQ ID NO: 111414 - RNA, 32 nt, Homo Sapiens
uuguuuaaucaucaccaacuccauuaucaccc

SEQ ID NO: 111415 - RNA, 31 nt, Homo Sapiens
cgccugcagcgcaagcacgaccaugagagag

SEQ ID NO: 111416 - RNA, 32 nt, Homo Sapiens
uugcgaaggagagaggcggcugagggacugca

SEQ ID NO: 111417 - RNA, 32 nt, Homo Sapiens
uuuaaaaauaccaaucacaaggauaauagagu

SEQ ID NO: 111418 - RNA, 32 nt, Homo Sapiens
gugccauuucauuauuugauuaucaccaaauu

SEQ ID NO: 111419 - RNA, 32 nt, Homo Sapiens
aggacaguuucccauaugaguaauuagaagug

SEQ ID NO: 111420 - RNA, 32 nt, Homo Sapiens
gaacaaaaacaucaacauggaguccaaguaau

SEQ ID NO: 111421 - RNA, 32 nt, Homo Sapiens
acauuuaaaaauuuucaguacuauuacucauc

SEQ ID NO: 111422 - RNA, 32 nt, Homo Sapiens
caaacccagcugcagcuucucaucucacgaau

SEQ ID NO: 111423 - RNA, 32 nt, Homo Sapiens
gccgcggagucggcgguguuguagguagcggu

SEQ ID NO: 111424 - RNA, 32 nt, Homo Sapiens
gaauguuguaaaacugucaggagauguaaaau

SEQ ID NO: 111425 - RNA, 32 nt, Homo Sapiens
cggugaagacccccauccccauguccuuccag

SEQ ID NO: 111426 - RNA, 32 nt, Homo Sapiens
augauacuugaucaaugaaaugucacauuauu

SEQ ID NO: 111427 - RNA, 32 nt, Homo Sapiens
gcuuccaggaugaucaaccuagcugaaaaccu

SEQ ID NO: 111428 - RNA, 32 nt, Homo Sapiens
ggcggcgacuucggcggcgccacgagagcggg

SEQ ID NO: 111429 - RNA, 32 nt, Homo Sapiens
aauuuacaaaaaugaguacuguauacuauauu

SEQ ID NO: 111430 - RNA, 32 nt, Homo Sapiens
caacucuucaaucccaaccugcgcugugauuu

SEQ ID NO: 111431 - RNA, 32 nt, Homo Sapiens
gaagagaagaaaguaccugaggauugcucuuu

SEQ ID NO: 111432 - RNA, 32 nt, Homo Sapiens
uuuugguaacaagaagcacaaugucuuuuuua

SEQ ID NO: 111433 - RNA, 32 nt, Homo Sapiens
uuuguggccuacugcucggggcaggggggcug

SEQ ID NO: 111434 - RNA, 32 nt, Homo Sapiens
uagauguugagauaauaucuuuugaggaacac

SEQ ID NO: 111435 - RNA, 32 nt, Homo Sapiens
uuuguauauaaaauuuuucugaguauaauguu

SEQ ID NO: 111436 - RNA, 32 nt, Homo Sapiens
cgcccuggaagacgcggccgguguacuuggga

SEQ ID NO: 111437 - RNA, 29 nt, Homo Sapiens
uuaauuaucucuuucuaccacaaaaccag

SEQ ID NO: 111438 - RNA, 32 nt, Homo Sapiens
ccagagaagacuguccuuuugagugacucaac

SEQ ID NO: 111439 - RNA, 32 nt, Homo Sapiens
aacaucacgugagacuccugggagacacaacc

SEQ ID NO: 111440 - RNA, 32 nt, Homo Sapiens
guguguagaugaggggcgggggacgggcgcca

SEQ ID NO: 111441 - RNA, 32 nt, Homo Sapiens
guaggguauguguacugcuuggagcuacggaa

SEQ ID NO: 111442 - RNA, 32 nt, Homo Sapiens
ugagucauguguuccaguggcuuggguucaca

SEQ ID NO: 111443 - RNA, 32 nt, Homo Sapiens
gagggugugggaaggucaagauggagugcaag

SEQ ID NO: 111444 - RNA, 32 nt, Homo Sapiens
guuuuacugccuguagcaauggccagagccuc

SEQ ID NO: 111445 - RNA, 32 nt, Homo Sapiens
auacuucacagcagaucaaacacauuuauggc

SEQ ID NO: 111446 - RNA, 32 nt, Homo Sapiens
gccccgccgagaccccacagggaccucaguca

SEQ ID NO: 111447 - RNA, 32 nt, Homo Sapiens
uaccgaagcaacuagauguggcugggacacaa

SEQ ID NO: 111448 - RNA, 32 nt, Homo Sapiens
uccagaaacugagacaaucacaugacagucac

SEQ ID NO: 111449 - RNA, 32 nt, Homo Sapiens
aggacuccacagcgcuuucucagucacaagcc

SEQ ID NO: 111450 - RNA, 32 nt, Homo Sapiens
caauacauaugugaauauaagauaguaugaua

SEQ ID NO: 111451 - RNA, 32 nt, Homo Sapiens
auggcguagccuacuccacaccuaggcuguac

SEQ ID NO: 111452 - RNA, 28 nt, Homo Sapiens
uaacugcgaguuuaaauguguuuguccu

SEQ ID NO: 111453 - RNA, 32 nt, Homo Sapiens
uuuugaaaggacuuauuaauuuugcugacaaa

SEQ ID NO: 111454 - RNA, 32 nt, Homo Sapiens
uccugccccgggaggucuccccggcccgcauc

SEQ ID NO: 111455 - RNA, 29 nt, Homo Sapiens
ggccacauagugauuuuggaaaacaggau

SEQ ID NO: 111456 - RNA, 32 nt, Homo Sapiens
uugugguuuugguucagaaacaaguuguauau

SEQ ID NO: 111457 - RNA, 32 nt, Homo Sapiens
uuaauuuuaagugaaauugccauucuaacucu

SEQ ID NO: 111458 - RNA, 32 nt, Homo Sapiens
gucgagccccgggcugcgcaccccgcuaggag

SEQ ID NO: 111459 - RNA, 32 nt, Homo Sapiens
ugaagagagauauaucugaaaacuggaauaag

SEQ ID NO: 111460 - RNA, 32 nt, Homo Sapiens
caguugaagacgggacgcgugcccgaucucaa

SEQ ID NO: 111461 - RNA, 32 nt, Homo Sapiens
gccacuggcuucccggccuuccguccgcugcc

SEQ ID NO: 111462 - RNA, 32 nt, Homo Sapiens
cggggcacccucggccucacccugcagugucu

SEQ ID NO: 111463 - RNA, 32 nt, Homo Sapiens
uccuucuccacuuuuugcagaucaaacagcau

SEQ ID NO: 111464 - RNA, 32 nt, Homo Sapiens
gauucagcucugcagccuccuccgcacucagg

SEQ ID NO: 111465 - RNA, 32 nt, Homo Sapiens
cccguuuccuuuuuccucuuccuuaauucuag

SEQ ID NO: 111466 - RNA, 32 nt, Homo Sapiens
aggccagugcagacuuugcuuccuccuuuugu

SEQ ID NO: 111467 - RNA, 32 nt, Homo Sapiens
ugcucuuucugguucuccccaccaccccacca

SEQ ID NO: 111468 - RNA, 32 nt, Homo Sapiens
gcagcugggcgcaggagcuggugggcuguugg

SEQ ID NO: 111469 - RNA, 32 nt, Homo Sapiens
ggaccaaucaaaccucuuuucuuauaaauuac

SEQ ID NO: 111470 - RNA, 32 nt, Homo Sapiens
cgaggaagccucugcacuuccacacauggcac

SEQ ID NO: 111471 - RNA, 32 nt, Homo Sapiens
ucaaaucgcaaauauggcgccggagcggcugc

SEQ ID NO: 111472 - RNA, 32 nt, Homo Sapiens
aaaaaagguacuuccugaaacuuuugauucaa

SEQ ID NO: 111473 - RNA, 32 nt, Homo Sapiens
accggcggagagcgaccucgggguuaaggggu

SEQ ID NO: 111474 - RNA, 32 nt, Homo Sapiens
aaaucaaauggcauccggggauuucugcucac

SEQ ID NO: 111475 - RNA, 32 nt, Homo Sapiens
caggagccaaagacauagcaauggagaacgug

SEQ ID NO: 111476 - RNA, 32 nt, Homo Sapiens
ggcgaugacaguuguuucuaugccuucugacc

SEQ ID NO: 111477 - RNA, 32 nt, Homo Sapiens
aggacaggcucuggagggaaaagccagagaga

SEQ ID NO: 111478 - RNA, 32 nt, Homo Sapiens
acaaaacauagcugguuaaccuugaagugacu

SEQ ID NO: 111479 - RNA, 30 nt, Homo Sapiens
cuuccagguucaagcuauucucaugccuca

SEQ ID NO: 111480 - RNA, 32 nt, Homo Sapiens
gccagagaugaggggacgccuggugaaaaugg

SEQ ID NO: 111481 - RNA, 32 nt, Homo Sapiens
uaaagggaaaaucauuucuuguccuuuaaggc

SEQ ID NO: 111482 - RNA, 31 nt, Homo Sapiens
gcagcggagcgcagcaucauggcggaccgag

SEQ ID NO: 111483 - RNA, 32 nt, Homo Sapiens
ccccacccccuaacacuaucucuucuauccug

SEQ ID NO: 111484 - RNA, 32 nt, Homo Sapiens
gcgcagcugcuccagcuuggcuccaggggaca

SEQ ID NO: 111485 - RNA, 32 nt, Homo Sapiens
agcaaccugaaugaauuuccagcaaauuauga

SEQ ID NO: 111486 - RNA, 32 nt, Homo Sapiens
ucagcugcucucugaccugcuuccucauggcu

SEQ ID NO: 111487 - RNA, 32 nt, Homo Sapiens
acugggaagagauagaauucaucuauacuuuc

SEQ ID NO: 111488 - RNA, 32 nt, Homo Sapiens
cggcgggcggugcuagcuccgcgcucccugcc

SEQ ID NO: 111489 - RNA, 32 nt, Homo Sapiens
gcccucuggcuccuggucauguuccauuauug

SEQ ID NO: 111490 - RNA, 32 nt, Homo Sapiens
cagcaaauggugccagcucuggcucaugagau

SEQ ID NO: 111491 - RNA, 32 nt, Homo Sapiens
aaggcgcucccucaucugggccaaaggaagga

SEQ ID NO: 111492 - RNA, 32 nt, Homo Sapiens
uuuuuggggaggggcggggggcuggugcggaa

SEQ ID NO: 111493 - RNA, 32 nt, Homo Sapiens
ggcugagggaccgcggggagggggcgccgagc

SEQ ID NO: 111494 - RNA, 32 nt, Homo Sapiens
aguacuguugaaaacugcaaguauuggcuauu

SEQ ID NO: 111495 - RNA, 31 nt, Homo Sapiens
ccgaggccgccgaguaccaggaggcccugga

SEQ ID NO: 111496 - RNA, 32 nt, Homo Sapiens
aguagaccgcagaggcucgcggccgcggguag

SEQ ID NO: 111497 - RNA, 32 nt, Homo Sapiens
uccccgcaacccagccccagccccagccccag

SEQ ID NO: 111498 - RNA, 32 nt, Homo Sapiens
cugccuacuuaacgcccagcucugcucagaaa

SEQ ID NO: 111499 - RNA, 32 nt, Homo Sapiens
ugccuucccccuccccacaggcucuccuugug

SEQ ID NO: 111500 - RNA, 32 nt, Homo Sapiens
gucccuccagcagucgccuccucccacccuga

SEQ ID NO: 111501 - RNA, 32 nt, Homo Sapiens
ucgagaccagccugggcaacguggugaaaccc

SEQ ID NO: 111502 - RNA, 32 nt, Homo Sapiens
augcuggaauggggaggggcuccccaagaugg

SEQ ID NO: 111503 - RNA, 32 nt, Homo Sapiens
ccagauggcacucagcgcucuccccugaggga

SEQ ID NO: 111504 - RNA, 32 nt, Homo Sapiens
ccucaccgcaggcagcaguuugcauuuugaaa

SEQ ID NO: 111505 - RNA, 32 nt, Homo Sapiens
cacuccccggcgccugccuuccgcggagacgu

SEQ ID NO: 111506 - RNA, 32 nt, Homo Sapiens
acaccuuauuuuuuccuugucauaaauggucc

SEQ ID NO: 111507 - RNA, 32 nt, Homo Sapiens
ggcaccuucuucugccuauuuagucaaaggcu

SEQ ID NO: 111508 - RNA, 32 nt, Homo Sapiens
ccaugccgacuguuugcucccggagcucugcg

SEQ ID NO: 111509 - RNA, 32 nt, Homo Sapiens
gguggcuccgggccggccgcuggcaucagggg

SEQ ID NO: 111510 - RNA, 32 nt, Homo Sapiens
cugcccacggccuggguguggcuggaauggug

SEQ ID NO: 111511 - RNA, 32 nt, Homo Sapiens
ggugauugucucgcuuguuuucaguugucgau

SEQ ID NO: 111512 - RNA, 32 nt, Homo Sapiens
aauacugaaacacauuaugccucuguaauugg

SEQ ID NO: 111513 - RNA, 32 nt, Homo Sapiens
uaugguauuuaguaauggcccagcuuagagac

SEQ ID NO: 111514 - RNA, 32 nt, Homo Sapiens
gguggcggguaguucccgccggcugugcgcgc

SEQ ID NO: 111515 - RNA, 32 nt, Homo Sapiens
gcuuaagggacacaguggacgaggggagaguc

SEQ ID NO: 111516 - RNA, 32 nt, Homo Sapiens
uggucacggggagcuuccugggcaagcaacau

SEQ ID NO: 111517 - RNA, 32 nt, Homo Sapiens
cugauuuuacagauaaagaaacaaagcuucag

SEQ ID NO: 111518 - RNA, 32 nt, Homo Sapiens
cuuugggcugaauggcagcacccacgcugggc

SEQ ID NO: 111519 - RNA, 32 nt, Homo Sapiens
uaugcauuuguaauuuuacauguaauaugcau

SEQ ID NO: 111520 - RNA, 32 nt, Homo Sapiens
aaggagaguccgguuuaaccgucaccgggaag

SEQ ID NO: 111521 - RNA, 32 nt, Homo Sapiens
uacugccauguuugcuuggagugccacaggaa

SEQ ID NO: 111522 - RNA, 32 nt, Homo Sapiens
gcucugaacuaaaagcauccguggggaccgaa

SEQ ID NO: 111523 - RNA, 32 nt, Homo Sapiens
aauuuuaacuaaaauuccaucucaaagagacc

SEQ ID NO: 111524 - RNA, 32 nt, Homo Sapiens
gcugucccccagcagaggugucccuggauaca

SEQ ID NO: 111525 - RNA, 32 nt, Homo Sapiens
agcaggaaaaauauuauaucuaauuaugucua

SEQ ID NO: 111526 - RNA, 32 nt, Homo Sapiens
cuucucuauaaaauuuuaauaaaugaaauguc

SEQ ID NO: 111527 - RNA, 32 nt, Homo Sapiens
ggauguguggaggugcuuauccaggugugauu

SEQ ID NO: 111528 - RNA, 32 nt, Homo Sapiens
cagucuucaguggugagucaguccucaccaag

SEQ ID NO: 111529 - RNA, 30 nt, Homo Sapiens
caaauugucugugaacugcuuagguaggag

SEQ ID NO: 111530 - RNA, 32 nt, Homo Sapiens
cgcccucccucccccucgagccgccgcgaugu

SEQ ID NO: 111531 - RNA, 32 nt, Homo Sapiens
ucuccugccugcccagcugcgcggcggagcgg

SEQ ID NO: 111532 - RNA, 32 nt, Homo Sapiens
aucucuggaaagggcccugauuuggccuaucu

SEQ ID NO: 111533 - RNA, 32 nt, Homo Sapiens
caagaugguugccccaggucccuggcccccuu

SEQ ID NO: 111534 - RNA, 32 nt, Homo Sapiens
uugugugaauguuuauaucaaaauguuugcca

SEQ ID NO: 111535 - RNA, 32 nt, Homo Sapiens
cagcuugagagaagcacucuguuuaugacaac

SEQ ID NO: 111536 - RNA, 32 nt, Homo Sapiens
uacccaggagggcaccacgucgugugcauacu

SEQ ID NO: 111537 - RNA, 32 nt, Homo Sapiens
uuucuccauuucugccggggucucccccuucc

SEQ ID NO: 111538 - RNA, 32 nt, Homo Sapiens
uuucuagaucacauuuucuugaugucuuccuu

SEQ ID NO: 111539 - RNA, 32 nt, Homo Sapiens
gcacgcggagcgaaacaguuugaaagggacug

SEQ ID NO: 111540 - RNA, 32 nt, Homo Sapiens
acuaugggaccugcaucuccauuccuacuacc

SEQ ID NO: 111541 - RNA, 32 nt, Homo Sapiens
uuuuuucauauuuguuuguuugcaauguuacu

SEQ ID NO: 111542 - RNA, 30 nt, Homo Sapiens
gcauuugucugugucaagaaguucaccuuc

SEQ ID NO: 111543 - RNA, 32 nt, Homo Sapiens
auucuucaauucaugacgagugccaaacuuga

SEQ ID NO: 111544 - RNA, 32 nt, Homo Sapiens
uagucccucuaagggagagaaaugcauuugaa

SEQ ID NO: 111545 - RNA, 32 nt, Homo Sapiens
auaucuuucuucagaguugcugacucuugaaa

SEQ ID NO: 111546 - RNA, 32 nt, Homo Sapiens
ccucgcugucuccacaggacccuuccccucca

SEQ ID NO: 111547 - RNA, 32 nt, Homo Sapiens
gcaggcaggggaaggagaagagacugaggggc

SEQ ID NO: 111548 - RNA, 32 nt, Homo Sapiens
cagcaggucgccuccagccugaccagcaucgg

SEQ ID NO: 111549 - RNA, 32 nt, Homo Sapiens
cuguuaccugccacuaggauccccgccugaga

SEQ ID NO: 111550 - RNA, 32 nt, Homo Sapiens
agaccaagaacaaaaccaccugaguauguagg

SEQ ID NO: 111551 - RNA, 32 nt, Homo Sapiens
ucauucucucgcacauuuccacagcaccugcu

SEQ ID NO: 111552 - RNA, 32 nt, Homo Sapiens
cuugagggcagggcugagucuuggucacccgu

SEQ ID NO: 111553 - RNA, 32 nt, Homo Sapiens
auggagacuuagacauguaaucugaaaaagaa

SEQ ID NO: 111554 - RNA, 32 nt, Homo Sapiens
aaacaagaauacugagucaguuuuuuaucugg

SEQ ID NO: 111555 - RNA, 32 nt, Homo Sapiens
gugccugcguugugccaguugcuggagaggua

SEQ ID NO: 111556 - RNA, 32 nt, Homo Sapiens
acagucugcgacgggacccggcgugcccaugu

SEQ ID NO: 111557 - RNA, 32 nt, Homo Sapiens
gggaggcgagcaagauggcgcagacgcagggc

SEQ ID NO: 111558 - RNA, 32 nt, Homo Sapiens
cccucaagguggccaccccagaugaagcuccu

SEQ ID NO: 111559 - RNA, 32 nt, Homo Sapiens
uuuuccugucuuuuaucccaggaggcaggaca

SEQ ID NO: 111560 - RNA, 32 nt, Homo Sapiens
gugcacacgccuuugcaagcgacggcgccaug

SEQ ID NO: 111561 - RNA, 32 nt, Homo Sapiens
aggcaaaaguuauaaugaggaagauaauauug

SEQ ID NO: 111562 - RNA, 32 nt, Homo Sapiens
cauccauuuucuauccugugucaguguuucau

SEQ ID NO: 111563 - RNA, 28 nt, Homo Sapiens
gcuguauuuacaggagaaagaggugauu

SEQ ID NO: 111564 - RNA, 32 nt, Homo Sapiens
ucugccauucccucccccaggccuucccugcc

SEQ ID NO: 111565 - RNA, 32 nt, Homo Sapiens
agcacaucuauuaugugacagauuuaaauguu

SEQ ID NO: 111566 - RNA, 32 nt, Homo Sapiens
gagcugccaaggaaaugaaagaugaggcgggg

SEQ ID NO: 111567 - RNA, 32 nt, Homo Sapiens
cagugagacaccuuccuguauccagcuuuccc

SEQ ID NO: 111568 - RNA, 32 nt, Homo Sapiens
uugcuguucuuuguccaccuuauuuacuuguu

SEQ ID NO: 111569 - RNA, 32 nt, Homo Sapiens
caaaagucaagagcuucauucucugcuucuaa

SEQ ID NO: 111570 - RNA, 32 nt, Homo Sapiens
cuguggcccagaagcuggaaguuugggaaagg

SEQ ID NO: 111571 - RNA, 32 nt, Homo Sapiens
uuauaaaagagauuuaauugacucucaguucc

SEQ ID NO: 111572 - RNA, 32 nt, Homo Sapiens
ugggaggaucauuugagcccaggaguuugaga

SEQ ID NO: 111573 - RNA, 32 nt, Homo Sapiens
acucugugauggauuaaagauggcuacauauu

SEQ ID NO: 111574 - RNA, 32 nt, Homo Sapiens
caguccagcccucucccuuccacuggugccuu

SEQ ID NO: 111575 - RNA, 32 nt, Homo Sapiens
gaccuuuggggcccgcgcugagacgcgcccgg

SEQ ID NO: 111576 - RNA, 32 nt, Homo Sapiens
agguacuuugggccaguagaguauacuacagu

SEQ ID NO: 111577 - RNA, 32 nt, Homo Sapiens
ucuggggaauccuggugaauauagugcugcua

SEQ ID NO: 111578 - RNA, 32 nt, Homo Sapiens
uucucagcauucuuagaauccaaauuacaacc

SEQ ID NO: 111579 - RNA, 32 nt, Homo Sapiens
cccgucucuauucugauaauccucaaauuucu

SEQ ID NO: 111580 - RNA, 32 nt, Homo Sapiens
ccccacggccccaaagccccccagccuccaug

SEQ ID NO: 111581 - RNA, 32 nt, Homo Sapiens
gugccucguucaucccuggugcuugagccccu

SEQ ID NO: 111582 - RNA, 32 nt, Homo Sapiens
guuacauuccuuggggguuagacacccuucau

SEQ ID NO: 111583 - RNA, 30 nt, Homo Sapiens
gaucagccacuugcugacccugguucuuaa

SEQ ID NO: 111584 - RNA, 32 nt, Homo Sapiens
uuuuauccccuacaucuggcagcauguggagc

SEQ ID NO: 111585 - RNA, 32 nt, Homo Sapiens
cgccuguaaucccagcacuuugggaagccaag

SEQ ID NO: 111586 - RNA, 32 nt, Homo Sapiens
caccuauaaucccagcacuuugggaggccgag

SEQ ID NO: 111587 - RNA, 32 nt, Homo Sapiens
caccuguaaucccagcacuuugggaggccaag

SEQ ID NO: 111588 - RNA, 32 nt, Homo Sapiens
cgaguuuuuuaaaggcacauucuguauacugc

SEQ ID NO: 111589 - RNA, 32 nt, Homo Sapiens
cacccauaaucccagcacuuugggaggcugag

SEQ ID NO: 111590 - RNA, 32 nt, Homo Sapiens
gcugucccuggacgugcugcagcccuccuguc

SEQ ID NO: 111591 - RNA, 32 nt, Homo Sapiens
cgggcacaggccaggacaaaaugcagacuuuu

SEQ ID NO: 111592 - RNA, 32 nt, Homo Sapiens
agugaccugcaguuuguggcugcagccagucc

SEQ ID NO: 111593 - RNA, 32 nt, Homo Sapiens
uauucugaagauugucccucuugcacuuggca

SEQ ID NO: 111594 - RNA, 32 nt, Homo Sapiens
gucugcguggaauaauacucaauauaacucau

SEQ ID NO: 111595 - RNA, 32 nt, Homo Sapiens
uaugucucuuuuuauagcacugaaaaccauca

SEQ ID NO: 111596 - RNA, 30 nt, Homo Sapiens
guguuauuuuugcacuacaagggcucugaa

SEQ ID NO: 111597 - RNA, 32 nt, Homo Sapiens
cauucuuauauuauuucauguauauugaagaa

SEQ ID NO: 111598 - RNA, 32 nt, Homo Sapiens
augacaaaaaugagauaaaaucuuaaaaacau

SEQ ID NO: 111599 - RNA, 32 nt, Homo Sapiens
ggaaaaggagggagggggugucugcaccaccu

SEQ ID NO: 111600 - RNA, 32 nt, Homo Sapiens
cgcagguggggcugcacagacgcugauggugg

SEQ ID NO: 111601 - RNA, 32 nt, Homo Sapiens
guuugcagucugagcaggccaggggcugacag

SEQ ID NO: 111602 - RNA, 32 nt, Homo Sapiens
uguauuuagagcgugucacuuccucugaacug

SEQ ID NO: 111603 - RNA, 32 nt, Homo Sapiens
accaaguggaaaucgaguuccuuccuguguac

SEQ ID NO: 111604 - RNA, 32 nt, Homo Sapiens
augauauuuaacaaagauagaguuuacaguuu

SEQ ID NO: 111605 - RNA, 32 nt, Homo Sapiens
ccaaaauguguuucauaacaaaccaucuggug

SEQ ID NO: 111606 - RNA, 32 nt, Homo Sapiens
ccuggguggcugggcccggcuuagggcagggu

SEQ ID NO: 111607 - RNA, 32 nt, Homo Sapiens
gcguuucaauaaaguuuguacacuuucaaaaa

SEQ ID NO: 111608 - RNA, 32 nt, Homo Sapiens
uaaccagugacuucaacuuuggcauuucauuc

SEQ ID NO: 111609 - RNA, 32 nt, Homo Sapiens
agaggaaguggggagagacggcaggugcagug

SEQ ID NO: 111610 - RNA, 32 nt, Homo Sapiens
ucggcuacccucggaccaggcccgcagcgccg

SEQ ID NO: 111611 - RNA, 32 nt, Homo Sapiens
uuuuuuuuaagaucuuuuucugauaugccugg

SEQ ID NO: 111612 - RNA, 32 nt, Homo Sapiens
ccuucuuacacacacacacacacacacacaca

SEQ ID NO: 111613 - RNA, 32 nt, Homo Sapiens
cacccgcccucccucccucccacggcgcucgc

SEQ ID NO: 111614 - RNA, 32 nt, Homo Sapiens
uuacacaaggaaauguguggcuuuuguuuugu

SEQ ID NO: 111615 - RNA, 32 nt, Homo Sapiens
cugggcgugugagcggccaccacaggcccuuc

SEQ ID NO: 111616 - RNA, 32 nt, Homo Sapiens
aggugacauccuuccccuuccacccugcuccc

SEQ ID NO: 111617 - RNA, 32 nt, Homo Sapiens
acgaggccuggaggagccucggagcccccgca

SEQ ID NO: 111618 - RNA, 32 nt, Homo Sapiens
gcuauuuuaaccccccaaauaaguuauuuguc

SEQ ID NO: 111619 - RNA, 32 nt, Homo Sapiens
gagguacaagaagccagaguggaaaugugcag

SEQ ID NO: 111620 - RNA, 32 nt, Homo Sapiens
ggaaggccuggagccggcagggggaagguggg

SEQ ID NO: 111621 - RNA, 32 nt, Homo Sapiens
acuuaugauauauuuuguuuccucuugugguu

SEQ ID NO: 111622 - RNA, 32 nt, Homo Sapiens
uuaaugcuaggauagucuaaaucuucaaggug

SEQ ID NO: 111623 - RNA, 32 nt, Homo Sapiens
aggcccucgaggggcgcaggcggacgggaaca

SEQ ID NO: 111624 - RNA, 32 nt, Homo Sapiens
caugucuccauucuucucugucucugucuugc

SEQ ID NO: 111625 - RNA, 32 nt, Homo Sapiens
cucuugcuuccacuccuacucuugcuguuuuc

SEQ ID NO: 111626 - RNA, 32 nt, Homo Sapiens
gcgccccugagggccagaggcagaugugggcu

SEQ ID NO: 111627 - RNA, 32 nt, Homo Sapiens
gguuaaaugggaugaggucauguaucugcagu

SEQ ID NO: 111628 - RNA, 32 nt, Homo Sapiens
agguuuguuuucugcugacuugcucggaaacc

SEQ ID NO: 111629 - RNA, 32 nt, Homo Sapiens
gacuauacagcaugauguguauccucaggccu

SEQ ID NO: 111630 - RNA, 32 nt, Homo Sapiens
uaccgccugucucaggaugaccgcgauggccu

SEQ ID NO: 111631 - RNA, 32 nt, Homo Sapiens
uaccccagaccccaagcccauaaaugggaagg

SEQ ID NO: 111632 - RNA, 32 nt, Homo Sapiens
guucauccuuaauccugacacccauguaaaug

SEQ ID NO: 111633 - RNA, 32 nt, Homo Sapiens
aauuucagccuggacucuaccuuauuaguugg

SEQ ID NO: 111634 - RNA, 32 nt, Homo Sapiens
ugcucggguuggcccagcgucucacgcuagca

SEQ ID NO: 111635 - RNA, 32 nt, Homo Sapiens
agcggaagucggggggcgcgccagcucguagc

SEQ ID NO: 111636 - RNA, 32 nt, Homo Sapiens
cacuucgggaaaaagacaagcauugagaagaa

SEQ ID NO: 111637 - RNA, 32 nt, Homo Sapiens
cugacgcacgcgugcugucgggggagggaugc

SEQ ID NO: 111638 - RNA, 32 nt, Homo Sapiens
gcuguccccucagcgggggccuugaagacucc

SEQ ID NO: 111639 - RNA, 32 nt, Homo Sapiens
cgucugcagagcuggugcugcaggcccauagg

SEQ ID NO: 111640 - RNA, 32 nt, Homo Sapiens
aaaauagaugcauacugaaaaaagaauuuugu

SEQ ID NO: 111641 - RNA, 32 nt, Homo Sapiens
auguguuuucuuuauguuaccaaaacagcaau

SEQ ID NO: 111642 - RNA, 32 nt, Homo Sapiens
gacgcguauguaauaaaggacgcccucccucc

SEQ ID NO: 111643 - RNA, 32 nt, Homo Sapiens
auugugaugauuauuauuuaaaaccauuauuu

SEQ ID NO: 111644 - RNA, 32 nt, Homo Sapiens
uaaugccuccaccacaccugugucucacgaug

SEQ ID NO: 111645 - RNA, 32 nt, Homo Sapiens
cugcggggaucuagggccuggcugggaagagg

SEQ ID NO: 111646 - RNA, 32 nt, Homo Sapiens
uguuguugcacuuuaaacauuuaaauuauaca

SEQ ID NO: 111647 - RNA, 32 nt, Homo Sapiens
ggcagcuuugaaaaaacaccaugaagaagaaa

SEQ ID NO: 111648 - RNA, 32 nt, Homo Sapiens
ugccuguaaucccagcacuuuggcaggacaag

SEQ ID NO: 111649 - RNA, 32 nt, Homo Sapiens
aaggcacccugacuuccacaagacaccagaau

SEQ ID NO: 111650 - RNA, 32 nt, Homo Sapiens
ucuugucuaauccgaauuugcauuccauggug

SEQ ID NO: 111651 - RNA, 32 nt, Homo Sapiens
aaaaucagaacauuccaugaaaaaaugucauc

SEQ ID NO: 111652 - RNA, 32 nt, Homo Sapiens
gcugaaagacagagcaccuugaggacguuauc

SEQ ID NO: 111653 - RNA, 32 nt, Homo Sapiens
cugugccucgguuuccccaguuccucgaauug

SEQ ID NO: 111654 - RNA, 32 nt, Homo Sapiens
ugaugggaagcaguuacagagcagcgucuucu

SEQ ID NO: 111655 - RNA, 32 nt, Homo Sapiens
uauuucuuuaauucugcuuacuauuucaugga

SEQ ID NO: 111656 - RNA, 32 nt, Homo Sapiens
aaaugaaaucucuuuuuggguucugucuacug

SEQ ID NO: 111657 - RNA, 32 nt, Homo Sapiens
gugugagagggagagacgacgugaggcgagag

SEQ ID NO: 111658 - RNA, 32 nt, Homo Sapiens
auucucugcuccugggagagcugcaucgccuc

SEQ ID NO: 111659 - RNA, 27 nt, Homo Sapiens
gagcgcuccuccuccagcccccagccc

SEQ ID NO: 111660 - RNA, 32 nt, Homo Sapiens
ggacagacacugggaucuucugccaugaagca

SEQ ID NO: 111661 - RNA, 32 nt, Homo Sapiens
uuggaauuuccagccgcacagcaucuggugcc

SEQ ID NO: 111662 - RNA, 32 nt, Homo Sapiens
aauagauagugucauguugcagguucaacguu

SEQ ID NO: 111663 - RNA, 32 nt, Homo Sapiens
uacagcgagauuaugaaacauuuuccuucuca

SEQ ID NO: 111664 - RNA, 32 nt, Homo Sapiens
ccgcgagccggccgcggcuggcacugcugcug

SEQ ID NO: 111665 - RNA, 32 nt, Homo Sapiens
aauguguuuuuaaauuuuuauuaaugcacuug

SEQ ID NO: 111666 - RNA, 32 nt, Homo Sapiens
gaggagaggaccuggcugggccccaagccuug

SEQ ID NO: 111667 - RNA, 32 nt, Homo Sapiens
ccacuuucugugugguacgcuggauucaagga

SEQ ID NO: 111668 - RNA, 32 nt, Homo Sapiens
gaagaugcuuuggcugccugagguccugcuug

SEQ ID NO: 111669 - RNA, 32 nt, Homo Sapiens
uccagacagguggucuggaaaccuuuuaccua

SEQ ID NO: 111670 - RNA, 32 nt, Homo Sapiens
uguggaaaaugaauucugagucugagcuauuc

SEQ ID NO: 111671 - RNA, 29 nt, Homo Sapiens
cuguggcauacaaguuauuuucuacagua

SEQ ID NO: 111672 - RNA, 32 nt, Homo Sapiens
cacaaaaucccucuccaaccacaggacccuuc

SEQ ID NO: 111673 - RNA, 27 nt, Homo Sapiens
ggucaguccuucuugggccuggagguu

SEQ ID NO: 111674 - RNA, 30 nt, Homo Sapiens
uggaucucuuaguagggggaaaguagaaaa

SEQ ID NO: 111675 - RNA, 32 nt, Homo Sapiens
cuccguggagggcauuuuguggccucucccag

SEQ ID NO: 111676 - RNA, 32 nt, Homo Sapiens
uagagcuuagaaagcuucuccuccccauguca

SEQ ID NO: 111677 - RNA, 32 nt, Homo Sapiens
ccuauguaugugguggaacucaccuuuacaca

SEQ ID NO: 111678 - RNA, 32 nt, Homo Sapiens
cuuucuuucuuuugcccuucacaguguuucga

SEQ ID NO: 111679 - RNA, 32 nt, Homo Sapiens
acuccuggggacacagauuugcugccacagag

SEQ ID NO: 111680 - RNA, 32 nt, Homo Sapiens
gauacaggcugauguguacuuaaccacuucca

SEQ ID NO: 111681 - RNA, 32 nt, Homo Sapiens
cuccaaaucuucagcugguuuuauaggguuac

SEQ ID NO: 111682 - RNA, 32 nt, Homo Sapiens
augcauucaguuggaagaaaguaguggcaaga

SEQ ID NO: 111683 - RNA, 32 nt, Homo Sapiens
ugcucccugcuuggggacccggcagacacucc

SEQ ID NO: 111684 - RNA, 32 nt, Homo Sapiens
uucauugugauacuguauacugaucuaacucc

SEQ ID NO: 111685 - RNA, 32 nt, Homo Sapiens
guauuugauguacuacaguaccauaguuauuu

SEQ ID NO: 111686 - RNA, 29 nt, Homo Sapiens
uaaggcauauguauaguauaucaguaaag

SEQ ID NO: 111687 - RNA, 32 nt, Homo Sapiens
agaggcaucugggguccuggaacuucauguug

SEQ ID NO: 111688 - RNA, 32 nt, Homo Sapiens
acgcaaggcugcaccucuguguguugggagac

SEQ ID NO: 111689 - RNA, 29 nt, Homo Sapiens
gcaagauauauugugucuauaaagguuuc

SEQ ID NO: 111690 - RNA, 32 nt, Homo Sapiens
agccccggguggcaguggauugauguccaguu

SEQ ID NO: 111691 - RNA, 32 nt, Homo Sapiens
ggugaaaugagugaagaaaugaaagguuucua

SEQ ID NO: 111692 - RNA, 32 nt, Homo Sapiens
ccagacucugcuuugccuccccgucccggucc

SEQ ID NO: 111693 - RNA, 32 nt, Homo Sapiens
ugcaccgaggcugaagucuauaagccuggaga

SEQ ID NO: 111694 - RNA, 32 nt, Homo Sapiens
ccacaucucugaaagcacaggagacacugugc

SEQ ID NO: 111695 - RNA, 30 nt, Homo Sapiens
gucgaggaggugcugccgccgcugccgccg

SEQ ID NO: 111696 - RNA, 32 nt, Homo Sapiens
accccaacuccagcccauccuguuggugaccg

SEQ ID NO: 111697 - RNA, 32 nt, Homo Sapiens
agcauaguguaaauucugaaguugugcaaaag

SEQ ID NO: 111698 - RNA, 32 nt, Homo Sapiens
gguuccgggggguggggggaggcuagacucaa

SEQ ID NO: 111699 - RNA, 32 nt, Homo Sapiens
ugcugucuccccacuaggaucauuccacaccc

SEQ ID NO: 111700 - RNA, 32 nt, Homo Sapiens
gccaccuuucccucuaccaagacuccacuucc

SEQ ID NO: 111701 - RNA, 32 nt, Homo Sapiens
aggagcgcagaauugucaugaaaauauaauuu

SEQ ID NO: 111702 - RNA, 32 nt, Homo Sapiens
aggccuguaugaaauauguccuguucuggggg

SEQ ID NO: 111703 - RNA, 32 nt, Homo Sapiens
uguguuaggaaaugcccgugaacuugcccucu

SEQ ID NO: 111704 - RNA, 32 nt, Homo Sapiens
acaugcagcugggcuuccugugaccaggcacc

SEQ ID NO: 111705 - RNA, 32 nt, Homo Sapiens
gaggacggcacggcccggcucuggagcaccgc

SEQ ID NO: 111706 - RNA, 31 nt, Homo Sapiens
acccccugacauagucucagagaucuguagg

SEQ ID NO: 111707 - RNA, 32 nt, Homo Sapiens
uggccuguggagggugagguguaauuauuugu

SEQ ID NO: 111708 - RNA, 32 nt, Homo Sapiens
ccccuccccucugaggagccugccugccucac

SEQ ID NO: 111709 - RNA, 32 nt, Homo Sapiens
agcguggucugcucagcuuccagucagaaagg

SEQ ID NO: 111710 - RNA, 32 nt, Homo Sapiens
aaaauacaaaaauuggccggguguggugguga

SEQ ID NO: 111711 - RNA, 32 nt, Homo Sapiens
cccuccgagucaucuucccagcccucaaggag

SEQ ID NO: 111712 - RNA, 32 nt, Homo Sapiens
caugugauugugaagaaauuuguacuaccuaa

SEQ ID NO: 111713 - RNA, 32 nt, Homo Sapiens
agagcaagaagaagagugacuccugaaagccc

SEQ ID NO: 111714 - RNA, 32 nt, Homo Sapiens
gcgcaggcgggaagacgccagaggccagcuuc

SEQ ID NO: 111715 - RNA, 32 nt, Homo Sapiens
cuaaaaguauuuuuaaauguuucucaugugau

SEQ ID NO: 111716 - RNA, 32 nt, Homo Sapiens
auggugcagaaguuuuaauguugggauaaaug

SEQ ID NO: 111717 - RNA, 32 nt, Homo Sapiens
cguggaaagaaaaaaaccuuguccuggcuuca

SEQ ID NO: 111718 - RNA, 32 nt, Homo Sapiens
cuuggcccgcggccugcaccgaccccgggccg

SEQ ID NO: 111719 - RNA, 32 nt, Homo Sapiens
uagagaaauugcacuuuuccugacuuaccuag

SEQ ID NO: 111720 - RNA, 32 nt, Homo Sapiens
aaaugaaaggaaaaauauaucccugguaguuu

SEQ ID NO: 111721 - RNA, 32 nt, Homo Sapiens
uguuuaaacacuuaucuucuggauuagaaugc

SEQ ID NO: 111722 - RNA, 32 nt, Homo Sapiens
gacugccaggaguuguaguucuccccggccgc

SEQ ID NO: 111723 - RNA, 32 nt, Homo Sapiens
uucugaaagagauaacuauauaacagcuuuuu

SEQ ID NO: 111724 - RNA, 32 nt, Homo Sapiens
uaucgaaauaagcauccauuuaaaagaaugau

SEQ ID NO: 111725 - RNA, 31 nt, Homo Sapiens
ggggcgguucccccaugcuguucuugugaua

SEQ ID NO: 111726 - RNA, 32 nt, Homo Sapiens
ucuccucuucacuagauucuauagaagcauag

SEQ ID NO: 111727 - RNA, 32 nt, Homo Sapiens
agguuaccuuccacaguuucuaucuuguguca

SEQ ID NO: 111728 - RNA, 32 nt, Homo Sapiens
cgcuugacuggcugcgcuuguuuucaggguuu

SEQ ID NO: 111729 - RNA, 32 nt, Homo Sapiens
caaaauguuuuugucuaccaaagaaaaauguu

SEQ ID NO: 111730 - RNA, 32 nt, Homo Sapiens
gaucucggcucacugcaagcuccaccuccugg

SEQ ID NO: 111731 - RNA, 32 nt, Homo Sapiens
gaucucggcugacugcaaccuccaccuccugg

SEQ ID NO: 111732 - RNA, 32 nt, Homo Sapiens
aaaaauguauaaaauuuacaucugugcagugg

SEQ ID NO: 111733 - RNA, 32 nt, Homo Sapiens
cagacuccagccuguuuccccagcccugcagg

SEQ ID NO: 111734 - RNA, 32 nt, Homo Sapiens
ccacagccgcgcucagccuggagggaagaugc

SEQ ID NO: 111735 - RNA, 32 nt, Homo Sapiens
auauguuuuuaggugggagaugcugauaacaa

SEQ ID NO: 111736 - RNA, 32 nt, Homo Sapiens
ugcaccacauugcuccacgguguguucagaag

SEQ ID NO: 111737 - RNA, 32 nt, Homo Sapiens
gauccgcgcuccugcucgcccgggcucugggg

SEQ ID NO: 111738 - RNA, 32 nt, Homo Sapiens
uuguuugagccccucccccaauaaagaauuuu

SEQ ID NO: 111739 - RNA, 32 nt, Homo Sapiens
guucccugacacuggcauucucuuauccaaag

SEQ ID NO: 111740 - RNA, 32 nt, Homo Sapiens
agcuguuuuauacauagaaaucaauuacaguu

SEQ ID NO: 111741 - RNA, 32 nt, Homo Sapiens
cggaggucagucuuaguggccuugagaguugc

SEQ ID NO: 111742 - RNA, 32 nt, Homo Sapiens
acgugggcgaggggcggggugucuggacugga

SEQ ID NO: 111743 - RNA, 32 nt, Homo Sapiens
ucuaccugcccuacuucgagaagugucgcggc

SEQ ID NO: 111744 - RNA, 32 nt, Homo Sapiens
auuuagugacuuucaugguuacauucaauauc

SEQ ID NO: 111745 - RNA, 32 nt, Homo Sapiens
cugccucgccuggcuccugcgcccgccgucca

SEQ ID NO: 111746 - RNA, 32 nt, Homo Sapiens
cuggagucccgggaaugaccgcucucccuuug

SEQ ID NO: 111747 - RNA, 32 nt, Homo Sapiens
gucaguucugccuauauagaaacccacacagu

SEQ ID NO: 111748 - RNA, 32 nt, Homo Sapiens
gggccgacucggcaccaucaccccgcucacca

SEQ ID NO: 111749 - RNA, 32 nt, Homo Sapiens
gucuuguguggucugggccacauccugugcca

SEQ ID NO: 111750 - RNA, 32 nt, Homo Sapiens
uggauaucuuugaauacuugguaaauuauuaa

SEQ ID NO: 111751 - RNA, 32 nt, Homo Sapiens
gggagcaaaacuggucaccuccccucgggcuc

SEQ ID NO: 111752 - RNA, 32 nt, Homo Sapiens
acccaaaaccucuggaggcggcaggugcacgg

SEQ ID NO: 111753 - RNA, 32 nt, Homo Sapiens
ucacgcggcgguggcugccgggacccuagcag

SEQ ID NO: 111754 - RNA, 32 nt, Homo Sapiens
uuuauuuuccaucuuuguuuucuguucuacaa

SEQ ID NO: 111755 - RNA, 32 nt, Homo Sapiens
gcccgccgcgaccccgcgccgccccgccccgc

SEQ ID NO: 111756 - RNA, 32 nt, Homo Sapiens
ggaggcgcggaguggagccgcagccagccccu

SEQ ID NO: 111757 - RNA, 32 nt, Homo Sapiens
uucaauuuuugaaaauacaauuuguaaauggu

SEQ ID NO: 111758 - RNA, 32 nt, Homo Sapiens
uugguuuugcaccucuccgugauuguagcccu

SEQ ID NO: 111759 - RNA, 32 nt, Homo Sapiens
uggucuguggagguaguugcugguggcacugg

SEQ ID NO: 111760 - RNA, 32 nt, Homo Sapiens
cuaggauuucaucgucagauggguaguauaaa

SEQ ID NO: 111761 - RNA, 32 nt, Homo Sapiens
ccgcacagagccuucccuccccgcuccgcacc

SEQ ID NO: 111762 - RNA, 32 nt, Homo Sapiens
cccuggaagcagauacagauggcugccugcug

SEQ ID NO: 111763 - RNA, 32 nt, Homo Sapiens
ucugccgggagcuggggugcggcccugugcuc

SEQ ID NO: 111764 - RNA, 32 nt, Homo Sapiens
gugcggucgcccgcuccgcgugcgccuacgcc

SEQ ID NO: 111765 - RNA, 32 nt, Homo Sapiens
ugugagugcaggugugugucuuuauuauauug

SEQ ID NO: 111766 - RNA, 32 nt, Homo Sapiens
agaugcuguuuacggauauuuauauucuaguc

SEQ ID NO: 111767 - RNA, 31 nt, Homo Sapiens
guugaaaaauaaaagguugucaaucgaaugg

SEQ ID NO: 111768 - RNA, 32 nt, Homo Sapiens
uuaggguauguauuaugcacagagaaacaauu

SEQ ID NO: 111769 - RNA, 32 nt, Homo Sapiens
cgccgcagggagugugucaaguuacagaggcg

SEQ ID NO: 111770 - RNA, 32 nt, Homo Sapiens
guggggacaggucaggaucuggacagcggcuc

SEQ ID NO: 111771 - RNA, 32 nt, Homo Sapiens
gagaggaaugggacacaaaaccaaacacuguu

SEQ ID NO: 111772 - RNA, 32 nt, Homo Sapiens
auccccagaaaagauggaaaagaaauugcaug

SEQ ID NO: 111773 - RNA, 32 nt, Homo Sapiens
ugcccccaccucaggccucacuggggcagggu

SEQ ID NO: 111774 - RNA, 32 nt, Homo Sapiens
gucauccccuugggcucucaccacuucaguuu

SEQ ID NO: 111775 - RNA, 32 nt, Homo Sapiens
ccuuuuucauaggggaagagugucacacuccu

SEQ ID NO: 111776 - RNA, 27 nt, Homo Sapiens
gccaccuccucguccagcccccaaacc

SEQ ID NO: 111777 - RNA, 32 nt, Homo Sapiens
agggggagccagcagcggcggucgccggcacg

SEQ ID NO: 111778 - RNA, 32 nt, Homo Sapiens
ggcuguguuguccugccucagagacaaauuca

SEQ ID NO: 111779 - RNA, 32 nt, Homo Sapiens
uugguuuucuucacaaucuugaacauuuuaca

SEQ ID NO: 111780 - RNA, 32 nt, Homo Sapiens
cagaggaccuggcucuugcccgaggugcccug

SEQ ID NO: 111781 - RNA, 32 nt, Homo Sapiens
uagguggcgaucucgaucucgauguccagggc

SEQ ID NO: 111782 - RNA, 32 nt, Homo Sapiens
auauuaaaacugugauuuccauauacaaguau

SEQ ID NO: 111783 - RNA, 32 nt, Homo Sapiens
ucuggaauugguuuagcccaaguggagccuga

SEQ ID NO: 111784 - RNA, 32 nt, Homo Sapiens
acaucuuccagaugcuggaugugcugcaggag

SEQ ID NO: 111785 - RNA, 32 nt, Homo Sapiens
gucgcuguuugcgggucuccgcggcgggaccg

SEQ ID NO: 111786 - RNA, 32 nt, Homo Sapiens
uuuucuuuucuuucuuccaagugcaugugugu

SEQ ID NO: 111787 - RNA, 32 nt, Homo Sapiens
caaaauugaaauguauauuuuugcuaggagcc

SEQ ID NO: 111788 - RNA, 32 nt, Homo Sapiens
auggauagaaacaaaauucucuaguacucauc

SEQ ID NO: 111789 - RNA, 32 nt, Homo Sapiens
gaccccacccgcccaccgccacuaucaggccc

SEQ ID NO: 111790 - RNA, 32 nt, Homo Sapiens
gcggcgcgagcagggcgggcgaguuccgcgcu

SEQ ID NO: 111791 - RNA, 32 nt, Homo Sapiens
gauggagaggauguucaacaccacucggaucc

SEQ ID NO: 111792 - RNA, 32 nt, Homo Sapiens
uguuggugacagacccugaugugcuggugcug

SEQ ID NO: 111793 - RNA, 32 nt, Homo Sapiens
uuacugaaagcaaaucaguuuuaagugauuuc

SEQ ID NO: 111794 - RNA, 32 nt, Homo Sapiens
uacauaaggaugacuuuuuuauacaauggaau

SEQ ID NO: 111795 - RNA, 32 nt, Homo Sapiens
auuuaaaauauuacauaugcagcugggagaac

SEQ ID NO: 111796 - RNA, 30 nt, Homo Sapiens
gguugaggcaggcgugucacuugaggccag

SEQ ID NO: 111797 - RNA, 32 nt, Homo Sapiens
caggacggcucggugcugcugcucgucagcga

SEQ ID NO: 111798 - RNA, 32 nt, Homo Sapiens
uguuguuuccuuaucacuccuggucccuuugc

SEQ ID NO: 111799 - RNA, 32 nt, Homo Sapiens
gagucgaggcagccggccggucggcggccgcc

SEQ ID NO: 111800 - RNA, 32 nt, Homo Sapiens
gagcgggacagccaggaggaagggcagcuugg

SEQ ID NO: 111801 - RNA, 32 nt, Homo Sapiens
caccuuagcauucaaggcuugucuagucugcc

SEQ ID NO: 111802 - RNA, 32 nt, Homo Sapiens
auggguuuauguuuucguuucauuuuggacuc

SEQ ID NO: 111803 - RNA, 32 nt, Homo Sapiens
ggccaugcccaagccacccccaagaucccccu

SEQ ID NO: 111804 - RNA, 32 nt, Homo Sapiens
uauggcagcacaauaaaaccaauauagcauua

SEQ ID NO: 111805 - RNA, 32 nt, Homo Sapiens
aggaaaugugugcuuucaggaguucuuauuag

SEQ ID NO: 111806 - RNA, 32 nt, Homo Sapiens
uugaaugucaauugguagaugaaaauaccagc

SEQ ID NO: 111807 - RNA, 32 nt, Homo Sapiens
cgugguccauauauucugcacuuuuauauuug

SEQ ID NO: 111808 - RNA, 32 nt, Homo Sapiens
auugcuuauuuuucuucuguaguggaugugaa

SEQ ID NO: 111809 - RNA, 32 nt, Homo Sapiens
caguugaggcaaaaaacuauggguuuuuucag

SEQ ID NO: 111810 - RNA, 32 nt, Homo Sapiens
ccgccgccgagcaaagccgggcugggcuugga

SEQ ID NO: 111811 - RNA, 32 nt, Homo Sapiens
aaaacguuccuagucacuucucuucugacauc

SEQ ID NO: 111812 - RNA, 32 nt, Homo Sapiens
gggcccuacagcgcccugagguagcugggccu

SEQ ID NO: 111813 - RNA, 32 nt, Homo Sapiens
uuaaagcaagcucagucauacaugacaaagug

SEQ ID NO: 111814 - RNA, 32 nt, Homo Sapiens
gcccgcguccccuggggugccaccaggugggc

SEQ ID NO: 111815 - RNA, 32 nt, Homo Sapiens
uuuccuuuccuccucagucaaauacaggcugc

SEQ ID NO: 111816 - RNA, 32 nt, Homo Sapiens
gacgccacuuggauacugauuugaacaaugua

SEQ ID NO: 111817 - RNA, 32 nt, Homo Sapiens
gaggaggcgcuugccuucagcuugugggaaau

SEQ ID NO: 111818 - RNA, 32 nt, Homo Sapiens
ugcucccgaguuggggggaggggguguggcaa

SEQ ID NO: 111819 - RNA, 32 nt, Homo Sapiens
aaaacagguuccaaauauucacugcuuuguaa

SEQ ID NO: 111820 - RNA, 32 nt, Homo Sapiens
aaaaguaaagagaagaaaaaacagaagaacuu

SEQ ID NO: 111821 - RNA, 32 nt, Homo Sapiens
acgucagacaccugucgacagcccagaugacu

SEQ ID NO: 111822 - RNA, 32 nt, Homo Sapiens
ucauccucauuuccaccaacggcagcuucauu

SEQ ID NO: 111823 - RNA, 32 nt, Homo Sapiens
guccuuagcagacaaaugguagauguaucuuu

SEQ ID NO: 111824 - RNA, 32 nt, Homo Sapiens
gggagauccagaagugaaacgccaggcucucu

SEQ ID NO: 111825 - RNA, 32 nt, Homo Sapiens
gagugggcacaugggggugcggggguguaggu

SEQ ID NO: 111826 - RNA, 32 nt, Homo Sapiens
gcagcucugagcucgcggaggcguggccggug

SEQ ID NO: 111827 - RNA, 32 nt, Homo Sapiens
acauacuauccuguuuccuccucaauagaauu

SEQ ID NO: 111828 - RNA, 32 nt, Homo Sapiens
ucaggaggggagaagaaggagccucugcugcc

SEQ ID NO: 111829 - RNA, 32 nt, Homo Sapiens
ugccacacgaccagcugugcucccagcagagg

SEQ ID NO: 111830 - RNA, 32 nt, Homo Sapiens
ccuaaaggccccacaucaaucauaucucaaca

SEQ ID NO: 111831 - RNA, 32 nt, Homo Sapiens
ucuguaccgggcggggggcgccuacgggccgg

SEQ ID NO: 111832 - RNA, 32 nt, Homo Sapiens
cccgcgugugcgccaggcuugggguccccggg

SEQ ID NO: 111833 - RNA, 32 nt, Homo Sapiens
uucccgccuccugaggccuuucugaggaucug

SEQ ID NO: 111834 - RNA, 32 nt, Homo Sapiens
uuuucucucuaaaaauaccuuuuauugacugu

SEQ ID NO: 111835 - RNA, 32 nt, Homo Sapiens
cggcagaggggcagagcuaggcugggaggagc

SEQ ID NO: 111836 - RNA, 32 nt, Homo Sapiens
uauuuuuuacuuugacgaacuuuauagagaau

SEQ ID NO: 111837 - RNA, 32 nt, Homo Sapiens
acuguuccagacaucgucaucuccaucugaug

SEQ ID NO: 111838 - RNA, 32 nt, Homo Sapiens
uuaaagaaaaagaaaguaguaccuuaguaugu

SEQ ID NO: 111839 - RNA, 32 nt, Homo Sapiens
cuuugcugagaagggcucucgggcguccagac

SEQ ID NO: 111840 - RNA, 32 nt, Homo Sapiens
ccccgcaggaggaaguuccacggcagguggug

SEQ ID NO: 111841 - RNA, 32 nt, Homo Sapiens
aguaggcgggcaucgugagcugucgcggugcg

SEQ ID NO: 111842 - RNA, 32 nt, Homo Sapiens
auuauuacaacacuaaagagaaguuuagaaua

SEQ ID NO: 111843 - RNA, 32 nt, Homo Sapiens
uucuuggaggagaguugaggcuuuucuuaggu

SEQ ID NO: 111844 - RNA, 32 nt, Homo Sapiens
uuuccuuacugaauccauuauuuuauagguua

SEQ ID NO: 111845 - RNA, 32 nt, Homo Sapiens
ugacugagcaugcaggaucagcuccaucucau

SEQ ID NO: 111846 - RNA, 32 nt, Homo Sapiens
agaauacuuuccaagcaauacaugauacuuuu

SEQ ID NO: 111847 - RNA, 32 nt, Homo Sapiens
ucuuucaaaaauucugauaugguaagguacuu

SEQ ID NO: 111848 - RNA, 32 nt, Homo Sapiens
uugcauuuuugaaaaauaauugaugcuucuug

SEQ ID NO: 111849 - RNA, 32 nt, Homo Sapiens
gcauguaaauuaauugucagcauuccaugucu

SEQ ID NO: 111850 - RNA, 32 nt, Homo Sapiens
gucggguagagugaguuuggccugcucaugac

SEQ ID NO: 111851 - RNA, 32 nt, Homo Sapiens
auuccagccccuucucuccccagccguugccc

SEQ ID NO: 111852 - RNA, 32 nt, Homo Sapiens
uuuugugugugauaaacugauuuugguuugca

SEQ ID NO: 111853 - RNA, 32 nt, Homo Sapiens
gugcccauauaggugagcaucccuuuagauca

SEQ ID NO: 111854 - RNA, 32 nt, Homo Sapiens
cuacagaggugcagacugcugcguucugguau

SEQ ID NO: 111855 - RNA, 32 nt, Homo Sapiens
gccgcccccucgcacuuccgugugccgcggcg

SEQ ID NO: 111856 - RNA, 32 nt, Homo Sapiens
uacuugagcuuaauucugaacuucaaaguaau

SEQ ID NO: 111857 - RNA, 32 nt, Homo Sapiens
aggaaauuccuccccuuauucuuccuugaagu

SEQ ID NO: 111858 - RNA, 32 nt, Homo Sapiens
cgcuagagcgaaauaaacucgcacaagugucc

SEQ ID NO: 111859 - RNA, 32 nt, Homo Sapiens
guuagccaggaaguucucaaucuccugaccuc

SEQ ID NO: 111860 - RNA, 32 nt, Homo Sapiens
aagggaagcgaagccggagcugcgggcgcuuu

SEQ ID NO: 111861 - RNA, 32 nt, Homo Sapiens
auucggcacaggcguccgcugcaguccgccgg

SEQ ID NO: 111862 - RNA, 32 nt, Homo Sapiens
ggaggugaucaggccaagaggguggagcccuc

SEQ ID NO: 111863 - RNA, 32 nt, Homo Sapiens
aauuguaacagaguacaaagaacauccuagaa

SEQ ID NO: 111864 - RNA, 32 nt, Homo Sapiens
gcauacacucuagcuuaagaaaacauugccau

SEQ ID NO: 111865 - RNA, 32 nt, Homo Sapiens
gccccuacaguugcccuggccuuggggccccc

SEQ ID NO: 111866 - RNA, 32 nt, Homo Sapiens
aguauuuguauauagaaaauggguuuaauaac

SEQ ID NO: 111867 - RNA, 32 nt, Homo Sapiens
acccccauuguuagaugaggucuuaaucaugg

SEQ ID NO: 111868 - RNA, 32 nt, Homo Sapiens
gugaaaauugugucuguaagauuguccagugc

SEQ ID NO: 111869 - RNA, 32 nt, Homo Sapiens
uucagucgucuggguuuuuuccccuuuucugu

SEQ ID NO: 111870 - RNA, 32 nt, Homo Sapiens
gccagcucggaacuugccaggccccaaaggcc

SEQ ID NO: 111871 - RNA, 32 nt, Homo Sapiens
auccaguccuggaagcccugaucagucaacca

SEQ ID NO: 111872 - RNA, 32 nt, Homo Sapiens
ucucagcauccaucaucaucgucgucugucaa

SEQ ID NO: 111873 - RNA, 32 nt, Homo Sapiens
aguugcaguggaaagaaaugugucaucugugg

SEQ ID NO: 111874 - RNA, 32 nt, Homo Sapiens
ucuguuuaagucucauaacucuauuuuuaguu

SEQ ID NO: 111875 - RNA, 32 nt, Homo Sapiens
uaaaugggguggcagugccuugcagggacgcg

SEQ ID NO: 111876 - RNA, 32 nt, Homo Sapiens
accucucagaaauuauuaaacauaauuuauuc

SEQ ID NO: 111877 - RNA, 32 nt, Homo Sapiens
aaccucgcgggccggcguggccuuggccgggc

SEQ ID NO: 111878 - RNA, 32 nt, Homo Sapiens
cuccaaggaccgucggugggcgauggcugcaa

SEQ ID NO: 111879 - RNA, 32 nt, Homo Sapiens
cuccuucucccccaacucccagcccugccugu

SEQ ID NO: 111880 - RNA, 32 nt, Homo Sapiens
gagcuucuccucugaguucuaacaaaauggug

SEQ ID NO: 111881 - RNA, 32 nt, Homo Sapiens
ccguggcccgguggccaggcgaguucuucucc

SEQ ID NO: 111882 - RNA, 32 nt, Homo Sapiens
aagauucacaugcagcuaauuaaagacaagaa

SEQ ID NO: 111883 - RNA, 32 nt, Homo Sapiens
acauuuuacacacacacacacacacacacaca

SEQ ID NO: 111884 - RNA, 32 nt, Homo Sapiens
aggaggagucuuccacggccccgccccgcccu

SEQ ID NO: 111885 - RNA, 32 nt, Homo Sapiens
ggggguugugaggccuggccaggcacccccug

SEQ ID NO: 111886 - RNA, 32 nt, Homo Sapiens
gcaaccugcauaauuaucaauggcgacuuucc

SEQ ID NO: 111887 - RNA, 31 nt, Homo Sapiens
agcucuggggcggugcaggcagccucgggac

SEQ ID NO: 111888 - RNA, 32 nt, Homo Sapiens
caugcucuaaugcuucagauucaagugcuuuu

SEQ ID NO: 111889 - RNA, 32 nt, Homo Sapiens
cggggguugggccgcacauuuacgugcgcgaa

SEQ ID NO: 111890 - RNA, 32 nt, Homo Sapiens
uuuuaugucuggggcagaaacacucaaguuga

SEQ ID NO: 111891 - RNA, 32 nt, Homo Sapiens
uguaaugagucuguucuggcucccagaagaug

SEQ ID NO: 111892 - RNA, 32 nt, Homo Sapiens
ggaggugguuguggggaaccaccuggagagca

SEQ ID NO: 111893 - RNA, 32 nt, Homo Sapiens
cuagccugggcaauaugaugagacccugucuc

SEQ ID NO: 111894 - RNA, 32 nt, Homo Sapiens
accccaugcaccucagggccaagcgggggcgu

SEQ ID NO: 111895 - RNA, 32 nt, Homo Sapiens
cuuucccucugugaccgacucccuucccagug

SEQ ID NO: 111896 - RNA, 32 nt, Homo Sapiens
acagugguccucaucccuccccaccucccacu

SEQ ID NO: 111897 - RNA, 32 nt, Homo Sapiens
gcgcugccgggcgugggcguggacucgggcgu

SEQ ID NO: 111898 - RNA, 32 nt, Homo Sapiens
ccacaggccaaggaacauugggaccagaagag

SEQ ID NO: 111899 - RNA, 32 nt, Homo Sapiens
gaccucugcccccagguagcaggacacuccau

SEQ ID NO: 111900 - RNA, 32 nt, Homo Sapiens
cuuauuguagcuaagagccaucugaagcagca

SEQ ID NO: 111901 - RNA, 32 nt, Homo Sapiens
gaugaugauuauuuauuaguaacugguuauga

SEQ ID NO: 111902 - RNA, 32 nt, Homo Sapiens
ucagcuuccccuccccguagcagccacuaaaa

SEQ ID NO: 111903 - RNA, 32 nt, Homo Sapiens
ugaucacuggguucuucaggaccuucuauauc

SEQ ID NO: 111904 - RNA, 32 nt, Homo Sapiens
uugcuucugcugacaccucaucuagcaccuuc

SEQ ID NO: 111905 - RNA, 32 nt, Homo Sapiens
gagggacucaagggaaaggcaagcuugaggcc

SEQ ID NO: 111906 - RNA, 32 nt, Homo Sapiens
uaguuaaaaaucaacucauaacuuagaaacug

SEQ ID NO: 111907 - RNA, 32 nt, Homo Sapiens
ucaccccagcuccuuuguguggcacccugaug

SEQ ID NO: 111908 - RNA, 32 nt, Homo Sapiens
guccucgccgcgggcagcgggcggcggaggca

SEQ ID NO: 111909 - RNA, 32 nt, Homo Sapiens
uuaauaguaaaauaaacguggcuauauuuuaa

SEQ ID NO: 111910 - RNA, 32 nt, Homo Sapiens
ccaacccccugccccaggagcgggccugagcc

SEQ ID NO: 111911 - RNA, 32 nt, Homo Sapiens
ugguagugggggcugcagcugccggacccagg

SEQ ID NO: 111912 - RNA, 32 nt, Homo Sapiens
cuggggacggaagggaagguaguuagauccca

SEQ ID NO: 111913 - RNA, 32 nt, Homo Sapiens
auaaucuaaaagaauaauuuggauggccaauu

SEQ ID NO: 111914 - RNA, 32 nt, Homo Sapiens
aaaaaauaacaugggaguaauaaucggucaaa

SEQ ID NO: 111915 - RNA, 32 nt, Homo Sapiens
uuuuuaaacacacacacacacacacacacaca

SEQ ID NO: 111916 - RNA, 32 nt, Homo Sapiens
gcuggaagcuccuggucugaucuggggauacc

SEQ ID NO: 111917 - RNA, 32 nt, Homo Sapiens
uucuugcccagcugaccacuggccccggggug

SEQ ID NO: 111918 - RNA, 32 nt, Homo Sapiens
uggaacaaguagaaagaacuggcugccaucuu

SEQ ID NO: 111919 - RNA, 32 nt, Homo Sapiens
aagcauuucugauuugaauauuuuuguacauu

SEQ ID NO: 111920 - RNA, 32 nt, Homo Sapiens
cacuguguggagggggcuguguugugggcacc

SEQ ID NO: 111921 - RNA, 32 nt, Homo Sapiens
aguuuaauuauucacagcaccccauuuuacuc

SEQ ID NO: 111922 - RNA, 32 nt, Homo Sapiens
gcaccggaggagaggcucucuagucugaaggc

SEQ ID NO: 111923 - RNA, 32 nt, Homo Sapiens
aauacauggaaaucguuaauaucgcugauauu

SEQ ID NO: 111924 - RNA, 32 nt, Homo Sapiens
uuuuggauuaaaccuguuucccgguuaugugu

SEQ ID NO: 111925 - RNA, 32 nt, Homo Sapiens
acuagaaaggcagugccucagcccuucccuga

SEQ ID NO: 111926 - RNA, 32 nt, Homo Sapiens
uucagaaucuguggagcaagaaaggauuuggg

SEQ ID NO: 111927 - RNA, 32 nt, Homo Sapiens
uccaggcugagguagucucagauggagaugag

SEQ ID NO: 111928 - RNA, 32 nt, Homo Sapiens
cuccaaggaaagggcuugcuuuguuuucuguu

SEQ ID NO: 111929 - RNA, 32 nt, Homo Sapiens
gcugcggcucugccgcggcggcagcaugggug

SEQ ID NO: 111930 - RNA, 32 nt, Homo Sapiens
uauauauacgcacacacacacacacacauaaa

SEQ ID NO: 111931 - RNA, 32 nt, Homo Sapiens
gauuccagagagggagcuuugcuggcaaaagc

SEQ ID NO: 111932 - RNA, 32 nt, Homo Sapiens
uaaagaaguauuuuaacaaaaaucuauuaugu

SEQ ID NO: 111933 - RNA, 32 nt, Homo Sapiens
aggccagugggaggaggggcagggcagggcug

SEQ ID NO: 111934 - RNA, 32 nt, Homo Sapiens
aaacccugacagcugagaaguggcacagaccu

SEQ ID NO: 111935 - RNA, 32 nt, Homo Sapiens
ugggaggacagagggcaaggcagaagguaaag

SEQ ID NO: 111936 - RNA, 32 nt, Homo Sapiens
gcgaggggcagacaugcugaauuccacgggcg

SEQ ID NO: 111937 - RNA, 32 nt, Homo Sapiens
gucaaaaauaccauuuuaguaugaagcaauga

SEQ ID NO: 111938 - RNA, 32 nt, Homo Sapiens
auguugaaaaauaguuuagcaauauaauuguc

SEQ ID NO: 111939 - RNA, 32 nt, Homo Sapiens
gccuccaguccugagggaggggcuugccccac

SEQ ID NO: 111940 - RNA, 27 nt, Homo Sapiens
cuguucuucacucucagcccccugaaa

SEQ ID NO: 111941 - RNA, 32 nt, Homo Sapiens
acucugcuaacuucucacuuggaacagacugc

SEQ ID NO: 111942 - RNA, 32 nt, Homo Sapiens
cccugucucuacagcugcaugcuccucugcgu

SEQ ID NO: 111943 - RNA, 32 nt, Homo Sapiens
cagcgcugugucugcuguguccuggggccucc

SEQ ID NO: 111944 - RNA, 32 nt, Homo Sapiens
ucugaucccucugggggcucuggccaagggcc

SEQ ID NO: 111945 - RNA, 32 nt, Homo Sapiens
uuagaacuuuggaguguaaaucuucaugaugu

SEQ ID NO: 111946 - RNA, 32 nt, Homo Sapiens
cauagccaucacgagcaugucacagugcugca

SEQ ID NO: 111947 - RNA, 32 nt, Homo Sapiens
cccugccgcccgguucccauuagccuguccgc

SEQ ID NO: 111948 - RNA, 32 nt, Homo Sapiens
cacagagaccaagagggagagaggcuucagaa

SEQ ID NO: 111949 - RNA, 32 nt, Homo Sapiens
cugauucuuuagcucauuaucaucucucccag

SEQ ID NO: 111950 - RNA, 32 nt, Homo Sapiens
gggaugcagggccacaggccuccgcucucucc

SEQ ID NO: 111951 - RNA, 32 nt, Homo Sapiens
cucaccuuucgccacuuccucccugggguauc

SEQ ID NO: 111952 - RNA, 32 nt, Homo Sapiens
acaaaucuucugcaugagauuacugaugcuuc

SEQ ID NO: 111953 - RNA, 32 nt, Homo Sapiens
ucccgaagcugaugggcucugucuuaggucuu

SEQ ID NO: 111954 - RNA, 32 nt, Homo Sapiens
aaugauggaaaugcucuugagcucacaacauu

SEQ ID NO: 111955 - RNA, 32 nt, Homo Sapiens
ugcaggcugagaggcugcuuugcgccuucauc

SEQ ID NO: 111956 - RNA, 32 nt, Homo Sapiens
uaaauuagaaucuguaguugcuaacauacuaa

SEQ ID NO: 111957 - RNA, 32 nt, Homo Sapiens
aauagggacaaagugacauaccuagaguuugc

SEQ ID NO: 111958 - RNA, 32 nt, Homo Sapiens
ggaaauuugugaucaucucuacgccuugcuuu

SEQ ID NO: 111959 - RNA, 32 nt, Homo Sapiens
gccaucaugcugggcuuugacagccacgaggc

SEQ ID NO: 111960 - RNA, 32 nt, Homo Sapiens
agaauuaacauauaaacuuuguuguaaaacug

SEQ ID NO: 111961 - RNA, 32 nt, Homo Sapiens
gcccuuggguccuggggagccacggaagguug

SEQ ID NO: 111962 - RNA, 32 nt, Homo Sapiens
gucugcccauccccccaccacccuccauccug

SEQ ID NO: 111963 - RNA, 32 nt, Homo Sapiens
ggaacaguauaaaauaccaguuuguacaguau

SEQ ID NO: 111964 - RNA, 32 nt, Homo Sapiens
ugaugaacucauugggagcauuuuaaacuuuu

SEQ ID NO: 111965 - RNA, 32 nt, Homo Sapiens
cguccgcagcgggcgccgcuagccagcggaag

SEQ ID NO: 111966 - RNA, 32 nt, Homo Sapiens
uuguucuaaauguggugacaaacaagucauuu

SEQ ID NO: 111967 - RNA, 32 nt, Homo Sapiens
aacuucuuuuuauuuucuuuuguaaauguuua

SEQ ID NO: 111968 - RNA, 32 nt, Homo Sapiens
uuuccacuaaaaauauaaugaaaugauguuaa

SEQ ID NO: 111969 - RNA, 31 nt, Homo Sapiens
aaaauauuuaugagaaaguucucauuuaaaa

SEQ ID NO: 111970 - RNA, 32 nt, Homo Sapiens
accucaccuugauggauauuuuugccaaucuc

SEQ ID NO: 111971 - RNA, 32 nt, Homo Sapiens
gcaguggggguguccagggcggugcuugagaa

SEQ ID NO: 111972 - RNA, 32 nt, Homo Sapiens
cacugcacuccagccugggugacaaagugaga

SEQ ID NO: 111973 - RNA, 32 nt, Homo Sapiens
cacugcacuccagccuaggugacagagugaga

SEQ ID NO: 111974 - RNA, 32 nt, Homo Sapiens
agcuugccugcccuuccucaucucucccugcc

SEQ ID NO: 111975 - RNA, 32 nt, Homo Sapiens
uguaggccauucaaaacgccuccggagugucg

SEQ ID NO: 111976 - RNA, 32 nt, Homo Sapiens
gagucccgauccccggcucuguccggcccacg

SEQ ID NO: 111977 - RNA, 29 nt, Homo Sapiens
agugcugugacuugcaugauggauucuag

SEQ ID NO: 111978 - RNA, 32 nt, Homo Sapiens
gcuuccuguuucgucugguaacuccuaagccu

SEQ ID NO: 111979 - RNA, 32 nt, Homo Sapiens
ggcggacugggcggggcuccgagcggggacug

SEQ ID NO: 111980 - RNA, 32 nt, Homo Sapiens
auucacuucuucauuucuuacugggucuuaga

SEQ ID NO: 111981 - RNA, 32 nt, Homo Sapiens
ccaggaagcagcaggccugcaauguacauaug

SEQ ID NO: 111982 - RNA, 32 nt, Homo Sapiens
uugaaauuuuuacuaaaauaaaacauaugugu

SEQ ID NO: 111983 - RNA, 32 nt, Homo Sapiens
cuuuucaucgccauuccauucccagcagcuuu

SEQ ID NO: 111984 - RNA, 32 nt, Homo Sapiens
aaaauaucuuugcaucauagaacagaaauaua

SEQ ID NO: 111985 - RNA, 32 nt, Homo Sapiens
cagagccugggcucagccccagggagggcagg

SEQ ID NO: 111986 - RNA, 32 nt, Homo Sapiens
augcgugugacaguauaaauauauuaugaaaa

SEQ ID NO: 111987 - RNA, 32 nt, Homo Sapiens
cugaauggugccucugugagcggcuccguccc

SEQ ID NO: 111988 - RNA, 29 nt, Homo Sapiens
cgugaguaugguuuauaugaacuacaaau

SEQ ID NO: 111989 - RNA, 32 nt, Homo Sapiens
auaagcaggaaggauggcaagcacgggacagg

SEQ ID NO: 111990 - RNA, 31 nt, Homo Sapiens
caggugcaugccaccacgccugguuaauuuu

SEQ ID NO: 111991 - RNA, 32 nt, Homo Sapiens
auuggucauuucugcuggcuuuucuccaauga

SEQ ID NO: 111992 - RNA, 32 nt, Homo Sapiens
cccucggcucccagcccuacagacuugcugug

SEQ ID NO: 111993 - RNA, 32 nt, Homo Sapiens
cggaaguguagcggggggaggcggcggccacc

SEQ ID NO: 111994 - RNA, 31 nt, Homo Sapiens
gauaagaaauaaaaagguguuuauaacuauu

SEQ ID NO: 111995 - RNA, 32 nt, Homo Sapiens
cccauuuuuuauucuuuggguccuuccauccc

SEQ ID NO: 111996 - RNA, 32 nt, Homo Sapiens
uugacuuuguggcaauagaaaacaguaaaaaa

SEQ ID NO: 111997 - RNA, 32 nt, Homo Sapiens
agccgaacccgcccuccgaauccagagaggcg

SEQ ID NO: 111998 - RNA, 32 nt, Homo Sapiens
cuaaauccaggugcgcuaacugcucgcagggu

SEQ ID NO: 111999 - RNA, 32 nt, Homo Sapiens
ucucucccaugucauugguguucuggaaagca

SEQ ID NO: 112000 - RNA, 32 nt, Homo Sapiens
augcagauccugaaguuuuuggucaauaggcu

SEQ ID NO: 112001 - RNA, 32 nt, Homo Sapiens
gacuggaaaacaaacacugcauuauguauguu

SEQ ID NO: 112002 - RNA, 32 nt, Homo Sapiens
uauuugccuuuuccucauauucacaagugaac

SEQ ID NO: 112003 - RNA, 32 nt, Homo Sapiens
cccccugcccucuuagcacaagaggcccaggc

SEQ ID NO: 112004 - RNA, 32 nt, Homo Sapiens
cuaucucuacuagucauagaaaagaaacauug

SEQ ID NO: 112005 - RNA, 32 nt, Homo Sapiens
cugaccucaaccccgcucuccucauccuauuc

SEQ ID NO: 112006 - RNA, 32 nt, Homo Sapiens
ccuggccaacauggugaaauccugucucugcu

SEQ ID NO: 112007 - RNA, 32 nt, Homo Sapiens
aaucaguccauaaaggguuugcuggggccaac

SEQ ID NO: 112008 - RNA, 32 nt, Homo Sapiens
cuccugucuggcccgaggccgccccgugacug

SEQ ID NO: 112009 - RNA, 32 nt, Homo Sapiens
auaugcugacuucauuuaaauuaguuuagacu

SEQ ID NO: 112010 - RNA, 32 nt, Homo Sapiens
ugugagccgcacuuccuguccucaccacugcg

SEQ ID NO: 112011 - RNA, 32 nt, Homo Sapiens
caugguggccgggagaggaaaccucaggguca

SEQ ID NO: 112012 - RNA, 32 nt, Homo Sapiens
auuggccgggcgugguggugcgugccugugau

SEQ ID NO: 112013 - RNA, 32 nt, Homo Sapiens
aagaauuauuuuuuuucuuuuauaauaaggaa

SEQ ID NO: 112014 - RNA, 32 nt, Homo Sapiens
ccuugaauggugcaaugaauuaaccagcugau

SEQ ID NO: 112015 - RNA, 32 nt, Homo Sapiens
gccaccacccccacccaaaggcagugaggagu

SEQ ID NO: 112016 - RNA, 32 nt, Homo Sapiens
gagacuuaagacuacugaguugugaaaauuac

SEQ ID NO: 112017 - RNA, 32 nt, Homo Sapiens
gcgguguucaugauuucuuuuauucuuugcac

SEQ ID NO: 112018 - RNA, 29 nt, Homo Sapiens
gaccagccugaccaacauggcaaaacccu

SEQ ID NO: 112019 - RNA, 32 nt, Homo Sapiens
ccugcucaucauauuccaacccagccacgacu

SEQ ID NO: 112020 - RNA, 32 nt, Homo Sapiens
cugaagcugugacugccaaacaucucaaauga

SEQ ID NO: 112021 - RNA, 32 nt, Homo Sapiens
ugauguguuguuguaaucuccauccaccauag

SEQ ID NO: 112022 - RNA, 32 nt, Homo Sapiens
accaccaaggggcccucuggaacuugagacca

SEQ ID NO: 112023 - RNA, 32 nt, Homo Sapiens
uaaauguaaccaaaaagugaacuacaggugca

SEQ ID NO: 112024 - RNA, 32 nt, Homo Sapiens
agagcggcggccuggaugccccagcgcccucc

SEQ ID NO: 112025 - RNA, 32 nt, Homo Sapiens
uuagccugauucucuucagugaauuuugauaa

SEQ ID NO: 112026 - RNA, 32 nt, Homo Sapiens
ccugucucagacauugucuccuccuuagaaga

SEQ ID NO: 112027 - RNA, 32 nt, Homo Sapiens
ucuugaggucacauuuucuccuugaaaaguga

SEQ ID NO: 112028 - RNA, 32 nt, Homo Sapiens
ggcuuaaggacuaugguuuacauccuguugga

SEQ ID NO: 112029 - RNA, 32 nt, Homo Sapiens
uggcccucuguuccugccccagccccuucccc

SEQ ID NO: 112030 - RNA, 32 nt, Homo Sapiens
cccugcgccucucgucguggccuccuggacuc

SEQ ID NO: 112031 - RNA, 32 nt, Homo Sapiens
cugcugcuucuccaagcuuucagacaagaaug

SEQ ID NO: 112032 - RNA, 32 nt, Homo Sapiens
gcuggaaugcaaauuucagaggcuucuuuuga

SEQ ID NO: 112033 - RNA, 32 nt, Homo Sapiens
uccuuuucuuuuucuuuuuuuccuucauuuuu

SEQ ID NO: 112034 - RNA, 32 nt, Homo Sapiens
augugcacuggccaccaccaggguugggggcg

SEQ ID NO: 112035 - RNA, 32 nt, Homo Sapiens
cugugccaaacuguguaaagcaaguacuuaca

SEQ ID NO: 112036 - RNA, 32 nt, Homo Sapiens
ucagcagggaggaggggcugcccggaguuggg

SEQ ID NO: 112037 - RNA, 32 nt, Homo Sapiens
cgccccucaccucuuugaaacucuggacguau

SEQ ID NO: 112038 - RNA, 32 nt, Homo Sapiens
ugggaccaggaagcugcagcugucccaucauc

SEQ ID NO: 112039 - RNA, 32 nt, Homo Sapiens
ggcuugucccugcauguuuguaaagcgggacu

SEQ ID NO: 112040 - RNA, 28 nt, Homo Sapiens
cauguaguggcuaugcaguguggaaagu

SEQ ID NO: 112041 - RNA, 32 nt, Homo Sapiens
agccacgggacuggcgggaggagcacgcgggg

SEQ ID NO: 112042 - RNA, 32 nt, Homo Sapiens
cugaugcaaaaauaucuauguggaagagaaga

SEQ ID NO: 112043 - RNA, 32 nt, Homo Sapiens
gcagcucugcugugggggcccgugggagggag

SEQ ID NO: 112044 - RNA, 32 nt, Homo Sapiens
aagacccuucuccccggaaagccuccugacag

SEQ ID NO: 112045 - RNA, 32 nt, Homo Sapiens
aaaauacaaaaauuagccgaguguguuggugg

SEQ ID NO: 112046 - RNA, 32 nt, Homo Sapiens
uguucccgcagagccggcacccgacgccgcac

SEQ ID NO: 112047 - RNA, 32 nt, Homo Sapiens
augcuuccccgguuucccuccuccuuuuaacu

SEQ ID NO: 112048 - RNA, 32 nt, Homo Sapiens
uucaugauguauuuucaaauagaguucaggau

SEQ ID NO: 112049 - RNA, 32 nt, Homo Sapiens
caacaucgaauguguacaacuuaaguuggucc

SEQ ID NO: 112050 - RNA, 32 nt, Homo Sapiens
uaucucuucagaugaaacuguccagauuaauu

SEQ ID NO: 112051 - RNA, 32 nt, Homo Sapiens
cacaccauaaagacauacuugagacugaguaa

SEQ ID NO: 112052 - RNA, 32 nt, Homo Sapiens
gcgccuugcugggcuccuggguuggacucccu

SEQ ID NO: 112053 - RNA, 32 nt, Homo Sapiens
agaaaugacaaugagcugaauauaugguuuua

SEQ ID NO: 112054 - RNA, 32 nt, Homo Sapiens
cuguacucuuuuugccuuuguacauucaggca

SEQ ID NO: 112055 - RNA, 32 nt, Homo Sapiens
aggagauuucuacacaaaucucacagaguccu

SEQ ID NO: 112056 - RNA, 32 nt, Homo Sapiens
cagggaguggggauugguccuacuuucuuucu

SEQ ID NO: 112057 - RNA, 32 nt, Homo Sapiens
gcccccgucgcgccucgugcggcagcggagag

SEQ ID NO: 112058 - RNA, 32 nt, Homo Sapiens
gucauuguccucuggaacaccuagcagacauc

SEQ ID NO: 112059 - RNA, 32 nt, Homo Sapiens
cugaaggcgguaccggccucccggaacagccc

SEQ ID NO: 112060 - RNA, 32 nt, Homo Sapiens
aauuuauuuggggucuuauauguuauuucuca

SEQ ID NO: 112061 - RNA, 32 nt, Homo Sapiens
uuaaguggucuuucuuguuuuuaauauucaug

SEQ ID NO: 112062 - RNA, 32 nt, Homo Sapiens
gugcccugccuacuccuucucaauaggccaca

SEQ ID NO: 112063 - RNA, 32 nt, Homo Sapiens
auggcauggaacucuuguuucuuggggaagga

SEQ ID NO: 112064 - RNA, 32 nt, Homo Sapiens
cuguagagagcuucuuuuuguuucuaccuggc

SEQ ID NO: 112065 - RNA, 32 nt, Homo Sapiens
ugcagcccuuuuagugguggugucucacucuu

SEQ ID NO: 112066 - RNA, 32 nt, Homo Sapiens
ugugucccagaccacacccauacccaagcagg

SEQ ID NO: 112067 - RNA, 32 nt, Homo Sapiens
cugcaaacaugauggcggcagcucccauccag

SEQ ID NO: 112068 - RNA, 32 nt, Homo Sapiens
aggggacugaagauacucccacaggggcucag

SEQ ID NO: 112069 - RNA, 32 nt, Homo Sapiens
caaugaaucaguacuuuguuuccccagguaga

SEQ ID NO: 112070 - RNA, 32 nt, Homo Sapiens
auucaauguaaagcaaacuuugaaaauaagcu

SEQ ID NO: 112071 - RNA, 32 nt, Homo Sapiens
ugugaaggcaaagggacaauuaucacugcaug

SEQ ID NO: 112072 - RNA, 32 nt, Homo Sapiens
caaagauguaaguuaauuuugaagauacaaag

SEQ ID NO: 112073 - RNA, 32 nt, Homo Sapiens
ugcggggacacggucugcacccugcccgcggc

SEQ ID NO: 112074 - RNA, 32 nt, Homo Sapiens
uuaagagaaugcuuugaaagcuuauuugauag

SEQ ID NO: 112075 - RNA, 32 nt, Homo Sapiens
aaaggacauccagguucccacccaggccuucc

SEQ ID NO: 112076 - RNA, 31 nt, Homo Sapiens
augagguuuuggaacagagugcuguuuuaga

SEQ ID NO: 112077 - RNA, 32 nt, Homo Sapiens
uuaaauauucaaugcaugaaagcaauuguacu

SEQ ID NO: 112078 - RNA, 32 nt, Homo Sapiens
ccuuucaaacucccuucuaggacaugcuccau

SEQ ID NO: 112079 - RNA, 32 nt, Homo Sapiens
ugguccgcaguggcagagcgccaggcagagcc

SEQ ID NO: 112080 - RNA, 32 nt, Homo Sapiens
aauaggucaaaauuccaaaaccauggacauuu

SEQ ID NO: 112081 - RNA, 32 nt, Homo Sapiens
acacccggccuauauuguuuugaaagcauacu

SEQ ID NO: 112082 - RNA, 32 nt, Homo Sapiens
cuacugucaaccaaauaugcugcaagucuucc

SEQ ID NO: 112083 - RNA, 32 nt, Homo Sapiens
auuuggucaagauuagugcuagcugauuugcu

SEQ ID NO: 112084 - RNA, 32 nt, Homo Sapiens
uuguguuacuuuuauuauuuggaugauaucag

SEQ ID NO: 112085 - RNA, 32 nt, Homo Sapiens
uccuucucuggagauguccauaaagaaguaau

SEQ ID NO: 112086 - RNA, 32 nt, Homo Sapiens
augguauuuauuuuuucuuuucuuuacaaacc

SEQ ID NO: 112087 - RNA, 32 nt, Homo Sapiens
caagcauguauuuuugucaauuaccagaaaga

SEQ ID NO: 112088 - RNA, 32 nt, Homo Sapiens
cgucgagggcugcagaacacagcgggguccug

SEQ ID NO: 112089 - RNA, 32 nt, Homo Sapiens
cuugaacacacacauguacacacacacacaca

SEQ ID NO: 112090 - RNA, 32 nt, Homo Sapiens
agaauuaagaugaaaaacauggccgggcgggg

SEQ ID NO: 112091 - RNA, 32 nt, Homo Sapiens
ccggagcugcgaugcuagagcacucuugccac

SEQ ID NO: 112092 - RNA, 31 nt, Homo Sapiens
cugcccugcacuggaccaggagucuggagau

SEQ ID NO: 112093 - RNA, 32 nt, Homo Sapiens
ucuccuuccuuccugguuccugcagcagcugc

SEQ ID NO: 112094 - RNA, 32 nt, Homo Sapiens
uauguucaaauuagcugcuugccugaugugug

SEQ ID NO: 112095 - RNA, 32 nt, Homo Sapiens
acuugagcugguuuuuguuuuugguauuugug

SEQ ID NO: 112096 - RNA, 32 nt, Homo Sapiens
auuuauaggauuaaagugacuucauuuguaua

SEQ ID NO: 112097 - RNA, 32 nt, Homo Sapiens
aucagcugaaaguuuuugaaacaaauauuuga

SEQ ID NO: 112098 - RNA, 32 nt, Homo Sapiens
gcagcagcgccuccucccggcgcccgagagac

SEQ ID NO: 112099 - RNA, 32 nt, Homo Sapiens
aguugucuuuaggugguccugaaucuugggcc

SEQ ID NO: 112100 - RNA, 32 nt, Homo Sapiens
aggucuaaguuuugggucauccaauugucauc

SEQ ID NO: 112101 - RNA, 28 nt, Homo Sapiens
gacaugaggcggccggcggcggugccgc

SEQ ID NO: 112102 - RNA, 32 nt, Homo Sapiens
aggcacggcccgcaacucggcgcggggggagc

SEQ ID NO: 112103 - RNA, 32 nt, Homo Sapiens
ggugucacuucaguaauucugguagcagccgu

SEQ ID NO: 112104 - RNA, 32 nt, Homo Sapiens
uguuucugagacggagucucagucugucaccc

SEQ ID NO: 112105 - RNA, 32 nt, Homo Sapiens
caacaacgcgcccucucccaguccucacaaag

SEQ ID NO: 112106 - RNA, 32 nt, Homo Sapiens
ucgaagacaugcccuccaccggaacucccuag

SEQ ID NO: 112107 - RNA, 32 nt, Homo Sapiens
uccgguuuucuuucuaaucucauguauuccug

SEQ ID NO: 112108 - RNA, 32 nt, Homo Sapiens
aaggcucugaaauuguacaugcaaauugguac

SEQ ID NO: 112109 - RNA, 32 nt, Homo Sapiens
gcaaagaugcuguuaauguuaugauggugcau

SEQ ID NO: 112110 - RNA, 32 nt, Homo Sapiens
augauuaaagguuggaaagaugacuguugcug

SEQ ID NO: 112111 - RNA, 32 nt, Homo Sapiens
ugaguuaaaugaguucuuaauaaucucuggcu

SEQ ID NO: 112112 - RNA, 32 nt, Homo Sapiens
ggcccggagcugcuccugcugcuggcaacaaa

SEQ ID NO: 112113 - RNA, 32 nt, Homo Sapiens
ucucaaccuuaugucaccucagcccucaucuc

SEQ ID NO: 112114 - RNA, 32 nt, Homo Sapiens
aagagaaaauguauuucuuuagguuucaaaca

SEQ ID NO: 112115 - RNA, 32 nt, Homo Sapiens
aagacuuuaaacaguugauucuuuuuguguuu

SEQ ID NO: 112116 - RNA, 32 nt, Homo Sapiens
ugagaaccuuggcggcuguggaggcugccgcg

SEQ ID NO: 112117 - RNA, 32 nt, Homo Sapiens
uguagagaagcgggaguggaucugaaauaaaa

SEQ ID NO: 112118 - RNA, 32 nt, Homo Sapiens
uuuuaaauccgaaaggacagucaugauuuaag

SEQ ID NO: 112119 - RNA, 32 nt, Homo Sapiens
ucaagaaaguguuuuaaaaauacuuuggaaaa

SEQ ID NO: 112120 - RNA, 32 nt, Homo Sapiens
cucaagucaagucacuggucuguuugcauuug

SEQ ID NO: 112121 - RNA, 32 nt, Homo Sapiens
gaaagucuguggcccaagagagagacacaagu

SEQ ID NO: 112122 - RNA, 32 nt, Homo Sapiens
aaauguuugugauguuuccaaugcugaaugcc

SEQ ID NO: 112123 - RNA, 32 nt, Homo Sapiens
ggugacagaaaaggcagaagcuggggcuuucu

SEQ ID NO: 112124 - RNA, 32 nt, Homo Sapiens
aaugugagaaaugucuaauagcccauaaaguc

SEQ ID NO: 112125 - RNA, 32 nt, Homo Sapiens
auuucgggucuugcuggggcugagagagacca

SEQ ID NO: 112126 - RNA, 32 nt, Homo Sapiens
ccuaguccaccgcucccggcgccggcuccccg

SEQ ID NO: 112127 - RNA, 32 nt, Homo Sapiens
aguugagagcggaaucuuuuugaaauaaaaag

SEQ ID NO: 112128 - RNA, 32 nt, Homo Sapiens
aggcauuuaaauuguuucuguuacucugugca

SEQ ID NO: 112129 - RNA, 32 nt, Homo Sapiens
ucaccagauuaauauauggaacaucauaagua

SEQ ID NO: 112130 - RNA, 32 nt, Homo Sapiens
uguuugaauugcagccauccccugcccccucc

SEQ ID NO: 112131 - RNA, 32 nt, Homo Sapiens
aucguagaucauaguauauuuuugcuuuucag

SEQ ID NO: 112132 - RNA, 32 nt, Homo Sapiens
cuuggagaggggcuuugacugagggcuggggg

SEQ ID NO: 112133 - RNA, 32 nt, Homo Sapiens
caccaccgcauucugaccuccuccucccaaaa

SEQ ID NO: 112134 - RNA, 32 nt, Homo Sapiens
acaucacugccuguuuuagccauggggauuuu

SEQ ID NO: 112135 - RNA, 32 nt, Homo Sapiens
cgcaguuguuuccauuccuauuuuuaauaaau

SEQ ID NO: 112136 - RNA, 32 nt, Homo Sapiens
guaucggucauuucuauuuccuuuuuugagaa

SEQ ID NO: 112137 - RNA, 32 nt, Homo Sapiens
gcucccuuucccuuguccaagguccuucuagc

SEQ ID NO: 112138 - RNA, 32 nt, Homo Sapiens
agcagccggguucgggggcgccgcgcugugag

SEQ ID NO: 112139 - RNA, 32 nt, Homo Sapiens
uuuccugaaaacccuugccaugugcuaguaau

SEQ ID NO: 112140 - RNA, 32 nt, Homo Sapiens
ccuauaguuauauaaucugacucucaguucag

SEQ ID NO: 112141 - RNA, 32 nt, Homo Sapiens
cuccgcuccccgcccucuucccggcccagggc

SEQ ID NO: 112142 - RNA, 32 nt, Homo Sapiens
auaaaugcaauuuuugucaagagaucuuucag

SEQ ID NO: 112143 - RNA, 32 nt, Homo Sapiens
gagcuagcaaggaaaacucaggaccaugaugg

SEQ ID NO: 112144 - RNA, 30 nt, Homo Sapiens
ccagcauggggaaacuucacuccaagccgg

SEQ ID NO: 112145 - RNA, 32 nt, Homo Sapiens
ggggugggggaugccuaggcguauuuguggua

SEQ ID NO: 112146 - RNA, 27 nt, Homo Sapiens
aacaguuguuucuucagcuuccuuugu

SEQ ID NO: 112147 - RNA, 32 nt, Homo Sapiens
cuauaacagugguuaccugucuccauguugac

SEQ ID NO: 112148 - RNA, 30 nt, Homo Sapiens
gaugagcacgcgcagcuggagccggugagc

SEQ ID NO: 112149 - RNA, 32 nt, Homo Sapiens
ugguuaucuauuccagccuccuccuaaggucc

SEQ ID NO: 112150 - RNA, 32 nt, Homo Sapiens
ggacguggggugcaggcgccaacaucaguggc

SEQ ID NO: 112151 - RNA, 32 nt, Homo Sapiens
uuuguccacuggaugucacuauuuuacuaaaa

SEQ ID NO: 112152 - RNA, 32 nt, Homo Sapiens
guacauuauuuuuuaauguuaaaagggcuuuu

SEQ ID NO: 112153 - RNA, 32 nt, Homo Sapiens
cuuucuaacugggaugugguagagggacugaa

SEQ ID NO: 112154 - RNA, 32 nt, Homo Sapiens
acagaaacugccuauuugaaauggcucauaag

SEQ ID NO: 112155 - RNA, 32 nt, Homo Sapiens
gcguccugucaggcggcggccgagggcgucgc

SEQ ID NO: 112156 - RNA, 32 nt, Homo Sapiens
ugauggauucagaaaguagguuccaguggcgu

SEQ ID NO: 112157 - RNA, 32 nt, Homo Sapiens
uuuagaccauucaaauacaacagaauucugag

SEQ ID NO: 112158 - RNA, 32 nt, Homo Sapiens
cagaacaggaccagaaguccuguucucuucua

SEQ ID NO: 112159 - RNA, 32 nt, Homo Sapiens
ccgacucaagauauuugucaaauauuuucaga

SEQ ID NO: 112160 - RNA, 32 nt, Homo Sapiens
aaaauggcagauuguguuugcugaauuugauu

SEQ ID NO: 112161 - RNA, 30 nt, Homo Sapiens
cgggaagccacccucccagcucugaggacu

SEQ ID NO: 112162 - RNA, 32 nt, Homo Sapiens
cagaugacaacaaagauugauagaaaucaggc

SEQ ID NO: 112163 - RNA, 32 nt, Homo Sapiens
cuuuucagauaaaacaguuuaugaguucauag

SEQ ID NO: 112164 - RNA, 32 nt, Homo Sapiens
acugugaccuuagcauuuaguuuucuagagga

SEQ ID NO: 112165 - RNA, 32 nt, Homo Sapiens
gugugagucagcgccccuggacgggccgggcu

SEQ ID NO: 112166 - RNA, 32 nt, Homo Sapiens
uugucuggaagagccauggacacaucauuauu

SEQ ID NO: 112167 - RNA, 32 nt, Homo Sapiens
uucucaugaugaugaaaaaguaucaagucaua

SEQ ID NO: 112168 - RNA, 32 nt, Homo Sapiens
ccgaguucccccagcccuucaucaccaacccg

SEQ ID NO: 112169 - RNA, 32 nt, Homo Sapiens
uguugcucugacaccaacccaggcagcucugc

SEQ ID NO: 112170 - RNA, 32 nt, Homo Sapiens
ugacaucaucgucaucacuguguauuuugcuc

SEQ ID NO: 112171 - RNA, 29 nt, Homo Sapiens
ugaaagucauauggguagagggagcaaug

SEQ ID NO: 112172 - RNA, 32 nt, Homo Sapiens
augacaaguaucaaagacauuuaggcaacuua

SEQ ID NO: 112173 - RNA, 32 nt, Homo Sapiens
ugggcgcggcggugcuggagcggccgguggcu

SEQ ID NO: 112174 - RNA, 32 nt, Homo Sapiens
aacagcuagagcaggcuguccucggagggaga

SEQ ID NO: 112175 - RNA, 32 nt, Homo Sapiens
uggagaaagagcagaugaaauauuuucucagu

SEQ ID NO: 112176 - RNA, 32 nt, Homo Sapiens
uauagacauuuucagacauuuuuggaaauuuc

SEQ ID NO: 112177 - RNA, 30 nt, Homo Sapiens
ucccuccaugcucugcugucuccuggugau

SEQ ID NO: 112178 - RNA, 32 nt, Homo Sapiens
ccucugauugugaauacugcuaacccuggaau

SEQ ID NO: 112179 - RNA, 32 nt, Homo Sapiens
cuguuacugaaaugaggagagaaggacaugug

SEQ ID NO: 112180 - RNA, 32 nt, Homo Sapiens
aguuagugaugauguuguauaugcugaugguc

SEQ ID NO: 112181 - RNA, 32 nt, Homo Sapiens
ccaggccuccauggagacugugacgaugacaa

SEQ ID NO: 112182 - RNA, 32 nt, Homo Sapiens
cccucuccaucaccugcucugcucuuauaagg

SEQ ID NO: 112183 - RNA, 32 nt, Homo Sapiens
ucugauuaauuucagcagcaucggaauauauu

SEQ ID NO: 112184 - RNA, 32 nt, Homo Sapiens
ccuuucugcugcaggaaccucucaucagaccg

SEQ ID NO: 112185 - RNA, 32 nt, Homo Sapiens
uuuggaaaugaugagauuauuuccuguguuaa

SEQ ID NO: 112186 - RNA, 31 nt, Homo Sapiens
aaagcugcaaggucaagaugguucauuaugg

SEQ ID NO: 112187 - RNA, 32 nt, Homo Sapiens
cacacacacacacacacacacacacacacagc

SEQ ID NO: 112188 - RNA, 32 nt, Homo Sapiens
ucaauuuauuuuuuagcaguuuaauggguaca

SEQ ID NO: 112189 - RNA, 32 nt, Homo Sapiens
aagucaaaguggugaaaauauguaauaauuuu

SEQ ID NO: 112190 - RNA, 32 nt, Homo Sapiens
gacaggccgggcgcgguggcucacgucuguaa

SEQ ID NO: 112191 - RNA, 32 nt, Homo Sapiens
ggagagaggaggaaaagucuuccuaauugugc

SEQ ID NO: 112192 - RNA, 32 nt, Homo Sapiens
guucuguauucagucauucucuagguaauguc

SEQ ID NO: 112193 - RNA, 32 nt, Homo Sapiens
ggcagguggcuugagggugcugcuaaaacagc

SEQ ID NO: 112194 - RNA, 32 nt, Homo Sapiens
uuuggaagagguguccugcugcuguuaccagc

SEQ ID NO: 112195 - RNA, 32 nt, Homo Sapiens
ccccccucccccgcagcagcgggccuugccgu

SEQ ID NO: 112196 - RNA, 32 nt, Homo Sapiens
uucucugugucgccccgcccagcccccuggug

SEQ ID NO: 112197 - RNA, 32 nt, Homo Sapiens
uugauuuaggaaaguuuaugccugcugcuucu

SEQ ID NO: 112198 - RNA, 32 nt, Homo Sapiens
uucaguagugaaaucuuacuguaccgccuguu

SEQ ID NO: 112199 - RNA, 32 nt, Homo Sapiens
augggagccgaaacccuauuaagacaggucuu

SEQ ID NO: 112200 - RNA, 32 nt, Homo Sapiens
gggcuuuauaugcuuggauggcuuuguggaau

SEQ ID NO: 112201 - RNA, 31 nt, Homo Sapiens
ccuccaaccccaggaggccaggcaagcaugg

SEQ ID NO: 112202 - RNA, 32 nt, Homo Sapiens
auguagaaucaaauuauauaaacaguaccaau

SEQ ID NO: 112203 - RNA, 29 nt, Homo Sapiens
gaaacugaaaauaaagcuuguuuauuucc

SEQ ID NO: 112204 - RNA, 32 nt, Homo Sapiens
gaaggaugagcagcagcuagccaggcaaaggg

SEQ ID NO: 112205 - RNA, 32 nt, Homo Sapiens
uucaucuggaaguuaaagugaggccacugaag

SEQ ID NO: 112206 - RNA, 32 nt, Homo Sapiens
gaauccagccucgggggucaucuggaggcaug

SEQ ID NO: 112207 - RNA, 32 nt, Homo Sapiens
agauguucccccugcuguaaaugcaggucucu

SEQ ID NO: 112208 - RNA, 32 nt, Homo Sapiens
guccacauucuccccaggaagccggacucuau

SEQ ID NO: 112209 - RNA, 32 nt, Homo Sapiens
aacaaaaacaaaacaaaacauaaaauauaaac

SEQ ID NO: 112210 - RNA, 32 nt, Homo Sapiens
cucggggccuucacagccuccauccuuagcuu

SEQ ID NO: 112211 - RNA, 32 nt, Homo Sapiens
cuccgcaucaacagacugggagggauuacgug

SEQ ID NO: 112212 - RNA, 32 nt, Homo Sapiens
auuucuagggcauuggcgcgcugcugggugac

SEQ ID NO: 112213 - RNA, 32 nt, Homo Sapiens
gcaucuucgugacgcccacgggcgugcucaag

SEQ ID NO: 112214 - RNA, 32 nt, Homo Sapiens
uaucauuaauaaaaauaucuagcuggucugaa

SEQ ID NO: 112215 - RNA, 32 nt, Homo Sapiens
guggcaugugguguagcuuucacuuacuucca

SEQ ID NO: 112216 - RNA, 32 nt, Homo Sapiens
aaauuguguagaguuagguacacaaaggagua

SEQ ID NO: 112217 - RNA, 32 nt, Homo Sapiens
aagacaggccccagauccccucccaguggcac

SEQ ID NO: 112218 - RNA, 32 nt, Homo Sapiens
guaguuacugucagcuaacagguuuuuuaagg

SEQ ID NO: 112219 - RNA, 32 nt, Homo Sapiens
aacaaaucaagaagcugaaaaauuuuuaggau

SEQ ID NO: 112220 - RNA, 32 nt, Homo Sapiens
uagcccugcugggcugccccuccuucggagug

SEQ ID NO: 112221 - RNA, 32 nt, Homo Sapiens
ggagcugcaggcggcgggaggggcuacaaaug

SEQ ID NO: 112222 - RNA, 32 nt, Homo Sapiens
ggaaccgcggcugcuggacaagaggggugcgg

SEQ ID NO: 112223 - RNA, 32 nt, Homo Sapiens
ucuuccaauaaaacuaauuauggcucauuccc

SEQ ID NO: 112224 - RNA, 32 nt, Homo Sapiens
ucagaguccauuuuuucuuaugucuuuauaag

SEQ ID NO: 112225 - RNA, 32 nt, Homo Sapiens
augagauaaaaagaauaaggcaauaaauguug

SEQ ID NO: 112226 - RNA, 32 nt, Homo Sapiens
ugugaaagcccgccuuguugccugcuuugugc

SEQ ID NO: 112227 - RNA, 32 nt, Homo Sapiens
gcugggcagcgcccuucguccaggcucgcgcc

SEQ ID NO: 112228 - RNA, 32 nt, Homo Sapiens
acagccuccagaagccaaaaccaugccuggau

SEQ ID NO: 112229 - RNA, 32 nt, Homo Sapiens
uccaacaguuuagcaagagucacucugagauu

SEQ ID NO: 112230 - RNA, 32 nt, Homo Sapiens
acaccucugcaccuuguuaccugacuuucggc

SEQ ID NO: 112231 - RNA, 32 nt, Homo Sapiens
ccugcaugcugccuguauugccugcaugcugc

SEQ ID NO: 112232 - RNA, 32 nt, Homo Sapiens
cucuacaaaaauacaaaaauuagccaggugug

SEQ ID NO: 112233 - RNA, 32 nt, Homo Sapiens
uucaugaaaaggaaaaaugguuaacauguuua

SEQ ID NO: 112234 - RNA, 32 nt, Homo Sapiens
uauucauuguguuaaacuuauuuuuaguuuaa

SEQ ID NO: 112235 - RNA, 32 nt, Homo Sapiens
gagacagcauagcaguccaggcugguccuuug

SEQ ID NO: 112236 - RNA, 32 nt, Homo Sapiens
ucaaguggcaucuuaaauuuuugcuggaagug

SEQ ID NO: 112237 - RNA, 32 nt, Homo Sapiens
gaugccaaggccagucugcagccgucgucgcu

SEQ ID NO: 112238 - RNA, 32 nt, Homo Sapiens
uggagccgccuggagggcucggucggcgaccu

SEQ ID NO: 112239 - RNA, 32 nt, Homo Sapiens
uguugccugugaggagcuuucuggcaugugau

SEQ ID NO: 112240 - RNA, 32 nt, Homo Sapiens
cuaagcagcuggaaggaaccauggccaacugu

SEQ ID NO: 112241 - RNA, 32 nt, Homo Sapiens
gggagcugcaccugacacauuuacauuucaca

SEQ ID NO: 112242 - RNA, 28 nt, Homo Sapiens
cacagccugcugagcaggaugacaggac

SEQ ID NO: 112243 - RNA, 32 nt, Homo Sapiens
gcuucccgccggggauggccggccagugacgg

SEQ ID NO: 112244 - RNA, 32 nt, Homo Sapiens
cugaagaggaaccugacuguauggaaggucaa

SEQ ID NO: 112245 - RNA, 32 nt, Homo Sapiens
ugacaaaaaauauuuuacauaauuacucauuu

SEQ ID NO: 112246 - RNA, 32 nt, Homo Sapiens
gagggcggggaagaggcgugacggagauuccu

SEQ ID NO: 112247 - RNA, 32 nt, Homo Sapiens
acacacggaaaggcggcugugcggacgcaggg

SEQ ID NO: 112248 - RNA, 32 nt, Homo Sapiens
caguuauaaauauggugaauuuuuucuggacc

SEQ ID NO: 112249 - RNA, 32 nt, Homo Sapiens
gauuauuuaaguggcuuuugaucuguaaauaa

SEQ ID NO: 112250 - RNA, 32 nt, Homo Sapiens
caggugaguggcggggcggggcagaggugagg

SEQ ID NO: 112251 - RNA, 32 nt, Homo Sapiens
uccgcuguuuccugaggcugggugcugaguuc

SEQ ID NO: 112252 - RNA, 32 nt, Homo Sapiens
guauuguuacuucuuuccaggaugcaaggucu

SEQ ID NO: 112253 - RNA, 32 nt, Homo Sapiens
gaugaaaagagaauguugugauuugagcuuuu

SEQ ID NO: 112254 - RNA, 32 nt, Homo Sapiens
cuccaggacaccacuagguggugcuggaugcu

SEQ ID NO: 112255 - RNA, 29 nt, Homo Sapiens
uggggcuaaaguuuguuuuuccagggcug

SEQ ID NO: 112256 - RNA, 32 nt, Homo Sapiens
ggagugcgggguggagagagcaucaggaaaaa

SEQ ID NO: 112257 - RNA, 32 nt, Homo Sapiens
acaauuuguuguuaaacacaucacucaaugua

SEQ ID NO: 112258 - RNA, 31 nt, Homo Sapiens
cagcgagcaggcugccugcccaccccgugcc

SEQ ID NO: 112259 - RNA, 32 nt, Homo Sapiens
ggggugagaggaagaaagcaaacccggggagc

SEQ ID NO: 112260 - RNA, 32 nt, Homo Sapiens
ggaggguagggcuugcugggcuggggacugga

SEQ ID NO: 112261 - RNA, 32 nt, Homo Sapiens
gguuugcuaagagcuuucaucaugaauggaug

SEQ ID NO: 112262 - RNA, 32 nt, Homo Sapiens
ccguuagggccgccccugcucuccggacgcga

SEQ ID NO: 112263 - RNA, 32 nt, Homo Sapiens
gauuuuugacauuuguaucaaaagagaaguug

SEQ ID NO: 112264 - RNA, 32 nt, Homo Sapiens
uuugccacagaaagcagugagcaagaaugaua

SEQ ID NO: 112265 - RNA, 32 nt, Homo Sapiens
cacauucugcuguuguugggaaacagggagug

SEQ ID NO: 112266 - RNA, 32 nt, Homo Sapiens
guccugggagguccuuggcagaacucaguuaa

SEQ ID NO: 112267 - RNA, 32 nt, Homo Sapiens
uuauaauuaguuccucauuagcauuuugcuaa

SEQ ID NO: 112268 - RNA, 32 nt, Homo Sapiens
ucaaaggugggaagagagccuggaaaagaacc

SEQ ID NO: 112269 - RNA, 32 nt, Homo Sapiens
gaucccaaaagugccuccccagccucagcccc

SEQ ID NO: 112270 - RNA, 32 nt, Homo Sapiens
ggccgccugcuguacauagugaagcugucacu

SEQ ID NO: 112271 - RNA, 32 nt, Homo Sapiens
auauaauucuuacugcagaaaaccccuaggaa

SEQ ID NO: 112272 - RNA, 32 nt, Homo Sapiens
augcccaaggcacagggcugcagaaaauaaac

SEQ ID NO: 112273 - RNA, 32 nt, Homo Sapiens
auguuacaguugaagagcuugguuucauugag

SEQ ID NO: 112274 - RNA, 32 nt, Homo Sapiens
guucaggccacuuuucugucuuuuauuugguu

SEQ ID NO: 112275 - RNA, 32 nt, Homo Sapiens
aaaaggccaaggaaaaaaaauauuccuacuua

SEQ ID NO: 112276 - RNA, 32 nt, Homo Sapiens
uuuauuuuauguuuuucuuucuuuugaacccu

SEQ ID NO: 112277 - RNA, 32 nt, Homo Sapiens
uuugagagcgcgaagaggggcggcaagauggc

SEQ ID NO: 112278 - RNA, 32 nt, Homo Sapiens
gccucccgcgcgccuaggugccugcgacuuua

SEQ ID NO: 112279 - RNA, 32 nt, Homo Sapiens
guauuacugcccagaagaguugcuaggguguu

SEQ ID NO: 112280 - RNA, 32 nt, Homo Sapiens
cggccccucccccaagucucuucugugcaagg

SEQ ID NO: 112281 - RNA, 32 nt, Homo Sapiens
ggugauuugaguuaaugaacuucuuuucauga

SEQ ID NO: 112282 - RNA, 32 nt, Homo Sapiens
cuucggugccucggggucuccugaagacaggc

SEQ ID NO: 112283 - RNA, 32 nt, Homo Sapiens
ggugagcggcucggacucggcggccgcaccug

SEQ ID NO: 112284 - RNA, 32 nt, Homo Sapiens
aaaauacaaaaauuagccaggugugauggugg

SEQ ID NO: 112285 - RNA, 32 nt, Homo Sapiens
uuuaagagaggcccggcccauccagagggggu

SEQ ID NO: 112286 - RNA, 32 nt, Homo Sapiens
acuucuucuuucuucccuuuccuuccacggug

SEQ ID NO: 112287 - RNA, 32 nt, Homo Sapiens
acaauucugagaaacaaaaacacacacgcaga

SEQ ID NO: 112288 - RNA, 32 nt, Homo Sapiens
ucuggacuguaagaauaugucuccagggccag

SEQ ID NO: 112289 - RNA, 32 nt, Homo Sapiens
ccagauguaggggaagagauguuuacaguaug

SEQ ID NO: 112290 - RNA, 32 nt, Homo Sapiens
cccggcacccucaacaucauaaggaaucagac

SEQ ID NO: 112291 - RNA, 28 nt, Homo Sapiens
uuuauugaguaauaaacuuguggcacac

SEQ ID NO: 112292 - RNA, 32 nt, Homo Sapiens
uccaucuuuagcccuuuccccugugugcccuu

SEQ ID NO: 112293 - RNA, 32 nt, Homo Sapiens
caccgucagcggggcgcgcacgcccccaaacc

SEQ ID NO: 112294 - RNA, 32 nt, Homo Sapiens
ccacgcguccgcccacgcguccggcugcucug

SEQ ID NO: 112295 - RNA, 32 nt, Homo Sapiens
gaccuugcacugcuccuccagccccagcugcc

SEQ ID NO: 112296 - RNA, 32 nt, Homo Sapiens
cucagggcagaaaaagggaauggcagggagua

SEQ ID NO: 112297 - RNA, 32 nt, Homo Sapiens
acccaauaaaauguuauaugaaagaaugaaaa

SEQ ID NO: 112298 - RNA, 32 nt, Homo Sapiens
aagcuacagaacuucugagauuguggaagaau

SEQ ID NO: 112299 - RNA, 32 nt, Homo Sapiens
agaacaaaaugaauuuauugaccaauuuauuu

SEQ ID NO: 112300 - RNA, 32 nt, Homo Sapiens
ucacaaauacuagggguuuuuguuguauuuuu

SEQ ID NO: 112301 - RNA, 32 nt, Homo Sapiens
caguggcugucccauggcuacauccugugggu

SEQ ID NO: 112302 - RNA, 32 nt, Homo Sapiens
gggacuuggacaaagagggguuuuccuacaga

SEQ ID NO: 112303 - RNA, 32 nt, Homo Sapiens
uaauuuuaucccauuuuuaauauuuuggucua

SEQ ID NO: 112304 - RNA, 32 nt, Homo Sapiens
accuggaggaucuggaccgggugcugggggug

SEQ ID NO: 112305 - RNA, 32 nt, Homo Sapiens
cccuggggaggugaaagucagagagcgaagcg

SEQ ID NO: 112306 - RNA, 31 nt, Homo Sapiens
guccgccagcuccgugcuccccgcgccaccc

SEQ ID NO: 112307 - RNA, 32 nt, Homo Sapiens
ggacauguuuaaauaacugugcaaggggugau

SEQ ID NO: 112308 - RNA, 32 nt, Homo Sapiens
agacuguccaguguuauaaaguuugugucaau

SEQ ID NO: 112309 - RNA, 32 nt, Homo Sapiens
ucucuguuuccacacguacacaugccccugug

SEQ ID NO: 112310 - RNA, 32 nt, Homo Sapiens
gcaguggauguaccccaccucuuugcuuaaaa

SEQ ID NO: 112311 - RNA, 32 nt, Homo Sapiens
uaggaauuacaauaugauguuauuagcugucc

SEQ ID NO: 112312 - RNA, 32 nt, Homo Sapiens
aucagaauauccauaguagacaagaauuugau

SEQ ID NO: 112313 - RNA, 32 nt, Homo Sapiens
uucugucaaggugggggccgccugcucagccc

SEQ ID NO: 112314 - RNA, 32 nt, Homo Sapiens
uguaaagcuguaaauacuuaauuuugacuuuc

SEQ ID NO: 112315 - RNA, 32 nt, Homo Sapiens
acagcagggugggcuuguggggccugggaggg

SEQ ID NO: 112316 - RNA, 32 nt, Homo Sapiens
cuggacguugggcuccuggcgaaccucucggc

SEQ ID NO: 112317 - RNA, 28 nt, Homo Sapiens
agaugaguggcuagaucagggggcucau

SEQ ID NO: 112318 - RNA, 32 nt, Homo Sapiens
uggacauugucugcgugguuccuuucucagcc

SEQ ID NO: 112319 - RNA, 32 nt, Homo Sapiens
aaguggcagcgaagaagacuggccccgacauu

SEQ ID NO: 112320 - RNA, 32 nt, Homo Sapiens
ggcuuuaaaauuuuaaaacaaacaaacaaaaa

SEQ ID NO: 112321 - RNA, 32 nt, Homo Sapiens
gggucaccggugccgaugcucuggcccucccc

SEQ ID NO: 112322 - RNA, 30 nt, Homo Sapiens
cugucugucugugggagucggacauugugc

SEQ ID NO: 112323 - RNA, 32 nt, Homo Sapiens
ugaacuuggccauuguccagcagcaccauggg

SEQ ID NO: 112324 - RNA, 32 nt, Homo Sapiens
cuuucucgcgcccacuggccggucucuccucu

SEQ ID NO: 112325 - RNA, 32 nt, Homo Sapiens
agaggaaggggagaaugagugucgccugcuaa

SEQ ID NO: 112326 - RNA, 32 nt, Homo Sapiens
gcacacuuaaaagcaaaggaaaaaauaaauca

SEQ ID NO: 112327 - RNA, 32 nt, Homo Sapiens
aaaguaaggaacaauaccugggaaauaauaaa

SEQ ID NO: 112328 - RNA, 32 nt, Homo Sapiens
gagcaggaguccugggucuucccaguugagac

SEQ ID NO: 112329 - RNA, 32 nt, Homo Sapiens
ggagucaaccccggcgugguggcugcugcagg

SEQ ID NO: 112330 - RNA, 32 nt, Homo Sapiens
cuguuguggguuccugccaggcuugaagaaaa

SEQ ID NO: 112331 - RNA, 32 nt, Homo Sapiens
caacuuaagaugacuagauauuaaucauuccu

SEQ ID NO: 112332 - RNA, 32 nt, Homo Sapiens
auucugaguagguucuuaguuuucugauuucu

SEQ ID NO: 112333 - RNA, 32 nt, Homo Sapiens
uuguagagagaaaaaagaaaacaagagauaua

SEQ ID NO: 112334 - RNA, 32 nt, Homo Sapiens
uugucaaauuaugcagaagagacagaggagag

SEQ ID NO: 112335 - RNA, 32 nt, Homo Sapiens
cccugaguuagagacaaugcaaauguuggauu

SEQ ID NO: 112336 - RNA, 32 nt, Homo Sapiens
ccacucugccccagcucccuggauccuacccc

SEQ ID NO: 112337 - RNA, 32 nt, Homo Sapiens
ggucaugaaguaacagaaauggucacacugau

SEQ ID NO: 112338 - RNA, 32 nt, Homo Sapiens
ucaacggagggaguggcacuucugccuugagu

SEQ ID NO: 112339 - RNA, 32 nt, Homo Sapiens
auuccuccaaauauauauaccacuguguauua

SEQ ID NO: 112340 - RNA, 29 nt, Homo Sapiens
uaggugaagggacagaggacagggcuucu

SEQ ID NO: 112341 - RNA, 32 nt, Homo Sapiens
ccaguguggugacacacgcuguagcugucucc

SEQ ID NO: 112342 - RNA, 32 nt, Homo Sapiens
caugagcaccugugccagccccugcccgucac

SEQ ID NO: 112343 - RNA, 30 nt, Homo Sapiens
aacuuucuaaaauaaaagcaugcugaauuu

SEQ ID NO: 112344 - RNA, 32 nt, Homo Sapiens
aagccuuucuuacaucuugaaaauuuucuaau

SEQ ID NO: 112345 - RNA, 32 nt, Homo Sapiens
ucagaauagauauuucugauuugaaaauucua

SEQ ID NO: 112346 - RNA, 32 nt, Homo Sapiens
guaggaaagucuuuuuuccuuagcgugguuuc

SEQ ID NO: 112347 - RNA, 32 nt, Homo Sapiens
ggccggggagccccugccugggcccgcagccu

SEQ ID NO: 112348 - RNA, 32 nt, Homo Sapiens
ggcagugugcuggcaguggccuugaggcuuug

SEQ ID NO: 112349 - RNA, 32 nt, Homo Sapiens
gucuugcuuucuacuaaccuuuuguuacuaaa

SEQ ID NO: 112350 - RNA, 32 nt, Homo Sapiens
uucuagaggggugacagcgaaacgugggacca

SEQ ID NO: 112351 - RNA, 32 nt, Homo Sapiens
cgugaagcaaucauuuccccucccgucuuccu

SEQ ID NO: 112352 - RNA, 32 nt, Homo Sapiens
cucaaucugaugcaucauaaucagcagaguca

SEQ ID NO: 112353 - RNA, 32 nt, Homo Sapiens
uuuggagacaccugguugucacuggagggggu

SEQ ID NO: 112354 - RNA, 32 nt, Homo Sapiens
uuuguacauauuuuuuuuuuuaaagagaagaa

SEQ ID NO: 112355 - RNA, 32 nt, Homo Sapiens
gugucaggcugcuggcgccucugcaagggcag

SEQ ID NO: 112356 - RNA, 32 nt, Homo Sapiens
gaccugagcccaagcccuccccuggugcagcu

SEQ ID NO: 112357 - RNA, 32 nt, Homo Sapiens
ugcaaaaguauuuuaccuuugcauaaguguuu

SEQ ID NO: 112358 - RNA, 32 nt, Homo Sapiens
uaguccaccagagccccuccccgccccucucc

SEQ ID NO: 112359 - RNA, 32 nt, Homo Sapiens
ucucacuccugcccuucuuccacagcguaugu

SEQ ID NO: 112360 - RNA, 32 nt, Homo Sapiens
cuuugaguucucuggaguagauauuaauuuga

SEQ ID NO: 112361 - RNA, 32 nt, Homo Sapiens
ggcuaagcuuggugugcagagccccuugcccc

SEQ ID NO: 112362 - RNA, 32 nt, Homo Sapiens
ucugaucagcagccucuuccuccuccaggacc

SEQ ID NO: 112363 - RNA, 32 nt, Homo Sapiens
uaagugaagcaugauccaaaauacuugauuau

SEQ ID NO: 112364 - RNA, 32 nt, Homo Sapiens
augcacuauggauguggaacugucaagcagaa

SEQ ID NO: 112365 - RNA, 32 nt, Homo Sapiens
ugccuuucccagcgucucauacccccgguagu

SEQ ID NO: 112366 - RNA, 28 nt, Homo Sapiens
acuauguuguucuccgcccuccugcugg

SEQ ID NO: 112367 - RNA, 32 nt, Homo Sapiens
aucucucaaguacccaucuuggaggguacgga

SEQ ID NO: 112368 - RNA, 32 nt, Homo Sapiens
uccucagccucugccccaguucugggagaagu

SEQ ID NO: 112369 - RNA, 32 nt, Homo Sapiens
cagguggccccggcaccuugucccuuccgggc

SEQ ID NO: 112370 - RNA, 32 nt, Homo Sapiens
uuaauauuuccuuugauauuauacaggaaagc

SEQ ID NO: 112371 - RNA, 32 nt, Homo Sapiens
uuggccgggaggaggcugugcugcaccagcac

SEQ ID NO: 112372 - RNA, 32 nt, Homo Sapiens
aaauaaugguucauuuaccaucuuuaggauca

SEQ ID NO: 112373 - RNA, 32 nt, Homo Sapiens
ccaccauuuuuggcagcguggcagcuuugcaa

SEQ ID NO: 112374 - RNA, 32 nt, Homo Sapiens
guuacuguguuauucugaguucuuauaaaugc

SEQ ID NO: 112375 - RNA, 32 nt, Homo Sapiens
uuacuguauagacuaaauauauucuauuuaca

SEQ ID NO: 112376 - RNA, 32 nt, Homo Sapiens
gccuuagaugcaucccgagggucugaaauuaa

SEQ ID NO: 112377 - RNA, 32 nt, Homo Sapiens
acugcgggacgguggcucugcaguggaugcag

SEQ ID NO: 112378 - RNA, 32 nt, Homo Sapiens
cauuuuggagggcugagaugggaaauaaaagu

SEQ ID NO: 112379 - RNA, 32 nt, Homo Sapiens
guccccgcccgcgcgccguaccgcggcggaga

SEQ ID NO: 112380 - RNA, 32 nt, Homo Sapiens
gcagcagccaaggacacuuaccugugaugagg

SEQ ID NO: 112381 - RNA, 32 nt, Homo Sapiens
acccuuccauauauaauauauauggaauaugu

SEQ ID NO: 112382 - RNA, 30 nt, Homo Sapiens
cacuaccaggugcuugaugaaucuggcgag

SEQ ID NO: 112383 - RNA, 32 nt, Homo Sapiens
gcgggcgccgucugcuccgggagcccugaccc

SEQ ID NO: 112384 - RNA, 32 nt, Homo Sapiens
ccucgcacacugaagcaggggcgugcggugac

SEQ ID NO: 112385 - RNA, 32 nt, Homo Sapiens
aucggccacaccugguguccaugggcagccug

SEQ ID NO: 112386 - RNA, 32 nt, Homo Sapiens
gauacuucaaggauagaaguguuggcacgcac

SEQ ID NO: 112387 - RNA, 32 nt, Homo Sapiens
auauugagaaagucaacaagcaccucuuuaca

SEQ ID NO: 112388 - RNA, 32 nt, Homo Sapiens
aaacaagaauaaacagaaugguauuuuuaggu

SEQ ID NO: 112389 - RNA, 32 nt, Homo Sapiens
aaacacauuauguaucuuaguuacauuucuau

SEQ ID NO: 112390 - RNA, 32 nt, Homo Sapiens
gaagaauuagcccucccaaaauguagauuauu

SEQ ID NO: 112391 - RNA, 32 nt, Homo Sapiens
cuugaccaggacuugggacuuugcgaaaggau

SEQ ID NO: 112392 - RNA, 32 nt, Homo Sapiens
aagaaagaaaaguuuuauaccaaaaauuguau

SEQ ID NO: 112393 - RNA, 32 nt, Homo Sapiens
gcccaucuguccaaccuuuucacugguuccuc

SEQ ID NO: 112394 - RNA, 32 nt, Homo Sapiens
gucuucuccucuuccuuguccccuccuccucc

SEQ ID NO: 112395 - RNA, 32 nt, Homo Sapiens
ggacaaggauccaugaaaaagaccugugaugu

SEQ ID NO: 112396 - RNA, 32 nt, Homo Sapiens
ccaggaaggaggaggguguucaggagccagac

SEQ ID NO: 112397 - RNA, 32 nt, Homo Sapiens
gcuguguucaacaucuuagcuuacguuuuuca

SEQ ID NO: 112398 - RNA, 32 nt, Homo Sapiens
ggaaaccccacccuuuucuccucacugugccu

SEQ ID NO: 112399 - RNA, 32 nt, Homo Sapiens
cuguucugguucccucucucccccaugaauau

SEQ ID NO: 112400 - RNA, 32 nt, Homo Sapiens
caccugggccgcuacugcuuggagcaccugcc

SEQ ID NO: 112401 - RNA, 31 nt, Homo Sapiens
uguuuucccauuucuuucugaguuagaauca

SEQ ID NO: 112402 - RNA, 32 nt, Homo Sapiens
ucugagagauaagagggaagggguagaaggaa

SEQ ID NO: 112403 - RNA, 32 nt, Homo Sapiens
ugagaaagguguuaauaaaauucuauugcaaa

SEQ ID NO: 112404 - RNA, 32 nt, Homo Sapiens
aucucaggcucucacaggauccggagggaaau

SEQ ID NO: 112405 - RNA, 32 nt, Homo Sapiens
ugaaacugaaauaagcuaauuuuuugggucac

SEQ ID NO: 112406 - RNA, 32 nt, Homo Sapiens
ugugggaaauaccaccaaggaaccucaucgug

SEQ ID NO: 112407 - RNA, 32 nt, Homo Sapiens
ugcuuggcggugagggggcucuacacaagcuu

SEQ ID NO: 112408 - RNA, 32 nt, Homo Sapiens
auacacuccuucccuuccaucacugcagaccu

SEQ ID NO: 112409 - RNA, 32 nt, Homo Sapiens
cguccagcugucucuccccuguccccacaugu

SEQ ID NO: 112410 - RNA, 32 nt, Homo Sapiens
agaaauaguuuagggacauguauucauuuugu

SEQ ID NO: 112411 - RNA, 32 nt, Homo Sapiens
ggaacaggcuccgacgagaucuuccuggcacc

SEQ ID NO: 112412 - RNA, 32 nt, Homo Sapiens
caugaucucggcucacuguaccucugucuccc

SEQ ID NO: 112413 - RNA, 32 nt, Homo Sapiens
cacuaaaaggcuuuuuacauuuucccuccuua

SEQ ID NO: 112414 - RNA, 32 nt, Homo Sapiens
uacagcagagugccuuagcaaaaacugucucu

SEQ ID NO: 112415 - RNA, 32 nt, Homo Sapiens
uguguuuuucuuuuuccacaaggaauaaauga

SEQ ID NO: 112416 - RNA, 32 nt, Homo Sapiens
auugaugggaaauuauuuuucaggaaaauuua

SEQ ID NO: 112417 - RNA, 32 nt, Homo Sapiens
cguacaggaucugguuaccugugcaguuguga

SEQ ID NO: 112418 - RNA, 32 nt, Homo Sapiens
ggcacaccaucaugcauaccaauauaugcaua

SEQ ID NO: 112419 - RNA, 32 nt, Homo Sapiens
aagcaggcagaaaaacaugaaaagguaagauu

SEQ ID NO: 112420 - RNA, 30 nt, Homo Sapiens
cgucugugcagcgagcagccggcgcgggga

SEQ ID NO: 112421 - RNA, 32 nt, Homo Sapiens
acugccuccccaguacaggggcuuggacagaa

SEQ ID NO: 112422 - RNA, 32 nt, Homo Sapiens
gucauugugggaagaagggguggggggagggg

SEQ ID NO: 112423 - RNA, 32 nt, Homo Sapiens
ucucugggccccaggcacccccuggcuugaac

SEQ ID NO: 112424 - RNA, 32 nt, Homo Sapiens
gauuuguuauuuauagacuuucguagcuuaga

SEQ ID NO: 112425 - RNA, 32 nt, Homo Sapiens
ucucccuggaaagggagggaggcuucgacguc

SEQ ID NO: 112426 - RNA, 32 nt, Homo Sapiens
augugacccccuccucuaugaggcuggguuag

SEQ ID NO: 112427 - RNA, 32 nt, Homo Sapiens
aaccccgagggccaguuucuugucgaauuggu

SEQ ID NO: 112428 - RNA, 32 nt, Homo Sapiens
uuucaagccuacuuaccuuuauaaagguucuc

SEQ ID NO: 112429 - RNA, 32 nt, Homo Sapiens
ccagauccccaugccuggggccccucggcugg

SEQ ID NO: 112430 - RNA, 32 nt, Homo Sapiens
aguuaaaaacaaaacacuaacaaucuuuacgu

SEQ ID NO: 112431 - RNA, 32 nt, Homo Sapiens
ugucuguuguggugggccucccgggaauaagu

SEQ ID NO: 112432 - RNA, 32 nt, Homo Sapiens
gagcacgccucccagcccuggccugcagugug

SEQ ID NO: 112433 - RNA, 32 nt, Homo Sapiens
aauugauguaaauuauuuuuaaacagugcauu

SEQ ID NO: 112434 - RNA, 30 nt, Homo Sapiens
agcugccaugcucugcugccucuaauucac

SEQ ID NO: 112435 - RNA, 32 nt, Homo Sapiens
gggccuguugaagaugcuuguauuuuacuuuu

SEQ ID NO: 112436 - RNA, 32 nt, Homo Sapiens
aggguggcugugcgagguacugccggggcuga

SEQ ID NO: 112437 - RNA, 32 nt, Homo Sapiens
cgcuccgacgcggaagaucugacugcagccau

SEQ ID NO: 112438 - RNA, 32 nt, Homo Sapiens
ggggcuggccacauggagcccgggcuggagca

SEQ ID NO: 112439 - RNA, 32 nt, Homo Sapiens
aagauuugggggucgccuugccggccuccugu

SEQ ID NO: 112440 - RNA, 32 nt, Homo Sapiens
uugugggagacacccugcagauccucaugggu

SEQ ID NO: 112441 - RNA, 32 nt, Homo Sapiens
uucccuuuugaagagacagcaacagccguagc

SEQ ID NO: 112442 - RNA, 32 nt, Homo Sapiens
ugacuguucagguguaugguaguaaguaaaug

SEQ ID NO: 112443 - RNA, 32 nt, Homo Sapiens
aaggagauauuguaugaaucucacuagccgca

SEQ ID NO: 112444 - RNA, 32 nt, Homo Sapiens
ccauauucauguaaacaaaauuuaguuuuugu

SEQ ID NO: 112445 - RNA, 32 nt, Homo Sapiens
cuagccucuaaagauagagaucaaagacgcug

SEQ ID NO: 112446 - RNA, 32 nt, Homo Sapiens
guagauuucugaauguguuguauuuugcugag

SEQ ID NO: 112447 - RNA, 32 nt, Homo Sapiens
aaccaauaaaauggcauuuuaagaaauaaggu

SEQ ID NO: 112448 - RNA, 32 nt, Homo Sapiens
ugcaaauuagcucacaucuuuccuccugcugc

SEQ ID NO: 112449 - RNA, 32 nt, Homo Sapiens
uguccuuaagacaaaauaaggaaggaaaacgu

SEQ ID NO: 112450 - RNA, 32 nt, Homo Sapiens
uggaugagaagaagaaggagugguacagucac

SEQ ID NO: 112451 - RNA, 32 nt, Homo Sapiens
guauuuccaaaaaaguaauaccuuuuaauuag

SEQ ID NO: 112452 - RNA, 32 nt, Homo Sapiens
ccagcugguuccagcccuggccaagguucucc

SEQ ID NO: 112453 - RNA, 32 nt, Homo Sapiens
auuuucuccccaugguacacucuaguguaggc

SEQ ID NO: 112454 - RNA, 32 nt, Homo Sapiens
gaaaggcccgaacacauguauuuuggcugcaa

SEQ ID NO: 112455 - RNA, 32 nt, Homo Sapiens
augaagaggagucgcagugcccuguccguggc

SEQ ID NO: 112456 - RNA, 32 nt, Homo Sapiens
gcccuucucuaggaugccccagccccuacccu

SEQ ID NO: 112457 - RNA, 32 nt, Homo Sapiens
agugggcggugggugaggggccccucaacgag

SEQ ID NO: 112458 - RNA, 32 nt, Homo Sapiens
gagcaaugucauuaauccauauguggacuagu

SEQ ID NO: 112459 - RNA, 32 nt, Homo Sapiens
gacuuaaggaaguuaagaguaucuuauuaccg

SEQ ID NO: 112460 - RNA, 32 nt, Homo Sapiens
augaugaagcauuguuuuuaaucuuaagacua

SEQ ID NO: 112461 - RNA, 32 nt, Homo Sapiens
ucagugucaucucuacucuccucugccaugag

SEQ ID NO: 112462 - RNA, 32 nt, Homo Sapiens
uuugcagaaugaugaaguugcauuuagaaaau

SEQ ID NO: 112463 - RNA, 31 nt, Homo Sapiens
gggaaaaugaccacguucaaggaggcaauga

SEQ ID NO: 112464 - RNA, 32 nt, Homo Sapiens
cugccccgcaugcccugggccaugaucuggga

SEQ ID NO: 112465 - RNA, 32 nt, Homo Sapiens
augucaccuugaugggggcugugaguggggca

SEQ ID NO: 112466 - RNA, 32 nt, Homo Sapiens
cuggaggugcugucauggccugccucaacccg

SEQ ID NO: 112467 - RNA, 32 nt, Homo Sapiens
cggugguguaacuguguguuucccuccagccc

SEQ ID NO: 112468 - RNA, 32 nt, Homo Sapiens
uaaaccacauucaaaccuguuaauucgcuguu

SEQ ID NO: 112469 - RNA, 32 nt, Homo Sapiens
auguucuugacaaugcagagcaauucugagca

SEQ ID NO: 112470 - RNA, 32 nt, Homo Sapiens
gaauuagcagcaugcugagaauggacacagug

SEQ ID NO: 112471 - RNA, 32 nt, Homo Sapiens
uugcacagaaaacacauuaucuggagagaaag

SEQ ID NO: 112472 - RNA, 32 nt, Homo Sapiens
aauggaaacagaggaggaaaacaaagaaaccg

SEQ ID NO: 112473 - RNA, 32 nt, Homo Sapiens
uggcccgcgcggccgcaggggcggauaaaaag

SEQ ID NO: 112474 - RNA, 32 nt, Homo Sapiens
gagaacaaagacucugagaaaagcacagaugc

SEQ ID NO: 112475 - RNA, 32 nt, Homo Sapiens
accgcgucuccuucccucuccccaaagccugg

SEQ ID NO: 112476 - RNA, 32 nt, Homo Sapiens
gaauuaauacucaauuacuuaucugcuuaccu

SEQ ID NO: 112477 - RNA, 32 nt, Homo Sapiens
aaaaucucacuuuauuuuugcuaauaaguaga

SEQ ID NO: 112478 - RNA, 32 nt, Homo Sapiens
acccuguuaggagagcauagcaucaugaugua

SEQ ID NO: 112479 - RNA, 32 nt, Homo Sapiens
cauuagaaacuuauauuuaaaaacagaauuaa

SEQ ID NO: 112480 - RNA, 32 nt, Homo Sapiens
gaugaauuuccacuuccaaagucuuucauugg

SEQ ID NO: 112481 - RNA, 32 nt, Homo Sapiens
ucugggugggcaccacccugacccacagcguc

SEQ ID NO: 112482 - RNA, 32 nt, Homo Sapiens
cgggggaggcggagacgcggagcgggccuuuu

SEQ ID NO: 112483 - RNA, 32 nt, Homo Sapiens
cagagucaggugggacccgucguccuccccuc

SEQ ID NO: 112484 - RNA, 32 nt, Homo Sapiens
agaccagugucugucagccagguucccaaccc

SEQ ID NO: 112485 - RNA, 32 nt, Homo Sapiens
cugcuggcguucggaaaaaacgcaguccggug

SEQ ID NO: 112486 - RNA, 32 nt, Homo Sapiens
cccugcugacgccugugacuaggccuaaccuu

SEQ ID NO: 112487 - RNA, 32 nt, Homo Sapiens
gggucccagggagccuuggaaccuggcacccu

SEQ ID NO: 112488 - RNA, 32 nt, Homo Sapiens
agggucucuagggucugcaaaauagaggccaa

SEQ ID NO: 112489 - RNA, 32 nt, Homo Sapiens
uggcagugcgccugcgccgcgucggcgugcgg

SEQ ID NO: 112490 - RNA, 32 nt, Homo Sapiens
gacuuuuuaaaauggcagaugcauggacugua

SEQ ID NO: 112491 - RNA, 32 nt, Homo Sapiens
aaaauacaugucuauuugucaaacauaagugg

SEQ ID NO: 112492 - RNA, 32 nt, Homo Sapiens
guacgggagugcucaccuccagcuacuguguc

SEQ ID NO: 112493 - RNA, 32 nt, Homo Sapiens
ggacaaggauaaaggaauaugauuuuccagag

SEQ ID NO: 112494 - RNA, 32 nt, Homo Sapiens
ugaaagguugguuuuugaaacuugaaauuuca

SEQ ID NO: 112495 - RNA, 32 nt, Homo Sapiens
ugcuuuuacuaaaccaguacuucguuaugaaa

SEQ ID NO: 112496 - RNA, 32 nt, Homo Sapiens
gcuucccagucccgaacgccgcccguccccac

SEQ ID NO: 112497 - RNA, 32 nt, Homo Sapiens
gacuaaauuuacaaacaagauacauguguaau

SEQ ID NO: 112498 - RNA, 29 nt, Homo Sapiens
ugcucuguaacaaauuaccacaaauuuag

SEQ ID NO: 112499 - RNA, 32 nt, Homo Sapiens
gaucuuacugagggcucaggaacuuggcaugg

SEQ ID NO: 112500 - RNA, 32 nt, Homo Sapiens
uccaucccuggccuccuccccucacacacacu

SEQ ID NO: 112501 - RNA, 32 nt, Homo Sapiens
agaggguccacuucauuaaauggaaugaggug

SEQ ID NO: 112502 - RNA, 32 nt, Homo Sapiens
uauagacauuauauuggaucccagaacuuucc

SEQ ID NO: 112503 - RNA, 32 nt, Homo Sapiens
uguuuauggaaaucuuuagcuuuuaaucauuu

SEQ ID NO: 112504 - RNA, 32 nt, Homo Sapiens
ccauuuucccccugauaagaugagguaaagcc

SEQ ID NO: 112505 - RNA, 32 nt, Homo Sapiens
aaagaaaacuaaaacaguaagaaagccaaaac

SEQ ID NO: 112506 - RNA, 32 nt, Homo Sapiens
aggagacgaaaagccaguugguuuggaaagcg

SEQ ID NO: 112507 - RNA, 32 nt, Homo Sapiens
gugcauggucugugcugccuucugccuggguc

SEQ ID NO: 112508 - RNA, 32 nt, Homo Sapiens
uccaaggaaaguuuauacucuuuuuguaauac

SEQ ID NO: 112509 - RNA, 32 nt, Homo Sapiens
uuaugaauuacaugugguuuuauauacacaca

SEQ ID NO: 112510 - RNA, 32 nt, Homo Sapiens
cagcugcagcgggaccgcguggggugggcccc

SEQ ID NO: 112511 - RNA, 32 nt, Homo Sapiens
auuuuagaagcuaugaaaguccuuuuaugaaa

SEQ ID NO: 112512 - RNA, 32 nt, Homo Sapiens
ccauggacaagggccugggcuuccucacccac

SEQ ID NO: 112513 - RNA, 32 nt, Homo Sapiens
aggaacuaaaaccagaggcauuauuacugcau

SEQ ID NO: 112514 - RNA, 32 nt, Homo Sapiens
cacucuccccuacuccaccuccuuccaagucc

SEQ ID NO: 112515 - RNA, 32 nt, Homo Sapiens
ugcugcaauugucuggccaguguaguuuuccc

SEQ ID NO: 112516 - RNA, 32 nt, Homo Sapiens
gcgcgggucucccuccucccggaguuuggaac

SEQ ID NO: 112517 - RNA, 32 nt, Homo Sapiens
gggaaauagaagaucaagcauuacuguccuuu

SEQ ID NO: 112518 - RNA, 32 nt, Homo Sapiens
cugugaaaaugaauauggaggacaggucuaca

SEQ ID NO: 112519 - RNA, 32 nt, Homo Sapiens
cuggaaaacgagcuaauuccgugccgauggag

SEQ ID NO: 112520 - RNA, 32 nt, Homo Sapiens
ccaccagugcuucuggcagagcccagggcagu

SEQ ID NO: 112521 - RNA, 31 nt, Homo Sapiens
gagcucuugugcuugaguucaguguuagugg

SEQ ID NO: 112522 - RNA, 32 nt, Homo Sapiens
gaccucgcgcagcguccgcgggcuccggggcg

SEQ ID NO: 112523 - RNA, 32 nt, Homo Sapiens
gcgggcaggcucaggggaggggcgcgcauggu

SEQ ID NO: 112524 - RNA, 32 nt, Homo Sapiens
uaguuuagguaaacuuuuuauuaugaccauua

SEQ ID NO: 112525 - RNA, 30 nt, Homo Sapiens
gcugggcaugguggcaugcagugguagucc

SEQ ID NO: 112526 - RNA, 32 nt, Homo Sapiens
ucccaugugcuaaaggagagaacccugaugau

SEQ ID NO: 112527 - RNA, 32 nt, Homo Sapiens
guaacuccaggacgagaccggagcgacccgcg

SEQ ID NO: 112528 - RNA, 32 nt, Homo Sapiens
acaagaggggccgguggaagccgcgcagccuc

SEQ ID NO: 112529 - RNA, 32 nt, Homo Sapiens
ccuuggagagauaucugauauuaaacaucauc

SEQ ID NO: 112530 - RNA, 32 nt, Homo Sapiens
aaaaucaaagaaccagugaaaacuacauuugc

SEQ ID NO: 112531 - RNA, 32 nt, Homo Sapiens
gcccaguccgagcgcggacccggcgcccgcag

SEQ ID NO: 112532 - RNA, 29 nt, Homo Sapiens
uguaaaauauguaugaagaaaagguguac

SEQ ID NO: 112533 - RNA, 32 nt, Homo Sapiens
agcccaaauugucauugggcagaagcaaucau

SEQ ID NO: 112534 - RNA, 32 nt, Homo Sapiens
cauggccuggaaagagacuucucccauagcaa

SEQ ID NO: 112535 - RNA, 32 nt, Homo Sapiens
ucuuccacauauauuuuguguuaauguuuagg

SEQ ID NO: 112536 - RNA, 32 nt, Homo Sapiens
aguccaugaugaugucguggcagagucugauu

SEQ ID NO: 112537 - RNA, 32 nt, Homo Sapiens
gucauagaguauacuuacauaaaccuaggugg

SEQ ID NO: 112538 - RNA, 32 nt, Homo Sapiens
aggcugcaccucacgcaugcugaaguuacugg

SEQ ID NO: 112539 - RNA, 32 nt, Homo Sapiens
aguugcauuccaagggccuguuuacauggcag

SEQ ID NO: 112540 - RNA, 32 nt, Homo Sapiens
cuuccggcuccggcacggggccccgaggcguu

SEQ ID NO: 112541 - RNA, 32 nt, Homo Sapiens
ccagccggggagugggggcugggcgggucucu

SEQ ID NO: 112542 - RNA, 32 nt, Homo Sapiens
cuucugcacgucugcuggggucucuuccucuc

SEQ ID NO: 112543 - RNA, 32 nt, Homo Sapiens
ugagauugcaccuucuucuccugcuacuccuc

SEQ ID NO: 112544 - RNA, 32 nt, Homo Sapiens
caguacuucguuaugaaaaugccuuccacgca

SEQ ID NO: 112545 - RNA, 32 nt, Homo Sapiens
uuuaagaugucaugcauacauuucaacaacaa

SEQ ID NO: 112546 - RNA, 32 nt, Homo Sapiens
uggagugccagccccaggaagcuccagggcug

SEQ ID NO: 112547 - RNA, 32 nt, Homo Sapiens
uugcagcucuuuccaauaucuagagacauuuu

SEQ ID NO: 112548 - RNA, 32 nt, Homo Sapiens
aaauguuuaaaagagugccuggcauuauuauu

SEQ ID NO: 112549 - RNA, 32 nt, Homo Sapiens
gggccuccugacgcugccccuggggccacagg

SEQ ID NO: 112550 - RNA, 32 nt, Homo Sapiens
ggagaugaaggcccuccucccaggagguaggg

SEQ ID NO: 112551 - RNA, 32 nt, Homo Sapiens
cacaagacaaggauucccucucucaccacucc

SEQ ID NO: 112552 - RNA, 32 nt, Homo Sapiens
guccacgccgcgcaccgcuccgagggccagcg

SEQ ID NO: 112553 - RNA, 32 nt, Homo Sapiens
uguuuguauaaauuauugaaauccauuugcac

SEQ ID NO: 112554 - RNA, 32 nt, Homo Sapiens
gugcuaauauuuugccuucuuucuuucuuuuc

SEQ ID NO: 112555 - RNA, 32 nt, Homo Sapiens
ucucccuugccagccagcacucugccuucugu

SEQ ID NO: 112556 - RNA, 32 nt, Homo Sapiens
gcgggagggcucggcuucucgacugcccgccu

SEQ ID NO: 112557 - RNA, 32 nt, Homo Sapiens
uugguggcgggggguuucggcgugccaacagc

SEQ ID NO: 112558 - RNA, 32 nt, Homo Sapiens
cugcaaaugcuguuuagggucaucgccucuuc

SEQ ID NO: 112559 - RNA, 32 nt, Homo Sapiens
uauucccugcccaaaaaauuccuggaaaauug

SEQ ID NO: 112560 - RNA, 32 nt, Homo Sapiens
gcccacaagguccgccccucugucucugcacc

SEQ ID NO: 112561 - RNA, 32 nt, Homo Sapiens
agaaagccgggagucaucggacaccuugcugg

SEQ ID NO: 112562 - RNA, 32 nt, Homo Sapiens
cucccaauauuuuuaucugucuugggauuauc

SEQ ID NO: 112563 - RNA, 32 nt, Homo Sapiens
uacguuugugcagaaucucuauguauauucua

SEQ ID NO: 112564 - RNA, 32 nt, Homo Sapiens
gggauggccccgguggcccuccccucaauucc

SEQ ID NO: 112565 - RNA, 32 nt, Homo Sapiens
uuaaggcacuguggcagcugugagauaaaguc

SEQ ID NO: 112566 - RNA, 32 nt, Homo Sapiens
cugaggucggcaguuugagaccagccugacca

SEQ ID NO: 112567 - RNA, 32 nt, Homo Sapiens
aggagaagaugcugaggaugcggaccgcggga

SEQ ID NO: 112568 - RNA, 32 nt, Homo Sapiens
ccugcccgcccggggcccugaccguggcuucu

SEQ ID NO: 112569 - RNA, 32 nt, Homo Sapiens
cugcugcccucccgcccugcuccaccccgcca

SEQ ID NO: 112570 - RNA, 32 nt, Homo Sapiens
gaaaaugugaacagugcugaaagguuuuguga

SEQ ID NO: 112571 - RNA, 32 nt, Homo Sapiens
uggaggagauaaaccaauuuuaugucuaucau

SEQ ID NO: 112572 - RNA, 32 nt, Homo Sapiens
agaucacaucuuugucacuggaugcuacuuga

SEQ ID NO: 112573 - RNA, 32 nt, Homo Sapiens
cguccccgcccggcugucaagcuguguucuag

SEQ ID NO: 112574 - RNA, 32 nt, Homo Sapiens
ugccucuugggucuuccucccaggccuugucu

SEQ ID NO: 112575 - RNA, 32 nt, Homo Sapiens
uuucugauuaugcuaauuucaaaugagauucc

SEQ ID NO: 112576 - RNA, 32 nt, Homo Sapiens
uaagguuuucuuuuucuauuguacaagucaau

SEQ ID NO: 112577 - RNA, 32 nt, Homo Sapiens
ccgggccagacguucccacaguaaaucucccc

SEQ ID NO: 112578 - RNA, 32 nt, Homo Sapiens
ugagcgugaacauuuacgaguuuguggcuggu

SEQ ID NO: 112579 - RNA, 32 nt, Homo Sapiens
guuaagagcaaaucuaggagaagugcuucagc

SEQ ID NO: 112580 - RNA, 32 nt, Homo Sapiens
cggguuccgccuuugcagugcccuccacccuu

SEQ ID NO: 112581 - RNA, 32 nt, Homo Sapiens
ugucuucccucccccgaccccagccugucagu

SEQ ID NO: 112582 - RNA, 32 nt, Homo Sapiens
uucucccacaguggucuguaucucaacauuuu

SEQ ID NO: 112583 - RNA, 32 nt, Homo Sapiens
gauggacuccccgcccgcccaggccgucccca

SEQ ID NO: 112584 - RNA, 32 nt, Homo Sapiens
ccaugaagauaaaagaaacauaugucugcgug

SEQ ID NO: 112585 - RNA, 32 nt, Homo Sapiens
acugagaggccucgaggccugcaccgcaaggc

SEQ ID NO: 112586 - RNA, 32 nt, Homo Sapiens
guccccugccccccaagccagccagacccaga

SEQ ID NO: 112587 - RNA, 32 nt, Homo Sapiens
cccuccccaggacuucugugacuccugggcca

SEQ ID NO: 112588 - RNA, 32 nt, Homo Sapiens
ggacaugccuccuggggaggggcucgaggagc

SEQ ID NO: 112589 - RNA, 32 nt, Homo Sapiens
ugcuggagguguuccugaagagauugaaccua

SEQ ID NO: 112590 - RNA, 32 nt, Homo Sapiens
agagcccuuaguugagagccccugccgccccu

SEQ ID NO: 112591 - RNA, 32 nt, Homo Sapiens
ggcggccgcgggcuccgguucccggccagcuc

SEQ ID NO: 112592 - RNA, 32 nt, Homo Sapiens
aaccuggcggccucggguguccgcagcaggcu

SEQ ID NO: 112593 - RNA, 32 nt, Homo Sapiens
caccuggaggacaugcaccaaggcuugccaga

SEQ ID NO: 112594 - RNA, 31 nt, Homo Sapiens
agaggacggcccugccugccucuuggccuca

SEQ ID NO: 112595 - RNA, 32 nt, Homo Sapiens
cuuaucauuucccucuccuaugcaccaguaag

SEQ ID NO: 112596 - RNA, 32 nt, Homo Sapiens
auccauccugcaccccagucccccagcccuaa

SEQ ID NO: 112597 - RNA, 32 nt, Homo Sapiens
auccacacauaaagaccagccugauuauuugu

SEQ ID NO: 112598 - RNA, 32 nt, Homo Sapiens
ugugucggggggcgagggaggggagguggccg

SEQ ID NO: 112599 - RNA, 32 nt, Homo Sapiens
gccuuccucccccguggaccccgguggaugac

SEQ ID NO: 112600 - RNA, 32 nt, Homo Sapiens
aucuuagauuuaucuuaguaaauguaauaaau

SEQ ID NO: 112601 - RNA, 32 nt, Homo Sapiens
agcugggcucugcguccucguccagccgccaa

SEQ ID NO: 112602 - RNA, 32 nt, Homo Sapiens
caaauaggcuuuucccucuccccucacccaau

SEQ ID NO: 112603 - RNA, 32 nt, Homo Sapiens
aggcauuguucccuacccucuggcgagugcau

SEQ ID NO: 112604 - RNA, 32 nt, Homo Sapiens
gugacuggagccgcggcgacggcggcagcagc

SEQ ID NO: 112605 - RNA, 32 nt, Homo Sapiens
caagugguggagcugggaucuuuuagggcccu

SEQ ID NO: 112606 - RNA, 32 nt, Homo Sapiens
uuugaggagaaagaacagauuuauuuauagac

SEQ ID NO: 112607 - RNA, 32 nt, Homo Sapiens
ucacuaccaaaaugacaucauuuuccaccucu

SEQ ID NO: 112608 - RNA, 32 nt, Homo Sapiens
ccauauuguuuugugaugucaccucuggaaug

SEQ ID NO: 112609 - RNA, 32 nt, Homo Sapiens
gcgcccgcgcagccaccgagccucugcccagc

SEQ ID NO: 112610 - RNA, 32 nt, Homo Sapiens
ucgcuauagauuccuuguuucucacuucguag

SEQ ID NO: 112611 - RNA, 32 nt, Homo Sapiens
ugacauggcuccaugagauucuguggaaugcc

SEQ ID NO: 112612 - RNA, 32 nt, Homo Sapiens
uaucuuuccaguucauacuuguuuuuaaucau

SEQ ID NO: 112613 - RNA, 32 nt, Homo Sapiens
ggaggcuggggacaggcaguuuuuggucuuuu

SEQ ID NO: 112614 - RNA, 31 nt, Homo Sapiens
ccugauucaaggacuuugcuagcuagguuuu

SEQ ID NO: 112615 - RNA, 32 nt, Homo Sapiens
cgcuccauccccagccccggccccgcauccag

SEQ ID NO: 112616 - RNA, 32 nt, Homo Sapiens
gauagauagaaaaacggaaggguucagcugcu

SEQ ID NO: 112617 - RNA, 32 nt, Homo Sapiens
gcagcucuugucccgcgcgugguuuuugugaa

SEQ ID NO: 112618 - RNA, 32 nt, Homo Sapiens
ucacuucgccgccgaauccccggcgccgccca

SEQ ID NO: 112619 - RNA, 32 nt, Homo Sapiens
gccuuuaggaauauuuucccacuacaucacug

SEQ ID NO: 112620 - RNA, 32 nt, Homo Sapiens
gauaucuagaaaaagcaguugaggauugguuu

SEQ ID NO: 112621 - RNA, 32 nt, Homo Sapiens
cugucuguccacacgggcaucauucguuagug

SEQ ID NO: 112622 - RNA, 32 nt, Homo Sapiens
cuuguagaagggaguugcuacccuuaguagug

SEQ ID NO: 112623 - RNA, 32 nt, Homo Sapiens
ucgggcuuguaacugucugagccccggauccg

SEQ ID NO: 112624 - RNA, 32 nt, Homo Sapiens
cuggcggacagagggcuggaaacaagacgcuc

SEQ ID NO: 112625 - RNA, 32 nt, Homo Sapiens
aggauagcacauuugacaguuuuugcauuuuu

SEQ ID NO: 112626 - RNA, 32 nt, Homo Sapiens
guguuugguggaagaacagcccacauuaagag

SEQ ID NO: 112627 - RNA, 32 nt, Homo Sapiens
gagccugcaggaagcugaacuuugaaagauua

SEQ ID NO: 112628 - RNA, 30 nt, Homo Sapiens
gcccaggccguucuuacggccccuuacucu

SEQ ID NO: 112629 - RNA, 32 nt, Homo Sapiens
gggcuggagagggccuggccucuccgagggau

SEQ ID NO: 112630 - RNA, 32 nt, Homo Sapiens
gcagccaguuauuagaauaaaaacagaauacu

SEQ ID NO: 112631 - RNA, 32 nt, Homo Sapiens
guuuugugccuguuuaaaggcuuuuguuuagc

SEQ ID NO: 112632 - RNA, 32 nt, Homo Sapiens
cgccgugggaagauggcggacggaaagggaga

SEQ ID NO: 112633 - RNA, 32 nt, Homo Sapiens
uucuuaaaggauuaugcuuuaaugcuguuauc

SEQ ID NO: 112634 - RNA, 32 nt, Homo Sapiens
ugcauaaaaugaauuagauggcuuugagugga

SEQ ID NO: 112635 - RNA, 32 nt, Homo Sapiens
ccucccaagaaauuauuuaacaaacugaaagg

SEQ ID NO: 112636 - RNA, 32 nt, Homo Sapiens
cagcgcgagcgggcgagcggcgcgggcggccg

SEQ ID NO: 112637 - RNA, 32 nt, Homo Sapiens
ucagugcagaaucaauucucauuuucaucgua

SEQ ID NO: 112638 - RNA, 32 nt, Homo Sapiens
uagauccugaagauguguuuguugaaugaaug

SEQ ID NO: 112639 - RNA, 32 nt, Homo Sapiens
caggcugucccccuccucccagggccuccugg

SEQ ID NO: 112640 - RNA, 32 nt, Homo Sapiens
uguuuguucauacacuuagugaaagcagaucc

SEQ ID NO: 112641 - RNA, 32 nt, Homo Sapiens
ccucgccgggucuggaggggacagcagagaca

SEQ ID NO: 112642 - RNA, 32 nt, Homo Sapiens
gacacgaggcacagaaaacaaauaucaaagau

SEQ ID NO: 112643 - RNA, 32 nt, Homo Sapiens
uccgccagccccagcugcuccuccucaagccc

SEQ ID NO: 112644 - RNA, 32 nt, Homo Sapiens
guccucaggcccacccaagcgccgggcugcag

SEQ ID NO: 112645 - RNA, 32 nt, Homo Sapiens
ugcccucuggggagcccggccgaggcgccuuu

SEQ ID NO: 112646 - RNA, 32 nt, Homo Sapiens
ggggaagggaaugugaccaggucuaggucugg

SEQ ID NO: 112647 - RNA, 32 nt, Homo Sapiens
ggauguugcuuuugcaccuuacgggggcaucu

SEQ ID NO: 112648 - RNA, 32 nt, Homo Sapiens
cuccuuucauuucccacuacgcacaaagaguu

SEQ ID NO: 112649 - RNA, 32 nt, Homo Sapiens
uaaucuuaaaacauaagaugcuuuuauuagau

SEQ ID NO: 112650 - RNA, 31 nt, Homo Sapiens
cagaauaauaacaguacuguauaucauuuga

SEQ ID NO: 112651 - RNA, 32 nt, Homo Sapiens
aaaguauaaaacaaaaucuagccccuucuuca

SEQ ID NO: 112652 - RNA, 32 nt, Homo Sapiens
acccacaggcugucacacugaugccaguggcc

SEQ ID NO: 112653 - RNA, 32 nt, Homo Sapiens
ugcacuggcccugcggcgggccccagagccca

SEQ ID NO: 112654 - RNA, 32 nt, Homo Sapiens
auauacaauuuaaguuucucuuuuuggcaacu

SEQ ID NO: 112655 - RNA, 32 nt, Homo Sapiens
ggcggccaugcuguggccagccaggcaggaag

SEQ ID NO: 112656 - RNA, 30 nt, Homo Sapiens
aucaccaggcuaauggggggcgucagcagc

SEQ ID NO: 112657 - RNA, 32 nt, Homo Sapiens
gcgcggcagggcccggaguaucccgcuuucuu

SEQ ID NO: 112658 - RNA, 32 nt, Homo Sapiens
cacuggaauauggcaacuuauguuucaggguu

SEQ ID NO: 112659 - RNA, 32 nt, Homo Sapiens
uagucacuccaaagaagaaaauccacauggua

SEQ ID NO: 112660 - RNA, 29 nt, Homo Sapiens
uacugaauguguuucauaugcgugaccgu

SEQ ID NO: 112661 - RNA, 32 nt, Homo Sapiens
caggggcaaugggauguaguuuuuacccaggu

SEQ ID NO: 112662 - RNA, 32 nt, Homo Sapiens
uccuggucaccauggcgaccuggaagucccac

SEQ ID NO: 112663 - RNA, 32 nt, Homo Sapiens
aaauuucaagacagcaguaucgcagggcccug

SEQ ID NO: 112664 - RNA, 32 nt, Homo Sapiens
gccuuacccagcugugcuacugucauuugcaa

SEQ ID NO: 112665 - RNA, 32 nt, Homo Sapiens
gcaaguuccuuccccacucugggccucaguuu

SEQ ID NO: 112666 - RNA, 32 nt, Homo Sapiens
auccuaggaaacaaacugaacguaggaaaccu

SEQ ID NO: 112667 - RNA, 32 nt, Homo Sapiens
gaggcguggggagcagagcggcgcugagggga

SEQ ID NO: 112668 - RNA, 32 nt, Homo Sapiens
gccacugucaaucccggcacuuugggaggccu

SEQ ID NO: 112669 - RNA, 32 nt, Homo Sapiens
ccuccugugugagcggaccacccugacacgcc

SEQ ID NO: 112670 - RNA, 32 nt, Homo Sapiens
cagcaaaagccggguuucauuaucauaaugca

SEQ ID NO: 112671 - RNA, 32 nt, Homo Sapiens
cugcgcgagaucgagaucccgcugggggagcu

SEQ ID NO: 112672 - RNA, 32 nt, Homo Sapiens
caguggcucuuuuuccuucucaaacacuuuac

SEQ ID NO: 112673 - RNA, 32 nt, Homo Sapiens
gggcggggcgacccgauguggcggggaggagu

SEQ ID NO: 112674 - RNA, 32 nt, Homo Sapiens
ccuccugaguagcugggauuucaggccaugaa

SEQ ID NO: 112675 - RNA, 32 nt, Homo Sapiens
uagacuuuccaucgccuuuuccuuccaucagu

SEQ ID NO: 112676 - RNA, 32 nt, Homo Sapiens
uuuacuggcuguacuauguuaacuggugacug

SEQ ID NO: 112677 - RNA, 32 nt, Homo Sapiens
gaacuaaucagacguggaccucaacuucugau

SEQ ID NO: 112678 - RNA, 32 nt, Homo Sapiens
cucugaauauuuuagucucucucugagucuca

SEQ ID NO: 112679 - RNA, 32 nt, Homo Sapiens
auuauuugggauuuaaauuuucaccuguuaag

SEQ ID NO: 112680 - RNA, 32 nt, Homo Sapiens
gggaagcuuagguuuauguugaggauucuguu

SEQ ID NO: 112681 - RNA, 29 nt, Homo Sapiens
aaugacauauguaugaaaaaccauacacu

SEQ ID NO: 112682 - RNA, 31 nt, Homo Sapiens
gggcccauggcggcgccggcguuggcauuag

SEQ ID NO: 112683 - RNA, 32 nt, Homo Sapiens
aucacccagggccuugugggccccacauaggg

SEQ ID NO: 112684 - RNA, 32 nt, Homo Sapiens
ccagggcagacacacccccacccagccccuau

SEQ ID NO: 112685 - RNA, 32 nt, Homo Sapiens
agcuguuuucuuuugaaaguucaaacucauca

SEQ ID NO: 112686 - RNA, 32 nt, Homo Sapiens
caguaggcggggcuuggugccgggggcggggu

SEQ ID NO: 112687 - RNA, 32 nt, Homo Sapiens
uuggccccugucuucgacccagcccagccccc

SEQ ID NO: 112688 - RNA, 32 nt, Homo Sapiens
uguacuaaauaaaauguacaucugaagaugau

SEQ ID NO: 112689 - RNA, 32 nt, Homo Sapiens
ggacacaaaaauuacuucagugagaccaaauc

SEQ ID NO: 112690 - RNA, 32 nt, Homo Sapiens
cuuaggcagagcugggauauaaacacccaggu

SEQ ID NO: 112691 - RNA, 32 nt, Homo Sapiens
agccuuuguucugcacuuaauaaaugguuuug

SEQ ID NO: 112692 - RNA, 32 nt, Homo Sapiens
auaggaauugguuggcagugccagcuggcucu

SEQ ID NO: 112693 - RNA, 32 nt, Homo Sapiens
uugcugcuuuugcucagaggacauccaugacc

SEQ ID NO: 112694 - RNA, 32 nt, Homo Sapiens
gugagauaguuuuuauuuuaacuggcauguca

SEQ ID NO: 112695 - RNA, 32 nt, Homo Sapiens
uuucuucugcaugaaacaucugcaucaaggcu

SEQ ID NO: 112696 - RNA, 32 nt, Homo Sapiens
uuucagaaugucgucuuccuccacauugugag

SEQ ID NO: 112697 - RNA, 32 nt, Homo Sapiens
agugcuccgagcucagacagaggaagcccugc

SEQ ID NO: 112698 - RNA, 32 nt, Homo Sapiens
cugccagacggcgcugagccugcacggccgcu

SEQ ID NO: 112699 - RNA, 32 nt, Homo Sapiens
caggcaggccuggccauagggcaagagcaggc

SEQ ID NO: 112700 - RNA, 32 nt, Homo Sapiens
cugagugacagccuggcccgcggccgccuaca

SEQ ID NO: 112701 - RNA, 32 nt, Homo Sapiens
ucccuggauuaccacacgugcccucccugcca

SEQ ID NO: 112702 - RNA, 32 nt, Homo Sapiens
uaauaguuaagagcuuuuauugugacaggaga

SEQ ID NO: 112703 - RNA, 32 nt, Homo Sapiens
cuaauuauaaggcauuaaguaagcaaauagug

SEQ ID NO: 112704 - RNA, 32 nt, Homo Sapiens
cugcugcagacagaagcagaggaaagccaaga

SEQ ID NO: 112705 - RNA, 32 nt, Homo Sapiens
gcaggggcggcccgcgggagggagcggaaguc

SEQ ID NO: 112706 - RNA, 32 nt, Homo Sapiens
cuucauucugccaaccuuuuccaacuccauga

SEQ ID NO: 112707 - RNA, 32 nt, Homo Sapiens
gccugcugaggguggagacccacgagccgagg

SEQ ID NO: 112708 - RNA, 32 nt, Homo Sapiens
cgagcgcagccgagcgcacgccgagcccgucc

SEQ ID NO: 112709 - RNA, 32 nt, Homo Sapiens
ucuugggaggcagcuccccacccccugccacc

SEQ ID NO: 112710 - RNA, 32 nt, Homo Sapiens
cggcgucggccuuccacugugggguuaaaucu

SEQ ID NO: 112711 - RNA, 32 nt, Homo Sapiens
acucacaucauucuaugggguugaagacaacu

SEQ ID NO: 112712 - RNA, 32 nt, Homo Sapiens
cugcagcauacuugacaacacagggaauaccg

SEQ ID NO: 112713 - RNA, 28 nt, Homo Sapiens
agccgaagaagaaaacauuugaauuuac

SEQ ID NO: 112714 - RNA, 32 nt, Homo Sapiens
cuugauggugauugcauuguauuccuuuaauc

SEQ ID NO: 112715 - RNA, 32 nt, Homo Sapiens
auagggagccgcacggggagcgggaaagcggu

SEQ ID NO: 112716 - RNA, 32 nt, Homo Sapiens
cugccugugggucuucauugcccagcuccugc

SEQ ID NO: 112717 - RNA, 32 nt, Homo Sapiens
uuacugaaaggggucugccacacauaacuucc

SEQ ID NO: 112718 - RNA, 32 nt, Homo Sapiens
ggagauuucuauaguuauuguuuucugucauu

SEQ ID NO: 112719 - RNA, 32 nt, Homo Sapiens
guaagucuaaaauuauuucaaauuaaaaauaa

SEQ ID NO: 112720 - RNA, 32 nt, Homo Sapiens
ggucacauaauauuaaauuuuacaauuugagc

SEQ ID NO: 112721 - RNA, 32 nt, Homo Sapiens
auuaaaagugacauuugucuaauagccuaaua

SEQ ID NO: 112722 - RNA, 32 nt, Homo Sapiens
caccugacgcugcaugagacauugacaccaga

SEQ ID NO: 112723 - RNA, 32 nt, Homo Sapiens
cugaggagcagcccugccugcugcucuucccc

SEQ ID NO: 112724 - RNA, 32 nt, Homo Sapiens
ucccgagucugcgcucuuucggguccgcugcu

SEQ ID NO: 112725 - RNA, 31 nt, Homo Sapiens
agcuuguauugagccuuuuaaaguauugaau

SEQ ID NO: 112726 - RNA, 32 nt, Homo Sapiens
uacaaaaguugauguuauuucucgugguaaau

SEQ ID NO: 112727 - RNA, 32 nt, Homo Sapiens
cauuauucguagauauuggacaaagaaccuuc

SEQ ID NO: 112728 - RNA, 32 nt, Homo Sapiens
cugaccuggugaucugcccacccaggccuccc

SEQ ID NO: 112729 - RNA, 32 nt, Homo Sapiens
aagauucuuuuaucagacaacuucuuccuucu

SEQ ID NO: 112730 - RNA, 32 nt, Homo Sapiens
uguuuuguuuuuccucuuuuaagggauaguag

SEQ ID NO: 112731 - RNA, 32 nt, Homo Sapiens
uuggaaugagauuaaaauacauuuugaaaguu

SEQ ID NO: 112732 - RNA, 32 nt, Homo Sapiens
gcccuguuucuuccucccgagcugcaaucuuu

SEQ ID NO: 112733 - RNA, 32 nt, Homo Sapiens
uuuagagcugugauauugugauuuauaauaaa

SEQ ID NO: 112734 - RNA, 32 nt, Homo Sapiens
ggcacgagcuuaaguuccccuguucaaggcau

SEQ ID NO: 112735 - RNA, 32 nt, Homo Sapiens
gauuucauuucccuggcuugccaguggcacug

SEQ ID NO: 112736 - RNA, 32 nt, Homo Sapiens
cuauacaguuaagugacuaucacucacccggu

SEQ ID NO: 112737 - RNA, 32 nt, Homo Sapiens
agcauauauuuuacugucaguugucucaacuc

SEQ ID NO: 112738 - RNA, 32 nt, Homo Sapiens
ggagacccucauccaucuuuggcaugcacgua

SEQ ID NO: 112739 - RNA, 32 nt, Homo Sapiens
ccaauccaguccucuuuaaauuucauagaaua

SEQ ID NO: 112740 - RNA, 30 nt, Homo Sapiens
gcuugauuggcugagggggaaagaguuccc

SEQ ID NO: 112741 - RNA, 32 nt, Homo Sapiens
caggccugcucauuuucaguccuaaucguaga

SEQ ID NO: 112742 - RNA, 32 nt, Homo Sapiens
agccugggugugauggcaagacaguagaugag

SEQ ID NO: 112743 - RNA, 32 nt, Homo Sapiens
ggucucacacccuggaggaauguuaaguaaga

SEQ ID NO: 112744 - RNA, 32 nt, Homo Sapiens
gagacgcggcaccauggcuagcaagaaagucu

SEQ ID NO: 112745 - RNA, 32 nt, Homo Sapiens
ccgcccccgggcggcgcugugauuggccggcc

SEQ ID NO: 112746 - RNA, 32 nt, Homo Sapiens
uaugcccccugucccucacccccgucuggauc

SEQ ID NO: 112747 - RNA, 32 nt, Homo Sapiens
acuccugaagauaaauauguguuggacaagca

SEQ ID NO: 112748 - RNA, 32 nt, Homo Sapiens
aagggcuggggccagcuucuuccuccuaacca

SEQ ID NO: 112749 - RNA, 32 nt, Homo Sapiens
uuguggcccccggcugcagccucaguggcaug

SEQ ID NO: 112750 - RNA, 32 nt, Homo Sapiens
gagaaagaaaucaacuuuucccagugguggag

SEQ ID NO: 112751 - RNA, 32 nt, Homo Sapiens
uaucuuugacauuauuaaaauaauuauuccuu

SEQ ID NO: 112752 - RNA, 32 nt, Homo Sapiens
uaugucccagaaauugaguuuacuguugcuug

SEQ ID NO: 112753 - RNA, 32 nt, Homo Sapiens
uucaaugccaggccuggcaagugggugaaaga

SEQ ID NO: 112754 - RNA, 32 nt, Homo Sapiens
accgccaggagccgcuggugcaguggcauagc

SEQ ID NO: 112755 - RNA, 32 nt, Homo Sapiens
ggaguuugcuaagggcaguauuuuucugucaa

SEQ ID NO: 112756 - RNA, 32 nt, Homo Sapiens
caaacaauuggaaggaaguugcuugaauguug

SEQ ID NO: 112757 - RNA, 32 nt, Homo Sapiens
ugcacccccgacccauuccccgcggcccccuc

SEQ ID NO: 112758 - RNA, 32 nt, Homo Sapiens
gcugugaugaugauugcauuucaacacaugcc

SEQ ID NO: 112759 - RNA, 32 nt, Homo Sapiens
caugaaaaaagagcagaagagagaccucacug

SEQ ID NO: 112760 - RNA, 32 nt, Homo Sapiens
gggcuauucuccuggguuccuuccgggguuua

SEQ ID NO: 112761 - RNA, 32 nt, Homo Sapiens
uuuuaaccaaaauggcauuuguuuggcuguca

SEQ ID NO: 112762 - RNA, 32 nt, Homo Sapiens
cacagggccaaggugugcuugcgccacccgcg

SEQ ID NO: 112763 - RNA, 32 nt, Homo Sapiens
guaauguaauguaaaggguggaaaggccucaa

SEQ ID NO: 112764 - RNA, 26 nt, Homo Sapiens
ucuaggcacuguauuuaacuaacuuu

SEQ ID NO: 112765 - RNA, 32 nt, Homo Sapiens
uccucugggaugccagcucuccccuuugugcu

SEQ ID NO: 112766 - RNA, 32 nt, Homo Sapiens
gcccugcauuccugcccuuuccacucauucug

SEQ ID NO: 112767 - RNA, 32 nt, Homo Sapiens
accaccauuuccccugugguuuguuaucagua

SEQ ID NO: 112768 - RNA, 32 nt, Homo Sapiens
cagccccugugaagaggaagaggcggcggcgg

SEQ ID NO: 112769 - RNA, 30 nt, Homo Sapiens
uuauugccacuugcucagucgucaauguaa

SEQ ID NO: 112770 - RNA, 32 nt, Homo Sapiens
gcgggucuggcuggcggcagcggcgggaggga

SEQ ID NO: 112771 - RNA, 32 nt, Homo Sapiens
agagcugugaauggauuaauggaacagaaagg

SEQ ID NO: 112772 - RNA, 32 nt, Homo Sapiens
cucucccguccuccuguuuuaggggcauauga

SEQ ID NO: 112773 - RNA, 32 nt, Homo Sapiens
acaagacauuacaugacuugauaauauugcau

SEQ ID NO: 112774 - RNA, 32 nt, Homo Sapiens
accccaccuuugagaugcccgccccgccuccg

SEQ ID NO: 112775 - RNA, 32 nt, Homo Sapiens
ccaguccugaguauuucuuuauagcaaugcga

SEQ ID NO: 112776 - RNA, 32 nt, Homo Sapiens
guucugaaggcaccuccucaccucagaaacug

SEQ ID NO: 112777 - RNA, 32 nt, Homo Sapiens
aauagaggaagaaaugucagaugcgugcccag

SEQ ID NO: 112778 - RNA, 32 nt, Homo Sapiens
ucucccugccccagcuuuccccgaccaaucac

SEQ ID NO: 112779 - RNA, 32 nt, Homo Sapiens
uuucucccucaucggcccggcgcugauuccuc

SEQ ID NO: 112780 - RNA, 32 nt, Homo Sapiens
auaugaaaagagaaaaauauuuuaauuuaaaa

SEQ ID NO: 112781 - RNA, 30 nt, Homo Sapiens
ggcugggaucaccaccaucgaggcagugaa

SEQ ID NO: 112782 - RNA, 32 nt, Homo Sapiens
uguaaaccaagauugcacuacugcacuccagc

SEQ ID NO: 112783 - RNA, 32 nt, Homo Sapiens
uuaaaaugagugccucuugggaagcuucuuuu

SEQ ID NO: 112784 - RNA, 32 nt, Homo Sapiens
gaaaacucacgaagcagaggcugggcguggug

SEQ ID NO: 112785 - RNA, 32 nt, Homo Sapiens
aagugaaaaaaguagaaauguaguaauagcua

SEQ ID NO: 112786 - RNA, 32 nt, Homo Sapiens
ccuuaagguguugagcuuuaacucuaugcuga

SEQ ID NO: 112787 - RNA, 30 nt, Homo Sapiens
gcgacuagggcucgggcgccggcgagaugc

SEQ ID NO: 112788 - RNA, 32 nt, Homo Sapiens
agaaaaccaaccccacccugccagcugggggc

SEQ ID NO: 112789 - RNA, 32 nt, Homo Sapiens
gugucauauaggaaacacaaaaguuuauugcu

SEQ ID NO: 112790 - RNA, 32 nt, Homo Sapiens
gcagcguccagguuaaaagccgcugaccaaag

SEQ ID NO: 112791 - RNA, 32 nt, Homo Sapiens
ucuuuaaaaaauuuuauucuuagcacacuguu

SEQ ID NO: 112792 - RNA, 32 nt, Homo Sapiens
gaaauaaaggcauaaacugaaauaucauuuaa

SEQ ID NO: 112793 - RNA, 32 nt, Homo Sapiens
ugaguggaacuugaguacaguugaauuauuaa

SEQ ID NO: 112794 - RNA, 32 nt, Homo Sapiens
uccuucuacuacccgcggcgccgcccgggugg

SEQ ID NO: 112795 - RNA, 32 nt, Homo Sapiens
aauaagcacaaaauguuggcagcaaaugguca

SEQ ID NO: 112796 - RNA, 32 nt, Homo Sapiens
gagcugcaggcgcgcgucauggcugcuuugag

SEQ ID NO: 112797 - RNA, 32 nt, Homo Sapiens
cugucuuccuccaaccucccccuuuuucguug

SEQ ID NO: 112798 - RNA, 32 nt, Homo Sapiens
ggcuuucuuuugcuguauuguuuuauaagccu

SEQ ID NO: 112799 - RNA, 32 nt, Homo Sapiens
agugcuuacccacaaggcaacacuuaucuucc

SEQ ID NO: 112800 - RNA, 32 nt, Homo Sapiens
ccaagggaauccacccagaaugcaccccugaa

SEQ ID NO: 112801 - RNA, 32 nt, Homo Sapiens
aaaagauacucagucuuaauccuaugcaaaaa

SEQ ID NO: 112802 - RNA, 32 nt, Homo Sapiens
ucuuuucuguuuuuuuaacccuuuguaauauu

SEQ ID NO: 112803 - RNA, 32 nt, Homo Sapiens
gguuuauagagauguauauagaauuauagucc

SEQ ID NO: 112804 - RNA, 32 nt, Homo Sapiens
cauugguccaugaaggagcagccagggguggu

SEQ ID NO: 112805 - RNA, 32 nt, Homo Sapiens
ccugcggagacgggacagcccugucccacuca

SEQ ID NO: 112806 - RNA, 32 nt, Homo Sapiens
cccugaggcggccgugguuaggcggcuccccg

SEQ ID NO: 112807 - RNA, 32 nt, Homo Sapiens
acacugagaaaguuggccaugaggccugcuug

SEQ ID NO: 112808 - RNA, 32 nt, Homo Sapiens
acaguauugugauuuucaguguauuacaaaua

SEQ ID NO: 112809 - RNA, 32 nt, Homo Sapiens
ggagcucgggccgugcccgcugagagauccag

SEQ ID NO: 112810 - RNA, 32 nt, Homo Sapiens
uacggcuagacaaauaugacugguggucuaga

SEQ ID NO: 112811 - RNA, 32 nt, Homo Sapiens
aaccuggguaaauguggauuaagggaaacaaa

SEQ ID NO: 112812 - RNA, 32 nt, Homo Sapiens
cugggcccugccucggccuccugcgccaauac

SEQ ID NO: 112813 - RNA, 32 nt, Homo Sapiens
uucgauaagaaagggaucgcugauugaguuau

SEQ ID NO: 112814 - RNA, 32 nt, Homo Sapiens
uaugaaaaauuccaaacuuaugaggaauguuu

SEQ ID NO: 112815 - RNA, 32 nt, Homo Sapiens
caguguugucugucauccauuuaaguguuccc

SEQ ID NO: 112816 - RNA, 32 nt, Homo Sapiens
caguucuugaugauguauuuuaugaugcccag

SEQ ID NO: 112817 - RNA, 32 nt, Homo Sapiens
uuuuauuucuucauuguacucuucuuuuguaa

SEQ ID NO: 112818 - RNA, 32 nt, Homo Sapiens
agugaguagaggccagggauccugcuaaauaa

SEQ ID NO: 112819 - RNA, 32 nt, Homo Sapiens
gaaccaauuaaaaguaggucuuugaaaaaaua

SEQ ID NO: 112820 - RNA, 32 nt, Homo Sapiens
ugggggaguagagaaagcggggcgcgcggagg

SEQ ID NO: 112821 - RNA, 32 nt, Homo Sapiens
ucccugcccucucuccucuccccugcagcagg

SEQ ID NO: 112822 - RNA, 32 nt, Homo Sapiens
guaguucauuugacccuccccagccgcgggcc

SEQ ID NO: 112823 - RNA, 32 nt, Homo Sapiens
ggcuguggguuugucacauacgccacugugga

SEQ ID NO: 112824 - RNA, 32 nt, Homo Sapiens
ucuacaaaaaauacaaaaauuagucaggugug

SEQ ID NO: 112825 - RNA, 32 nt, Homo Sapiens
aaacuuaagcuuaacauggaaacuauagaaac

SEQ ID NO: 112826 - RNA, 32 nt, Homo Sapiens
auuugauguaaaauuacaaaugcugaaaacau

SEQ ID NO: 112827 - RNA, 32 nt, Homo Sapiens
ucagggagggaugcucagggagggauaugcug

SEQ ID NO: 112828 - RNA, 32 nt, Homo Sapiens
gcaguucagauuuaaagcaccauccaaaccuu

SEQ ID NO: 112829 - RNA, 32 nt, Homo Sapiens
aaugaagagguuugaguagauguacaaaucaa

SEQ ID NO: 112830 - RNA, 32 nt, Homo Sapiens
uacaaauaaaagacaucccuguagcauauggu

SEQ ID NO: 112831 - RNA, 32 nt, Homo Sapiens
ugagauggggaugaagguaagaugccgcauca

SEQ ID NO: 112832 - RNA, 32 nt, Homo Sapiens
gggaacgagucaccguguaucuggagaccaug

SEQ ID NO: 112833 - RNA, 32 nt, Homo Sapiens
cuaagucuggaacagcaggaaggguugaugcu

SEQ ID NO: 112834 - RNA, 32 nt, Homo Sapiens
uccccgcagcggggaaacuccgcgccuagagc

SEQ ID NO: 112835 - RNA, 32 nt, Homo Sapiens
agugagccgauagcuuccuuuuagucuucacc

SEQ ID NO: 112836 - RNA, 32 nt, Homo Sapiens
ucugauaauagaagcaaugccuguccauugua

SEQ ID NO: 112837 - RNA, 31 nt, Homo Sapiens
caagccuuuauugacauucaaguguuuaugu

SEQ ID NO: 112838 - RNA, 32 nt, Homo Sapiens
acaaaaaugcccugguggcaaagcuaucacca

SEQ ID NO: 112839 - RNA, 31 nt, Homo Sapiens
gaaugccaagccaaaacaugaguuucaacuc

SEQ ID NO: 112840 - RNA, 32 nt, Homo Sapiens
auacgauguucccucgcaaagcccgugugacg

SEQ ID NO: 112841 - RNA, 32 nt, Homo Sapiens
acguguauauauagaccaaggauaugugcuga

SEQ ID NO: 112842 - RNA, 32 nt, Homo Sapiens
cccggccgcuggaagcaggggaggugaaaugu

SEQ ID NO: 112843 - RNA, 32 nt, Homo Sapiens
cggccugggcuuccccagagccaggcgugcgg

SEQ ID NO: 112844 - RNA, 32 nt, Homo Sapiens
uuuccccccuccgccucccaggaagaaagaau

SEQ ID NO: 112845 - RNA, 32 nt, Homo Sapiens
cccugugggucuggcggucagagggaccccac

SEQ ID NO: 112846 - RNA, 32 nt, Homo Sapiens
ggaaggggcuggggagugggggugggaagcag

SEQ ID NO: 112847 - RNA, 32 nt, Homo Sapiens
cauaaagaaugaugaagaaccaaagaaugaug

SEQ ID NO: 112848 - RNA, 32 nt, Homo Sapiens
cccaggcgauucuccugccucagccuccugag

SEQ ID NO: 112849 - RNA, 32 nt, Homo Sapiens
cccaggaugcggugcgugcuucugcccagcgc

SEQ ID NO: 112850 - RNA, 32 nt, Homo Sapiens
acguauggcucucauguacccuugccuccccc

SEQ ID NO: 112851 - RNA, 32 nt, Homo Sapiens
cauucacuucuguaguaugguuuccaccuauc

SEQ ID NO: 112852 - RNA, 32 nt, Homo Sapiens
uuuugcuucauggaaaaucaaccgaaaaugga

SEQ ID NO: 112853 - RNA, 32 nt, Homo Sapiens
uucuccaucccucuccucuucccgccgcgccg

SEQ ID NO: 112854 - RNA, 32 nt, Homo Sapiens
aguuuugugcuuccaaaucacuuuuugguuuu

SEQ ID NO: 112855 - RNA, 32 nt, Homo Sapiens
cuggcucaggguggggcugucccuuccaggag

SEQ ID NO: 112856 - RNA, 32 nt, Homo Sapiens
ucauccguguguauguguaugugugugagugu

SEQ ID NO: 112857 - RNA, 32 nt, Homo Sapiens
caacccuaaggcacagagagccaacccugagu

SEQ ID NO: 112858 - RNA, 32 nt, Homo Sapiens
cuacagacugggagaaagaauuggaagccuuc

SEQ ID NO: 112859 - RNA, 32 nt, Homo Sapiens
auaccaagccccaggagaugggcacugagaaa

SEQ ID NO: 112860 - RNA, 32 nt, Homo Sapiens
cuacauacauuauuuucuuaauuguuagcuau

SEQ ID NO: 112861 - RNA, 32 nt, Homo Sapiens
ggcuggccucaaacuccugaccucaggugauc

SEQ ID NO: 112862 - RNA, 32 nt, Homo Sapiens
cuggaggaacucggcuuccagcuauucuguaa

SEQ ID NO: 112863 - RNA, 32 nt, Homo Sapiens
agaagcgggagggcguccggucugcacgcccg

SEQ ID NO: 112864 - RNA, 32 nt, Homo Sapiens
uucccggacggagcggcuggccgggcagaggg

SEQ ID NO: 112865 - RNA, 32 nt, Homo Sapiens
aggagcugccuggccuccaguggguaaaauag

SEQ ID NO: 112866 - RNA, 32 nt, Homo Sapiens
uaucuaauauauuaaguaugugugauacuaag

SEQ ID NO: 112867 - RNA, 32 nt, Homo Sapiens
cuuuuuaaauuaaucuuuguacuccucuauca

SEQ ID NO: 112868 - RNA, 32 nt, Homo Sapiens
aggccgguauuacuguaaagcagagaauggcu

SEQ ID NO: 112869 - RNA, 32 nt, Homo Sapiens
gccgcugaccgaccgacggaggcgccgauugg

SEQ ID NO: 112870 - RNA, 32 nt, Homo Sapiens
gacuuggucuggucucucugguggcuacaacc

SEQ ID NO: 112871 - RNA, 32 nt, Homo Sapiens
uguucaaaaauauguuaaauuuaggcucagca

SEQ ID NO: 112872 - RNA, 32 nt, Homo Sapiens
gcuacaaaguucccaaagaacuuagcuaagau

SEQ ID NO: 112873 - RNA, 32 nt, Homo Sapiens
ggacugcgcccggcaguggcuucgcgggcgac

SEQ ID NO: 112874 - RNA, 32 nt, Homo Sapiens
uuaaaacauaucugaagauaaaaacauaccuc

SEQ ID NO: 112875 - RNA, 32 nt, Homo Sapiens
ucacaaggaggaagaaggagaaguugugcugu

SEQ ID NO: 112876 - RNA, 32 nt, Homo Sapiens
gcacacgcgucccuuccauugcccuccaucuc

SEQ ID NO: 112877 - RNA, 32 nt, Homo Sapiens
ugcacauuugaaaaaagcaguuuaaugaaugg

SEQ ID NO: 112878 - RNA, 32 nt, Homo Sapiens
gcaaauucuuauaaaaauguuuauuguaaagu

SEQ ID NO: 112879 - RNA, 32 nt, Homo Sapiens
aaaaagcugcugcaugccaagucacugugcua

SEQ ID NO: 112880 - RNA, 32 nt, Homo Sapiens
ugucagucaacauggaggcagaggaaucggag

SEQ ID NO: 112881 - RNA, 32 nt, Homo Sapiens
cgucacaaugccuauuguccuguccuucucuu

SEQ ID NO: 112882 - RNA, 32 nt, Homo Sapiens
accacucuuuugcaaauaaagcauccuuucug

SEQ ID NO: 112883 - RNA, 32 nt, Homo Sapiens
ugagcucucccgcauuccuccucccacuuggc

SEQ ID NO: 112884 - RNA, 32 nt, Homo Sapiens
ccucaggugauccacccgccuuggccucccaa

SEQ ID NO: 112885 - RNA, 32 nt, Homo Sapiens
gagcucggguucagcccucacaaugggacuga

SEQ ID NO: 112886 - RNA, 32 nt, Homo Sapiens
aucuccuuauucucauguaacuucuauuaaca

SEQ ID NO: 112887 - RNA, 32 nt, Homo Sapiens
aacggcugggcucaaagauaaaaggaagggaa

SEQ ID NO: 112888 - RNA, 32 nt, Homo Sapiens
cuuuucagcuucugcugggcuggggccugaug

SEQ ID NO: 112889 - RNA, 32 nt, Homo Sapiens
uuguaaaaccagccaguaauuucugugcaacc

SEQ ID NO: 112890 - RNA, 32 nt, Homo Sapiens
ggggugcucagguggaggugugggguaugcac

SEQ ID NO: 112891 - RNA, 32 nt, Homo Sapiens
gccuagccaagauggugaaaccccgucucuag

SEQ ID NO: 112892 - RNA, 32 nt, Homo Sapiens
ggagauuuaggaccauaaugaggucucauguu

SEQ ID NO: 112893 - RNA, 32 nt, Homo Sapiens
ucuuuccuacaggaugaaagugccuuuugaau

SEQ ID NO: 112894 - RNA, 32 nt, Homo Sapiens
cuuguggaaugggauagaauugaauuccuuuu

SEQ ID NO: 112895 - RNA, 32 nt, Homo Sapiens
aggaaauugcaaaauggaggccaaaaguaagg

SEQ ID NO: 112896 - RNA, 32 nt, Homo Sapiens
ccaggccagcugccuccgcgugaucaaagcca

SEQ ID NO: 112897 - RNA, 32 nt, Homo Sapiens
cucucucuguguuuccuccagcccuugucucg

SEQ ID NO: 112898 - RNA, 32 nt, Homo Sapiens
cugaggccaggucuaccccccaucauaccagc

SEQ ID NO: 112899 - RNA, 28 nt, Homo Sapiens
ggggcggggcggccggcaccaugucgag

SEQ ID NO: 112900 - RNA, 32 nt, Homo Sapiens
aucugugaaagaauaugaaaugaucugugcug

SEQ ID NO: 112901 - RNA, 32 nt, Homo Sapiens
uuucugaauaauagaaaucacuucucuaaaag

SEQ ID NO: 112902 - RNA, 32 nt, Homo Sapiens
guuccucacuuugcuucuccaacagccugucg

SEQ ID NO: 112903 - RNA, 32 nt, Homo Sapiens
aacucauacuaaaguauaaaugacuuucuucu

SEQ ID NO: 112904 - RNA, 32 nt, Homo Sapiens
ccccuugaaucugcuaaagaaaacagauccug

SEQ ID NO: 112905 - RNA, 32 nt, Homo Sapiens
agucucuugggucugaauauaccuggguuugu

SEQ ID NO: 112906 - RNA, 32 nt, Homo Sapiens
aaaaguuuagaaaguaaacacuuuuugagcac

SEQ ID NO: 112907 - RNA, 32 nt, Homo Sapiens
gagguggaggugagggcgggcgccagcgaacu

SEQ ID NO: 112908 - RNA, 32 nt, Homo Sapiens
uuucaguuguuacaaucaggggugcuacugga

SEQ ID NO: 112909 - RNA, 32 nt, Homo Sapiens
gccugccugggaagaggaaagggaggggugcc

SEQ ID NO: 112910 - RNA, 32 nt, Homo Sapiens
gcgcgaggcggagucccggcgcgcagccaggc

SEQ ID NO: 112911 - RNA, 32 nt, Homo Sapiens
gucaggcuccauccccucccccaccugccccu

SEQ ID NO: 112912 - RNA, 32 nt, Homo Sapiens
cggaggcuggagcuggaggcgcggcgccggug

SEQ ID NO: 112913 - RNA, 32 nt, Homo Sapiens
uuuuucaggaagacuuggccaggccguguucc

SEQ ID NO: 112914 - RNA, 32 nt, Homo Sapiens
uaucaucugaccaggucuggaggcuggcggga

SEQ ID NO: 112915 - RNA, 32 nt, Homo Sapiens
uauuucuaauguuuguuauacuuguacagagu

SEQ ID NO: 112916 - RNA, 30 nt, Homo Sapiens
uaaaucacuggaggcaugcauaaugaaugg

SEQ ID NO: 112917 - RNA, 32 nt, Homo Sapiens
gggaaaagaaugccugggggucuguaauagga

SEQ ID NO: 112918 - RNA, 29 nt, Homo Sapiens
caccaugguuacccggcccuugcccucuu

SEQ ID NO: 112919 - RNA, 32 nt, Homo Sapiens
cgcugugaggcugucgucuuggagcacccaca

SEQ ID NO: 112920 - RNA, 32 nt, Homo Sapiens
ggccgggcucgguggcucucgccuguaauccc

SEQ ID NO: 112921 - RNA, 32 nt, Homo Sapiens
ugcugggcgcgguggcucuugccuguaauccc

SEQ ID NO: 112922 - RNA, 32 nt, Homo Sapiens
guaaaaauauuugagaaaaauaaaguacaagu

SEQ ID NO: 112923 - RNA, 32 nt, Homo Sapiens
ggcaugugggccuggcuguguucaauugcaag

SEQ ID NO: 112924 - RNA, 32 nt, Homo Sapiens
acacagcugcauaaaaacgucuccaaggggac

SEQ ID NO: 112925 - RNA, 32 nt, Homo Sapiens
uaguggcgagaaagcugacuccauucaucaga

SEQ ID NO: 112926 - RNA, 32 nt, Homo Sapiens
caagcugcagaucgucgugccgaugaaagaga

SEQ ID NO: 112927 - RNA, 32 nt, Homo Sapiens
cuuuaucucuacauuuuccacuucuacaugau

SEQ ID NO: 112928 - RNA, 32 nt, Homo Sapiens
gauguugaugucugcugggcugcacuggggcu

SEQ ID NO: 112929 - RNA, 31 nt, Homo Sapiens
ccgcggcugccggacgggacgggaccggcua

SEQ ID NO: 112930 - RNA, 32 nt, Homo Sapiens
caagcuauuuauucaaugauaauuuugaaaca

SEQ ID NO: 112931 - RNA, 32 nt, Homo Sapiens
uggcucugccacuuaacagccauguaaccuug

SEQ ID NO: 112932 - RNA, 32 nt, Homo Sapiens
cacacacgcgccgcccacgcacgcgcuccccu

SEQ ID NO: 112933 - RNA, 32 nt, Homo Sapiens
auaagguuuucuugaaguugugccaaagcauu

SEQ ID NO: 112934 - RNA, 32 nt, Homo Sapiens
ucgcaccaaacuuguaggccaagccgaggaug

SEQ ID NO: 112935 - RNA, 32 nt, Homo Sapiens
ucucuacuaaaaguacaaaaaauuagcugggc

SEQ ID NO: 112936 - RNA, 32 nt, Homo Sapiens
ugcauggcccucgcaggguguuugugaggaua

SEQ ID NO: 112937 - RNA, 32 nt, Homo Sapiens
accucugccucccaggaucaagugauucuccu

SEQ ID NO: 112938 - RNA, 32 nt, Homo Sapiens
gagaccgugucugaaucaucauuguauuaaac

SEQ ID NO: 112939 - RNA, 32 nt, Homo Sapiens
cggagccgcugcccccucuccccgcccccugc

SEQ ID NO: 112940 - RNA, 32 nt, Homo Sapiens
gccagucuuucuaucggaauccaauuaaggaa

SEQ ID NO: 112941 - RNA, 32 nt, Homo Sapiens
gugugauaugggugaacccagccccugaccuu

SEQ ID NO: 112942 - RNA, 32 nt, Homo Sapiens
aaacauucaaagcuuagggauagguccuuggg

SEQ ID NO: 112943 - RNA, 32 nt, Homo Sapiens
ggcagcuauaacaacuggaucuacuugacaag

SEQ ID NO: 112944 - RNA, 32 nt, Homo Sapiens
agcuaucaccugaggacagaggugacuuguuc

SEQ ID NO: 112945 - RNA, 30 nt, Homo Sapiens
cgggacaggacuugugcgccggcgccccgg

SEQ ID NO: 112946 - RNA, 32 nt, Homo Sapiens
uggagauacacaggagcuucuaucuugcugaa

SEQ ID NO: 112947 - RNA, 32 nt, Homo Sapiens
uccccagagcgccaggcccccggggggaggga

SEQ ID NO: 112948 - RNA, 32 nt, Homo Sapiens
uaucauacuuuuuugaugaaaacauaaugccu

SEQ ID NO: 112949 - RNA, 32 nt, Homo Sapiens
ggaguuucucugucucucauguuuccuguaag

SEQ ID NO: 112950 - RNA, 32 nt, Homo Sapiens
aucauggugcggcaaauggaggcaggguccaa

SEQ ID NO: 112951 - RNA, 32 nt, Homo Sapiens
ccuacagugggauacauagggucaaauugaga

SEQ ID NO: 112952 - RNA, 32 nt, Homo Sapiens
caccaagucuuagaucuuucuagagcuuguuu

SEQ ID NO: 112953 - RNA, 32 nt, Homo Sapiens
ggggacguggggcagccaccccugcccagcga

SEQ ID NO: 112954 - RNA, 32 nt, Homo Sapiens
cucuucccacugcccuccccagccccagcucc

SEQ ID NO: 112955 - RNA, 32 nt, Homo Sapiens
gccacgcgcugucaagcaacacucugcggacc

SEQ ID NO: 112956 - RNA, 32 nt, Homo Sapiens
agcuggaaucaaggacaugaccaagagcagca

SEQ ID NO: 112957 - RNA, 32 nt, Homo Sapiens
acauaguauaucuauaugcuuuuccccauagg

SEQ ID NO: 112958 - RNA, 27 nt, Homo Sapiens
ggaguuuccuucuucauuuucgugccu

SEQ ID NO: 112959 - RNA, 32 nt, Homo Sapiens
uugacuuauucuucucuuucuucacaauguau

SEQ ID NO: 112960 - RNA, 32 nt, Homo Sapiens
gcuggggaggcugugcuguuuccccuggagac

SEQ ID NO: 112961 - RNA, 32 nt, Homo Sapiens
gaaaccaucagguccucucggagauucagaag

SEQ ID NO: 112962 - RNA, 32 nt, Homo Sapiens
ggcucuaacaaguggauaccagugacucucgc

SEQ ID NO: 112963 - RNA, 32 nt, Homo Sapiens
cucgaaaaagaaugucaaguauaugauaagcc

SEQ ID NO: 112964 - RNA, 32 nt, Homo Sapiens
aagucaucagccacugcuacuacaucuugcca

SEQ ID NO: 112965 - RNA, 32 nt, Homo Sapiens
auguaccgaggguguggcccugugacauaucc

SEQ ID NO: 112966 - RNA, 32 nt, Homo Sapiens
uggggccgggcgcggcuuggcgggagggucug

SEQ ID NO: 112967 - RNA, 32 nt, Homo Sapiens
gacggggaggcuuuuccaaacccaggcagcuu

SEQ ID NO: 112968 - RNA, 32 nt, Homo Sapiens
cuuccggcagcagcugcuggccugugccgggg

SEQ ID NO: 112969 - RNA, 32 nt, Homo Sapiens
uuuuuaccuugauuuggcauguuuguauguua

SEQ ID NO: 112970 - RNA, 32 nt, Homo Sapiens
ccuuuuuuaagugaugacuacugaugaaauaa

SEQ ID NO: 112971 - RNA, 31 nt, Homo Sapiens
acucccugcuguuccgcaggaccuccaccuu

SEQ ID NO: 112972 - RNA, 32 nt, Homo Sapiens
acccaggaagcagagguugcagugagcagaga

SEQ ID NO: 112973 - RNA, 32 nt, Homo Sapiens
uucaugaaggcuaaagggaauuccuuuugauu

SEQ ID NO: 112974 - RNA, 32 nt, Homo Sapiens
gcugacuggcuccgccauucgcgggaaggcgu

SEQ ID NO: 112975 - RNA, 32 nt, Homo Sapiens
uuuuaucauuauaaauguguuuaguucaucau

SEQ ID NO: 112976 - RNA, 32 nt, Homo Sapiens
uaaauagcucuuuucucugauacagaaaaguu

SEQ ID NO: 112977 - RNA, 32 nt, Homo Sapiens
ucuuuuauauaaauaggaaaacaaaggcagag

SEQ ID NO: 112978 - RNA, 32 nt, Homo Sapiens
ucuacccuuuuagauuugauaaauauuuuuau

SEQ ID NO: 112979 - RNA, 32 nt, Homo Sapiens
uucuuggccucagcuccucccuggggaaggaa

SEQ ID NO: 112980 - RNA, 32 nt, Homo Sapiens
uuaaaagcacuuucacaccucuccucgcuucc

SEQ ID NO: 112981 - RNA, 32 nt, Homo Sapiens
cagcuccugggauucuccuccucccuccgccc

SEQ ID NO: 112982 - RNA, 32 nt, Homo Sapiens
uaaacuuuuagguuugcucuguaaucugcuaa

SEQ ID NO: 112983 - RNA, 32 nt, Homo Sapiens
uuuccgaccccauggagcuguaugagacaucc

SEQ ID NO: 112984 - RNA, 32 nt, Homo Sapiens
agcacuaauaaaacuuggauugauuccagauu

SEQ ID NO: 112985 - RNA, 32 nt, Homo Sapiens
ccgucggucucuuuucucuuccguccuaaaag

SEQ ID NO: 112986 - RNA, 32 nt, Homo Sapiens
cacgccugccuugcucugccccaugcccugaa

SEQ ID NO: 112987 - RNA, 32 nt, Homo Sapiens
ugggaacccaaguccaagcauaccaacacgag

SEQ ID NO: 112988 - RNA, 32 nt, Homo Sapiens
ccccgcccgcggccccaccaaccuccguuccg

SEQ ID NO: 112989 - RNA, 32 nt, Homo Sapiens
ugacccggccggacgccccuccccuaucuugc

SEQ ID NO: 112990 - RNA, 32 nt, Homo Sapiens
cgcggcggagggcuggccggccucgggggagu

SEQ ID NO: 112991 - RNA, 32 nt, Homo Sapiens
uggacuggauauuaccaucauccaccauccug

SEQ ID NO: 112992 - RNA, 32 nt, Homo Sapiens
gagcauggcuggcaggggcagcugcuguggca

SEQ ID NO: 112993 - RNA, 32 nt, Homo Sapiens
guccucugcuggcauucugcauccccuccaua

SEQ ID NO: 112994 - RNA, 32 nt, Homo Sapiens
acugcagcucccaccuccuccucccgccccug

SEQ ID NO: 112995 - RNA, 32 nt, Homo Sapiens
cuacguuauguuggagcauuuauuuuaaaaau

SEQ ID NO: 112996 - RNA, 32 nt, Homo Sapiens
augaucccugaacauaguuuucacccaagagc

SEQ ID NO: 112997 - RNA, 32 nt, Homo Sapiens
agcuccgggcagggaccccgucugcaccgggu

SEQ ID NO: 112998 - RNA, 32 nt, Homo Sapiens
cugugaguaguaauuuuaguuacaauggagua

SEQ ID NO: 112999 - RNA, 32 nt, Homo Sapiens
ccuggcccccuccuccuucucucaggauuucu

SEQ ID NO: 113000 - RNA, 32 nt, Homo Sapiens
uuauuguagauauauacaagaaaagagcggua

SEQ ID NO: 113001 - RNA, 32 nt, Homo Sapiens
ccuguuuuggauuuuucucuuugcauguuuga

SEQ ID NO: 113002 - RNA, 32 nt, Homo Sapiens
cauauuugggcacugguuuggccaaguguaca

SEQ ID NO: 113003 - RNA, 32 nt, Homo Sapiens
ccugccccccaccccaggaacuggacuaagcc

SEQ ID NO: 113004 - RNA, 32 nt, Homo Sapiens
ccuuugcuaaggaaacugaacugaauuccagg

SEQ ID NO: 113005 - RNA, 32 nt, Homo Sapiens
uauacuauucuauuuagauuugcccagaauua

SEQ ID NO: 113006 - RNA, 32 nt, Homo Sapiens
auuuucaguagcaacaacugaauaccacaaua

SEQ ID NO: 113007 - RNA, 32 nt, Homo Sapiens
cugucgucccuccucagcuucuuguuccuggg

SEQ ID NO: 113008 - RNA, 32 nt, Homo Sapiens
gaaagcagaguuagugcuggaacuuguauuuu

SEQ ID NO: 113009 - RNA, 32 nt, Homo Sapiens
uacgucccccuucugcugcuccugcuucuccu

SEQ ID NO: 113010 - RNA, 32 nt, Homo Sapiens
accucuggccccaggcccucagggagaaagga

SEQ ID NO: 113011 - RNA, 32 nt, Homo Sapiens
aggggaagaggcaggaggguccuccuaugacc

SEQ ID NO: 113012 - RNA, 32 nt, Homo Sapiens
gaagacugugaugagcucgucuguggaacauc

SEQ ID NO: 113013 - RNA, 32 nt, Homo Sapiens
gagcaucuggaucaaggugcuggccauguccc

SEQ ID NO: 113014 - RNA, 32 nt, Homo Sapiens
ugaauuauagaguaaguauaauuacagcaaag

SEQ ID NO: 113015 - RNA, 32 nt, Homo Sapiens
ccgccucccgguuucaagcaguucuccagcau

SEQ ID NO: 113016 - RNA, 32 nt, Homo Sapiens
ccuauaagauauuaauauuauuaaacagaccc

SEQ ID NO: 113017 - RNA, 32 nt, Homo Sapiens
uucagguuuuuagacuauugcucccuguacuu

SEQ ID NO: 113018 - RNA, 32 nt, Homo Sapiens
gcaggcgcagugccccccucccgugggcuggc

SEQ ID NO: 113019 - RNA, 32 nt, Homo Sapiens
cuuuaaaaauagucuuuggguucguuaaagca

SEQ ID NO: 113020 - RNA, 32 nt, Homo Sapiens
uaacaauaaaagacaaggaaaaaauaacaaug

SEQ ID NO: 113021 - RNA, 32 nt, Homo Sapiens
gacacaaucccauguggaugcacagucucacu

SEQ ID NO: 113022 - RNA, 32 nt, Homo Sapiens
ccagcagaaagaugcaauauuuuuuguuuccu

SEQ ID NO: 113023 - RNA, 31 nt, Homo Sapiens
cgcaucgagccccagcgcccggcccgcagcc

SEQ ID NO: 113024 - RNA, 32 nt, Homo Sapiens
aaggcuggagguggugucaucaccuccauuuu

SEQ ID NO: 113025 - RNA, 32 nt, Homo Sapiens
aauacaaaaugaaauaaaaaggaugcaaauca

SEQ ID NO: 113026 - RNA, 32 nt, Homo Sapiens
aaacaaagaaacaaaauuaaaauggaauugga

SEQ ID NO: 113027 - RNA, 32 nt, Homo Sapiens
auucugaaggcacuuuauguacuacauggagg

SEQ ID NO: 113028 - RNA, 32 nt, Homo Sapiens
cuaucaaguuguauucuuuccuguucuauaac

SEQ ID NO: 113029 - RNA, 32 nt, Homo Sapiens
gagcagaggcagcggcagcggcagcggcagua

SEQ ID NO: 113030 - RNA, 32 nt, Homo Sapiens
ugaagaugaggauaagaaacaaggaaaacaga

SEQ ID NO: 113031 - RNA, 32 nt, Homo Sapiens
uauggauaaugcuauauaaucauuaucuuuuu

SEQ ID NO: 113032 - RNA, 32 nt, Homo Sapiens
uccggcggguaguggcucugcgggacgucgug

SEQ ID NO: 113033 - RNA, 32 nt, Homo Sapiens
gaccaggagagccaacccagaucccacuaccu

SEQ ID NO: 113034 - RNA, 32 nt, Homo Sapiens
uccggcccauccccaggcaccucacaggcccc

SEQ ID NO: 113035 - RNA, 32 nt, Homo Sapiens
uugccuggguuccaugagacaggccagcgugu

SEQ ID NO: 113036 - RNA, 32 nt, Homo Sapiens
aaaugcuuuaucuuuuuuuuuaaagauuuauu

SEQ ID NO: 113037 - RNA, 32 nt, Homo Sapiens
cuuccucccugcugcuggccggagaccaaauc

SEQ ID NO: 113038 - RNA, 32 nt, Homo Sapiens
aacaggccagccugcuugggcgcucggucucc

SEQ ID NO: 113039 - RNA, 31 nt, Homo Sapiens
gcccccugagauacucucagagcagcucagc

SEQ ID NO: 113040 - RNA, 32 nt, Homo Sapiens
ucauaacaaaaauacuacuaauauaacuacug

SEQ ID NO: 113041 - RNA, 32 nt, Homo Sapiens
uacuguuaaucuugauuuuucuugauuuuauu

SEQ ID NO: 113042 - RNA, 32 nt, Homo Sapiens
ugaaaccaggggaugcacagucuaaaugaaua

SEQ ID NO: 113043 - RNA, 29 nt, Homo Sapiens
ccuguuucuauccuguuuaauaaauuagu

SEQ ID NO: 113044 - RNA, 32 nt, Homo Sapiens
accgccaggcaggaaccccgcuggcagaugac

SEQ ID NO: 113045 - RNA, 32 nt, Homo Sapiens
aguuaccuguauuucucucaccaccugaggaa

SEQ ID NO: 113046 - RNA, 32 nt, Homo Sapiens
uuguucugcauuuuauuuuuuauuucucacca

SEQ ID NO: 113047 - RNA, 32 nt, Homo Sapiens
gauugauuuccuggcaggcucuacgccgagga

SEQ ID NO: 113048 - RNA, 32 nt, Homo Sapiens
uggugacugggugcccuuggugagcuguguau

SEQ ID NO: 113049 - RNA, 32 nt, Homo Sapiens
cccccagcgggcagggucuggugcugggagga

SEQ ID NO: 113050 - RNA, 32 nt, Homo Sapiens
uccugcucuaaagcauuuugaugucucauucu

SEQ ID NO: 113051 - RNA, 32 nt, Homo Sapiens
ggcgcgaggcuuuuggagcggcuguggguguc

SEQ ID NO: 113052 - RNA, 32 nt, Homo Sapiens
agcaguuaucuggagacaucugagagaauauu

SEQ ID NO: 113053 - RNA, 32 nt, Homo Sapiens
acagccuccaugaacggggaccugaaguacug

SEQ ID NO: 113054 - RNA, 30 nt, Homo Sapiens
aguauacccuggaccacccaucugaccauc

SEQ ID NO: 113055 - RNA, 32 nt, Homo Sapiens
agauccgggguagagggaaaagagcuccgggc

SEQ ID NO: 113056 - RNA, 32 nt, Homo Sapiens
acauccaauacagaguucugguaaagauaaaa

SEQ ID NO: 113057 - RNA, 32 nt, Homo Sapiens
gagacauugcccaguuauugcugguacuuuug

SEQ ID NO: 113058 - RNA, 32 nt, Homo Sapiens
caaagcugucauuaauaaaaauucuuauagua

SEQ ID NO: 113059 - RNA, 32 nt, Homo Sapiens
auucuauccagaaguugaagaaucugaauuua

SEQ ID NO: 113060 - RNA, 32 nt, Homo Sapiens
ucuuuuuaaauuauaucggggguggucauaua

SEQ ID NO: 113061 - RNA, 32 nt, Homo Sapiens
gcugagauaugaacauauuguugaaagguaau

SEQ ID NO: 113062 - RNA, 32 nt, Homo Sapiens
gguguguggcuuuugaagaaaauguauguacu

SEQ ID NO: 113063 - RNA, 32 nt, Homo Sapiens
acuuagcaggaaucuccgaucuguggagaagu

SEQ ID NO: 113064 - RNA, 32 nt, Homo Sapiens
gguacuaaggcuuggccuggacaggcagucua

SEQ ID NO: 113065 - RNA, 32 nt, Homo Sapiens
agacggaaaggagaggaaaggagaccuagagc

SEQ ID NO: 113066 - RNA, 32 nt, Homo Sapiens
uguucuuaggaauuauuuuguuguuacguuuu

SEQ ID NO: 113067 - RNA, 32 nt, Homo Sapiens
cccccuuccaaauaauaaagucuauggacagg

SEQ ID NO: 113068 - RNA, 32 nt, Homo Sapiens
ugaauagccuacucccaaguaagagcaaaucu

SEQ ID NO: 113069 - RNA, 32 nt, Homo Sapiens
acaguuguuucugaaaauuuucaaugagcuuu

SEQ ID NO: 113070 - RNA, 32 nt, Homo Sapiens
aaugucaaacuguaucaucaaaaacaaagauc

SEQ ID NO: 113071 - RNA, 32 nt, Homo Sapiens
gaagaauaaguccuucuguuuucucuuuaaca

SEQ ID NO: 113072 - RNA, 32 nt, Homo Sapiens
ccugcccaccccggcccgggccgcggugacag

SEQ ID NO: 113073 - RNA, 32 nt, Homo Sapiens
uccacccgcucccgccgcgcgcgaaucgcggu

SEQ ID NO: 113074 - RNA, 32 nt, Homo Sapiens
cccuaguaauucuccuaucucagccucccaaa

SEQ ID NO: 113075 - RNA, 32 nt, Homo Sapiens
agcucgcgggcgacugccugccaggcagacgc

SEQ ID NO: 113076 - RNA, 32 nt, Homo Sapiens
gaauaaagauuuauuucuucuaaucaaagaug

SEQ ID NO: 113077 - RNA, 32 nt, Homo Sapiens
gcugcugcucacgccccgcccgggagccagau

SEQ ID NO: 113078 - RNA, 32 nt, Homo Sapiens
caucugcaggccccaaacggccuccggucggu

SEQ ID NO: 113079 - RNA, 32 nt, Homo Sapiens
aggauggagugucuguaaaaucaacaggaaau

SEQ ID NO: 113080 - RNA, 32 nt, Homo Sapiens
agcagagucugugccaauguggggugagcagg

SEQ ID NO: 113081 - RNA, 29 nt, Homo Sapiens
cacaggccauaauuguuccauagaccccu

SEQ ID NO: 113082 - RNA, 32 nt, Homo Sapiens
uccgcgcccucccgacgccagguccugccguc

SEQ ID NO: 113083 - RNA, 31 nt, Homo Sapiens
accuuggcucauagaaagucacuuuaauaga

SEQ ID NO: 113084 - RNA, 32 nt, Homo Sapiens
aauauuaguaaauuauuuggaauauagaaugu

SEQ ID NO: 113085 - RNA, 32 nt, Homo Sapiens
cgugcuauggcccuguaccacacugaggagcg

SEQ ID NO: 113086 - RNA, 32 nt, Homo Sapiens
gugcggccaggcccgcgggguggucgggggga

SEQ ID NO: 113087 - RNA, 32 nt, Homo Sapiens
ucuguucuguuucaaggcacucuagauuccau

SEQ ID NO: 113088 - RNA, 32 nt, Homo Sapiens
uccuaggcuuuuuugggggccuaacccacgca

SEQ ID NO: 113089 - RNA, 32 nt, Homo Sapiens
caguuggaagagauuucagaugugcuacagcc

SEQ ID NO: 113090 - RNA, 32 nt, Homo Sapiens
aagaaucaaacaaaaucuuaaguucuaugaga

SEQ ID NO: 113091 - RNA, 29 nt, Homo Sapiens
cagggacuggaagagaggacgcggucgag

SEQ ID NO: 113092 - RNA, 32 nt, Homo Sapiens
guuuuuauguaaaucaaucacuuuuuuaaaaa

SEQ ID NO: 113093 - RNA, 32 nt, Homo Sapiens
aguaagaaaaagaaaggaaaaccaucauugcu

SEQ ID NO: 113094 - RNA, 32 nt, Homo Sapiens
uaacuuuuguuuuaaccuuugcaccuucucag

SEQ ID NO: 113095 - RNA, 32 nt, Homo Sapiens
ugaacacuuuuuaaauguguguguugcuuauu

SEQ ID NO: 113096 - RNA, 32 nt, Homo Sapiens
gcugagggccgcggugugggugcgcggagcag

SEQ ID NO: 113097 - RNA, 32 nt, Homo Sapiens
acaagguguuuguccaucagugauaggguuug

SEQ ID NO: 113098 - RNA, 32 nt, Homo Sapiens
acccacccauucuuuuuccuggcacuuuccac

SEQ ID NO: 113099 - RNA, 29 nt, Homo Sapiens
ugcucccacccaccugacuccaaauaaag

SEQ ID NO: 113100 - RNA, 32 nt, Homo Sapiens
guucacauggaaaagguuauagcuuugccuug

SEQ ID NO: 113101 - RNA, 32 nt, Homo Sapiens
cggcggggcugguggggcggugcggaagcgag

SEQ ID NO: 113102 - RNA, 32 nt, Homo Sapiens
ucaagauuugcuuuuccauccuugucuucuga

SEQ ID NO: 113103 - RNA, 32 nt, Homo Sapiens
accaaauggaaauaaagcuuuuugaugcaaaa

SEQ ID NO: 113104 - RNA, 32 nt, Homo Sapiens
aggagccuccaagcucauggccuccuuaggag

SEQ ID NO: 113105 - RNA, 32 nt, Homo Sapiens
ccacagauggagaggaccaggagccaguggcc

SEQ ID NO: 113106 - RNA, 32 nt, Homo Sapiens
ccacaagccugccuccucccacccugccagcc

SEQ ID NO: 113107 - RNA, 32 nt, Homo Sapiens
cgggugugguggcgcaugccuguaaucccaac

SEQ ID NO: 113108 - RNA, 28 nt, Homo Sapiens
gacuacugaggucaucauuugaaugaau

SEQ ID NO: 113109 - RNA, 32 nt, Homo Sapiens
ugugugucugccugcuggcuugcuuaaguuau

SEQ ID NO: 113110 - RNA, 32 nt, Homo Sapiens
uaaguaaacaaauggguguggcuguguucuaa

SEQ ID NO: 113111 - RNA, 31 nt, Homo Sapiens
cucugaaagccccagacuuuuucaaguguag

SEQ ID NO: 113112 - RNA, 32 nt, Homo Sapiens
ggggaagcccuggcugcaccgccccucgcucc

SEQ ID NO: 113113 - RNA, 32 nt, Homo Sapiens
guaggaaccccggcccucgcucugcagcuggu

SEQ ID NO: 113114 - RNA, 32 nt, Homo Sapiens
aguaccucagaauauauagucagaaaucuaga

SEQ ID NO: 113115 - RNA, 32 nt, Homo Sapiens
guuuaggaucauaauugucucuacagucugau

SEQ ID NO: 113116 - RNA, 32 nt, Homo Sapiens
acugggccagcccugccuccagcccucaccuc

SEQ ID NO: 113117 - RNA, 31 nt, Homo Sapiens
ggggaaguggauacaucucagaauuggguuu

SEQ ID NO: 113118 - RNA, 32 nt, Homo Sapiens
gugacgcccucccagagccaaccucgggugac

SEQ ID NO: 113119 - RNA, 32 nt, Homo Sapiens
uucauguucauuuuauuuuuauuauuuuuuuu

SEQ ID NO: 113120 - RNA, 32 nt, Homo Sapiens
guucagggaaggaggggaaaagggaggugcag

SEQ ID NO: 113121 - RNA, 32 nt, Homo Sapiens
uuuggcuacuguaaguuuugcuccauggaaua

SEQ ID NO: 113122 - RNA, 32 nt, Homo Sapiens
cugcacccaucccccgccugaagccaccggcu

SEQ ID NO: 113123 - RNA, 32 nt, Homo Sapiens
aacugugccaggcccuggcccauagggccaua

SEQ ID NO: 113124 - RNA, 32 nt, Homo Sapiens
cuucgucucgcuccacuguuugcagagcgguu

SEQ ID NO: 113125 - RNA, 31 nt, Homo Sapiens
gcugcuacaaagaagacauguuuuagacaaa

SEQ ID NO: 113126 - RNA, 32 nt, Homo Sapiens
cccuacuuuccucuccugcuuucugccuguga

SEQ ID NO: 113127 - RNA, 32 nt, Homo Sapiens
auaaggauugaguuucuuuuuaugaugauuuu

SEQ ID NO: 113128 - RNA, 32 nt, Homo Sapiens
ccucuaaaaucuuaagcagaugcugaauccau

SEQ ID NO: 113129 - RNA, 32 nt, Homo Sapiens
agggauagccagcagcagcuccaggucugcgc

SEQ ID NO: 113130 - RNA, 28 nt, Homo Sapiens
agccugguggucuagauguguuuggaga

SEQ ID NO: 113131 - RNA, 32 nt, Homo Sapiens
cgaaacugacagugcuuccgggggugcgucag

SEQ ID NO: 113132 - RNA, 32 nt, Homo Sapiens
ugcaaaacuagaucuuugucaucuuuucagua

SEQ ID NO: 113133 - RNA, 32 nt, Homo Sapiens
gggaggacucaggagacuuuggacuccaggug

SEQ ID NO: 113134 - RNA, 32 nt, Homo Sapiens
acucauggaagacuuuuaaagaauaaccuuuu

SEQ ID NO: 113135 - RNA, 32 nt, Homo Sapiens
gugauuauucugaagauaaaugucuggcuaca

SEQ ID NO: 113136 - RNA, 32 nt, Homo Sapiens
ucugcaauuuaaaauuccugugaucuguaaaa

SEQ ID NO: 113137 - RNA, 32 nt, Homo Sapiens
uuuuuccccucuauucaucaaaccuuuaugua

SEQ ID NO: 113138 - RNA, 32 nt, Homo Sapiens
auuccuuaaaccacaaaagaaaacagugaaag

SEQ ID NO: 113139 - RNA, 32 nt, Homo Sapiens
uuuucaccaaaccauggauagaaucaauauuu

SEQ ID NO: 113140 - RNA, 32 nt, Homo Sapiens
ucguccuagagcacagggacucuugccaauga

SEQ ID NO: 113141 - RNA, 32 nt, Homo Sapiens
guaaggaaaaagaguguuaauaccaugaugca

SEQ ID NO: 113142 - RNA, 32 nt, Homo Sapiens
agagcugccccggccggcccccgucucuuucu

SEQ ID NO: 113143 - RNA, 32 nt, Homo Sapiens
uaaaucuugggguuauguguuuauuaaaaacu

SEQ ID NO: 113144 - RNA, 32 nt, Homo Sapiens
gaaauaagcugaaugaauacaugacugggaau

SEQ ID NO: 113145 - RNA, 32 nt, Homo Sapiens
uccaugcauacaccagagcucuguggaccaag

SEQ ID NO: 113146 - RNA, 32 nt, Homo Sapiens
cacuauucuggcaauaaauuuugguagacuaa

SEQ ID NO: 113147 - RNA, 32 nt, Homo Sapiens
guccuuaccuuaugacuguguuugaucauauc

SEQ ID NO: 113148 - RNA, 32 nt, Homo Sapiens
aaaggucugguguucaaguaaaaaugauguga

SEQ ID NO: 113149 - RNA, 32 nt, Homo Sapiens
guagguugauuucuuauguuuuguagacucau

SEQ ID NO: 113150 - RNA, 32 nt, Homo Sapiens
cuaggccugggcaggaacauauauuauuuauu

SEQ ID NO: 113151 - RNA, 31 nt, Homo Sapiens
ggcaccuccuggaaacaguccacuugggcgc

SEQ ID NO: 113152 - RNA, 32 nt, Homo Sapiens
gguggacuugggaacaggcuguguguuugucc

SEQ ID NO: 113153 - RNA, 32 nt, Homo Sapiens
uucugagagguccagcagcaagcagggcaguu

SEQ ID NO: 113154 - RNA, 32 nt, Homo Sapiens
ggugggaggguggguacaggccagggauauuc

SEQ ID NO: 113155 - RNA, 32 nt, Homo Sapiens
auauuuguccccuccuauguccuguuucuguc

SEQ ID NO: 113156 - RNA, 32 nt, Homo Sapiens
agcuggccugguggugacaguggccuugcuuc

SEQ ID NO: 113157 - RNA, 32 nt, Homo Sapiens
gagugaagcuggaagauucugguguccacgug

SEQ ID NO: 113158 - RNA, 32 nt, Homo Sapiens
gguucucgcuacuucaaaccaagggucuugag

SEQ ID NO: 113159 - RNA, 32 nt, Homo Sapiens
augacuugauaaauagaacauguuuuaagaag

SEQ ID NO: 113160 - RNA, 32 nt, Homo Sapiens
ugcuccggccgccgcugucccuuucaucaaag

SEQ ID NO: 113161 - RNA, 32 nt, Homo Sapiens
aacuugacuuaagaauaccacuuuuuagaaaa

SEQ ID NO: 113162 - RNA, 32 nt, Homo Sapiens
uacuaaguacccuugggguggugcugggucau

SEQ ID NO: 113163 - RNA, 32 nt, Homo Sapiens
uccuaggugcugggauucaguccccaaacaca

SEQ ID NO: 113164 - RNA, 32 nt, Homo Sapiens
cccucacaauuuauuuccuccucccgugccag

SEQ ID NO: 113165 - RNA, 32 nt, Homo Sapiens
accaggucugguuuuugaaauucuuucuccgu

SEQ ID NO: 113166 - RNA, 32 nt, Homo Sapiens
agccaguaucugugucgccgccgcccgcggcg

SEQ ID NO: 113167 - RNA, 32 nt, Homo Sapiens
uggcggcgggugugcgccgagccccggcccag

SEQ ID NO: 113168 - RNA, 32 nt, Homo Sapiens
gaggagguccaggccuguguugccagagcugg

SEQ ID NO: 113169 - RNA, 32 nt, Homo Sapiens
gaucccuccgcacuaacaguguucucaguggg

SEQ ID NO: 113170 - RNA, 32 nt, Homo Sapiens
agucacgucccggcgcuagcccagcccgaccc

SEQ ID NO: 113171 - RNA, 32 nt, Homo Sapiens
uaaaucucuaucacauaaggauuauauauuug

SEQ ID NO: 113172 - RNA, 32 nt, Homo Sapiens
gucugggaacagagccacgaaucugccuuuga

SEQ ID NO: 113173 - RNA, 32 nt, Homo Sapiens
ucaugugagacuucccucuggaugaccagaga

SEQ ID NO: 113174 - RNA, 32 nt, Homo Sapiens
ucuauuacuuuuuaaaugguuuuaauuuguau

SEQ ID NO: 113175 - RNA, 32 nt, Homo Sapiens
cccuguaaaauggagguggaaagacaagcuca

SEQ ID NO: 113176 - RNA, 32 nt, Homo Sapiens
ccagacuuuccgggcgcccaccaggcucccgg

SEQ ID NO: 113177 - RNA, 32 nt, Homo Sapiens
acgcauuuaaaauuauuucaugagucuaguag

SEQ ID NO: 113178 - RNA, 32 nt, Homo Sapiens
ggcuuauauggccuggcccagggcgccauggc

SEQ ID NO: 113179 - RNA, 32 nt, Homo Sapiens
uucacaauuuucaguaaagggauugcauauga

SEQ ID NO: 113180 - RNA, 32 nt, Homo Sapiens
gacuuuguucuuccuucacaaccuucugagcc

SEQ ID NO: 113181 - RNA, 30 nt, Homo Sapiens
ucccagaguuugcugccgccgccgccgcug

SEQ ID NO: 113182 - RNA, 32 nt, Homo Sapiens
cucagauuuaugaaaauaauuacuggaucgga

SEQ ID NO: 113183 - RNA, 31 nt, Homo Sapiens
caggggugaaacaugggcucugagguuggcu

SEQ ID NO: 113184 - RNA, 32 nt, Homo Sapiens
gauucugcuguaauguaacuucggagccagcu

SEQ ID NO: 113185 - RNA, 32 nt, Homo Sapiens
cccaggaccccgcucccauucugcccuugcuc

SEQ ID NO: 113186 - RNA, 32 nt, Homo Sapiens
aacauaaauauguuuacuugugauuuagcuuu

SEQ ID NO: 113187 - RNA, 32 nt, Homo Sapiens
auuacuagauauuaaaaguuaagcaaauagau

SEQ ID NO: 113188 - RNA, 32 nt, Homo Sapiens
gugggcccggggccuggcaggcucucgguggg

SEQ ID NO: 113189 - RNA, 32 nt, Homo Sapiens
caguuguauuuuugugaauauuuuaauacauc

SEQ ID NO: 113190 - RNA, 32 nt, Homo Sapiens
uauuuaaucuuguuaaauuauauaagcagaaa

SEQ ID NO: 113191 - RNA, 32 nt, Homo Sapiens
gacgccggcucggcgcugccgcggcucuaugg

SEQ ID NO: 113192 - RNA, 32 nt, Homo Sapiens
aauuaauguaauuauguauagaauuaagacca

SEQ ID NO: 113193 - RNA, 32 nt, Homo Sapiens
uuagcaggcugauguccugcaccauuauguuu

SEQ ID NO: 113194 - RNA, 32 nt, Homo Sapiens
uagauagacugucuucaagcucacugauauuu

SEQ ID NO: 113195 - RNA, 32 nt, Homo Sapiens
uaucucuguugcuuucugggguccuaggaaau

SEQ ID NO: 113196 - RNA, 32 nt, Homo Sapiens
gggugggacuuccagagauagggauggguugg

SEQ ID NO: 113197 - RNA, 32 nt, Homo Sapiens
cuuaauucugacacuaccuuucugggaaaugu

SEQ ID NO: 113198 - RNA, 32 nt, Homo Sapiens
uugcaaagacugaguguucaaacuacuguaca

SEQ ID NO: 113199 - RNA, 32 nt, Homo Sapiens
acuauguaaaaagcucuaagcucuagagucua

SEQ ID NO: 113200 - RNA, 32 nt, Homo Sapiens
cuugcuucagaauugaaauggaagugggggug

SEQ ID NO: 113201 - RNA, 32 nt, Homo Sapiens
guacugcacaccauuucuuucaucaugcgauu

SEQ ID NO: 113202 - RNA, 32 nt, Homo Sapiens
gaauggcuuggggucuccagcgauaaagucaa

SEQ ID NO: 113203 - RNA, 32 nt, Homo Sapiens
aguuuuuguuugaauaucuuuuucucaauucu

SEQ ID NO: 113204 - RNA, 32 nt, Homo Sapiens
gagacuucaaggacucaguuugguuccaccca

SEQ ID NO: 113205 - RNA, 32 nt, Homo Sapiens
uaaaaaucuaguggguugaccuuuaaaugcaa

SEQ ID NO: 113206 - RNA, 30 nt, Homo Sapiens
ccuuacagggguggcauguaucaaauggca

SEQ ID NO: 113207 - RNA, 32 nt, Homo Sapiens
ccaccacaaccuggcugugcgucugucccugu

SEQ ID NO: 113208 - RNA, 32 nt, Homo Sapiens
ggccccucccacccuugcccagccccugcuug

SEQ ID NO: 113209 - RNA, 32 nt, Homo Sapiens
ccacaggugauuuaguaaauuuagacaguagu

SEQ ID NO: 113210 - RNA, 32 nt, Homo Sapiens
gaggggcagauaagagcacugcugaccaucug

SEQ ID NO: 113211 - RNA, 32 nt, Homo Sapiens
gucuuaaauuugauauaacaucuccuaacuug

SEQ ID NO: 113212 - RNA, 32 nt, Homo Sapiens
gccagaauguuauggaacaguucaauccuggg

SEQ ID NO: 113213 - RNA, 32 nt, Homo Sapiens
caaaagccauucagugcugguuuuaagagaac

SEQ ID NO: 113214 - RNA, 32 nt, Homo Sapiens
gccccaugggccgucacaaaggcuugaucacu

SEQ ID NO: 113215 - RNA, 32 nt, Homo Sapiens
cagggaaugcacgcugaguccuagacacagag

SEQ ID NO: 113216 - RNA, 32 nt, Homo Sapiens
ugggcgccguggugucgacgggccccgagccu

SEQ ID NO: 113217 - RNA, 32 nt, Homo Sapiens
uuuaaugucuucugcaccaguccuuuuaugac

SEQ ID NO: 113218 - RNA, 32 nt, Homo Sapiens
caggaaccaucgagacaccauggaagcauugg

SEQ ID NO: 113219 - RNA, 32 nt, Homo Sapiens
gagaugccaggagacccuucccugcccaugga

SEQ ID NO: 113220 - RNA, 32 nt, Homo Sapiens
cggcgccgcccgggucccugcagcgcuuccuc

SEQ ID NO: 113221 - RNA, 32 nt, Homo Sapiens
cuaauuugauaaacaacauggcuugugugaaa

SEQ ID NO: 113222 - RNA, 32 nt, Homo Sapiens
caguuuuauuguuuugaggucaauguucuuuu

SEQ ID NO: 113223 - RNA, 32 nt, Homo Sapiens
ccugccccuggcggcccccagcugccccaugc

SEQ ID NO: 113224 - RNA, 32 nt, Homo Sapiens
gguaggaugaauugaucauuauaaagauuuaa

SEQ ID NO: 113225 - RNA, 32 nt, Homo Sapiens
ugaaaggguugaauuugggcuccaucaguaau

SEQ ID NO: 113226 - RNA, 32 nt, Homo Sapiens
uuuucaugaaguucuuagacuagcugaauuug

SEQ ID NO: 113227 - RNA, 32 nt, Homo Sapiens
agacgaugucauuucuguauuccucuaaggca

SEQ ID NO: 113228 - RNA, 32 nt, Homo Sapiens
ggaagauacauaaaagugcuuugcauugaauu

SEQ ID NO: 113229 - RNA, 32 nt, Homo Sapiens
gugccggcccagguggcaggcgcgcccguugg

SEQ ID NO: 113230 - RNA, 32 nt, Homo Sapiens
acaccagaugaccacggcagggcccgugcugg

SEQ ID NO: 113231 - RNA, 32 nt, Homo Sapiens
uauauguuuuuuucuuuuuuaggaagauauga

SEQ ID NO: 113232 - RNA, 32 nt, Homo Sapiens
cugcgccuccacguggauuugguagagaaacc

SEQ ID NO: 113233 - RNA, 32 nt, Homo Sapiens
guccuccccuuuuuccucucccugacaauaaa

SEQ ID NO: 113234 - RNA, 32 nt, Homo Sapiens
uuggggccccacagcccuccagcucaacccac

SEQ ID NO: 113235 - RNA, 32 nt, Homo Sapiens
accagccuggggaacauagugagacccuuucu

SEQ ID NO: 113236 - RNA, 32 nt, Homo Sapiens
aagcgguccugcugggguggguggguguuagu

SEQ ID NO: 113237 - RNA, 32 nt, Homo Sapiens
agagcucugugccuguguguccagcccuggag

SEQ ID NO: 113238 - RNA, 32 nt, Homo Sapiens
ucuuguggcagcggcccuccccugggagaacc

SEQ ID NO: 113239 - RNA, 32 nt, Homo Sapiens
aaagagguuuggagagcuauagaagcuggguu

SEQ ID NO: 113240 - RNA, 32 nt, Homo Sapiens
auggaaaugaguagauuuaacuuuucaaucag

SEQ ID NO: 113241 - RNA, 32 nt, Homo Sapiens
agcuuuuugcaagaggagggggaccagcacca

SEQ ID NO: 113242 - RNA, 32 nt, Homo Sapiens
gcuuagggcagcuucuugcugcucagcagacc

SEQ ID NO: 113243 - RNA, 32 nt, Homo Sapiens
gccugcggggucgcucaaggacacccuccugg

SEQ ID NO: 113244 - RNA, 32 nt, Homo Sapiens
uaaauguuuuuggccgggcgugguggcucaug

SEQ ID NO: 113245 - RNA, 32 nt, Homo Sapiens
gucggggcaaacaaaauuaugugaauuguguu

SEQ ID NO: 113246 - RNA, 32 nt, Homo Sapiens
cagccaugggaaucccacggaccucucgcgug

SEQ ID NO: 113247 - RNA, 30 nt, Homo Sapiens
ccaggaggcaggcagugcggggugcccagg

SEQ ID NO: 113248 - RNA, 32 nt, Homo Sapiens
ucugccccugucagggcuagguccucagagua

SEQ ID NO: 113249 - RNA, 32 nt, Homo Sapiens
uaagagagggcccuuccccugccaggacccac

SEQ ID NO: 113250 - RNA, 32 nt, Homo Sapiens
uccuggacucugggcuuaguugaacagcuggg

SEQ ID NO: 113251 - RNA, 32 nt, Homo Sapiens
cugccuggccccaggcugcuuccacugucuca

SEQ ID NO: 113252 - RNA, 32 nt, Homo Sapiens
uaggaaauuuuuuuuucuuccaguuuagaauc

SEQ ID NO: 113253 - RNA, 32 nt, Homo Sapiens
gcggcgcgauacgccaguggggcgcgcuuaac

SEQ ID NO: 113254 - RNA, 32 nt, Homo Sapiens
gagaaucugucagccuuggagggaagggaucc

SEQ ID NO: 113255 - RNA, 32 nt, Homo Sapiens
cuguaccacauuuauuucuauauucauuuugu

SEQ ID NO: 113256 - RNA, 32 nt, Homo Sapiens
uccgcauuucuucuccuucccggaaauuuguu

SEQ ID NO: 113257 - RNA, 32 nt, Homo Sapiens
ugucuccuggaaugcucccaccucaaguggag

SEQ ID NO: 113258 - RNA, 32 nt, Homo Sapiens
ggaguuccagaccagccugggcaacaugcgag

SEQ ID NO: 113259 - RNA, 32 nt, Homo Sapiens
gacuccggcggaagaggacaaggcagaaugca

SEQ ID NO: 113260 - RNA, 29 nt, Homo Sapiens
acaacgucaggauucagagguaggcucug

SEQ ID NO: 113261 - RNA, 32 nt, Homo Sapiens
agugaccucacagaccagcucagagauguuac

SEQ ID NO: 113262 - RNA, 30 nt, Homo Sapiens
gaagacagaguaguugaugaguuagauaac

SEQ ID NO: 113263 - RNA, 32 nt, Homo Sapiens
ggcacugcuguguggaacgaguucuuggaaug

SEQ ID NO: 113264 - RNA, 32 nt, Homo Sapiens
agcaacauuuuugguuuucccucccccuucua

SEQ ID NO: 113265 - RNA, 30 nt, Homo Sapiens
ccucccauagccccgaacgcccugacggga

SEQ ID NO: 113266 - RNA, 32 nt, Homo Sapiens
agauccuuaaaauaaacucuugggcauccccc

SEQ ID NO: 113267 - RNA, 32 nt, Homo Sapiens
aacuuagcugggugugguggcaugugccugga

SEQ ID NO: 113268 - RNA, 32 nt, Homo Sapiens
cgaggccugaacucagcccggagaccgcgccc

SEQ ID NO: 113269 - RNA, 32 nt, Homo Sapiens
uccauuuuauacaaucacugauacagucuaug

SEQ ID NO: 113270 - RNA, 32 nt, Homo Sapiens
ggaggcccgaacugauccgcggcggccggaga

SEQ ID NO: 113271 - RNA, 32 nt, Homo Sapiens
gcaugcuccgugacuggggaucuuugguagcc

SEQ ID NO: 113272 - RNA, 32 nt, Homo Sapiens
agcuaaaaauaaaacaucauaaaucuucuuau

SEQ ID NO: 113273 - RNA, 32 nt, Homo Sapiens
ucucuaaagggaaccuacuuuuuuauauuaaa

SEQ ID NO: 113274 - RNA, 32 nt, Homo Sapiens
ccaaagguaggaagaaagcagagggaaauauu

SEQ ID NO: 113275 - RNA, 32 nt, Homo Sapiens
auuagcuuuuuaaguuccuuccaaauauguua

SEQ ID NO: 113276 - RNA, 32 nt, Homo Sapiens
gacggcggggacaaggggcggcuggucggagu

SEQ ID NO: 113277 - RNA, 32 nt, Homo Sapiens
uuuuauuuaauugaggcaggggcuugcccuuu

SEQ ID NO: 113278 - RNA, 32 nt, Homo Sapiens
ugggcagugacgggguucgggugaccauggac

SEQ ID NO: 113279 - RNA, 32 nt, Homo Sapiens
ggagggucauauuauuuucggcuuuauuuaug

SEQ ID NO: 113280 - RNA, 32 nt, Homo Sapiens
ggugauacaguggguaccaagcuccucugcuc

SEQ ID NO: 113281 - RNA, 32 nt, Homo Sapiens
ucucacccccacuuccuuccagucauacacag

SEQ ID NO: 113282 - RNA, 32 nt, Homo Sapiens
uuguggggucagcagagcugccaucugcccac

SEQ ID NO: 113283 - RNA, 24 nt, Homo Sapiens
ugagcuauggcaaggaggauaugg

SEQ ID NO: 113284 - RNA, 32 nt, Homo Sapiens
aauauaaaaaauuuaaauuguccugauucuau

SEQ ID NO: 113285 - RNA, 32 nt, Homo Sapiens
cugcacaaguguguggcaaggugugucugagg

SEQ ID NO: 113286 - RNA, 32 nt, Homo Sapiens
uacccgguccucuuuucuucaauacaaaauga

SEQ ID NO: 113287 - RNA, 32 nt, Homo Sapiens
uuguagaauuguauuaguauucuucauuaucc

SEQ ID NO: 113288 - RNA, 32 nt, Homo Sapiens
uuuucagugcagaaauuaaaaguaaguauaaa

SEQ ID NO: 113289 - RNA, 32 nt, Homo Sapiens
gcucuggagugcucuugauugaaacagaaagg

SEQ ID NO: 113290 - RNA, 32 nt, Homo Sapiens
aagcaaaggcugugagaagcaguugggaguuu

SEQ ID NO: 113291 - RNA, 32 nt, Homo Sapiens
gauggccaaggagccagagcguggaggcggac

SEQ ID NO: 113292 - RNA, 32 nt, Homo Sapiens
gucgcagcccgcggccccgaccucugacccgc

SEQ ID NO: 113293 - RNA, 32 nt, Homo Sapiens
caggguccacuuuacuuccuugcuaucuccac

SEQ ID NO: 113294 - RNA, 32 nt, Homo Sapiens
cggaaagugcguauguuaugcauaaaagugga

SEQ ID NO: 113295 - RNA, 32 nt, Homo Sapiens
uuauucauuuaaaugccuggaacugacuucuu

SEQ ID NO: 113296 - RNA, 32 nt, Homo Sapiens
aaugauccacuaacuuuuuuuuucuuggccca

SEQ ID NO: 113297 - RNA, 32 nt, Homo Sapiens
agccaguuauuaggaagagcaagcucaccaca

SEQ ID NO: 113298 - RNA, 32 nt, Homo Sapiens
gggacacaaagguaauaaaaaugccugcccug

SEQ ID NO: 113299 - RNA, 32 nt, Homo Sapiens
cuggaaccccacccuuucuccuccuccuuccu

SEQ ID NO: 113300 - RNA, 32 nt, Homo Sapiens
uggaaauacggauacuucagccaauuucaaug

SEQ ID NO: 113301 - RNA, 32 nt, Homo Sapiens
aagugccagagagcuucuugauccaacugaga

SEQ ID NO: 113302 - RNA, 32 nt, Homo Sapiens
gagaggggaguggauucuugcugcugguauga

SEQ ID NO: 113303 - RNA, 31 nt, Homo Sapiens
ugaaaacagcacugccuuccgcgcugcccca

SEQ ID NO: 113304 - RNA, 32 nt, Homo Sapiens
ugguauccaagcuuaaauuucuugcuauacag

SEQ ID NO: 113305 - RNA, 32 nt, Homo Sapiens
agccccagccccagcucccuccggccgcagaa

SEQ ID NO: 113306 - RNA, 32 nt, Homo Sapiens
gccuggcuuaguggggacccagggcaucagac

SEQ ID NO: 113307 - RNA, 32 nt, Homo Sapiens
gugagaaaaaaguuuguuuacaggagcagaaa

SEQ ID NO: 113308 - RNA, 32 nt, Homo Sapiens
gugucguuuugggagccuggaaguguuacugg

SEQ ID NO: 113309 - RNA, 32 nt, Homo Sapiens
auaaaaauauccaccugucuuguaucauggac

SEQ ID NO: 113310 - RNA, 32 nt, Homo Sapiens
uuaucugcuugccuuuuuuagagaguagcagu

SEQ ID NO: 113311 - RNA, 32 nt, Homo Sapiens
guuuggaagaacucaguagguaguuuccaggu

SEQ ID NO: 113312 - RNA, 32 nt, Homo Sapiens
guuggccacucccacacuuccccucccccagg

SEQ ID NO: 113313 - RNA, 32 nt, Homo Sapiens
ccagagcccacuuuuuuuucuuuuuuugaaau

SEQ ID NO: 113314 - RNA, 32 nt, Homo Sapiens
gaguccauuauuuccucuggcuuccucaaauu

SEQ ID NO: 113315 - RNA, 32 nt, Homo Sapiens
cccgcagggccggcugccccaggagagcccug

SEQ ID NO: 113316 - RNA, 32 nt, Homo Sapiens
cuuucucuagaguaaaggcuguccugacggug

SEQ ID NO: 113317 - RNA, 32 nt, Homo Sapiens
agugcuuagucuuuuuucuacuugcuuuucca

SEQ ID NO: 113318 - RNA, 32 nt, Homo Sapiens
gugagggaaccuggaggcucugucaccuggcc

SEQ ID NO: 113319 - RNA, 32 nt, Homo Sapiens
cauacguuugcuuuuucagaaacucuagcauu

SEQ ID NO: 113320 - RNA, 32 nt, Homo Sapiens
auccccgagcccccucgccguccccgacagcc

SEQ ID NO: 113321 - RNA, 32 nt, Homo Sapiens
cucgucuuuuucuugcaauauuuuuugggggg

SEQ ID NO: 113322 - RNA, 32 nt, Homo Sapiens
gguuucauuuuaauaccuuguugauuucacca

SEQ ID NO: 113323 - RNA, 32 nt, Homo Sapiens
aucaacagccgggaaggcugagcgcgugugag

SEQ ID NO: 113324 - RNA, 32 nt, Homo Sapiens
agagaccuagacacaguggacaauggcauccu

SEQ ID NO: 113325 - RNA, 32 nt, Homo Sapiens
guuuauaccuggguggccagggccucccucuc

SEQ ID NO: 113326 - RNA, 32 nt, Homo Sapiens
ugguuuuaauuucaaaauauuugucauacaag

SEQ ID NO: 113327 - RNA, 32 nt, Homo Sapiens
agucaucugaauccuugguucucuuuauacuc

SEQ ID NO: 113328 - RNA, 32 nt, Homo Sapiens
gaacgagcuauuauuugaauguuaauuuaaga

SEQ ID NO: 113329 - RNA, 32 nt, Homo Sapiens
aaacagaagagauaaaaacuuuuccaugcaaa

SEQ ID NO: 113330 - RNA, 32 nt, Homo Sapiens
ggaagguagaccgggaaggggaggcgggcggg

SEQ ID NO: 113331 - RNA, 32 nt, Homo Sapiens
uugcugagggugccugcgcagcugcgacggcu

SEQ ID NO: 113332 - RNA, 32 nt, Homo Sapiens
uggcaggcaaagucaguacaugcugaaaaugg

SEQ ID NO: 113333 - RNA, 32 nt, Homo Sapiens
uuuguuggcggagaagauuacaauggcuauua

SEQ ID NO: 113334 - RNA, 32 nt, Homo Sapiens
cauuaggaaacaaaaagaauuuagaaggaaug

SEQ ID NO: 113335 - RNA, 32 nt, Homo Sapiens
uagacugccauucucaucagcggccgucaggc

SEQ ID NO: 113336 - RNA, 32 nt, Homo Sapiens
acaguguguacaaaagacuugcuguuuuaaua

SEQ ID NO: 113337 - RNA, 32 nt, Homo Sapiens
ccuguggguagucggcuggugucccugucgug

SEQ ID NO: 113338 - RNA, 32 nt, Homo Sapiens
cggugaagcgcggagggcggcgcgggcaccgg

SEQ ID NO: 113339 - RNA, 32 nt, Homo Sapiens
ccucacuaccgccagacaccccgguggaagca

SEQ ID NO: 113340 - RNA, 32 nt, Homo Sapiens
cccucccccaaagcccggaucccgagaaagau

SEQ ID NO: 113341 - RNA, 32 nt, Homo Sapiens
ccauucuagacaaaguauuaauccuuagugaa

SEQ ID NO: 113342 - RNA, 32 nt, Homo Sapiens
cuuaccuucuauuuucgaguuucauuuauauu

SEQ ID NO: 113343 - RNA, 31 nt, Homo Sapiens
uggucagcuggggucgcucucgggugguugg

SEQ ID NO: 113344 - RNA, 32 nt, Homo Sapiens
uggugugcaccuguagucccagcucuucagga

SEQ ID NO: 113345 - RNA, 32 nt, Homo Sapiens
agcagccgggacacggacacaggggacaauac

SEQ ID NO: 113346 - RNA, 32 nt, Homo Sapiens
caagcccaggccgggggcgguggcucacaccu

SEQ ID NO: 113347 - RNA, 32 nt, Homo Sapiens
ucucucaggcucuucaggauccaaguccguag

SEQ ID NO: 113348 - RNA, 32 nt, Homo Sapiens
cccgcucugugcuaccugcggcccggcucucc

SEQ ID NO: 113349 - RNA, 32 nt, Homo Sapiens
guuuuaaguccucccugcccucucuccucucc

SEQ ID NO: 113350 - RNA, 32 nt, Homo Sapiens
augauguauguggcaguugcugucugcaguuu

SEQ ID NO: 113351 - RNA, 32 nt, Homo Sapiens
auagaaacccaccuuuuauuuaaguaugaagc

SEQ ID NO: 113352 - RNA, 32 nt, Homo Sapiens
uucucucugcaccucucuggucaggccuaguc

SEQ ID NO: 113353 - RNA, 32 nt, Homo Sapiens
ccacagcccggccccaggcccaggucauggug

SEQ ID NO: 113354 - RNA, 32 nt, Homo Sapiens
uucucguggaguacaagccggacugugcugag

SEQ ID NO: 113355 - RNA, 32 nt, Homo Sapiens
aaaggaacuggcaugcacacgugcccagcagg

SEQ ID NO: 113356 - RNA, 32 nt, Homo Sapiens
cucuacccacggcuaaggucuucauuucccuc

SEQ ID NO: 113357 - RNA, 32 nt, Homo Sapiens
agcauacucuaggcuguugucccuuuaaaacu

SEQ ID NO: 113358 - RNA, 32 nt, Homo Sapiens
aaaacaaaacaucuuuguguugugaacaaagg

SEQ ID NO: 113359 - RNA, 32 nt, Homo Sapiens
aggcagugccgccagcagacaucguuuucuca

SEQ ID NO: 113360 - RNA, 32 nt, Homo Sapiens
auugugagaugcacauaacaauguuuaggaua

SEQ ID NO: 113361 - RNA, 32 nt, Homo Sapiens
uggaagugaagcugccgacugugcaugacugc

SEQ ID NO: 113362 - RNA, 32 nt, Homo Sapiens
agugaguggcacagucucggcucacugcaacc

SEQ ID NO: 113363 - RNA, 32 nt, Homo Sapiens
cuauugcugcccaccuccuccccuccccacuu

SEQ ID NO: 113364 - RNA, 31 nt, Homo Sapiens
uccccugcgaccgcccugccccccgucaccg

SEQ ID NO: 113365 - RNA, 32 nt, Homo Sapiens
ugggugauguccuuggcugcugccgucagagg

SEQ ID NO: 113366 - RNA, 32 nt, Homo Sapiens
uuaaucauuauaccucuuuauccaucaaagug

SEQ ID NO: 113367 - RNA, 32 nt, Homo Sapiens
aaccacugcccucuccuucuuucuccuucaag

SEQ ID NO: 113368 - RNA, 32 nt, Homo Sapiens
guggaaagccucgucagagcagugcguggcag

SEQ ID NO: 113369 - RNA, 32 nt, Homo Sapiens
uuaaagaguauuugaauauauuuuagaaucaa

SEQ ID NO: 113370 - RNA, 32 nt, Homo Sapiens
aaaugaaaccaucaauaaagacuggguugcca

SEQ ID NO: 113371 - RNA, 32 nt, Homo Sapiens
cugcggccggaggaggccauggagcccgagua

SEQ ID NO: 113372 - RNA, 32 nt, Homo Sapiens
cuuuuugagagaaccuuauauuuuauauaguc

SEQ ID NO: 113373 - RNA, 32 nt, Homo Sapiens
aguuuggguugcucauacaauaaacagauuga

SEQ ID NO: 113374 - RNA, 32 nt, Homo Sapiens
uaugcuaaacaaaaaaccaaacugaaugugac

SEQ ID NO: 113375 - RNA, 32 nt, Homo Sapiens
cagcacuuagagaggccauggugggagaaucu

SEQ ID NO: 113376 - RNA, 32 nt, Homo Sapiens
gccaggccagugccgccuacguggagacuguc

SEQ ID NO: 113377 - RNA, 32 nt, Homo Sapiens
uuuuauuguccauuuucugugaggauaugcaa

SEQ ID NO: 113378 - RNA, 32 nt, Homo Sapiens
uuaaaucccccuccccgacaacagacuaacag

SEQ ID NO: 113379 - RNA, 32 nt, Homo Sapiens
ucuuccugagggcagagcucuuaccgcccacu

SEQ ID NO: 113380 - RNA, 32 nt, Homo Sapiens
gagcuugcuucuuggcugaauggucugcuggg

SEQ ID NO: 113381 - RNA, 32 nt, Homo Sapiens
cguaucaauaccuuuauagacaaauacgaaca

SEQ ID NO: 113382 - RNA, 32 nt, Homo Sapiens
cuuccugcagcugagaucuaugcaggccaucc

SEQ ID NO: 113383 - RNA, 32 nt, Homo Sapiens
gauucccgcggggcgccgggcugcuauucuuc

SEQ ID NO: 113384 - RNA, 31 nt, Homo Sapiens
ccugagcugccgguggguuuuaaguccugca

SEQ ID NO: 113385 - RNA, 32 nt, Homo Sapiens
cggaggcucgggcuccaccgacccuccuccca

SEQ ID NO: 113386 - RNA, 32 nt, Homo Sapiens
agauaaaacacuuucuauaaggaaguuggaug

SEQ ID NO: 113387 - RNA, 32 nt, Homo Sapiens
guuaagaaaaauuuauccuuguaaguaucuuc

SEQ ID NO: 113388 - RNA, 32 nt, Homo Sapiens
uacacgcguccacagcagcacuggcucaccac

SEQ ID NO: 113389 - RNA, 32 nt, Homo Sapiens
uucagauauuuucugauguggagauauguuau

SEQ ID NO: 113390 - RNA, 32 nt, Homo Sapiens
guugaaacuccagcagcgccggacccgggaag

SEQ ID NO: 113391 - RNA, 32 nt, Homo Sapiens
cuccccaggccucugaggucugcgaguuuucc

SEQ ID NO: 113392 - RNA, 32 nt, Homo Sapiens
gaagcauucuaaaaauauagcugaugcuguua

SEQ ID NO: 113393 - RNA, 32 nt, Homo Sapiens
ucggggcuuccucuccucugauggggcuccac

SEQ ID NO: 113394 - RNA, 32 nt, Homo Sapiens
cugcugucccccaagagggugcuucgagggug

SEQ ID NO: 113395 - RNA, 32 nt, Homo Sapiens
ccuggggaugggccggguugggggguggguug

SEQ ID NO: 113396 - RNA, 32 nt, Homo Sapiens
guaaauggccucuuacuaauguaaaaugauuu

SEQ ID NO: 113397 - RNA, 32 nt, Homo Sapiens
ugcucacugaggaaagcagagggguuccugcc

SEQ ID NO: 113398 - RNA, 32 nt, Homo Sapiens
uuccaaauaugccauuugauaaauuacauaag

SEQ ID NO: 113399 - RNA, 32 nt, Homo Sapiens
caaaagauaauuacuaugaucuguaggaaucu

SEQ ID NO: 113400 - RNA, 32 nt, Homo Sapiens
cuguggcgcacuugguugggguucuuugggua

SEQ ID NO: 113401 - RNA, 32 nt, Homo Sapiens
ccuccugcuccagccccacuucugaaaguauc

SEQ ID NO: 113402 - RNA, 32 nt, Homo Sapiens
accugcugccuuggggacccuggacgugccga

SEQ ID NO: 113403 - RNA, 32 nt, Homo Sapiens
aaaaugcagauuuugucaaaucaaauaaagau

SEQ ID NO: 113404 - RNA, 32 nt, Homo Sapiens
agaaugacuuguuuuuccauaagggacaugag

SEQ ID NO: 113405 - RNA, 32 nt, Homo Sapiens
cagauuccgucacagagaagugguccaucugu

SEQ ID NO: 113406 - RNA, 32 nt, Homo Sapiens
agcccuguugcgcuuccggcgccugcuggugg

SEQ ID NO: 113407 - RNA, 32 nt, Homo Sapiens
ccauugcaggaauaauauguuaaaaaccaaug

SEQ ID NO: 113408 - RNA, 32 nt, Homo Sapiens
gcgugguuguggugcuguaugugaacgcaugc

SEQ ID NO: 113409 - RNA, 32 nt, Homo Sapiens
aaucugaagccacuuaaaagcuacuguuuggc

SEQ ID NO: 113410 - RNA, 32 nt, Homo Sapiens
cagcgccgugagcgccagcagcgcgauggccg

SEQ ID NO: 113411 - RNA, 32 nt, Homo Sapiens
guacuuuuuuaaaaggcagagcauucuuuuuu

SEQ ID NO: 113412 - RNA, 32 nt, Homo Sapiens
uggaucucaguucgcgcccaccccgcaggcgc

SEQ ID NO: 113413 - RNA, 32 nt, Homo Sapiens
gcacgagcugggugcgguccgcgcagcugcag

SEQ ID NO: 113414 - RNA, 32 nt, Homo Sapiens
cgggaggcggcaccccggugcuccccgcggcu

SEQ ID NO: 113415 - RNA, 32 nt, Homo Sapiens
cagacacuucggggcuuugaagagcacagcuc

SEQ ID NO: 113416 - RNA, 32 nt, Homo Sapiens
gugaaacaggugguaauuuuccuucucggccc

SEQ ID NO: 113417 - RNA, 32 nt, Homo Sapiens
ucauggcagccaaaagcagaggagcuugcagg

SEQ ID NO: 113418 - RNA, 32 nt, Homo Sapiens
cgucgaccuccagccgcugagcgccgcggccc

SEQ ID NO: 113419 - RNA, 32 nt, Homo Sapiens
uaaaauagaaaauuaugaaugaaauuuaucua

SEQ ID NO: 113420 - RNA, 32 nt, Homo Sapiens
gaacuggcagcucagcugcagaugcuuuucuc

SEQ ID NO: 113421 - RNA, 32 nt, Homo Sapiens
gcucucuucucuccccaggacccaggcugugg

SEQ ID NO: 113422 - RNA, 32 nt, Homo Sapiens
uagguagguagguuuuaaaaauacuaguuaaa

SEQ ID NO: 113423 - RNA, 32 nt, Homo Sapiens
accucgggcucggcauaaagcggccgccggcc

SEQ ID NO: 113424 - RNA, 32 nt, Homo Sapiens
auaauuguuagaaauucagaaugacaaguuuc

SEQ ID NO: 113425 - RNA, 28 nt, Homo Sapiens
aagaugggucaaagucagaguggugguc

SEQ ID NO: 113426 - RNA, 32 nt, Homo Sapiens
ugggccgccugccugcugaugugggcucuagg

SEQ ID NO: 113427 - RNA, 32 nt, Homo Sapiens
cuccgcccgacacagcgucuccagggguuuuc

SEQ ID NO: 113428 - RNA, 32 nt, Homo Sapiens
uuaaggacugacugaggcaguuugaggauuag

SEQ ID NO: 113429 - RNA, 32 nt, Homo Sapiens
guagccgaagcgcuuccagcauccucuguuca

SEQ ID NO: 113430 - RNA, 32 nt, Homo Sapiens
agucggagaagcauagggacuaggcccaaucc

SEQ ID NO: 113431 - RNA, 32 nt, Homo Sapiens
uuaaaucguauuauuuuuuucuuaacagaaau

SEQ ID NO: 113432 - RNA, 32 nt, Homo Sapiens
ucaccuuugaaaaaccagacaggaugcuucug

SEQ ID NO: 113433 - RNA, 32 nt, Homo Sapiens
ugccaucucuacaggcacccaucagaaaaagc

SEQ ID NO: 113434 - RNA, 32 nt, Homo Sapiens
uggcuacccaagucgaguauauacaggaauac

SEQ ID NO: 113435 - RNA, 32 nt, Homo Sapiens
cauucugcagaaaaagaaauugaggcaagggg

SEQ ID NO: 113436 - RNA, 32 nt, Homo Sapiens
agggaguggcuuuggggucaugcuaacuaccu

SEQ ID NO: 113437 - RNA, 32 nt, Homo Sapiens
aagugccaggaugggguaucagcugaacaaug

SEQ ID NO: 113438 - RNA, 32 nt, Homo Sapiens
aauugggagagaaagcuuuauauuugugugag

SEQ ID NO: 113439 - RNA, 32 nt, Homo Sapiens
ggauuggaugacugauuauuggacagaauggc

SEQ ID NO: 113440 - RNA, 32 nt, Homo Sapiens
gaccugggccuggcccguguguguccucggcg

SEQ ID NO: 113441 - RNA, 32 nt, Homo Sapiens
uguugcagauacuguggucacauuucaaaggc

SEQ ID NO: 113442 - RNA, 32 nt, Homo Sapiens
gacugaccuuaccaacuacuagcgaggaugca

SEQ ID NO: 113443 - RNA, 32 nt, Homo Sapiens
ugauuucuugaacaucuuucccuguuuguaua

SEQ ID NO: 113444 - RNA, 32 nt, Homo Sapiens
ggggugcugaucuggagacagaucuguccugg

SEQ ID NO: 113445 - RNA, 32 nt, Homo Sapiens
cuaaagucaagagcuucauucccugcuucuaa

SEQ ID NO: 113446 - RNA, 32 nt, Homo Sapiens
aguuucauaugcacagaagagcaguuggaaau

SEQ ID NO: 113447 - RNA, 32 nt, Homo Sapiens
ucaguuggaaauuuauaaccaaccaaaccaag

SEQ ID NO: 113448 - RNA, 32 nt, Homo Sapiens
gaaaaaguuuaaaagaaauucugacagaugac

SEQ ID NO: 113449 - RNA, 32 nt, Homo Sapiens
ccugcguccuucccucuccagcugguuaagag

SEQ ID NO: 113450 - RNA, 32 nt, Homo Sapiens
augaauuccuuccucuuuaagcagcaacuuac

SEQ ID NO: 113451 - RNA, 32 nt, Homo Sapiens
aguaagggaccagaagugacuagccuucaugu

SEQ ID NO: 113452 - RNA, 32 nt, Homo Sapiens
caccuagcucgccagagagucuauguauggga

SEQ ID NO: 113453 - RNA, 32 nt, Homo Sapiens
uuuaaaugaagaguuagaauauuuuauuggcu

SEQ ID NO: 113454 - RNA, 32 nt, Homo Sapiens
gucccgcgccccagccgccgcgcaccaacgcc

SEQ ID NO: 113455 - RNA, 32 nt, Homo Sapiens
ggcugcaggccguuaaguggacaggaaguggc

SEQ ID NO: 113456 - RNA, 27 nt, Homo Sapiens
cugugcuccugcuccagcccccauuuc

SEQ ID NO: 113457 - RNA, 32 nt, Homo Sapiens
auucuugucccuguugcccccaucucuacccc

SEQ ID NO: 113458 - RNA, 32 nt, Homo Sapiens
gcuucuguucucugucacaaccccaggugauu

SEQ ID NO: 113459 - RNA, 32 nt, Homo Sapiens
caucacacuccagccugcucuucccggucaug

SEQ ID NO: 113460 - RNA, 28 nt, Homo Sapiens
cacugggggcggcggacgaacagggagg

SEQ ID NO: 113461 - RNA, 32 nt, Homo Sapiens
uaugcgauuaauguaauuuaauucaaugcauc

SEQ ID NO: 113462 - RNA, 32 nt, Homo Sapiens
ccgccugcccccacccagaaccuuccgguuug

SEQ ID NO: 113463 - RNA, 32 nt, Homo Sapiens
uuuccauguaccucuggugugucagggauuuu

SEQ ID NO: 113464 - RNA, 32 nt, Homo Sapiens
uauuugccucuaauugggccugagagaccaua

SEQ ID NO: 113465 - RNA, 32 nt, Homo Sapiens
cgaccagaugaccuuccauuucaccggcggca

SEQ ID NO: 113466 - RNA, 32 nt, Homo Sapiens
cccucggcucugacaggccgcggccuucuguc

SEQ ID NO: 113467 - RNA, 32 nt, Homo Sapiens
agaauaauaacauacccacacaauuaauauaa

SEQ ID NO: 113468 - RNA, 32 nt, Homo Sapiens
caugagcccuggggagcuccaaggcugcagcc

SEQ ID NO: 113469 - RNA, 32 nt, Homo Sapiens
ugcaggagauuuaauguauaaaauuucuagga

SEQ ID NO: 113470 - RNA, 32 nt, Homo Sapiens
gucugcugccagcacaguaggucccggccagc

SEQ ID NO: 113471 - RNA, 31 nt, Homo Sapiens
augcucaggaaaguuauuugaguuaaauugc

SEQ ID NO: 113472 - RNA, 32 nt, Homo Sapiens
gagcgccucacagcuuagugcgccugcgcacg

SEQ ID NO: 113473 - RNA, 32 nt, Homo Sapiens
aguauuguguggaacgugcccccuuggucugc

SEQ ID NO: 113474 - RNA, 32 nt, Homo Sapiens
cggcuggugagccgacaggcccggguacagcu

SEQ ID NO: 113475 - RNA, 32 nt, Homo Sapiens
ucuguggugaauggguggccuguggugaaugg

SEQ ID NO: 113476 - RNA, 27 nt, Homo Sapiens
cucaagucugucuucagccagggacuu

SEQ ID NO: 113477 - RNA, 32 nt, Homo Sapiens
ccucuuuggccauugucucagccucugccacu

SEQ ID NO: 113478 - RNA, 32 nt, Homo Sapiens
uagaauuuguucuccuucucuuccuuuucuca

SEQ ID NO: 113479 - RNA, 32 nt, Homo Sapiens
cgccgccgccgccgcgcgaggagccaggaugg

SEQ ID NO: 113480 - RNA, 32 nt, Homo Sapiens
ccuucaauaaaacuuuuuuauucugaucucca

SEQ ID NO: 113481 - RNA, 32 nt, Homo Sapiens
acccaggaguccagaccccccagccccuccuc

SEQ ID NO: 113482 - RNA, 32 nt, Homo Sapiens
acugccaucuuaguuuggauucuuauguagca

SEQ ID NO: 113483 - RNA, 32 nt, Homo Sapiens
ugccgaggaagaaaauggaaaugugguuccug

SEQ ID NO: 113484 - RNA, 32 nt, Homo Sapiens
uacggcagcaaauugcuacaugugcuggauau

SEQ ID NO: 113485 - RNA, 29 nt, Homo Sapiens
uguguaaaguuuuuauauuuucacaauuu

SEQ ID NO: 113486 - RNA, 32 nt, Homo Sapiens
cucgugggaugggaaaguccugaauguccccc

SEQ ID NO: 113487 - RNA, 32 nt, Homo Sapiens
aauaaaugaaaacaccugagcugguggcugug

SEQ ID NO: 113488 - RNA, 32 nt, Homo Sapiens
aacuucccacagcagcacaacacacacaauau

SEQ ID NO: 113489 - RNA, 32 nt, Homo Sapiens
gucgguuggaacaugagacucgaggcugagcg

SEQ ID NO: 113490 - RNA, 32 nt, Homo Sapiens
cccaccucuucccccucccacccaagcccaca

SEQ ID NO: 113491 - RNA, 32 nt, Homo Sapiens
uacuuuggcaugugucccaggugacuugagac

SEQ ID NO: 113492 - RNA, 32 nt, Homo Sapiens
cugcggucuucugcuagccugauccgcagcuu

SEQ ID NO: 113493 - RNA, 32 nt, Homo Sapiens
ggccccgaucgggcuaggccgacggccucccu

SEQ ID NO: 113494 - RNA, 32 nt, Homo Sapiens
uggcggggacugagccuccugcuugagguagu

SEQ ID NO: 113495 - RNA, 32 nt, Homo Sapiens
cucuggagccagucugcaagaaugggacaggu

SEQ ID NO: 113496 - RNA, 32 nt, Homo Sapiens
agcucccuuucccccacuuucucacuuauucu

SEQ ID NO: 113497 - RNA, 32 nt, Homo Sapiens
caagauagaugguauuggcagaggaacagaca

SEQ ID NO: 113498 - RNA, 32 nt, Homo Sapiens
ucccaugaggaggugagccagugguaaugccc

SEQ ID NO: 113499 - RNA, 32 nt, Homo Sapiens
ccccggggccgcggauccggcagccaugugug

SEQ ID NO: 113500 - RNA, 32 nt, Homo Sapiens
gcccagcccgcagcugcggcggcgcucagagu

SEQ ID NO: 113501 - RNA, 32 nt, Homo Sapiens
aaucuuuuucacaguauucaguuuucucaccu

SEQ ID NO: 113502 - RNA, 30 nt, Homo Sapiens
uaugaucugcuaaaguggugauuuauccau

SEQ ID NO: 113503 - RNA, 32 nt, Homo Sapiens
cuugccuguagagccugcaugcuuuuuuguuu

SEQ ID NO: 113504 - RNA, 32 nt, Homo Sapiens
cccaggcugccuggccggggccacugccuccu

SEQ ID NO: 113505 - RNA, 32 nt, Homo Sapiens
ccugaugaaaauauuuguaagcagaucaucuu

SEQ ID NO: 113506 - RNA, 32 nt, Homo Sapiens
guuuacaauuuuauaugaaagauggaauaagc

SEQ ID NO: 113507 - RNA, 32 nt, Homo Sapiens
aaaagguuagucuuucaguacacguuacuggu

SEQ ID NO: 113508 - RNA, 32 nt, Homo Sapiens
ggcuuagaacagaccucucugugcaauaacuu

SEQ ID NO: 113509 - RNA, 32 nt, Homo Sapiens
ucugggggucuccucagugacccccauaccuc

SEQ ID NO: 113510 - RNA, 32 nt, Homo Sapiens
gcaccuuucugagggaggggauuuuacagccg

SEQ ID NO: 113511 - RNA, 32 nt, Homo Sapiens
agcaguuuacaaagccagugucuaaaugaagu

SEQ ID NO: 113512 - RNA, 32 nt, Homo Sapiens
uuugggaaggagaaaaacuuuuucucaauucu

SEQ ID NO: 113513 - RNA, 32 nt, Homo Sapiens
guuaaauuguuccaaggaugucuuaggauuuu

SEQ ID NO: 113514 - RNA, 32 nt, Homo Sapiens
uugaaagaggugcauaauaaaacuacuaacca

SEQ ID NO: 113515 - RNA, 32 nt, Homo Sapiens
ucgguccacaccugggcauuuggugagaauca

SEQ ID NO: 113516 - RNA, 32 nt, Homo Sapiens
ugccuugcauauauuauauccucaaugaguac

SEQ ID NO: 113517 - RNA, 32 nt, Homo Sapiens
ugcacuacagccuuuucuuaaaaugcaagauu

SEQ ID NO: 113518 - RNA, 32 nt, Homo Sapiens
ccuuuacagguguaauggaaaaaaugguuugg

SEQ ID NO: 113519 - RNA, 32 nt, Homo Sapiens
gcucuccaaagucuugaguucuguauauggcc

SEQ ID NO: 113520 - RNA, 32 nt, Homo Sapiens
acagucaugggacugcaucuucguccuugucc

SEQ ID NO: 113521 - RNA, 32 nt, Homo Sapiens
ucagcggcgccgggcgcuuggggcuggaggag

SEQ ID NO: 113522 - RNA, 32 nt, Homo Sapiens
gaaaaucagaucugaggccuagaagagaaacu

SEQ ID NO: 113523 - RNA, 32 nt, Homo Sapiens
ggcgagcagucugcgcgcggauggccgcagcg

SEQ ID NO: 113524 - RNA, 32 nt, Homo Sapiens
agguuuuagcugaaaugaggagucacaauuaa

SEQ ID NO: 113525 - RNA, 32 nt, Homo Sapiens
cuggcuccccacagcccucgccucuggucucc

SEQ ID NO: 113526 - RNA, 32 nt, Homo Sapiens
gugcuugccugaggucccacuguguuaguggg

SEQ ID NO: 113527 - RNA, 32 nt, Homo Sapiens
gcacagagacccugggcccagcccacaaaacc

SEQ ID NO: 113528 - RNA, 32 nt, Homo Sapiens
ucugaauccccucugacuccaacuucucuuuc

SEQ ID NO: 113529 - RNA, 32 nt, Homo Sapiens
uugcagaaggcauggaggugggaccagaugcu

SEQ ID NO: 113530 - RNA, 32 nt, Homo Sapiens
caguguguuguaauuuuguaaggccaacuauu

SEQ ID NO: 113531 - RNA, 32 nt, Homo Sapiens
guaccugaggggcugcucuaugcuguguaugc

SEQ ID NO: 113532 - RNA, 31 nt, Homo Sapiens
agacagcaacaagauuuuaaucaccugguca

SEQ ID NO: 113533 - RNA, 32 nt, Homo Sapiens
agaaguggaggccccaggacaggcuggcuggc

SEQ ID NO: 113534 - RNA, 29 nt, Homo Sapiens
uuuuaaauuaaaccugucuuuggagccuc

SEQ ID NO: 113535 - RNA, 32 nt, Homo Sapiens
ugaucucuuaauguaaauuaagaauauuuuca

SEQ ID NO: 113536 - RNA, 32 nt, Homo Sapiens
cucacuaauaauagcaagauuuauuaacauga

SEQ ID NO: 113537 - RNA, 30 nt, Homo Sapiens
gggggguuucaccauguuagccaggauggu

SEQ ID NO: 113538 - RNA, 32 nt, Homo Sapiens
aucacuucauuuuaaaugaaugagauaauuac

SEQ ID NO: 113539 - RNA, 32 nt, Homo Sapiens
uuggaggugggagagcacuuuuaaagcacacc

SEQ ID NO: 113540 - RNA, 32 nt, Homo Sapiens
cuuucaaacuagcuucagauauuauuuaauac

SEQ ID NO: 113541 - RNA, 32 nt, Homo Sapiens
uaugaagaucauauaacaauuaaacauaagcc

SEQ ID NO: 113542 - RNA, 32 nt, Homo Sapiens
ugugugcccucugguucagcugaaacaguccu

SEQ ID NO: 113543 - RNA, 32 nt, Homo Sapiens
uauggcuuaucaaaugcuuguccuggcccgau

SEQ ID NO: 113544 - RNA, 32 nt, Homo Sapiens
ugguaaccgagccagcagcugaagucucuuuu

SEQ ID NO: 113545 - RNA, 32 nt, Homo Sapiens
agaccuuuaauggagacaugcauuugcuaacu

SEQ ID NO: 113546 - RNA, 32 nt, Homo Sapiens
gcacagaccugggcgcggggucgggcgauugg

SEQ ID NO: 113547 - RNA, 32 nt, Homo Sapiens
uugcaaagccagcucucgguuccgauggggua

SEQ ID NO: 113548 - RNA, 32 nt, Homo Sapiens
cgagggcgcggcggaggcucccguggccucgg

SEQ ID NO: 113549 - RNA, 32 nt, Homo Sapiens
ggugggcccucccgccccucccuggcaggaca

SEQ ID NO: 113550 - RNA, 32 nt, Homo Sapiens
uuuaguuacuaaccucuugaugaccgaggagg

SEQ ID NO: 113551 - RNA, 32 nt, Homo Sapiens
ucacugugcuggcuacagagcucgacaguucu

SEQ ID NO: 113552 - RNA, 32 nt, Homo Sapiens
agggcaucuggagcucaucccaauggugucuc

SEQ ID NO: 113553 - RNA, 32 nt, Homo Sapiens
gagccuccuuggcagauagggaucucaggcag

SEQ ID NO: 113554 - RNA, 32 nt, Homo Sapiens
uuuuccacagaaaaagagccagaaagagaaag

SEQ ID NO: 113555 - RNA, 32 nt, Homo Sapiens
ggggccgggggcggggguucgguuugacuacc

SEQ ID NO: 113556 - RNA, 32 nt, Homo Sapiens
gcugugcugucccuccucuccccuuauguggc

SEQ ID NO: 113557 - RNA, 32 nt, Homo Sapiens
uuguuagaguuuuuaauaaccauuuaauucau

SEQ ID NO: 113558 - RNA, 32 nt, Homo Sapiens
ugugaaauucccuccucccuccuuccaccuuc

SEQ ID NO: 113559 - RNA, 32 nt, Homo Sapiens
aaguugccuucgucuguaaauacuuagugauu

SEQ ID NO: 113560 - RNA, 30 nt, Homo Sapiens
ugcucagggggcugcauccugcugggagca

SEQ ID NO: 113561 - RNA, 31 nt, Homo Sapiens
aauaauuuggccaaaccuucagugugaccaa

SEQ ID NO: 113562 - RNA, 32 nt, Homo Sapiens
cccuauuuccuucuccuccugucuuuaaagcc

SEQ ID NO: 113563 - RNA, 32 nt, Homo Sapiens
acuuuuaagauugauuagauugagaccaaaca

SEQ ID NO: 113564 - RNA, 32 nt, Homo Sapiens
ucggugcgcucagcggccgccgacgcuaggag

SEQ ID NO: 113565 - RNA, 32 nt, Homo Sapiens
ccccucccuggccagccucccucacuucuuuc

SEQ ID NO: 113566 - RNA, 32 nt, Homo Sapiens
aaaacuuauuaagguuaaauagaauuguuucu

SEQ ID NO: 113567 - RNA, 32 nt, Homo Sapiens
uuugcaugcgccccggcccugccccuuggccc

SEQ ID NO: 113568 - RNA, 32 nt, Homo Sapiens
gcugcggacuugcugcugcugcugcugccagu

SEQ ID NO: 113569 - RNA, 32 nt, Homo Sapiens
uuuuaaaauuaauuuuacuuugaaugauuuau

SEQ ID NO: 113570 - RNA, 32 nt, Homo Sapiens
guguacuuggggggcaugauucccuccuucua

SEQ ID NO: 113571 - RNA, 32 nt, Homo Sapiens
ugaauaggaaaauaaaugaguuuggagacuuc

SEQ ID NO: 113572 - RNA, 32 nt, Homo Sapiens
cccuccagggacgagagauggcccccucuuuc

SEQ ID NO: 113573 - RNA, 32 nt, Homo Sapiens
cccugaagucagaucaacgggagagaaggaag

SEQ ID NO: 113574 - RNA, 32 nt, Homo Sapiens
ugcggagcucccggcggcccagccccgaggcu

SEQ ID NO: 113575 - RNA, 32 nt, Homo Sapiens
uaagcauauauucaguuauauucagcauguac

SEQ ID NO: 113576 - RNA, 32 nt, Homo Sapiens
cccccgcccgcggcugggcuccgagagacgag

SEQ ID NO: 113577 - RNA, 32 nt, Homo Sapiens
uaauuucaagacaaauugaaucuuauuuuaua

SEQ ID NO: 113578 - RNA, 32 nt, Homo Sapiens
ugucaccgcccggccacgcacagccuggagga

SEQ ID NO: 113579 - RNA, 32 nt, Homo Sapiens
guuugcacuuauuugcagaguaaacugcucau

SEQ ID NO: 113580 - RNA, 32 nt, Homo Sapiens
uuguagagaaauauuucucuuagaaauaaaac

SEQ ID NO: 113581 - RNA, 32 nt, Homo Sapiens
cuugaauacaguuuucuaggacaagggaucuu

SEQ ID NO: 113582 - RNA, 31 nt, Homo Sapiens
ggcaguuaucuuaccuucccauagacaccca

SEQ ID NO: 113583 - RNA, 32 nt, Homo Sapiens
gaaagaaacacuuccuuauaauuauauuagua

SEQ ID NO: 113584 - RNA, 29 nt, Homo Sapiens
aauggugaugcucucaguuucucugccuu

SEQ ID NO: 113585 - RNA, 31 nt, Homo Sapiens
gaccccucgcgcugccugcggccucgcgccg

SEQ ID NO: 113586 - RNA, 32 nt, Homo Sapiens
aaauauuuaaaauuauuuaaauuguuuuggac

SEQ ID NO: 113587 - RNA, 32 nt, Homo Sapiens
uuccugagggcucugucuugccugcaggguca

SEQ ID NO: 113588 - RNA, 32 nt, Homo Sapiens
cccugccuccagcagagcccccaccauucacu

SEQ ID NO: 113589 - RNA, 32 nt, Homo Sapiens
aaccagagaagcugugugacucguacaaauuu

SEQ ID NO: 113590 - RNA, 32 nt, Homo Sapiens
uuauagaaggggggauacaaaaaggaacuaac

SEQ ID NO: 113591 - RNA, 32 nt, Homo Sapiens
cacgcgccgcggccgauccccccgguucacca

SEQ ID NO: 113592 - RNA, 30 nt, Homo Sapiens
guugcuggcuguggcggcggccaggaucau

SEQ ID NO: 113593 - RNA, 32 nt, Homo Sapiens
cuaccucuggucuagagauuuccaaaggcaaa

SEQ ID NO: 113594 - RNA, 32 nt, Homo Sapiens
uguugauuucaccaacuguugcuggaagauuc

SEQ ID NO: 113595 - RNA, 32 nt, Homo Sapiens
guugcacuggcuaauguauuucuuauacagaa

SEQ ID NO: 113596 - RNA, 32 nt, Homo Sapiens
accagcacaaggaaacauaggcagcacugaaa

SEQ ID NO: 113597 - RNA, 32 nt, Homo Sapiens
ucaugguuccuagguuuuccugucaccucauu

SEQ ID NO: 113598 - RNA, 32 nt, Homo Sapiens
aaguugcuuuuguaaaggagaauuauauuguu

SEQ ID NO: 113599 - RNA, 32 nt, Homo Sapiens
uauagugcuuugugaucaaugaucuuugaugu

SEQ ID NO: 113600 - RNA, 32 nt, Homo Sapiens
cuaggagagaaaauuucagauuuuacucucau

SEQ ID NO: 113601 - RNA, 32 nt, Homo Sapiens
uacuagaggagauaaauauuuugcauauaaug

SEQ ID NO: 113602 - RNA, 32 nt, Homo Sapiens
ccucuccuuucugugaaagggaaucgugugug

SEQ ID NO: 113603 - RNA, 32 nt, Homo Sapiens
auggagaacucauagugauuagucuuuguuua

SEQ ID NO: 113604 - RNA, 32 nt, Homo Sapiens
uuuuaauagauauagagcuauuaggauuugcu

SEQ ID NO: 113605 - RNA, 32 nt, Homo Sapiens
cugcuuggccuggccaggccuggcacagcccu

SEQ ID NO: 113606 - RNA, 32 nt, Homo Sapiens
cacuccucucccagccccccugcccacuguuc

SEQ ID NO: 113607 - RNA, 30 nt, Homo Sapiens
ccuccugucugugccaggaggcaccugagu

SEQ ID NO: 113608 - RNA, 32 nt, Homo Sapiens
ucccucgccggccuggcgcccggcgccaucug

SEQ ID NO: 113609 - RNA, 32 nt, Homo Sapiens
cuacaacuaugucauuaacugaagauacaugu

SEQ ID NO: 113610 - RNA, 32 nt, Homo Sapiens
aaaggcccugucacuccacagaugucuggcca

SEQ ID NO: 113611 - RNA, 32 nt, Homo Sapiens
acugucuucagacgucgcaaggaucaagaaaa

SEQ ID NO: 113612 - RNA, 32 nt, Homo Sapiens
uucacucuuaucuacccuuuggcacuuaucuu

SEQ ID NO: 113613 - RNA, 32 nt, Homo Sapiens
agccgaaagcaucuugaccacgcagccgccac

SEQ ID NO: 113614 - RNA, 32 nt, Homo Sapiens
auggacacaccugugcacacaugccuacaggc

SEQ ID NO: 113615 - RNA, 32 nt, Homo Sapiens
ggagggcagggccagcaccucaccccacacaa

SEQ ID NO: 113616 - RNA, 32 nt, Homo Sapiens
cccgcagcgcaucccggucgccgcccagccuc

SEQ ID NO: 113617 - RNA, 32 nt, Homo Sapiens
uuuuauuaaaauuuauaagcaagaaaugauac

SEQ ID NO: 113618 - RNA, 32 nt, Homo Sapiens
cccucgaagcucccucccggugcuggggggca

SEQ ID NO: 113619 - RNA, 32 nt, Homo Sapiens
cuuccagcucaacggcagcagcaagaagcugc

SEQ ID NO: 113620 - RNA, 32 nt, Homo Sapiens
uaagaggcagccaagucagcucugccaacugc

SEQ ID NO: 113621 - RNA, 32 nt, Homo Sapiens
aauuagccgggcgugguggugcacgccuguag

SEQ ID NO: 113622 - RNA, 32 nt, Homo Sapiens
aauuagcugggugugguggcgcaugccuguag

SEQ ID NO: 113623 - RNA, 32 nt, Homo Sapiens
gcgugucugaagauggggggcucagggggcac

SEQ ID NO: 113624 - RNA, 32 nt, Homo Sapiens
uauguagauaauguacuuuuaugagauguaca

SEQ ID NO: 113625 - RNA, 32 nt, Homo Sapiens
gcgacaauucauguguaaauguuuacucaagg

SEQ ID NO: 113626 - RNA, 32 nt, Homo Sapiens
gcuuucaauaucuuaaaauauuuauaaaacau

SEQ ID NO: 113627 - RNA, 32 nt, Homo Sapiens
aucugaccuguccccuggcccagcccuuaggc

SEQ ID NO: 113628 - RNA, 32 nt, Homo Sapiens
uccuaucagcuucucucccacccaauuaggcc

SEQ ID NO: 113629 - RNA, 32 nt, Homo Sapiens
uuucccaucugugcaggauggcaaaggucaca

SEQ ID NO: 113630 - RNA, 32 nt, Homo Sapiens
aaacuggagguggucacaaugccuuccccauc

SEQ ID NO: 113631 - RNA, 32 nt, Homo Sapiens
aacacaaagaaauuuaaaaaacaaaaaaccua

SEQ ID NO: 113632 - RNA, 32 nt, Homo Sapiens
uuccugggaaagggguauguuuucucuccagg

SEQ ID NO: 113633 - RNA, 32 nt, Homo Sapiens
guauuuugaaagauugauguuugcauuuuacu

SEQ ID NO: 113634 - RNA, 32 nt, Homo Sapiens
uguuuccugucugauagcaccacacgcaaacc

SEQ ID NO: 113635 - RNA, 32 nt, Homo Sapiens
gggacagggggaggagaugggcagcauuguug

SEQ ID NO: 113636 - RNA, 32 nt, Homo Sapiens
cuggucagugauuccagguuuuaaauaauuug

SEQ ID NO: 113637 - RNA, 32 nt, Homo Sapiens
acagcuuuucaccuuacuucuccugugaucua

SEQ ID NO: 113638 - RNA, 32 nt, Homo Sapiens
cagagcccccggagcccucccagcccucaggc

SEQ ID NO: 113639 - RNA, 32 nt, Homo Sapiens
ugggaggaagcaggagugaguaaaaacauugu

SEQ ID NO: 113640 - RNA, 32 nt, Homo Sapiens
uacucucucgccauuucugcauggccaaaucu

SEQ ID NO: 113641 - RNA, 31 nt, Homo Sapiens
guggaaagguuaaaaaccagagccuggaaac

SEQ ID NO: 113642 - RNA, 32 nt, Homo Sapiens
auuuuuacuucagauuuuaagcucaugaauaa

SEQ ID NO: 113643 - RNA, 32 nt, Homo Sapiens
ucaaggauaaaccaaaacaauauuuagaacua

SEQ ID NO: 113644 - RNA, 32 nt, Homo Sapiens
gacgaugccucggcuugaccuuuuuugaaaag

SEQ ID NO: 113645 - RNA, 32 nt, Homo Sapiens
ugucugacuuuguuugcccagugucgcguagc

SEQ ID NO: 113646 - RNA, 32 nt, Homo Sapiens
uccgugcgggauuggauagugaagcacgugaa

SEQ ID NO: 113647 - RNA, 32 nt, Homo Sapiens
cgccgcgggccgggcgcggggaggugucaugc

SEQ ID NO: 113648 - RNA, 32 nt, Homo Sapiens
ucagcacagcccggcccggagccccgccucca

SEQ ID NO: 113649 - RNA, 32 nt, Homo Sapiens
gagccgggaaagcuguuuuuccguggauuugg

SEQ ID NO: 113650 - RNA, 32 nt, Homo Sapiens
aauuagcugggugugguggcgcaugccuguaa

SEQ ID NO: 113651 - RNA, 32 nt, Homo Sapiens
agagagcucaccugugucccagcccucugaug

SEQ ID NO: 113652 - RNA, 32 nt, Homo Sapiens
ccgucucuacuaaaauacaaaaaauuagccgg

SEQ ID NO: 113653 - RNA, 32 nt, Homo Sapiens
uccuccuccccucagcuuugcuaauaccaguc

SEQ ID NO: 113654 - RNA, 32 nt, Homo Sapiens
uaacacgggcaagagggaaagaaaggcuaacc

SEQ ID NO: 113655 - RNA, 32 nt, Homo Sapiens
ugcccagcacaccagauugccagcuccgagac

SEQ ID NO: 113656 - RNA, 32 nt, Homo Sapiens
gccggccgugcccggcggccuuaagaaccagg

SEQ ID NO: 113657 - RNA, 32 nt, Homo Sapiens
uuguuuuauuauuacuuucauuauuauuugcc

SEQ ID NO: 113658 - RNA, 32 nt, Homo Sapiens
ucagaagcucucccaucuucacagcaacccug

SEQ ID NO: 113659 - RNA, 32 nt, Homo Sapiens
uaaaaggagagaaagcaaaacauuuuguaugc

SEQ ID NO: 113660 - RNA, 32 nt, Homo Sapiens
uagacaauggguuuuccaagcugggcaaggua

SEQ ID NO: 113661 - RNA, 32 nt, Homo Sapiens
aaaccacaggaacaauuucucuggagacaagg

SEQ ID NO: 113662 - RNA, 32 nt, Homo Sapiens
agcgcgggccccagcagccucggcagccacag

SEQ ID NO: 113663 - RNA, 32 nt, Homo Sapiens
acuucaacuuugcccaugaugugcuggaugug

SEQ ID NO: 113664 - RNA, 32 nt, Homo Sapiens
ugcggguggguaucccaccuccagcccacagu

SEQ ID NO: 113665 - RNA, 32 nt, Homo Sapiens
caugagaagaucugcauuuucuccuuuugcuu

SEQ ID NO: 113666 - RNA, 32 nt, Homo Sapiens
cugagguggcugcgguacacggcgcccauccu

SEQ ID NO: 113667 - RNA, 32 nt, Homo Sapiens
uucauauacacagucuauacaaugaaauaaug

SEQ ID NO: 113668 - RNA, 32 nt, Homo Sapiens
cauucagaacagaggcuuuucccagaucccag

SEQ ID NO: 113669 - RNA, 32 nt, Homo Sapiens
uauauuuauuagcuuaaauauauccuuuggug

SEQ ID NO: 113670 - RNA, 32 nt, Homo Sapiens
uucgcuguucccucccccaccuguccugcagu

SEQ ID NO: 113671 - RNA, 32 nt, Homo Sapiens
ucuaauaauuuucaucaauaggaaaaaagaaa

SEQ ID NO: 113672 - RNA, 32 nt, Homo Sapiens
auuuuaauauccaaauuuaaagguuuggaaaa

SEQ ID NO: 113673 - RNA, 32 nt, Homo Sapiens
gcgaggcgcgugccggccgcaggagcuccggg

SEQ ID NO: 113674 - RNA, 32 nt, Homo Sapiens
ggucugcccgcacccggccaaagcccaggaag

SEQ ID NO: 113675 - RNA, 32 nt, Homo Sapiens
aauaaaauaguccaucuaaauuccuggaucga

SEQ ID NO: 113676 - RNA, 32 nt, Homo Sapiens
ccggagacugcgguugucauugaucaauugaa

SEQ ID NO: 113677 - RNA, 32 nt, Homo Sapiens
cuccauaaauguuuuuaaugacaauauucugu

SEQ ID NO: 113678 - RNA, 32 nt, Homo Sapiens
uucccaguagcucuugcauccuccucccaacu

SEQ ID NO: 113679 - RNA, 32 nt, Homo Sapiens
cccugguggaggccgcuggccuggacagcucc

SEQ ID NO: 113680 - RNA, 32 nt, Homo Sapiens
agguaaaaauguaucgcauuguuaucuaauau

SEQ ID NO: 113681 - RNA, 32 nt, Homo Sapiens
ugucaacaaccugcuaagugacacggaagaag

SEQ ID NO: 113682 - RNA, 32 nt, Homo Sapiens
aaaauaaauuuuuauuugauauuucauauaug

SEQ ID NO: 113683 - RNA, 32 nt, Homo Sapiens
ccggcacccuagccccaucuccaggagccccu

SEQ ID NO: 113684 - RNA, 32 nt, Homo Sapiens
aagacagcaaggaaagcaaaaaauaagcuuca

SEQ ID NO: 113685 - RNA, 32 nt, Homo Sapiens
ucuggagccucagccagaaguaccauuagguu

SEQ ID NO: 113686 - RNA, 32 nt, Homo Sapiens
gcucccaucugcuuucuucucuagaauccacu

SEQ ID NO: 113687 - RNA, 32 nt, Homo Sapiens
uaauuuuagagcauuaacucccuaauugccag

SEQ ID NO: 113688 - RNA, 32 nt, Homo Sapiens
ggccuuugccagcagagccagggcagggcgag

SEQ ID NO: 113689 - RNA, 32 nt, Homo Sapiens
uuguuuaaacacgguuuuucauuuucucaacu

SEQ ID NO: 113690 - RNA, 32 nt, Homo Sapiens
gaauagaggaaagugaugcugcugcuaagaau

SEQ ID NO: 113691 - RNA, 32 nt, Homo Sapiens
cugcgcuccccucccccaccagugggaccagu

SEQ ID NO: 113692 - RNA, 32 nt, Homo Sapiens
uuuuuucugcagagguagcugcacaugcagcu

SEQ ID NO: 113693 - RNA, 32 nt, Homo Sapiens
uaaauuguggcucugucauuuaucucugugac

SEQ ID NO: 113694 - RNA, 32 nt, Homo Sapiens
agcccucccuccccacccccacccuguaacuc

SEQ ID NO: 113695 - RNA, 32 nt, Homo Sapiens
cccagccccgucccagaggccgcugccccuga

SEQ ID NO: 113696 - RNA, 32 nt, Homo Sapiens
ucuuggagggagaggggaacggacagcaaaca

SEQ ID NO: 113697 - RNA, 32 nt, Homo Sapiens
cagggaagacccgugugaccgccuccuuggcu

SEQ ID NO: 113698 - RNA, 32 nt, Homo Sapiens
acugacaggaggaaccaaggaggcacguaucu

SEQ ID NO: 113699 - RNA, 32 nt, Homo Sapiens
gacagaccuggcuccugcccucauggaguuug

SEQ ID NO: 113700 - RNA, 32 nt, Homo Sapiens
ugcccucagggaucuugcguucccagugguca

SEQ ID NO: 113701 - RNA, 32 nt, Homo Sapiens
agugagggguauaucugggcuggccaguugga

SEQ ID NO: 113702 - RNA, 32 nt, Homo Sapiens
auuuccugcuuacuuuucauucucaugacuga

SEQ ID NO: 113703 - RNA, 32 nt, Homo Sapiens
uggagggcauuuuuaaauuuauuuucaaaauu

SEQ ID NO: 113704 - RNA, 32 nt, Homo Sapiens
agcauuguauaaaguguggguguucaugcuuu

SEQ ID NO: 113705 - RNA, 32 nt, Homo Sapiens
gccccgcaccucgcgucccggaucgcucugau

SEQ ID NO: 113706 - RNA, 32 nt, Homo Sapiens
gggugcacuccagccaccucagugcucuaagc

SEQ ID NO: 113707 - RNA, 32 nt, Homo Sapiens
cccacagcccucggggaccaccuggagucucu

SEQ ID NO: 113708 - RNA, 32 nt, Homo Sapiens
cucuccccagagccuccccgcgcggaccccgc

SEQ ID NO: 113709 - RNA, 32 nt, Homo Sapiens
ccaccaccgacccccagcaggacgugaccccc

SEQ ID NO: 113710 - RNA, 32 nt, Homo Sapiens
aguauuuggcaucaccuuuacauggagcacaa

SEQ ID NO: 113711 - RNA, 32 nt, Homo Sapiens
cuccgugugcgccccuucgcccggggacugaa

SEQ ID NO: 113712 - RNA, 32 nt, Homo Sapiens
cuacuaaaaaauaaaauaugaaaauuagccgu

SEQ ID NO: 113713 - RNA, 32 nt, Homo Sapiens
ucugugcuucucucuuucuccucccacagggu

SEQ ID NO: 113714 - RNA, 32 nt, Homo Sapiens
aaggucagagaugagaucccgcagcagggacg

SEQ ID NO: 113715 - RNA, 32 nt, Homo Sapiens
ggaggccgagagaugaggccggagcccaccaa

SEQ ID NO: 113716 - RNA, 32 nt, Homo Sapiens
uuugggaggcaccaggcggggaggaguuggcg

SEQ ID NO: 113717 - RNA, 32 nt, Homo Sapiens
gaggaggagacggcggcggcgaucucccggcc

SEQ ID NO: 113718 - RNA, 32 nt, Homo Sapiens
gugcugccuggacacacacacacacacggaua

SEQ ID NO: 113719 - RNA, 32 nt, Homo Sapiens
uuccaaacauuuucuuuuuuucugagauggag

SEQ ID NO: 113720 - RNA, 32 nt, Homo Sapiens
cucauguugaagaggguuuggauuccgaugca

SEQ ID NO: 113721 - RNA, 32 nt, Homo Sapiens
gcguugcccacaccccaucucccgucaccaca

SEQ ID NO: 113722 - RNA, 32 nt, Homo Sapiens
gugacaaagggagggaccagagaauccggggc

SEQ ID NO: 113723 - RNA, 32 nt, Homo Sapiens
uauuacgagaauaaagauuuuguguacucaga

SEQ ID NO: 113724 - RNA, 32 nt, Homo Sapiens
ccagauccuaccccuuucccugagccacaugu

SEQ ID NO: 113725 - RNA, 32 nt, Homo Sapiens
gggagagcgucgggcgggaggcggugguccug

SEQ ID NO: 113726 - RNA, 32 nt, Homo Sapiens
ccggcggcccgcccggcucccacaaauagacu

SEQ ID NO: 113727 - RNA, 32 nt, Homo Sapiens
guauuguuuguaaugugacuuauuuaacgccu

SEQ ID NO: 113728 - RNA, 32 nt, Homo Sapiens
uguuuugccauguuggccaggcuggucucgaa

SEQ ID NO: 113729 - RNA, 32 nt, Homo Sapiens
gccuaaaauaagacuuuuuugacuauucuaaa

SEQ ID NO: 113730 - RNA, 32 nt, Homo Sapiens
gaaaagguauuguagcccacccuccaccccgc

SEQ ID NO: 113731 - RNA, 32 nt, Homo Sapiens
ccucuucagcggaucccuccccgccuccaucc

SEQ ID NO: 113732 - RNA, 32 nt, Homo Sapiens
ccagcguccgggcaacgcccccugcucccgga

SEQ ID NO: 113733 - RNA, 32 nt, Homo Sapiens
cugcccagacagagcugacucuggucccagug

SEQ ID NO: 113734 - RNA, 32 nt, Homo Sapiens
cggugcggcugucucggugcugcugcugcugc

SEQ ID NO: 113735 - RNA, 32 nt, Homo Sapiens
ugcccugaaauuauuuuguuuacuuuuuugcu

SEQ ID NO: 113736 - RNA, 32 nt, Homo Sapiens
uuggaaacagagcugaagaacuuggcacacuc

SEQ ID NO: 113737 - RNA, 28 nt, Homo Sapiens
aacaagauagcuuuacauuugaaugcca

SEQ ID NO: 113738 - RNA, 30 nt, Homo Sapiens
cacuauuucugugcuguccacacucucuug

SEQ ID NO: 113739 - RNA, 32 nt, Homo Sapiens
gccaaguuuggggagcagccccuggcuccuug

SEQ ID NO: 113740 - RNA, 32 nt, Homo Sapiens
ggccugugggcuugcuuuuggaaggccucagg

SEQ ID NO: 113741 - RNA, 32 nt, Homo Sapiens
gcccuguguuccuggggaagcuggggacuugg

SEQ ID NO: 113742 - RNA, 32 nt, Homo Sapiens
uuauuugaugacugaaaaugaacuguaaaugc

SEQ ID NO: 113743 - RNA, 32 nt, Homo Sapiens
ugaaaugguucagcccucuacugcaggaccag

SEQ ID NO: 113744 - RNA, 32 nt, Homo Sapiens
aagaucuaagucuucuagcaucuuauauuauu

SEQ ID NO: 113745 - RNA, 32 nt, Homo Sapiens
uguuuaccgucuccuucuggaccugagaggag

SEQ ID NO: 113746 - RNA, 32 nt, Homo Sapiens
gccgucgcucuccaacgccagcgccgccucuc

SEQ ID NO: 113747 - RNA, 32 nt, Homo Sapiens
ugcugggaauggggagagggcccuugagggac

SEQ ID NO: 113748 - RNA, 32 nt, Homo Sapiens
aauugcuuccagaaacaaaauuauguaucugu

SEQ ID NO: 113749 - RNA, 32 nt, Homo Sapiens
ccauugagcugcaagagggaccaagagggggc

SEQ ID NO: 113750 - RNA, 32 nt, Homo Sapiens
auggcuccagucugcugcccuccaucccgaca

SEQ ID NO: 113751 - RNA, 32 nt, Homo Sapiens
ucucacggcaccuuauuuuuuauuuuuauuuu

SEQ ID NO: 113752 - RNA, 32 nt, Homo Sapiens
uugucauuaugaugaaguaaguguuaaguguc

SEQ ID NO: 113753 - RNA, 32 nt, Homo Sapiens
uaucuagaaauuuaccucaaaagcagaauuuu

SEQ ID NO: 113754 - RNA, 32 nt, Homo Sapiens
uccccaaguaggaccuccuucuccucccccuc

SEQ ID NO: 113755 - RNA, 32 nt, Homo Sapiens
uuuccucaccccuuuaccccccuuuuugaaag

SEQ ID NO: 113756 - RNA, 32 nt, Homo Sapiens
ugccggcggcccggccgcucccgcugcaauug

SEQ ID NO: 113757 - RNA, 32 nt, Homo Sapiens
uggugcugcugcgcugacagggcugugagcag

SEQ ID NO: 113758 - RNA, 32 nt, Homo Sapiens
aucauuaccuggggagggguuccugaaaccuu

SEQ ID NO: 113759 - RNA, 32 nt, Homo Sapiens
gcagccggacugccugcccaccaguuacccgc

SEQ ID NO: 113760 - RNA, 31 nt, Homo Sapiens
uguaaucccaguauuuugggaguccaaggca

SEQ ID NO: 113761 - RNA, 32 nt, Homo Sapiens
gaaaaaugaaauuuauuuuuaauauuacuacu

SEQ ID NO: 113762 - RNA, 32 nt, Homo Sapiens
uuagaacaaaaauucuaauuaaaauaguuaac

SEQ ID NO: 113763 - RNA, 32 nt, Homo Sapiens
gacuuaucaacacuauaauuguucccuaugaa

SEQ ID NO: 113764 - RNA, 32 nt, Homo Sapiens
uuggguacaguuaaaggcaacccugagggacu

SEQ ID NO: 113765 - RNA, 32 nt, Homo Sapiens
uaauugcaagcacucauuucacucucccugug

SEQ ID NO: 113766 - RNA, 32 nt, Homo Sapiens
aggugucgccccucugucuacucccuuucuua

SEQ ID NO: 113767 - RNA, 32 nt, Homo Sapiens
cccggcuccacacccugccccauccacccugu

SEQ ID NO: 113768 - RNA, 32 nt, Homo Sapiens
cauuauuuucuuuucuuucuuccaagugcaug

SEQ ID NO: 113769 - RNA, 32 nt, Homo Sapiens
agcaacacaggcugcgcuguugguaggaguga

SEQ ID NO: 113770 - RNA, 32 nt, Homo Sapiens
ugggaagcucgcggccgggguuccaccuggaa

SEQ ID NO: 113771 - RNA, 32 nt, Homo Sapiens
acagagugaugcaccuucccgcugcugugagg

SEQ ID NO: 113772 - RNA, 32 nt, Homo Sapiens
acauauauugauucaugucaccaccaccguaa

SEQ ID NO: 113773 - RNA, 32 nt, Homo Sapiens
ucugggacucugcggcagacaggacacuuaag

SEQ ID NO: 113774 - RNA, 32 nt, Homo Sapiens
gaccuuccugcccaucgucuccagagcuggau

SEQ ID NO: 113775 - RNA, 32 nt, Homo Sapiens
uuaaccagcugaugagagaugauccuucaacc

SEQ ID NO: 113776 - RNA, 32 nt, Homo Sapiens
gacaggaagaaagucaauaauauuuugugcaa

SEQ ID NO: 113777 - RNA, 32 nt, Homo Sapiens
ucaaacagggauggaagcaaccccaaggauau

SEQ ID NO: 113778 - RNA, 32 nt, Homo Sapiens
ucagggguuucauuuugcaggcaugucucuga

SEQ ID NO: 113779 - RNA, 32 nt, Homo Sapiens
cagcgauucgccccgcccgcccggugaaucug

SEQ ID NO: 113780 - RNA, 32 nt, Homo Sapiens
cuuacuuuuuauuucuuuuucuuguuuaacug

SEQ ID NO: 113781 - RNA, 32 nt, Homo Sapiens
augucuguggggugacucuacugugcuuuauc

SEQ ID NO: 113782 - RNA, 32 nt, Homo Sapiens
auuaguuuuucuuuuucuucuucuuuuuuuuu

SEQ ID NO: 113783 - RNA, 32 nt, Homo Sapiens
cacaaucaagucuuaaugaugaauuaauaauu

SEQ ID NO: 113784 - RNA, 32 nt, Homo Sapiens
auguaaauuuaaaauugguuguaucuaauaug

SEQ ID NO: 113785 - RNA, 32 nt, Homo Sapiens
uuuuccuuuuagccauuuucucuucaauuucu

SEQ ID NO: 113786 - RNA, 32 nt, Homo Sapiens
cgggacccggcugugggaccaacgcuuccggu

SEQ ID NO: 113787 - RNA, 32 nt, Homo Sapiens
cugcagcccuccccacccggcauccaccugca

SEQ ID NO: 113788 - RNA, 32 nt, Homo Sapiens
uuuuuuuuuaagucagcuuggaacuuuuuucc

SEQ ID NO: 113789 - RNA, 32 nt, Homo Sapiens
gggcgagagguggaaggucagaggagaugggg

SEQ ID NO: 113790 - RNA, 32 nt, Homo Sapiens
gagguacccaccccuuggaggagagagacccc

SEQ ID NO: 113791 - RNA, 32 nt, Homo Sapiens
caaguaaaaugaauucuaauguacaaguuugu

SEQ ID NO: 113792 - RNA, 32 nt, Homo Sapiens
aauaugucagaaaauugauagcacuaaaacaa

SEQ ID NO: 113793 - RNA, 32 nt, Homo Sapiens
cagucacuucuguguuaccugucauuuccuac

SEQ ID NO: 113794 - RNA, 32 nt, Homo Sapiens
ugguggccacuacgcagaccagacuucgcucg

SEQ ID NO: 113795 - RNA, 32 nt, Homo Sapiens
ggugagcccggggggaucggcgcgccccgugu

SEQ ID NO: 113796 - RNA, 32 nt, Homo Sapiens
aguaaccuuuauccaaaccagauccugaauaa

SEQ ID NO: 113797 - RNA, 32 nt, Homo Sapiens
ccuuuagacacuuggggugcucccaagucugc

SEQ ID NO: 113798 - RNA, 32 nt, Homo Sapiens
caagaagaaauccaucaugucaccuuagacuu

SEQ ID NO: 113799 - RNA, 27 nt, Homo Sapiens
ggcugcccccuccccagcccccaguuc

SEQ ID NO: 113800 - RNA, 32 nt, Homo Sapiens
guccagccugacgccuacuggggcagggcagc

SEQ ID NO: 113801 - RNA, 32 nt, Homo Sapiens
uuucuaagaaacaauuaugugcacuuugauac

SEQ ID NO: 113802 - RNA, 32 nt, Homo Sapiens
ucagcccccagaugaagauggggaucacagug

SEQ ID NO: 113803 - RNA, 32 nt, Homo Sapiens
agaauacgccaaucaauacuuggggcucuaag

SEQ ID NO: 113804 - RNA, 32 nt, Homo Sapiens
gguccaggguugcuaggaaaagaaaucagcag

SEQ ID NO: 113805 - RNA, 32 nt, Homo Sapiens
aauuguuaaaauguaguuuagaaucuuuaaua

SEQ ID NO: 113806 - RNA, 32 nt, Homo Sapiens
ccauaaggagcccuggccuccuugcagaaaca

SEQ ID NO: 113807 - RNA, 32 nt, Homo Sapiens
auguuuaugagaauacucuaagaucucaaccc

SEQ ID NO: 113808 - RNA, 32 nt, Homo Sapiens
uucaaauguuaaaaaacuuauuuuuaauguuu

SEQ ID NO: 113809 - RNA, 32 nt, Homo Sapiens
ucaggccaggcagcugcccucagggucugcca

SEQ ID NO: 113810 - RNA, 32 nt, Homo Sapiens
ugacaugaggauggggcuugggauaaagcccu

SEQ ID NO: 113811 - RNA, 32 nt, Homo Sapiens
cugcuuucuucugcugccuuuuaugcuccuug

SEQ ID NO: 113812 - RNA, 32 nt, Homo Sapiens
caguuguuccuaucucucccccgccccccacc

SEQ ID NO: 113813 - RNA, 30 nt, Homo Sapiens
ggcuguaaggcgcgcgcggucagcuguugg

SEQ ID NO: 113814 - RNA, 32 nt, Homo Sapiens
aacuuugcuucuuuggguuuguggcacccugg

SEQ ID NO: 113815 - RNA, 32 nt, Homo Sapiens
ggcuccaggcacuggcuucucuucucuguguc

SEQ ID NO: 113816 - RNA, 32 nt, Homo Sapiens
guuuuguaccggcacgggauauggaacgaaaa

SEQ ID NO: 113817 - RNA, 32 nt, Homo Sapiens
cccccuagccuguggggugcaucugcgaacca

SEQ ID NO: 113818 - RNA, 32 nt, Homo Sapiens
ucgcagccuggcggccuccgcuguggcugccu

SEQ ID NO: 113819 - RNA, 32 nt, Homo Sapiens
ccaucguggguucccugagcccagccagccug

SEQ ID NO: 113820 - RNA, 32 nt, Homo Sapiens
uggauuuguaaauuguaaugaccucaaaacuu

SEQ ID NO: 113821 - RNA, 32 nt, Homo Sapiens
uugaggguugggggcaaugaugagcauaugaa

SEQ ID NO: 113822 - RNA, 32 nt, Homo Sapiens
ggcaggggcuccugcugcgucugggccugaag

SEQ ID NO: 113823 - RNA, 32 nt, Homo Sapiens
ugacuguaaacuucacuuuguaccuugucccc

SEQ ID NO: 113824 - RNA, 32 nt, Homo Sapiens
ccaccuccuugacucgcaguccucccaccgca

SEQ ID NO: 113825 - RNA, 32 nt, Homo Sapiens
gcggggcucuggcgcgccagccggcgggacag

SEQ ID NO: 113826 - RNA, 32 nt, Homo Sapiens
cucggcauggccgcgucacuucucugauuaug

SEQ ID NO: 113827 - RNA, 32 nt, Homo Sapiens
gaguaaaagaaaaacuaagagaucaaacugag

SEQ ID NO: 113828 - RNA, 32 nt, Homo Sapiens
auauguuguguuacacaauuuaccaaaauuaa

SEQ ID NO: 113829 - RNA, 32 nt, Homo Sapiens
aguauuuuaaggguuuuuuuuauuaauacauu

SEQ ID NO: 113830 - RNA, 32 nt, Homo Sapiens
ucuuugcccagacuuugauccuucauggaggc

SEQ ID NO: 113831 - RNA, 32 nt, Homo Sapiens
uuuuguaaaaacaugcugggugaugaaagauu

SEQ ID NO: 113832 - RNA, 32 nt, Homo Sapiens
acaucuaaaaauuucacaucauaaguuuaaac

SEQ ID NO: 113833 - RNA, 32 nt, Homo Sapiens
agagaagaaaauaaucaucuaagaccaucucu

SEQ ID NO: 113834 - RNA, 32 nt, Homo Sapiens
uguuuuuaaggguucugagcaugaagcuggca

SEQ ID NO: 113835 - RNA, 32 nt, Homo Sapiens
uggcauuuuccuaccacuuacuaaaagguuua

SEQ ID NO: 113836 - RNA, 32 nt, Homo Sapiens
cgugcgcacuccccggacgucccgccccgccc

SEQ ID NO: 113837 - RNA, 28 nt, Homo Sapiens
cccgguuggucaggaccaagugggcccg

SEQ ID NO: 113838 - RNA, 32 nt, Homo Sapiens
gccuucugcacuacucuuuugcucuuacgaac

SEQ ID NO: 113839 - RNA, 32 nt, Homo Sapiens
gcugcggcuccugcaccuccccggggagccgc

SEQ ID NO: 113840 - RNA, 32 nt, Homo Sapiens
cuuauuuuuuaaaacaggcuagaaucucaugu

SEQ ID NO: 113841 - RNA, 32 nt, Homo Sapiens
ccuggauagaaaguugaccacuaacugcaggu

SEQ ID NO: 113842 - RNA, 32 nt, Homo Sapiens
aguggaggcaggaugggagagcccccugggug

SEQ ID NO: 113843 - RNA, 28 nt, Homo Sapiens
cuuauuaugugcaacauuaugauuaauc

SEQ ID NO: 113844 - RNA, 32 nt, Homo Sapiens
ccuuuuaaaaauuacuggcuaaaaagaaggaa

SEQ ID NO: 113845 - RNA, 32 nt, Homo Sapiens
guccuaggcaguagguugaaaaacacugaagu

SEQ ID NO: 113846 - RNA, 32 nt, Homo Sapiens
agggagcacaacacuggcaaugccuugcuuuc

SEQ ID NO: 113847 - RNA, 32 nt, Homo Sapiens
ggggcagaagagacccaaccacuuccuauuuu

SEQ ID NO: 113848 - RNA, 32 nt, Homo Sapiens
gcucggcgauccccggcgccgucgccaggcgc

SEQ ID NO: 113849 - RNA, 32 nt, Homo Sapiens
aucuuguucaaucggaaacccccguuaccucc

SEQ ID NO: 113850 - RNA, 32 nt, Homo Sapiens
uggagaagggaagucggaacacaaggaaggac

SEQ ID NO: 113851 - RNA, 32 nt, Homo Sapiens
acaucauaaaaagccaugaaagggacucucau

SEQ ID NO: 113852 - RNA, 32 nt, Homo Sapiens
uauguaacuucagggauucaauccccaaaugu

SEQ ID NO: 113853 - RNA, 32 nt, Homo Sapiens
gaaacaaaaguacagacagaacacaaaagguu

SEQ ID NO: 113854 - RNA, 32 nt, Homo Sapiens
gaaccccuuucugccccuccaccaguaccagu

SEQ ID NO: 113855 - RNA, 32 nt, Homo Sapiens
uaagccagaaaaggacuggacggaggaggacc

SEQ ID NO: 113856 - RNA, 32 nt, Homo Sapiens
augaggacaaagugaauuuaaccuggaaaaga

SEQ ID NO: 113857 - RNA, 32 nt, Homo Sapiens
cgcgccucccugcacacgcacacacacgcaca

SEQ ID NO: 113858 - RNA, 32 nt, Homo Sapiens
aggaaucuuuuguucuuaauucugaguugcuc

SEQ ID NO: 113859 - RNA, 32 nt, Homo Sapiens
cagcugacgcuccuccacggagguccccuuuu

SEQ ID NO: 113860 - RNA, 32 nt, Homo Sapiens
agacaagaacugaguuaccaaaaccuacuaaa

SEQ ID NO: 113861 - RNA, 32 nt, Homo Sapiens
uguccugucuacauuagcauucaccccgggug

SEQ ID NO: 113862 - RNA, 32 nt, Homo Sapiens
aacugcugcaggaugccuguaguagggaacuc

SEQ ID NO: 113863 - RNA, 32 nt, Homo Sapiens
caagguucauaggcuuacauuuucuccuggca

SEQ ID NO: 113864 - RNA, 32 nt, Homo Sapiens
gucaugcucucacucuuuccuguccccuaccc

SEQ ID NO: 113865 - RNA, 32 nt, Homo Sapiens
cccauucaucugcaugagcuacucuuggcuuc

SEQ ID NO: 113866 - RNA, 32 nt, Homo Sapiens
cccccaacucugcgccccuacuccaugcugcu

SEQ ID NO: 113867 - RNA, 32 nt, Homo Sapiens
cagacggccgugggguggguggcaccgcuucc

SEQ ID NO: 113868 - RNA, 32 nt, Homo Sapiens
gcccgguugcuuccucaguucccggcuguguc

SEQ ID NO: 113869 - RNA, 32 nt, Homo Sapiens
ucccagcuacucuggaggcugaggcgggagaa

SEQ ID NO: 113870 - RNA, 32 nt, Homo Sapiens
aauaucuguucuuuugcucaucuuagaccaca

SEQ ID NO: 113871 - RNA, 32 nt, Homo Sapiens
uuggaaauuuguacugaaauccacaauaauca

SEQ ID NO: 113872 - RNA, 32 nt, Homo Sapiens
auuuuauaguugugaugcacaauauaauuuaa

SEQ ID NO: 113873 - RNA, 32 nt, Homo Sapiens
ggugggaccugccacgugcuaacucuggcacu

SEQ ID NO: 113874 - RNA, 32 nt, Homo Sapiens
auugacaauuauuguagggguagcauuuaaga

SEQ ID NO: 113875 - RNA, 32 nt, Homo Sapiens
cgcuacuaauuugcccgagguacgaacgaaac

SEQ ID NO: 113876 - RNA, 32 nt, Homo Sapiens
uugccugaaaacaagcagauaccgauugcuuc

SEQ ID NO: 113877 - RNA, 32 nt, Homo Sapiens
ugugacaguuaaaauuaaguaaaauuaaaacu

SEQ ID NO: 113878 - RNA, 32 nt, Homo Sapiens
auaggaacugggggccuucccuggacagugau

SEQ ID NO: 113879 - RNA, 32 nt, Homo Sapiens
ucacuugccugccuaauggucaucuccccagu

SEQ ID NO: 113880 - RNA, 32 nt, Homo Sapiens
aauuauacagcuuauuagagugugggaauagg

SEQ ID NO: 113881 - RNA, 32 nt, Homo Sapiens
aacccauuuuaaaaugaguuuuugaaucuugc

SEQ ID NO: 113882 - RNA, 32 nt, Homo Sapiens
ucuuuuugaaagauuucauuaagacugauggg

SEQ ID NO: 113883 - RNA, 32 nt, Homo Sapiens
uucccggaguccacgcaugugaguugggucaa

SEQ ID NO: 113884 - RNA, 32 nt, Homo Sapiens
uggaauagaguguggaauauuauaaaacugga

SEQ ID NO: 113885 - RNA, 32 nt, Homo Sapiens
aaaguuccaaaauauaguuuauuguaucuuuc

SEQ ID NO: 113886 - RNA, 32 nt, Homo Sapiens
cagagccaaaagccagcagagagaagacucag

SEQ ID NO: 113887 - RNA, 32 nt, Homo Sapiens
gacgaugguauccccuaggagcccugugaggu

SEQ ID NO: 113888 - RNA, 32 nt, Homo Sapiens
caagccugaccgugcccuaguuuucagaggag

SEQ ID NO: 113889 - RNA, 32 nt, Homo Sapiens
gcauggccaaaaaacuaaguaucaaagcagca

SEQ ID NO: 113890 - RNA, 32 nt, Homo Sapiens
cuagugauuugaaaaauaauuuucuggauaac

SEQ ID NO: 113891 - RNA, 32 nt, Homo Sapiens
auagguuccagcuuuauguccugcugcagacu

SEQ ID NO: 113892 - RNA, 32 nt, Homo Sapiens
gggccagagcuagggcugcugcuucugcucca

SEQ ID NO: 113893 - RNA, 32 nt, Homo Sapiens
agaauauaaaaauuagcuggguaugguggcac

SEQ ID NO: 113894 - RNA, 32 nt, Homo Sapiens
aucuccacgcaccuguguaugugaaagucauu

SEQ ID NO: 113895 - RNA, 32 nt, Homo Sapiens
cauaccuauuuucuccgccuguauguauggau

SEQ ID NO: 113896 - RNA, 32 nt, Homo Sapiens
caccgagccucugcccagccaagccgccgucg

SEQ ID NO: 113897 - RNA, 32 nt, Homo Sapiens
ccucccugccccacccggguccugugcuggcu

SEQ ID NO: 113898 - RNA, 32 nt, Homo Sapiens
ggcugugugucugcggaucuguaguggcggcg

SEQ ID NO: 113899 - RNA, 32 nt, Homo Sapiens
ucuucuuaccaugaucaaaggcgaaggaaggg

SEQ ID NO: 113900 - RNA, 32 nt, Homo Sapiens
uuuacagaacacauuuuaaucaauagaagaau

SEQ ID NO: 113901 - RNA, 32 nt, Homo Sapiens
ccggaggcuguggccuggugucagggcggggc

SEQ ID NO: 113902 - RNA, 32 nt, Homo Sapiens
aggagacccagcuggaaaccuggcuucuccau

SEQ ID NO: 113903 - RNA, 32 nt, Homo Sapiens
gccguguacgaagugagccgcagcuccuacgu

SEQ ID NO: 113904 - RNA, 31 nt, Homo Sapiens
gacaaacaucugugaguuggauaugugccaa

SEQ ID NO: 113905 - RNA, 32 nt, Homo Sapiens
gcaacuuaccccggccagccagcccucucacc

SEQ ID NO: 113906 - RNA, 30 nt, Homo Sapiens
ugugugaauaucccugcuggcucugaugcu

SEQ ID NO: 113907 - RNA, 32 nt, Homo Sapiens
cagaaguuagacaaguuuauuuuagugcaaac

SEQ ID NO: 113908 - RNA, 32 nt, Homo Sapiens
augagaauuuaaagcaaauguuucuaaaugag

SEQ ID NO: 113909 - RNA, 30 nt, Homo Sapiens
acagcaccagucgcuggugagucugguagc

SEQ ID NO: 113910 - RNA, 32 nt, Homo Sapiens
aauguuuuaacucuuuuggacaaaggaaucaa

SEQ ID NO: 113911 - RNA, 32 nt, Homo Sapiens
uauugaaauggcaggugggcucuguaaguuau

SEQ ID NO: 113912 - RNA, 32 nt, Homo Sapiens
guucuaaaaguacuuggguaaacauacuaaaa

SEQ ID NO: 113913 - RNA, 32 nt, Homo Sapiens
cgccccuugucacaaugaccuccccuucccac

SEQ ID NO: 113914 - RNA, 32 nt, Homo Sapiens
auaacuguggagauaauacugaugaaaaugag

SEQ ID NO: 113915 - RNA, 32 nt, Homo Sapiens
uuagaccuguaguuuucaacacugacagcacu

SEQ ID NO: 113916 - RNA, 32 nt, Homo Sapiens
auugauuuuucaguucuuuuuaucaucuagaa

SEQ ID NO: 113917 - RNA, 32 nt, Homo Sapiens
cagcacuggggaggagagacaggauaaagggc

SEQ ID NO: 113918 - RNA, 32 nt, Homo Sapiens
uuuuauuuuccauuuuucuuguuuccugauaa

SEQ ID NO: 113919 - RNA, 32 nt, Homo Sapiens
guacucuccaagcuccugucuuucuuuccucu

SEQ ID NO: 113920 - RNA, 32 nt, Homo Sapiens
aaggcacaggaguuugucugggacaucauaga

SEQ ID NO: 113921 - RNA, 32 nt, Homo Sapiens
uuaaaagacagaggcuccaaaaugauuucagg

SEQ ID NO: 113922 - RNA, 32 nt, Homo Sapiens
cugccuucaggaacacgggucuguagaggguc

SEQ ID NO: 113923 - RNA, 30 nt, Homo Sapiens
ccgcgccaugcuccaccuuagcgaguuuuc

SEQ ID NO: 113924 - RNA, 32 nt, Homo Sapiens
ucugugacuuaacgucgucaaguauggcauau

SEQ ID NO: 113925 - RNA, 32 nt, Homo Sapiens
cagccccugcuagcugccccccgagccgagcg

SEQ ID NO: 113926 - RNA, 27 nt, Homo Sapiens
cuuuaucauuaauuagguaauauuuuc

SEQ ID NO: 113927 - RNA, 32 nt, Homo Sapiens
cgaccccagggcuggcagcugccgcugcaccg

SEQ ID NO: 113928 - RNA, 32 nt, Homo Sapiens
gcugucaaguguccagagagccaugguguugg

SEQ ID NO: 113929 - RNA, 32 nt, Homo Sapiens
caacauaaaaauuucaauuuucaguaaaaaaa

SEQ ID NO: 113930 - RNA, 32 nt, Homo Sapiens
cucaguucucgggcguacggcgcggccugucc

SEQ ID NO: 113931 - RNA, 32 nt, Homo Sapiens
auacuuuuuguaguuucuuuuaauuuuugaaa

SEQ ID NO: 113932 - RNA, 32 nt, Homo Sapiens
ccgagguacggcggcacggcugcagccuggau

SEQ ID NO: 113933 - RNA, 32 nt, Homo Sapiens
gacuccugcuccaugcuuuuggcagucauggg

SEQ ID NO: 113934 - RNA, 30 nt, Homo Sapiens
guaaaacgcaggcgcugggccgcgggcgga

SEQ ID NO: 113935 - RNA, 31 nt, Homo Sapiens
gaauccacaaagaauuaaaaacugguaacac

SEQ ID NO: 113936 - RNA, 32 nt, Homo Sapiens
guuuaauguugaagaauugaccucagggcuca

SEQ ID NO: 113937 - RNA, 32 nt, Homo Sapiens
ucuuuuuuuuuuucuuuuuuuuuuuguauuau

SEQ ID NO: 113938 - RNA, 32 nt, Homo Sapiens
gucucugcuauggucccuccccagucaggccc

SEQ ID NO: 113939 - RNA, 32 nt, Homo Sapiens
cccuucugcuccagcuugcuggauguuaccug

SEQ ID NO: 113940 - RNA, 32 nt, Homo Sapiens
gaaggguuagagaggucgguagaggggcccag

SEQ ID NO: 113941 - RNA, 32 nt, Homo Sapiens
aguuggaaaaauacuuuuucaaaaacuacagc

SEQ ID NO: 113942 - RNA, 32 nt, Homo Sapiens
gcggagaguuuaauaggcaagaaggaagggag

SEQ ID NO: 113943 - RNA, 32 nt, Homo Sapiens
uuugccaagaugaagaaaaugaguucucaagg

SEQ ID NO: 113944 - RNA, 32 nt, Homo Sapiens
agccugauuaagcggggcucccugcccgugag

SEQ ID NO: 113945 - RNA, 32 nt, Homo Sapiens
auuguccucaugccuguauucuccaggaaacu

SEQ ID NO: 113946 - RNA, 31 nt, Homo Sapiens
agacacauggaaaugcagcaaaacugcagca

SEQ ID NO: 113947 - RNA, 32 nt, Homo Sapiens
gccuaugccagcugacaggggcagagggcagc

SEQ ID NO: 113948 - RNA, 32 nt, Homo Sapiens
ccgucugggaagcucaucuugcgaagcugagg

SEQ ID NO: 113949 - RNA, 32 nt, Homo Sapiens
ggggggaaaugaauacugaguuggccuuuauu

SEQ ID NO: 113950 - RNA, 32 nt, Homo Sapiens
uuauguuaauaaacuuguagcuuuuugugaaa

SEQ ID NO: 113951 - RNA, 32 nt, Homo Sapiens
uacuauaaaaacaauauaugugggaaaacuuc

SEQ ID NO: 113952 - RNA, 32 nt, Homo Sapiens
aaacuuauuuuuccagcagaagaaucccagac

SEQ ID NO: 113953 - RNA, 32 nt, Homo Sapiens
uguucugacuuugccuggcugucuccuugacc

SEQ ID NO: 113954 - RNA, 27 nt, Homo Sapiens
agauggcggcgcagccaccccgcggga

SEQ ID NO: 113955 - RNA, 32 nt, Homo Sapiens
uuaaucuuucuugguccacauccugaaagcau

SEQ ID NO: 113956 - RNA, 32 nt, Homo Sapiens
uugagguggaggaacagaagugaaaugagcaa

SEQ ID NO: 113957 - RNA, 32 nt, Homo Sapiens
acccuuccccaugccccucccacggucagcuc

SEQ ID NO: 113958 - RNA, 32 nt, Homo Sapiens
uuuuuguguagggagaauaaugucuaguaaug

SEQ ID NO: 113959 - RNA, 28 nt, Homo Sapiens
ccaaugaugagggaacauuugaaagaac

SEQ ID NO: 113960 - RNA, 32 nt, Homo Sapiens
auuuuucucuauuugcuagauuuguuuugagu

SEQ ID NO: 113961 - RNA, 32 nt, Homo Sapiens
acuucgggaaucaacccuccugaaacagcgga

SEQ ID NO: 113962 - RNA, 32 nt, Homo Sapiens
cugaggucaggaguuugagaccagccugccca

SEQ ID NO: 113963 - RNA, 32 nt, Homo Sapiens
auguugguaacgccagccacgauuuuucguau

SEQ ID NO: 113964 - RNA, 32 nt, Homo Sapiens
uccaaccacacaccccaccccauccguguccu

SEQ ID NO: 113965 - RNA, 32 nt, Homo Sapiens
gcuucugacacgguccacgugccuggcucuga

SEQ ID NO: 113966 - RNA, 30 nt, Homo Sapiens
ccuggcugccuucuucacgcccugaggaca

SEQ ID NO: 113967 - RNA, 32 nt, Homo Sapiens
uugagaucaaggagaagauaguggaacaaaau

SEQ ID NO: 113968 - RNA, 32 nt, Homo Sapiens
gacuuaaaaagaaaacaaaaacaaauggcaag

SEQ ID NO: 113969 - RNA, 32 nt, Homo Sapiens
ugaaggguuauguauacaucacacacacacac

SEQ ID NO: 113970 - RNA, 32 nt, Homo Sapiens
guucuccccccgcaccauccguguccugcauu

SEQ ID NO: 113971 - RNA, 32 nt, Homo Sapiens
uugccuguggcccauaccccagcccuccuguc

SEQ ID NO: 113972 - RNA, 32 nt, Homo Sapiens
auagugaauauuaaagagggaaagcaguuuuc

SEQ ID NO: 113973 - RNA, 32 nt, Homo Sapiens
gacguguccccacugaggugccccacagcagc

SEQ ID NO: 113974 - RNA, 32 nt, Homo Sapiens
augggagacaugugcugggucuguggggccgu

SEQ ID NO: 113975 - RNA, 32 nt, Homo Sapiens
ucaugccgcaagggcuuucugcucuggccuua

SEQ ID NO: 113976 - RNA, 32 nt, Homo Sapiens
gaauuaaauauguucauauucuucgauuaucu

SEQ ID NO: 113977 - RNA, 32 nt, Homo Sapiens
uuuucucagggauaagaaaaccacaaucaagg

SEQ ID NO: 113978 - RNA, 32 nt, Homo Sapiens
ggugucuuguuuucuuucuccuccaugugucu

SEQ ID NO: 113979 - RNA, 32 nt, Homo Sapiens
cuggugaaagagaagcacagagauauuuugau

SEQ ID NO: 113980 - RNA, 32 nt, Homo Sapiens
uaggggauauuuuucaaccucuugcuuuauac

SEQ ID NO: 113981 - RNA, 32 nt, Homo Sapiens
gauuucauuuccccaggucuucaguguugaug

SEQ ID NO: 113982 - RNA, 32 nt, Homo Sapiens
cuuaagaguccaaaugucucuggugauguucc

SEQ ID NO: 113983 - RNA, 32 nt, Homo Sapiens
augaaaagaaguuaacaggaaauaguaggcua

SEQ ID NO: 113984 - RNA, 32 nt, Homo Sapiens
aagagcaggucccaggugugccugcagcagug

SEQ ID NO: 113985 - RNA, 32 nt, Homo Sapiens
ggaaggagguuaaacucagaaaaaagaagacc

SEQ ID NO: 113986 - RNA, 32 nt, Homo Sapiens
caggcuggaaugcaguggugugaucuuggcuc

SEQ ID NO: 113987 - RNA, 32 nt, Homo Sapiens
uuauugaaaggggacaccuguacauucuucca

SEQ ID NO: 113988 - RNA, 27 nt, Homo Sapiens
ggccucuccacccucagcccccugcuu

SEQ ID NO: 113989 - RNA, 32 nt, Homo Sapiens
augaagaaaaggagagguagauacagucagug

SEQ ID NO: 113990 - RNA, 32 nt, Homo Sapiens
gagaaguucaacauuuauuucuucacgugucc

SEQ ID NO: 113991 - RNA, 32 nt, Homo Sapiens
uuagaacccagaaaaaagaguuauaucauuug

SEQ ID NO: 113992 - RNA, 32 nt, Homo Sapiens
ccaaaccccacuuucucccuccuccuuuuccu

SEQ ID NO: 113993 - RNA, 32 nt, Homo Sapiens
cagcuccccacuuuaucugcagacucugggac

SEQ ID NO: 113994 - RNA, 32 nt, Homo Sapiens
cccaucgacgacuucccggggcgacaggagca

SEQ ID NO: 113995 - RNA, 31 nt, Homo Sapiens
cugcgcggcugcacccugccccauccugccg

SEQ ID NO: 113996 - RNA, 32 nt, Homo Sapiens
gggaagaugaacccagaaaugcugagucaggg

SEQ ID NO: 113997 - RNA, 32 nt, Homo Sapiens
agucagguuucagugucuuuucccucccuuag

SEQ ID NO: 113998 - RNA, 32 nt, Homo Sapiens
gaggaacucuguugcuucgccuggacaagaag

SEQ ID NO: 113999 - RNA, 32 nt, Homo Sapiens
aaggagaaaaggacugauucguuugccaaaag

SEQ ID NO: 114000 - RNA, 32 nt, Homo Sapiens
ggugggcaaggugggaccuccugcagccugga

SEQ ID NO: 114001 - RNA, 32 nt, Homo Sapiens
ccauuccugugccuacuuugccugaguucuuc

SEQ ID NO: 114002 - RNA, 32 nt, Homo Sapiens
auucaccaaaaggacuuaauucuuguuuuuuu

SEQ ID NO: 114003 - RNA, 32 nt, Homo Sapiens
ucaucugcucugcaugauaucuccagggggac

SEQ ID NO: 114004 - RNA, 32 nt, Homo Sapiens
gauauaaauuuguguuugauaaauauccucuc

SEQ ID NO: 114005 - RNA, 32 nt, Homo Sapiens
cuuuaaagcuguuuuucuccauugucauagug

SEQ ID NO: 114006 - RNA, 32 nt, Homo Sapiens
ucucggcuccccagcccagucuuggcuucuug

SEQ ID NO: 114007 - RNA, 32 nt, Homo Sapiens
aauccugaagcaugcagauuccagacaugacc

SEQ ID NO: 114008 - RNA, 32 nt, Homo Sapiens
augggggauaucugaggccagugcucuccugc

SEQ ID NO: 114009 - RNA, 30 nt, Homo Sapiens
gcugcuugcugugcugcugcuuuuccuacu

SEQ ID NO: 114010 - RNA, 32 nt, Homo Sapiens
ucuaacauuaagcuaccaagauccugaauguc

SEQ ID NO: 114011 - RNA, 30 nt, Homo Sapiens
uggugaggcaggcucgccuccuccagcugu

SEQ ID NO: 114012 - RNA, 32 nt, Homo Sapiens
cacauuauaacuaaaggaauccccucaauuca

SEQ ID NO: 114013 - RNA, 32 nt, Homo Sapiens
uuacauauauggacauaacuugugaaggauga

SEQ ID NO: 114014 - RNA, 32 nt, Homo Sapiens
cauauuguucuugugauagugaauaagucuca

SEQ ID NO: 114015 - RNA, 32 nt, Homo Sapiens
caccucgcggacggcguggguccgccagcucc

SEQ ID NO: 114016 - RNA, 32 nt, Homo Sapiens
guguuguccugcaguugucauugucuucucca

SEQ ID NO: 114017 - RNA, 32 nt, Homo Sapiens
uaugacucagguuaagaaauguguuuuaggau

SEQ ID NO: 114018 - RNA, 32 nt, Homo Sapiens
uggaagagaagaagugacacaaaccuauacuu

SEQ ID NO: 114019 - RNA, 32 nt, Homo Sapiens
cagaaacuuccaucucagguccuuccaaggaa

SEQ ID NO: 114020 - RNA, 32 nt, Homo Sapiens
uucugauguuucggaacagucauuucaccuac

SEQ ID NO: 114021 - RNA, 32 nt, Homo Sapiens
caguaauuauaggucaaaucuaauuacaacaa

SEQ ID NO: 114022 - RNA, 32 nt, Homo Sapiens
uuccggucuccauggcgacgccuccaaacagc

SEQ ID NO: 114023 - RNA, 32 nt, Homo Sapiens
gagggccgccgaacuacccccggagggaggag

SEQ ID NO: 114024 - RNA, 32 nt, Homo Sapiens
auaacuugaaauuuauagcugugauaggaguu

SEQ ID NO: 114025 - RNA, 32 nt, Homo Sapiens
uggcagggacuggcaggaggcaggugcaggga

SEQ ID NO: 114026 - RNA, 32 nt, Homo Sapiens
aaaaaaaaaaacaaaaacugggcugggucuuc

SEQ ID NO: 114027 - RNA, 32 nt, Homo Sapiens
cgcggggugaagcggcuucccgcggggccgug

SEQ ID NO: 114028 - RNA, 32 nt, Homo Sapiens
cuuucucacauuuuccauuuccaaauaacugu

SEQ ID NO: 114029 - RNA, 32 nt, Homo Sapiens
aaucauccuuacuagguaaaauguauuaugau

SEQ ID NO: 114030 - RNA, 32 nt, Homo Sapiens
caacaagucaauccaaaucagcccguuaagga

SEQ ID NO: 114031 - RNA, 32 nt, Homo Sapiens
uuuccguccgccagugcaggaacccggugcuc

SEQ ID NO: 114032 - RNA, 28 nt, Homo Sapiens
ggcccggggcggcguccgccauggagau

SEQ ID NO: 114033 - RNA, 32 nt, Homo Sapiens
gauucccucugugaaggaaucaucucuacuuc

SEQ ID NO: 114034 - RNA, 32 nt, Homo Sapiens
uuuuguuugauuucagcccauguucuugacaa

SEQ ID NO: 114035 - RNA, 32 nt, Homo Sapiens
ucaagaggcugcgccuguacugccuggaugag

SEQ ID NO: 114036 - RNA, 32 nt, Homo Sapiens
cuaccuucacagaucaaggagggucuacuaca

SEQ ID NO: 114037 - RNA, 32 nt, Homo Sapiens
uguguauuaaagauuauuauaaaaugauaacu

SEQ ID NO: 114038 - RNA, 32 nt, Homo Sapiens
uuauauauauauauuuuuuaaacuuaaauuuu

SEQ ID NO: 114039 - RNA, 32 nt, Homo Sapiens
ccuugcaucuacaaaacaagagagagacuguu

SEQ ID NO: 114040 - RNA, 32 nt, Homo Sapiens
ugccuggagagccgaguugcagugcuggaagu

SEQ ID NO: 114041 - RNA, 32 nt, Homo Sapiens
cuugugggaauuauguaauauuuauuaauauu

SEQ ID NO: 114042 - RNA, 32 nt, Homo Sapiens
uccccccaggucuaccccucccggcccugccu

SEQ ID NO: 114043 - RNA, 32 nt, Homo Sapiens
guauggcccuccccagggguacccagugccag

SEQ ID NO: 114044 - RNA, 32 nt, Homo Sapiens
cccaugaccaggccacggucaaggcuguuuuu

SEQ ID NO: 114045 - RNA, 32 nt, Homo Sapiens
uaaaacuguaccaaaugacauaaaaaugcaua

SEQ ID NO: 114046 - RNA, 32 nt, Homo Sapiens
uucugagaauaaagguuuuguuauaucaaaaa

SEQ ID NO: 114047 - RNA, 32 nt, Homo Sapiens
aaucaccugugugucuuaauuucucaauuccu

SEQ ID NO: 114048 - RNA, 32 nt, Homo Sapiens
aaugugauaaaacuuuaaauguauaaaacuuu

SEQ ID NO: 114049 - RNA, 32 nt, Homo Sapiens
agagauggcguagaagugaaagucuuaaaggg

SEQ ID NO: 114050 - RNA, 32 nt, Homo Sapiens
ugcgcuaguccuaaagaggaaaugucucuacg

SEQ ID NO: 114051 - RNA, 32 nt, Homo Sapiens
ccuggggaguaccugauggcugcccuuugacc

SEQ ID NO: 114052 - RNA, 32 nt, Homo Sapiens
ucaauauuuuuccaggaaaguugaggagaaua

SEQ ID NO: 114053 - RNA, 32 nt, Homo Sapiens
augauucauaucuaaauuacauuauuauguua

SEQ ID NO: 114054 - RNA, 32 nt, Homo Sapiens
ucagggcucccucagguucagaggucgccucu

SEQ ID NO: 114055 - RNA, 32 nt, Homo Sapiens
auucacaaccucaccaaacuaguaucauuuua

SEQ ID NO: 114056 - RNA, 32 nt, Homo Sapiens
aagguucuuuccuuuuucuuaguugcuuucua

SEQ ID NO: 114057 - RNA, 32 nt, Homo Sapiens
gguggagagaaaaguggucaguccuucuuggg

SEQ ID NO: 114058 - RNA, 32 nt, Homo Sapiens
uuauaaaugaauuuuucauagaauuuacagua

SEQ ID NO: 114059 - RNA, 32 nt, Homo Sapiens
cgggagcucaaagggaugugggcgaaaucuug

SEQ ID NO: 114060 - RNA, 32 nt, Homo Sapiens
uuauuucuuaaagcuuuuuuuuuuuucccauc

SEQ ID NO: 114061 - RNA, 32 nt, Homo Sapiens
cgugccccuauuuuccucugagcccucagaac

SEQ ID NO: 114062 - RNA, 32 nt, Homo Sapiens
ucguggccgcgcucgucgcggagcuccucuag

SEQ ID NO: 114063 - RNA, 32 nt, Homo Sapiens
auaggaaguagaccucuuuuucuuaccagucu

SEQ ID NO: 114064 - RNA, 31 nt, Homo Sapiens
aggcuccggcucccuccgccccgcgccaucg

SEQ ID NO: 114065 - RNA, 32 nt, Homo Sapiens
uccaggcagguccagcaguccuggcgggcuga

SEQ ID NO: 114066 - RNA, 32 nt, Homo Sapiens
ucuguggugcuugguuaccgcggcccuagcaa

SEQ ID NO: 114067 - RNA, 32 nt, Homo Sapiens
aucaaaagaagaagacaaacaucuaucuuucu

SEQ ID NO: 114068 - RNA, 32 nt, Homo Sapiens
uugcuucaugugcagauaaccaaaaaucauuu

SEQ ID NO: 114069 - RNA, 32 nt, Homo Sapiens
cagaaaaguguugguaacuauaaagaaaauua

SEQ ID NO: 114070 - RNA, 32 nt, Homo Sapiens
aagaacucaaggccuaggagaauggggucaca

SEQ ID NO: 114071 - RNA, 32 nt, Homo Sapiens
uaccauuuuaauaaagcauguacaauaaacca

SEQ ID NO: 114072 - RNA, 32 nt, Homo Sapiens
ggcuggucucgaacuccugaccucaagcaguc

SEQ ID NO: 114073 - RNA, 32 nt, Homo Sapiens
ccaccccaucccuuuucucuggcacuccaguc

SEQ ID NO: 114074 - RNA, 32 nt, Homo Sapiens
cuuaccgagucgguggcggcgccggacagcgg

SEQ ID NO: 114075 - RNA, 32 nt, Homo Sapiens
gccucagacgaguccagggcgccggguuaacu

SEQ ID NO: 114076 - RNA, 32 nt, Homo Sapiens
auucugucugggauuauauuugcuaaguaaaa

SEQ ID NO: 114077 - RNA, 32 nt, Homo Sapiens
aggaucugccagcugcccugcagccaacugag

SEQ ID NO: 114078 - RNA, 32 nt, Homo Sapiens
auuuuugagacuuggguuuucuuaaugccagu

SEQ ID NO: 114079 - RNA, 30 nt, Homo Sapiens
gucuuccaugcucacugcucaugcacuuuu

SEQ ID NO: 114080 - RNA, 32 nt, Homo Sapiens
cacaguauuuccccuauauuuuaguccuucca

SEQ ID NO: 114081 - RNA, 32 nt, Homo Sapiens
aagcaaucuuggcagacuaaaacaaguacauc

SEQ ID NO: 114082 - RNA, 32 nt, Homo Sapiens
ucgccgcgcgcccagccaugaaccuggcgagc

SEQ ID NO: 114083 - RNA, 32 nt, Homo Sapiens
gcacuauccugccugguggcccugggagccag

SEQ ID NO: 114084 - RNA, 32 nt, Homo Sapiens
cgcucacccgcggacucagggcuggcggcggg

SEQ ID NO: 114085 - RNA, 32 nt, Homo Sapiens
uucauaaacugguaucucuggaggaacuguga

SEQ ID NO: 114086 - RNA, 32 nt, Homo Sapiens
agaacagagucuuuuucuucuucggauucuau

SEQ ID NO: 114087 - RNA, 32 nt, Homo Sapiens
ugcgcggaccgugcgcgccgcgggcgccagau

SEQ ID NO: 114088 - RNA, 32 nt, Homo Sapiens
acuuccuguggcggcuccuggcgcuggcgggc

SEQ ID NO: 114089 - RNA, 32 nt, Homo Sapiens
cggaggcggcggcucgggagggaaggaggcgg

SEQ ID NO: 114090 - RNA, 32 nt, Homo Sapiens
cccuucgaaagcacagcugaaagcguugaccu

SEQ ID NO: 114091 - RNA, 32 nt, Homo Sapiens
aacugugagaaauaaacuauguggauacuguc

SEQ ID NO: 114092 - RNA, 32 nt, Homo Sapiens
uggauuuuauuacacaugguggaagagagaag

SEQ ID NO: 114093 - RNA, 32 nt, Homo Sapiens
ggcagcaggggagccccgcgggcgcgcguccu

SEQ ID NO: 114094 - RNA, 32 nt, Homo Sapiens
ccggggggcuccugggggugugcgcccccagc

SEQ ID NO: 114095 - RNA, 32 nt, Homo Sapiens
uuugucauguugcucgggcuagccucaaacuc

SEQ ID NO: 114096 - RNA, 32 nt, Homo Sapiens
aauuaugguuggaaaacugaggaaucuucugg

SEQ ID NO: 114097 - RNA, 32 nt, Homo Sapiens
aucuuuaugacauuucaaauguuuauuuggaa

SEQ ID NO: 114098 - RNA, 32 nt, Homo Sapiens
gcacuucuagaaugucugaaguacaaacauga

SEQ ID NO: 114099 - RNA, 32 nt, Homo Sapiens
ggugaggucacuagauucuacugcucuucccc

SEQ ID NO: 114100 - RNA, 32 nt, Homo Sapiens
gaacauguuucccccuuugguuuccuguauuu

SEQ ID NO: 114101 - RNA, 32 nt, Homo Sapiens
cgagcggcggucggagccugcugcggcaguug

SEQ ID NO: 114102 - RNA, 32 nt, Homo Sapiens
cucacggcggccccggccccggguggcugcag

SEQ ID NO: 114103 - RNA, 32 nt, Homo Sapiens
uacucugggaaaaauaaaaugcugggugucuc

SEQ ID NO: 114104 - RNA, 32 nt, Homo Sapiens
uugcuaccacggccuccuuuccguuugauuug

SEQ ID NO: 114105 - RNA, 32 nt, Homo Sapiens
cuuuugccagcuugauggguauuaagugucau

SEQ ID NO: 114106 - RNA, 32 nt, Homo Sapiens
gcccccacccgcccuucguccccuccgccucu

SEQ ID NO: 114107 - RNA, 32 nt, Homo Sapiens
cccgagcgcugcgccuggaccggcgccgagcg

SEQ ID NO: 114108 - RNA, 32 nt, Homo Sapiens
auuuuguuuuguuuuucuuacagcuuugccgg

SEQ ID NO: 114109 - RNA, 32 nt, Homo Sapiens
gggauuaauuagagauaaugucuguaaagcau

SEQ ID NO: 114110 - RNA, 32 nt, Homo Sapiens
cacgugguagaugcccaccuccuccaugccuc

SEQ ID NO: 114111 - RNA, 32 nt, Homo Sapiens
uggaaaaauacuuuuucaaaaacuacagcuua

SEQ ID NO: 114112 - RNA, 32 nt, Homo Sapiens
ugcuuagaauugugaagugcagcuuuacaguc

SEQ ID NO: 114113 - RNA, 32 nt, Homo Sapiens
aggcacugcagccuugggagaaguugacugug

SEQ ID NO: 114114 - RNA, 32 nt, Homo Sapiens
gcucucugcccgcgccgccgccgccucagccu

SEQ ID NO: 114115 - RNA, 32 nt, Homo Sapiens
ccuguuucucuuaaaauaaaauccauuuccua

SEQ ID NO: 114116 - RNA, 32 nt, Homo Sapiens
gcaguggcgcggugcgggcucacugcaagcuc

SEQ ID NO: 114117 - RNA, 32 nt, Homo Sapiens
gccugagcugugagaaacauccugucaggcag

SEQ ID NO: 114118 - RNA, 32 nt, Homo Sapiens
ugccaggcucugcgccugccccacacccuccc

SEQ ID NO: 114119 - RNA, 32 nt, Homo Sapiens
augcacuuuugugaaaauggggugugaggagu

SEQ ID NO: 114120 - RNA, 32 nt, Homo Sapiens
aaagggaaaaagagaaaagcugaugcuggcaa

SEQ ID NO: 114121 - RNA, 32 nt, Homo Sapiens
guagccaagcacuuauggaccagaguggccca

SEQ ID NO: 114122 - RNA, 32 nt, Homo Sapiens
aagagcaaaacuccaucucaaaaaauaaauaa

SEQ ID NO: 114123 - RNA, 32 nt, Homo Sapiens
uaaugcagugcauuuccuuagcccuuagaguu

SEQ ID NO: 114124 - RNA, 32 nt, Homo Sapiens
aaaugccccuuagagguuucccauuggccacu

SEQ ID NO: 114125 - RNA, 32 nt, Homo Sapiens
cagcuggaguuuggauccaaaggcucuggcua

SEQ ID NO: 114126 - RNA, 32 nt, Homo Sapiens
gcugauauaaccucuauagugaauacucacau

SEQ ID NO: 114127 - RNA, 28 nt, Homo Sapiens
accaugagcaccagccaaccaggggccu

SEQ ID NO: 114128 - RNA, 32 nt, Homo Sapiens
uucaugggggcagauaauguggagaguguccc

SEQ ID NO: 114129 - RNA, 32 nt, Homo Sapiens
acccuggccugccugagggccgggagcuugga

SEQ ID NO: 114130 - RNA, 32 nt, Homo Sapiens
aguuaagugcagugguaugaucaugagcucac

SEQ ID NO: 114131 - RNA, 32 nt, Homo Sapiens
cacguguugggccacagcaaggcgcacgugag

SEQ ID NO: 114132 - RNA, 32 nt, Homo Sapiens
uuucuuacacugugucauucuguuagauacua

SEQ ID NO: 114133 - RNA, 32 nt, Homo Sapiens
uguuggccauucacgcacacaggagauggggc

SEQ ID NO: 114134 - RNA, 32 nt, Homo Sapiens
acgcuuuccuuccccaccccccagcgucaucu

SEQ ID NO: 114135 - RNA, 32 nt, Homo Sapiens
ggcggguuuuggcagacaggucagagaccacu

SEQ ID NO: 114136 - RNA, 31 nt, Homo Sapiens
uaaagagaaaaaauauguguauaucaugaaa

SEQ ID NO: 114137 - RNA, 32 nt, Homo Sapiens
gggagugaacugaauuguuuccgcgggcagag

SEQ ID NO: 114138 - RNA, 32 nt, Homo Sapiens
aaugagcacugacaccugugugcccggacauc

SEQ ID NO: 114139 - RNA, 32 nt, Homo Sapiens
uccugugcuuacaauuuuuaaugcaugugccu

SEQ ID NO: 114140 - RNA, 32 nt, Homo Sapiens
uggagcccauccccggggcgcacaucuccguc

SEQ ID NO: 114141 - RNA, 32 nt, Homo Sapiens
aauccuucuaacuaccagcagauugauaugag

SEQ ID NO: 114142 - RNA, 32 nt, Homo Sapiens
aguuuuccaaauacugucucuucucaauaacu

SEQ ID NO: 114143 - RNA, 32 nt, Homo Sapiens
gauauucuauagaguaguugcagacauugcgc

SEQ ID NO: 114144 - RNA, 32 nt, Homo Sapiens
gucacuuuaauacaggaaauuuagguguuuuu

SEQ ID NO: 114145 - RNA, 32 nt, Homo Sapiens
ccggugccgggcgaacauggcggcggccaccg

SEQ ID NO: 114146 - RNA, 32 nt, Homo Sapiens
gaguuggcucugcgccgcaggggugugcaagc

SEQ ID NO: 114147 - RNA, 32 nt, Homo Sapiens
ggccgugucacgggucauaaucacucauauuu

SEQ ID NO: 114148 - RNA, 32 nt, Homo Sapiens
aaucauauuaucuaucugauaauucccauuua

SEQ ID NO: 114149 - RNA, 32 nt, Homo Sapiens
acggcaaggacugccucaggugacgggccgug

SEQ ID NO: 114150 - RNA, 31 nt, Homo Sapiens
aggcggcugccgggcugcggggcgccuugac

SEQ ID NO: 114151 - RNA, 32 nt, Homo Sapiens
cuuuucucaauccuuugucaccaccagacuuc

SEQ ID NO: 114152 - RNA, 32 nt, Homo Sapiens
aucagggaaugggaagcugcgcgccauugagu

SEQ ID NO: 114153 - RNA, 32 nt, Homo Sapiens
cagaaaucuguggugggcgggcggcaggugag

SEQ ID NO: 114154 - RNA, 32 nt, Homo Sapiens
auuaauagugauauuuuggacaaggaguucug

SEQ ID NO: 114155 - RNA, 32 nt, Homo Sapiens
uguuuaaaaaauuuuuaguucaaguuuaguuc

SEQ ID NO: 114156 - RNA, 32 nt, Homo Sapiens
gcuuuuuagggucagaggaacacaagcucaug

SEQ ID NO: 114157 - RNA, 32 nt, Homo Sapiens
cgcuuucugaggaggagagcauggcgcgggcc

SEQ ID NO: 114158 - RNA, 32 nt, Homo Sapiens
ucagagaggauucuccuggggugucuuagagg

SEQ ID NO: 114159 - RNA, 32 nt, Homo Sapiens
agacccugugccagaucgucagggcagcaaca

SEQ ID NO: 114160 - RNA, 32 nt, Homo Sapiens
cguccuuucaccugcgauccaagcccuuggca

SEQ ID NO: 114161 - RNA, 32 nt, Homo Sapiens
uuccuagagaauaugauguuuuuuaggcauua

SEQ ID NO: 114162 - RNA, 32 nt, Homo Sapiens
ccccgccccagcgcagugccggccacacccau

SEQ ID NO: 114163 - RNA, 32 nt, Homo Sapiens
accugagccgccagcucgccacaggggccagg

SEQ ID NO: 114164 - RNA, 32 nt, Homo Sapiens
acgggagaggaugccccgcaggaacauggagc

SEQ ID NO: 114165 - RNA, 32 nt, Homo Sapiens
agccgggcaugguggcgggcgccuguaguccc

SEQ ID NO: 114166 - RNA, 32 nt, Homo Sapiens
uccuguacgcgcccggucgagccccgggcugc

SEQ ID NO: 114167 - RNA, 32 nt, Homo Sapiens
cucuuuugcauuccaugucuucuauucaccau

SEQ ID NO: 114168 - RNA, 32 nt, Homo Sapiens
uccggagaagcggcgccuccuccccgccagga

SEQ ID NO: 114169 - RNA, 32 nt, Homo Sapiens
uggagauggggucaaggcagcaggacugauca

SEQ ID NO: 114170 - RNA, 32 nt, Homo Sapiens
uggagccucucagugugggcagcccucgcaug

SEQ ID NO: 114171 - RNA, 32 nt, Homo Sapiens
cgcuggggcgcacaggggacggagcccggguc

SEQ ID NO: 114172 - RNA, 32 nt, Homo Sapiens
cuuuuuuaaaagacaaaagcaaaaccagacuu

SEQ ID NO: 114173 - RNA, 32 nt, Homo Sapiens
cucucauucccucucuuccucuuguaagugcc

SEQ ID NO: 114174 - RNA, 32 nt, Homo Sapiens
uuucaucacuacucuuuuuuuguacauuuuac

SEQ ID NO: 114175 - RNA, 32 nt, Homo Sapiens
acugacacacuauauauacagacaacauuuac

SEQ ID NO: 114176 - RNA, 32 nt, Homo Sapiens
cagcaucuauggugggaaaacacacaugauca

SEQ ID NO: 114177 - RNA, 32 nt, Homo Sapiens
cuccuggcccaggccuggcgggcacugcuucc

SEQ ID NO: 114178 - RNA, 32 nt, Homo Sapiens
guggugucuccaaugaacuuguuuccugguuu

SEQ ID NO: 114179 - RNA, 32 nt, Homo Sapiens
ucuuccauccuccuccuccccuuaauggauug

SEQ ID NO: 114180 - RNA, 32 nt, Homo Sapiens
ucgucucuggcacggagcaggcugguccugcc

SEQ ID NO: 114181 - RNA, 32 nt, Homo Sapiens
uuuggaccagcaugccgguggggugcaggcgc

SEQ ID NO: 114182 - RNA, 32 nt, Homo Sapiens
ccucggccaucggcugcuccccgguggcccag

SEQ ID NO: 114183 - RNA, 32 nt, Homo Sapiens
gccaggacucagucaccuccagcuucuccaug

SEQ ID NO: 114184 - RNA, 32 nt, Homo Sapiens
ugucaugguaaguucuacucauuuucacuucu

SEQ ID NO: 114185 - RNA, 32 nt, Homo Sapiens
ugggcgcggcccgggcagccgcgcuuucccaa

SEQ ID NO: 114186 - RNA, 32 nt, Homo Sapiens
gaguaaauccgggucucuaggaugccagaggc

SEQ ID NO: 114187 - RNA, 32 nt, Homo Sapiens
uacaauugcuuguuaaaauauuuuauaaguga

SEQ ID NO: 114188 - RNA, 32 nt, Homo Sapiens
ucccuguugagcaagacaggugaggcaagaua

SEQ ID NO: 114189 - RNA, 32 nt, Homo Sapiens
caugaggagaauaaaagucucguguugacauc

SEQ ID NO: 114190 - RNA, 32 nt, Homo Sapiens
gggugguggggcgggggcccggugcuggccga

SEQ ID NO: 114191 - RNA, 32 nt, Homo Sapiens
cagaucacauauaaaaagucuggauugucagu

SEQ ID NO: 114192 - RNA, 32 nt, Homo Sapiens
ucgcgagcgucgccgcgcggagaagccagcug

SEQ ID NO: 114193 - RNA, 32 nt, Homo Sapiens
gggagcucuggccacugcuucccaugagcuga

SEQ ID NO: 114194 - RNA, 32 nt, Homo Sapiens
caagacugauaccaccugcgugucccuuccuc

SEQ ID NO: 114195 - RNA, 32 nt, Homo Sapiens
ggaagacccacccagggagcgguuucaguggc

SEQ ID NO: 114196 - RNA, 32 nt, Homo Sapiens
gagacuggcgcggcguucguguccgaguucuc

SEQ ID NO: 114197 - RNA, 32 nt, Homo Sapiens
guuucuucuccucuaucucauaaugcauuaug

SEQ ID NO: 114198 - RNA, 32 nt, Homo Sapiens
aacuaauugcccgugaagacgccaguggaagg

SEQ ID NO: 114199 - RNA, 32 nt, Homo Sapiens
cagcuacuagagaggcugaggcaggagaauca

SEQ ID NO: 114200 - RNA, 32 nt, Homo Sapiens
aagcucuaggucagaaguacuacacagugcuu

SEQ ID NO: 114201 - RNA, 32 nt, Homo Sapiens
cagccccgugcugcagcacugcaugcgcaucc

SEQ ID NO: 114202 - RNA, 32 nt, Homo Sapiens
caccccgggcuguuucacaagcaagugguuuu

SEQ ID NO: 114203 - RNA, 32 nt, Homo Sapiens
uggaugucacaauaauacaaaccaauguaccu

SEQ ID NO: 114204 - RNA, 32 nt, Homo Sapiens
gugaacauguuucuagaaauuguuauggugga

SEQ ID NO: 114205 - RNA, 29 nt, Homo Sapiens
augaaaccuaaauauucuagaccuucuac

SEQ ID NO: 114206 - RNA, 32 nt, Homo Sapiens
gcaacccggacgccaugggacacgccacagag

SEQ ID NO: 114207 - RNA, 32 nt, Homo Sapiens
uuguauugaauucugcuaagagcauuagugau

SEQ ID NO: 114208 - RNA, 32 nt, Homo Sapiens
ccuagauuuggacugcccuuacggauuggcuc

SEQ ID NO: 114209 - RNA, 32 nt, Homo Sapiens
cuccugggcuccagcccuccccugcccccagc

SEQ ID NO: 114210 - RNA, 32 nt, Homo Sapiens
caaugagaacauugccacuuacugcucagauc

SEQ ID NO: 114211 - RNA, 32 nt, Homo Sapiens
auuuucaaaugagaaaaucaagcaaagagagg

SEQ ID NO: 114212 - RNA, 32 nt, Homo Sapiens
guuauuaggguagacuccaggaggugggauuc

SEQ ID NO: 114213 - RNA, 30 nt, Homo Sapiens
ucaucauggcuaaugaggacugucccaagg

SEQ ID NO: 114214 - RNA, 32 nt, Homo Sapiens
uauauaagcaaaacagaagagucuuguuccaa

SEQ ID NO: 114215 - RNA, 32 nt, Homo Sapiens
cacugaccugcucaucugacaccugagggccg

SEQ ID NO: 114216 - RNA, 32 nt, Homo Sapiens
aagaacuuugaaaaugugauugagguuaagga

SEQ ID NO: 114217 - RNA, 32 nt, Homo Sapiens
aagccagcgcuucuucucuccauccuuggacc

SEQ ID NO: 114218 - RNA, 30 nt, Homo Sapiens
uccaggggagccccgacgccggcggggagg

SEQ ID NO: 114219 - RNA, 32 nt, Homo Sapiens
cagugucgugcccucagccaguucuuggccac

SEQ ID NO: 114220 - RNA, 32 nt, Homo Sapiens
auuguauuuuuuucuuuuuuucccucauuuga

SEQ ID NO: 114221 - RNA, 32 nt, Homo Sapiens
uccucuuucugccaccucccaaggcagaaauc

SEQ ID NO: 114222 - RNA, 32 nt, Homo Sapiens
aggauaaauaaaaauuugauaguuaagaagau

SEQ ID NO: 114223 - RNA, 32 nt, Homo Sapiens
uggaggcccaaccgcgcucccgucuggagaag

SEQ ID NO: 114224 - RNA, 32 nt, Homo Sapiens
uauuuguuuucuauuuuuuuuaauuuauauuu

SEQ ID NO: 114225 - RNA, 32 nt, Homo Sapiens
caggaugggcgggaacugggcggccucaggcc

SEQ ID NO: 114226 - RNA, 32 nt, Homo Sapiens
guuuaccuugucaucagcauguaagcuaauua

SEQ ID NO: 114227 - RNA, 28 nt, Homo Sapiens
aagaaguuggcuuccaggaugaugcuca

SEQ ID NO: 114228 - RNA, 32 nt, Homo Sapiens
uccaugagugcuuauucacauaugccggccuc

SEQ ID NO: 114229 - RNA, 32 nt, Homo Sapiens
aguagccaggaguauagguaugugccaccaca

SEQ ID NO: 114230 - RNA, 32 nt, Homo Sapiens
uggcagugggaagaggcagacgacuagaugac

SEQ ID NO: 114231 - RNA, 32 nt, Homo Sapiens
uucccucccuaagggaagggcuggccgcucac

SEQ ID NO: 114232 - RNA, 32 nt, Homo Sapiens
agguugccugacggccgccugcaccuacccaa

SEQ ID NO: 114233 - RNA, 32 nt, Homo Sapiens
ccucuuuccagggaagccucauucuacugcuu

SEQ ID NO: 114234 - RNA, 32 nt, Homo Sapiens
ggacuugcauuacccuaugcuccaccucugua

SEQ ID NO: 114235 - RNA, 32 nt, Homo Sapiens
gaaaagaagauauuuuucaaccugaacuugca

SEQ ID NO: 114236 - RNA, 32 nt, Homo Sapiens
acauggcuucugaaccugucuuuugggagugg

SEQ ID NO: 114237 - RNA, 32 nt, Homo Sapiens
uccggccugcaggucaaugucuugcugcuccu

SEQ ID NO: 114238 - RNA, 32 nt, Homo Sapiens
auguacaugauuuuagaaauuguuaugaauga

SEQ ID NO: 114239 - RNA, 32 nt, Homo Sapiens
guagcccccacgcuggccccagcgugagaccc

SEQ ID NO: 114240 - RNA, 32 nt, Homo Sapiens
uaagucggguggcaauugucagggugugggaa

SEQ ID NO: 114241 - RNA, 32 nt, Homo Sapiens
aaugccauguucuugcagaaaaugcuuagccu

SEQ ID NO: 114242 - RNA, 32 nt, Homo Sapiens
gugcuaaauuuuaggcuacuguaucuucaggc

SEQ ID NO: 114243 - RNA, 32 nt, Homo Sapiens
ugugcugucauucuauaugauauugcucaaug

SEQ ID NO: 114244 - RNA, 32 nt, Homo Sapiens
gaagagcuaccacgagccccagccucacagug

SEQ ID NO: 114245 - RNA, 32 nt, Homo Sapiens
cagaugacaaggauuagaacacucauuaagau

SEQ ID NO: 114246 - RNA, 32 nt, Homo Sapiens
gggcuuaggcgcccauaaauguucuuucugug

SEQ ID NO: 114247 - RNA, 30 nt, Homo Sapiens
aauuaggccaggcgcgguggcucaccccug

SEQ ID NO: 114248 - RNA, 32 nt, Homo Sapiens
ucugucuaaugcggaggugaucaaguguggcu

SEQ ID NO: 114249 - RNA, 29 nt, Homo Sapiens
ggcagcauauguagguaccagcucaaccc

SEQ ID NO: 114250 - RNA, 32 nt, Homo Sapiens
ccccauggaagacccugaaacacucagccaag

SEQ ID NO: 114251 - RNA, 32 nt, Homo Sapiens
gacccuuguaaauugucauacgccaauaaaau

SEQ ID NO: 114252 - RNA, 32 nt, Homo Sapiens
cuguacacguucuuaagcagcgugucaggaga

SEQ ID NO: 114253 - RNA, 32 nt, Homo Sapiens
cccaggagggucagagaagaccacggggacuc

SEQ ID NO: 114254 - RNA, 32 nt, Homo Sapiens
gaguucauuagcuucuuuccugucuauauaaa

SEQ ID NO: 114255 - RNA, 32 nt, Homo Sapiens
gggcgggacgcgccgcgcucgggaugucguga

SEQ ID NO: 114256 - RNA, 32 nt, Homo Sapiens
gaaaauuugaaauaugcugucuauucacuuca

SEQ ID NO: 114257 - RNA, 32 nt, Homo Sapiens
caaauccaccccaccccauuacacaggugaga

SEQ ID NO: 114258 - RNA, 32 nt, Homo Sapiens
uacaaucggaagccucugcuggugaaaauaug

SEQ ID NO: 114259 - RNA, 32 nt, Homo Sapiens
gaccacuuaaaguaaaaacuacaugauuuauu

SEQ ID NO: 114260 - RNA, 32 nt, Homo Sapiens
ucauaaaaaugagcaauggagauccaggcugg

SEQ ID NO: 114261 - RNA, 32 nt, Homo Sapiens
gccgguggaggcccaggcguugcuaggauugc

SEQ ID NO: 114262 - RNA, 32 nt, Homo Sapiens
auuauugacaacacuuugcaacaguaauacca

SEQ ID NO: 114263 - RNA, 32 nt, Homo Sapiens
gauuuguauuuuagaugcuuguuuccuauuaa

SEQ ID NO: 114264 - RNA, 32 nt, Homo Sapiens
ggaagucccuaccauccuuguuuagucuauau

SEQ ID NO: 114265 - RNA, 32 nt, Homo Sapiens
gaaacuuuccagugcauagagccaugugagcc

SEQ ID NO: 114266 - RNA, 32 nt, Homo Sapiens
ucauauuuaugauggauauagauacauacuau

SEQ ID NO: 114267 - RNA, 32 nt, Homo Sapiens
uaaacaggaaauggugguacacagaggcuagg

SEQ ID NO: 114268 - RNA, 32 nt, Homo Sapiens
aaaugaaacuucuaucggaaguaaauuaauuu

SEQ ID NO: 114269 - RNA, 32 nt, Homo Sapiens
auggcagcaagguggcuccuguggcaguggag

SEQ ID NO: 114270 - RNA, 32 nt, Homo Sapiens
uguucccauccagugacgaccggauccagcau

SEQ ID NO: 114271 - RNA, 32 nt, Homo Sapiens
ccagcgcugggaagaggggccagaaaggcagc

SEQ ID NO: 114272 - RNA, 32 nt, Homo Sapiens
auaccauccuuuuucugaacucuucuucaaaa

SEQ ID NO: 114273 - RNA, 32 nt, Homo Sapiens
uuuuuccucucucgcuuucuuucuuacacaga

SEQ ID NO: 114274 - RNA, 32 nt, Homo Sapiens
cgagccguggcgcccagagcugcgagccgcuc

SEQ ID NO: 114275 - RNA, 32 nt, Homo Sapiens
auuguaucaaggaaagaggcacugaagagggu

SEQ ID NO: 114276 - RNA, 32 nt, Homo Sapiens
aaccggaaauaccaaaggauuaucuccaauau

SEQ ID NO: 114277 - RNA, 32 nt, Homo Sapiens
agcggaggcgccgccgcagccggagcggcucc

SEQ ID NO: 114278 - RNA, 32 nt, Homo Sapiens
ugaguagggcugcacaagaugcuggaggcuug

SEQ ID NO: 114279 - RNA, 32 nt, Homo Sapiens
ccaagaucacacggaggagggugcugggagac

SEQ ID NO: 114280 - RNA, 32 nt, Homo Sapiens
gcccuccgccugcucccagccaugguggccug

SEQ ID NO: 114281 - RNA, 32 nt, Homo Sapiens
gcagggccugggccggcagggacccccagaag

SEQ ID NO: 114282 - RNA, 32 nt, Homo Sapiens
gcgaccccauccccaucccggucccugcagag

SEQ ID NO: 114283 - RNA, 32 nt, Homo Sapiens
ggccaccgaccuacugggccgacggacuccca

SEQ ID NO: 114284 - RNA, 32 nt, Homo Sapiens
cugaacucacaccacacccagcuuauagaaug

SEQ ID NO: 114285 - RNA, 32 nt, Homo Sapiens
guugauuuuauguaucucuugggacaacuuuu

SEQ ID NO: 114286 - RNA, 32 nt, Homo Sapiens
gccaauguuucauccaccggcugcacaggcac

SEQ ID NO: 114287 - RNA, 32 nt, Homo Sapiens
gcaauugaaaacuacaaagcagcaguuaacag

SEQ ID NO: 114288 - RNA, 32 nt, Homo Sapiens
acuugguucuacuaccaugaucuuuauaaacu

SEQ ID NO: 114289 - RNA, 32 nt, Homo Sapiens
cagcuuuaaaacuauaaauaugcccaaauuuu

SEQ ID NO: 114290 - RNA, 32 nt, Homo Sapiens
uuucugaaagacugcuauggagucugagaaaa

SEQ ID NO: 114291 - RNA, 32 nt, Homo Sapiens
acagacacaggguggggguggggaggggcggu

SEQ ID NO: 114292 - RNA, 32 nt, Homo Sapiens
cauuuggaaaauuugcagccugacaauaugau

SEQ ID NO: 114293 - RNA, 32 nt, Homo Sapiens
ggcuuagagagaaaagcuggauaugagaaaau

SEQ ID NO: 114294 - RNA, 32 nt, Homo Sapiens
caaaaacaaaaauuauaaacuaguccauccaa

SEQ ID NO: 114295 - RNA, 32 nt, Homo Sapiens
uagguuuugucaagcuaucuaucaaaguaaug

SEQ ID NO: 114296 - RNA, 32 nt, Homo Sapiens
ugaagauuggcaaaaacuaaaauaaauuaaag

SEQ ID NO: 114297 - RNA, 32 nt, Homo Sapiens
ugccgcagcuccagggcucuuccuccucacca

SEQ ID NO: 114298 - RNA, 32 nt, Homo Sapiens
auuuaucaaauggucaugcccacugggagccg

SEQ ID NO: 114299 - RNA, 32 nt, Homo Sapiens
uccccuucuuucguccucaccaucucugcaga

SEQ ID NO: 114300 - RNA, 32 nt, Homo Sapiens
auaugcucuccccucccuuuuuaaacaaaugg

SEQ ID NO: 114301 - RNA, 32 nt, Homo Sapiens
accacgcccggccacuagccugaauuucaauc

SEQ ID NO: 114302 - RNA, 32 nt, Homo Sapiens
gaugaugaggccgagguaaaagagacaucugc

SEQ ID NO: 114303 - RNA, 32 nt, Homo Sapiens
uuauuuuuuuuuucuuuuuauugaaacccagu

SEQ ID NO: 114304 - RNA, 32 nt, Homo Sapiens
aacucaugguguggcuaaucuacauuuaucaa

SEQ ID NO: 114305 - RNA, 32 nt, Homo Sapiens
cuuaagauuacaucaagcuaauugugcgagcu

SEQ ID NO: 114306 - RNA, 32 nt, Homo Sapiens
cuuuccaugugcaaaaaauuguagucuucuga

SEQ ID NO: 114307 - RNA, 32 nt, Homo Sapiens
cacccccuucccccagcccauccauuaggcca

SEQ ID NO: 114308 - RNA, 32 nt, Homo Sapiens
cagcagcgucgucauugaagucugcuugaucc

SEQ ID NO: 114309 - RNA, 32 nt, Homo Sapiens
uguguuugucaccucccuacuccugucauuac

SEQ ID NO: 114310 - RNA, 32 nt, Homo Sapiens
uuacuguuuauacugugguauguuuuugauua

SEQ ID NO: 114311 - RNA, 32 nt, Homo Sapiens
aaaagaauucacggauccuuugaaagaagacg

SEQ ID NO: 114312 - RNA, 31 nt, Homo Sapiens
acauucuuucuuuuugugccaaaugacuugc

SEQ ID NO: 114313 - RNA, 32 nt, Homo Sapiens
guccucagggaaggcagaagggcaggcaagcc

SEQ ID NO: 114314 - RNA, 32 nt, Homo Sapiens
uuccaaggagccuaccugaggucccuacucuc

SEQ ID NO: 114315 - RNA, 32 nt, Homo Sapiens
acaaccagcugaugaaggaagaucuugcccua

SEQ ID NO: 114316 - RNA, 32 nt, Homo Sapiens
gcagcaguucccugcuugcacccccacaucca

SEQ ID NO: 114317 - RNA, 32 nt, Homo Sapiens
cagugcccagccucacuucucuagacuaugau

SEQ ID NO: 114318 - RNA, 32 nt, Homo Sapiens
aggagguccaccagcccucaccagcccccgcg

SEQ ID NO: 114319 - RNA, 32 nt, Homo Sapiens
uguuccuggaggggcggcauggggcggggauc

SEQ ID NO: 114320 - RNA, 32 nt, Homo Sapiens
cugucuccuccucccgucacagaugugagcca

SEQ ID NO: 114321 - RNA, 32 nt, Homo Sapiens
cuuguucucccauggauuccugucccaagcua

SEQ ID NO: 114322 - RNA, 32 nt, Homo Sapiens
gucauucaguuacucuuaauucuuuauaaaac

SEQ ID NO: 114323 - RNA, 32 nt, Homo Sapiens
cccugaagcuucucuggguccuggacuccguu

SEQ ID NO: 114324 - RNA, 32 nt, Homo Sapiens
acuuuguauacauucuaauuauauuauuuuuc

SEQ ID NO: 114325 - RNA, 32 nt, Homo Sapiens
uugguucucccucucccugaggaccucuuauu

SEQ ID NO: 114326 - RNA, 32 nt, Homo Sapiens
ggggaagcgggaucccagcuagacuuagaacu

SEQ ID NO: 114327 - RNA, 32 nt, Homo Sapiens
ugaauauuugucgauauuuccaucauuaaauu

SEQ ID NO: 114328 - RNA, 32 nt, Homo Sapiens
uuagacacuaugugucccaccaucccauuaca

SEQ ID NO: 114329 - RNA, 32 nt, Homo Sapiens
ugugauucaguaagguuaacaaugaaaauuaa

SEQ ID NO: 114330 - RNA, 32 nt, Homo Sapiens
ucccccaucccagcccgcccccucggccgcuc

SEQ ID NO: 114331 - RNA, 32 nt, Homo Sapiens
guauuugacccauuuuaauguguacaacuuua

SEQ ID NO: 114332 - RNA, 32 nt, Homo Sapiens
uccauucuauuuugugaauugggauaauaaca

SEQ ID NO: 114333 - RNA, 32 nt, Homo Sapiens
ugacuccuggaaccugcguccuccccaaagcc

SEQ ID NO: 114334 - RNA, 32 nt, Homo Sapiens
agcuguuuacuuauauuggucuguaaaucccu

SEQ ID NO: 114335 - RNA, 32 nt, Homo Sapiens
gaguguucuguguccacuagagauaugugcca

SEQ ID NO: 114336 - RNA, 32 nt, Homo Sapiens
ccccauuuaaaaaaauaacaaacauuuuuuaa

SEQ ID NO: 114337 - RNA, 32 nt, Homo Sapiens
uuugcauauauuuuugucaccuugcaugaaca

SEQ ID NO: 114338 - RNA, 30 nt, Homo Sapiens
cucugaacuaaaagcauccguggggaccga

SEQ ID NO: 114339 - RNA, 32 nt, Homo Sapiens
ggccugggcacgccauccguccuccaggaaga

SEQ ID NO: 114340 - RNA, 32 nt, Homo Sapiens
gccuagggugaggggugagcuugugaucagga

SEQ ID NO: 114341 - RNA, 32 nt, Homo Sapiens
acacugaggcacccucagagaaggcagggccu

SEQ ID NO: 114342 - RNA, 32 nt, Homo Sapiens
acaaaacaaaacaaaacacaguccugcauacu

SEQ ID NO: 114343 - RNA, 32 nt, Homo Sapiens
gguuuauuccuccuccaaaucuucagcugguu

SEQ ID NO: 114344 - RNA, 32 nt, Homo Sapiens
acgagcagccugcccuguguccccucauacuu

SEQ ID NO: 114345 - RNA, 32 nt, Homo Sapiens
ccaaacggugcaacagaaggguagguuagaug

SEQ ID NO: 114346 - RNA, 32 nt, Homo Sapiens
aaggcagcugcccggguuugccugugacucca

SEQ ID NO: 114347 - RNA, 32 nt, Homo Sapiens
caagccugaagacacagucuacauaaucaaau

SEQ ID NO: 114348 - RNA, 32 nt, Homo Sapiens
ccagagagaaaguugaccguggcacccuccug

SEQ ID NO: 114349 - RNA, 32 nt, Homo Sapiens
auuuagaacuuuaagucucacccauuaucugg

SEQ ID NO: 114350 - RNA, 32 nt, Homo Sapiens
cugaaggggguggggagaagcguggacugggc

SEQ ID NO: 114351 - RNA, 32 nt, Homo Sapiens
gggauugcagacggagucugguucacuuagug

SEQ ID NO: 114352 - RNA, 32 nt, Homo Sapiens
ccgucuucaggagagaaagaaaaaauaaaaua

SEQ ID NO: 114353 - RNA, 32 nt, Homo Sapiens
ugugaccccuccuggggccaggccgggccugu

SEQ ID NO: 114354 - RNA, 32 nt, Homo Sapiens
uagccacucugcaacucuccuguugugcuaaa

SEQ ID NO: 114355 - RNA, 32 nt, Homo Sapiens
caggccugacuucauaggaauucauccaucuu

SEQ ID NO: 114356 - RNA, 31 nt, Homo Sapiens
aaguugagcaagguuccaggagucagccgga

SEQ ID NO: 114357 - RNA, 32 nt, Homo Sapiens
ccuaacccaagauggaagagccagagggcucu

SEQ ID NO: 114358 - RNA, 32 nt, Homo Sapiens
cuagccuggggcggggcgcggggccagagggu

SEQ ID NO: 114359 - RNA, 32 nt, Homo Sapiens
auagcaaagucacuucuguuaaucccuuaauc

SEQ ID NO: 114360 - RNA, 32 nt, Homo Sapiens
gaagcccagucucuucucuggaucugggccuu

SEQ ID NO: 114361 - RNA, 32 nt, Homo Sapiens
gugguggggaggaaaaguuugcgaaguggcgg

SEQ ID NO: 114362 - RNA, 32 nt, Homo Sapiens
ggagaacaaaaauucaguauuauacagaucua

SEQ ID NO: 114363 - RNA, 31 nt, Homo Sapiens
aaccaagcuaugcuccuuccaagggcaggac

SEQ ID NO: 114364 - RNA, 32 nt, Homo Sapiens
gguacgccgaagggucaucggcguggaguccu

SEQ ID NO: 114365 - RNA, 32 nt, Homo Sapiens
agagagccagccccggccgccgucgcggggaa

SEQ ID NO: 114366 - RNA, 32 nt, Homo Sapiens
cccguagaccccuguuucuccuccugcaccug

SEQ ID NO: 114367 - RNA, 32 nt, Homo Sapiens
ucaccucaugcaagggcguggagaccaguaga

SEQ ID NO: 114368 - RNA, 32 nt, Homo Sapiens
auuccucuaguugguuuguaauuguucuuuga

SEQ ID NO: 114369 - RNA, 32 nt, Homo Sapiens
uauuuuaaaaacacauagcuugaaaauuuauu

SEQ ID NO: 114370 - RNA, 28 nt, Homo Sapiens
ccucaguggguccccaggaugggagccc

SEQ ID NO: 114371 - RNA, 28 nt, Homo Sapiens
aaccuuggcaaaauaaacuuucuaaauu

SEQ ID NO: 114372 - RNA, 32 nt, Homo Sapiens
cuucuugagcuaugucucuacuccaggcucug

SEQ ID NO: 114373 - RNA, 32 nt, Homo Sapiens
aguauuguuuuaaaguuucugucuguaaagug

SEQ ID NO: 114374 - RNA, 32 nt, Homo Sapiens
uugagcuuuucugugcuucucuguucauucuu

SEQ ID NO: 114375 - RNA, 32 nt, Homo Sapiens
auaaggucuccaucgugaugcccucucugcag

SEQ ID NO: 114376 - RNA, 32 nt, Homo Sapiens
uuuugcccuaaaacgucucccuagcuguucuu

SEQ ID NO: 114377 - RNA, 32 nt, Homo Sapiens
uguuaauaguugcagggucucaccacuucauu

SEQ ID NO: 114378 - RNA, 32 nt, Homo Sapiens
guuccuugggucccgucgucugugauacugca

SEQ ID NO: 114379 - RNA, 32 nt, Homo Sapiens
ucccgccuuucuggaccaaaccaauguauuuc

SEQ ID NO: 114380 - RNA, 32 nt, Homo Sapiens
agguuuggacgggugcugugccgcaugucgag

SEQ ID NO: 114381 - RNA, 32 nt, Homo Sapiens
uucuucuggcuccucauuuuuccuccuguugc

SEQ ID NO: 114382 - RNA, 32 nt, Homo Sapiens
acuuuuaaacauuauucacuacuguuuuugaa

SEQ ID NO: 114383 - RNA, 32 nt, Homo Sapiens
cuggcagaaaaauuaugucaaagaugaaccua

SEQ ID NO: 114384 - RNA, 32 nt, Homo Sapiens
uauauaagaucguuuacuugcauaauauauca

SEQ ID NO: 114385 - RNA, 32 nt, Homo Sapiens
cagcagcuuucugacguggacaucagaagugu

SEQ ID NO: 114386 - RNA, 32 nt, Homo Sapiens
gaccgugacuguuaaucaaagauccucuuaac

SEQ ID NO: 114387 - RNA, 32 nt, Homo Sapiens
cuggucgguuugacgcaagacccuggcggauc

SEQ ID NO: 114388 - RNA, 32 nt, Homo Sapiens
uccucccugccagcucagaggcaccugcagac

SEQ ID NO: 114389 - RNA, 32 nt, Homo Sapiens
aggaggcuccuugauuuaugguagcuuuggac

SEQ ID NO: 114390 - RNA, 32 nt, Homo Sapiens
uuuagcccugaacauuucaugguguucaucaa

SEQ ID NO: 114391 - RNA, 32 nt, Homo Sapiens
uuguagccccuggccugggcacucaagggcag

SEQ ID NO: 114392 - RNA, 32 nt, Homo Sapiens
accucuuccucuaucagggacagugugggugc

SEQ ID NO: 114393 - RNA, 32 nt, Homo Sapiens
gguggaccgcgcuuaccgcuggccucuuggaa

SEQ ID NO: 114394 - RNA, 32 nt, Homo Sapiens
aaccucagcaaccuguaagacugauaaugaaa

SEQ ID NO: 114395 - RNA, 32 nt, Homo Sapiens
accuccgccucccggguucaagugauucucgu

SEQ ID NO: 114396 - RNA, 32 nt, Homo Sapiens
ccuaugauugcuucuuuuuguaaagcaagcaa

SEQ ID NO: 114397 - RNA, 32 nt, Homo Sapiens
ugagcacgggccgcuccgcuccccugcuccug

SEQ ID NO: 114398 - RNA, 32 nt, Homo Sapiens
uuaauuuucuggacuuuaaaucuccugguuaa

SEQ ID NO: 114399 - RNA, 32 nt, Homo Sapiens
uaaugagcaaaaaggggagagaauuugcaaua

SEQ ID NO: 114400 - RNA, 32 nt, Homo Sapiens
gaccuugcuugaguauuuuuucuaauaaaaca

SEQ ID NO: 114401 - RNA, 32 nt, Homo Sapiens
gaggaaagcuuccggaucugccccacagccuu

SEQ ID NO: 114402 - RNA, 32 nt, Homo Sapiens
gugggaggaugcgggcgggccgguagccaggc

SEQ ID NO: 114403 - RNA, 32 nt, Homo Sapiens
gaccagccagaccagcagagcagggagccacu

SEQ ID NO: 114404 - RNA, 32 nt, Homo Sapiens
acugggcuccggaggacucaccacugcccccu

SEQ ID NO: 114405 - RNA, 32 nt, Homo Sapiens
gagagggucucauucugucacccaggcuagag

SEQ ID NO: 114406 - RNA, 32 nt, Homo Sapiens
uguauauacuauuuauuucagggcugggcuau

SEQ ID NO: 114407 - RNA, 32 nt, Homo Sapiens
ggcuucuucauggauuguaaauccccaaagcg

SEQ ID NO: 114408 - RNA, 32 nt, Homo Sapiens
acauucuccaugaacaggugguuggauuggua

SEQ ID NO: 114409 - RNA, 32 nt, Homo Sapiens
gccagaacugauacagccccccuggucugggg

SEQ ID NO: 114410 - RNA, 32 nt, Homo Sapiens
agcauauuuuugggggaaagugcugcugauau

SEQ ID NO: 114411 - RNA, 32 nt, Homo Sapiens
cugaaacaccuguuagggguucccuccauaug

SEQ ID NO: 114412 - RNA, 32 nt, Homo Sapiens
ccaccuugcugucugucucauugucuuucucu

SEQ ID NO: 114413 - RNA, 32 nt, Homo Sapiens
ccuucgauaauuaugaaggguguuucgguauc

SEQ ID NO: 114414 - RNA, 32 nt, Homo Sapiens
aaagcaaaacaaaaacaaaaucuauuguaguu

SEQ ID NO: 114415 - RNA, 32 nt, Homo Sapiens
acuguauuucagaaaaaagaaacuacaguuuu

SEQ ID NO: 114416 - RNA, 32 nt, Homo Sapiens
agcccauuggaggauaugagguccugugaaau

SEQ ID NO: 114417 - RNA, 32 nt, Homo Sapiens
gccgccgccgcccgcuuucggcucgggccuca

SEQ ID NO: 114418 - RNA, 32 nt, Homo Sapiens
auuaccuuaaacaagcagauuuagccauuuuu

SEQ ID NO: 114419 - RNA, 32 nt, Homo Sapiens
ggcuggcggccggcgggagaggcggccggccu

SEQ ID NO: 114420 - RNA, 32 nt, Homo Sapiens
uuccagagauggaaacaaacccaggugucucu

SEQ ID NO: 114421 - RNA, 32 nt, Homo Sapiens
aggcgcccccgccccaggcuuccgcgcccagc

SEQ ID NO: 114422 - RNA, 32 nt, Homo Sapiens
cuaguguugcugucuuggauucauguuaagaa

SEQ ID NO: 114423 - RNA, 32 nt, Homo Sapiens
gaauccuuccuggcggccgccugcugcccuga

SEQ ID NO: 114424 - RNA, 32 nt, Homo Sapiens
ugcccaucuccauggugugcagucucuggguu

SEQ ID NO: 114425 - RNA, 32 nt, Homo Sapiens
uugcauguguuuuuauucucuagaucuguuac

SEQ ID NO: 114426 - RNA, 32 nt, Homo Sapiens
guguuauagguuacaaaaucugauuuauuuaa

SEQ ID NO: 114427 - RNA, 32 nt, Homo Sapiens
cugcugggucauuugacuagggagaccacauc

SEQ ID NO: 114428 - RNA, 32 nt, Homo Sapiens
ggccuucgggggcgggccagcggccgcucaau

SEQ ID NO: 114429 - RNA, 32 nt, Homo Sapiens
aacaaacuacugugucacuguccagguaggaa

SEQ ID NO: 114430 - RNA, 32 nt, Homo Sapiens
gucauuacagaaaaagcaaauauucccucaac

SEQ ID NO: 114431 - RNA, 32 nt, Homo Sapiens
gaugggcaauucuggcugugggagcaccaccu

SEQ ID NO: 114432 - RNA, 32 nt, Homo Sapiens
agccagaccuccccggcgggccucagggaaca

SEQ ID NO: 114433 - RNA, 32 nt, Homo Sapiens
agcgggcggggaggggcguggggcuggaucgc

SEQ ID NO: 114434 - RNA, 32 nt, Homo Sapiens
gcucuaaaguuauuaagcaguuuuauguucgu

SEQ ID NO: 114435 - RNA, 32 nt, Homo Sapiens
gaggacccggugccggaggccgugggcggcga

SEQ ID NO: 114436 - RNA, 32 nt, Homo Sapiens
ccggcugcugcaaugcgugugguggugauugg

SEQ ID NO: 114437 - RNA, 32 nt, Homo Sapiens
uuucuuuuaaauaguuguauuuauuugaaggc

SEQ ID NO: 114438 - RNA, 32 nt, Homo Sapiens
aggagguggagcucgucgucagcucuccugcu

SEQ ID NO: 114439 - RNA, 29 nt, Homo Sapiens
gaccaggcuaggcaacauggcaaaacccc

SEQ ID NO: 114440 - RNA, 32 nt, Homo Sapiens
ucaccccccucucuccuccccaccccugguaa

SEQ ID NO: 114441 - RNA, 32 nt, Homo Sapiens
caucuguuuaaugaguagaauguccgugaugc

SEQ ID NO: 114442 - RNA, 32 nt, Homo Sapiens
caucaguaccugguguugggacagcaggauag

SEQ ID NO: 114443 - RNA, 32 nt, Homo Sapiens
cuguggugccucuucugacaaggcuucuaaag

SEQ ID NO: 114444 - RNA, 32 nt, Homo Sapiens
auucugcuaauuauuaccaacaaaauuguauu

SEQ ID NO: 114445 - RNA, 32 nt, Homo Sapiens
uguguugggcaggcuggucucaaacuccugac

SEQ ID NO: 114446 - RNA, 32 nt, Homo Sapiens
agccccgccccggcgcuggucccgcccaccca

SEQ ID NO: 114447 - RNA, 31 nt, Homo Sapiens
cggcgaccggacuggcugccccggaacugcg

SEQ ID NO: 114448 - RNA, 32 nt, Homo Sapiens
cacugggaggaauacaaaaugccacaguuguu

SEQ ID NO: 114449 - RNA, 32 nt, Homo Sapiens
cuccugcagcuucuguggccaagccccagccu

SEQ ID NO: 114450 - RNA, 32 nt, Homo Sapiens
uucaaacauaucuaauaauaauuugccuuagu

SEQ ID NO: 114451 - RNA, 32 nt, Homo Sapiens
acaucaaaccagagugcccaaccccggccugu

SEQ ID NO: 114452 - RNA, 32 nt, Homo Sapiens
uggcccaaucccagccccauuccaggcccacu

SEQ ID NO: 114453 - RNA, 32 nt, Homo Sapiens
agcaccucccgguaccccggcuggagggcguu

SEQ ID NO: 114454 - RNA, 32 nt, Homo Sapiens
aauggaggggagaccuggccaagggagccagc

SEQ ID NO: 114455 - RNA, 32 nt, Homo Sapiens
gagaaauuguuuugcaaauggaucuauuuuug

SEQ ID NO: 114456 - RNA, 32 nt, Homo Sapiens
cuguaacagauuaaguacuauuuuauauccag

SEQ ID NO: 114457 - RNA, 32 nt, Homo Sapiens
caugcuggagggcagaaggcagaagugagcau

SEQ ID NO: 114458 - RNA, 32 nt, Homo Sapiens
agaagauucucccgacgauaacucaggacuug

SEQ ID NO: 114459 - RNA, 32 nt, Homo Sapiens
gaaagcuguugaugcugaaauguuuccuuccu

SEQ ID NO: 114460 - RNA, 32 nt, Homo Sapiens
ccugauuuucugcugcacguggcaucugauua

SEQ ID NO: 114461 - RNA, 32 nt, Homo Sapiens
uuugccaaaacacuugaaugugccucaagaaa

SEQ ID NO: 114462 - RNA, 31 nt, Homo Sapiens
ccucaagugaucugccugccuuggucuccca

SEQ ID NO: 114463 - RNA, 30 nt, Homo Sapiens
gcucccaauccgaugggggagacaggacac

SEQ ID NO: 114464 - RNA, 32 nt, Homo Sapiens
ggagggaacagagcggcuguguaugcagccug

SEQ ID NO: 114465 - RNA, 32 nt, Homo Sapiens
gugugagacaaggcccauagguauggcccccc

SEQ ID NO: 114466 - RNA, 32 nt, Homo Sapiens
ggugccuguugcugccgccgccgcgggaccug

SEQ ID NO: 114467 - RNA, 32 nt, Homo Sapiens
ucagcuuggcuaacagaauggggcuugggaau

SEQ ID NO: 114468 - RNA, 30 nt, Homo Sapiens
uggauuuugcuaaugguugagugauaccua

SEQ ID NO: 114469 - RNA, 32 nt, Homo Sapiens
cgccgucugcccuguccaucuguccguccguu

SEQ ID NO: 114470 - RNA, 32 nt, Homo Sapiens
gacaugucagaauuuugugagucauggauggg

SEQ ID NO: 114471 - RNA, 32 nt, Homo Sapiens
caggugcuagauggcggcugcagaggcugugc

SEQ ID NO: 114472 - RNA, 32 nt, Homo Sapiens
ggcgcugggauagucgcacgcuggaugcaucu

SEQ ID NO: 114473 - RNA, 32 nt, Homo Sapiens
uucuagaauuugccucuuugggacugaagucu

SEQ ID NO: 114474 - RNA, 32 nt, Homo Sapiens
augaaugaaagcuagaccugauggggaggcau

SEQ ID NO: 114475 - RNA, 32 nt, Homo Sapiens
gaaucagccuggcagcagcauugugauuagaa

SEQ ID NO: 114476 - RNA, 32 nt, Homo Sapiens
aacuucuacgugaccaugguaccuguugaaaa

SEQ ID NO: 114477 - RNA, 32 nt, Homo Sapiens
caagguuuaacccugcuagguagguauuauaa

SEQ ID NO: 114478 - RNA, 32 nt, Homo Sapiens
cuuucaaauggaccggcccagaaaucagucca

SEQ ID NO: 114479 - RNA, 32 nt, Homo Sapiens
gcagaugucauccauacuguagggccaauagc

SEQ ID NO: 114480 - RNA, 31 nt, Homo Sapiens
uggccggcagagggcgcaggagcccaggaga

SEQ ID NO: 114481 - RNA, 32 nt, Homo Sapiens
gaauagcacccucuccccgggaggcccuagcu

SEQ ID NO: 114482 - RNA, 32 nt, Homo Sapiens
ccagaaaggacacuccauauugugaaaccggc

SEQ ID NO: 114483 - RNA, 27 nt, Homo Sapiens
cacacguccagcuucagccacauugag

SEQ ID NO: 114484 - RNA, 32 nt, Homo Sapiens
aacauuuuugaaagaucacucagcuuuaacac

SEQ ID NO: 114485 - RNA, 29 nt, Homo Sapiens
acacauauauguaucuauauuccuuuguu

SEQ ID NO: 114486 - RNA, 32 nt, Homo Sapiens
cauuaguggggaggaggguggggagacauaac

SEQ ID NO: 114487 - RNA, 32 nt, Homo Sapiens
ucuuguauuuccccucugguuguuccuaaccc

SEQ ID NO: 114488 - RNA, 32 nt, Homo Sapiens
cgcggcugcugcucacugugcugcugggaccc

SEQ ID NO: 114489 - RNA, 32 nt, Homo Sapiens
cgagccaucauucccagggcugcgagcuggca

SEQ ID NO: 114490 - RNA, 32 nt, Homo Sapiens
auagcuaagaucugggacucuggagcccuugg

SEQ ID NO: 114491 - RNA, 32 nt, Homo Sapiens
aauuagccaggugugguggugcaugcuuguaa

SEQ ID NO: 114492 - RNA, 32 nt, Homo Sapiens
acauauuuucuuucuguugaaauaacugaaaa

SEQ ID NO: 114493 - RNA, 32 nt, Homo Sapiens
gcccuacugugggcauagcgcccgccaugaca

SEQ ID NO: 114494 - RNA, 32 nt, Homo Sapiens
aagagggaaaggaaacagucgaaugcaaacag

SEQ ID NO: 114495 - RNA, 32 nt, Homo Sapiens
acaggggcccuuuccaugcaguguccugugca

SEQ ID NO: 114496 - RNA, 32 nt, Homo Sapiens
ucugcuaaugaaaaggguucuuucucuugggg

SEQ ID NO: 114497 - RNA, 32 nt, Homo Sapiens
ccgguuucugccuucgcguugcuggggugcag

SEQ ID NO: 114498 - RNA, 32 nt, Homo Sapiens
guaaaggggaugauauuccacaaacuaauuau

SEQ ID NO: 114499 - RNA, 32 nt, Homo Sapiens
acccuccgcgaaucccggccuccggagaccgu

SEQ ID NO: 114500 - RNA, 32 nt, Homo Sapiens
accuuacauuuuaaucuaauaugucaugaucu

SEQ ID NO: 114501 - RNA, 32 nt, Homo Sapiens
accugucaugaaggguaugaccuuaaugaugu

SEQ ID NO: 114502 - RNA, 32 nt, Homo Sapiens
acccgucgucccgcacucggaguccgcgaugg

SEQ ID NO: 114503 - RNA, 32 nt, Homo Sapiens
caguaggggcgcucuugcugcagauggagccc

SEQ ID NO: 114504 - RNA, 32 nt, Homo Sapiens
uggggaagccgaguccgcgcgcgggucgggcc

SEQ ID NO: 114505 - RNA, 32 nt, Homo Sapiens
guucacugacacaguaaaauuaacucuguggg

SEQ ID NO: 114506 - RNA, 32 nt, Homo Sapiens
aauaggcuuuauuaaucaacugaugucuugau

SEQ ID NO: 114507 - RNA, 32 nt, Homo Sapiens
gaaagucuguuucauugggguuuuuguuuugu

SEQ ID NO: 114508 - RNA, 32 nt, Homo Sapiens
gagggggaagcagcaggacacauuggcaaguc

SEQ ID NO: 114509 - RNA, 32 nt, Homo Sapiens
cggucgacgcgggccugagcucccuccagcug

SEQ ID NO: 114510 - RNA, 32 nt, Homo Sapiens
cugagauuuuauuuauaaauuagccacuuguc

SEQ ID NO: 114511 - RNA, 32 nt, Homo Sapiens
agaucauguauuauaacacuuuggaauuauuc

SEQ ID NO: 114512 - RNA, 32 nt, Homo Sapiens
caaacuuucccacaucuuccugucuuccaagc

SEQ ID NO: 114513 - RNA, 32 nt, Homo Sapiens
uaucugucucacuggcugucuuucugccaguu

SEQ ID NO: 114514 - RNA, 32 nt, Homo Sapiens
gagggagucuuguucugucacccaggcuggag

SEQ ID NO: 114515 - RNA, 32 nt, Homo Sapiens
aauuuggacuaaaagguuuuauugaaauaaag

SEQ ID NO: 114516 - RNA, 32 nt, Homo Sapiens
uuccggacugaagcugcagacuuucgcggcaa

SEQ ID NO: 114517 - RNA, 32 nt, Homo Sapiens
auuugauauggacauugcauuugacgagacag

SEQ ID NO: 114518 - RNA, 32 nt, Homo Sapiens
aggcaagagaauacucaaaaauauuuaaaacu

SEQ ID NO: 114519 - RNA, 32 nt, Homo Sapiens
ugcacuuccagccucuucuccuuguggcucuc

SEQ ID NO: 114520 - RNA, 32 nt, Homo Sapiens
aaaauuccggugcuugggcuucggcuucagag

SEQ ID NO: 114521 - RNA, 32 nt, Homo Sapiens
gucagagcaauuuuauuauuuucaucaguaug

SEQ ID NO: 114522 - RNA, 32 nt, Homo Sapiens
uucuuuuuucuuuuuuagaaaacucagaauga

SEQ ID NO: 114523 - RNA, 32 nt, Homo Sapiens
cucugcuucucagcugccaucuccagugcccc

SEQ ID NO: 114524 - RNA, 32 nt, Homo Sapiens
accagcugaacaggccaaagccagacuacagc

SEQ ID NO: 114525 - RNA, 32 nt, Homo Sapiens
uugggggucugagaugaggccuuauggcccag

SEQ ID NO: 114526 - RNA, 32 nt, Homo Sapiens
uucucccuuuguuguauuuaugcugaaucuuc

SEQ ID NO: 114527 - RNA, 32 nt, Homo Sapiens
ucuacacugaagauuuucuucuuauuuaaugu

SEQ ID NO: 114528 - RNA, 32 nt, Homo Sapiens
gaaagucaaaccugucagugcuccacaccagg

SEQ ID NO: 114529 - RNA, 32 nt, Homo Sapiens
agguguucuuugauuuuccuucgcauugaugg

SEQ ID NO: 114530 - RNA, 32 nt, Homo Sapiens
uggaggggcagcuggaggagcugggacggcgg

SEQ ID NO: 114531 - RNA, 32 nt, Homo Sapiens
accaucuccacccugccugcuguggaaucucc

SEQ ID NO: 114532 - RNA, 32 nt, Homo Sapiens
gcuuuuuguggcaacauuuuuauagcuugugu

SEQ ID NO: 114533 - RNA, 32 nt, Homo Sapiens
ggcugccucugcgcguccauggagcagcggga

SEQ ID NO: 114534 - RNA, 32 nt, Homo Sapiens
agcggggggugccugccuggcuggggagcccc

SEQ ID NO: 114535 - RNA, 32 nt, Homo Sapiens
acuuauuuccaacagguuuaucucuaacuuuu

SEQ ID NO: 114536 - RNA, 32 nt, Homo Sapiens
gaacaaauacucuaaacuuaugugaacaguuu

SEQ ID NO: 114537 - RNA, 32 nt, Homo Sapiens
cugguguucugcagucaucuccccuccuggcg

SEQ ID NO: 114538 - RNA, 32 nt, Homo Sapiens
gaccgagauguagaagacacuauugcacaaaa

SEQ ID NO: 114539 - RNA, 32 nt, Homo Sapiens
cgcaccccccuccuccucccuggcccagagag

SEQ ID NO: 114540 - RNA, 32 nt, Homo Sapiens
gccucuggcuucugcugggccgaggccaccag

SEQ ID NO: 114541 - RNA, 32 nt, Homo Sapiens
auguuccccauccacacccugcuugcuccugu

SEQ ID NO: 114542 - RNA, 32 nt, Homo Sapiens
cuuccauaauagauauuuuuaauagcaggaca

SEQ ID NO: 114543 - RNA, 32 nt, Homo Sapiens
ggcagggauccugcgcggggcccccgggauuc

SEQ ID NO: 114544 - RNA, 32 nt, Homo Sapiens
ucccgccucgcccccacccccacccaccucua

SEQ ID NO: 114545 - RNA, 32 nt, Homo Sapiens
agccgauuuuuccuuuuugauuaaagaugcua

SEQ ID NO: 114546 - RNA, 32 nt, Homo Sapiens
gcuuaugcucuucuccuucugcugcugccauc

SEQ ID NO: 114547 - RNA, 32 nt, Homo Sapiens
gacacggcgggugucggggccaggggugagac

SEQ ID NO: 114548 - RNA, 32 nt, Homo Sapiens
cucaggacucuucuggccguagguuccaggaa

SEQ ID NO: 114549 - RNA, 32 nt, Homo Sapiens
aacuguagaaaagagaaccauugaaggaaucu

SEQ ID NO: 114550 - RNA, 32 nt, Homo Sapiens
ucagcacaaaaauuauuuagaaaucuuuggaa

SEQ ID NO: 114551 - RNA, 32 nt, Homo Sapiens
uuuaaguaacugagucauuuuuaccacacagu

SEQ ID NO: 114552 - RNA, 32 nt, Homo Sapiens
ugaauugcuaauguaaguuacuaauuagguca

SEQ ID NO: 114553 - RNA, 32 nt, Homo Sapiens
gugaaucucuggggccaggaagacccugcugc

SEQ ID NO: 114554 - RNA, 30 nt, Homo Sapiens
agggucuggggaagcggcggcaggcgccau

SEQ ID NO: 114555 - RNA, 30 nt, Homo Sapiens
cucaagcuggacugcagcgccucgggggau

SEQ ID NO: 114556 - RNA, 32 nt, Homo Sapiens
gacaaucaaguaacaacugaaaaugugaaagu

SEQ ID NO: 114557 - RNA, 32 nt, Homo Sapiens
ucuuuaucauucauuucuuuuucuaaaaguug

SEQ ID NO: 114558 - RNA, 32 nt, Homo Sapiens
gccaaagcccugguccucuccacccugccucc

SEQ ID NO: 114559 - RNA, 32 nt, Homo Sapiens
uuguauaaacacauucuuucugguacauucaa

SEQ ID NO: 114560 - RNA, 32 nt, Homo Sapiens
caguuccuuugggucacccccaccccaacuuu

SEQ ID NO: 114561 - RNA, 32 nt, Homo Sapiens
aaagucgcggugaaugcgugcaugucucaaug

SEQ ID NO: 114562 - RNA, 32 nt, Homo Sapiens
gcuuauauucuauuuuccugcaaaugugucag

SEQ ID NO: 114563 - RNA, 32 nt, Homo Sapiens
guaaaacaacgguggcaacagcuccucuucca

SEQ ID NO: 114564 - RNA, 31 nt, Homo Sapiens
acagcccucaauggugggaacugcaaaaccu

SEQ ID NO: 114565 - RNA, 32 nt, Homo Sapiens
aucacagggcagagccgggaagcgaugaauuu

SEQ ID NO: 114566 - RNA, 32 nt, Homo Sapiens
uuaaaugaacuuauguacagaaaacauguaua

SEQ ID NO: 114567 - RNA, 32 nt, Homo Sapiens
uggggaaauacccauuaccguccugacccuug

SEQ ID NO: 114568 - RNA, 32 nt, Homo Sapiens
gggagccaguuguguucagacacacacaucac

SEQ ID NO: 114569 - RNA, 32 nt, Homo Sapiens
cacucuugugugauauaaaggcguguauauua

SEQ ID NO: 114570 - RNA, 32 nt, Homo Sapiens
ggcuuuuuuuuuuuuuuuuuuuuuggacaggg

SEQ ID NO: 114571 - RNA, 32 nt, Homo Sapiens
cuauuuuauaugcacaaaucugccaaaauaua

SEQ ID NO: 114572 - RNA, 32 nt, Homo Sapiens
aucuuuuguucuaccuguauugucugacuucu

SEQ ID NO: 114573 - RNA, 32 nt, Homo Sapiens
gcgguggauguccggcucuggaccucaguuuc

SEQ ID NO: 114574 - RNA, 32 nt, Homo Sapiens
uagcccggccgcccgcgccuguccgguccggu

SEQ ID NO: 114575 - RNA, 32 nt, Homo Sapiens
gacgcaucccagucugggcgggacgcucggcc

SEQ ID NO: 114576 - RNA, 32 nt, Homo Sapiens
uuucauguauucaaaucagcauuuuuuucuaa

SEQ ID NO: 114577 - RNA, 32 nt, Homo Sapiens
cgcugguuggaaagaguguugguguuggcugg

SEQ ID NO: 114578 - RNA, 32 nt, Homo Sapiens
uuuucacugcuguguccccagcgccugguccg

SEQ ID NO: 114579 - RNA, 32 nt, Homo Sapiens
cacacuuuauuacaguuaaaauuuaagguuuu

SEQ ID NO: 114580 - RNA, 32 nt, Homo Sapiens
caacgaagcugauccuaaaagugauccaaucu

SEQ ID NO: 114581 - RNA, 32 nt, Homo Sapiens
uauuccuacagaauucuuauuaacucaaauaa

SEQ ID NO: 114582 - RNA, 32 nt, Homo Sapiens
auggauaaagcuguuuuguucuaguaacaauu

SEQ ID NO: 114583 - RNA, 32 nt, Homo Sapiens
caucucuucuaaaaauacaaaaauuagcuggu

SEQ ID NO: 114584 - RNA, 32 nt, Homo Sapiens
aacggauaagagugaugaacuucuuuguuacc

SEQ ID NO: 114585 - RNA, 32 nt, Homo Sapiens
cuauuuacuuucaaaacaauuugcauuuagag

SEQ ID NO: 114586 - RNA, 32 nt, Homo Sapiens
ggggagggaaaggggcuaaagucucuucuguu

SEQ ID NO: 114587 - RNA, 31 nt, Homo Sapiens
uuaauguagcgcagcuccuauacuucagauu

SEQ ID NO: 114588 - RNA, 32 nt, Homo Sapiens
ggacugaaaaagacaaagguaacuguggaguu

SEQ ID NO: 114589 - RNA, 32 nt, Homo Sapiens
uggaauugaggagagaguaggaugcugauuuu

SEQ ID NO: 114590 - RNA, 32 nt, Homo Sapiens
ugaauuuuacacaacuacuuacgacaagggag

SEQ ID NO: 114591 - RNA, 32 nt, Homo Sapiens
cacacuaaacacacagguauaugcuaaauugu

SEQ ID NO: 114592 - RNA, 32 nt, Homo Sapiens
ggcgcuggcugagcagaggacccggcgggcgg

SEQ ID NO: 114593 - RNA, 32 nt, Homo Sapiens
cgcccacuucccggcccggggccugcacaauc

SEQ ID NO: 114594 - RNA, 32 nt, Homo Sapiens
aauaaaauuuauucuauucauucuuugcuuug

SEQ ID NO: 114595 - RNA, 32 nt, Homo Sapiens
ggggucgucuucaucuucgccggaugauuucc

SEQ ID NO: 114596 - RNA, 32 nt, Homo Sapiens
aaggcaaccacgaccuugcuagguucucugag

SEQ ID NO: 114597 - RNA, 32 nt, Homo Sapiens
agcugucaacuuuaacagucugcacaguuucc

SEQ ID NO: 114598 - RNA, 32 nt, Homo Sapiens
aaaaacucuccauuucuuucugguggaggcuc

SEQ ID NO: 114599 - RNA, 32 nt, Homo Sapiens
aguguuccaccucuccugccaugugccagccu

SEQ ID NO: 114600 - RNA, 32 nt, Homo Sapiens
auaauugauuaccauccuuauuuauuuuaaug

SEQ ID NO: 114601 - RNA, 32 nt, Homo Sapiens
aacagcagagauaaaaaguuuacuuuuguggu

SEQ ID NO: 114602 - RNA, 32 nt, Homo Sapiens
ccugccccacccacccagugccuugcugaagc

SEQ ID NO: 114603 - RNA, 32 nt, Homo Sapiens
ccuacccuaaaauucuaaggggaagggaccca

SEQ ID NO: 114604 - RNA, 32 nt, Homo Sapiens
uuauucuuggugcugccugggguguugcugag

SEQ ID NO: 114605 - RNA, 32 nt, Homo Sapiens
uuagucuuuucagugucuuuugcaauucaauu

SEQ ID NO: 114606 - RNA, 32 nt, Homo Sapiens
cccaaguaagguuuuuaccaauuuauauucaa

SEQ ID NO: 114607 - RNA, 32 nt, Homo Sapiens
cgccgccgccucuggugacccgggcccugacc

SEQ ID NO: 114608 - RNA, 32 nt, Homo Sapiens
ggacaucacaagaccaucagucugaauccagg

SEQ ID NO: 114609 - RNA, 32 nt, Homo Sapiens
cacgccccaugcucuucccuccccucgagugu

SEQ ID NO: 114610 - RNA, 32 nt, Homo Sapiens
caaagguauuuaauauucuuuuuuaugacaac

SEQ ID NO: 114611 - RNA, 32 nt, Homo Sapiens
accaaccagugcugaagagauuuuagaaccuu

SEQ ID NO: 114612 - RNA, 28 nt, Homo Sapiens
ugagaggggcggcccuggaggagacgga

SEQ ID NO: 114613 - RNA, 32 nt, Homo Sapiens
aucagcuacaaaugccaccuggugcugcgccc

SEQ ID NO: 114614 - RNA, 32 nt, Homo Sapiens
auuuuucuacaucggguuuucuuagggcucuc

SEQ ID NO: 114615 - RNA, 32 nt, Homo Sapiens
cccuccuccucagcccucccccacccauuaaa

SEQ ID NO: 114616 - RNA, 29 nt, Homo Sapiens
auccuauggggacaggagccuucaggacu

SEQ ID NO: 114617 - RNA, 32 nt, Homo Sapiens
cugcuuggcccggccggccuggcaccguuuuu

SEQ ID NO: 114618 - RNA, 32 nt, Homo Sapiens
uuucucaguuuaggcuaacacaguccacacca

SEQ ID NO: 114619 - RNA, 32 nt, Homo Sapiens
guggaacccauuaccuucucccucauuucagg

SEQ ID NO: 114620 - RNA, 32 nt, Homo Sapiens
caguggcugucugcgaucaggucuggcagcau

SEQ ID NO: 114621 - RNA, 32 nt, Homo Sapiens
uauagcugcccuccccuccggacuggugcccu

SEQ ID NO: 114622 - RNA, 32 nt, Homo Sapiens
cccccacagagcucaaggggguggggggcuga

SEQ ID NO: 114623 - RNA, 32 nt, Homo Sapiens
cagggcuugagcucaguaaugugggaaaacgc

SEQ ID NO: 114624 - RNA, 32 nt, Homo Sapiens
ccugugagggccagcucuggaaaaaccuggga

SEQ ID NO: 114625 - RNA, 32 nt, Homo Sapiens
ccagaauuuccacagcauacaccuggaccugu

SEQ ID NO: 114626 - RNA, 32 nt, Homo Sapiens
aggacuuuguggaacuuuggaacuugucuuaa

SEQ ID NO: 114627 - RNA, 32 nt, Homo Sapiens
uucuaacaaaaauauaacuuuucuaauaucug

SEQ ID NO: 114628 - RNA, 32 nt, Homo Sapiens
aaggucagaggguaaauuccuaacaggagacc

SEQ ID NO: 114629 - RNA, 32 nt, Homo Sapiens
cuauuuuguauuguuguuuguaucauuuugua

SEQ ID NO: 114630 - RNA, 32 nt, Homo Sapiens
aaaggcccuugcaauuuuuaauuaacaagcaa

SEQ ID NO: 114631 - RNA, 32 nt, Homo Sapiens
aggggaaagaauccugaguccugugcucauga

SEQ ID NO: 114632 - RNA, 32 nt, Homo Sapiens
uguuaauuuuauuuuauugaggcuguucaguu

SEQ ID NO: 114633 - RNA, 32 nt, Homo Sapiens
ucugcaaccuccgccucccgguuuaaagcgau

SEQ ID NO: 114634 - RNA, 32 nt, Homo Sapiens
cacgagggcgcuccgccuccgcgccccaaauc

SEQ ID NO: 114635 - RNA, 32 nt, Homo Sapiens
uucuuucaugggcauuugauaauuucagucuu

SEQ ID NO: 114636 - RNA, 32 nt, Homo Sapiens
cacugccugguccagggcugggcucucagcuc

SEQ ID NO: 114637 - RNA, 32 nt, Homo Sapiens
acacaaauuuuuccucaaucauuugaaaguca

SEQ ID NO: 114638 - RNA, 32 nt, Homo Sapiens
ccuggcccgcggcugcuccgggccucacaucu

SEQ ID NO: 114639 - RNA, 32 nt, Homo Sapiens
ggccgaguuagagcggccggccugacucucua

SEQ ID NO: 114640 - RNA, 32 nt, Homo Sapiens
auggugagggugggggugagggggccucucua

SEQ ID NO: 114641 - RNA, 32 nt, Homo Sapiens
gagggagccccggcuccgagguugcucuucgc

SEQ ID NO: 114642 - RNA, 31 nt, Homo Sapiens
ucacggcagcgcacugcuuuguaggcugccg

SEQ ID NO: 114643 - RNA, 32 nt, Homo Sapiens
ucacccuauccuguuccucccaccaggccugu

SEQ ID NO: 114644 - RNA, 32 nt, Homo Sapiens
gugcagucuccgggaucgcauucuucucccgg

SEQ ID NO: 114645 - RNA, 32 nt, Homo Sapiens
ucacuuuucuucuccuuuccucuugauuauua

SEQ ID NO: 114646 - RNA, 32 nt, Homo Sapiens
gucuuuucuuugacuccauggaggaauuugua

SEQ ID NO: 114647 - RNA, 32 nt, Homo Sapiens
aauccaugaagauaaaagaaacauaugucugc

SEQ ID NO: 114648 - RNA, 32 nt, Homo Sapiens
auaguguucccucucauccccaggguucgucc

SEQ ID NO: 114649 - RNA, 32 nt, Homo Sapiens
ugguuccauuuucuccggggcuguggggccaa

SEQ ID NO: 114650 - RNA, 32 nt, Homo Sapiens
ggccaagguacccacaggaucccauccccucc

SEQ ID NO: 114651 - RNA, 32 nt, Homo Sapiens
uaauuucaaaauuuaaagccaugcuaaaauua

SEQ ID NO: 114652 - RNA, 32 nt, Homo Sapiens
aaagauuauauauuuauauauagucuuuucug

SEQ ID NO: 114653 - RNA, 32 nt, Homo Sapiens
gaagcgccuucaaacuuccaauaaagagauca

SEQ ID NO: 114654 - RNA, 32 nt, Homo Sapiens
ccagcuuugcgucuucaucacucacucaagug

SEQ ID NO: 114655 - RNA, 32 nt, Homo Sapiens
uucaugggggagaggaagccgcggggagccca

SEQ ID NO: 114656 - RNA, 32 nt, Homo Sapiens
uuuuguugucuugugcaguauuuuacagcccc

SEQ ID NO: 114657 - RNA, 32 nt, Homo Sapiens
gguuuaaguauaaagcacugugaaugaaggua

SEQ ID NO: 114658 - RNA, 32 nt, Homo Sapiens
uccaucuucuccccaccaccgccccggugugc

SEQ ID NO: 114659 - RNA, 32 nt, Homo Sapiens
acauggugagggugggggugagggggccucuc

SEQ ID NO: 114660 - RNA, 32 nt, Homo Sapiens
uauuuuacuucuuuuagcuguuuaacucugua

SEQ ID NO: 114661 - RNA, 32 nt, Homo Sapiens
aggggcuagagggggagaagggaaggccuggu

SEQ ID NO: 114662 - RNA, 32 nt, Homo Sapiens
aaugagagugcauugcaaaguaguuucccaag

SEQ ID NO: 114663 - RNA, 32 nt, Homo Sapiens
ccugcggcggcugcgcuaccagagcacccgcu

SEQ ID NO: 114664 - RNA, 32 nt, Homo Sapiens
uguuggcccagcuggucucaaacuccuaaccu

SEQ ID NO: 114665 - RNA, 27 nt, Homo Sapiens
caaugacugagauuauuuugcuaauuu

SEQ ID NO: 114666 - RNA, 32 nt, Homo Sapiens
acagagcgacagagcaguugagaggacacucc

SEQ ID NO: 114667 - RNA, 32 nt, Homo Sapiens
ccgcauuaaucauggcaaucaagcccccuucc

SEQ ID NO: 114668 - RNA, 30 nt, Homo Sapiens
ucuuuuuguguaucgggggaaaccagcccc

SEQ ID NO: 114669 - RNA, 32 nt, Homo Sapiens
ugucucaaacuccuaaccucaacugauccacc

SEQ ID NO: 114670 - RNA, 32 nt, Homo Sapiens
uagucacuuuuguaagccagucucuucaugcc

SEQ ID NO: 114671 - RNA, 32 nt, Homo Sapiens
acuggucaugcaaggucuugggccugcccuug

SEQ ID NO: 114672 - RNA, 32 nt, Homo Sapiens
aacacgccccuacagaagugcacuuccuugag

SEQ ID NO: 114673 - RNA, 32 nt, Homo Sapiens
uuuuguauuuuugguagagauaggguuucaca

SEQ ID NO: 114674 - RNA, 32 nt, Homo Sapiens
uaaauuucaaaauuaugaagaauuacagaauu

SEQ ID NO: 114675 - RNA, 32 nt, Homo Sapiens
gugcaggaguggcaggaugguugcauguacca

SEQ ID NO: 114676 - RNA, 32 nt, Homo Sapiens
cacacacacacacacacacacacacacacugc

SEQ ID NO: 114677 - RNA, 32 nt, Homo Sapiens
ggucgccgccggggcgccgccuggcguaggga

SEQ ID NO: 114678 - RNA, 32 nt, Homo Sapiens
cagaaaaauggcauuccucucugucucucccu

SEQ ID NO: 114679 - RNA, 32 nt, Homo Sapiens
gcagggugguaauauuggcauucugauuaaau

SEQ ID NO: 114680 - RNA, 32 nt, Homo Sapiens
ugcugcauccagagaccuccccuggccggggg

SEQ ID NO: 114681 - RNA, 32 nt, Homo Sapiens
cuaugccuucugcaccaagaagaagugaauga

SEQ ID NO: 114682 - RNA, 32 nt, Homo Sapiens
uguaugguugucuacaauuuguuuuccuguaa

SEQ ID NO: 114683 - RNA, 32 nt, Homo Sapiens
ccgggcugccagcccugacugucgggccccca

SEQ ID NO: 114684 - RNA, 28 nt, Homo Sapiens
ugcauggggcggcuccccagggaccgcc

SEQ ID NO: 114685 - RNA, 32 nt, Homo Sapiens
aaacauuuucuuucuuuuucuggaaauuuugu

SEQ ID NO: 114686 - RNA, 32 nt, Homo Sapiens
gaggcagguguuuccaagggugucucauuaac

SEQ ID NO: 114687 - RNA, 32 nt, Homo Sapiens
ucaccguguuggccagaaugguuugcauuccu

SEQ ID NO: 114688 - RNA, 32 nt, Homo Sapiens
gacuuaaaauuccacaucaaguguuccauuaa

SEQ ID NO: 114689 - RNA, 32 nt, Homo Sapiens
auuaucuuuucucauuaaaauugugaugcucc

SEQ ID NO: 114690 - RNA, 32 nt, Homo Sapiens
gcaagagugguggcagggagacuuuggcaaca

SEQ ID NO: 114691 - RNA, 32 nt, Homo Sapiens
ucuuuuauguauucuaacuuuaaaagacaagu

SEQ ID NO: 114692 - RNA, 32 nt, Homo Sapiens
ggcugcgcccgccaaggcacggcggcucagac

SEQ ID NO: 114693 - RNA, 32 nt, Homo Sapiens
acuguaacagaaaauaaauuuugaauguguac

SEQ ID NO: 114694 - RNA, 32 nt, Homo Sapiens
ggcuugcuaugaugccugacaacuaauauccu

SEQ ID NO: 114695 - RNA, 32 nt, Homo Sapiens
ggacccugugggaggcuuccccggcgccgaga

SEQ ID NO: 114696 - RNA, 32 nt, Homo Sapiens
ggccaaggcucaccccagugcugcuggcuucu

SEQ ID NO: 114697 - RNA, 32 nt, Homo Sapiens
uuucuugauuuucagucaaugaaaauuauuaa

SEQ ID NO: 114698 - RNA, 32 nt, Homo Sapiens
gaggauuaauuguugccuuacaauguuacuga

SEQ ID NO: 114699 - RNA, 32 nt, Homo Sapiens
uccaagguauuuuuauuuuagcuucccuuaag

SEQ ID NO: 114700 - RNA, 32 nt, Homo Sapiens
caggcagggggcugaggccgaggccuggccau

SEQ ID NO: 114701 - RNA, 32 nt, Homo Sapiens
aaucaaaaaugguuccacaucucaucugauuu

SEQ ID NO: 114702 - RNA, 32 nt, Homo Sapiens
gaagaagagucuuuuaugacaucaagagaaau

SEQ ID NO: 114703 - RNA, 32 nt, Homo Sapiens
uugcuucagaauucaguaaaucuuaugaaggg

SEQ ID NO: 114704 - RNA, 32 nt, Homo Sapiens
uauaauacuucaugacugacaccuggcuuucc

SEQ ID NO: 114705 - RNA, 29 nt, Homo Sapiens
ugagggcaggaacagaggacguugggcga

SEQ ID NO: 114706 - RNA, 32 nt, Homo Sapiens
gcucagagucccgcccacauaugagacaggca

SEQ ID NO: 114707 - RNA, 32 nt, Homo Sapiens
ugugucagagacagaagggagcuggggauugg

SEQ ID NO: 114708 - RNA, 32 nt, Homo Sapiens
uccgccugauuucgaucgcccgcggucccccg

SEQ ID NO: 114709 - RNA, 32 nt, Homo Sapiens
agguuuguugguuuuuuuaauacacuuuaauu

SEQ ID NO: 114710 - RNA, 32 nt, Homo Sapiens
auguugguucagggaacacacuuucagaacca

SEQ ID NO: 114711 - RNA, 32 nt, Homo Sapiens
ugccccgcgggccccgcgagcgggagugggac

SEQ ID NO: 114712 - RNA, 32 nt, Homo Sapiens
acuccuuguaggucugcagaugugugucccau

SEQ ID NO: 114713 - RNA, 32 nt, Homo Sapiens
uuuuguaaccaccucugacuacuuuuguauau

SEQ ID NO: 114714 - RNA, 32 nt, Homo Sapiens
cacauaaaaauauuuauguagaaaagaaaaua

SEQ ID NO: 114715 - RNA, 32 nt, Homo Sapiens
ucucuccaggcccaagucgugcucuccuucca

SEQ ID NO: 114716 - RNA, 31 nt, Homo Sapiens
aauaccguguacugccugaguugugccucuu

SEQ ID NO: 114717 - RNA, 32 nt, Homo Sapiens
ggauuaucuauuuuuaaacaagcaguugacuu

SEQ ID NO: 114718 - RNA, 32 nt, Homo Sapiens
acacuccuggaaacgccuuugcccugauccaa

SEQ ID NO: 114719 - RNA, 32 nt, Homo Sapiens
gguuucccauucucucccacuuuuauacuguu

SEQ ID NO: 114720 - RNA, 32 nt, Homo Sapiens
ccucauccagcccucccuccccagguccuucc

SEQ ID NO: 114721 - RNA, 32 nt, Homo Sapiens
aauacauugguuaggacucagaggaaauacgg

SEQ ID NO: 114722 - RNA, 32 nt, Homo Sapiens
uccagcucccagccugggagugccaagagcca

SEQ ID NO: 114723 - RNA, 32 nt, Homo Sapiens
ugucguaacaagcagacaagaaacauuaaaaa

SEQ ID NO: 114724 - RNA, 32 nt, Homo Sapiens
ggcagcagcuccgcucccggcgccacccaccg

SEQ ID NO: 114725 - RNA, 32 nt, Homo Sapiens
cuuuaaaguguugucuauugcauaaaacaguu

SEQ ID NO: 114726 - RNA, 32 nt, Homo Sapiens
uuccagagcagggcugucggugcucugcaggg

SEQ ID NO: 114727 - RNA, 32 nt, Homo Sapiens
ccucccauggccuucccuccccacaguccuca

SEQ ID NO: 114728 - RNA, 32 nt, Homo Sapiens
cauucuuccuucccucaacucucugcccucca

SEQ ID NO: 114729 - RNA, 32 nt, Homo Sapiens
gauucggagugucugaacaggaugcugauguu

SEQ ID NO: 114730 - RNA, 32 nt, Homo Sapiens
cucgucuuaaucucggcgucaggacccacgcg

SEQ ID NO: 114731 - RNA, 32 nt, Homo Sapiens
gaaccagaucgacuggucugguagcagccugu

SEQ ID NO: 114732 - RNA, 32 nt, Homo Sapiens
cacagucucugacuuugcagggcucacagauu

SEQ ID NO: 114733 - RNA, 32 nt, Homo Sapiens
acgcugguccucaggacguguuaaagagaucu

SEQ ID NO: 114734 - RNA, 32 nt, Homo Sapiens
acuauuucugcugauauacucaccuuagaacu

SEQ ID NO: 114735 - RNA, 32 nt, Homo Sapiens
acuucucucuacagaccuuuauuucuuucccu

SEQ ID NO: 114736 - RNA, 32 nt, Homo Sapiens
aucagaagacacagcuuuuggugcgggcagac

SEQ ID NO: 114737 - RNA, 32 nt, Homo Sapiens
acagacagguugaacuuggccucugaaugcau

SEQ ID NO: 114738 - RNA, 32 nt, Homo Sapiens
ucaccccaggacucuaaauuauugggguaaaa

SEQ ID NO: 114739 - RNA, 32 nt, Homo Sapiens
ggcucugggaaugugccuuccuuauuuuaguu

SEQ ID NO: 114740 - RNA, 32 nt, Homo Sapiens
uacuaaccaaaggggcuuccuugucagggccu

SEQ ID NO: 114741 - RNA, 32 nt, Homo Sapiens
ugcgggaccggggugggcgccgcuacugggaa

SEQ ID NO: 114742 - RNA, 32 nt, Homo Sapiens
guucccugcuucguuaucuacucguuggucau

SEQ ID NO: 114743 - RNA, 32 nt, Homo Sapiens
agugcugugacuucggugaauuuucaauuuaa

SEQ ID NO: 114744 - RNA, 32 nt, Homo Sapiens
gaaagaaagucuuuuuguacaacuuuacaaua

SEQ ID NO: 114745 - RNA, 32 nt, Homo Sapiens
gaggccagacucaucaccaucuacuauugauu

SEQ ID NO: 114746 - RNA, 32 nt, Homo Sapiens
ugaaggaugcaggcuuccaggccuggcuuccu

SEQ ID NO: 114747 - RNA, 32 nt, Homo Sapiens
uauaagccaaaauaaucuuugcaaaauuccau

SEQ ID NO: 114748 - RNA, 32 nt, Homo Sapiens
agcaaccucauuucuuuuuuuaauuguuuuca

SEQ ID NO: 114749 - RNA, 32 nt, Homo Sapiens
uggaugugaagaagguuuggguaaacugcaug

SEQ ID NO: 114750 - RNA, 32 nt, Homo Sapiens
uuuucauguaaguuuaauuaucugcauuuauc

SEQ ID NO: 114751 - RNA, 32 nt, Homo Sapiens
cagcagcccuccagcccucuugugcuuucccu

SEQ ID NO: 114752 - RNA, 32 nt, Homo Sapiens
caaauugugaauggaauaaaauccacacuuua

SEQ ID NO: 114753 - RNA, 32 nt, Homo Sapiens
cauguacugacccgaaaggcucggccgcagag

SEQ ID NO: 114754 - RNA, 32 nt, Homo Sapiens
aaagacaggaggaggaaauagguaauaggcua

SEQ ID NO: 114755 - RNA, 32 nt, Homo Sapiens
guguggaggaggaguggccggaugccccacac

SEQ ID NO: 114756 - RNA, 32 nt, Homo Sapiens
uccgggguucggccauguccucacgcgggcag

SEQ ID NO: 114757 - RNA, 32 nt, Homo Sapiens
ggcaggaaccccgcuggcagaugaccaggacc

SEQ ID NO: 114758 - RNA, 32 nt, Homo Sapiens
caaggcccgacuccccgcaccacucagggucc

SEQ ID NO: 114759 - RNA, 32 nt, Homo Sapiens
ucacuguguauaggaauuuguauuuuggaggu

SEQ ID NO: 114760 - RNA, 32 nt, Homo Sapiens
aguacccacggaaaacuuguuuaccuugucac

SEQ ID NO: 114761 - RNA, 32 nt, Homo Sapiens
cgcuggcccgcggcgcugcgcuggcagggagc

SEQ ID NO: 114762 - RNA, 32 nt, Homo Sapiens
aaacgugugaauguuguuacgagauuggagca

SEQ ID NO: 114763 - RNA, 31 nt, Homo Sapiens
gcaaacaugacaaagaaaaaagucucccaaa

SEQ ID NO: 114764 - RNA, 32 nt, Homo Sapiens
aucagugaggcccuugucaguggggcccuggu

SEQ ID NO: 114765 - RNA, 32 nt, Homo Sapiens
auugcuacuuggauugagaguagcuggaaugu

SEQ ID NO: 114766 - RNA, 32 nt, Homo Sapiens
aggucagggagaggcucugugccccugacccc

SEQ ID NO: 114767 - RNA, 32 nt, Homo Sapiens
ucaugaacuuuucaguaggcugucugguuuau

SEQ ID NO: 114768 - RNA, 32 nt, Homo Sapiens
caggcuccuggcggcccaccccugccuucgug

SEQ ID NO: 114769 - RNA, 32 nt, Homo Sapiens
gaguccacgcaccggggauggaggcgcugggu

SEQ ID NO: 114770 - RNA, 32 nt, Homo Sapiens
cugcaaguucccucaaaacccuggcaauggca

SEQ ID NO: 114771 - RNA, 32 nt, Homo Sapiens
gacgggagguggcggagguggcggcggaggcg

SEQ ID NO: 114772 - RNA, 32 nt, Homo Sapiens
uaacucucuggugauugggugguggauagaag

SEQ ID NO: 114773 - RNA, 32 nt, Homo Sapiens
agcauggugguccagugguuauauaaaaauaa

SEQ ID NO: 114774 - RNA, 32 nt, Homo Sapiens
caaaaccccaauccccgcagguuuguagauaa

SEQ ID NO: 114775 - RNA, 32 nt, Homo Sapiens
ucuaacuggagcucagaguaagaaauaaagau

SEQ ID NO: 114776 - RNA, 32 nt, Homo Sapiens
agugauucagcacaguaugccuuuuucugcgc

SEQ ID NO: 114777 - RNA, 32 nt, Homo Sapiens
uagagauucuucauuaucuucaugguguuuug

SEQ ID NO: 114778 - RNA, 32 nt, Homo Sapiens
uacuuuuuuguuucucacccgcaacuugagcc

SEQ ID NO: 114779 - RNA, 32 nt, Homo Sapiens
accuccgguuggaggcacccaggcuugccagc

SEQ ID NO: 114780 - RNA, 32 nt, Homo Sapiens
auugggauuaugaaaauaaccaaagaguauag

SEQ ID NO: 114781 - RNA, 32 nt, Homo Sapiens
cugcaacaagauauuugccggcugggacuucu

SEQ ID NO: 114782 - RNA, 32 nt, Homo Sapiens
aaauuguauaaaaauaugaauguuggcugcag

SEQ ID NO: 114783 - RNA, 32 nt, Homo Sapiens
gagacgcagcugccgcgccggggccugagcug

SEQ ID NO: 114784 - RNA, 32 nt, Homo Sapiens
cucuagucuaacggucuuguaguuagagaucu

SEQ ID NO: 114785 - RNA, 32 nt, Homo Sapiens
ggaggcuacaacuggaauaaaaauaagaaagc

SEQ ID NO: 114786 - RNA, 29 nt, Homo Sapiens
cagggcuucugugaggaccacaaaaucua

SEQ ID NO: 114787 - RNA, 32 nt, Homo Sapiens
aggagcuagcgccaugguggccugcaguaugc

SEQ ID NO: 114788 - RNA, 32 nt, Homo Sapiens
ucgguggcugggggaagcugggcgugguuagc

SEQ ID NO: 114789 - RNA, 32 nt, Homo Sapiens
gcuaaggguauuuuaauaaaucuugguuucau

SEQ ID NO: 114790 - RNA, 32 nt, Homo Sapiens
cacuguuguaaauaacuuuuaauggccaaacc

SEQ ID NO: 114791 - RNA, 31 nt, Homo Sapiens
ugcuggaugcccuggaggaacaaggaggccu

SEQ ID NO: 114792 - RNA, 32 nt, Homo Sapiens
uuucauuuugcuauuggaauuuuuuauuguaa

SEQ ID NO: 114793 - RNA, 32 nt, Homo Sapiens
cacauauuugaaaucauauauuaagacuuucc

SEQ ID NO: 114794 - RNA, 32 nt, Homo Sapiens
cacauggcaagagcuuccuaaugaaauggacg

SEQ ID NO: 114795 - RNA, 32 nt, Homo Sapiens
cacacacuucccugaugaaaugucuggauuug

SEQ ID NO: 114796 - RNA, 32 nt, Homo Sapiens
ugaucuguagcccaugcugaugucacccacca

SEQ ID NO: 114797 - RNA, 32 nt, Homo Sapiens
cugaccccaugcucagccucuaggggacggca

SEQ ID NO: 114798 - RNA, 32 nt, Homo Sapiens
uuauauaaaaauuuuuaucaacacuaaacuuu

SEQ ID NO: 114799 - RNA, 32 nt, Homo Sapiens
ggacauggcugcggcccccggaggaggggacg

SEQ ID NO: 114800 - RNA, 32 nt, Homo Sapiens
aucuuguucaacauggaagacuucacacuggc

SEQ ID NO: 114801 - RNA, 32 nt, Homo Sapiens
caguaacugguuucuuuaucccuaacaugaau

SEQ ID NO: 114802 - RNA, 32 nt, Homo Sapiens
uuaaauacauaggccaaugcaaaauaguauac

SEQ ID NO: 114803 - RNA, 32 nt, Homo Sapiens
gcugacaccuuuaaucgcaguacuuugggagg

SEQ ID NO: 114804 - RNA, 31 nt, Homo Sapiens
gccuguccagcugcaggaccauagaggcugu

SEQ ID NO: 114805 - RNA, 32 nt, Homo Sapiens
accacugcacuccagccugggcgacagaggga

SEQ ID NO: 114806 - RNA, 32 nt, Homo Sapiens
agcaauaggaggagauggaguuucacuguguc

SEQ ID NO: 114807 - RNA, 32 nt, Homo Sapiens
ggaggcccgagcccggcccagccucgucccgc

SEQ ID NO: 114808 - RNA, 31 nt, Homo Sapiens
uguuuuccaauaaaauacagugacuaccuga

SEQ ID NO: 114809 - RNA, 32 nt, Homo Sapiens
caaagcaguuuaaugaaagaaaagugucugaa

SEQ ID NO: 114810 - RNA, 32 nt, Homo Sapiens
gccuucccagugcgcucggcccggcccgcgca

SEQ ID NO: 114811 - RNA, 31 nt, Homo Sapiens
ccacugugcccggccuuuugaguuaauuuuu

SEQ ID NO: 114812 - RNA, 32 nt, Homo Sapiens
ucgagcuccagcugcauucccuccgcguccgc

SEQ ID NO: 114813 - RNA, 32 nt, Homo Sapiens
ccggcuggggccuggggugcagcuggugucag

SEQ ID NO: 114814 - RNA, 32 nt, Homo Sapiens
auauacaccugauagucaaauaagguacagaa

SEQ ID NO: 114815 - RNA, 32 nt, Homo Sapiens
ccccacuggcuguguccccugccaccgaagug

SEQ ID NO: 114816 - RNA, 32 nt, Homo Sapiens
acaguggguggagccaauccacuccuuccuuu

SEQ ID NO: 114817 - RNA, 32 nt, Homo Sapiens
acuaaagaugcagaaauugaugaucuuggaau

SEQ ID NO: 114818 - RNA, 32 nt, Homo Sapiens
ugguuggccuuuuugaagacaccaaccugugu

SEQ ID NO: 114819 - RNA, 31 nt, Homo Sapiens
cucgccgcugccccggcuccgccgcucgcag

SEQ ID NO: 114820 - RNA, 32 nt, Homo Sapiens
aggagcggucccugcgcuugcugcugggaagu

SEQ ID NO: 114821 - RNA, 32 nt, Homo Sapiens
augaacaccguaagguuagcuagcuuccuacu

SEQ ID NO: 114822 - RNA, 31 nt, Homo Sapiens
uggaagcggauccuuccccaggcaagccuug

SEQ ID NO: 114823 - RNA, 32 nt, Homo Sapiens
acuccugaccuggugauuugcccgccuuggcc

SEQ ID NO: 114824 - RNA, 32 nt, Homo Sapiens
uucugcuuucagacaugcugcagguccucauc

SEQ ID NO: 114825 - RNA, 32 nt, Homo Sapiens
uuauacaauguucuuugucucaaaauaaagca

SEQ ID NO: 114826 - RNA, 32 nt, Homo Sapiens
uuuucacucgugguccucucccuaucccuugc

SEQ ID NO: 114827 - RNA, 32 nt, Homo Sapiens
ucauauaaucucgggauacacacacacacaca

SEQ ID NO: 114828 - RNA, 32 nt, Homo Sapiens
gcuagucuugucagcagcccggccauuggagc

SEQ ID NO: 114829 - RNA, 32 nt, Homo Sapiens
aauauccgcggggucuuccucaagugacacuc

SEQ ID NO: 114830 - RNA, 32 nt, Homo Sapiens
uuccgucgccuugccgccgcccggccccacag

SEQ ID NO: 114831 - RNA, 32 nt, Homo Sapiens
auuuucuaaaagacuauuuugauaaacuauac

SEQ ID NO: 114832 - RNA, 32 nt, Homo Sapiens
auuauauacuaaaacaaaaaggauuuuagugg

SEQ ID NO: 114833 - RNA, 32 nt, Homo Sapiens
gguggaggcggagccggagcgcggccauggcg

SEQ ID NO: 114834 - RNA, 32 nt, Homo Sapiens
ucagcuccacaggccuggcccggccacuguuc

SEQ ID NO: 114835 - RNA, 32 nt, Homo Sapiens
ccaaggguaagagcuucgaucucugcacagcc

SEQ ID NO: 114836 - RNA, 32 nt, Homo Sapiens
gcgcgccugggccgugaaggacuucgccccca

SEQ ID NO: 114837 - RNA, 32 nt, Homo Sapiens
ucuccgacgagagaggcggcgacgguggcguc

SEQ ID NO: 114838 - RNA, 32 nt, Homo Sapiens
gggccccggccagcaagcugcccccuccacuc

SEQ ID NO: 114839 - RNA, 32 nt, Homo Sapiens
cgggcugcugcagaaccccgccguguaaagag

SEQ ID NO: 114840 - RNA, 32 nt, Homo Sapiens
auaucauaugguuugcagauauuuucuuccau

SEQ ID NO: 114841 - RNA, 32 nt, Homo Sapiens
uccgccgcacgcugcagccgcggcuggaagau

SEQ ID NO: 114842 - RNA, 32 nt, Homo Sapiens
aacagcccuggaggaagguaugcaaagucuca

SEQ ID NO: 114843 - RNA, 32 nt, Homo Sapiens
cggccgccaaccccugaaagcagaaccuggcc

SEQ ID NO: 114844 - RNA, 32 nt, Homo Sapiens
ccuccauaugcuugaagugcugauuaccuaca

SEQ ID NO: 114845 - RNA, 32 nt, Homo Sapiens
agccuuuaauaaagaugugaaucuugaaaaaa

SEQ ID NO: 114846 - RNA, 32 nt, Homo Sapiens
ucauuaaaagcauagcacuuugaaauuaacua

SEQ ID NO: 114847 - RNA, 32 nt, Homo Sapiens
guacccaugcuguuaaauuugcaugauguuuu

SEQ ID NO: 114848 - RNA, 32 nt, Homo Sapiens
uucuuauuugcauuauuccaauaaaugaaaau

SEQ ID NO: 114849 - RNA, 32 nt, Homo Sapiens
aguucucagaauucuacagagaaggagggaau

SEQ ID NO: 114850 - RNA, 32 nt, Homo Sapiens
ugccucucgaggaggaggugcgaaguccugga

SEQ ID NO: 114851 - RNA, 32 nt, Homo Sapiens
ucagaaaacgagcuguuuaaaaugucccauug

SEQ ID NO: 114852 - RNA, 32 nt, Homo Sapiens
ccugugccucacccagagccagugucucccag

SEQ ID NO: 114853 - RNA, 32 nt, Homo Sapiens
cccuccuccacucuccucuccccugugagcuc

SEQ ID NO: 114854 - RNA, 32 nt, Homo Sapiens
aagaaaggcucuuuugugugugucggugugug

SEQ ID NO: 114855 - RNA, 32 nt, Homo Sapiens
gcggugaggaagaccugcggcggcgggaggag

SEQ ID NO: 114856 - RNA, 32 nt, Homo Sapiens
gucaucuggaacuguucauauaaacaguggcu

SEQ ID NO: 114857 - RNA, 32 nt, Homo Sapiens
uugcagcccuguaauauacuuaauaaaugacg

SEQ ID NO: 114858 - RNA, 32 nt, Homo Sapiens
uccccgggccggccggccggugggcacgauga

SEQ ID NO: 114859 - RNA, 32 nt, Homo Sapiens
agccagcgccugccucgccgccgcccucgcug

SEQ ID NO: 114860 - RNA, 28 nt, Homo Sapiens
augaaagguugagaacauuugacuuccc

SEQ ID NO: 114861 - RNA, 32 nt, Homo Sapiens
aguugaaaaaauaguagaagcuauucuacaag

SEQ ID NO: 114862 - RNA, 31 nt, Homo Sapiens
cccuuguuuucaaguuaucuaacugaaauau

SEQ ID NO: 114863 - RNA, 32 nt, Homo Sapiens
caucugcccuccuccuucucaggaaucacagg

SEQ ID NO: 114864 - RNA, 31 nt, Homo Sapiens
caaggugggaggaucaccagagccugggaag

SEQ ID NO: 114865 - RNA, 32 nt, Homo Sapiens
cggcugcuccugaggccuggcuccgcacggag

SEQ ID NO: 114866 - RNA, 32 nt, Homo Sapiens
acaauuuaaaauuguucuccccuuuaacauuu

SEQ ID NO: 114867 - RNA, 32 nt, Homo Sapiens
aauucuccaagcccugcccuccggcgcccccg

SEQ ID NO: 114868 - RNA, 32 nt, Homo Sapiens
cauucuacuucauuuuaauguaaaaagucuuu

SEQ ID NO: 114869 - RNA, 32 nt, Homo Sapiens
acagaaggaaaguaguuuauauguaaacucug

SEQ ID NO: 114870 - RNA, 32 nt, Homo Sapiens
caauugccaaacuaaagacaucaguucauugg

SEQ ID NO: 114871 - RNA, 32 nt, Homo Sapiens
agcauuuugcauguucuuucuaaucuuuguug

SEQ ID NO: 114872 - RNA, 26 nt, Homo Sapiens
gaugcuggagaacuaugggaaccugg

SEQ ID NO: 114873 - RNA, 32 nt, Homo Sapiens
guucuucacaguguuggugcuaaugaggccag

SEQ ID NO: 114874 - RNA, 32 nt, Homo Sapiens
cuauugcuuucuuuucuuucguuugucuauug

SEQ ID NO: 114875 - RNA, 32 nt, Homo Sapiens
cccgcgcccccucccggcaccgccgccgucgu

SEQ ID NO: 114876 - RNA, 32 nt, Homo Sapiens
uuauuuuauuuuuuauuuuuugagacggaguc

SEQ ID NO: 114877 - RNA, 32 nt, Homo Sapiens
ggcuuggcaaagugggagaaccucugcuuggg

SEQ ID NO: 114878 - RNA, 32 nt, Homo Sapiens
gcucgguggugggugagguaucagcuuucucc

SEQ ID NO: 114879 - RNA, 32 nt, Homo Sapiens
gcugagagccgagcgggcggcgcgggcagguc

SEQ ID NO: 114880 - RNA, 32 nt, Homo Sapiens
ugaggcagggagccaucgggcuggggccccuu

SEQ ID NO: 114881 - RNA, 32 nt, Homo Sapiens
gucuuucaaauuaaaauuauaccugaaugaag

SEQ ID NO: 114882 - RNA, 32 nt, Homo Sapiens
cugugcaggacacggggagaaguguagccgag

SEQ ID NO: 114883 - RNA, 32 nt, Homo Sapiens
gaggggcggaugugugugaacauggaaugggg

SEQ ID NO: 114884 - RNA, 32 nt, Homo Sapiens
auauuuuucaggaagaauaaagaauagagaga

SEQ ID NO: 114885 - RNA, 32 nt, Homo Sapiens
cggcagcggaggaggaagcuggcagggcggcg

SEQ ID NO: 114886 - RNA, 32 nt, Homo Sapiens
cuaaaaauguaccucggugaggaggcacagau

SEQ ID NO: 114887 - RNA, 32 nt, Homo Sapiens
guggcaagugacccucccuguggcugaagugu

SEQ ID NO: 114888 - RNA, 32 nt, Homo Sapiens
auuuuucugcuccugcuucucucucuucauug

SEQ ID NO: 114889 - RNA, 32 nt, Homo Sapiens
ucugcacugggccagcauccuccggccgcugc

SEQ ID NO: 114890 - RNA, 32 nt, Homo Sapiens
caagcuguggagggccagggguggggcugaga

SEQ ID NO: 114891 - RNA, 32 nt, Homo Sapiens
ugguccuauuuuuucacauucuggcauguggc

SEQ ID NO: 114892 - RNA, 32 nt, Homo Sapiens
augauaauccuuuuguauacuucuuuaauuuu

SEQ ID NO: 114893 - RNA, 32 nt, Homo Sapiens
gucggugcuucccuccucgggcugugggcaca

SEQ ID NO: 114894 - RNA, 32 nt, Homo Sapiens
acuccuuucccauuuuaaucuuguucucuccc

SEQ ID NO: 114895 - RNA, 32 nt, Homo Sapiens
aaguugauucuggauuugaauuacgagauuga

SEQ ID NO: 114896 - RNA, 32 nt, Homo Sapiens
uugcccaggcuggucucgaacuucugagcuca

SEQ ID NO: 114897 - RNA, 32 nt, Homo Sapiens
uuuuuuacuaaaucucugcagugcuuauaaaa

SEQ ID NO: 114898 - RNA, 32 nt, Homo Sapiens
acacagcugggcaaagccacaaggcuggccag

SEQ ID NO: 114899 - RNA, 32 nt, Homo Sapiens
ucuagucaguccauaaagauugugcuaauuuu

SEQ ID NO: 114900 - RNA, 32 nt, Homo Sapiens
gugugccacuagaagugcuacuuuuuaacgaa

SEQ ID NO: 114901 - RNA, 32 nt, Homo Sapiens
uauuucuaagcaaaauacauuuuuugugugug

SEQ ID NO: 114902 - RNA, 32 nt, Homo Sapiens
acuggauucuuacuuucuggaucuugacacug

SEQ ID NO: 114903 - RNA, 32 nt, Homo Sapiens
agguuccggggcgccgcagagcucccggccuc

SEQ ID NO: 114904 - RNA, 32 nt, Homo Sapiens
gugagaaagcugauguaaaaaauguaugcaua

SEQ ID NO: 114905 - RNA, 32 nt, Homo Sapiens
aaagaguuuauuuaagcaaacagagauucaug

SEQ ID NO: 114906 - RNA, 32 nt, Homo Sapiens
ugaauacauuucaaaucaacuauuaaaaauuu

SEQ ID NO: 114907 - RNA, 32 nt, Homo Sapiens
uaccacaguauguaccuaguguugcauaaucu

SEQ ID NO: 114908 - RNA, 32 nt, Homo Sapiens
cauguaggaaauaauuacauuuacugcauacc

SEQ ID NO: 114909 - RNA, 32 nt, Homo Sapiens
acccucuuuccacaguugccagcuucccacug

SEQ ID NO: 114910 - RNA, 32 nt, Homo Sapiens
caggcacucacacgcccuccuguccacaaccc

SEQ ID NO: 114911 - RNA, 32 nt, Homo Sapiens
ugacauaaacagauguaaugcaugucacagug

SEQ ID NO: 114912 - RNA, 32 nt, Homo Sapiens
gucuggccagcgacugccuucuccucucuggg

SEQ ID NO: 114913 - RNA, 30 nt, Homo Sapiens
ucagaggccguuccggccgccacagccccu

SEQ ID NO: 114914 - RNA, 32 nt, Homo Sapiens
accaacugcuccaggagagagaagagguggag

SEQ ID NO: 114915 - RNA, 32 nt, Homo Sapiens
uaaauauaaaaauuauguaugaaauaaaaaaa

SEQ ID NO: 114916 - RNA, 32 nt, Homo Sapiens
guguguauauauauguauauauauuuuuucau

SEQ ID NO: 114917 - RNA, 30 nt, Homo Sapiens
ucuguggauaaaaccaggcggguaacauac

SEQ ID NO: 114918 - RNA, 32 nt, Homo Sapiens
aauuaacccagcuaaguaaaaaaucugucuug

SEQ ID NO: 114919 - RNA, 32 nt, Homo Sapiens
acaccaaaaaauuuugaaaaagaagauaaaaa

SEQ ID NO: 114920 - RNA, 32 nt, Homo Sapiens
cccugggacuucgcccugaccccgcuccuccu

SEQ ID NO: 114921 - RNA, 32 nt, Homo Sapiens
uguaagaaaaagauuggaagugcggagcuguc

SEQ ID NO: 114922 - RNA, 32 nt, Homo Sapiens
aagcccuacgaaugcauugauugugggaaagc

SEQ ID NO: 114923 - RNA, 32 nt, Homo Sapiens
aaaaggggcagacacaccgaggaugcgauuua

SEQ ID NO: 114924 - RNA, 32 nt, Homo Sapiens
uaaggcaucuucuugcugugccuucacuuggc

SEQ ID NO: 114925 - RNA, 32 nt, Homo Sapiens
ccccuccccuaccagucuucccggccccuucc

SEQ ID NO: 114926 - RNA, 32 nt, Homo Sapiens
aggagaaaugacuuuuauaacauuuugagaaa

SEQ ID NO: 114927 - RNA, 32 nt, Homo Sapiens
guagaugaugaccggccccauaaacagccacc

SEQ ID NO: 114928 - RNA, 32 nt, Homo Sapiens
accuggcccucccaggacagcucucgcccccc

SEQ ID NO: 114929 - RNA, 32 nt, Homo Sapiens
gaaaaaagacuacuacagguuaagauaauuuu

SEQ ID NO: 114930 - RNA, 32 nt, Homo Sapiens
gugcuggauaucuuugaacagcggcuggagca

SEQ ID NO: 114931 - RNA, 32 nt, Homo Sapiens
cccaaaguccaaaugugaaguaccuugguguc

SEQ ID NO: 114932 - RNA, 32 nt, Homo Sapiens
ggcggaccagaccugcccugcucugugacaga

SEQ ID NO: 114933 - RNA, 32 nt, Homo Sapiens
gucccugcggccucccaccucccugccuuuca

SEQ ID NO: 114934 - RNA, 32 nt, Homo Sapiens
uuauaaaagacugucuuaauuugcauacuuaa

SEQ ID NO: 114935 - RNA, 32 nt, Homo Sapiens
gcuugauucaacaaagccacagacuuaacguu

SEQ ID NO: 114936 - RNA, 32 nt, Homo Sapiens
cgagggcuccugcugguacuguguucgcugcu

SEQ ID NO: 114937 - RNA, 32 nt, Homo Sapiens
ccccgccccgggacggccccacggaagaugca

SEQ ID NO: 114938 - RNA, 32 nt, Homo Sapiens
uguugggacuggaaccauuaugcggccccaua

SEQ ID NO: 114939 - RNA, 32 nt, Homo Sapiens
ugcuuuugauugggaagaugggcuucaauuag

SEQ ID NO: 114940 - RNA, 32 nt, Homo Sapiens
aauuguaacuauguauuguauuucaugggagg

SEQ ID NO: 114941 - RNA, 32 nt, Homo Sapiens
gacauugucauuccgccugguuguuucccuuu

SEQ ID NO: 114942 - RNA, 32 nt, Homo Sapiens
ugcauugaucuuuuccacaaguauuaaacugc

SEQ ID NO: 114943 - RNA, 32 nt, Homo Sapiens
ugguccacagaaaaccagucacaugagccacc

SEQ ID NO: 114944 - RNA, 32 nt, Homo Sapiens
gcgacucugcccgcucccguuucggcgcggug

SEQ ID NO: 114945 - RNA, 32 nt, Homo Sapiens
auuccuugcauaauugcucuuuaaaaccagua

SEQ ID NO: 114946 - RNA, 32 nt, Homo Sapiens
ucgagcucagcgcggcggaggcggcggcggcc

SEQ ID NO: 114947 - RNA, 32 nt, Homo Sapiens
gaucccugaaggggcugcugacugccccagaa

SEQ ID NO: 114948 - RNA, 32 nt, Homo Sapiens
acuucccggccgccccugagcccagcagccgc

SEQ ID NO: 114949 - RNA, 32 nt, Homo Sapiens
augcagcucaaggggaagaaagucacggacaa

SEQ ID NO: 114950 - RNA, 32 nt, Homo Sapiens
cauggcagcagaauccauccccggcagucagc

SEQ ID NO: 114951 - RNA, 32 nt, Homo Sapiens
gcacuacuauaaaauucgucuuguuagagaua

SEQ ID NO: 114952 - RNA, 31 nt, Homo Sapiens
uuuacugggcacagagccugaguugacaaug

SEQ ID NO: 114953 - RNA, 32 nt, Homo Sapiens
aauguuuugucaauaaacagggcuugagcaca

SEQ ID NO: 114954 - RNA, 32 nt, Homo Sapiens
cccacaaccagagccaugggaauacccagcug

SEQ ID NO: 114955 - RNA, 32 nt, Homo Sapiens
uugccacugugcuauauacacagcauaagauu

SEQ ID NO: 114956 - RNA, 32 nt, Homo Sapiens
cucaccccccacccccuccccccuccgcaagu

SEQ ID NO: 114957 - RNA, 32 nt, Homo Sapiens
gacuggaagguucguuccccuugcccaccaag

SEQ ID NO: 114958 - RNA, 32 nt, Homo Sapiens
uacauugugcccuugauuuuuaucuccaagug

SEQ ID NO: 114959 - RNA, 32 nt, Homo Sapiens
cuccacucucauucagacacucagcuuuuccg

SEQ ID NO: 114960 - RNA, 32 nt, Homo Sapiens
acacccaaacacaccacauugggaaaaccuuc

SEQ ID NO: 114961 - RNA, 29 nt, Homo Sapiens
uuagauguguguuucaggcuuggagugua

SEQ ID NO: 114962 - RNA, 32 nt, Homo Sapiens
agugacaugaacuggcaaagugguuuuaaaag

SEQ ID NO: 114963 - RNA, 32 nt, Homo Sapiens
gugaugaggggaggggggcacaugcugagucu

SEQ ID NO: 114964 - RNA, 32 nt, Homo Sapiens
uaagcugaggcaggcggcaggcguggugcaca

SEQ ID NO: 114965 - RNA, 32 nt, Homo Sapiens
ccucgguacccgcgagcggggaggaggcagga

SEQ ID NO: 114966 - RNA, 32 nt, Homo Sapiens
cucccagguucaagcuauucuccugccucagc

SEQ ID NO: 114967 - RNA, 32 nt, Homo Sapiens
agggcuggaggccagugcugcagggccagccc

SEQ ID NO: 114968 - RNA, 32 nt, Homo Sapiens
aguaggagaccuggggcaaggcccccugugga

SEQ ID NO: 114969 - RNA, 32 nt, Homo Sapiens
ugaagcagccucugcuggacaguggacuguuc

SEQ ID NO: 114970 - RNA, 32 nt, Homo Sapiens
uauuauuauuuuuuaagccuacugcagugggu

SEQ ID NO: 114971 - RNA, 32 nt, Homo Sapiens
aauucaaaaccaaaaacaagucacaagggagu

SEQ ID NO: 114972 - RNA, 32 nt, Homo Sapiens
cucaauguaaccucaggggccaguuuuagcau

SEQ ID NO: 114973 - RNA, 32 nt, Homo Sapiens
agagcucuauuaauugccauguuuacaaacaa

SEQ ID NO: 114974 - RNA, 32 nt, Homo Sapiens
gccuccaccuccccgguuccagcgauucuccu

SEQ ID NO: 114975 - RNA, 32 nt, Homo Sapiens
uuuguuuguuuuccuuuuugcccaauagagcc

SEQ ID NO: 114976 - RNA, 32 nt, Homo Sapiens
cccauuuaucuaaauauggacugcucaggaaa

SEQ ID NO: 114977 - RNA, 32 nt, Homo Sapiens
caggcaccaaccccuuccucaggucggugcac

SEQ ID NO: 114978 - RNA, 29 nt, Homo Sapiens
acaaacauguuuuugugaaagcuacugaa

SEQ ID NO: 114979 - RNA, 29 nt, Homo Sapiens
uugguguuagugaugcuggagaagagaau

SEQ ID NO: 114980 - RNA, 32 nt, Homo Sapiens
cauugcacuccagccugggugacagagcgaga

SEQ ID NO: 114981 - RNA, 32 nt, Homo Sapiens
cauuacacuccagccugggugacagagcaaga

SEQ ID NO: 114982 - RNA, 32 nt, Homo Sapiens
aacuuucguuacguugucucauuauuuaaccc

SEQ ID NO: 114983 - RNA, 32 nt, Homo Sapiens
ugcccuuccaaauaaaccuugcuaaguccaaa

SEQ ID NO: 114984 - RNA, 27 nt, Homo Sapiens
augcuaguuugcuucagccccuaguua

SEQ ID NO: 114985 - RNA, 32 nt, Homo Sapiens
ucugggggccgauggaagggagccgagucaga

SEQ ID NO: 114986 - RNA, 32 nt, Homo Sapiens
gcugcgcggggcccgcgguguguagaguccgc

SEQ ID NO: 114987 - RNA, 32 nt, Homo Sapiens
uaugguuagcugucacauacaacuuuuuuuuu

SEQ ID NO: 114988 - RNA, 32 nt, Homo Sapiens
acaagaaaacauauuucuugagcaugcuguua

SEQ ID NO: 114989 - RNA, 32 nt, Homo Sapiens
gccagcgucuguuuccaauuauaaaaaaaaaa

SEQ ID NO: 114990 - RNA, 32 nt, Homo Sapiens
aagguguuuuuuguuuuugucuuuuuaaacua

SEQ ID NO: 114991 - RNA, 32 nt, Homo Sapiens
uacagagaagggucuuuuuuuuuuuaaguauu

SEQ ID NO: 114992 - RNA, 32 nt, Homo Sapiens
cauugcccauauguacagaaagagaauaaaga

SEQ ID NO: 114993 - RNA, 32 nt, Homo Sapiens
uguuuauuuuacaauccagggauuguucaggc

SEQ ID NO: 114994 - RNA, 32 nt, Homo Sapiens
cugcuggacguuugaaaauacaaaaggccggg

SEQ ID NO: 114995 - RNA, 32 nt, Homo Sapiens
aaacuuuccuacugcuucaguugaaggaaaag

SEQ ID NO: 114996 - RNA, 32 nt, Homo Sapiens
ucugacucacgugugugauccaaauaaaggua

SEQ ID NO: 114997 - RNA, 32 nt, Homo Sapiens
ggccccggcacugcccggggcaucugggguug

SEQ ID NO: 114998 - RNA, 32 nt, Homo Sapiens
gccggguuacagccgccuccucggcgccacag

SEQ ID NO: 114999 - RNA, 32 nt, Homo Sapiens
guccucagggagcucacgggguaugagagaga

SEQ ID NO: 115000 - RNA, 32 nt, Homo Sapiens
uuggaaaagcuacuuuuuuccuaaagaacaga

SEQ ID NO: 115001 - RNA, 32 nt, Homo Sapiens
agauuuucugcugauaaucuuuuacaccuugg

SEQ ID NO: 115002 - RNA, 32 nt, Homo Sapiens
accccacgccgggaacccacgcgggccacuac

SEQ ID NO: 115003 - RNA, 32 nt, Homo Sapiens
ccagagauucagagcaaaacucgggcaaaggc

SEQ ID NO: 115004 - RNA, 29 nt, Homo Sapiens
uguagugugacauuccugccugccugagg

SEQ ID NO: 115005 - RNA, 32 nt, Homo Sapiens
ggaaaauauuaaaagcagcaaauauuuauuac

SEQ ID NO: 115006 - RNA, 32 nt, Homo Sapiens
cauaauaaaaaauuaugacaaugucaaaaaaa

SEQ ID NO: 115007 - RNA, 32 nt, Homo Sapiens
agugcuuuaaaacacuaacaaauuuugcuucu

SEQ ID NO: 115008 - RNA, 32 nt, Homo Sapiens
gucacccaccgcccuccuccuacucagggacc

SEQ ID NO: 115009 - RNA, 32 nt, Homo Sapiens
auuucuuuuuuucuuuuuuuuaaggucuaugg

SEQ ID NO: 115010 - RNA, 32 nt, Homo Sapiens
ugggcuacccuuggguccugcuccucaggccg

SEQ ID NO: 115011 - RNA, 31 nt, Homo Sapiens
ggcgagaaaaggaucgcaggagccaggcccu

SEQ ID NO: 115012 - RNA, 32 nt, Homo Sapiens
uguuccguugcuggugagcagcugcguuccuc

SEQ ID NO: 115013 - RNA, 32 nt, Homo Sapiens
augauuuaaauuauacaggaaggugugcguag

SEQ ID NO: 115014 - RNA, 32 nt, Homo Sapiens
gaauauuggagcaauuuuaacauugcagaaac

SEQ ID NO: 115015 - RNA, 32 nt, Homo Sapiens
cucacuuaugagaugccugaagccaggccaug

SEQ ID NO: 115016 - RNA, 32 nt, Homo Sapiens
cucuuaaacaacacacagaagaauugguccag

SEQ ID NO: 115017 - RNA, 32 nt, Homo Sapiens
cucuuucggcccagcccaguucauggcucucg

SEQ ID NO: 115018 - RNA, 32 nt, Homo Sapiens
ucugccucccucgcuccuccaacagcugccuu

SEQ ID NO: 115019 - RNA, 32 nt, Homo Sapiens
ggaggguccgagccagccgcuguuuugccgga

SEQ ID NO: 115020 - RNA, 32 nt, Homo Sapiens
cgccuggcuuuggaaugcuccaggcgcgccga

SEQ ID NO: 115021 - RNA, 32 nt, Homo Sapiens
uuugugacauucaagaaaaguauuuauucuaa

SEQ ID NO: 115022 - RNA, 32 nt, Homo Sapiens
acuucugugaauuuuaccacucaguagaaacc

SEQ ID NO: 115023 - RNA, 32 nt, Homo Sapiens
gaaacaccaaaaauauaaggaaaauaacacag

SEQ ID NO: 115024 - RNA, 32 nt, Homo Sapiens
gaugguccccaacuuguaaugauucaauuuag

SEQ ID NO: 115025 - RNA, 32 nt, Homo Sapiens
uggcucuugggcaaacguccuuccucacgggg

SEQ ID NO: 115026 - RNA, 32 nt, Homo Sapiens
ucgguggggugcgguggcucucggccuccgaa

SEQ ID NO: 115027 - RNA, 32 nt, Homo Sapiens
cucgacagcgccccugcugucuuccccaccgc

SEQ ID NO: 115028 - RNA, 32 nt, Homo Sapiens
gaccuccuaggccugauuguccugccagggug

SEQ ID NO: 115029 - RNA, 31 nt, Homo Sapiens
uaccaaauggaaagauugugccugcagccug

SEQ ID NO: 115030 - RNA, 32 nt, Homo Sapiens
ugagaaaagggaggaggggaagacagucugaa

SEQ ID NO: 115031 - RNA, 32 nt, Homo Sapiens
acguaacugucaacucuugaagaacuuuuauu

SEQ ID NO: 115032 - RNA, 32 nt, Homo Sapiens
ugugcuugucuuaugcagaaauauaaagcgau

SEQ ID NO: 115033 - RNA, 32 nt, Homo Sapiens
uccggucucacugaccccggcccacccgcggg

SEQ ID NO: 115034 - RNA, 32 nt, Homo Sapiens
ucccgaugagggucccauggccugcucccuca

SEQ ID NO: 115035 - RNA, 32 nt, Homo Sapiens
gagccgcuguugucgcugguaucccgggagca

SEQ ID NO: 115036 - RNA, 32 nt, Homo Sapiens
ccaugcccggcgggucucacgcggcugccccu

SEQ ID NO: 115037 - RNA, 32 nt, Homo Sapiens
cccgagcugcagccaagggucugcuggauggg

SEQ ID NO: 115038 - RNA, 32 nt, Homo Sapiens
gaccaggaugacuggggagcuuggcagaaguu

SEQ ID NO: 115039 - RNA, 32 nt, Homo Sapiens
ugcuguucauugauugagggaggaggaggagg

SEQ ID NO: 115040 - RNA, 32 nt, Homo Sapiens
aaaucacauagagccuuugauugugaggcagg

SEQ ID NO: 115041 - RNA, 31 nt, Homo Sapiens
aaaauagcaguuuacaaccagaauuagaaca

SEQ ID NO: 115042 - RNA, 32 nt, Homo Sapiens
auucugagagcagaggagggaaggcgggaugg

SEQ ID NO: 115043 - RNA, 32 nt, Homo Sapiens
ugucucccauucuuuugauuucuuacuguacu

SEQ ID NO: 115044 - RNA, 32 nt, Homo Sapiens
gaaagugcucaccgugagcggcugguaccugu

SEQ ID NO: 115045 - RNA, 32 nt, Homo Sapiens
guaaagaaaaaccuuuaauguuggaagaagcu

SEQ ID NO: 115046 - RNA, 32 nt, Homo Sapiens
uuacugguuuuaucuacuuguuuauuuuguac

SEQ ID NO: 115047 - RNA, 32 nt, Homo Sapiens
aaagagugcaggugcaguuucauucaacacau

SEQ ID NO: 115048 - RNA, 32 nt, Homo Sapiens
caccuggauuuaccacgacggcgaggacacca

SEQ ID NO: 115049 - RNA, 32 nt, Homo Sapiens
ucaagggacauagagggaaaauguuaaugugu

SEQ ID NO: 115050 - RNA, 32 nt, Homo Sapiens
gcugugucccccgccuccuccuccccauuucc

SEQ ID NO: 115051 - RNA, 32 nt, Homo Sapiens
augagcaauggggaacugguugccagggucua

SEQ ID NO: 115052 - RNA, 32 nt, Homo Sapiens
gcggccagggacccgggcuuaggcuggcaggc

SEQ ID NO: 115053 - RNA, 32 nt, Homo Sapiens
auaugacccagcugagaagcccucaggccucg

SEQ ID NO: 115054 - RNA, 30 nt, Homo Sapiens
uggaugauuguggcagcagaagccguugca

SEQ ID NO: 115055 - RNA, 32 nt, Homo Sapiens
agccugggccccagcccacaccuucaccaggg

SEQ ID NO: 115056 - RNA, 31 nt, Homo Sapiens
augaagagaugagacaagguauauaaaaguc

SEQ ID NO: 115057 - RNA, 32 nt, Homo Sapiens
augauuuuuuaaaagucaaguuuaauuucaaa

SEQ ID NO: 115058 - RNA, 32 nt, Homo Sapiens
cagccccgccccaucuaucuuugggaauuuau

SEQ ID NO: 115059 - RNA, 32 nt, Homo Sapiens
cugauggagagccuucugcuucugcccucugg

SEQ ID NO: 115060 - RNA, 32 nt, Homo Sapiens
acacugcacucugacccuguaguacagcaaua

SEQ ID NO: 115061 - RNA, 30 nt, Homo Sapiens
gggaaccguccgcagccgccggagccggga

SEQ ID NO: 115062 - RNA, 32 nt, Homo Sapiens
agguggagcaaggcccucuccuguccugcccc

SEQ ID NO: 115063 - RNA, 32 nt, Homo Sapiens
gaguuugucuacaggcgguuucucuguuauca

SEQ ID NO: 115064 - RNA, 32 nt, Homo Sapiens
gcugccuuaguggaggugcgcguggccugcac

SEQ ID NO: 115065 - RNA, 32 nt, Homo Sapiens
uaggcaaauagauaaaauuuauuuuuauggag

SEQ ID NO: 115066 - RNA, 32 nt, Homo Sapiens
cugucuugcuccaucugagaccagagccaaga

SEQ ID NO: 115067 - RNA, 32 nt, Homo Sapiens
cugcuaaacugggauggaggaaucggcccagc

SEQ ID NO: 115068 - RNA, 32 nt, Homo Sapiens
uagcccaagguuuccacccaucugccaggggg

SEQ ID NO: 115069 - RNA, 32 nt, Homo Sapiens
cucaguucagugaacacaaaacuuauuuaaag

SEQ ID NO: 115070 - RNA, 32 nt, Homo Sapiens
uuuagagucagucauuggcuuugucauuuacc

SEQ ID NO: 115071 - RNA, 32 nt, Homo Sapiens
uuauagcugugacugucacccucucaggcuuu

SEQ ID NO: 115072 - RNA, 32 nt, Homo Sapiens
cgugggucucgugggggcagaagagcucucgg

SEQ ID NO: 115073 - RNA, 32 nt, Homo Sapiens
ccagcucccugcgucccgucccgcguccccgc

SEQ ID NO: 115074 - RNA, 32 nt, Homo Sapiens
cgcucuuucgccaccuuccccagccgccggcc

SEQ ID NO: 115075 - RNA, 32 nt, Homo Sapiens
caggggucggugugucccucugaaucugagau

SEQ ID NO: 115076 - RNA, 32 nt, Homo Sapiens
acagacauugucagcauugcauuauuccaggg

SEQ ID NO: 115077 - RNA, 32 nt, Homo Sapiens
uaucuaagguaacaacaacaauuuugcaggug

SEQ ID NO: 115078 - RNA, 32 nt, Homo Sapiens
cccgucgggggcgacaucccggcggccgcgcu

SEQ ID NO: 115079 - RNA, 32 nt, Homo Sapiens
guguccgugccguucaguugcccgccauggcu

SEQ ID NO: 115080 - RNA, 32 nt, Homo Sapiens
cucugagcccgcaguuccgcaagccccugggg

SEQ ID NO: 115081 - RNA, 32 nt, Homo Sapiens
ucccagcugcucugcuggcuugcugaagccag

SEQ ID NO: 115082 - RNA, 32 nt, Homo Sapiens
cuucucugcauaauuuaaauguucagauaaau

SEQ ID NO: 115083 - RNA, 32 nt, Homo Sapiens
ggaucacccugagaaagcugguacggggcgcc

SEQ ID NO: 115084 - RNA, 32 nt, Homo Sapiens
guucccuccgacgguacccacugccgcugcgc

SEQ ID NO: 115085 - RNA, 32 nt, Homo Sapiens
augguggcgucccaggccuacaaccugaccuc

SEQ ID NO: 115086 - RNA, 32 nt, Homo Sapiens
agauaugggaugcagggccuuuuaguuccaua

SEQ ID NO: 115087 - RNA, 30 nt, Homo Sapiens
cuccucggcaggcggcggcggggccugccu

SEQ ID NO: 115088 - RNA, 32 nt, Homo Sapiens
ccuuuugcaccucagcugccacaccuauagag

SEQ ID NO: 115089 - RNA, 32 nt, Homo Sapiens
cagccacaucuuucuucuuaguuuacagugaa

SEQ ID NO: 115090 - RNA, 32 nt, Homo Sapiens
ccuugcuuaaugcuuuuguugacucaacaagg

SEQ ID NO: 115091 - RNA, 32 nt, Homo Sapiens
ucgcgcccgcuccgacguguccagguccgcgg

SEQ ID NO: 115092 - RNA, 32 nt, Homo Sapiens
acaggcccuggcugagggcagcugcgcgggcu

SEQ ID NO: 115093 - RNA, 32 nt, Homo Sapiens
uuugcuccaugagggaggggcagcaacaucgc

SEQ ID NO: 115094 - RNA, 32 nt, Homo Sapiens
uuguguuuuaucuuaaccaccaggucauuccu

SEQ ID NO: 115095 - RNA, 32 nt, Homo Sapiens
gcguguuguggacucagcacuggggccuguca

SEQ ID NO: 115096 - RNA, 32 nt, Homo Sapiens
uucugcaggagcuuuuccugcuggugccacug

SEQ ID NO: 115097 - RNA, 32 nt, Homo Sapiens
ccacuuggacuugcacaguguccgccgggcgc

SEQ ID NO: 115098 - RNA, 32 nt, Homo Sapiens
cugacacauacacacuuggacaaauggaaugu

SEQ ID NO: 115099 - RNA, 32 nt, Homo Sapiens
cccaugccuggccaggaauuuuguuuuuuagg

SEQ ID NO: 115100 - RNA, 32 nt, Homo Sapiens
gggugccacauggguuccugugccacccuuuc

SEQ ID NO: 115101 - RNA, 32 nt, Homo Sapiens
ccagugcagccgcaaugcugccgcgagcugcc

SEQ ID NO: 115102 - RNA, 32 nt, Homo Sapiens
auuauuugagguuugucauauucaucuuuggu

SEQ ID NO: 115103 - RNA, 32 nt, Homo Sapiens
aggcacucggcacaacuccgcaggaccggcuc

SEQ ID NO: 115104 - RNA, 32 nt, Homo Sapiens
cuucuguucagggaacauuuugcauucaggcu

SEQ ID NO: 115105 - RNA, 32 nt, Homo Sapiens
gcgcaggggcuuggccaguccuggucagcuuu

SEQ ID NO: 115106 - RNA, 32 nt, Homo Sapiens
aauggagaagaggacagaggaugugugggaaa

SEQ ID NO: 115107 - RNA, 32 nt, Homo Sapiens
guguacuguguggcauuguaauuuagauauaa

SEQ ID NO: 115108 - RNA, 31 nt, Homo Sapiens
gccaggcagcgaguccugccccgcccgcagc

SEQ ID NO: 115109 - RNA, 32 nt, Homo Sapiens
auaggcguaacuaauuuuaacucuauaaugug

SEQ ID NO: 115110 - RNA, 32 nt, Homo Sapiens
guuggagugcccuggcugcugcucugcaugug

SEQ ID NO: 115111 - RNA, 32 nt, Homo Sapiens
cgggcuccgccggcugcggccgagaggacgcg

SEQ ID NO: 115112 - RNA, 32 nt, Homo Sapiens
aucguuucacucuccuuugauuccuuguuaug

SEQ ID NO: 115113 - RNA, 30 nt, Homo Sapiens
cgcucggaccccaggccgccggugcugucg

SEQ ID NO: 115114 - RNA, 32 nt, Homo Sapiens
guguuagcuucugaauuggcaauuggaggcgg

SEQ ID NO: 115115 - RNA, 32 nt, Homo Sapiens
aguggccguagcaucaccccaucagaaagggg

SEQ ID NO: 115116 - RNA, 29 nt, Homo Sapiens
aagccugggcgacagagggagauuccguc

SEQ ID NO: 115117 - RNA, 32 nt, Homo Sapiens
aggaggugaccuagccgccgcgguccuagaag

SEQ ID NO: 115118 - RNA, 32 nt, Homo Sapiens
gcuaguaguuuauugagcuuuguauauuugga

SEQ ID NO: 115119 - RNA, 32 nt, Homo Sapiens
gggcagacauuugguuaauugugccagauacc

SEQ ID NO: 115120 - RNA, 32 nt, Homo Sapiens
cccugggcugcagcuccuggugcugagaacuu

SEQ ID NO: 115121 - RNA, 32 nt, Homo Sapiens
agcuggggcagagccugcugcagcccagcucu

SEQ ID NO: 115122 - RNA, 32 nt, Homo Sapiens
acgcaucccagggccgagugcagggccucgca

SEQ ID NO: 115123 - RNA, 32 nt, Homo Sapiens
gcgacguggaggaggaccaggugguggccgug

SEQ ID NO: 115124 - RNA, 32 nt, Homo Sapiens
uuauuuuauuuuuuaaaugggagcaacauauc

SEQ ID NO: 115125 - RNA, 32 nt, Homo Sapiens
aaauccuauuaccaaguucaguuuuuuaaaac

SEQ ID NO: 115126 - RNA, 32 nt, Homo Sapiens
acaggggcgggggcaggagcguggggggaagg

SEQ ID NO: 115127 - RNA, 32 nt, Homo Sapiens
gaaacuguuguuaauguuuuugaaauucuacu

SEQ ID NO: 115128 - RNA, 32 nt, Homo Sapiens
uuuacuguuauaauaauuauuaacuuccuugu

SEQ ID NO: 115129 - RNA, 32 nt, Homo Sapiens
ggcucggggccgcgcgcaccuuccccgcacug

SEQ ID NO: 115130 - RNA, 32 nt, Homo Sapiens
cuucggcuccucaggaccaccagagaaggaga

SEQ ID NO: 115131 - RNA, 32 nt, Homo Sapiens
cgaaaaggcggugcuuaaaccggaggaggcgg

SEQ ID NO: 115132 - RNA, 32 nt, Homo Sapiens
ucccuucacccccauuucugaccucaguuccu

SEQ ID NO: 115133 - RNA, 32 nt, Homo Sapiens
aaucuaaacugggaauggccgaggaggaaggg

SEQ ID NO: 115134 - RNA, 32 nt, Homo Sapiens
auugagccacauggauuuggacagguuguuac

SEQ ID NO: 115135 - RNA, 32 nt, Homo Sapiens
ugacauggugccuuaggaaugacuuggguuua

SEQ ID NO: 115136 - RNA, 32 nt, Homo Sapiens
acuaauguuuuaaauuuucucagugaccuuau

SEQ ID NO: 115137 - RNA, 32 nt, Homo Sapiens
uuucaccguuugcaggguugcuaaucagauac

SEQ ID NO: 115138 - RNA, 32 nt, Homo Sapiens
acauguaccuugaccaucguccuuccucucaa

SEQ ID NO: 115139 - RNA, 32 nt, Homo Sapiens
acuugccugcggugacaccugcuccccucuga

SEQ ID NO: 115140 - RNA, 32 nt, Homo Sapiens
uuucaaaucucuuauuauauguuuccuuuuuu

SEQ ID NO: 115141 - RNA, 32 nt, Homo Sapiens
ccuuaucccagauagaaaagugucucaaaugc

SEQ ID NO: 115142 - RNA, 32 nt, Homo Sapiens
agucauggaaaugugaagacuuugguuuuugg

SEQ ID NO: 115143 - RNA, 32 nt, Homo Sapiens
acuguguggaccgucugcugggacuccggccc

SEQ ID NO: 115144 - RNA, 32 nt, Homo Sapiens
uuuuucccuaaaagucuaaaaccuuaaacuuu

SEQ ID NO: 115145 - RNA, 32 nt, Homo Sapiens
agugggugcuaaauaaaccacuuuuugucugc

SEQ ID NO: 115146 - RNA, 32 nt, Homo Sapiens
gguccccgugcuggugggacugagaagaacgc

SEQ ID NO: 115147 - RNA, 32 nt, Homo Sapiens
uagcagccgcugccgcuuuggcuugcucggga

SEQ ID NO: 115148 - RNA, 32 nt, Homo Sapiens
agacugcccucccgggcuggcgucccacggag

SEQ ID NO: 115149 - RNA, 32 nt, Homo Sapiens
ccaaucauauaguggggcucagggccagugcu

SEQ ID NO: 115150 - RNA, 32 nt, Homo Sapiens
agacuacagcugcaggacccaggacgccccuc

SEQ ID NO: 115151 - RNA, 32 nt, Homo Sapiens
cuuucuuacaaagcuuuguauuacuguguggu

SEQ ID NO: 115152 - RNA, 32 nt, Homo Sapiens
auuuaugcacuguuauguggacaggggcaugg

SEQ ID NO: 115153 - RNA, 32 nt, Homo Sapiens
acuuaaaaagagaauauaacauuuuaugucac

SEQ ID NO: 115154 - RNA, 32 nt, Homo Sapiens
aacugaaaugaagaauggccaaguuuuauuga

SEQ ID NO: 115155 - RNA, 32 nt, Homo Sapiens
uaaaacaagcacaaaaucuuagggaagucaua

SEQ ID NO: 115156 - RNA, 32 nt, Homo Sapiens
gaaaagugcagggcaucggcgaggcacacgaa

SEQ ID NO: 115157 - RNA, 32 nt, Homo Sapiens
cugcagugaugguggcugucccgggaacuugg

SEQ ID NO: 115158 - RNA, 32 nt, Homo Sapiens
ggugcaugaggcgcggcgcgggcccuucagua

SEQ ID NO: 115159 - RNA, 32 nt, Homo Sapiens
cauggccugccagcagcugagaagccccccug

SEQ ID NO: 115160 - RNA, 32 nt, Homo Sapiens
ucuguuuauacaagucuaccacugccgauuga

SEQ ID NO: 115161 - RNA, 32 nt, Homo Sapiens
ccugguccagcaugaaggcguuuccaucugca

SEQ ID NO: 115162 - RNA, 32 nt, Homo Sapiens
agugauuccccucccgccccgcacagagaccc

SEQ ID NO: 115163 - RNA, 32 nt, Homo Sapiens
uggcccaguuggugggaccccuguccacaccc

SEQ ID NO: 115164 - RNA, 32 nt, Homo Sapiens
ucuguacucccucuugcucuaucugccauagg

SEQ ID NO: 115165 - RNA, 32 nt, Homo Sapiens
guaauagcuaguauuuauccaaugccaacugu

SEQ ID NO: 115166 - RNA, 32 nt, Homo Sapiens
acgccacgccuggcccggucagugcugcaugc

SEQ ID NO: 115167 - RNA, 30 nt, Homo Sapiens
gccucugucugugugguuaauguucugguu

SEQ ID NO: 115168 - RNA, 32 nt, Homo Sapiens
cccguccucagcaagucucugaugccacaacc

SEQ ID NO: 115169 - RNA, 32 nt, Homo Sapiens
aguuugcacuguaugcuggacggcauuccugc

SEQ ID NO: 115170 - RNA, 32 nt, Homo Sapiens
ucagcaaggggagugcuggccugacacaucag

SEQ ID NO: 115171 - RNA, 32 nt, Homo Sapiens
ugaaauuuuuaaaagcuguuuccauuagaagg

SEQ ID NO: 115172 - RNA, 32 nt, Homo Sapiens
uacagacucagccccaggacucgggccagccu

SEQ ID NO: 115173 - RNA, 32 nt, Homo Sapiens
ucgaaggcucugcugacugcuguccuugucca

SEQ ID NO: 115174 - RNA, 31 nt, Homo Sapiens
ccuguuucaaggacuuugcuagcuagguuuu

SEQ ID NO: 115175 - RNA, 32 nt, Homo Sapiens
ugggggaguauauacacguauagaaucuguac

SEQ ID NO: 115176 - RNA, 32 nt, Homo Sapiens
gcucugcuggggccuggcauggaacgugagac

SEQ ID NO: 115177 - RNA, 32 nt, Homo Sapiens
agccuuguccagaguuccuguguagcacgggg

SEQ ID NO: 115178 - RNA, 32 nt, Homo Sapiens
guccucaggcucccgcagcugcuccggaggga

SEQ ID NO: 115179 - RNA, 32 nt, Homo Sapiens
ccuguuccucucuagccugugcucuccauaug

SEQ ID NO: 115180 - RNA, 32 nt, Homo Sapiens
cucccacguggaccacagagccaggcucuccu

SEQ ID NO: 115181 - RNA, 32 nt, Homo Sapiens
ucguauuuagacaagaagaacaaaauuuauuu

SEQ ID NO: 115182 - RNA, 32 nt, Homo Sapiens
ccuccauaggucucuguuucuucugacaguga

SEQ ID NO: 115183 - RNA, 32 nt, Homo Sapiens
uggugugcaccuguagucacagcuacucggga

SEQ ID NO: 115184 - RNA, 32 nt, Homo Sapiens
agcuuugcccgccuagcaacaugucgcuuggc

SEQ ID NO: 115185 - RNA, 32 nt, Homo Sapiens
gcucuucgaguugcuggcuucucuaaggccug

SEQ ID NO: 115186 - RNA, 32 nt, Homo Sapiens
ucccacuacuuuccuuucccucugcccugcca

SEQ ID NO: 115187 - RNA, 31 nt, Homo Sapiens
gcugccuggcacugcccgcuugccggucagg

SEQ ID NO: 115188 - RNA, 32 nt, Homo Sapiens
aaagggcuggcucccccuccccaggcuggaga

SEQ ID NO: 115189 - RNA, 29 nt, Homo Sapiens
acugugcauaugcuguaccauacaguuuu

SEQ ID NO: 115190 - RNA, 32 nt, Homo Sapiens
acuuuuucugcccacacccucacucacacuca

SEQ ID NO: 115191 - RNA, 32 nt, Homo Sapiens
gccaaacaaggugcaggacccagcuuuggccc

SEQ ID NO: 115192 - RNA, 32 nt, Homo Sapiens
aagaaaaucugcuuugggccgcagcagugcug

SEQ ID NO: 115193 - RNA, 32 nt, Homo Sapiens
ccaagaccugguuuccuuucauucaucccagg

SEQ ID NO: 115194 - RNA, 32 nt, Homo Sapiens
agccgggugugguggcgggcgccuguaauauc

SEQ ID NO: 115195 - RNA, 31 nt, Homo Sapiens
gaggugcugccggccgccaccaugaccgagg

SEQ ID NO: 115196 - RNA, 32 nt, Homo Sapiens
ggaccuucccucuaccucccccaguuagugac

SEQ ID NO: 115197 - RNA, 32 nt, Homo Sapiens
aaagccgcgucucgcccucccgccccgccguc

SEQ ID NO: 115198 - RNA, 32 nt, Homo Sapiens
gccucuccacggccaacuccugucccaggaca

SEQ ID NO: 115199 - RNA, 32 nt, Homo Sapiens
ggggggugcuccucgacccacccagauuugac

SEQ ID NO: 115200 - RNA, 32 nt, Homo Sapiens
gauuaaggccccaaguccauuuuaaggcaugg

SEQ ID NO: 115201 - RNA, 32 nt, Homo Sapiens
uucucucugacccccaccucgacucggccucu

SEQ ID NO: 115202 - RNA, 32 nt, Homo Sapiens
cuccuccggcggcggcggagcccgagagaacu

SEQ ID NO: 115203 - RNA, 32 nt, Homo Sapiens
gugggagguuuggggaccuugagagaagagcc

SEQ ID NO: 115204 - RNA, 32 nt, Homo Sapiens
agcauggaaugggaaguggacguggcuuucug

SEQ ID NO: 115205 - RNA, 32 nt, Homo Sapiens
aaaacaaaaugaauuaucuacauggucaucca

SEQ ID NO: 115206 - RNA, 32 nt, Homo Sapiens
auucuguguacucuaguugcuucuuucccuug

SEQ ID NO: 115207 - RNA, 32 nt, Homo Sapiens
gcuguggggucucaguggccugggggaaagca

SEQ ID NO: 115208 - RNA, 32 nt, Homo Sapiens
uaacggaacuaucaucuguguuuguauuggaa

SEQ ID NO: 115209 - RNA, 32 nt, Homo Sapiens
gaagaguagcuaggcagaugcagagauggaga

SEQ ID NO: 115210 - RNA, 32 nt, Homo Sapiens
ggcugggcgugguggcucacgccugugguccc

SEQ ID NO: 115211 - RNA, 32 nt, Homo Sapiens
cgcucgguuuccccgcccccgccgggcuuaac

SEQ ID NO: 115212 - RNA, 32 nt, Homo Sapiens
aggagaugauccuuggacuuuuuuacccaacc

SEQ ID NO: 115213 - RNA, 32 nt, Homo Sapiens
gcggggcgaggcccuggacggcggcggcagug

SEQ ID NO: 115214 - RNA, 32 nt, Homo Sapiens
uuuuucuucaaaagcuaagugaagguucaaua

SEQ ID NO: 115215 - RNA, 32 nt, Homo Sapiens
agggacgcauggcccugaggcggccgcagggc

SEQ ID NO: 115216 - RNA, 32 nt, Homo Sapiens
cggcgcccagcaggcgcggggcgaaggagcug

SEQ ID NO: 115217 - RNA, 32 nt, Homo Sapiens
uucccugggggucccaggauccccugcuacuc

SEQ ID NO: 115218 - RNA, 32 nt, Homo Sapiens
cuuccagcagcaauugaagaugugucuggaga

SEQ ID NO: 115219 - RNA, 32 nt, Homo Sapiens
guugaagccuacgagauguauaaagaaaagcu

SEQ ID NO: 115220 - RNA, 32 nt, Homo Sapiens
cuggcaccucuaggagcagcucccacacuugc

SEQ ID NO: 115221 - RNA, 32 nt, Homo Sapiens
gauuuccaauauauuuuuguuuuauuguuauu

SEQ ID NO: 115222 - RNA, 32 nt, Homo Sapiens
cauggacacucuucuuuuuuaaauuuuauguc

SEQ ID NO: 115223 - RNA, 32 nt, Homo Sapiens
agacgcccaccaccccacuccucaccaccagc

SEQ ID NO: 115224 - RNA, 32 nt, Homo Sapiens
augcaaaaaccacaaugaaauaccgucucaca

SEQ ID NO: 115225 - RNA, 32 nt, Homo Sapiens
ucccgcggccgcgguucggacccgccggcgac

SEQ ID NO: 115226 - RNA, 28 nt, Homo Sapiens
gauuagaaucauuaacaucaugaaaaau

SEQ ID NO: 115227 - RNA, 32 nt, Homo Sapiens
acaagcccaacaguaaucugcaucauaagcug

SEQ ID NO: 115228 - RNA, 32 nt, Homo Sapiens
gcugcccgcccggacugucgcggcccgcggug

SEQ ID NO: 115229 - RNA, 32 nt, Homo Sapiens
agaaaauccccuucuuuuuuuucucucucuuu

SEQ ID NO: 115230 - RNA, 32 nt, Homo Sapiens
auuggcaccucuuuucggcauuguucaaucac

SEQ ID NO: 115231 - RNA, 32 nt, Homo Sapiens
ucuguuauuuguaaacugaggaccacaauaaa

SEQ ID NO: 115232 - RNA, 32 nt, Homo Sapiens
ccuucagccccucccggggagaagggccuugc

SEQ ID NO: 115233 - RNA, 32 nt, Homo Sapiens
cuuacuuugagugauccuccaacuucauuuga

SEQ ID NO: 115234 - RNA, 32 nt, Homo Sapiens
acccaguuaugaacuccuccaaaggugaagau

SEQ ID NO: 115235 - RNA, 32 nt, Homo Sapiens
cgacugccgucccagggugacucugaguuguc

SEQ ID NO: 115236 - RNA, 32 nt, Homo Sapiens
agaaaaggaggcggcuucgggcuuucguuggc

SEQ ID NO: 115237 - RNA, 32 nt, Homo Sapiens
cuaaacacagaaaagauacuguaaaaauauag

SEQ ID NO: 115238 - RNA, 32 nt, Homo Sapiens
cucggguuuaggggauguggggaccaggagaa

SEQ ID NO: 115239 - RNA, 32 nt, Homo Sapiens
uuggcccauuuguaaguccccaucccuacccu

SEQ ID NO: 115240 - RNA, 32 nt, Homo Sapiens
gguuuccccuccuuccuccccaagggcuuacu

SEQ ID NO: 115241 - RNA, 32 nt, Homo Sapiens
cuguuucccccauuuuuccuuuucacccaaaa

SEQ ID NO: 115242 - RNA, 32 nt, Homo Sapiens
gguguccaaacacuaaccacccauggauguuu

SEQ ID NO: 115243 - RNA, 32 nt, Homo Sapiens
acggcuacuuggaggaggacaacucggacgag

SEQ ID NO: 115244 - RNA, 32 nt, Homo Sapiens
agccacgaugaccccacccagaccaucccucu

SEQ ID NO: 115245 - RNA, 32 nt, Homo Sapiens
ugcgggccgggcgggugcauucaggccaaggc

SEQ ID NO: 115246 - RNA, 32 nt, Homo Sapiens
cucaggccccuccuucagccuguggccaccuc

SEQ ID NO: 115247 - RNA, 32 nt, Homo Sapiens
gcccguggcuccuggccugcucccugcaguac

SEQ ID NO: 115248 - RNA, 32 nt, Homo Sapiens
uuuaaccauuuaagacuacuuuucuuauaggu

SEQ ID NO: 115249 - RNA, 32 nt, Homo Sapiens
aggcaaucaagagcuuccagaaaugccacacu

SEQ ID NO: 115250 - RNA, 32 nt, Homo Sapiens
gcacuuuuaccagguguguguuggaauuggug

SEQ ID NO: 115251 - RNA, 32 nt, Homo Sapiens
agguagacucuuuggcacuuuggcacagggau

SEQ ID NO: 115252 - RNA, 32 nt, Homo Sapiens
aaaaccucagaauuucaggcaccacaaaaaca

SEQ ID NO: 115253 - RNA, 32 nt, Homo Sapiens
aucucgaauauguuucugggccauuugauuuu

SEQ ID NO: 115254 - RNA, 32 nt, Homo Sapiens
uaaggcccgcggcucaugugcugcccgccccc

SEQ ID NO: 115255 - RNA, 32 nt, Homo Sapiens
aucagauuucagaacaucucauucauuucuua

SEQ ID NO: 115256 - RNA, 32 nt, Homo Sapiens
uugugcuccccucccccaucaaaggaaagggg

SEQ ID NO: 115257 - RNA, 32 nt, Homo Sapiens
gguagccgacugccucugggacagcgguggcg

SEQ ID NO: 115258 - RNA, 32 nt, Homo Sapiens
gcgcggcggggcggggguggaggacgagagag

SEQ ID NO: 115259 - RNA, 32 nt, Homo Sapiens
agcagaccaggguuggcaaggcuggcaccaac

SEQ ID NO: 115260 - RNA, 32 nt, Homo Sapiens
agcaaauaaaugaacugacuucaacugggaua

SEQ ID NO: 115261 - RNA, 32 nt, Homo Sapiens
gguucccacgugcaaaaucaacaucaggaacc

SEQ ID NO: 115262 - RNA, 32 nt, Homo Sapiens
guuuuugggaccagcccuuccuccuggguuuu

SEQ ID NO: 115263 - RNA, 32 nt, Homo Sapiens
ggacacacagaaaguaacacaaguuugccaag

SEQ ID NO: 115264 - RNA, 32 nt, Homo Sapiens
aagcagccucaugagcaucccaggugccuaag

SEQ ID NO: 115265 - RNA, 32 nt, Homo Sapiens
gugauacuuaggaacccuggcaucuuuucuau

SEQ ID NO: 115266 - RNA, 32 nt, Homo Sapiens
ccacagagggucucuagggucugcaaaauaga

SEQ ID NO: 115267 - RNA, 32 nt, Homo Sapiens
auccucaaguaccaccugcugcuccaggaaau

SEQ ID NO: 115268 - RNA, 32 nt, Homo Sapiens
cacaggcacgugcaaucacacacacacgugga

SEQ ID NO: 115269 - RNA, 32 nt, Homo Sapiens
uuguagggacgccccagauugucagggauggg

SEQ ID NO: 115270 - RNA, 32 nt, Homo Sapiens
ggugcugguggauguuagcaguucuucccuug

SEQ ID NO: 115271 - RNA, 32 nt, Homo Sapiens
ugaaugcaagauacaaagugggauggaagaau

SEQ ID NO: 115272 - RNA, 32 nt, Homo Sapiens
aaaugccauuguuuuaaggaaauacacaguga

SEQ ID NO: 115273 - RNA, 32 nt, Homo Sapiens
aaucagaaacucuggcuguggggcccagcaac

SEQ ID NO: 115274 - RNA, 32 nt, Homo Sapiens
auacuaaguuaaaacgucacaaaggugcugcu

SEQ ID NO: 115275 - RNA, 32 nt, Homo Sapiens
caaguccuagggugggcuuccagcugccuuaa

SEQ ID NO: 115276 - RNA, 32 nt, Homo Sapiens
cacacacacacacacacacacacacacacaau

SEQ ID NO: 115277 - RNA, 32 nt, Homo Sapiens
uuuuuccuuuuuucuuuuuuuuuuuuuuuuaa

SEQ ID NO: 115278 - RNA, 32 nt, Homo Sapiens
cggaccccaugggcccagccccugcccaucua

SEQ ID NO: 115279 - RNA, 32 nt, Homo Sapiens
ugggcccugugcugcaaagguaaagggucuug

SEQ ID NO: 115280 - RNA, 32 nt, Homo Sapiens
ccuuauuccuccuaccucccgccccgcccagg

SEQ ID NO: 115281 - RNA, 32 nt, Homo Sapiens
gggcgcugcgguggccgcggcgcggagccgca

SEQ ID NO: 115282 - RNA, 32 nt, Homo Sapiens
ggggcuuucuuuuuaguucucuagggucugau

SEQ ID NO: 115283 - RNA, 32 nt, Homo Sapiens
cagucauccuuacagaaagauacccucuccag

SEQ ID NO: 115284 - RNA, 32 nt, Homo Sapiens
uuagccgucuucugcuacaucaaugcagcaaa

SEQ ID NO: 115285 - RNA, 32 nt, Homo Sapiens
aacacaaagaucuggauuucuggcaagacuug

SEQ ID NO: 115286 - RNA, 32 nt, Homo Sapiens
gucguauuugaaaaaguagaaaauugaguuac

SEQ ID NO: 115287 - RNA, 32 nt, Homo Sapiens
gaacugcacauuaagauuaccuaccgaagcaa

SEQ ID NO: 115288 - RNA, 32 nt, Homo Sapiens
cagcagcugcaccucuccugucugugcuccuc

SEQ ID NO: 115289 - RNA, 32 nt, Homo Sapiens
cagcuccugugcuguaaacaaagaguccuuuc

SEQ ID NO: 115290 - RNA, 32 nt, Homo Sapiens
ucacggugauguugcacagacaguggcugaca

SEQ ID NO: 115291 - RNA, 32 nt, Homo Sapiens
uccugaauugggaaguuacaguucucgggauc

SEQ ID NO: 115292 - RNA, 32 nt, Homo Sapiens
uugguugguuguuuguuuuuuaucaucugaga

SEQ ID NO: 115293 - RNA, 32 nt, Homo Sapiens
uccaaucucuauguuauguuuaauuuuauuuu

SEQ ID NO: 115294 - RNA, 32 nt, Homo Sapiens
uagcucuggugccucucagaacuccccugucu

SEQ ID NO: 115295 - RNA, 32 nt, Homo Sapiens
cauagcaaacaauggguaggugaugggaucua

SEQ ID NO: 115296 - RNA, 32 nt, Homo Sapiens
gagaaaugacaauggccacacacacacacaca

SEQ ID NO: 115297 - RNA, 32 nt, Homo Sapiens
gugcuucugcaccccagccccuguccugccug

SEQ ID NO: 115298 - RNA, 32 nt, Homo Sapiens
uauaauguaucuguacagcacuuuuuacauuu

SEQ ID NO: 115299 - RNA, 32 nt, Homo Sapiens
agaucccgcaggcggagcugccaggggccacc

SEQ ID NO: 115300 - RNA, 32 nt, Homo Sapiens
uaucguggaaugaaagauuaaguauauuaaca

SEQ ID NO: 115301 - RNA, 32 nt, Homo Sapiens
gguggagaaaccgaggcugaagcugggaggug

SEQ ID NO: 115302 - RNA, 32 nt, Homo Sapiens
acucucaaacccauucccaucacuuuauuagu

SEQ ID NO: 115303 - RNA, 32 nt, Homo Sapiens
auagagcaaacaccuuuaguuucaucagaucc

SEQ ID NO: 115304 - RNA, 32 nt, Homo Sapiens
gauggacggaaugauuucuacugcuggguuug

SEQ ID NO: 115305 - RNA, 32 nt, Homo Sapiens
uugauccuggaaagguggcagagccuccacug

SEQ ID NO: 115306 - RNA, 32 nt, Homo Sapiens
ggccagccagauggcgacguggcgguuccccg

SEQ ID NO: 115307 - RNA, 30 nt, Homo Sapiens
cuucuaggcaggcagcagguccugguuugu

SEQ ID NO: 115308 - RNA, 32 nt, Homo Sapiens
ggaggccggcgcagcgcagagcgggcucgaag

SEQ ID NO: 115309 - RNA, 32 nt, Homo Sapiens
aauucuccagcauuaggacuuaccuccuucuu

SEQ ID NO: 115310 - RNA, 32 nt, Homo Sapiens
uugacuucugcuuauggaaaacaaagaaacag

SEQ ID NO: 115311 - RNA, 32 nt, Homo Sapiens
ugccuccuguugaccagccugguuucauaccg

SEQ ID NO: 115312 - RNA, 32 nt, Homo Sapiens
ggaaauuuguuuguauuuuuuauuuacauuuu

SEQ ID NO: 115313 - RNA, 32 nt, Homo Sapiens
uauuacaauuuaauuuaaaaauacuaaaggca

SEQ ID NO: 115314 - RNA, 32 nt, Homo Sapiens
ccgugcaguggcccugccacagcccucccucg

SEQ ID NO: 115315 - RNA, 32 nt, Homo Sapiens
ucaagccuuguacaagcacauaucauguagac

SEQ ID NO: 115316 - RNA, 32 nt, Homo Sapiens
aaucaaaaacccaacgcguaaaacagggcagu

SEQ ID NO: 115317 - RNA, 32 nt, Homo Sapiens
ccccagagcccauggccugacugcacagccug

SEQ ID NO: 115318 - RNA, 32 nt, Homo Sapiens
acaugaauuacauaugaauuauuaagcauaug

SEQ ID NO: 115319 - RNA, 32 nt, Homo Sapiens
aagcagaucacaccucuuucugccucuacaua

SEQ ID NO: 115320 - RNA, 32 nt, Homo Sapiens
guuguuauuucugauuagaacucuguaacccu

SEQ ID NO: 115321 - RNA, 32 nt, Homo Sapiens
ucucaguugggggacaggccgguggcugaccc

SEQ ID NO: 115322 - RNA, 32 nt, Homo Sapiens
aacagaagacugaagaauaaaaacuaaggaac

SEQ ID NO: 115323 - RNA, 32 nt, Homo Sapiens
gauuuuaucauguuggccaggcuggucucgaa

SEQ ID NO: 115324 - RNA, 32 nt, Homo Sapiens
caggaaguauugguaaauggaggcaggagugg

SEQ ID NO: 115325 - RNA, 32 nt, Homo Sapiens
acaaucaccgugcugcagccaccccuuauuaa

SEQ ID NO: 115326 - RNA, 32 nt, Homo Sapiens
agauaggacuaaaguugugccaaacuauauca

SEQ ID NO: 115327 - RNA, 29 nt, Homo Sapiens
auuauuucuaaauagggccacaugguuuu

SEQ ID NO: 115328 - RNA, 32 nt, Homo Sapiens
uuuccauuucaucuguauuuuaucuccgugac

SEQ ID NO: 115329 - RNA, 32 nt, Homo Sapiens
uggccuauuucccccgucagguugcacaggug

SEQ ID NO: 115330 - RNA, 28 nt, Homo Sapiens
agcaauguugcuaauauguguuaucaga

SEQ ID NO: 115331 - RNA, 32 nt, Homo Sapiens
ccgucucaugaggggcccgagcagaagcagga

SEQ ID NO: 115332 - RNA, 32 nt, Homo Sapiens
uuaaauaccauaaaauguaacucugccuuuua

SEQ ID NO: 115333 - RNA, 32 nt, Homo Sapiens
guccgugcaccgaugcauacaccacaccccac

SEQ ID NO: 115334 - RNA, 32 nt, Homo Sapiens
cacucccaggcgagccggcccgcggcugccag

SEQ ID NO: 115335 - RNA, 32 nt, Homo Sapiens
gaggggaggcggaucugaggggcugggugcag

SEQ ID NO: 115336 - RNA, 32 nt, Homo Sapiens
gaugaggacagagggaaccaagacucugaaag

SEQ ID NO: 115337 - RNA, 32 nt, Homo Sapiens
aguauuagaaacaaaaucauggaucaagagau

SEQ ID NO: 115338 - RNA, 32 nt, Homo Sapiens
cagaagucaagagcucuucugugguggaaucc

SEQ ID NO: 115339 - RNA, 32 nt, Homo Sapiens
ccgccaugauucugaggccuucccagcuaugu

SEQ ID NO: 115340 - RNA, 32 nt, Homo Sapiens
uaguuaaauggauucauaugaagugcuuuacu

SEQ ID NO: 115341 - RNA, 32 nt, Homo Sapiens
ugccucugcccccagcacccacccucccccau

SEQ ID NO: 115342 - RNA, 32 nt, Homo Sapiens
gucccuaauuuacucuaaccaagcauuuucag

SEQ ID NO: 115343 - RNA, 32 nt, Homo Sapiens
caugcaccuaccucagaaaacaaguaucguca

SEQ ID NO: 115344 - RNA, 32 nt, Homo Sapiens
gcaccccaccuucgucuuugaccuccagccuc

SEQ ID NO: 115345 - RNA, 32 nt, Homo Sapiens
acccuaggaagccccagguauucgcaaucuga

SEQ ID NO: 115346 - RNA, 32 nt, Homo Sapiens
cggcuguccacagcggacccugcugugccucc

SEQ ID NO: 115347 - RNA, 32 nt, Homo Sapiens
uggccacgagaggcaggcuggcugggacauga

SEQ ID NO: 115348 - RNA, 30 nt, Homo Sapiens
aaacugugugaccacuacagcagaguaaag

SEQ ID NO: 115349 - RNA, 32 nt, Homo Sapiens
gauaauguacagauuuaaaaacaaaucuuguu

SEQ ID NO: 115350 - RNA, 32 nt, Homo Sapiens
guuacuuuucccuugacuggaucccaaguagc

SEQ ID NO: 115351 - RNA, 32 nt, Homo Sapiens
ucuugagugucuauuauguacaggacauguac

SEQ ID NO: 115352 - RNA, 32 nt, Homo Sapiens
gccgcagcuuaccuuggagaugcagaaaucau

SEQ ID NO: 115353 - RNA, 32 nt, Homo Sapiens
acugaggccccaaguggcuccgcggccgagaa

SEQ ID NO: 115354 - RNA, 32 nt, Homo Sapiens
ccagggcacugcccggcccguccaggaccugu

SEQ ID NO: 115355 - RNA, 32 nt, Homo Sapiens
aaccaguggggccagcacacacgaagcaacag

SEQ ID NO: 115356 - RNA, 32 nt, Homo Sapiens
uuccgggcgcgguggcucacgccuguaauccc

SEQ ID NO: 115357 - RNA, 32 nt, Homo Sapiens
uuaaaaacacuuucccauuaaucuuuacuguu

SEQ ID NO: 115358 - RNA, 32 nt, Homo Sapiens
uacucagucugaucuuuuuuuuguuuguuuua

SEQ ID NO: 115359 - RNA, 32 nt, Homo Sapiens
cacccguuccuuaccccccacccagaggcacc

SEQ ID NO: 115360 - RNA, 32 nt, Homo Sapiens
uaacaccccgauuuccucuuggguccccucaa

SEQ ID NO: 115361 - RNA, 32 nt, Homo Sapiens
aaagaugagaaaaaauuaauuaaugaggacaa

SEQ ID NO: 115362 - RNA, 32 nt, Homo Sapiens
ucagugaggagcugcugcugugcuguuuaaug

SEQ ID NO: 115363 - RNA, 32 nt, Homo Sapiens
aauaaaucuuuuaucuugaauguaauaagaau

SEQ ID NO: 115364 - RNA, 32 nt, Homo Sapiens
uauaguuuaaauuuuuuguaagcaaaaaauac

SEQ ID NO: 115365 - RNA, 32 nt, Homo Sapiens
uauaaacgucuggcauuucccuggcuugcacu

SEQ ID NO: 115366 - RNA, 31 nt, Homo Sapiens
uugaagugaaacacaguuuuaaaacuugcuu

SEQ ID NO: 115367 - RNA, 32 nt, Homo Sapiens
auuugcugucuccucugcucaccaggauggca

SEQ ID NO: 115368 - RNA, 32 nt, Homo Sapiens
ugccuggacugggacuguuagagcugcuuccu

SEQ ID NO: 115369 - RNA, 32 nt, Homo Sapiens
ccagucauuaaaguccaguauuacuaagguaa

SEQ ID NO: 115370 - RNA, 32 nt, Homo Sapiens
cagcuccuuucuguccuggagcuagcaaagac

SEQ ID NO: 115371 - RNA, 32 nt, Homo Sapiens
gggacucuauaagugcuuuagaugggugucuc

SEQ ID NO: 115372 - RNA, 32 nt, Homo Sapiens
gcuaccaauauuuguucuuaauucuccaguua

SEQ ID NO: 115373 - RNA, 32 nt, Homo Sapiens
ugaggcugcccugacccuuccacagucauuuc

SEQ ID NO: 115374 - RNA, 32 nt, Homo Sapiens
cuaaacacgaggaaacauuauucauuggaaaa

SEQ ID NO: 115375 - RNA, 32 nt, Homo Sapiens
ccuuccacgcgcugcgcagccucgaccagcag

SEQ ID NO: 115376 - RNA, 32 nt, Homo Sapiens
ugugcugaggccccggcccccgccccugggac

SEQ ID NO: 115377 - RNA, 32 nt, Homo Sapiens
gcucucgccucacugcggccuccggaguccaa

SEQ ID NO: 115378 - RNA, 32 nt, Homo Sapiens
ucaggggacguugaaauuauuuuuguaacggg

SEQ ID NO: 115379 - RNA, 29 nt, Homo Sapiens
ggccgcuggggacagauggccaggccggc

SEQ ID NO: 115380 - RNA, 32 nt, Homo Sapiens
uccugcaaggaccugggccucccagcccagcc

SEQ ID NO: 115381 - RNA, 32 nt, Homo Sapiens
aggcuccggccgcagagaacucagccucauuc

SEQ ID NO: 115382 - RNA, 32 nt, Homo Sapiens
gucuucacuccagccagcaucauggucuucgg

SEQ ID NO: 115383 - RNA, 32 nt, Homo Sapiens
auucuuuuuccacagagugagcgucauaauau

SEQ ID NO: 115384 - RNA, 32 nt, Homo Sapiens
aauaguugcaguauuucuuuuaaauguuuuug

SEQ ID NO: 115385 - RNA, 32 nt, Homo Sapiens
ucgacucuguuguuagccgaagacucgccucu

SEQ ID NO: 115386 - RNA, 32 nt, Homo Sapiens
cuugccccaucccucccacacacaggaccaga

SEQ ID NO: 115387 - RNA, 32 nt, Homo Sapiens
cuccuccaguccugucucaucuccugggagag

SEQ ID NO: 115388 - RNA, 32 nt, Homo Sapiens
ggcccaauaacacuucugguucagggacacau

SEQ ID NO: 115389 - RNA, 32 nt, Homo Sapiens
uuugugcccccggcccgucuccgcgcucacca

SEQ ID NO: 115390 - RNA, 32 nt, Homo Sapiens
uuaaagaguacucccggcauggucaauuuccu

SEQ ID NO: 115391 - RNA, 32 nt, Homo Sapiens
uauuuugagagugucuuuuuuauuucauucau

SEQ ID NO: 115392 - RNA, 32 nt, Homo Sapiens
ccuagucuugcauuggaaccacuucuaggaac

SEQ ID NO: 115393 - RNA, 32 nt, Homo Sapiens
guggauccagugaacccguccaggugccccaa

SEQ ID NO: 115394 - RNA, 32 nt, Homo Sapiens
uuucccaguauaaugauacaucguagccuaag

SEQ ID NO: 115395 - RNA, 32 nt, Homo Sapiens
auugggauaagaaaaaauauauauugcucuuc

SEQ ID NO: 115396 - RNA, 32 nt, Homo Sapiens
cugccgcgugcccuucccccaucccuccaauc

SEQ ID NO: 115397 - RNA, 32 nt, Homo Sapiens
cguaaugucaaauaccaccuauaaaauauauu

SEQ ID NO: 115398 - RNA, 32 nt, Homo Sapiens
gccacgcagcggggccggacaggcgguaagga

SEQ ID NO: 115399 - RNA, 32 nt, Homo Sapiens
aaacuuuuuuucugggcccuuauguacccacc

SEQ ID NO: 115400 - RNA, 32 nt, Homo Sapiens
uugguaaugugucaaagagaugaggaaauaag

SEQ ID NO: 115401 - RNA, 32 nt, Homo Sapiens
agagauaagaccacuuuuuuaucugagcuucu

SEQ ID NO: 115402 - RNA, 32 nt, Homo Sapiens
auguccuggggaccugagcagcagccaccagg

SEQ ID NO: 115403 - RNA, 32 nt, Homo Sapiens
aacucgaauuaaauauccacaauucaaaagca

SEQ ID NO: 115404 - RNA, 32 nt, Homo Sapiens
aauccugaucccagcccaaucuugggcccuug

SEQ ID NO: 115405 - RNA, 32 nt, Homo Sapiens
cccgugcugaugacuguggcugugaugaauuc

SEQ ID NO: 115406 - RNA, 32 nt, Homo Sapiens
gaggaaaggggaugcagagcccugcccagcac

SEQ ID NO: 115407 - RNA, 32 nt, Homo Sapiens
uggaaccagcugucuguggagagaauggggug

SEQ ID NO: 115408 - RNA, 32 nt, Homo Sapiens
uuaaaugagauuacagcauaaugaagaagaca

SEQ ID NO: 115409 - RNA, 32 nt, Homo Sapiens
ccgcccaacagcccggccgcgcggcgguuggu

SEQ ID NO: 115410 - RNA, 32 nt, Homo Sapiens
cucucugcagguagguuuuucuggaugauagg

SEQ ID NO: 115411 - RNA, 32 nt, Homo Sapiens
uccuuaauaucuacucuuuagcacuauaguga

SEQ ID NO: 115412 - RNA, 32 nt, Homo Sapiens
ggguuauuugaaaaaauauaaggaauucacac

SEQ ID NO: 115413 - RNA, 32 nt, Homo Sapiens
aaggaugugaaucauggauggaaggccauuug

SEQ ID NO: 115414 - RNA, 32 nt, Homo Sapiens
uaucagaguaccauuccaaucucuuaacuugc

SEQ ID NO: 115415 - RNA, 32 nt, Homo Sapiens
acacaucucccgcuccucuauggccccugccu

SEQ ID NO: 115416 - RNA, 32 nt, Homo Sapiens
aaacguuggaguuugggcuggagcuccucccu

SEQ ID NO: 115417 - RNA, 32 nt, Homo Sapiens
ucugggcuccagccagagaacaaucuuuuauu

SEQ ID NO: 115418 - RNA, 32 nt, Homo Sapiens
caauugagcuccagcccugguuuuccuaccca

SEQ ID NO: 115419 - RNA, 32 nt, Homo Sapiens
ccuaucugcuccuggaggugauccccgacucc

SEQ ID NO: 115420 - RNA, 32 nt, Homo Sapiens
acccacugccagcagagaaugcuguccaguuu

SEQ ID NO: 115421 - RNA, 32 nt, Homo Sapiens
ucaaggauuuuacaguugaccuugaagaccac

SEQ ID NO: 115422 - RNA, 32 nt, Homo Sapiens
uucagggcacuugauuuagauuuggaggggcu

SEQ ID NO: 115423 - RNA, 32 nt, Homo Sapiens
cucucgugcucuaggaccugcacgggacuugu

SEQ ID NO: 115424 - RNA, 32 nt, Homo Sapiens
auaacaauuuugcuaaaccauuacaauguuag

SEQ ID NO: 115425 - RNA, 32 nt, Homo Sapiens
auuaaucccgugcuccuccucacugccauuau

SEQ ID NO: 115426 - RNA, 32 nt, Homo Sapiens
gggcugcgucccgcccgcgccgccucuuugag

SEQ ID NO: 115427 - RNA, 32 nt, Homo Sapiens
ccgagcacugcgggggcuuuccuccuuguugg

SEQ ID NO: 115428 - RNA, 32 nt, Homo Sapiens
cugaaagaucagagaccauguuauuccugacc

SEQ ID NO: 115429 - RNA, 32 nt, Homo Sapiens
auccugcucacgagacacagguaggcagcaaa

SEQ ID NO: 115430 - RNA, 30 nt, Homo Sapiens
uucuguuacucagcugcagaggccgcacag

SEQ ID NO: 115431 - RNA, 32 nt, Homo Sapiens
ugacaucugaugcaugugcagcaguggggagu

SEQ ID NO: 115432 - RNA, 32 nt, Homo Sapiens
ggaaccugaggcggucuggggcggcggcgcuc

SEQ ID NO: 115433 - RNA, 32 nt, Homo Sapiens
ggauccagggacacuuuuuuuuaaagcucaua

SEQ ID NO: 115434 - RNA, 31 nt, Homo Sapiens
uggaagaugucuauggaugugacauuccugg

SEQ ID NO: 115435 - RNA, 32 nt, Homo Sapiens
ccgggcccugggcccuggcagcgccgcauccg

SEQ ID NO: 115436 - RNA, 32 nt, Homo Sapiens
ggguggcccgucucccaggcugggcgugggcc

SEQ ID NO: 115437 - RNA, 32 nt, Homo Sapiens
cauuccugcgcauggugcagugccgcucugug

SEQ ID NO: 115438 - RNA, 32 nt, Homo Sapiens
agguuuuauuuaauguuuaugucaucuuuaug

SEQ ID NO: 115439 - RNA, 32 nt, Homo Sapiens
ccucuaagcccugauccacaauaaaaauggac

SEQ ID NO: 115440 - RNA, 32 nt, Homo Sapiens
cuaaaaggccuuggggcuggagcccagagagg

SEQ ID NO: 115441 - RNA, 32 nt, Homo Sapiens
auaaguacauucaauuuuaugauuuacauuua

SEQ ID NO: 115442 - RNA, 32 nt, Homo Sapiens
uuccaggcugggcucgguuuugucuggugggu

SEQ ID NO: 115443 - RNA, 32 nt, Homo Sapiens
ucccgccgccugaccuggcccgcccgccuuuc

SEQ ID NO: 115444 - RNA, 32 nt, Homo Sapiens
uuuggccaguguuuccaggaggcucugggcuu

SEQ ID NO: 115445 - RNA, 32 nt, Homo Sapiens
gaaaauuaaugagaaauugggacuuucuaggu

SEQ ID NO: 115446 - RNA, 32 nt, Homo Sapiens
aagacuaaaagauauacagagaagacauaaug

SEQ ID NO: 115447 - RNA, 32 nt, Homo Sapiens
gacagcgcguccuucccuaaagacuauugcaa

SEQ ID NO: 115448 - RNA, 30 nt, Homo Sapiens
gcgccaugggccgccugcacugcacugagg

SEQ ID NO: 115449 - RNA, 32 nt, Homo Sapiens
guuugugugucugcaucuccaucuuaccccuu

SEQ ID NO: 115450 - RNA, 32 nt, Homo Sapiens
cgagggacuaggggaccgcgugaggcccgacg

SEQ ID NO: 115451 - RNA, 32 nt, Homo Sapiens
gagugugguuucuuuuugaaucuuuaauuaaa

SEQ ID NO: 115452 - RNA, 32 nt, Homo Sapiens
aauuuuuaaguuuuauuuuaaugaauuaaaau

SEQ ID NO: 115453 - RNA, 32 nt, Homo Sapiens
ggggaauauaguauuggaauuuuauagcuagu

SEQ ID NO: 115454 - RNA, 32 nt, Homo Sapiens
cccuggcugucagagugaaauguaaagucagg

SEQ ID NO: 115455 - RNA, 32 nt, Homo Sapiens
uguucccagccccuccucccucaggcccagga

SEQ ID NO: 115456 - RNA, 32 nt, Homo Sapiens
aaccuucuuagugccucaaacuagaucuaguu

SEQ ID NO: 115457 - RNA, 32 nt, Homo Sapiens
uauuaauacacacacacacacacacacauaca

SEQ ID NO: 115458 - RNA, 32 nt, Homo Sapiens
auacuuaaaaauuaccauaugaccauuuuaaa

SEQ ID NO: 115459 - RNA, 32 nt, Homo Sapiens
cugggccugugcugggugggagagaaaagaaa

SEQ ID NO: 115460 - RNA, 32 nt, Homo Sapiens
uugaccuugucuuuuugguaugccuugggguu

SEQ ID NO: 115461 - RNA, 32 nt, Homo Sapiens
gucugggaaggggccaugggagucccugcuga

SEQ ID NO: 115462 - RNA, 32 nt, Homo Sapiens
caaaccucuuguuaagacuuguccuguagcuu

SEQ ID NO: 115463 - RNA, 32 nt, Homo Sapiens
ucuuggcucgcggaagcgcaggcgccgacugc

SEQ ID NO: 115464 - RNA, 32 nt, Homo Sapiens
ggagccaggcagccuccaccucacaagaccug

SEQ ID NO: 115465 - RNA, 32 nt, Homo Sapiens
uguaugggauauugcaaaaauaaaaaggaaag

SEQ ID NO: 115466 - RNA, 32 nt, Homo Sapiens
caccauuuaaacaugguuuaucuucagcaaau

SEQ ID NO: 115467 - RNA, 32 nt, Homo Sapiens
gaacaauaugucaaccauuugcauggggucga

SEQ ID NO: 115468 - RNA, 32 nt, Homo Sapiens
ugugaauaacuguguuuccuaccgaaacccug

SEQ ID NO: 115469 - RNA, 32 nt, Homo Sapiens
ccugaaugccaucacccuccccagggcucugc

SEQ ID NO: 115470 - RNA, 32 nt, Homo Sapiens
uaaaucuaaaucuauuuauuaauauuuaacau

SEQ ID NO: 115471 - RNA, 32 nt, Homo Sapiens
gccugcugacccguggccccagcucacucauu

SEQ ID NO: 115472 - RNA, 32 nt, Homo Sapiens
uuuacaaucuguaucuuugacaauucugggug

SEQ ID NO: 115473 - RNA, 32 nt, Homo Sapiens
cauggggaagggauauauaagauggaagcuuc

SEQ ID NO: 115474 - RNA, 32 nt, Homo Sapiens
gaggaauuaaagacauagacacagaaauauag

SEQ ID NO: 115475 - RNA, 32 nt, Homo Sapiens
aggguguggacccaguaagggcugggaauuuc

SEQ ID NO: 115476 - RNA, 28 nt, Homo Sapiens
cuaugaguguuugggauguguuuuauuu

SEQ ID NO: 115477 - RNA, 32 nt, Homo Sapiens
aaauuuucucugccauacacuaacucaaaaau

SEQ ID NO: 115478 - RNA, 32 nt, Homo Sapiens
caccacugcacuccagccuggcgacaaaguga

SEQ ID NO: 115479 - RNA, 32 nt, Homo Sapiens
gccccgcggcacgcugccccugcacgcgcugc

SEQ ID NO: 115480 - RNA, 32 nt, Homo Sapiens
cccccgcaaccugggcauaugucccacgccgu

SEQ ID NO: 115481 - RNA, 32 nt, Homo Sapiens
uuuauauuacagacucaauuuuacaaaauuac

SEQ ID NO: 115482 - RNA, 32 nt, Homo Sapiens
ucacacaaauuucaaaaugugcguguuacacu

SEQ ID NO: 115483 - RNA, 32 nt, Homo Sapiens
acgaagaguauuuggauugcgugacccuauga

SEQ ID NO: 115484 - RNA, 32 nt, Homo Sapiens
uccgcacccucaccccaccaucacuuaaacua

SEQ ID NO: 115485 - RNA, 32 nt, Homo Sapiens
gauaaggcacgcugugcuguugggucucucag

SEQ ID NO: 115486 - RNA, 32 nt, Homo Sapiens
cgcccauagaaugcccaggggcgacaaacugu

SEQ ID NO: 115487 - RNA, 32 nt, Homo Sapiens
acuacagcugcagaccaguacacaucaagcaa

SEQ ID NO: 115488 - RNA, 32 nt, Homo Sapiens
cucucagccuccccgggugcccggcccccugu

SEQ ID NO: 115489 - RNA, 32 nt, Homo Sapiens
cuuucuuuuuugccuuaggagcuuagcucaaa

SEQ ID NO: 115490 - RNA, 32 nt, Homo Sapiens
ucauugguaaaacuuuuaaauucaacaccuga

SEQ ID NO: 115491 - RNA, 32 nt, Homo Sapiens
ugggggcgcgcccugccugguccggcacuucu

SEQ ID NO: 115492 - RNA, 32 nt, Homo Sapiens
gagcugccgcucgcugccccgggcaggggcac

SEQ ID NO: 115493 - RNA, 32 nt, Homo Sapiens
cuuccccccaaaccuagcacaaaacgggguuc

SEQ ID NO: 115494 - RNA, 32 nt, Homo Sapiens
caauugcaacaaaaacaaaaauagacaaguga

SEQ ID NO: 115495 - RNA, 32 nt, Homo Sapiens
cagggcuagggugauuuuuggccgugggcuuu

SEQ ID NO: 115496 - RNA, 32 nt, Homo Sapiens
ccggcgucgcggacgcaucccagucugggcgg

SEQ ID NO: 115497 - RNA, 32 nt, Homo Sapiens
auuugucgcacacucggggaccgcggguggcc

SEQ ID NO: 115498 - RNA, 32 nt, Homo Sapiens
cggcaaugcucccuccuucucaggguccacgg

SEQ ID NO: 115499 - RNA, 32 nt, Homo Sapiens
cagcgcgugcgcguagcgaccucuuugcgccu

SEQ ID NO: 115500 - RNA, 32 nt, Homo Sapiens
aaucaccuuucugcccaguggaugugagcuuc

SEQ ID NO: 115501 - RNA, 32 nt, Homo Sapiens
uaagagaaacaaauucuuauugugaaucuuaa

SEQ ID NO: 115502 - RNA, 32 nt, Homo Sapiens
uuguagggccuggccuugugggcagggggcag

SEQ ID NO: 115503 - RNA, 32 nt, Homo Sapiens
gagacguggcagccgcccugcccgccagaaag

SEQ ID NO: 115504 - RNA, 32 nt, Homo Sapiens
cuuugagaggcugaggugguaggaucaccuga

SEQ ID NO: 115505 - RNA, 31 nt, Homo Sapiens
uguccccugacccagacucaggcaagucuaa

SEQ ID NO: 115506 - RNA, 32 nt, Homo Sapiens
uuagcuuuaaguguucagauuaacacuuuuga

SEQ ID NO: 115507 - RNA, 32 nt, Homo Sapiens
agcaaagaacuaaggauuuuuccauggacaug

SEQ ID NO: 115508 - RNA, 32 nt, Homo Sapiens
ugugagugugcccagaguuaaagggaauauca

SEQ ID NO: 115509 - RNA, 32 nt, Homo Sapiens
cuguauaccccaccccaguacuccacagcacc

SEQ ID NO: 115510 - RNA, 32 nt, Homo Sapiens
uuguaaauuauauucuaauuuauugccauguu

SEQ ID NO: 115511 - RNA, 32 nt, Homo Sapiens
cuuccagccacugugauguuugaaauauguga

SEQ ID NO: 115512 - RNA, 32 nt, Homo Sapiens
gaguggggauggcagugccaggacuucuagcg

SEQ ID NO: 115513 - RNA, 32 nt, Homo Sapiens
ccgucugcgucucccccacgccgccucgccug

SEQ ID NO: 115514 - RNA, 32 nt, Homo Sapiens
ggaagagaugucagcucugcucucccuguaaa

SEQ ID NO: 115515 - RNA, 32 nt, Homo Sapiens
gggagcugaugccccuucuccccuuccuggac

SEQ ID NO: 115516 - RNA, 32 nt, Homo Sapiens
agauuucuuuugccucucucacugauccauuu

SEQ ID NO: 115517 - RNA, 32 nt, Homo Sapiens
cucugcuuugucuguccagaucuuuaggauuu

SEQ ID NO: 115518 - RNA, 32 nt, Homo Sapiens
gaaagaagcccucguggauggaggaagaagau

SEQ ID NO: 115519 - RNA, 32 nt, Homo Sapiens
cagaaagauuacaagaaaagagcauuaauucc

SEQ ID NO: 115520 - RNA, 32 nt, Homo Sapiens
ccagggagggaggcagcuggcuggggagucag

SEQ ID NO: 115521 - RNA, 32 nt, Homo Sapiens
aucaaaugaaguucuccugacucucugguuua

SEQ ID NO: 115522 - RNA, 32 nt, Homo Sapiens
ggaaaaucaguucuuuuaaaauuucuucaaga

SEQ ID NO: 115523 - RNA, 32 nt, Homo Sapiens
ccucuuggcaaugaaauuugcagcuccucccu

SEQ ID NO: 115524 - RNA, 32 nt, Homo Sapiens
ugcgguugcuccauguucugacuuagggcaau

SEQ ID NO: 115525 - RNA, 32 nt, Homo Sapiens
guagaauauaauguauacuaagggauuucaag

SEQ ID NO: 115526 - RNA, 32 nt, Homo Sapiens
cucuuuaaggcagcugguucucuucuggccca

SEQ ID NO: 115527 - RNA, 32 nt, Homo Sapiens
uuugcuucaggacuccaccuccucuacucuaa

SEQ ID NO: 115528 - RNA, 32 nt, Homo Sapiens
gcucacggguggcggggccgcggggccggaau

SEQ ID NO: 115529 - RNA, 32 nt, Homo Sapiens
gugaaguagggccaguagggcaauccugaaga

SEQ ID NO: 115530 - RNA, 32 nt, Homo Sapiens
gcagcuuaacaaguagggcagggcuuuucucu

SEQ ID NO: 115531 - RNA, 31 nt, Homo Sapiens
gacagcagccgccuccugccccccgugcgcc

SEQ ID NO: 115532 - RNA, 32 nt, Homo Sapiens
uaagcauagcaaacagaggaagaauuuguuau

SEQ ID NO: 115533 - RNA, 32 nt, Homo Sapiens
gacucuguuuucugccuggcguuucacuugug

SEQ ID NO: 115534 - RNA, 32 nt, Homo Sapiens
agcacucgccucccuaccaaugacucaccuga

SEQ ID NO: 115535 - RNA, 32 nt, Homo Sapiens
aaacagacacaagcuuuccuagagaauaugau

SEQ ID NO: 115536 - RNA, 32 nt, Homo Sapiens
uuuuugaaacugagucucacucugucacccag

SEQ ID NO: 115537 - RNA, 32 nt, Homo Sapiens
ggagaccaggacaaggaacagaaagacccuua

SEQ ID NO: 115538 - RNA, 32 nt, Homo Sapiens
ccuuuggagccaguggagccugccggcgcauc

SEQ ID NO: 115539 - RNA, 32 nt, Homo Sapiens
ggaaccaucacuguugcuggaggcaccugaca

SEQ ID NO: 115540 - RNA, 32 nt, Homo Sapiens
gggucagauggaagcucuguggccuuuccuaa

SEQ ID NO: 115541 - RNA, 32 nt, Homo Sapiens
auacuuguauuuaugcuuuugauaaaauguau

SEQ ID NO: 115542 - RNA, 32 nt, Homo Sapiens
gggugugagccgccgcgccgagcauggccauc

SEQ ID NO: 115543 - RNA, 32 nt, Homo Sapiens
uugguacugguugaauccuucaguuaacugcu

SEQ ID NO: 115544 - RNA, 32 nt, Homo Sapiens
ucauauuacagaguugcuuuugcaccuaaauu

SEQ ID NO: 115545 - RNA, 32 nt, Homo Sapiens
cacgcaccgcggcuagcgccgacacccagcua

SEQ ID NO: 115546 - RNA, 32 nt, Homo Sapiens
cgugaaugcgcugaucguuucuuccaguuaga

SEQ ID NO: 115547 - RNA, 32 nt, Homo Sapiens
gucuugugaugaugagaacauaagugugauuc

SEQ ID NO: 115548 - RNA, 30 nt, Homo Sapiens
augaugggagguguucaagcacagcaaucc

SEQ ID NO: 115549 - RNA, 32 nt, Homo Sapiens
cuagagcuaggagaaaaaugcagacgcgagga

SEQ ID NO: 115550 - RNA, 32 nt, Homo Sapiens
cuguaaauccucgccaagucuuucuccaggcc

SEQ ID NO: 115551 - RNA, 32 nt, Homo Sapiens
ucauguacaaauauugggaugcaugagauccc

SEQ ID NO: 115552 - RNA, 32 nt, Homo Sapiens
ugguuuugguuuggcuucuuuuagucaggcuu

SEQ ID NO: 115553 - RNA, 32 nt, Homo Sapiens
auucuaguagccaucuucacuguuagucuuaa

SEQ ID NO: 115554 - RNA, 32 nt, Homo Sapiens
cuuuccguguggagcccacccuucuugcuccu

SEQ ID NO: 115555 - RNA, 32 nt, Homo Sapiens
aaauuaagcccauuucacccggaaaagaugac

SEQ ID NO: 115556 - RNA, 32 nt, Homo Sapiens
ucuaagaaauuuuuccaacaagcaaaaaccuu

SEQ ID NO: 115557 - RNA, 32 nt, Homo Sapiens
gaauauaggggaggggaaagccacacuuuaaa

SEQ ID NO: 115558 - RNA, 32 nt, Homo Sapiens
gagcccuuaagccccagcugucgguuuuuacc

SEQ ID NO: 115559 - RNA, 32 nt, Homo Sapiens
ccugcagugugcucucugaugcugggauggag

SEQ ID NO: 115560 - RNA, 32 nt, Homo Sapiens
auggcuguaaaaaugacuuaaauguuuauauc

SEQ ID NO: 115561 - RNA, 32 nt, Homo Sapiens
ccuuccacauauacaaguucauuuuaaauuuu

SEQ ID NO: 115562 - RNA, 32 nt, Homo Sapiens
aaauuauccagcaaacaaaaaaaaaaaaaaaa

SEQ ID NO: 115563 - RNA, 32 nt, Homo Sapiens
caugugggcuggggggcggggcggggagcggc

SEQ ID NO: 115564 - RNA, 32 nt, Homo Sapiens
auauaacuuaggauacuucugacugguuuuga

SEQ ID NO: 115565 - RNA, 32 nt, Homo Sapiens
uuagacauuauguauaauaaaaccauaaaggg

SEQ ID NO: 115566 - RNA, 32 nt, Homo Sapiens
uuuucuuuaaagcuagucauuucaaaagcaua

SEQ ID NO: 115567 - RNA, 32 nt, Homo Sapiens
aguguucugaagaacggcacggacucuuaggc

SEQ ID NO: 115568 - RNA, 32 nt, Homo Sapiens
uguucauucuguacagugaauuuuccgaaccu

SEQ ID NO: 115569 - RNA, 32 nt, Homo Sapiens
ucccggcagcagcggcagcugagacucacggu

SEQ ID NO: 115570 - RNA, 32 nt, Homo Sapiens
agccgccccccugccccucgggccccccucuc

SEQ ID NO: 115571 - RNA, 32 nt, Homo Sapiens
ucauuuugcagauuuagaagcugaaacauggg

SEQ ID NO: 115572 - RNA, 32 nt, Homo Sapiens
gagcgcaggccaggguuguuugguuuugaggu

SEQ ID NO: 115573 - RNA, 32 nt, Homo Sapiens
cagugaauacuaguggaauuguuugggcugcu

SEQ ID NO: 115574 - RNA, 32 nt, Homo Sapiens
uuuuccuacuauacauuuaggcaaauuauuuu

SEQ ID NO: 115575 - RNA, 32 nt, Homo Sapiens
aggcagacacaagcugcgggcugugcgguccu

SEQ ID NO: 115576 - RNA, 32 nt, Homo Sapiens
acccaauacuuauguuguauuguuggugcgaa

SEQ ID NO: 115577 - RNA, 32 nt, Homo Sapiens
auaaaggaguuguguccccagcccuuccacuc

SEQ ID NO: 115578 - RNA, 30 nt, Homo Sapiens
ggcagucuggcugcugcagaagaguuuuua

SEQ ID NO: 115579 - RNA, 32 nt, Homo Sapiens
uuucaggcauuugcugaauaggugaugauaca

SEQ ID NO: 115580 - RNA, 32 nt, Homo Sapiens
auauaauuaauggguuuggaaaaucaucaccc

SEQ ID NO: 115581 - RNA, 32 nt, Homo Sapiens
ucuaguaaaaauagauuacuugugaaauuauu

SEQ ID NO: 115582 - RNA, 32 nt, Homo Sapiens
aaaaaggcaggggacauaauccauacuggccu

SEQ ID NO: 115583 - RNA, 32 nt, Homo Sapiens
gcuuagugaugugugucagaccucugagccca

SEQ ID NO: 115584 - RNA, 32 nt, Homo Sapiens
auuccauacccucauuuaauucuuaauaaaac

SEQ ID NO: 115585 - RNA, 32 nt, Homo Sapiens
agaagaagaaaagaagacgcuggauaaguuug

SEQ ID NO: 115586 - RNA, 32 nt, Homo Sapiens
ccuaguuuguuccaugagugugcauuucauuu

SEQ ID NO: 115587 - RNA, 32 nt, Homo Sapiens
uggagguggggacucuggaaaagcagccccca

SEQ ID NO: 115588 - RNA, 32 nt, Homo Sapiens
ugugcuuucuuacccuguucuguuccaguuuu

SEQ ID NO: 115589 - RNA, 32 nt, Homo Sapiens
ugccucacacuggccuguugaggcccagcuua

SEQ ID NO: 115590 - RNA, 32 nt, Homo Sapiens
cucacgugucccucccggccccggggccaccu

SEQ ID NO: 115591 - RNA, 32 nt, Homo Sapiens
ucucagccccgugcugccccccgcccccagug

SEQ ID NO: 115592 - RNA, 32 nt, Homo Sapiens
cugcugccuucccgucgccgcucccgaagcuu

SEQ ID NO: 115593 - RNA, 32 nt, Homo Sapiens
gggguuggaaggggcgggaagggcgcugucuu

SEQ ID NO: 115594 - RNA, 32 nt, Homo Sapiens
ggccacguggauguucaugagaugcauucucu

SEQ ID NO: 115595 - RNA, 32 nt, Homo Sapiens
accuuaauuacaucugcaaaaucucuuuuacc

SEQ ID NO: 115596 - RNA, 32 nt, Homo Sapiens
uuuuuuuuuuuuucuuuuuuugagacauaguc

SEQ ID NO: 115597 - RNA, 32 nt, Homo Sapiens
accagcuccagaagcacguccucugacuucac

SEQ ID NO: 115598 - RNA, 30 nt, Homo Sapiens
cuccccgcagucccugccuagccccucugc

SEQ ID NO: 115599 - RNA, 32 nt, Homo Sapiens
ucgaauaaacaccagcaguggccagacaacac

SEQ ID NO: 115600 - RNA, 32 nt, Homo Sapiens
aggucauuuuuggagggagaacuggacgccug

SEQ ID NO: 115601 - RNA, 32 nt, Homo Sapiens
ggcuacccgucuuaggcagcaacagcagagcu

SEQ ID NO: 115602 - RNA, 32 nt, Homo Sapiens
uuguuuauuuagugaucaguuacuucauguuu

SEQ ID NO: 115603 - RNA, 32 nt, Homo Sapiens
ccagacucacacaucuuccuccaggucaggga

SEQ ID NO: 115604 - RNA, 32 nt, Homo Sapiens
ucccuccagcagcuccuucucauggccccugg

SEQ ID NO: 115605 - RNA, 32 nt, Homo Sapiens
cguaaaggugcagcugccgccaccgccgcuuc

SEQ ID NO: 115606 - RNA, 32 nt, Homo Sapiens
aaaaaaucuaacacuggcuaccccgcucggga

SEQ ID NO: 115607 - RNA, 29 nt, Homo Sapiens
ugagauguuccuccugccccagcacccug

SEQ ID NO: 115608 - RNA, 32 nt, Homo Sapiens
uuaguugaaugccuucuuucugaacauuuguu

SEQ ID NO: 115609 - RNA, 32 nt, Homo Sapiens
ugcugccggccgccaccaugaccgagggcgca

SEQ ID NO: 115610 - RNA, 32 nt, Homo Sapiens
uagauggcacuagucccccgauaauuuauguc

SEQ ID NO: 115611 - RNA, 32 nt, Homo Sapiens
ugcaagucuucaggauggcacaaaacaaaggu

SEQ ID NO: 115612 - RNA, 31 nt, Homo Sapiens
cgccugccggccugccugccacagccggacu

SEQ ID NO: 115613 - RNA, 32 nt, Homo Sapiens
ggucucaaacuccugagcucaagcgauccucc

SEQ ID NO: 115614 - RNA, 32 nt, Homo Sapiens
uagagaauaagauuauuuugaaugacuucagg

SEQ ID NO: 115615 - RNA, 32 nt, Homo Sapiens
cuauuauuucauuuaaagaauaugcugugcua

SEQ ID NO: 115616 - RNA, 32 nt, Homo Sapiens
agagaccugcgcaggagccgggaccccugcug

SEQ ID NO: 115617 - RNA, 32 nt, Homo Sapiens
ggggugauugccagaagcugcuggcuacagug

SEQ ID NO: 115618 - RNA, 32 nt, Homo Sapiens
gagugcgguacuggcggcgggcggcgggcagc

SEQ ID NO: 115619 - RNA, 32 nt, Homo Sapiens
cauuccacuaagaucaucuauuccaaggucau

SEQ ID NO: 115620 - RNA, 32 nt, Homo Sapiens
uucagggccgcggccucgugcugcugccgcau

SEQ ID NO: 115621 - RNA, 32 nt, Homo Sapiens
uugauauaguguccuuuuuuuaaaauucagaa

SEQ ID NO: 115622 - RNA, 32 nt, Homo Sapiens
cauuuauucugaauuguccccagcgugcguuu

SEQ ID NO: 115623 - RNA, 32 nt, Homo Sapiens
gcucaggaauggcccacaaaucuguaauuuga

SEQ ID NO: 115624 - RNA, 32 nt, Homo Sapiens
aacaggaccugugagcagcugcauuggccugg

SEQ ID NO: 115625 - RNA, 32 nt, Homo Sapiens
guuuacuucuaaaaugggaacuugaggcaauu

SEQ ID NO: 115626 - RNA, 32 nt, Homo Sapiens
aaguuccuucaugccuaagauuuuuuccaguu

SEQ ID NO: 115627 - RNA, 32 nt, Homo Sapiens
agagaaugucauuucucauaguguuucuguuu

SEQ ID NO: 115628 - RNA, 32 nt, Homo Sapiens
cccuggagggugggcggcucauggugccacag

SEQ ID NO: 115629 - RNA, 32 nt, Homo Sapiens
gaggccgccugccggggacucagacacucagg

SEQ ID NO: 115630 - RNA, 32 nt, Homo Sapiens
cucagccaccgccgccgccgccgccuccuccu

SEQ ID NO: 115631 - RNA, 32 nt, Homo Sapiens
ggcccagggccucuggcuucccugcccaaucc

SEQ ID NO: 115632 - RNA, 32 nt, Homo Sapiens
ccgccgccucgccgcuuccccucgucggagcg

SEQ ID NO: 115633 - RNA, 28 nt, Homo Sapiens
cugcguuuuggcucaaggaugacugccu

SEQ ID NO: 115634 - RNA, 32 nt, Homo Sapiens
auuuuugcaauaaugcaguaugguacauuuuu

SEQ ID NO: 115635 - RNA, 32 nt, Homo Sapiens
gaaaccccgucucuacuaaaaauagaaaaauu

SEQ ID NO: 115636 - RNA, 32 nt, Homo Sapiens
ccuuaccagcugacaaggugguuucuuucuuu

SEQ ID NO: 115637 - RNA, 32 nt, Homo Sapiens
ugccuguaaucccugcacuuugggaggcuaag

SEQ ID NO: 115638 - RNA, 32 nt, Homo Sapiens
cuacugccggcgccugcgguuccuccuggccc

SEQ ID NO: 115639 - RNA, 32 nt, Homo Sapiens
augguuucaaaauaacugcaccugaauuuguu

SEQ ID NO: 115640 - RNA, 32 nt, Homo Sapiens
cauuuuccucucccacuuagcacaugugugcu

SEQ ID NO: 115641 - RNA, 32 nt, Homo Sapiens
agagcuggaucucucagcucccgcccccagag

SEQ ID NO: 115642 - RNA, 32 nt, Homo Sapiens
aauaaaagaacaaggaaacaaaaguaacaaag

SEQ ID NO: 115643 - RNA, 32 nt, Homo Sapiens
ggugcacaggucgggggagcacaggccacaga

SEQ ID NO: 115644 - RNA, 32 nt, Homo Sapiens
acaugccacaugccagcaaagagaagggaaga

SEQ ID NO: 115645 - RNA, 32 nt, Homo Sapiens
ccagcccuggggauucauccugcccaggagau

SEQ ID NO: 115646 - RNA, 32 nt, Homo Sapiens
aacaagagcugcuaggugcucaugugggcagg

SEQ ID NO: 115647 - RNA, 32 nt, Homo Sapiens
gcaacaaagagcaaacaaauaaaccacaagcg

SEQ ID NO: 115648 - RNA, 32 nt, Homo Sapiens
ucggccagguugugucccaaaauccccucagc

SEQ ID NO: 115649 - RNA, 32 nt, Homo Sapiens
ggaggcaggugggcugcugcagugccccgagg

SEQ ID NO: 115650 - RNA, 32 nt, Homo Sapiens
uccugggcucaagugaucccccugccuuggcc

SEQ ID NO: 115651 - RNA, 32 nt, Homo Sapiens
cucauuuucucuugcagccgccaugauucuga

SEQ ID NO: 115652 - RNA, 30 nt, Homo Sapiens
uuagcacaugaaggauagauaugcacugaa

SEQ ID NO: 115653 - RNA, 32 nt, Homo Sapiens
aaauccauauuaccauuuggagaaauagaaaa

SEQ ID NO: 115654 - RNA, 28 nt, Homo Sapiens
uggugaaaaaauaaauuucugucgucuu

SEQ ID NO: 115655 - RNA, 32 nt, Homo Sapiens
ggccgcugccccagccccguuccuuccgauga

SEQ ID NO: 115656 - RNA, 32 nt, Homo Sapiens
agacagugccagucggaggguggcauuaacac

SEQ ID NO: 115657 - RNA, 32 nt, Homo Sapiens
aagcggcgccucggcccucccgaccuuuccga

SEQ ID NO: 115658 - RNA, 32 nt, Homo Sapiens
uuaugcuguucccucuugggcuucaugcaaag

SEQ ID NO: 115659 - RNA, 32 nt, Homo Sapiens
ggacaugggcauuuggggcgccugaacccaag

SEQ ID NO: 115660 - RNA, 32 nt, Homo Sapiens
aaagugccugaguaagaagagauuuaauuauu

SEQ ID NO: 115661 - RNA, 32 nt, Homo Sapiens
agaguagaggcggcggcggcggcggccggacc

SEQ ID NO: 115662 - RNA, 32 nt, Homo Sapiens
ugauuauaauuucuguuugcuugugcuguuug

SEQ ID NO: 115663 - RNA, 32 nt, Homo Sapiens
ugguagaaagucagccccuggccuguccuucu

SEQ ID NO: 115664 - RNA, 32 nt, Homo Sapiens
cgggcccggcggcgggacccaggcgguugagg

SEQ ID NO: 115665 - RNA, 32 nt, Homo Sapiens
uuaaaggaauggggaagaaggacuugggcccc

SEQ ID NO: 115666 - RNA, 32 nt, Homo Sapiens
uuugccucugauaagcacuuuuuaaauggcuc

SEQ ID NO: 115667 - RNA, 32 nt, Homo Sapiens
gggugugugugugagcgcgcuuggagguuucg

SEQ ID NO: 115668 - RNA, 32 nt, Homo Sapiens
aagagauguuucccuuuccuuucuuucaccuu

SEQ ID NO: 115669 - RNA, 32 nt, Homo Sapiens
agacuggagcgcucagccugccacggaagacu

SEQ ID NO: 115670 - RNA, 32 nt, Homo Sapiens
auuucagucuuccauuaguucauuucagucca

SEQ ID NO: 115671 - RNA, 32 nt, Homo Sapiens
auucagcucgucccaaaccccacgugguguag

SEQ ID NO: 115672 - RNA, 32 nt, Homo Sapiens
uuuaacagcaaccaacauauuguuugcauagu

SEQ ID NO: 115673 - RNA, 32 nt, Homo Sapiens
uacagagcucggcuucuuugccuugggagggg

SEQ ID NO: 115674 - RNA, 32 nt, Homo Sapiens
guaauacuaauuauuucuuaugcugguauguu

SEQ ID NO: 115675 - RNA, 32 nt, Homo Sapiens
ggcgccggacagagccgcggacuccagcgccc

SEQ ID NO: 115676 - RNA, 32 nt, Homo Sapiens
ccugguuugcuccaugagggaggggcagcaac

SEQ ID NO: 115677 - RNA, 32 nt, Homo Sapiens
ugggggcacagcccugcccaccccuggauuuc

SEQ ID NO: 115678 - RNA, 32 nt, Homo Sapiens
gagcaaucucaaccucuauuucuagaucacau

SEQ ID NO: 115679 - RNA, 32 nt, Homo Sapiens
uguaucugcccccuuuucacaccgugugugac

SEQ ID NO: 115680 - RNA, 32 nt, Homo Sapiens
gaaugcuggaagaacagcucagggccuuggcu

SEQ ID NO: 115681 - RNA, 32 nt, Homo Sapiens
aguggacaggacuuaaauucagcaaugauggc

SEQ ID NO: 115682 - RNA, 32 nt, Homo Sapiens
ggccgggugugguggcucacgccuguaauucu

SEQ ID NO: 115683 - RNA, 32 nt, Homo Sapiens
agaaguguauauaaucugaaucaauaagcucu

SEQ ID NO: 115684 - RNA, 32 nt, Homo Sapiens
cccacaucauccauugucuugcugccaagugc

SEQ ID NO: 115685 - RNA, 32 nt, Homo Sapiens
gacucuucuggugcugggggcagggugcaugg

SEQ ID NO: 115686 - RNA, 32 nt, Homo Sapiens
ccauagcccagcuggagccgugaacacugggg

SEQ ID NO: 115687 - RNA, 32 nt, Homo Sapiens
uauccauuccucccuucuuucuuaaaguaaua

SEQ ID NO: 115688 - RNA, 32 nt, Homo Sapiens
agacggcuuccugcauguuucccacaagcgcu

SEQ ID NO: 115689 - RNA, 32 nt, Homo Sapiens
ugcuucuucucgcaugcuuugcugcuuagaaa

SEQ ID NO: 115690 - RNA, 32 nt, Homo Sapiens
ggccaguuggcgagggguggcuccugaggguu

SEQ ID NO: 115691 - RNA, 32 nt, Homo Sapiens
gagcacaccucguuccccguggcacucaugcc

SEQ ID NO: 115692 - RNA, 32 nt, Homo Sapiens
caucauuggggucaacgcggccuuccaggcag

SEQ ID NO: 115693 - RNA, 31 nt, Homo Sapiens
aaauugaaauaaacuauaucauauuacuagg

SEQ ID NO: 115694 - RNA, 32 nt, Homo Sapiens
gggagaggaaacaaaugugaaguuguggacuc

SEQ ID NO: 115695 - RNA, 32 nt, Homo Sapiens
uacaggggaaugagcaaaucucaaagagcugg

SEQ ID NO: 115696 - RNA, 32 nt, Homo Sapiens
auaaugucaauacuguaguuuuuaaagauuuu

SEQ ID NO: 115697 - RNA, 32 nt, Homo Sapiens
guuuugcaacuucuuguuuaugagccuggaag

SEQ ID NO: 115698 - RNA, 32 nt, Homo Sapiens
uucuuugugcgcgccuguuaguuuguuaaacc

SEQ ID NO: 115699 - RNA, 32 nt, Homo Sapiens
gugcugucaucccuucuccuccccucucccca

SEQ ID NO: 115700 - RNA, 32 nt, Homo Sapiens
acaaauacauauauuauaaauauaaccuuugu

SEQ ID NO: 115701 - RNA, 32 nt, Homo Sapiens
ccaauccugucuuuuuaaaaucucaaguuugc

SEQ ID NO: 115702 - RNA, 32 nt, Homo Sapiens
cuccaagacaauaauuacauuggcacaaugua

SEQ ID NO: 115703 - RNA, 32 nt, Homo Sapiens
uaugcuucagaauuaaaacaaugaagauuaaa

SEQ ID NO: 115704 - RNA, 32 nt, Homo Sapiens
ugccuggucucggucugagcgucgcccagcga

SEQ ID NO: 115705 - RNA, 32 nt, Homo Sapiens
acaccuauaugaucugggauuuuguucauauu

SEQ ID NO: 115706 - RNA, 32 nt, Homo Sapiens
ccaugagcaucucuaccagaaaacauugccuc

SEQ ID NO: 115707 - RNA, 32 nt, Homo Sapiens
ccgccagacaccucgagcuccuuaaguagcuc

SEQ ID NO: 115708 - RNA, 32 nt, Homo Sapiens
uagcuccgccgcggccguccuccgcggcucga

SEQ ID NO: 115709 - RNA, 32 nt, Homo Sapiens
gggcuugggcccuggaggagaaagccauucug

SEQ ID NO: 115710 - RNA, 32 nt, Homo Sapiens
cuuacagaauccaagaggaagcuuucauaaaa

SEQ ID NO: 115711 - RNA, 32 nt, Homo Sapiens
aggaccuccgcggaagugacuucgcugccgga

SEQ ID NO: 115712 - RNA, 32 nt, Homo Sapiens
accagggguuuuagcucuguucucugcuccca

SEQ ID NO: 115713 - RNA, 32 nt, Homo Sapiens
ugaauuuccaugccaaccaacauaauuaaaug

SEQ ID NO: 115714 - RNA, 32 nt, Homo Sapiens
accaguccagcauucuuagaacagauggguuu

SEQ ID NO: 115715 - RNA, 32 nt, Homo Sapiens
gccaagcagcggcggccucggaggaagagggg

SEQ ID NO: 115716 - RNA, 32 nt, Homo Sapiens
ccccaggccagcugccuuugcucugcuguggc

SEQ ID NO: 115717 - RNA, 29 nt, Homo Sapiens
ucaggcauauguaugcaauggaaagccac

SEQ ID NO: 115718 - RNA, 32 nt, Homo Sapiens
ucaaaugcuucucagagagccuugcuuugguu

SEQ ID NO: 115719 - RNA, 31 nt, Homo Sapiens
gaacauuuguggagaaaggucuccauggagc

SEQ ID NO: 115720 - RNA, 32 nt, Homo Sapiens
caggaggaucauuugagccugggaauuugagc

SEQ ID NO: 115721 - RNA, 32 nt, Homo Sapiens
uccccagggugggggaagggccaggcagagca

SEQ ID NO: 115722 - RNA, 32 nt, Homo Sapiens
uguguuguagauguuucacuuggaagaaauug

SEQ ID NO: 115723 - RNA, 32 nt, Homo Sapiens
cuaauaacaacaagaauaucaggaaggaacuu

SEQ ID NO: 115724 - RNA, 32 nt, Homo Sapiens
ugguaccaggucuccuccaccgccauggcuuc

SEQ ID NO: 115725 - RNA, 32 nt, Homo Sapiens
gcuuuggaagccugucauuaugagauacaguc

SEQ ID NO: 115726 - RNA, 32 nt, Homo Sapiens
ccauccccuguuauuugggcccuaacagaagc

SEQ ID NO: 115727 - RNA, 32 nt, Homo Sapiens
cuggggggcaggaugccuggggacaguucagg

SEQ ID NO: 115728 - RNA, 32 nt, Homo Sapiens
gcagggggugguucuucccauaaaaacacaga

SEQ ID NO: 115729 - RNA, 32 nt, Homo Sapiens
ucaccccauuuucuuuuuaaccucgcccccuu

SEQ ID NO: 115730 - RNA, 32 nt, Homo Sapiens
ccugaaacaagcucauuucaguuucuggcaac

SEQ ID NO: 115731 - RNA, 32 nt, Homo Sapiens
ccgcggagcugacuucagcagcccacagcugu

SEQ ID NO: 115732 - RNA, 32 nt, Homo Sapiens
uccuguccugaacauuuccaguguggccucuc

SEQ ID NO: 115733 - RNA, 32 nt, Homo Sapiens
ugaaaggacuuaugaauaauuaaauggaaggc

SEQ ID NO: 115734 - RNA, 32 nt, Homo Sapiens
acauuuuuaauacccagaaaaauaccauauuc

SEQ ID NO: 115735 - RNA, 28 nt, Homo Sapiens
augaugguuuggaacauuaucuacaauu

SEQ ID NO: 115736 - RNA, 32 nt, Homo Sapiens
caguggcuucuugucgccugcugcugggcgug

SEQ ID NO: 115737 - RNA, 32 nt, Homo Sapiens
aacuacuaaaaauuauuuuuguaaugauugag

SEQ ID NO: 115738 - RNA, 32 nt, Homo Sapiens
ugauaacccagcuacagggaaaucccggccca

SEQ ID NO: 115739 - RNA, 32 nt, Homo Sapiens
caagcacugugucuccuuucaaccauuauuau

SEQ ID NO: 115740 - RNA, 32 nt, Homo Sapiens
aggauccgugcaguggcugcgccgccaggccc

SEQ ID NO: 115741 - RNA, 32 nt, Homo Sapiens
uccagccccucgcucucccggugaccugcugg

SEQ ID NO: 115742 - RNA, 32 nt, Homo Sapiens
uuuuaagaaaauaacuaugaacaucugaauau

SEQ ID NO: 115743 - RNA, 32 nt, Homo Sapiens
ugugaaggucccauuuucaauggaauuuccaa

SEQ ID NO: 115744 - RNA, 32 nt, Homo Sapiens
acuccauuccuccgccccguggucuggugcgu

SEQ ID NO: 115745 - RNA, 32 nt, Homo Sapiens
agaagggcgagggcgagcggcggggacugggg

SEQ ID NO: 115746 - RNA, 32 nt, Homo Sapiens
ccuagcucuuugggccucuccugcccucugcu

SEQ ID NO: 115747 - RNA, 32 nt, Homo Sapiens
agaaaggguucaucuuuuugacuuccaacuga

SEQ ID NO: 115748 - RNA, 32 nt, Homo Sapiens
cuggaaagugaucccggcauccgagagccaag

SEQ ID NO: 115749 - RNA, 32 nt, Homo Sapiens
uuccagauggaggugaugaugaugacauuaua

SEQ ID NO: 115750 - RNA, 32 nt, Homo Sapiens
aggucaggaugggaucucuguaucauguuuuu

SEQ ID NO: 115751 - RNA, 32 nt, Homo Sapiens
cacuugaaacucaaaacugacacuaggaacag

SEQ ID NO: 115752 - RNA, 32 nt, Homo Sapiens
gagggucacuccugggggaugacggcguggac

SEQ ID NO: 115753 - RNA, 32 nt, Homo Sapiens
uacuguguugacucacucaguguugggaucac

SEQ ID NO: 115754 - RNA, 32 nt, Homo Sapiens
acuucaaaugggaaaaaucuuuuuguagacuc

SEQ ID NO: 115755 - RNA, 32 nt, Homo Sapiens
gucauucauccugauguccucaauugcugcug

SEQ ID NO: 115756 - RNA, 32 nt, Homo Sapiens
caugcacacacaccccacucucugcacagaga

SEQ ID NO: 115757 - RNA, 32 nt, Homo Sapiens
aaguuacuggggauuacucgaccucauuacuu

SEQ ID NO: 115758 - RNA, 32 nt, Homo Sapiens
ccccgucagucugucuuuacucuucuuuuccu

SEQ ID NO: 115759 - RNA, 32 nt, Homo Sapiens
aagugaauuuaaaaauaaguaacugcuagaua

SEQ ID NO: 115760 - RNA, 32 nt, Homo Sapiens
cccaagaggaguuaagauugggauaaguaauc

SEQ ID NO: 115761 - RNA, 32 nt, Homo Sapiens
caugcgacgucugucccccagcccaaacagcc

SEQ ID NO: 115762 - RNA, 32 nt, Homo Sapiens
gccgggcugcgcaggcgguaggugacgagccu

SEQ ID NO: 115763 - RNA, 32 nt, Homo Sapiens
uccucagugucuguggccacaauccuguacug

SEQ ID NO: 115764 - RNA, 32 nt, Homo Sapiens
gaguggggggcgggcgccugggggcgacggga

SEQ ID NO: 115765 - RNA, 32 nt, Homo Sapiens
aauucagagaaaaccaggcacaaucuucugag

SEQ ID NO: 115766 - RNA, 32 nt, Homo Sapiens
uaaucuuaacaaccucuuuccugaauauuuaa

SEQ ID NO: 115767 - RNA, 32 nt, Homo Sapiens
gauaaaaggcuuuuuuagggcuuuauuuguuu

SEQ ID NO: 115768 - RNA, 32 nt, Homo Sapiens
gcuagaauaaaaccucucucugugacaggaac

SEQ ID NO: 115769 - RNA, 32 nt, Homo Sapiens
gccuccuggaagaacaaaucuaccaggugauc

SEQ ID NO: 115770 - RNA, 32 nt, Homo Sapiens
aaccgccgcuccuggggaggagccgcggcucg

SEQ ID NO: 115771 - RNA, 32 nt, Homo Sapiens
aucacaaacugaaugacuugacuucaaaagca

SEQ ID NO: 115772 - RNA, 32 nt, Homo Sapiens
cccaccccuccagcccaacaucuugugagcac

SEQ ID NO: 115773 - RNA, 31 nt, Homo Sapiens
uucucuaccuucaagaaccaggcagcccugc

SEQ ID NO: 115774 - RNA, 32 nt, Homo Sapiens
ugggcauggccaugagugagacaggcuguacu

SEQ ID NO: 115775 - RNA, 32 nt, Homo Sapiens
ucaggcucugguuucgagcgggcccgcuaguc

SEQ ID NO: 115776 - RNA, 32 nt, Homo Sapiens
agaacauacuuauauguaaaguauuauuuauu

SEQ ID NO: 115777 - RNA, 32 nt, Homo Sapiens
agagagcucgcacccucccacggcagcagggu

SEQ ID NO: 115778 - RNA, 32 nt, Homo Sapiens
uucccaucucuauacuucuccuuuggacaugg

SEQ ID NO: 115779 - RNA, 32 nt, Homo Sapiens
cagcaugcagccagcugcucugcagccccaaa

SEQ ID NO: 115780 - RNA, 32 nt, Homo Sapiens
ucggugcgcgucgucccgcuccauggcgcucu

SEQ ID NO: 115781 - RNA, 32 nt, Homo Sapiens
acuacacaaaaauagaacaauuagucugaauu

SEQ ID NO: 115782 - RNA, 32 nt, Homo Sapiens
guuuccccaacgcuauugcguagacguaguag

SEQ ID NO: 115783 - RNA, 32 nt, Homo Sapiens
ucguuacugucugccuucaguggucugagguc

SEQ ID NO: 115784 - RNA, 32 nt, Homo Sapiens
gcggccugccccucagccuccuccgcgcgguu

SEQ ID NO: 115785 - RNA, 32 nt, Homo Sapiens
ggggccaguggcaggagcgccacgcaccgcca

SEQ ID NO: 115786 - RNA, 32 nt, Homo Sapiens
ccuaaaugugauacagaagaacaucucauccc

SEQ ID NO: 115787 - RNA, 32 nt, Homo Sapiens
aaccacuccuuccuuccuuaaucuuuuccuuc

SEQ ID NO: 115788 - RNA, 32 nt, Homo Sapiens
guaguuuuggucucucguuuaauuguaugcaa

SEQ ID NO: 115789 - RNA, 32 nt, Homo Sapiens
cuggcagguccuccccucucuugucagaugcc

SEQ ID NO: 115790 - RNA, 32 nt, Homo Sapiens
cugcgaugcaugauucuauuaauuuuguuaug

SEQ ID NO: 115791 - RNA, 32 nt, Homo Sapiens
cucagacuguuuguuuucuuucugggaagaaa

SEQ ID NO: 115792 - RNA, 32 nt, Homo Sapiens
cauccuggcaggugccccaggaugccacgccu

SEQ ID NO: 115793 - RNA, 32 nt, Homo Sapiens
uauagcuaccagcccacaggcauuuagucuac

SEQ ID NO: 115794 - RNA, 32 nt, Homo Sapiens
ccaguccccugggcugcccuucccgggccucg

SEQ ID NO: 115795 - RNA, 32 nt, Homo Sapiens
uuucaaggagcuuguggccaucuuuaaucugu

SEQ ID NO: 115796 - RNA, 32 nt, Homo Sapiens
ggaggaugugcgcccccgcgggccgcccagcc

SEQ ID NO: 115797 - RNA, 32 nt, Homo Sapiens
acuguugcuugauuuuagaaaauacacaaaaa

SEQ ID NO: 115798 - RNA, 32 nt, Homo Sapiens
ggacuucuugugccuggcagcugggacgggcc

SEQ ID NO: 115799 - RNA, 32 nt, Homo Sapiens
agcucagaugauccaugauuggaaggaugugg

SEQ ID NO: 115800 - RNA, 32 nt, Homo Sapiens
ugccucaguuggaaaaccuuuucaggcccuca

SEQ ID NO: 115801 - RNA, 32 nt, Homo Sapiens
agggggccaaacagcucugaaauuuccaaaaa

SEQ ID NO: 115802 - RNA, 32 nt, Homo Sapiens
gagucacacugccugcuccuuugggugugauu

SEQ ID NO: 115803 - RNA, 32 nt, Homo Sapiens
cuaaaaagggagccgcgaagggcgcugggcag

SEQ ID NO: 115804 - RNA, 32 nt, Homo Sapiens
auucaaaauuauucuuuuuucaaguugaaacu

SEQ ID NO: 115805 - RNA, 32 nt, Homo Sapiens
gagcaagggaauguuuaagccauuuagaacau

SEQ ID NO: 115806 - RNA, 32 nt, Homo Sapiens
gcagggccgaguagccagcugcauugcuuaga

SEQ ID NO: 115807 - RNA, 32 nt, Homo Sapiens
aucaacugaaacaaaaucuaugaaauaucaga

SEQ ID NO: 115808 - RNA, 32 nt, Homo Sapiens
acuguauuaguaaaaauuguguguugaguaaa

SEQ ID NO: 115809 - RNA, 32 nt, Homo Sapiens
ucuaccaggcccuuccucucccccugucuguu

SEQ ID NO: 115810 - RNA, 32 nt, Homo Sapiens
ugggagguggagguugcagugggcuaagaugg

SEQ ID NO: 115811 - RNA, 32 nt, Homo Sapiens
aguagaguugggaucugaaccacaggacaaua

SEQ ID NO: 115812 - RNA, 31 nt, Homo Sapiens
gugggcaugggcgcacuggcccgggcgcugc

SEQ ID NO: 115813 - RNA, 32 nt, Homo Sapiens
aucugaagagauuuuuaccauuagugguuuga

SEQ ID NO: 115814 - RNA, 32 nt, Homo Sapiens
caaaaucuugacuuaaaauuuuccggggaacu

SEQ ID NO: 115815 - RNA, 32 nt, Homo Sapiens
ggagugacaaguuguuaauaugcaaaacggau

SEQ ID NO: 115816 - RNA, 32 nt, Homo Sapiens
gugcccaggccgaggaaagcgcggcggcggca

SEQ ID NO: 115817 - RNA, 32 nt, Homo Sapiens
cacagccagggagaggggaggagugggcagug

SEQ ID NO: 115818 - RNA, 32 nt, Homo Sapiens
gcaggggucugcuucaggaaauggaagcuguc

SEQ ID NO: 115819 - RNA, 32 nt, Homo Sapiens
gucccucucgcguccccgcccggcgccacgcc

SEQ ID NO: 115820 - RNA, 32 nt, Homo Sapiens
agaugaugaugauggucaaagggugcaaaauc

SEQ ID NO: 115821 - RNA, 32 nt, Homo Sapiens
cucucagucccagagcacacuuggcuacucuu

SEQ ID NO: 115822 - RNA, 32 nt, Homo Sapiens
aaaagaaaccguauaccuguuaacaucacucc

SEQ ID NO: 115823 - RNA, 32 nt, Homo Sapiens
ccuguaacugacagaccaaauuaauuggcuuu

SEQ ID NO: 115824 - RNA, 32 nt, Homo Sapiens
uucuguacuuaccaaaaaucuaccauuucaau

SEQ ID NO: 115825 - RNA, 32 nt, Homo Sapiens
gcugacaccuacugagguaggugcuggggcau

SEQ ID NO: 115826 - RNA, 32 nt, Homo Sapiens
augaccuccccuccccagcccaaugccaagug

SEQ ID NO: 115827 - RNA, 32 nt, Homo Sapiens
ucaauuuccaggaaacaggcuccuucucuucu

SEQ ID NO: 115828 - RNA, 32 nt, Homo Sapiens
gcaauugaauuuucauuuuacaauagauaaau

SEQ ID NO: 115829 - RNA, 32 nt, Homo Sapiens
guucugaacuucuauguccuuacaacaaggua

SEQ ID NO: 115830 - RNA, 32 nt, Homo Sapiens
ggagaaaggacugcucuguggagcagaguccu

SEQ ID NO: 115831 - RNA, 32 nt, Homo Sapiens
uauagcaauaucccacaauaccucugacaaug

SEQ ID NO: 115832 - RNA, 32 nt, Homo Sapiens
gcauugcccucuccauggcucuggucacccug

SEQ ID NO: 115833 - RNA, 32 nt, Homo Sapiens
caccauuuuuaaaacuugagaauaguuuuagu

SEQ ID NO: 115834 - RNA, 32 nt, Homo Sapiens
uuccaagagugacuccgucggaggaaaaugac

SEQ ID NO: 115835 - RNA, 32 nt, Homo Sapiens
acucaggaacagagacauccgcaucguaaaug

SEQ ID NO: 115836 - RNA, 32 nt, Homo Sapiens
gaugccgcccuucccaucgcucucuuccccuu

SEQ ID NO: 115837 - RNA, 32 nt, Homo Sapiens
aauguagcuuugagggaucaguucuuaacuuu

SEQ ID NO: 115838 - RNA, 32 nt, Homo Sapiens
aguuuaagugaaaucuaguuuagaauugauga

SEQ ID NO: 115839 - RNA, 32 nt, Homo Sapiens
cuguaaaacaccuauuugggauaauauuugga

SEQ ID NO: 115840 - RNA, 32 nt, Homo Sapiens
cauaugccuguuugugauuuuaucucagaaua

SEQ ID NO: 115841 - RNA, 32 nt, Homo Sapiens
cucuauuaugccaggcuucuguuccuugguuu

SEQ ID NO: 115842 - RNA, 32 nt, Homo Sapiens
cucugucauaacuugucaacacugcuguauga

SEQ ID NO: 115843 - RNA, 32 nt, Homo Sapiens
acacagggccccagcccagcccucugcacccc

SEQ ID NO: 115844 - RNA, 32 nt, Homo Sapiens
cagcucuaccacuuacuaacugcaugggacuu

SEQ ID NO: 115845 - RNA, 32 nt, Homo Sapiens
uauauaguuaugcauacauacacacacacaca

SEQ ID NO: 115846 - RNA, 32 nt, Homo Sapiens
aacccugcucgcccgcgccgaggcgggccacg

SEQ ID NO: 115847 - RNA, 32 nt, Homo Sapiens
cuguuuccaaaauuauuucuauaugacacaaa

SEQ ID NO: 115848 - RNA, 32 nt, Homo Sapiens
uguugagugagaaaacaaaauuaucuuccuuu

SEQ ID NO: 115849 - RNA, 32 nt, Homo Sapiens
cucauccuuuggccugcccccaggugcauggc

SEQ ID NO: 115850 - RNA, 32 nt, Homo Sapiens
ugaugguacuaaaagguuagacuuuugagaaa

SEQ ID NO: 115851 - RNA, 32 nt, Homo Sapiens
gcuguagaugggcuucacaucuguaaagcaau

SEQ ID NO: 115852 - RNA, 32 nt, Homo Sapiens
agucaucugagaacuguugccagaggccccag

SEQ ID NO: 115853 - RNA, 32 nt, Homo Sapiens
cugacaggccgcggccuucugucccccggccc

SEQ ID NO: 115854 - RNA, 32 nt, Homo Sapiens
auaaauuaaugauucugaagcuuauguuucuu

SEQ ID NO: 115855 - RNA, 32 nt, Homo Sapiens
gauguacacagacugaaacacacacacauaca

SEQ ID NO: 115856 - RNA, 32 nt, Homo Sapiens
aaccgacccucagccgcauccccgguggcugc

SEQ ID NO: 115857 - RNA, 32 nt, Homo Sapiens
guaauagacauuacauuuauugacuugagcau

SEQ ID NO: 115858 - RNA, 32 nt, Homo Sapiens
cucuacacauauauuuccauauacuuaauauu

SEQ ID NO: 115859 - RNA, 32 nt, Homo Sapiens
ccuggucuccccagcccucuugaccuggccac

SEQ ID NO: 115860 - RNA, 32 nt, Homo Sapiens
gguucauuuguacagcugcaaaaauacugucu

SEQ ID NO: 115861 - RNA, 32 nt, Homo Sapiens
cuggugcuauuuuuauuuaagucuuuguuuca

SEQ ID NO: 115862 - RNA, 32 nt, Homo Sapiens
uuuaaaguagagacgggcuuugccauauuggc

SEQ ID NO: 115863 - RNA, 32 nt, Homo Sapiens
caaauacuccguccuggaagcgucugguuggc

SEQ ID NO: 115864 - RNA, 32 nt, Homo Sapiens
gcccgcuguggggcgcugcugcagccgcucuu

SEQ ID NO: 115865 - RNA, 32 nt, Homo Sapiens
cugaggcaguugcaggcaggcagcccuguacu

SEQ ID NO: 115866 - RNA, 32 nt, Homo Sapiens
aagaggcuccggggagauagcggaccagugag

SEQ ID NO: 115867 - RNA, 32 nt, Homo Sapiens
aaaacuuuguucguuacuggcuuuacccuaac

SEQ ID NO: 115868 - RNA, 30 nt, Homo Sapiens
uugagggauaaaagacuacauauuggguau

SEQ ID NO: 115869 - RNA, 32 nt, Homo Sapiens
cccuggcgcagcccuccagccugugcgcucac

SEQ ID NO: 115870 - RNA, 32 nt, Homo Sapiens
gcuuauuccaugcuuuuucuaucccauccucu

SEQ ID NO: 115871 - RNA, 32 nt, Homo Sapiens
ugcuuuacuuuuccuagacuggauagaaaauc

SEQ ID NO: 115872 - RNA, 32 nt, Homo Sapiens
uuacuuuauagaagcuggauuuugaagaucua

SEQ ID NO: 115873 - RNA, 32 nt, Homo Sapiens
uucacuagugggcagagacaaguucuaauugu

SEQ ID NO: 115874 - RNA, 32 nt, Homo Sapiens
aguagauuugauuugccuggagucuuuuggag

SEQ ID NO: 115875 - RNA, 31 nt, Homo Sapiens
aaaggugaaaacacucucccugauuccugga

SEQ ID NO: 115876 - RNA, 32 nt, Homo Sapiens
agcacagccccgaggugugcgaagccaccaag

SEQ ID NO: 115877 - RNA, 32 nt, Homo Sapiens
cccacacugaaaccaaaacauaaaaaccaaac

SEQ ID NO: 115878 - RNA, 32 nt, Homo Sapiens
cacgggccccggaggcccacuccgcggagggc

SEQ ID NO: 115879 - RNA, 32 nt, Homo Sapiens
gaggggccgggcuacgagcggcugagaaaaug

SEQ ID NO: 115880 - RNA, 32 nt, Homo Sapiens
ccgcgucccuaggccuggcucccgccugcccg

SEQ ID NO: 115881 - RNA, 32 nt, Homo Sapiens
cugcucuggguggcugggaaaauacaagaacc

SEQ ID NO: 115882 - RNA, 32 nt, Homo Sapiens
ggacgguggcgggcgagcggcuccucugccag

SEQ ID NO: 115883 - RNA, 32 nt, Homo Sapiens
ccauggucuuuucucuucauggaauucagcua

SEQ ID NO: 115884 - RNA, 32 nt, Homo Sapiens
uuucauuuacggccucuuucuuuugcagaaau

SEQ ID NO: 115885 - RNA, 32 nt, Homo Sapiens
ugagugccccaaccccaccucacaaucuucac

SEQ ID NO: 115886 - RNA, 32 nt, Homo Sapiens
guguucagagacguggguacaaacccugugau

SEQ ID NO: 115887 - RNA, 32 nt, Homo Sapiens
cagggcccagcuucccaggagagaccaaaggc

SEQ ID NO: 115888 - RNA, 32 nt, Homo Sapiens
gucagagcccagcccaggaguuugaggcugca

SEQ ID NO: 115889 - RNA, 31 nt, Homo Sapiens
ggugccugcugcugccugccuuggccugaug

SEQ ID NO: 115890 - RNA, 32 nt, Homo Sapiens
cauuugcucaguggagaaucugcauauaaccu

SEQ ID NO: 115891 - RNA, 32 nt, Homo Sapiens
uccccaacaccguggaauccucacuggugugc

SEQ ID NO: 115892 - RNA, 31 nt, Homo Sapiens
guugguaugcauaauuaauaauugggcugca

SEQ ID NO: 115893 - RNA, 32 nt, Homo Sapiens
agcagggcggagcggcuuuuccaggagaaagg

SEQ ID NO: 115894 - RNA, 32 nt, Homo Sapiens
uucaguccaaauaagguucuuacuccuccuga

SEQ ID NO: 115895 - RNA, 31 nt, Homo Sapiens
aaaaacaaaacaguuuuuaaaacugauuuua

SEQ ID NO: 115896 - RNA, 32 nt, Homo Sapiens
cacagagccguaaaggcgcgcgggaacauggg

SEQ ID NO: 115897 - RNA, 31 nt, Homo Sapiens
gaagauuccacauaaaaauuuucugagguug

SEQ ID NO: 115898 - RNA, 32 nt, Homo Sapiens
ggcaggaggggcagggcgggccagguggaguc

SEQ ID NO: 115899 - RNA, 32 nt, Homo Sapiens
aaacaguuuucaguaaugaguggacaguaagu

SEQ ID NO: 115900 - RNA, 32 nt, Homo Sapiens
agggcaggggagagggggcauucugguuaaaa

SEQ ID NO: 115901 - RNA, 32 nt, Homo Sapiens
gcauuuaaauguuuguuggcuuguugcaguuc

SEQ ID NO: 115902 - RNA, 32 nt, Homo Sapiens
gggugacggcgccugggccggaggaggggaga

SEQ ID NO: 115903 - RNA, 32 nt, Homo Sapiens
guguugguuuaguggauguucguggaauugcu

SEQ ID NO: 115904 - RNA, 32 nt, Homo Sapiens
cuugaaaauguauucugugaaacuacucauac

SEQ ID NO: 115905 - RNA, 32 nt, Homo Sapiens
uuccuuugggcucgggcugagugucgcccacu

SEQ ID NO: 115906 - RNA, 32 nt, Homo Sapiens
gacguuugauuguuguaguguucauagaguca

SEQ ID NO: 115907 - RNA, 32 nt, Homo Sapiens
cggaucggaggccgcgcggggaggaggagggc

SEQ ID NO: 115908 - RNA, 32 nt, Homo Sapiens
aagugaagacagaaccacagggcuauuuuguu

SEQ ID NO: 115909 - RNA, 32 nt, Homo Sapiens
uuaguuuaagcaaguuuuuuuauuucuagaag

SEQ ID NO: 115910 - RNA, 32 nt, Homo Sapiens
ccccucuaaauccuaaugugaauuucuucaga

SEQ ID NO: 115911 - RNA, 32 nt, Homo Sapiens
ccaggcacggccgaccccgccccgggcaccgc

SEQ ID NO: 115912 - RNA, 32 nt, Homo Sapiens
cagggcagcuagaaaagccaucuucauucgug

SEQ ID NO: 115913 - RNA, 32 nt, Homo Sapiens
aacauggagcaaaaacauaguacucuucugua

SEQ ID NO: 115914 - RNA, 32 nt, Homo Sapiens
acaucgccuugguguacaugaacuugcugagg

SEQ ID NO: 115915 - RNA, 32 nt, Homo Sapiens
cauauauaaaaauuauuaugugcuauacuaga

SEQ ID NO: 115916 - RNA, 32 nt, Homo Sapiens
agcccugcaccgcuccuggccccgggcccccu

SEQ ID NO: 115917 - RNA, 32 nt, Homo Sapiens
uaauuuuuuguauuuuuuuuuaguagagaugg

SEQ ID NO: 115918 - RNA, 32 nt, Homo Sapiens
caccauuccaccagcuggcccggccacgucuc

SEQ ID NO: 115919 - RNA, 32 nt, Homo Sapiens
aacagaugccuggccugggaacccagggauuu

SEQ ID NO: 115920 - RNA, 30 nt, Homo Sapiens
ccaggauggcuucugcaucaacuucuaaau

SEQ ID NO: 115921 - RNA, 32 nt, Homo Sapiens
aaggccagcagcagauaacaaccccggacaaa

SEQ ID NO: 115922 - RNA, 32 nt, Homo Sapiens
cacuuugcugguaaccacuugauugcugacag

SEQ ID NO: 115923 - RNA, 32 nt, Homo Sapiens
gacauuccuaacaucuuuguccaggucccagu

SEQ ID NO: 115924 - RNA, 32 nt, Homo Sapiens
uauaaaccuaaauaaugaucuauuagauucaa

SEQ ID NO: 115925 - RNA, 32 nt, Homo Sapiens
uuguuuacagcuuuucuagagcagcugugcga

SEQ ID NO: 115926 - RNA, 32 nt, Homo Sapiens
auccccccagauccugugagccagguaccgga

SEQ ID NO: 115927 - RNA, 32 nt, Homo Sapiens
gguuuuccuuccaagcacccagcccuccugcu

SEQ ID NO: 115928 - RNA, 32 nt, Homo Sapiens
gaagauuucauuuuaagcuccuccuuuuccuu

SEQ ID NO: 115929 - RNA, 32 nt, Homo Sapiens
gauaccagcuccgggugugccucuuuucucuc

SEQ ID NO: 115930 - RNA, 30 nt, Homo Sapiens
gaggcaugagagcggagagucacggaguuc

SEQ ID NO: 115931 - RNA, 32 nt, Homo Sapiens
cgccucuggcccagcccucccgcugauccccc

SEQ ID NO: 115932 - RNA, 32 nt, Homo Sapiens
uaccuggaagaggucagcuucuccucaaagga

SEQ ID NO: 115933 - RNA, 32 nt, Homo Sapiens
ugagggaguugcuucuuaggccucaggugcug

SEQ ID NO: 115934 - RNA, 32 nt, Homo Sapiens
gcuggugcccuucucuucugaccugcugaacc

SEQ ID NO: 115935 - RNA, 32 nt, Homo Sapiens
cuuuuuguaaagcauagauaaauugaauaauc

SEQ ID NO: 115936 - RNA, 32 nt, Homo Sapiens
aagacagaaguauuggacauguuggcaguaug

SEQ ID NO: 115937 - RNA, 32 nt, Homo Sapiens
cacugugaggccuccagaggauguggcaguga

SEQ ID NO: 115938 - RNA, 32 nt, Homo Sapiens
aucugucuuagauguacauuuauuugucagca

SEQ ID NO: 115939 - RNA, 32 nt, Homo Sapiens
acgggggaggggugucccacuuuaaucuuuug

SEQ ID NO: 115940 - RNA, 32 nt, Homo Sapiens
ccccagcgcgccccgacacacaugcuuuucuc

SEQ ID NO: 115941 - RNA, 32 nt, Homo Sapiens
ccagccccucuacuccugacuucugggcaaca

SEQ ID NO: 115942 - RNA, 32 nt, Homo Sapiens
ggaaagcagguuuaaaauaaaaagacaaccca

SEQ ID NO: 115943 - RNA, 28 nt, Homo Sapiens
aaaaagcggcggccguuggagguggcug

SEQ ID NO: 115944 - RNA, 32 nt, Homo Sapiens
gccuucucuugcucaauccgagguggaaaaag

SEQ ID NO: 115945 - RNA, 32 nt, Homo Sapiens
cugcccagccuacaccaccucccucaccgcaa

SEQ ID NO: 115946 - RNA, 32 nt, Homo Sapiens
ggauggggaaucugaggcccagagacgaguaa

SEQ ID NO: 115947 - RNA, 32 nt, Homo Sapiens
aaagaaugucagaccauuguuauuguugaaag

SEQ ID NO: 115948 - RNA, 30 nt, Homo Sapiens
gccccagagagugggggugagucuguguuu

SEQ ID NO: 115949 - RNA, 32 nt, Homo Sapiens
cguuuuccucauccuuucccucucccagucca

SEQ ID NO: 115950 - RNA, 32 nt, Homo Sapiens
gcaguggaggggccuccgcuccccucgguggu

SEQ ID NO: 115951 - RNA, 32 nt, Homo Sapiens
ggcuggggucacaggaggcgcuucugcgaccu

SEQ ID NO: 115952 - RNA, 32 nt, Homo Sapiens
ccaauuugccccaccaccaccuccucgggcuu

SEQ ID NO: 115953 - RNA, 32 nt, Homo Sapiens
accugaguucuucucucaguuccaagcaggaa

SEQ ID NO: 115954 - RNA, 32 nt, Homo Sapiens
uccuaggcugugauauauauuuuuguauuauc

SEQ ID NO: 115955 - RNA, 32 nt, Homo Sapiens
gugaaguacucuaugacauugauguggccaag

SEQ ID NO: 115956 - RNA, 30 nt, Homo Sapiens
cuaaaagagaagcagaggagcugauagaaa

SEQ ID NO: 115957 - RNA, 32 nt, Homo Sapiens
uacugaggcaggggaguaguggagagcgggug

SEQ ID NO: 115958 - RNA, 32 nt, Homo Sapiens
aagagcggggcggagaggcagcugcgggggga

SEQ ID NO: 115959 - RNA, 32 nt, Homo Sapiens
accaugggcugcuggggugucgggagaagcca

SEQ ID NO: 115960 - RNA, 27 nt, Homo Sapiens
aggucgaccuucuucagcaccuccagg

SEQ ID NO: 115961 - RNA, 32 nt, Homo Sapiens
gauuagacuggaagaagaaaccacuauuucau

SEQ ID NO: 115962 - RNA, 32 nt, Homo Sapiens
cguaucgaucaccagcaccaggguggcccgug

SEQ ID NO: 115963 - RNA, 32 nt, Homo Sapiens
agggagaggagcugcccggcccuggagaaggg

SEQ ID NO: 115964 - RNA, 32 nt, Homo Sapiens
guaacauuuuuccagcucaugugaaaauggaa

SEQ ID NO: 115965 - RNA, 32 nt, Homo Sapiens
uuugacccuguauaucaugacuuauuuuuaau

SEQ ID NO: 115966 - RNA, 32 nt, Homo Sapiens
agacuuuuuguuacugauucaaaccugcuauu

SEQ ID NO: 115967 - RNA, 32 nt, Homo Sapiens
ggacaaauauuuuucuccccuugcucuuccug

SEQ ID NO: 115968 - RNA, 32 nt, Homo Sapiens
agguugaggcugcagugagcugugauuaugcc

SEQ ID NO: 115969 - RNA, 32 nt, Homo Sapiens
ccaaaaauauguuuauuuuuuauuauagugua

SEQ ID NO: 115970 - RNA, 32 nt, Homo Sapiens
aaaaugguuuauuuuaggaaacuuuuuccacc

SEQ ID NO: 115971 - RNA, 31 nt, Homo Sapiens
ggcuaggucgcggcagacucgagccaugggc

SEQ ID NO: 115972 - RNA, 32 nt, Homo Sapiens
uuucuggguaaaacuuaaaaguuuacuauuuc

SEQ ID NO: 115973 - RNA, 32 nt, Homo Sapiens
uucccuuuuuaaauacuuguucuuaauucacu

SEQ ID NO: 115974 - RNA, 32 nt, Homo Sapiens
aacgccucugcagcugcagcccucguucucuu

SEQ ID NO: 115975 - RNA, 32 nt, Homo Sapiens
agacaccauuucauccuuaauuauuacuucug

SEQ ID NO: 115976 - RNA, 32 nt, Homo Sapiens
cccaggccaagccccucuccucacgggagggu

SEQ ID NO: 115977 - RNA, 32 nt, Homo Sapiens
caaauaauucuauccuauugucacugaagucc

SEQ ID NO: 115978 - RNA, 32 nt, Homo Sapiens
aucucuguuuuuaagcagaaauucauugugcu

SEQ ID NO: 115979 - RNA, 32 nt, Homo Sapiens
cugucguuaagagcuuucgaggaaggaguacu

SEQ ID NO: 115980 - RNA, 32 nt, Homo Sapiens
aggaggagcuggcgcaggcccaggcgccgaag

SEQ ID NO: 115981 - RNA, 32 nt, Homo Sapiens
gcggcucggaggagcggcugcugcugcugcug

SEQ ID NO: 115982 - RNA, 31 nt, Homo Sapiens
aacacacaccuggaauaaaaccacuucuuac

SEQ ID NO: 115983 - RNA, 32 nt, Homo Sapiens
gcgcuggucacugaggcccaggucgccgccgc

SEQ ID NO: 115984 - RNA, 32 nt, Homo Sapiens
accuuggccaucuucuuccuucgucgucucuc

SEQ ID NO: 115985 - RNA, 32 nt, Homo Sapiens
uuuaggauaaccuuugaaccaacaaucuucaa

SEQ ID NO: 115986 - RNA, 32 nt, Homo Sapiens
caaauuaauuuaauugcaugugcuagggaaaa

SEQ ID NO: 115987 - RNA, 32 nt, Homo Sapiens
ucucugucuccuccccuccccccgcgaacuug

SEQ ID NO: 115988 - RNA, 32 nt, Homo Sapiens
cacagacacccaccgccaccccggcugggucu

SEQ ID NO: 115989 - RNA, 32 nt, Homo Sapiens
gccuugauucagauuagcugugguucaagacu

SEQ ID NO: 115990 - RNA, 32 nt, Homo Sapiens
uuugccguuuuaaaauguguaauuguuccagc

SEQ ID NO: 115991 - RNA, 31 nt, Homo Sapiens
gaggguccggcccgccugcccgugcacagca

SEQ ID NO: 115992 - RNA, 32 nt, Homo Sapiens
ugccuucaaauuauucaagaagaggaaaucgg

SEQ ID NO: 115993 - RNA, 32 nt, Homo Sapiens
aauuagaauuguaugaaauuaagaguuucaga

SEQ ID NO: 115994 - RNA, 32 nt, Homo Sapiens
gcaaauuguucacuuugugguugaaagaccug

SEQ ID NO: 115995 - RNA, 32 nt, Homo Sapiens
uaaacccggcggagcagcagcggccgcgcgcg

SEQ ID NO: 115996 - RNA, 32 nt, Homo Sapiens
uacucuuggccauggcgcucgggcugcucauc

SEQ ID NO: 115997 - RNA, 32 nt, Homo Sapiens
uuacugucagaccagccacagaacuuccuccc

SEQ ID NO: 115998 - RNA, 32 nt, Homo Sapiens
uuucagcagacaugucugcacaugacagugua

SEQ ID NO: 115999 - RNA, 32 nt, Homo Sapiens
uaacccuuuuaaugccuuuaccucaaguugcu

SEQ ID NO: 116000 - RNA, 32 nt, Homo Sapiens
auauuuuaaaacuuugaagauuuauuuauuug

SEQ ID NO: 116001 - RNA, 32 nt, Homo Sapiens
aguguugcugcaacaauaaagccuguugcauc

SEQ ID NO: 116002 - RNA, 32 nt, Homo Sapiens
cuaugaggaggccccgggucuccagcccccuc

SEQ ID NO: 116003 - RNA, 32 nt, Homo Sapiens
gcagacagccucgaugagacaagcuaugguuu

SEQ ID NO: 116004 - RNA, 32 nt, Homo Sapiens
ccccagucaucccaggaaaaccacucacagcc

SEQ ID NO: 116005 - RNA, 32 nt, Homo Sapiens
uuuauaauugaaggagguaauuuuaaaaugcu

SEQ ID NO: 116006 - RNA, 32 nt, Homo Sapiens
agauaauguuaagaaaaauuugaaagcuuugg

SEQ ID NO: 116007 - RNA, 32 nt, Homo Sapiens
ccuacgaucucuuuguauuuuaucuuguggau

SEQ ID NO: 116008 - RNA, 32 nt, Homo Sapiens
cuuugauuuuauucuuuuuuuugagacagaau

SEQ ID NO: 116009 - RNA, 32 nt, Homo Sapiens
uauuucuauggcuccuuuugcugcugaggaca

SEQ ID NO: 116010 - RNA, 32 nt, Homo Sapiens
auuuuccauuuccaugaauauuacaggcugag

SEQ ID NO: 116011 - RNA, 32 nt, Homo Sapiens
agccaaguucccugugccuuaggcucauuuca

SEQ ID NO: 116012 - RNA, 32 nt, Homo Sapiens
gcugcggccccgcucccucuacccggccggac

SEQ ID NO: 116013 - RNA, 32 nt, Homo Sapiens
gcaccacacaaggagcucuuugaggacaagga

SEQ ID NO: 116014 - RNA, 32 nt, Homo Sapiens
uuagacuuuguuuuaaugcuuguacguacaua

SEQ ID NO: 116015 - RNA, 32 nt, Homo Sapiens
gagagguauuaucaggguugacaacuccuaug

SEQ ID NO: 116016 - RNA, 32 nt, Homo Sapiens
ggcgggaccccggcccgcgucucagcuauaaa

SEQ ID NO: 116017 - RNA, 32 nt, Homo Sapiens
ccaguguuuuuguaaaaaugugaaaagucaaa

SEQ ID NO: 116018 - RNA, 32 nt, Homo Sapiens
cgcugcaggacgagacccuggguguggcgucc

SEQ ID NO: 116019 - RNA, 32 nt, Homo Sapiens
ggggcggggaggggcgggaaguuugcgcccua

SEQ ID NO: 116020 - RNA, 32 nt, Homo Sapiens
uuauuguaaaaugugauuugucauugagagau

SEQ ID NO: 116021 - RNA, 32 nt, Homo Sapiens
cacacuuuccuccuccccacugcagugaguca

SEQ ID NO: 116022 - RNA, 32 nt, Homo Sapiens
ccagguggugccugccgaggucugggcguguu

SEQ ID NO: 116023 - RNA, 32 nt, Homo Sapiens
ucuuaccuuuuaagaagauacuauuuaagaag

SEQ ID NO: 116024 - RNA, 32 nt, Homo Sapiens
ccuagagggcauccgaggggcugggccuuggc

SEQ ID NO: 116025 - RNA, 32 nt, Homo Sapiens
agccucuucaggcgcagaacuugaucuccagg

SEQ ID NO: 116026 - RNA, 32 nt, Homo Sapiens
cauuuucugcaccucccccauaggcuuguuuc

SEQ ID NO: 116027 - RNA, 32 nt, Homo Sapiens
uauccaccugaauaaaaaugaccagcccuuuc

SEQ ID NO: 116028 - RNA, 32 nt, Homo Sapiens
ugagacccauagcuucauauggcugcuccagc

SEQ ID NO: 116029 - RNA, 32 nt, Homo Sapiens
ccguggggcugcccuccuccaugcgccuggga

SEQ ID NO: 116030 - RNA, 32 nt, Homo Sapiens
aucaguggcggcggcacccgcggccccgcgcg

SEQ ID NO: 116031 - RNA, 32 nt, Homo Sapiens
gauccuuauuucucuggcacagauugguauuu

SEQ ID NO: 116032 - RNA, 32 nt, Homo Sapiens
ugacagggucuccauauguugcccaggcuggu

SEQ ID NO: 116033 - RNA, 30 nt, Homo Sapiens
uggagcaauaaaagacaaaugcaacauuuu

SEQ ID NO: 116034 - RNA, 32 nt, Homo Sapiens
gacaguccuccuagcacccccauggcuuugag

SEQ ID NO: 116035 - RNA, 32 nt, Homo Sapiens
ugugggcugcgcagugggcucggggguugggg

SEQ ID NO: 116036 - RNA, 32 nt, Homo Sapiens
ugcuuuacaauuuuguaguuaauuuaacauau

SEQ ID NO: 116037 - RNA, 32 nt, Homo Sapiens
guuacauuuuaaaauaaacaaaaaacuguucu

SEQ ID NO: 116038 - RNA, 32 nt, Homo Sapiens
caaagggccaggugcuggaggugcugucaugg

SEQ ID NO: 116039 - RNA, 32 nt, Homo Sapiens
gagcagacauucacccaccucuggcaaaccga

SEQ ID NO: 116040 - RNA, 32 nt, Homo Sapiens
gguaguggccacagcuggggacaggcugacgg

SEQ ID NO: 116041 - RNA, 32 nt, Homo Sapiens
cugccuggagaggccuggcccugggcaaacag

SEQ ID NO: 116042 - RNA, 32 nt, Homo Sapiens
cuggguuuucccuuuaccagucuguccucacu

SEQ ID NO: 116043 - RNA, 32 nt, Homo Sapiens
uauuuuagaaaaacuuuauuauaccucuuugu

SEQ ID NO: 116044 - RNA, 32 nt, Homo Sapiens
uaaagaagaaaauaaacucaucucuaauguga

SEQ ID NO: 116045 - RNA, 32 nt, Homo Sapiens
accgcuccacaccugagcugccgccaagcuaa

SEQ ID NO: 116046 - RNA, 32 nt, Homo Sapiens
gaggcagacaaguggaauuaggccuugcugca

SEQ ID NO: 116047 - RNA, 32 nt, Homo Sapiens
ucccaagagagggugccuggacucagcaacuc

SEQ ID NO: 116048 - RNA, 32 nt, Homo Sapiens
ccuaagucuucaucgugcugcccuuuccaggc

SEQ ID NO: 116049 - RNA, 32 nt, Homo Sapiens
uccccagucugccacaccccaucccuuugggc

SEQ ID NO: 116050 - RNA, 32 nt, Homo Sapiens
aaugagauauaguuaagagauggcauucaaaa

SEQ ID NO: 116051 - RNA, 32 nt, Homo Sapiens
ggcucgguuacgcccccaccucgccaggaauc

SEQ ID NO: 116052 - RNA, 32 nt, Homo Sapiens
acucgccaacaucucggggcaguuggaccuau

SEQ ID NO: 116053 - RNA, 32 nt, Homo Sapiens
cagugcacuggggauuuggagagagaugggcu

SEQ ID NO: 116054 - RNA, 31 nt, Homo Sapiens
aucucuggccauauccugccccucgcucggu

SEQ ID NO: 116055 - RNA, 32 nt, Homo Sapiens
uugcaacuuccacuucccagguucaagugauu

SEQ ID NO: 116056 - RNA, 32 nt, Homo Sapiens
uuagccauuuuucaaagcaauugaaaugcauu

SEQ ID NO: 116057 - RNA, 32 nt, Homo Sapiens
augggaaguggugggaggagcgacccgggaug

SEQ ID NO: 116058 - RNA, 32 nt, Homo Sapiens
ggucaguccgccgcucaccccgcggccgcacc

SEQ ID NO: 116059 - RNA, 32 nt, Homo Sapiens
aaccaugccuuaaaaacaccaaggggacauug

SEQ ID NO: 116060 - RNA, 32 nt, Homo Sapiens
gggacccaauauggcuucuccuuuuuccacac

SEQ ID NO: 116061 - RNA, 32 nt, Homo Sapiens
accuugggguaaacagaaccuaggauaguaaa

SEQ ID NO: 116062 - RNA, 32 nt, Homo Sapiens
aauuuuauuauuauuauacuucaaguucuagg

SEQ ID NO: 116063 - RNA, 32 nt, Homo Sapiens
uauggggcacgagggacaagauaccagacauu

SEQ ID NO: 116064 - RNA, 29 nt, Homo Sapiens
auuccucagggacagagacaccugcaccu

SEQ ID NO: 116065 - RNA, 32 nt, Homo Sapiens
ccagagagaguaaacguguaagcacaugcuuu

SEQ ID NO: 116066 - RNA, 32 nt, Homo Sapiens
ggaagacaugucaagcccuuaagcaaauucuu

SEQ ID NO: 116067 - RNA, 32 nt, Homo Sapiens
cugucagccuggaaagagauccaggucuggag

SEQ ID NO: 116068 - RNA, 32 nt, Homo Sapiens
uguuucccauacaacucagggaugccaggugg

SEQ ID NO: 116069 - RNA, 32 nt, Homo Sapiens
ugucccacauucccaacaccgcccucugauca

SEQ ID NO: 116070 - RNA, 29 nt, Homo Sapiens
guaaccaugaagauucagauguaccucag

SEQ ID NO: 116071 - RNA, 32 nt, Homo Sapiens
uucagugccuaccgaagacaaaggcgccccga

SEQ ID NO: 116072 - RNA, 32 nt, Homo Sapiens
ucagauggcaaugaaagcccuggucagguggc

SEQ ID NO: 116073 - RNA, 32 nt, Homo Sapiens
cuaucaaggucaacuggcaguuuuauuaccuu

SEQ ID NO: 116074 - RNA, 32 nt, Homo Sapiens
uacugcaaccucagcuggcaucauggaccaug

SEQ ID NO: 116075 - RNA, 32 nt, Homo Sapiens
aacaauugugaacagaaacugaagaugguaca

SEQ ID NO: 116076 - RNA, 32 nt, Homo Sapiens
aauccccuaucaacacucccagcccuugcugg

SEQ ID NO: 116077 - RNA, 30 nt, Homo Sapiens
gaaucuuagaggcuugaugaugaugguguu

SEQ ID NO: 116078 - RNA, 32 nt, Homo Sapiens
ccaggcccugucugcggcccgaacgcaggccg

SEQ ID NO: 116079 - RNA, 32 nt, Homo Sapiens
uuguuaaauauucgaaugcauguagauuuguu

SEQ ID NO: 116080 - RNA, 32 nt, Homo Sapiens
ugaauuaguucuaugagaaguacuggcagaca

SEQ ID NO: 116081 - RNA, 32 nt, Homo Sapiens
uucccugcuggccugccccuugggaaggggca

SEQ ID NO: 116082 - RNA, 32 nt, Homo Sapiens
acuucuguccuuaaagauuucagacaugguga

SEQ ID NO: 116083 - RNA, 32 nt, Homo Sapiens
aaaacaaaaaaauuauacucaaaauucauuac

SEQ ID NO: 116084 - RNA, 32 nt, Homo Sapiens
aucgccuugcggccuggcacuggagcuggugc

SEQ ID NO: 116085 - RNA, 32 nt, Homo Sapiens
uauguaaguuuuuuguacauaauucucaauuu

SEQ ID NO: 116086 - RNA, 32 nt, Homo Sapiens
ugccugugauccuagcacuuugggaguuaaaa

SEQ ID NO: 116087 - RNA, 32 nt, Homo Sapiens
gauucaguuuuugcugcugugaaacagcucug

SEQ ID NO: 116088 - RNA, 32 nt, Homo Sapiens
cccuccacucugcccagcugcccuccccucgc

SEQ ID NO: 116089 - RNA, 32 nt, Homo Sapiens
cacagaagguuagagaugugugcgaggaacgg

SEQ ID NO: 116090 - RNA, 32 nt, Homo Sapiens
ucuguuuauucugauuuuacuaaaauaaaaag

SEQ ID NO: 116091 - RNA, 32 nt, Homo Sapiens
agagcgccugggacagcuuguccgccaggcuu

SEQ ID NO: 116092 - RNA, 32 nt, Homo Sapiens
uacacuuuuauggcuuuuaauuuucgauuuga

SEQ ID NO: 116093 - RNA, 32 nt, Homo Sapiens
cacagcgcuugagcucugcuaagggacagacu

SEQ ID NO: 116094 - RNA, 32 nt, Homo Sapiens
uuuugggucgccuggguccucaguccuagcgg

SEQ ID NO: 116095 - RNA, 32 nt, Homo Sapiens
acuguuuaaaucuauuuggcauaaaccuugau

SEQ ID NO: 116096 - RNA, 32 nt, Homo Sapiens
cauggucgcccauuuuuucaucauuuaaccua

SEQ ID NO: 116097 - RNA, 32 nt, Homo Sapiens
ggaaggacccagcccgaccccugggcauaaca

SEQ ID NO: 116098 - RNA, 32 nt, Homo Sapiens
guccugccuggcgaccccgaccuccuccugcu

SEQ ID NO: 116099 - RNA, 32 nt, Homo Sapiens
caagaauauaaaacuaaaguauuacagacucc

SEQ ID NO: 116100 - RNA, 32 nt, Homo Sapiens
aaauuuuaagggugagaaggaaugaccaacag

SEQ ID NO: 116101 - RNA, 32 nt, Homo Sapiens
uuuuuuguguguucuuuaaauaaauccaaaaa

SEQ ID NO: 116102 - RNA, 32 nt, Homo Sapiens
cgcaaagagugacgaggccccgugggagaacg

SEQ ID NO: 116103 - RNA, 32 nt, Homo Sapiens
gugcacacagaaauccagauaagaugugauua

SEQ ID NO: 116104 - RNA, 32 nt, Homo Sapiens
uccaaggaggccuggggguugggugggguggg

SEQ ID NO: 116105 - RNA, 32 nt, Homo Sapiens
aggcggcccuggcuucuggcugcacaacaaag

SEQ ID NO: 116106 - RNA, 31 nt, Homo Sapiens
ggagccgggcucugccugcgcccggggcaga

SEQ ID NO: 116107 - RNA, 32 nt, Homo Sapiens
aauuugcacaauauuucuuuuguuguacuuua

SEQ ID NO: 116108 - RNA, 32 nt, Homo Sapiens
uaaagaugugcugccuucauaagauuuggguu

SEQ ID NO: 116109 - RNA, 32 nt, Homo Sapiens
gccaaaagccacucagccccagccaccucgcg

SEQ ID NO: 116110 - RNA, 32 nt, Homo Sapiens
ggauaccuucugggcuuuugaacuugccccuc

SEQ ID NO: 116111 - RNA, 32 nt, Homo Sapiens
ggcccacccagcugcccagccuuugcccacuc

SEQ ID NO: 116112 - RNA, 32 nt, Homo Sapiens
uuuauauauaucuauauauauaauuuauugag

SEQ ID NO: 116113 - RNA, 32 nt, Homo Sapiens
uucuuucuauagaguucuucauuaacauuuau

SEQ ID NO: 116114 - RNA, 32 nt, Homo Sapiens
aaaggggcgagggaggggggugggauuuuugg

SEQ ID NO: 116115 - RNA, 32 nt, Homo Sapiens
ucccgcacuccagccucucgcugccaggguuu

SEQ ID NO: 116116 - RNA, 32 nt, Homo Sapiens
uucucaucugcucaggugucccgggcgccuug

SEQ ID NO: 116117 - RNA, 32 nt, Homo Sapiens
ucagaaugaagauguagagaaacaaggaagaa

SEQ ID NO: 116118 - RNA, 32 nt, Homo Sapiens
aauacaaugacauauuucuuuauuuucacaua

SEQ ID NO: 116119 - RNA, 32 nt, Homo Sapiens
gcacgaggcuaaaagaguggaucaugacccau

SEQ ID NO: 116120 - RNA, 32 nt, Homo Sapiens
guuggaacuaucaguggcgucucccaugcaca

SEQ ID NO: 116121 - RNA, 29 nt, Homo Sapiens
ucgcauggagggcucugggggcggugcgg

SEQ ID NO: 116122 - RNA, 32 nt, Homo Sapiens
aacucaagccccagcagcccgugccugcgcca

SEQ ID NO: 116123 - RNA, 32 nt, Homo Sapiens
ccauuuucaccuucugucuccuccaugucugc

SEQ ID NO: 116124 - RNA, 32 nt, Homo Sapiens
augggcggagcacgugggcugcuuaacugcug

SEQ ID NO: 116125 - RNA, 32 nt, Homo Sapiens
agaagaaaccuaaaaacuguggauaguggaaa

SEQ ID NO: 116126 - RNA, 32 nt, Homo Sapiens
uuguacaaacaaaacacagaaccauucagaug

SEQ ID NO: 116127 - RNA, 32 nt, Homo Sapiens
uccaacacauucaacacugguauaccuccuac

SEQ ID NO: 116128 - RNA, 32 nt, Homo Sapiens
guuuuuucuuuaggaauaaauuacauuuaucu

SEQ ID NO: 116129 - RNA, 32 nt, Homo Sapiens
ccucccagaccgguccccauggaggagaugga

SEQ ID NO: 116130 - RNA, 32 nt, Homo Sapiens
ccaucucaucccuggaggaggggcuggagcau

SEQ ID NO: 116131 - RNA, 32 nt, Homo Sapiens
guuagccaggauggucucaaucuccugacuuc

SEQ ID NO: 116132 - RNA, 27 nt, Homo Sapiens
ucuucaucuuuuucuuuuuguuugagc

SEQ ID NO: 116133 - RNA, 32 nt, Homo Sapiens
uucucucacucugcccagcugcagagugcugu

SEQ ID NO: 116134 - RNA, 32 nt, Homo Sapiens
uuucacuugcacuauuuuuuuauuuugccaga

SEQ ID NO: 116135 - RNA, 32 nt, Homo Sapiens
aaauggggguaucuuuccccuuuccugcccuu

SEQ ID NO: 116136 - RNA, 32 nt, Homo Sapiens
accagaggggagagacagagcagcaagcagug

SEQ ID NO: 116137 - RNA, 31 nt, Homo Sapiens
ucaccugccacguucucuccaaggagugggg

SEQ ID NO: 116138 - RNA, 32 nt, Homo Sapiens
cugggggagcagcugagggaaagggaauuuaa

SEQ ID NO: 116139 - RNA, 32 nt, Homo Sapiens
uuuuucuagaaaaggcacauuggguaucauuc

SEQ ID NO: 116140 - RNA, 32 nt, Homo Sapiens
cggcggcucggccaguacucccggcccccgcc

SEQ ID NO: 116141 - RNA, 32 nt, Homo Sapiens
ugcugcugcccauuuucucuggguacugcugg

SEQ ID NO: 116142 - RNA, 32 nt, Homo Sapiens
cagcuauuaagggagacucaccaccaagggga

SEQ ID NO: 116143 - RNA, 32 nt, Homo Sapiens
gacgagcguggcggccgcggcugcucggggcc

SEQ ID NO: 116144 - RNA, 32 nt, Homo Sapiens
auaaauuauaugcaauauauuauaguacaugu

SEQ ID NO: 116145 - RNA, 32 nt, Homo Sapiens
acgaggaggagaagaaacuuugguccuaacac

SEQ ID NO: 116146 - RNA, 32 nt, Homo Sapiens
cagaugugaugaggauuaaaugaaucaaaaga

SEQ ID NO: 116147 - RNA, 32 nt, Homo Sapiens
agcugcugaggcggcggguugaggcggcccga

SEQ ID NO: 116148 - RNA, 32 nt, Homo Sapiens
ccccuacccgguuucccucccuguuuuccuac

SEQ ID NO: 116149 - RNA, 32 nt, Homo Sapiens
caaguccgccacagcccucccccgcccccuuc

SEQ ID NO: 116150 - RNA, 32 nt, Homo Sapiens
uaagggaucccgggcaaagaccacagacaucc

SEQ ID NO: 116151 - RNA, 32 nt, Homo Sapiens
acacauuuuuaaaaucagccacuguaguacag

SEQ ID NO: 116152 - RNA, 32 nt, Homo Sapiens
uaaauaucauuccuucugaggcaaauugaaga

SEQ ID NO: 116153 - RNA, 32 nt, Homo Sapiens
uucauuuuucuuuuuucaaacaccaacuugua

SEQ ID NO: 116154 - RNA, 32 nt, Homo Sapiens
acugggcauaaugacauuuucuuuaaauuaga

SEQ ID NO: 116155 - RNA, 32 nt, Homo Sapiens
cacguauccccacgccucggggcccccgccgc

SEQ ID NO: 116156 - RNA, 32 nt, Homo Sapiens
cuuguuaaauauauuuauucagacauuggaug

SEQ ID NO: 116157 - RNA, 32 nt, Homo Sapiens
uggauggcaaaguggugucugagaccagugau

SEQ ID NO: 116158 - RNA, 32 nt, Homo Sapiens
uggagcugaccugaccaggcaaggcugcuguc

SEQ ID NO: 116159 - RNA, 32 nt, Homo Sapiens
cugcuguaaauguuugucuacugcacaagccu

SEQ ID NO: 116160 - RNA, 32 nt, Homo Sapiens
ugggguccuugaugggcaugugugauggggaa

SEQ ID NO: 116161 - RNA, 32 nt, Homo Sapiens
gcgccccgccaggccuuagggcccguggggga

SEQ ID NO: 116162 - RNA, 32 nt, Homo Sapiens
cacaguuaaacauuuccaguaaaauuucguaa

SEQ ID NO: 116163 - RNA, 31 nt, Homo Sapiens
ucugaggagccccagucaugcucagcacgcu

SEQ ID NO: 116164 - RNA, 32 nt, Homo Sapiens
uaaucaaagagauaauuucagcucuuacaaca

SEQ ID NO: 116165 - RNA, 28 nt, Homo Sapiens
ucacauggaaauaaaugcaucgaacauu

SEQ ID NO: 116166 - RNA, 32 nt, Homo Sapiens
gggccaauggagccaaguguauggaaacccac

SEQ ID NO: 116167 - RNA, 32 nt, Homo Sapiens
caggcagcuucucuccuuguccucuggggagg

SEQ ID NO: 116168 - RNA, 32 nt, Homo Sapiens
aaaacaaacauaaaguuggcacagaaaaggga

SEQ ID NO: 116169 - RNA, 32 nt, Homo Sapiens
ccucuucuguauuuugauaacucauugcuuua

SEQ ID NO: 116170 - RNA, 32 nt, Homo Sapiens
ugauugugcaggggaacgugcaggagguuuuu

SEQ ID NO: 116171 - RNA, 32 nt, Homo Sapiens
uuucuugcggcacgaugccgucucugcuggug

SEQ ID NO: 116172 - RNA, 32 nt, Homo Sapiens
aagggccucgggaguugcgagugucgcgaggu

SEQ ID NO: 116173 - RNA, 32 nt, Homo Sapiens
gaccuuggcacucgaacugaccucaagcucag

SEQ ID NO: 116174 - RNA, 32 nt, Homo Sapiens
gucgacgcugggcuuucgggucccgcgcccag

SEQ ID NO: 116175 - RNA, 32 nt, Homo Sapiens
ugagccaaagagaagaaaugauuuauuaacau

SEQ ID NO: 116176 - RNA, 32 nt, Homo Sapiens
ggggacacagauuuucauaguuuccauuuuug

SEQ ID NO: 116177 - RNA, 32 nt, Homo Sapiens
aaugagauguuuccaugucagcuccuuuacag

SEQ ID NO: 116178 - RNA, 32 nt, Homo Sapiens
agagacuuuuaaaaauaggcuuucuuauauuu

SEQ ID NO: 116179 - RNA, 32 nt, Homo Sapiens
gacuuuggaaaagguggaaggaagaacuguug

SEQ ID NO: 116180 - RNA, 32 nt, Homo Sapiens
cugugacccuuccacaccccagaacuggcuca

SEQ ID NO: 116181 - RNA, 32 nt, Homo Sapiens
augcuugaacucucaccuuugaccuuguguug

SEQ ID NO: 116182 - RNA, 32 nt, Homo Sapiens
ucucuggcucaauggucuacauucugaaguua

SEQ ID NO: 116183 - RNA, 32 nt, Homo Sapiens
cucccacgaggccauccuccucuucuuggacc

SEQ ID NO: 116184 - RNA, 32 nt, Homo Sapiens
cccguagcgccucgggcucccgggccggacag

SEQ ID NO: 116185 - RNA, 32 nt, Homo Sapiens
uuuuguucuggugaaguuugugaaauauauuu

SEQ ID NO: 116186 - RNA, 32 nt, Homo Sapiens
ccaauaugaugaugguuuucaugacuuugaau

SEQ ID NO: 116187 - RNA, 32 nt, Homo Sapiens
uauauaugcucuuaaacaaaaguuugaaauua

SEQ ID NO: 116188 - RNA, 32 nt, Homo Sapiens
gggcgaggccccagcucugcugcugccccuuc

SEQ ID NO: 116189 - RNA, 32 nt, Homo Sapiens
agaaggaagaucugaggcucuggugcucaggg

SEQ ID NO: 116190 - RNA, 32 nt, Homo Sapiens
ucaaacuacaucuauuuggugaucauuauuaa

SEQ ID NO: 116191 - RNA, 32 nt, Homo Sapiens
ucagggugccucugacagcugcugcaggaaac

SEQ ID NO: 116192 - RNA, 32 nt, Homo Sapiens
uuuuccuauggcauguuaacuggugcacaucg

SEQ ID NO: 116193 - RNA, 32 nt, Homo Sapiens
gugaccgcccuuccccgcaggcgggcgccggc

SEQ ID NO: 116194 - RNA, 32 nt, Homo Sapiens
gcccuccucuucccgcugcagugucuauggag

SEQ ID NO: 116195 - RNA, 32 nt, Homo Sapiens
caaagucuugggaaaaguaguuuucauggcag

SEQ ID NO: 116196 - RNA, 32 nt, Homo Sapiens
uccgcggcgacgagcagucucgcgccggagcu

SEQ ID NO: 116197 - RNA, 32 nt, Homo Sapiens
uuuuaucuuauuuguuuuuguacccauuaacc

SEQ ID NO: 116198 - RNA, 32 nt, Homo Sapiens
agaagagauccgaaucugugcccagcgcuaaa

SEQ ID NO: 116199 - RNA, 32 nt, Homo Sapiens
ucagcuaauuuucuggccuauuuauuaaacag

SEQ ID NO: 116200 - RNA, 32 nt, Homo Sapiens
uuguaugguauuuuaagauuaucaaucacuuc

SEQ ID NO: 116201 - RNA, 32 nt, Homo Sapiens
aaaucuggccccagcuuucuuucuguuagcau

SEQ ID NO: 116202 - RNA, 30 nt, Homo Sapiens
uccaugaauaucccugaccuuagcauaaaa

SEQ ID NO: 116203 - RNA, 32 nt, Homo Sapiens
cuuugagauauuuuaaaacguguauaccuuua

SEQ ID NO: 116204 - RNA, 32 nt, Homo Sapiens
uagggggagacggggugauugcaaauuauucc

SEQ ID NO: 116205 - RNA, 32 nt, Homo Sapiens
gucagagcauacuagagacuacaggagaggaa

SEQ ID NO: 116206 - RNA, 32 nt, Homo Sapiens
uuuaaaaaaaauuuuuaaguauuucauuauau

SEQ ID NO: 116207 - RNA, 32 nt, Homo Sapiens
cuucugcaacagauucuguuucuuuuucccga

SEQ ID NO: 116208 - RNA, 32 nt, Homo Sapiens
auaaaaagagcugacugacauaucuuuaaaua

SEQ ID NO: 116209 - RNA, 32 nt, Homo Sapiens
ucuuuacuaaccccaaauugucuacuggaaac

SEQ ID NO: 116210 - RNA, 28 nt, Homo Sapiens
ggcgagaucacaggaccaaggugaaauu

SEQ ID NO: 116211 - RNA, 32 nt, Homo Sapiens
uguggguugauuuuuuuuuuuaaauaacugac

SEQ ID NO: 116212 - RNA, 32 nt, Homo Sapiens
cugugugugcaggcaacguccacccaugcugc

SEQ ID NO: 116213 - RNA, 32 nt, Homo Sapiens
ugagugcagcgcggggucuccauggugcuagg

SEQ ID NO: 116214 - RNA, 32 nt, Homo Sapiens
ccugggcugggcccaggugcgcggcgcagagc

SEQ ID NO: 116215 - RNA, 32 nt, Homo Sapiens
ucagagcuccaggguggcacgcggcggcgcuu

SEQ ID NO: 116216 - RNA, 30 nt, Homo Sapiens
uggggaggcaggccaaaggggcuccacaug

SEQ ID NO: 116217 - RNA, 32 nt, Homo Sapiens
gcacgaggagaauggccagcaggaaggcgggg

SEQ ID NO: 116218 - RNA, 30 nt, Homo Sapiens
ggaccuaaacucgugccgcucgugccgaau

SEQ ID NO: 116219 - RNA, 32 nt, Homo Sapiens
aggaaccccucgcgcacccagcgcagaaggcu

SEQ ID NO: 116220 - RNA, 32 nt, Homo Sapiens
aaagccuuaagugaacaaaucuagcuaacagu

SEQ ID NO: 116221 - RNA, 32 nt, Homo Sapiens
augcagugaaaggaacuauauuauuaaauugc

SEQ ID NO: 116222 - RNA, 32 nt, Homo Sapiens
aaugcaguuuuagaagcagaaaaggucuuggu

SEQ ID NO: 116223 - RNA, 32 nt, Homo Sapiens
aaugaagcaaugugacucaaggccugcuguuu

SEQ ID NO: 116224 - RNA, 32 nt, Homo Sapiens
aguaguggggcaggccucucuaugcuuggugc

SEQ ID NO: 116225 - RNA, 32 nt, Homo Sapiens
acaccacacacacacacacacacacacacaca

SEQ ID NO: 116226 - RNA, 32 nt, Homo Sapiens
cccgaagacugaggcauuuuccaggucuacuu

SEQ ID NO: 116227 - RNA, 32 nt, Homo Sapiens
acaacaaaggauuauguccgaguauuuauuuu

SEQ ID NO: 116228 - RNA, 31 nt, Homo Sapiens
ucagagaaaacaacucucagccugguaaaug

SEQ ID NO: 116229 - RNA, 32 nt, Homo Sapiens
ugggauucacaucacgacgcggcggccccaac

SEQ ID NO: 116230 - RNA, 32 nt, Homo Sapiens
ugagcaccaacccuagucccccgcgcggcccc

SEQ ID NO: 116231 - RNA, 32 nt, Homo Sapiens
guacauuccuucuuccucccccugcuccagaa

SEQ ID NO: 116232 - RNA, 32 nt, Homo Sapiens
ucuccccaggcacaacacagcuaacacaaggc

SEQ ID NO: 116233 - RNA, 32 nt, Homo Sapiens
gaaacuccgucucuacuaaaaauagaaaaauu

SEQ ID NO: 116234 - RNA, 32 nt, Homo Sapiens
cccacggaaggggaccacagacaucgccgugu

SEQ ID NO: 116235 - RNA, 32 nt, Homo Sapiens
uuuaagaggugauucagaaugauaguuucgug

SEQ ID NO: 116236 - RNA, 32 nt, Homo Sapiens
agugagggaaagggccuggccggcaugcacag

SEQ ID NO: 116237 - RNA, 32 nt, Homo Sapiens
uuuaauuguuuuaaauuuuucauaggggaguu

SEQ ID NO: 116238 - RNA, 31 nt, Homo Sapiens
cucccuacccacagcaccugaguuaaaaagu

SEQ ID NO: 116239 - RNA, 32 nt, Homo Sapiens
ccuccagagauggccccuccucaccugggacg

SEQ ID NO: 116240 - RNA, 32 nt, Homo Sapiens
aagacauuuauuacacuuuuuaccaaagggag

SEQ ID NO: 116241 - RNA, 32 nt, Homo Sapiens
aggauggcguuggccuggggugggggugcucg

SEQ ID NO: 116242 - RNA, 32 nt, Homo Sapiens
accugcagcucugaagacccaggccucaccuc

SEQ ID NO: 116243 - RNA, 32 nt, Homo Sapiens
cccuugcccuccagagugggguugccugggac

SEQ ID NO: 116244 - RNA, 32 nt, Homo Sapiens
uuuggucauaauaucaugguucaauuaaacgg

SEQ ID NO: 116245 - RNA, 31 nt, Homo Sapiens
gagagcaagguagaggaaggagucccagcuu

SEQ ID NO: 116246 - RNA, 32 nt, Homo Sapiens
acuggggcagggcucuccuuguguguuuuugg

SEQ ID NO: 116247 - RNA, 32 nt, Homo Sapiens
gggccggcgggggcuggggaggggguaaguuu

SEQ ID NO: 116248 - RNA, 32 nt, Homo Sapiens
uauucaaaauaucaaacuuaugagucaccuag

SEQ ID NO: 116249 - RNA, 32 nt, Homo Sapiens
auucucagauuauacauauguuauaaaauaug

SEQ ID NO: 116250 - RNA, 32 nt, Homo Sapiens
uuaguggagacgggauuucaccauguuggcca

SEQ ID NO: 116251 - RNA, 32 nt, Homo Sapiens
auuuaggggcuuugguucuuacagauuuucaa

SEQ ID NO: 116252 - RNA, 32 nt, Homo Sapiens
gcccgcgccgcgccgcucuuucuccgacagcu

SEQ ID NO: 116253 - RNA, 32 nt, Homo Sapiens
ucgguuugcauucuugugcuuuugggaggugc

SEQ ID NO: 116254 - RNA, 32 nt, Homo Sapiens
agcacgccucccagcccuggccugcagggugg

SEQ ID NO: 116255 - RNA, 32 nt, Homo Sapiens
gaagcuuuaagugcauaugguacaggauaaag

SEQ ID NO: 116256 - RNA, 32 nt, Homo Sapiens
gcucgggguaccggaccuguacaugagcucag

SEQ ID NO: 116257 - RNA, 32 nt, Homo Sapiens
caagaggacgaggaucuggggguggggaacug

SEQ ID NO: 116258 - RNA, 32 nt, Homo Sapiens
uuugcacuuuugcuccaggccacuugugugug

SEQ ID NO: 116259 - RNA, 32 nt, Homo Sapiens
guagucugugucucugcggaugagaugacagc

SEQ ID NO: 116260 - RNA, 32 nt, Homo Sapiens
gacgggccgcggccgccuccaugaagcggaaa

SEQ ID NO: 116261 - RNA, 32 nt, Homo Sapiens
agguugauugaugugggacagcagccacaaug

SEQ ID NO: 116262 - RNA, 32 nt, Homo Sapiens
ggcugggcgugguggcucaugccuguaaucuc

SEQ ID NO: 116263 - RNA, 32 nt, Homo Sapiens
cuggaggaaggccauaugaaugcauugauugu

SEQ ID NO: 116264 - RNA, 32 nt, Homo Sapiens
uuaaaugauaacguaugugaaaacacuaaaug

SEQ ID NO: 116265 - RNA, 32 nt, Homo Sapiens
uuugugcucagaaagaaauugucagagcccag

SEQ ID NO: 116266 - RNA, 32 nt, Homo Sapiens
acccucugaacaccuuuuucugauggguaacu

SEQ ID NO: 116267 - RNA, 32 nt, Homo Sapiens
ccuuuauaaauuauguuauaauuucauguaau

SEQ ID NO: 116268 - RNA, 32 nt, Homo Sapiens
gcuuggaaacgcuuccucucuucuucuguucu

SEQ ID NO: 116269 - RNA, 32 nt, Homo Sapiens
ugucugaggauaccuuccaucucaaccuaccu

SEQ ID NO: 116270 - RNA, 32 nt, Homo Sapiens
gucgccgccgcggcuccuggaggucgguugcg

SEQ ID NO: 116271 - RNA, 32 nt, Homo Sapiens
uaagacaaaugcauauauacacugguacaaau

SEQ ID NO: 116272 - RNA, 32 nt, Homo Sapiens
gaucuugcggauccggccguacuuguagaaaa

SEQ ID NO: 116273 - RNA, 32 nt, Homo Sapiens
ugguucuuuccacagccuaguuuugauugacu

SEQ ID NO: 116274 - RNA, 32 nt, Homo Sapiens
acagucaugaacaacacugagaaacgucaaag

SEQ ID NO: 116275 - RNA, 32 nt, Homo Sapiens
acacuuuuucuuccgcaggggcgggagccccu

SEQ ID NO: 116276 - RNA, 32 nt, Homo Sapiens
gacuggcagggccgagccagcauuccacccca

SEQ ID NO: 116277 - RNA, 32 nt, Homo Sapiens
ccggaguccaguggcugaccgccuugcuggag

SEQ ID NO: 116278 - RNA, 32 nt, Homo Sapiens
aucuguauguucuuguauuguugucagugcau

SEQ ID NO: 116279 - RNA, 32 nt, Homo Sapiens
agggaauucaaauugaauggaaaaggggccug

SEQ ID NO: 116280 - RNA, 32 nt, Homo Sapiens
ucuccaugccagcagggugccuuuuauaucag

SEQ ID NO: 116281 - RNA, 32 nt, Homo Sapiens
cacuuacuugaugauuuuuaacuuuuuauuuc

SEQ ID NO: 116282 - RNA, 32 nt, Homo Sapiens
caggcucgccuggucauguguccuucacucuc

SEQ ID NO: 116283 - RNA, 32 nt, Homo Sapiens
cggguuucacggugaagaaguacuaacgcauu

SEQ ID NO: 116284 - RNA, 32 nt, Homo Sapiens
gcuuuuuuaggaccaaagguuauauuuccuua

SEQ ID NO: 116285 - RNA, 32 nt, Homo Sapiens
accucccugccagcugggcaaccuucccacug

SEQ ID NO: 116286 - RNA, 32 nt, Homo Sapiens
ucuuggagagagaauaaaguuuguauuuaagu

SEQ ID NO: 116287 - RNA, 32 nt, Homo Sapiens
ugggaacgccgugcuccauggcguggagggca

SEQ ID NO: 116288 - RNA, 32 nt, Homo Sapiens
aaugacccuagacccucuguccugcagaguca

SEQ ID NO: 116289 - RNA, 32 nt, Homo Sapiens
acuggggucuccuggcgacgaccauggcgggg

SEQ ID NO: 116290 - RNA, 32 nt, Homo Sapiens
caggcuucugccgccccccucaucuccacccu

SEQ ID NO: 116291 - RNA, 32 nt, Homo Sapiens
aaggacauuucccuccagguuaucugaaagaa

SEQ ID NO: 116292 - RNA, 32 nt, Homo Sapiens
aaaagaacguucgacugaacuguaaagucuaa

SEQ ID NO: 116293 - RNA, 32 nt, Homo Sapiens
ugggcuguauauaaaaauauuaaagagaaaca

SEQ ID NO: 116294 - RNA, 32 nt, Homo Sapiens
aaccuguuugaaaaauguguuaacuguuacau

SEQ ID NO: 116295 - RNA, 32 nt, Homo Sapiens
aucaggaaaaauaacuaauggauacuuagggu

SEQ ID NO: 116296 - RNA, 32 nt, Homo Sapiens
uguuuuggaauguucagaaauaaagacucuau

SEQ ID NO: 116297 - RNA, 30 nt, Homo Sapiens
acagccggagugggcgggggucccgaugca

SEQ ID NO: 116298 - RNA, 32 nt, Homo Sapiens
ggcacgaggcgcuagguagagcgccgggaccu

SEQ ID NO: 116299 - RNA, 32 nt, Homo Sapiens
uucagguuuaguuuaccuggcuuaccagggga

SEQ ID NO: 116300 - RNA, 32 nt, Homo Sapiens
cucuuuaaauguugaaagauguuagguuguca

SEQ ID NO: 116301 - RNA, 32 nt, Homo Sapiens
cucggugcuguuggguaggggcccugccagga

SEQ ID NO: 116302 - RNA, 32 nt, Homo Sapiens
gaaauucauuuucucuagugccuuucuagcac

SEQ ID NO: 116303 - RNA, 32 nt, Homo Sapiens
aagaggaagaggaggaaggcgacggcaacagu

SEQ ID NO: 116304 - RNA, 32 nt, Homo Sapiens
uuccaaacagagcuaauucauuaaggcagcuu

SEQ ID NO: 116305 - RNA, 32 nt, Homo Sapiens
guguuguuuacuucuucaguuuuuaaaauaag

SEQ ID NO: 116306 - RNA, 31 nt, Homo Sapiens
augacucauuugauuucuaauuucaaugaag

SEQ ID NO: 116307 - RNA, 32 nt, Homo Sapiens
uaaucuacaaauagacaacguuggcauguucu

SEQ ID NO: 116308 - RNA, 32 nt, Homo Sapiens
ccucccggccuggcuugcugccugcaggccuc

SEQ ID NO: 116309 - RNA, 32 nt, Homo Sapiens
ggcagcauucuaugaucccauggcucucacau

SEQ ID NO: 116310 - RNA, 28 nt, Homo Sapiens
uaggaugaauugaucauuauaaagauuu

SEQ ID NO: 116311 - RNA, 32 nt, Homo Sapiens
uagugagcacacccagcaaaguccacccagga

SEQ ID NO: 116312 - RNA, 32 nt, Homo Sapiens
uucuuucuuucugcaguuucucagauaaagua

SEQ ID NO: 116313 - RNA, 32 nt, Homo Sapiens
gccuccagggugccuccaccugcacaaccguc

SEQ ID NO: 116314 - RNA, 32 nt, Homo Sapiens
caggagugugggggcauuuggggggugaagug

SEQ ID NO: 116315 - RNA, 32 nt, Homo Sapiens
uuuagaugugcaauaaugcaaauaucaguagc

SEQ ID NO: 116316 - RNA, 32 nt, Homo Sapiens
guagauuaauuguuguaacauugucuuucuuu

SEQ ID NO: 116317 - RNA, 32 nt, Homo Sapiens
uacaaccacggcugagaaccacugccgcugac

SEQ ID NO: 116318 - RNA, 32 nt, Homo Sapiens
cgugagcagcgggcacacgggcagccacgaaa

SEQ ID NO: 116319 - RNA, 32 nt, Homo Sapiens
gggaggcuggguaguuaccggaggaggcagag

SEQ ID NO: 116320 - RNA, 32 nt, Homo Sapiens
gcggggcccacuaggcggggcggggguuggga

SEQ ID NO: 116321 - RNA, 32 nt, Homo Sapiens
agcgaguggaccagcaccaggggcucucuaga

SEQ ID NO: 116322 - RNA, 32 nt, Homo Sapiens
accgcggcggccucggcgccauggagcccccg

SEQ ID NO: 116323 - RNA, 32 nt, Homo Sapiens
acuauucccacuuucauucaaucaaccugcac

SEQ ID NO: 116324 - RNA, 32 nt, Homo Sapiens
ccugggcugggaauaccucacccacgcccagu

SEQ ID NO: 116325 - RNA, 32 nt, Homo Sapiens
ggauugagaaaaccuauauccauucuuuauau

SEQ ID NO: 116326 - RNA, 32 nt, Homo Sapiens
aauccucacgcaaguagauacauguucaucca

SEQ ID NO: 116327 - RNA, 32 nt, Homo Sapiens
ccaggccgcggcccaguggcgccggcgcacac

SEQ ID NO: 116328 - RNA, 32 nt, Homo Sapiens
ugguucucuuaugauugcucuccucccgcuuc

SEQ ID NO: 116329 - RNA, 32 nt, Homo Sapiens
ugccuggccugccugggggaaguggggagcau

SEQ ID NO: 116330 - RNA, 32 nt, Homo Sapiens
ccugcccaccccgugcccccagccagcuggcu

SEQ ID NO: 116331 - RNA, 32 nt, Homo Sapiens
acagacagguuaacagaagcuacugaagucua

SEQ ID NO: 116332 - RNA, 31 nt, Homo Sapiens
uuuuggagcaauuguaagugguguagugcuu

SEQ ID NO: 116333 - RNA, 32 nt, Homo Sapiens
cgauggcugggaccugcgcgacgcugcuguag

SEQ ID NO: 116334 - RNA, 32 nt, Homo Sapiens
uggccgccagcuuuguggcaggugccguggag

SEQ ID NO: 116335 - RNA, 32 nt, Homo Sapiens
aaagggcgcuuuaugcagacacagccccucaa

SEQ ID NO: 116336 - RNA, 32 nt, Homo Sapiens
gcacacccaagcccgggccuccggcacacucu

SEQ ID NO: 116337 - RNA, 32 nt, Homo Sapiens
guuuuuuuacacauauuaacuuaauaaaugua

SEQ ID NO: 116338 - RNA, 32 nt, Homo Sapiens
cuacaucuggaacagaaaggagacugugcugc

SEQ ID NO: 116339 - RNA, 32 nt, Homo Sapiens
ggcugggggcaguuaaaaagccgaaaagguac

SEQ ID NO: 116340 - RNA, 32 nt, Homo Sapiens
gcgggcgcgacccaucccgcuggcgcuccccg

SEQ ID NO: 116341 - RNA, 32 nt, Homo Sapiens
uuuaaaauuaugcucuguaacucuguacugcu

SEQ ID NO: 116342 - RNA, 32 nt, Homo Sapiens
ugcaaguaugugucccuggccacccugaagaa

SEQ ID NO: 116343 - RNA, 32 nt, Homo Sapiens
cccauugugucugaucccacaauuacucccag

SEQ ID NO: 116344 - RNA, 32 nt, Homo Sapiens
aagcccucauugacagaggaggaaacaggcca

SEQ ID NO: 116345 - RNA, 32 nt, Homo Sapiens
ggagcugcagcgccuccuggacacggccuucg

SEQ ID NO: 116346 - RNA, 32 nt, Homo Sapiens
cuucguuagaaaaguaaaaaugcugaagaagc

SEQ ID NO: 116347 - RNA, 32 nt, Homo Sapiens
aucuauccaccuggcuuucuccuuauuguuua

SEQ ID NO: 116348 - RNA, 32 nt, Homo Sapiens
ccauuggaaauaauucacuccagggaaugguu

SEQ ID NO: 116349 - RNA, 32 nt, Homo Sapiens
acucuuuuggaugcuggggccuuuuucugucu

SEQ ID NO: 116350 - RNA, 32 nt, Homo Sapiens
aggcuggagugcaaugccgugaucuccgcuca

SEQ ID NO: 116351 - RNA, 32 nt, Homo Sapiens
uccaauugucuccugcuagcaauaugugccac

SEQ ID NO: 116352 - RNA, 32 nt, Homo Sapiens
acugcagaaaucagaauauuccaaggccugug

SEQ ID NO: 116353 - RNA, 32 nt, Homo Sapiens
uuugcagaugagaaaacagaccuagaaccgug

SEQ ID NO: 116354 - RNA, 32 nt, Homo Sapiens
uuuacagugggauguucauauggccucuauuu

SEQ ID NO: 116355 - RNA, 32 nt, Homo Sapiens
ccuauuaaacgaauuuuacuaucuucccuaac

SEQ ID NO: 116356 - RNA, 32 nt, Homo Sapiens
gaggggugaaaaagaaaacaaacaaacaacaa

SEQ ID NO: 116357 - RNA, 32 nt, Homo Sapiens
gacagcuuguauuugcaguauuucauauuuau

SEQ ID NO: 116358 - RNA, 32 nt, Homo Sapiens
agccuggccucgccgcucgggagcuuugccau

SEQ ID NO: 116359 - RNA, 32 nt, Homo Sapiens
cucgucaugggggcgcggugggugcugucucg

SEQ ID NO: 116360 - RNA, 32 nt, Homo Sapiens
guggguaagcaccaccuggucucucagcaaac

SEQ ID NO: 116361 - RNA, 32 nt, Homo Sapiens
cagagccuggggacuuggccaggucucggugu

SEQ ID NO: 116362 - RNA, 32 nt, Homo Sapiens
cauaauauucucccccucccccaucuccaguc

SEQ ID NO: 116363 - RNA, 32 nt, Homo Sapiens
uuuguuagcuaauaauaguauuuucuuuuagu

SEQ ID NO: 116364 - RNA, 32 nt, Homo Sapiens
aguacagaaaguuauccaaaacaaaaguuggu

SEQ ID NO: 116365 - RNA, 32 nt, Homo Sapiens
agggagacgcggcgccgcugcugcgcugggcc

SEQ ID NO: 116366 - RNA, 32 nt, Homo Sapiens
gauaaacaacuucaaaaaaguuucaggauaca

SEQ ID NO: 116367 - RNA, 32 nt, Homo Sapiens
uuggauuguacaaauuacugcaaauguauaca

SEQ ID NO: 116368 - RNA, 32 nt, Homo Sapiens
uccaauuguuaucaaaaaguuacaugaaaauu

SEQ ID NO: 116369 - RNA, 32 nt, Homo Sapiens
uuugaaguuugcuuucaguuuacuaucaggga

SEQ ID NO: 116370 - RNA, 32 nt, Homo Sapiens
gcaggcccgcggcuguuuccccucgguccgca

SEQ ID NO: 116371 - RNA, 32 nt, Homo Sapiens
uauugccuuaaaccuccuuguuuuagacacac

SEQ ID NO: 116372 - RNA, 32 nt, Homo Sapiens
acaugccguuucaugucaccugcuacagcucu

SEQ ID NO: 116373 - RNA, 32 nt, Homo Sapiens
gccaacgcugacccuccugacaguggcaggac

SEQ ID NO: 116374 - RNA, 32 nt, Homo Sapiens
cacagccacccguggggugcugcccuuaugcc

SEQ ID NO: 116375 - RNA, 32 nt, Homo Sapiens
cuccccgccaaacaggcguaucggugcguucc

SEQ ID NO: 116376 - RNA, 32 nt, Homo Sapiens
agugugacguuucaguuaauagugguggucuu

SEQ ID NO: 116377 - RNA, 32 nt, Homo Sapiens
uuuggaaguguucuuugauauuacaguucuuu

SEQ ID NO: 116378 - RNA, 32 nt, Homo Sapiens
gggcccugcucgcaugccgccccgcccucccc

SEQ ID NO: 116379 - RNA, 32 nt, Homo Sapiens
cuggcaccuuuaccuagaaguacucugccaug

SEQ ID NO: 116380 - RNA, 32 nt, Homo Sapiens
cucagcucugguuuccucucccaggcucaccc

SEQ ID NO: 116381 - RNA, 32 nt, Homo Sapiens
ccgcgccgucggccauggccaagcgcuccagg

SEQ ID NO: 116382 - RNA, 32 nt, Homo Sapiens
uggucuuuacuuuuugccaaaaucaacauaua

SEQ ID NO: 116383 - RNA, 32 nt, Homo Sapiens
uccuaaugucaagcauauuaccauaguaugua

SEQ ID NO: 116384 - RNA, 32 nt, Homo Sapiens
uuccaaggacagacggcuguauggaaaggccg

SEQ ID NO: 116385 - RNA, 32 nt, Homo Sapiens
uccaucauuguacuaacagaagucuguacuau

SEQ ID NO: 116386 - RNA, 32 nt, Homo Sapiens
cugugccaauacugccuacugugcuagccuga

SEQ ID NO: 116387 - RNA, 32 nt, Homo Sapiens
cgucccugggaggggagggaggcgcgccugga

SEQ ID NO: 116388 - RNA, 32 nt, Homo Sapiens
ucauccagccuccggugcuguaaaacgcaggc

SEQ ID NO: 116389 - RNA, 32 nt, Homo Sapiens
agacuggcuucucagcugaggaaugcauuucc

SEQ ID NO: 116390 - RNA, 32 nt, Homo Sapiens
ucuugaucuauuucuucuguuuugagagccuc

SEQ ID NO: 116391 - RNA, 32 nt, Homo Sapiens
ucacaguguuaaaagaagacaugcugaaaugu

SEQ ID NO: 116392 - RNA, 32 nt, Homo Sapiens
ccggaguccccgccucucuccuccgcccacag

SEQ ID NO: 116393 - RNA, 32 nt, Homo Sapiens
cagccuggaagaccgcuuggcagcccuucugg

SEQ ID NO: 116394 - RNA, 32 nt, Homo Sapiens
agugguuugaauuauuuuuauucuucauaagu

SEQ ID NO: 116395 - RNA, 32 nt, Homo Sapiens
gccaggcaccuuuggguccaaccugcucaccc

SEQ ID NO: 116396 - RNA, 32 nt, Homo Sapiens
aaaagcuaccagccucacggagaaggcgcagu

SEQ ID NO: 116397 - RNA, 32 nt, Homo Sapiens
acgagcgccuccuggggaccggccccaccgcc

SEQ ID NO: 116398 - RNA, 32 nt, Homo Sapiens
ugaauuuugugcuuuuugauuggaguccuuug

SEQ ID NO: 116399 - RNA, 32 nt, Homo Sapiens
uucagcauucacuuacuagcuguaugaucuug

SEQ ID NO: 116400 - RNA, 32 nt, Homo Sapiens
ugugccggugccuggagcugcccacaccacug

SEQ ID NO: 116401 - RNA, 32 nt, Homo Sapiens
gaagcccugaggcgucgaggccgcccgagggg

SEQ ID NO: 116402 - RNA, 32 nt, Homo Sapiens
auugugauuaggaugacugauacagguuuagc

SEQ ID NO: 116403 - RNA, 32 nt, Homo Sapiens
cuacauugcuucauuacuuucauuuuccgaca

SEQ ID NO: 116404 - RNA, 32 nt, Homo Sapiens
guacagacuuguccaaucaugugugugguucc

SEQ ID NO: 116405 - RNA, 32 nt, Homo Sapiens
augaggguaaaguuaaguugagauaguuuuca

SEQ ID NO: 116406 - RNA, 32 nt, Homo Sapiens
gccuuucauucauuaccucucuggagacuucu

SEQ ID NO: 116407 - RNA, 32 nt, Homo Sapiens
ugguguagacugcuguaugcaguuggaaagga

SEQ ID NO: 116408 - RNA, 32 nt, Homo Sapiens
uaaaaggggcaagaaaaguaacucaucaucuc

SEQ ID NO: 116409 - RNA, 32 nt, Homo Sapiens
aacuugaacaaauggacaauaugucuauuacg

SEQ ID NO: 116410 - RNA, 32 nt, Homo Sapiens
gaagauauuuuuccugucauugaugagauaua

SEQ ID NO: 116411 - RNA, 32 nt, Homo Sapiens
aaagugguacaccuuaaagcuuuuauaugacu

SEQ ID NO: 116412 - RNA, 32 nt, Homo Sapiens
gucuggauguccacgcagaagccugcugcacg

SEQ ID NO: 116413 - RNA, 32 nt, Homo Sapiens
gaggcauauauaugacucucuugcuuccacuc

SEQ ID NO: 116414 - RNA, 32 nt, Homo Sapiens
ucuuggggcaggccagcucugauguggaugaa

SEQ ID NO: 116415 - RNA, 32 nt, Homo Sapiens
caucucaaaaauaaugcauaaacuauuuaaag

SEQ ID NO: 116416 - RNA, 32 nt, Homo Sapiens
aacccaggcuccuccucgccccggccuccggg

SEQ ID NO: 116417 - RNA, 32 nt, Homo Sapiens
ugucuccugcaaugagcaaggaauuaugucuc

SEQ ID NO: 116418 - RNA, 32 nt, Homo Sapiens
ggaagauuuacuauagcuaagagaaaacugca

SEQ ID NO: 116419 - RNA, 32 nt, Homo Sapiens
ucauagaaaaucaaucuggugcuaaugguugg

SEQ ID NO: 116420 - RNA, 32 nt, Homo Sapiens
acacagcccuccgagguucacacugcuccucc

SEQ ID NO: 116421 - RNA, 32 nt, Homo Sapiens
aaugaaaaagguuuuuugcccucccccuugug

SEQ ID NO: 116422 - RNA, 32 nt, Homo Sapiens
acggugugggaaccaaagucccugcccugcuc

SEQ ID NO: 116423 - RNA, 32 nt, Homo Sapiens
gaggucuucuggacucuagucugugggguacg

SEQ ID NO: 116424 - RNA, 32 nt, Homo Sapiens
agaaauuaaaagacagaacaaaacuguggauc

SEQ ID NO: 116425 - RNA, 27 nt, Homo Sapiens
ccggucugcuccuucagccuccuugcu

SEQ ID NO: 116426 - RNA, 32 nt, Homo Sapiens
aagaaauaucuaaaugaagccgaacacuugau

SEQ ID NO: 116427 - RNA, 32 nt, Homo Sapiens
gucacccgcacacagcgggauggcaucuccga

SEQ ID NO: 116428 - RNA, 30 nt, Homo Sapiens
cuguaaugaauguaggacgaaaguguuugg

SEQ ID NO: 116429 - RNA, 32 nt, Homo Sapiens
uguggcaaagccuuuuaccaguccucaacucu

SEQ ID NO: 116430 - RNA, 32 nt, Homo Sapiens
aguaaagucuucugcucccacucccagccaac

SEQ ID NO: 116431 - RNA, 32 nt, Homo Sapiens
cuuacuuaucucuguugcuuucugggguccua

SEQ ID NO: 116432 - RNA, 32 nt, Homo Sapiens
agagaucccagagucaaggagggcgccugagu

SEQ ID NO: 116433 - RNA, 32 nt, Homo Sapiens
aaaugaaugaaugcugguuguauuuuauuuga

SEQ ID NO: 116434 - RNA, 32 nt, Homo Sapiens
ugcucaacgcucugugguuugucagaccugca

SEQ ID NO: 116435 - RNA, 32 nt, Homo Sapiens
uauacauguauuaugaguuauaggaaaaacau

SEQ ID NO: 116436 - RNA, 32 nt, Homo Sapiens
gcagccucacacgcgagcgccacgcgaggcuc

SEQ ID NO: 116437 - RNA, 32 nt, Homo Sapiens
ggagacaggaggaggugagauggcucgccucu

SEQ ID NO: 116438 - RNA, 30 nt, Homo Sapiens
cugucccaugcucugcugagcacgguggug

SEQ ID NO: 116439 - RNA, 32 nt, Homo Sapiens
gaugguuagucaccugccccagcacucacacc

SEQ ID NO: 116440 - RNA, 32 nt, Homo Sapiens
ccacgcguggcuaauguuuuuguauuuuuagu

SEQ ID NO: 116441 - RNA, 32 nt, Homo Sapiens
ugugugugcugggagagucagaguggauguag

SEQ ID NO: 116442 - RNA, 32 nt, Homo Sapiens
ucgguugccuacccuguagauauguggaugaa

SEQ ID NO: 116443 - RNA, 32 nt, Homo Sapiens
uuuuaagauaaugauugcuuuucucuguuuau

SEQ ID NO: 116444 - RNA, 32 nt, Homo Sapiens
gacaggcuguccaagguagaaacuguacauag

SEQ ID NO: 116445 - RNA, 32 nt, Homo Sapiens
cugcccagggccuggagcccaagcccuguguu

SEQ ID NO: 116446 - RNA, 32 nt, Homo Sapiens
uggcuagaaaaaacccacugcuguacucugua

SEQ ID NO: 116447 - RNA, 32 nt, Homo Sapiens
acuccagcucguccucgccgcgccggugccac

SEQ ID NO: 116448 - RNA, 32 nt, Homo Sapiens
ugagcgaagauaaccguaauaaauaguaaccu

SEQ ID NO: 116449 - RNA, 32 nt, Homo Sapiens
ugcccaguguaaagcuuguagucuuuaaaagg

SEQ ID NO: 116450 - RNA, 32 nt, Homo Sapiens
guggggcgcugccgggcuccccggcacuagcg

SEQ ID NO: 116451 - RNA, 32 nt, Homo Sapiens
ggauuggaguuuccucaagaaauauccuaguu

SEQ ID NO: 116452 - RNA, 32 nt, Homo Sapiens
uuauauugauauauuucuaaauuagugccccu

SEQ ID NO: 116453 - RNA, 32 nt, Homo Sapiens
gggggccccccuccuugcucugcaggcaccuu

SEQ ID NO: 116454 - RNA, 32 nt, Homo Sapiens
cauacacugaugccuggcagcuagagcaaaug

SEQ ID NO: 116455 - RNA, 32 nt, Homo Sapiens
augaauagcuaaugcaugugggguuuaauacc

SEQ ID NO: 116456 - RNA, 32 nt, Homo Sapiens
ugugacgcagagauugugcugcugugcuucau

SEQ ID NO: 116457 - RNA, 32 nt, Homo Sapiens
guaugaggagaccagcagcaaaacauaaccau

SEQ ID NO: 116458 - RNA, 32 nt, Homo Sapiens
uuuauugcugaauaauguucauuguauggaua

SEQ ID NO: 116459 - RNA, 32 nt, Homo Sapiens
uuuucuuuuucuuuuucuuuuuuuuuuuuuac

SEQ ID NO: 116460 - RNA, 32 nt, Homo Sapiens
gugacauguggcauaugcugccucgaauuggg

SEQ ID NO: 116461 - RNA, 32 nt, Homo Sapiens
ccagacgggccgcgaaggcggggugucgccug

SEQ ID NO: 116462 - RNA, 32 nt, Homo Sapiens
cggucggugcccggcgcgccgggccaugcagc

SEQ ID NO: 116463 - RNA, 32 nt, Homo Sapiens
agcuaaaugaauugggcuauaaacaguuugaa

SEQ ID NO: 116464 - RNA, 32 nt, Homo Sapiens
ggacauugguuuccaaaucucccuuucucuuc

SEQ ID NO: 116465 - RNA, 30 nt, Homo Sapiens
gaauuccgcaggcgcggcaguucagcuggc

SEQ ID NO: 116466 - RNA, 29 nt, Homo Sapiens
aaaaccucuauccagacaagacaaaauaa

SEQ ID NO: 116467 - RNA, 32 nt, Homo Sapiens
caugucagucucaucgucccaaggcuugaaau

SEQ ID NO: 116468 - RNA, 32 nt, Homo Sapiens
guccucgacggcccggccccggcuccgcagga

SEQ ID NO: 116469 - RNA, 32 nt, Homo Sapiens
ggacuauuuccaccacccccaguuagcaccau

SEQ ID NO: 116470 - RNA, 32 nt, Homo Sapiens
cuuuuuaaaaauuuuaagaaguuuuccuugug

SEQ ID NO: 116471 - RNA, 32 nt, Homo Sapiens
agcacuaaggaccccccuccccaccccacccc

SEQ ID NO: 116472 - RNA, 32 nt, Homo Sapiens
ucugaaauguuacaaaaauaaacuauaaaaca

SEQ ID NO: 116473 - RNA, 32 nt, Homo Sapiens
auuccuggggaacuugaacggcagcuuuugca

SEQ ID NO: 116474 - RNA, 32 nt, Homo Sapiens
cccuggcgccccagcccagugccccccgaagg

SEQ ID NO: 116475 - RNA, 32 nt, Homo Sapiens
uuucucugaaguacaagaauuucaggugauuu

SEQ ID NO: 116476 - RNA, 32 nt, Homo Sapiens
ccagcgcgcuccccgcuucugcuuggcuuucc

SEQ ID NO: 116477 - RNA, 32 nt, Homo Sapiens
uuugaacacauguauuuauaaaacagagcuag

SEQ ID NO: 116478 - RNA, 32 nt, Homo Sapiens
acucacagaaucauaaucauggcuaaauauuu

SEQ ID NO: 116479 - RNA, 32 nt, Homo Sapiens
caaaggaugcaaacaucaaaaaaaaaaaaaaa

SEQ ID NO: 116480 - RNA, 32 nt, Homo Sapiens
ucaacucacaguuaggggacugggcguggcug

SEQ ID NO: 116481 - RNA, 32 nt, Homo Sapiens
ccugugcuugacacagaagagaauauacuugu

SEQ ID NO: 116482 - RNA, 32 nt, Homo Sapiens
auguuccucccuccccuuucaaccauggaccu

SEQ ID NO: 116483 - RNA, 32 nt, Homo Sapiens
gggaaaugggcauacaguacugagaaauggga

SEQ ID NO: 116484 - RNA, 32 nt, Homo Sapiens
agcucuguggccauggauauguuccagaaggu

SEQ ID NO: 116485 - RNA, 32 nt, Homo Sapiens
gcgucccauuuucuccccuggccucuuacuug

SEQ ID NO: 116486 - RNA, 32 nt, Homo Sapiens
ccccaaaucccuccccacguggggaugagaac

SEQ ID NO: 116487 - RNA, 32 nt, Homo Sapiens
uuguugccgucaugucggcugcgauugcagcu

SEQ ID NO: 116488 - RNA, 29 nt, Homo Sapiens
acagaacuauguauguauuuaggcuauuc

SEQ ID NO: 116489 - RNA, 32 nt, Homo Sapiens
cccucacccuccccuccggcagccucucccau

SEQ ID NO: 116490 - RNA, 32 nt, Homo Sapiens
gcaggagagacaauuucuagaauuuagauugc

SEQ ID NO: 116491 - RNA, 32 nt, Homo Sapiens
gaauaccagucuuuuaacacuccgcuacagaa

SEQ ID NO: 116492 - RNA, 32 nt, Homo Sapiens
gaccauccauucuccucaguggcuucuccagg

SEQ ID NO: 116493 - RNA, 31 nt, Homo Sapiens
gcuggcggggcgguguaaagcggcguuacuu

SEQ ID NO: 116494 - RNA, 32 nt, Homo Sapiens
cgccagauccuugggcaccuggcacucaagca

SEQ ID NO: 116495 - RNA, 32 nt, Homo Sapiens
cguccucggcccgggugcccugcccccgucca

SEQ ID NO: 116496 - RNA, 32 nt, Homo Sapiens
aucugcacccagcagagcgccggcgggguacg

SEQ ID NO: 116497 - RNA, 32 nt, Homo Sapiens
uguguguauauauacagagaaauguacauaug

SEQ ID NO: 116498 - RNA, 32 nt, Homo Sapiens
uggaggcagggccaucuuugcagcucagucua

SEQ ID NO: 116499 - RNA, 32 nt, Homo Sapiens
cuucuuuuuauacuuuauauuuauugagaugu

SEQ ID NO: 116500 - RNA, 32 nt, Homo Sapiens
aacaucagcuugaccaguauaaaauuacagug

SEQ ID NO: 116501 - RNA, 32 nt, Homo Sapiens
guacaauugaagagggacccacagucuugcug

SEQ ID NO: 116502 - RNA, 32 nt, Homo Sapiens
agagucuucccucagcauauuuuacgauagag

SEQ ID NO: 116503 - RNA, 32 nt, Homo Sapiens
agucaggaaaggaaaagaucagucacaauuca

SEQ ID NO: 116504 - RNA, 32 nt, Homo Sapiens
gagaggucaagcgagaagcgugcgggaagcac

SEQ ID NO: 116505 - RNA, 32 nt, Homo Sapiens
ccgagggcgggugaguggagagcagagccagg

SEQ ID NO: 116506 - RNA, 32 nt, Homo Sapiens
cggccgccgcgugcgcgagccgggguugcagc

SEQ ID NO: 116507 - RNA, 32 nt, Homo Sapiens
auguguguggagggauggggaauagaacauug

SEQ ID NO: 116508 - RNA, 32 nt, Homo Sapiens
acauccggggccagcuccggcguguguucagu

SEQ ID NO: 116509 - RNA, 32 nt, Homo Sapiens
ggcgcucgcccaggacuccccgggccucgggc

SEQ ID NO: 116510 - RNA, 32 nt, Homo Sapiens
aaaucuucaauaggaugcaaagaucaaugcaa

SEQ ID NO: 116511 - RNA, 32 nt, Homo Sapiens
ccugagaccagggcuuccauggagcgggacac

SEQ ID NO: 116512 - RNA, 32 nt, Homo Sapiens
aacaauauugcuccaugaugacuuaguacaaa

SEQ ID NO: 116513 - RNA, 32 nt, Homo Sapiens
cugggaaagggaggcugggugagcagagacag

SEQ ID NO: 116514 - RNA, 32 nt, Homo Sapiens
uaacucccuacuuuuccaaagugaauuuugua

SEQ ID NO: 116515 - RNA, 30 nt, Homo Sapiens
gccgcuccuggaggcggcggcgggagcgca

SEQ ID NO: 116516 - RNA, 32 nt, Homo Sapiens
caguggccaccugguacaccacacuggagccg

SEQ ID NO: 116517 - RNA, 32 nt, Homo Sapiens
ccaugaagcugaugggugagugucuuggccca

SEQ ID NO: 116518 - RNA, 32 nt, Homo Sapiens
caacaaaaaaagacaaugaaaaaaaaaacguc

SEQ ID NO: 116519 - RNA, 32 nt, Homo Sapiens
uugaaaaaaugaugaaguuugacuagcuaacc

SEQ ID NO: 116520 - RNA, 32 nt, Homo Sapiens
cugcccugcucacaggagcccgggcucuagca

SEQ ID NO: 116521 - RNA, 32 nt, Homo Sapiens
gugacccucccucugccuccuccaugaagguc

SEQ ID NO: 116522 - RNA, 32 nt, Homo Sapiens
ucucuucugccccucccugacauugaggacug

SEQ ID NO: 116523 - RNA, 32 nt, Homo Sapiens
aaacuguccaugggaaggcugaauugagugac

SEQ ID NO: 116524 - RNA, 32 nt, Homo Sapiens
uguucauuuaggaugcuucuaauucagccacu

SEQ ID NO: 116525 - RNA, 32 nt, Homo Sapiens
ggucgggcgagcgggcggcaacgcugcccggc

SEQ ID NO: 116526 - RNA, 32 nt, Homo Sapiens
cuccaaguuccacaggucugcuaccacaggcc

SEQ ID NO: 116527 - RNA, 32 nt, Homo Sapiens
ugacauuucaucuauuuaagauaauuauuauu

SEQ ID NO: 116528 - RNA, 32 nt, Homo Sapiens
ucaccgauuccacaguacuugcggcaagaacg

SEQ ID NO: 116529 - RNA, 32 nt, Homo Sapiens
cuuaacccauuaucuuccuguuucuggaauuu

SEQ ID NO: 116530 - RNA, 32 nt, Homo Sapiens
gggugcagacugaguucuagccaguggguccc

SEQ ID NO: 116531 - RNA, 32 nt, Homo Sapiens
cacagguauaugcuaaauuguaaugguaacca

SEQ ID NO: 116532 - RNA, 32 nt, Homo Sapiens
guggggcaagugccccaacuccccucaccagg

SEQ ID NO: 116533 - RNA, 32 nt, Homo Sapiens
cacuugcucucucaauauguccuaguuuucuu

SEQ ID NO: 116534 - RNA, 32 nt, Homo Sapiens
ucuauuuccccuagcccuguccuuccacuaag

SEQ ID NO: 116535 - RNA, 32 nt, Homo Sapiens
uuuaaacaaaaauuacauuacaagauccaggu

SEQ ID NO: 116536 - RNA, 32 nt, Homo Sapiens
gagagcagcugugcaagugaauccacauuaau

SEQ ID NO: 116537 - RNA, 32 nt, Homo Sapiens
uccaucugacuucccuggccaucuuaucccau

SEQ ID NO: 116538 - RNA, 31 nt, Homo Sapiens
uaauugccacacugccugucccacaugaggg

SEQ ID NO: 116539 - RNA, 32 nt, Homo Sapiens
cgucccauauccugccucagcccgccaaggua

SEQ ID NO: 116540 - RNA, 32 nt, Homo Sapiens
ucgaucacgaagucaggagaucgagaccaacc

SEQ ID NO: 116541 - RNA, 32 nt, Homo Sapiens
ggcuugagucgccugaacgaagagcaggaaga

SEQ ID NO: 116542 - RNA, 32 nt, Homo Sapiens
ucugggauugccuggguucccuuuggagaaga

SEQ ID NO: 116543 - RNA, 32 nt, Homo Sapiens
gacccagccagcugcuaagcucugcagcuccc

SEQ ID NO: 116544 - RNA, 32 nt, Homo Sapiens
aagaucucugggcuggcuggaacuagccuaag

SEQ ID NO: 116545 - RNA, 32 nt, Homo Sapiens
ggcauguugacagacauguuuccccuccuccc

SEQ ID NO: 116546 - RNA, 32 nt, Homo Sapiens
aaccuagaaauauuguuuuuuauauuauuguu

SEQ ID NO: 116547 - RNA, 32 nt, Homo Sapiens
gccgcgcgccggcuugccaggagcuggagggg

SEQ ID NO: 116548 - RNA, 32 nt, Homo Sapiens
uucuacguacuacuccaaagacugugauugug

SEQ ID NO: 116549 - RNA, 32 nt, Homo Sapiens
ugugggccgcgugggcccccagggccagccug

SEQ ID NO: 116550 - RNA, 32 nt, Homo Sapiens
gcaaagccagccaucacccuccggccagagcu

SEQ ID NO: 116551 - RNA, 32 nt, Homo Sapiens
cuccagucaccugcacugaucugugugccccu

SEQ ID NO: 116552 - RNA, 32 nt, Homo Sapiens
ugaauguacauguauauacacacacaccucca

SEQ ID NO: 116553 - RNA, 32 nt, Homo Sapiens
agugugugggucugagccuggagaaggagccu

SEQ ID NO: 116554 - RNA, 32 nt, Homo Sapiens
guuuucgucauguuggucaggcuggucuugaa

SEQ ID NO: 116555 - RNA, 32 nt, Homo Sapiens
aaguagacuaagugcucuguguucucagucuu

SEQ ID NO: 116556 - RNA, 32 nt, Homo Sapiens
auugcuguuuguuacuauaaauuaaaugaacc

SEQ ID NO: 116557 - RNA, 32 nt, Homo Sapiens
cuggagucgugagcgcgcgcccgccccgcucu

SEQ ID NO: 116558 - RNA, 32 nt, Homo Sapiens
gagcgccgccuggcgcgcaggugccgggacgu

SEQ ID NO: 116559 - RNA, 32 nt, Homo Sapiens
cucaggacucuaaaauggcagagcagcuuucu

SEQ ID NO: 116560 - RNA, 32 nt, Homo Sapiens
acaauaaauggaacagaagggaggcaguguuu

SEQ ID NO: 116561 - RNA, 32 nt, Homo Sapiens
cucaggcugagggaggcagaaagggaaaguau

SEQ ID NO: 116562 - RNA, 32 nt, Homo Sapiens
gguauauccugccugcaguucugggaauccug

SEQ ID NO: 116563 - RNA, 32 nt, Homo Sapiens
ugcaugaaaggagccuaaggccauuguugaua

SEQ ID NO: 116564 - RNA, 32 nt, Homo Sapiens
aaaacaacuuugguacacaaaggcagcuuugu

SEQ ID NO: 116565 - RNA, 32 nt, Homo Sapiens
cccgaacaguguggugucaaaggucagauggu

SEQ ID NO: 116566 - RNA, 32 nt, Homo Sapiens
caucuggagcagcuuagccucugacccucaag

SEQ ID NO: 116567 - RNA, 32 nt, Homo Sapiens
ccuguuccgugugaggcgcaucgcugccgccg

SEQ ID NO: 116568 - RNA, 32 nt, Homo Sapiens
aaccaggagugccacuaugcugacuucuuauu

SEQ ID NO: 116569 - RNA, 32 nt, Homo Sapiens
ccugagaaaaagagggagacaggacagcuaag

SEQ ID NO: 116570 - RNA, 32 nt, Homo Sapiens
uauuucagaaaaggagagguugacagucaucc

SEQ ID NO: 116571 - RNA, 32 nt, Homo Sapiens
auguguguuuauauuucuucauaaagcaccuc

SEQ ID NO: 116572 - RNA, 29 nt, Homo Sapiens
cggcaauaaaguuuacaaaaucuggauuu

SEQ ID NO: 116573 - RNA, 32 nt, Homo Sapiens
ugucauuuuuaaaauuuguauuucuuucauua

SEQ ID NO: 116574 - RNA, 32 nt, Homo Sapiens
cuguuccaacacggcucgcgggcccgugccgg

SEQ ID NO: 116575 - RNA, 32 nt, Homo Sapiens
acacccagcaaacagagcuggcugggaacugg

SEQ ID NO: 116576 - RNA, 32 nt, Homo Sapiens
agcagccaacuuuucugacaaaauggauguua

SEQ ID NO: 116577 - RNA, 32 nt, Homo Sapiens
gugugcacuccagcuucggaggcccugcgugg

SEQ ID NO: 116578 - RNA, 32 nt, Homo Sapiens
uggauguuucaugggcccggggccccccaggg

SEQ ID NO: 116579 - RNA, 32 nt, Homo Sapiens
guaaaagcuucauguugagaucuucacguauc

SEQ ID NO: 116580 - RNA, 32 nt, Homo Sapiens
agggaggggggacgacggcugcugccgcagca

SEQ ID NO: 116581 - RNA, 32 nt, Homo Sapiens
acuuuuucuuuccuuuuuuuuaauuuuagacc

SEQ ID NO: 116582 - RNA, 32 nt, Homo Sapiens
cacuggcgucugugucccagaacacccagcag

SEQ ID NO: 116583 - RNA, 32 nt, Homo Sapiens
ccccaccgccucgcugcccccgcccaguuucg

SEQ ID NO: 116584 - RNA, 32 nt, Homo Sapiens
auugcccacccccauuuuguacaucugcuauu

SEQ ID NO: 116585 - RNA, 32 nt, Homo Sapiens
acuacgccuacaugcuggacgucuacggcucg

SEQ ID NO: 116586 - RNA, 32 nt, Homo Sapiens
ugugucccgcggcuugcgcuccguaguggacu

SEQ ID NO: 116587 - RNA, 32 nt, Homo Sapiens
cgcgagccagccucgguucccgcggcccgccg

SEQ ID NO: 116588 - RNA, 32 nt, Homo Sapiens
ggaaggaggagcuuucuccucuggcugaguuu

SEQ ID NO: 116589 - RNA, 32 nt, Homo Sapiens
ggugugagccaccgugcccggcccagauaggu

SEQ ID NO: 116590 - RNA, 32 nt, Homo Sapiens
cacagggucccccuugccccagcccccuucug

SEQ ID NO: 116591 - RNA, 31 nt, Homo Sapiens
ggggcacggcgcguggcgugagacggggcgg

SEQ ID NO: 116592 - RNA, 32 nt, Homo Sapiens
ggcccccucugugguucuggcuccugcagggu

SEQ ID NO: 116593 - RNA, 32 nt, Homo Sapiens
aguguguuugcacuuucugagguucuagcuag

SEQ ID NO: 116594 - RNA, 32 nt, Homo Sapiens
aguuccccuaaaauaugacccacuuguucugg

SEQ ID NO: 116595 - RNA, 32 nt, Homo Sapiens
ggggugucauaggagauuaaggugauugagca

SEQ ID NO: 116596 - RNA, 32 nt, Homo Sapiens
aaugacacagcuuauuuaccaugccccugaca

SEQ ID NO: 116597 - RNA, 32 nt, Homo Sapiens
augccagcacuuugggagggugaggcaggugg

SEQ ID NO: 116598 - RNA, 32 nt, Homo Sapiens
uuuaaagcuuggacuuuguuuccuccuuguca

SEQ ID NO: 116599 - RNA, 32 nt, Homo Sapiens
uaauacugacuugucaguaucuccagcucuga

SEQ ID NO: 116600 - RNA, 32 nt, Homo Sapiens
cuggccggccccaggcagugagggccuuagca

SEQ ID NO: 116601 - RNA, 32 nt, Homo Sapiens
ccuauccugaagaugugauacacugaauggaa

SEQ ID NO: 116602 - RNA, 32 nt, Homo Sapiens
uuagauguucuuuccaccuggccuaugauguu

SEQ ID NO: 116603 - RNA, 32 nt, Homo Sapiens
gaaaccucugcaguucuuguaccuggauguug

SEQ ID NO: 116604 - RNA, 32 nt, Homo Sapiens
uaauaaaacacuuaagaacaggaagauuacau

SEQ ID NO: 116605 - RNA, 32 nt, Homo Sapiens
guuuugaagagucccuuaauaugugguggaac

SEQ ID NO: 116606 - RNA, 32 nt, Homo Sapiens
caaccgcgccccccgcgcacggacccccauua

SEQ ID NO: 116607 - RNA, 32 nt, Homo Sapiens
ucauaacuauaaaucucuuguuguuaaaaaac

SEQ ID NO: 116608 - RNA, 32 nt, Homo Sapiens
ucugaaccaucaucccugcucucaucucagcu

SEQ ID NO: 116609 - RNA, 32 nt, Homo Sapiens
aaauccauuaaagaacaggaaaaaauaauuau

SEQ ID NO: 116610 - RNA, 32 nt, Homo Sapiens
uguuagaaaauuuuaaaguauuacuaaaaccu

SEQ ID NO: 116611 - RNA, 32 nt, Homo Sapiens
uaccuugaggggagugagaaaaggagaaguag

SEQ ID NO: 116612 - RNA, 32 nt, Homo Sapiens
ccuggucacaugggacgcugcccgcuaccuug

SEQ ID NO: 116613 - RNA, 32 nt, Homo Sapiens
aaaauuacccgcgcugugcgguacgguaagac

SEQ ID NO: 116614 - RNA, 32 nt, Homo Sapiens
uggcuuacaccuguaagcccagcacuuuggga

SEQ ID NO: 116615 - RNA, 32 nt, Homo Sapiens
cccuugucagggacuccuggggccuggguggc

SEQ ID NO: 116616 - RNA, 32 nt, Homo Sapiens
ggaugcggagagccgagggcuaacucccggac

SEQ ID NO: 116617 - RNA, 32 nt, Homo Sapiens
ugugccccggaccugcggcgccgcccucgagc

SEQ ID NO: 116618 - RNA, 32 nt, Homo Sapiens
guauaaaauaaaauauucuuugcaguaaaaua

SEQ ID NO: 116619 - RNA, 32 nt, Homo Sapiens
aauguaucuauuauaagauauguuauauugca

SEQ ID NO: 116620 - RNA, 32 nt, Homo Sapiens
ccugcggccccggcucgcugcuccagcugccc

SEQ ID NO: 116621 - RNA, 32 nt, Homo Sapiens
caacugggacaaagggcccgcuuguccuggcu

SEQ ID NO: 116622 - RNA, 32 nt, Homo Sapiens
ccucccucagcuccaaguauuccuccucaagg

SEQ ID NO: 116623 - RNA, 32 nt, Homo Sapiens
uucauaucuggaacuuucauaauuaccuuagu

SEQ ID NO: 116624 - RNA, 32 nt, Homo Sapiens
agagucugccccccagcuuaaccacuuccuuu

SEQ ID NO: 116625 - RNA, 32 nt, Homo Sapiens
aucuccauuuuugugcuuuuugaaaaugcaau

SEQ ID NO: 116626 - RNA, 32 nt, Homo Sapiens
aggauuuuaugaccagaucuuccuggagauga

SEQ ID NO: 116627 - RNA, 32 nt, Homo Sapiens
gggagugacugcacccuugguggcugcuggaa

SEQ ID NO: 116628 - RNA, 30 nt, Homo Sapiens
gcccagggagguggugucacugcacaggaa

SEQ ID NO: 116629 - RNA, 32 nt, Homo Sapiens
ucgaauuccagaaugaugaaauuguuagguug

SEQ ID NO: 116630 - RNA, 29 nt, Homo Sapiens
uaaaauaaaaauuuccacuauuaaaaaaa

SEQ ID NO: 116631 - RNA, 32 nt, Homo Sapiens
gucuaucuaucuaucaucuaucuaucuaucua

SEQ ID NO: 116632 - RNA, 32 nt, Homo Sapiens
ggcucucagggugacgccacccacagagauuu

SEQ ID NO: 116633 - RNA, 32 nt, Homo Sapiens
acgcaggaggcaggcccugcccugcccucucc

SEQ ID NO: 116634 - RNA, 32 nt, Homo Sapiens
gauccggccccggcccccucggcaccgccugc

SEQ ID NO: 116635 - RNA, 32 nt, Homo Sapiens
cucgggacgcggccuuccugccucccacacuc

SEQ ID NO: 116636 - RNA, 32 nt, Homo Sapiens
acugcgcagggcggggccggccgaaccauggg

SEQ ID NO: 116637 - RNA, 32 nt, Homo Sapiens
aagacccaagacguuggaauggcuguuuccau

SEQ ID NO: 116638 - RNA, 32 nt, Homo Sapiens
ccgccuccggggccuccugggacccuggcccu

SEQ ID NO: 116639 - RNA, 32 nt, Homo Sapiens
gguaguacugguuucuggugaaauugaagaac

SEQ ID NO: 116640 - RNA, 32 nt, Homo Sapiens
acacugagacccagcccucucccgcuggcccc

SEQ ID NO: 116641 - RNA, 32 nt, Homo Sapiens
guacuugaugggauggucuugauucuggaacu

SEQ ID NO: 116642 - RNA, 32 nt, Homo Sapiens
acuuuauguauuauuugcacagggagaauuga

SEQ ID NO: 116643 - RNA, 32 nt, Homo Sapiens
ugcacaaggaauguccugacaugaugaaccug

SEQ ID NO: 116644 - RNA, 32 nt, Homo Sapiens
gucuuuuauuuuuucuucaaaaacaauguccu

SEQ ID NO: 116645 - RNA, 32 nt, Homo Sapiens
cgacccaaccccagcccuggguagccugcagc

SEQ ID NO: 116646 - RNA, 32 nt, Homo Sapiens
uaagccuggcucagcccucagggcccgcccga

SEQ ID NO: 116647 - RNA, 32 nt, Homo Sapiens
aggaggugaugaugaagguuauuauguauggg

SEQ ID NO: 116648 - RNA, 32 nt, Homo Sapiens
agggacaaugaucgggauauaaacccaagucu

SEQ ID NO: 116649 - RNA, 32 nt, Homo Sapiens
cuuucugucugcacuguuuaauuaggcuuacu

SEQ ID NO: 116650 - RNA, 32 nt, Homo Sapiens
uagcgaauauauauuuuguauucccagccuuu

SEQ ID NO: 116651 - RNA, 32 nt, Homo Sapiens
cagcucaugcuucucugaagacuugcagcaag

SEQ ID NO: 116652 - RNA, 32 nt, Homo Sapiens
gguauucuuuguguuucuuaauuguuuaacuc

SEQ ID NO: 116653 - RNA, 30 nt, Homo Sapiens
cuuaaacugggcgaucaggcagcgacccua

SEQ ID NO: 116654 - RNA, 32 nt, Homo Sapiens
uagugauaucuagaaagggcuaauuaggucuc

SEQ ID NO: 116655 - RNA, 32 nt, Homo Sapiens
aaugagcaguacccugcacaaccccgcggccg

SEQ ID NO: 116656 - RNA, 32 nt, Homo Sapiens
gaagguguuuuucagguuuugaaacaauccaa

SEQ ID NO: 116657 - RNA, 32 nt, Homo Sapiens
gcgucuggucugugucacacacagcagccccc

SEQ ID NO: 116658 - RNA, 32 nt, Homo Sapiens
ugcagacgugccucuguguaaauguacacaug

SEQ ID NO: 116659 - RNA, 32 nt, Homo Sapiens
ccacuacaauccagaggucaccacccuuccca

SEQ ID NO: 116660 - RNA, 32 nt, Homo Sapiens
cauugaagauaaaggagaaugauagaucacuu

SEQ ID NO: 116661 - RNA, 32 nt, Homo Sapiens
gcauaucaguguaugguacauguacaucaaaa

SEQ ID NO: 116662 - RNA, 32 nt, Homo Sapiens
ugaggacacacagauacauaaugacaccugca

SEQ ID NO: 116663 - RNA, 32 nt, Homo Sapiens
gcaacugacuagcagagcagaggcccaggagu

SEQ ID NO: 116664 - RNA, 32 nt, Homo Sapiens
uuagcuguuaacccagucacuccaccuuugac

SEQ ID NO: 116665 - RNA, 32 nt, Homo Sapiens
gguuuuuuaaacaauaguuuaaauuuuuagac

SEQ ID NO: 116666 - RNA, 32 nt, Homo Sapiens
uuagggccagugguauuaacuacuuuauaaaa

SEQ ID NO: 116667 - RNA, 32 nt, Homo Sapiens
caagcccugggugagcgagaggcuggagaaca

SEQ ID NO: 116668 - RNA, 32 nt, Homo Sapiens
ucaaagcaugcacuuguaacaaugaaaaagaa

SEQ ID NO: 116669 - RNA, 32 nt, Homo Sapiens
ugcagaaaguuccacauagaaguggcugggaa

SEQ ID NO: 116670 - RNA, 32 nt, Homo Sapiens
agccgcgcaccuccucccgccaggcgcuuucu

SEQ ID NO: 116671 - RNA, 32 nt, Homo Sapiens
acuauggauaaauuaacuuuuacagaaaucuu

SEQ ID NO: 116672 - RNA, 31 nt, Homo Sapiens
gcaagucauuugauucacccggugaugaaau

SEQ ID NO: 116673 - RNA, 32 nt, Homo Sapiens
agggccgcgcaccugccccgcgcaccugcccg

SEQ ID NO: 116674 - RNA, 32 nt, Homo Sapiens
augaccccaagccucaggccugauauguucuu

SEQ ID NO: 116675 - RNA, 31 nt, Homo Sapiens
uaaagacagaagguuuuuggucuguuuuuuc

SEQ ID NO: 116676 - RNA, 32 nt, Homo Sapiens
acugcccagguagccccuccccagcccuuggc

SEQ ID NO: 116677 - RNA, 32 nt, Homo Sapiens
aaaacccaggacuuuaaugacuuuaagagggg

SEQ ID NO: 116678 - RNA, 32 nt, Homo Sapiens
gacuggagaagcaaagaguggaaugugaggag

SEQ ID NO: 116679 - RNA, 32 nt, Homo Sapiens
gacagagucucacuuugacacccaggcuggag

SEQ ID NO: 116680 - RNA, 32 nt, Homo Sapiens
agagaucugguuccagcuuucagccacuagcu

SEQ ID NO: 116681 - RNA, 32 nt, Homo Sapiens
cuagcgccuggcugugugugcggccgcuccuc

SEQ ID NO: 116682 - RNA, 32 nt, Homo Sapiens
agaaccagcucuuuggugccagcuguuucauc

SEQ ID NO: 116683 - RNA, 32 nt, Homo Sapiens
aaaauuaccuguaccaguaauuuuaacauaaa

SEQ ID NO: 116684 - RNA, 32 nt, Homo Sapiens
gagcugguucccagcccccugcaacccaguac

SEQ ID NO: 116685 - RNA, 32 nt, Homo Sapiens
acaaaggguguuucgcuguccucgguaguuuu

SEQ ID NO: 116686 - RNA, 32 nt, Homo Sapiens
auauauuccucauguuggcaugauaauuuugc

SEQ ID NO: 116687 - RNA, 32 nt, Homo Sapiens
ggccgcagggagaggagcaggacacgcaccuu

SEQ ID NO: 116688 - RNA, 32 nt, Homo Sapiens
ggggcaucugcggaagaacuggguuguuuccc

SEQ ID NO: 116689 - RNA, 32 nt, Homo Sapiens
gaagauggaaucuuaaaauacauuuggaguuu

SEQ ID NO: 116690 - RNA, 32 nt, Homo Sapiens
gagguccaguaggccuggccggggcccugagg

SEQ ID NO: 116691 - RNA, 30 nt, Homo Sapiens
cagcaaggcccugccacccaccuucaggcc

SEQ ID NO: 116692 - RNA, 32 nt, Homo Sapiens
uaccaaagaacaagcagugauuugaaaaagga

SEQ ID NO: 116693 - RNA, 32 nt, Homo Sapiens
aaaccagccugggcaacauagcaagaccccau

SEQ ID NO: 116694 - RNA, 32 nt, Homo Sapiens
cggauguuacuuaauguggcuucucuaaugua

SEQ ID NO: 116695 - RNA, 32 nt, Homo Sapiens
agugauagggagagggagcgaggcuggugccg

SEQ ID NO: 116696 - RNA, 32 nt, Homo Sapiens
uucuugcacuguauccaaguuauuugaucugg

SEQ ID NO: 116697 - RNA, 32 nt, Homo Sapiens
caaagacaucuuccuggccacguguugaccua

SEQ ID NO: 116698 - RNA, 32 nt, Homo Sapiens
aauguauaaacuaauuguugguuugauauuua

SEQ ID NO: 116699 - RNA, 32 nt, Homo Sapiens
caugucagaacuacuaaaaauaaagaaaucag

SEQ ID NO: 116700 - RNA, 32 nt, Homo Sapiens
accugccgcccucuccucuccccacagcuacc

SEQ ID NO: 116701 - RNA, 32 nt, Homo Sapiens
gcucagaggggagaggggcuggccuggcauga

SEQ ID NO: 116702 - RNA, 32 nt, Homo Sapiens
uguuauaauaaauuauucuacauacucauuug

SEQ ID NO: 116703 - RNA, 32 nt, Homo Sapiens
gguuuuguauuuuccaguuguuuaauuuccau

SEQ ID NO: 116704 - RNA, 32 nt, Homo Sapiens
aucuuagaggcauggccgggcuggggcaucuu

SEQ ID NO: 116705 - RNA, 32 nt, Homo Sapiens
cauggcagaaggaggggaaaagacuuguuuuc

SEQ ID NO: 116706 - RNA, 32 nt, Homo Sapiens
ugccaguggacuccuccccacccaguggcguc

SEQ ID NO: 116707 - RNA, 32 nt, Homo Sapiens
gggcacgcccuucaccuuaucccccaccacuu

SEQ ID NO: 116708 - RNA, 32 nt, Homo Sapiens
gaguaaccuggucccggcagccgggccccagg

SEQ ID NO: 116709 - RNA, 32 nt, Homo Sapiens
aggagugguacuuaagcuccccugccuuaacc

SEQ ID NO: 116710 - RNA, 32 nt, Homo Sapiens
ucugcauuuaucuaauuaaaaauacaccuugc

SEQ ID NO: 116711 - RNA, 32 nt, Homo Sapiens
gggaggcuagagaucauggaagggaagugguu

SEQ ID NO: 116712 - RNA, 32 nt, Homo Sapiens
gacuauuauuuuuagucugaucaaugggcaca

SEQ ID NO: 116713 - RNA, 32 nt, Homo Sapiens
cccuuuuaguguuacgaguagaugaacaaugc

SEQ ID NO: 116714 - RNA, 32 nt, Homo Sapiens
cauaguuuuagguuuuacauuuagguauaugg

SEQ ID NO: 116715 - RNA, 32 nt, Homo Sapiens
gaauggaggaccauccauaauuccuaucuuua

SEQ ID NO: 116716 - RNA, 32 nt, Homo Sapiens
ccagucugaucaaugaagcauucgauuaguuu

SEQ ID NO: 116717 - RNA, 32 nt, Homo Sapiens
aaggcugccgaggacccuccccacccugaaca

SEQ ID NO: 116718 - RNA, 32 nt, Homo Sapiens
aaaauggaauaauggagcauuguuuuuccaca

SEQ ID NO: 116719 - RNA, 32 nt, Homo Sapiens
ccaccugugcgcgccgccugcgaagaaggaac

SEQ ID NO: 116720 - RNA, 32 nt, Homo Sapiens
guaaaccaaaagccacuggacucuguaaaccc

SEQ ID NO: 116721 - RNA, 32 nt, Homo Sapiens
uagagggggcacagcccuccucccaagggaaa

SEQ ID NO: 116722 - RNA, 32 nt, Homo Sapiens
aguaaaaucaggauggaaauaagagggugccu

SEQ ID NO: 116723 - RNA, 32 nt, Homo Sapiens
ccauuuuuaaacagacauucccagucauccug

SEQ ID NO: 116724 - RNA, 32 nt, Homo Sapiens
auccagaggagaaaucugagaucaguacaucu

SEQ ID NO: 116725 - RNA, 32 nt, Homo Sapiens
uucuuccacaguaaaaauacguuuuuuguaaa

SEQ ID NO: 116726 - RNA, 32 nt, Homo Sapiens
gccacuggguuaggaccugaggaccucacuug

SEQ ID NO: 116727 - RNA, 32 nt, Homo Sapiens
acccccagcccgcgccagcaugaugaacaaca

SEQ ID NO: 116728 - RNA, 32 nt, Homo Sapiens
uccuucccaggguccacgggcggcaaugcucc

SEQ ID NO: 116729 - RNA, 32 nt, Homo Sapiens
gccggcgucagaccgagcugccgccgccacca

SEQ ID NO: 116730 - RNA, 32 nt, Homo Sapiens
cauguugacugggauuggaaauaaugagacug

SEQ ID NO: 116731 - RNA, 32 nt, Homo Sapiens
ggaccagagucacuucuccuccuccuuucucc

SEQ ID NO: 116732 - RNA, 32 nt, Homo Sapiens
agcuuuauguuucucuguuguuuggacccuac

SEQ ID NO: 116733 - RNA, 32 nt, Homo Sapiens
auauuuuucugaguuuguuuucuaucauaaau

SEQ ID NO: 116734 - RNA, 32 nt, Homo Sapiens
uccuguauauauauuuuauugcaugcacugug

SEQ ID NO: 116735 - RNA, 32 nt, Homo Sapiens
cagcggccgggcggggucccggcugagagagg

SEQ ID NO: 116736 - RNA, 32 nt, Homo Sapiens
agaggggaaggggcaaugugaguggcgcuaug

SEQ ID NO: 116737 - RNA, 32 nt, Homo Sapiens
gaguggaggaagacucuggaacccuggaagcu

SEQ ID NO: 116738 - RNA, 32 nt, Homo Sapiens
guucugugugcugggccacgggcugcaaccgg

SEQ ID NO: 116739 - RNA, 32 nt, Homo Sapiens
uucgguguguggaaugugguauuuucccgcgu

SEQ ID NO: 116740 - RNA, 32 nt, Homo Sapiens
uccucuguauugcgguagauuuauacauucug

SEQ ID NO: 116741 - RNA, 32 nt, Homo Sapiens
acaggcuaaauaaauuuuggcaccagcaaauu

SEQ ID NO: 116742 - RNA, 32 nt, Homo Sapiens
uugucugugcuaauaauuggagcccacacaga

SEQ ID NO: 116743 - RNA, 32 nt, Homo Sapiens
gcuuccuggaggaacgacccugcccggccccc

SEQ ID NO: 116744 - RNA, 32 nt, Homo Sapiens
ugcacuguuggcugaacuuauggugugguggg

SEQ ID NO: 116745 - RNA, 32 nt, Homo Sapiens
gccaagcagaaagacugcugagguaacacgga

SEQ ID NO: 116746 - RNA, 32 nt, Homo Sapiens
augcucugcugggucagcaucuccagccaccu

SEQ ID NO: 116747 - RNA, 32 nt, Homo Sapiens
cccaucagacugcccccagcacacggaaugga

SEQ ID NO: 116748 - RNA, 32 nt, Homo Sapiens
caccaccccccuccugaccuggggggauaaau

SEQ ID NO: 116749 - RNA, 32 nt, Homo Sapiens
uugaauuuauuuaaaugaaaugggaaucuaga

SEQ ID NO: 116750 - RNA, 32 nt, Homo Sapiens
aacaggccaaccuggaggacaggagucccagg

SEQ ID NO: 116751 - RNA, 32 nt, Homo Sapiens
ggauucauuuuucuuaaauuuuggacuuauac

SEQ ID NO: 116752 - RNA, 30 nt, Homo Sapiens
cgcagcaugcuaaugggguacaccauugac

SEQ ID NO: 116753 - RNA, 32 nt, Homo Sapiens
ucuugccgagggugcagugguggcguggaagc

SEQ ID NO: 116754 - RNA, 32 nt, Homo Sapiens
caggugcucucguccucccgugccagcccccg

SEQ ID NO: 116755 - RNA, 32 nt, Homo Sapiens
cucaccaagcuacuaucucuuuuaacuccuua

SEQ ID NO: 116756 - RNA, 32 nt, Homo Sapiens
agaaacauucuauggcuuggaugacuuacauu

SEQ ID NO: 116757 - RNA, 32 nt, Homo Sapiens
cuuggggagugcugggucugcugaugggagaa

SEQ ID NO: 116758 - RNA, 32 nt, Homo Sapiens
gagcaggcuuggcgaguccuugcagagcugac

SEQ ID NO: 116759 - RNA, 32 nt, Homo Sapiens
gcaggaccugacgcugucugcuucccuggaau

SEQ ID NO: 116760 - RNA, 32 nt, Homo Sapiens
aguauucugccuuccaaguuagauagcuaucu

SEQ ID NO: 116761 - RNA, 32 nt, Homo Sapiens
auguuuaggcacagcuauuuauaggggaaaac

SEQ ID NO: 116762 - RNA, 32 nt, Homo Sapiens
agccuugccggugaagcguccaggaaaguuaa

SEQ ID NO: 116763 - RNA, 32 nt, Homo Sapiens
agaaaaacaaacucguuuuuuacaaagcccuu

SEQ ID NO: 116764 - RNA, 32 nt, Homo Sapiens
auucaauuuugguuauuacaaaacagaaaaga

SEQ ID NO: 116765 - RNA, 32 nt, Homo Sapiens
uuagaagccaagguuguggauuugaucuuaga

SEQ ID NO: 116766 - RNA, 32 nt, Homo Sapiens
agcccuggcuuugucuccgagggggagucaug

SEQ ID NO: 116767 - RNA, 32 nt, Homo Sapiens
caagcuuguuaucagcuuucagggccaugguu

SEQ ID NO: 116768 - RNA, 32 nt, Homo Sapiens
ugcgcccggaauccggggccucuccuucguga

SEQ ID NO: 116769 - RNA, 32 nt, Homo Sapiens
aauuuggggucaaagucaguuuuucuuuuaaa

SEQ ID NO: 116770 - RNA, 32 nt, Homo Sapiens
auaaagugaaugccuuuagggguagcucugaa

SEQ ID NO: 116771 - RNA, 32 nt, Homo Sapiens
ugaggcccaggacccaccccccugccaccccu

SEQ ID NO: 116772 - RNA, 32 nt, Homo Sapiens
gccacugcgcuccagccugggcgacagagugg

SEQ ID NO: 116773 - RNA, 32 nt, Homo Sapiens
cgggcccgagggucuggcugucgcagcgccgg

SEQ ID NO: 116774 - RNA, 32 nt, Homo Sapiens
gaagaaaaucagcuccuggggcuggugguugg

SEQ ID NO: 116775 - RNA, 32 nt, Homo Sapiens
uugucagauaaugcuuuuuuauguguuuuuac

SEQ ID NO: 116776 - RNA, 32 nt, Homo Sapiens
uaggcugaaggaaaacaaaaccauguggaagu

SEQ ID NO: 116777 - RNA, 32 nt, Homo Sapiens
guuuuguuucuuugcgugcagugucuuuccau

SEQ ID NO: 116778 - RNA, 32 nt, Homo Sapiens
acuuugcauuuuucuuuuuuuuaauuuuaaau

SEQ ID NO: 116779 - RNA, 32 nt, Homo Sapiens
gucuggcguggcgcagcccggcgugggguucg

SEQ ID NO: 116780 - RNA, 32 nt, Homo Sapiens
gacuucauuuuuccuaacaggauuagacaguc

SEQ ID NO: 116781 - RNA, 32 nt, Homo Sapiens
cucuucucccgggaacucagcccggcugagug

SEQ ID NO: 116782 - RNA, 32 nt, Homo Sapiens
aaaugaaguguuggcagaaacaugcugccucu

SEQ ID NO: 116783 - RNA, 32 nt, Homo Sapiens
uuaguaauaguaauuuuuuucuuaaauuaauu

SEQ ID NO: 116784 - RNA, 32 nt, Homo Sapiens
uggggguaauaaaacuuuguuuacaggauugu

SEQ ID NO: 116785 - RNA, 32 nt, Homo Sapiens
gcugcauuucuuuuuauguuaaauaugugagu

SEQ ID NO: 116786 - RNA, 32 nt, Homo Sapiens
ucagaaaggaaauaauuuuaugcuggacucug

SEQ ID NO: 116787 - RNA, 32 nt, Homo Sapiens
cauuccacaguguauauacauguaucaaaaag

SEQ ID NO: 116788 - RNA, 32 nt, Homo Sapiens
cgcagcggcgggcugaagggcuccuccagcac

SEQ ID NO: 116789 - RNA, 32 nt, Homo Sapiens
uuuuuauugaacuuaugcauguaacuauacug

SEQ ID NO: 116790 - RNA, 28 nt, Homo Sapiens
gccaggaaagauugggaagugggugguc

SEQ ID NO: 116791 - RNA, 32 nt, Homo Sapiens
cuuacggaagauaucugagaaaacuuuuauga

SEQ ID NO: 116792 - RNA, 32 nt, Homo Sapiens
cagauggauuucuguagccauaccaaagccag

SEQ ID NO: 116793 - RNA, 32 nt, Homo Sapiens
gcagcugcaccucgggccagcuuucugccugu

SEQ ID NO: 116794 - RNA, 32 nt, Homo Sapiens
gauaaagaaaaaauaaaguggaaacuuuuaga

SEQ ID NO: 116795 - RNA, 32 nt, Homo Sapiens
aaauuggacuucacauuuucugaugccuccuu

SEQ ID NO: 116796 - RNA, 32 nt, Homo Sapiens
uauuuauaauuagucauuuacauauuuuuguc

SEQ ID NO: 116797 - RNA, 32 nt, Homo Sapiens
gucaguaaauggacauaacaggauuguuguaa

SEQ ID NO: 116798 - RNA, 32 nt, Homo Sapiens
cgcgacccaucccgcuggcgcuccccgcucgc

SEQ ID NO: 116799 - RNA, 32 nt, Homo Sapiens
uaagagacuccagggcugcuccugucaugcag

SEQ ID NO: 116800 - RNA, 32 nt, Homo Sapiens
uucuguguccuuccaggauaugugucauuucc

SEQ ID NO: 116801 - RNA, 32 nt, Homo Sapiens
uaguacacccgcgaccccgccccauucccaga

SEQ ID NO: 116802 - RNA, 32 nt, Homo Sapiens
ucauacauugugucaucaagcauuccuugagc

SEQ ID NO: 116803 - RNA, 32 nt, Homo Sapiens
uuccuguugcugucuucagucucacagagaag

SEQ ID NO: 116804 - RNA, 32 nt, Homo Sapiens
acguggugucucacucugaaaagcaggaaugu

SEQ ID NO: 116805 - RNA, 32 nt, Homo Sapiens
ccgguccucuuuucuucaauacaaaaugagau

SEQ ID NO: 116806 - RNA, 32 nt, Homo Sapiens
auucccacaacacugacaaucaaggcaacaua

SEQ ID NO: 116807 - RNA, 30 nt, Homo Sapiens
uggguaaacaggagacggauaagggcaauu

SEQ ID NO: 116808 - RNA, 32 nt, Homo Sapiens
cuucuaauaguauuauacuaauuuauuaaggc

SEQ ID NO: 116809 - RNA, 32 nt, Homo Sapiens
gggcucucacucuggaggaugggguggauggg

SEQ ID NO: 116810 - RNA, 32 nt, Homo Sapiens
uugaaacauaucuguauuaaugaagagugacu

SEQ ID NO: 116811 - RNA, 32 nt, Homo Sapiens
cgccggccgcgcgucccggccaugaacugagc

SEQ ID NO: 116812 - RNA, 32 nt, Homo Sapiens
cuucgaaccccgccggcggcccgggcuggggc

SEQ ID NO: 116813 - RNA, 32 nt, Homo Sapiens
uccaagaggaggagggcgacgccaaggacuuu

SEQ ID NO: 116814 - RNA, 32 nt, Homo Sapiens
cuguggagugugccucuugaauguggacucga

SEQ ID NO: 116815 - RNA, 32 nt, Homo Sapiens
aggccuuccuuccuuccagucagccugagaga

SEQ ID NO: 116816 - RNA, 32 nt, Homo Sapiens
uauaguuuugaaaacaaauuuggugaaauaaa

SEQ ID NO: 116817 - RNA, 32 nt, Homo Sapiens
auccaagauauuuuaaaaucugucacguagaa

SEQ ID NO: 116818 - RNA, 32 nt, Homo Sapiens
uaucuuugguuucuuuuaaaaaguauauuuaa

SEQ ID NO: 116819 - RNA, 32 nt, Homo Sapiens
ccugguguaauugugacucaugugucaguuca

SEQ ID NO: 116820 - RNA, 32 nt, Homo Sapiens
gccucaaaaugaauauauccuugaauaaagua

SEQ ID NO: 116821 - RNA, 32 nt, Homo Sapiens
gcucggggcccagcgugccagccccggaguuc

SEQ ID NO: 116822 - RNA, 32 nt, Homo Sapiens
aaaaguuuacuuucuucauggauauucuuggu

SEQ ID NO: 116823 - RNA, 32 nt, Homo Sapiens
cucagggagagccaagcacauuuccaguccga

SEQ ID NO: 116824 - RNA, 32 nt, Homo Sapiens
gagacaaacugagggacaaggacacccuuuaa

SEQ ID NO: 116825 - RNA, 32 nt, Homo Sapiens
aucagagaaaacuacaggccaauauaucugau

SEQ ID NO: 116826 - RNA, 29 nt, Homo Sapiens
ggcagugugacuuauuuccuguggugaaa

SEQ ID NO: 116827 - RNA, 32 nt, Homo Sapiens
auaacggaagggaucagaagauaucuuuugug

SEQ ID NO: 116828 - RNA, 32 nt, Homo Sapiens
cucugauguucguuuggguacgugguugugga

SEQ ID NO: 116829 - RNA, 32 nt, Homo Sapiens
gggagucucugugccugggaauuaggaccccu

SEQ ID NO: 116830 - RNA, 32 nt, Homo Sapiens
aaggaccaggagcggcugaugaggcauagaua

SEQ ID NO: 116831 - RNA, 32 nt, Homo Sapiens
uuaaguuuuaucguguaaauacauuagcuaaa

SEQ ID NO: 116832 - RNA, 32 nt, Homo Sapiens
uuucugaaucauaauuaaacuuuaugauaaaa

SEQ ID NO: 116833 - RNA, 32 nt, Homo Sapiens
guaagaaacuaugccugauucuguaaaauaag

SEQ ID NO: 116834 - RNA, 32 nt, Homo Sapiens
cguccccaaggaauaaguuuguucagaacucu

SEQ ID NO: 116835 - RNA, 32 nt, Homo Sapiens
uccugggcuggguaaaagcagcuggagugaag

SEQ ID NO: 116836 - RNA, 30 nt, Homo Sapiens
gcuauuuaaugauuaaagucauuugcagua

SEQ ID NO: 116837 - RNA, 32 nt, Homo Sapiens
uacuuugguucaucagaaaaacuucagcacac

SEQ ID NO: 116838 - RNA, 32 nt, Homo Sapiens
caacaucuucucucuuuuuuuuuuuuuuugag

SEQ ID NO: 116839 - RNA, 32 nt, Homo Sapiens
uagaccccuucucaacaucagaauaggaagag

SEQ ID NO: 116840 - RNA, 32 nt, Homo Sapiens
ugaaauauagcagaggaaagggcgcugaggca

SEQ ID NO: 116841 - RNA, 32 nt, Homo Sapiens
ugacucaucccauaaacaaaacuaaagauaaa

SEQ ID NO: 116842 - RNA, 32 nt, Homo Sapiens
gugugcaugugugaauuuacagcuugucaucg

SEQ ID NO: 116843 - RNA, 32 nt, Homo Sapiens
cauagacaucaaucagagagugucacagauuu

SEQ ID NO: 116844 - RNA, 32 nt, Homo Sapiens
aaacuccaacuggcaaaaaagcaagcaucuaa

SEQ ID NO: 116845 - RNA, 32 nt, Homo Sapiens
aaauaagugucuguuguuuagggcacccuguc

SEQ ID NO: 116846 - RNA, 32 nt, Homo Sapiens
aaaagacauuuguugcacaaaugacaguauuu

SEQ ID NO: 116847 - RNA, 32 nt, Homo Sapiens
aaaggcaggcggugcugaggagggggcagggu

SEQ ID NO: 116848 - RNA, 32 nt, Homo Sapiens
ggagcgccucugggaucagcuaccuccucucc

SEQ ID NO: 116849 - RNA, 32 nt, Homo Sapiens
gcuggugccguggaugucaccagucggacugu

SEQ ID NO: 116850 - RNA, 32 nt, Homo Sapiens
aaacaaaaacaaaauguagaaaaagcaaaagc

SEQ ID NO: 116851 - RNA, 32 nt, Homo Sapiens
ucugaagcugaaucaaauuaagauuccuguua

SEQ ID NO: 116852 - RNA, 32 nt, Homo Sapiens
uguccccaccucugguggaaaguaugaccuac

SEQ ID NO: 116853 - RNA, 32 nt, Homo Sapiens
caggugugguggcucacgccugugaucccagc

SEQ ID NO: 116854 - RNA, 32 nt, Homo Sapiens
ccagcaccaugauacuugggcaugucauuucu

SEQ ID NO: 116855 - RNA, 32 nt, Homo Sapiens
uauaccaguaggacugaaucagggccuucaaa

SEQ ID NO: 116856 - RNA, 32 nt, Homo Sapiens
gccgccgccucccggagguccuccugaugccc

SEQ ID NO: 116857 - RNA, 30 nt, Homo Sapiens
uccaggcagccucgcccgccggcugcgcuc

SEQ ID NO: 116858 - RNA, 32 nt, Homo Sapiens
ucaauucuaaucuuagugucaauaaauauuaa

SEQ ID NO: 116859 - RNA, 32 nt, Homo Sapiens
gagggaggggugcagcaacaugugcacaggca

SEQ ID NO: 116860 - RNA, 32 nt, Homo Sapiens
aggugggccugccuguggaggauagcccagcu

SEQ ID NO: 116861 - RNA, 32 nt, Homo Sapiens
cguaguuuucuuuaauuuuaaauuuaaaccca

SEQ ID NO: 116862 - RNA, 32 nt, Homo Sapiens
cugucucuugccugucccaccugugcccugcc

SEQ ID NO: 116863 - RNA, 32 nt, Homo Sapiens
cccagcagugcugggcgggcguguuuauuugu

SEQ ID NO: 116864 - RNA, 32 nt, Homo Sapiens
ucuucgugauugggggcgccaggcagggcggc

SEQ ID NO: 116865 - RNA, 32 nt, Homo Sapiens
acacaauuacaauacaugauuaaaugcaauag

SEQ ID NO: 116866 - RNA, 32 nt, Homo Sapiens
acaaugugcuuuauguuauaccuauagcuuug

SEQ ID NO: 116867 - RNA, 32 nt, Homo Sapiens
auuguuguggugaacugucaagugcaauuugc

SEQ ID NO: 116868 - RNA, 32 nt, Homo Sapiens
auguugacuaaauuuacaaauaaacuuguuua

SEQ ID NO: 116869 - RNA, 32 nt, Homo Sapiens
caggcagaacuaagccaggcauaaccacagcc

SEQ ID NO: 116870 - RNA, 32 nt, Homo Sapiens
caggacgcuuucacaggugcuaagugaucuca

SEQ ID NO: 116871 - RNA, 30 nt, Homo Sapiens
ccuguuguaagugaugcagaagccagagag

SEQ ID NO: 116872 - RNA, 32 nt, Homo Sapiens
cuccccagagcuccccgcacugacggggcugc

SEQ ID NO: 116873 - RNA, 32 nt, Homo Sapiens
cuacauucucccugagcauuaagacuucccuu

SEQ ID NO: 116874 - RNA, 32 nt, Homo Sapiens
ugauugcgcucccuccuucuguagaggccgcc

SEQ ID NO: 116875 - RNA, 32 nt, Homo Sapiens
cgccgcugcugccgccgccgccgcccagagac

SEQ ID NO: 116876 - RNA, 32 nt, Homo Sapiens
gacgacgaccacggcgacuagggcgccgguca

SEQ ID NO: 116877 - RNA, 30 nt, Homo Sapiens
aaacaggagaugcuugaugaggaugggauc

SEQ ID NO: 116878 - RNA, 32 nt, Homo Sapiens
uugaaacaaaaauggacaaauauuuaaaauau

SEQ ID NO: 116879 - RNA, 32 nt, Homo Sapiens
aguuucaauaaaaucauuuagcauugaauuca

SEQ ID NO: 116880 - RNA, 32 nt, Homo Sapiens
augaugcccuuccccuucuccccuguccucac

SEQ ID NO: 116881 - RNA, 32 nt, Homo Sapiens
ugguuaaguuggcuucuguuucuaguugagga

SEQ ID NO: 116882 - RNA, 32 nt, Homo Sapiens
ucacggggucucccgcgccgcucauggcgccu

SEQ ID NO: 116883 - RNA, 32 nt, Homo Sapiens
gcguucacccugggcucugccuauacacuugg

SEQ ID NO: 116884 - RNA, 27 nt, Homo Sapiens
accccugaagagguucugauuugauuu

SEQ ID NO: 116885 - RNA, 32 nt, Homo Sapiens
uuuccuccguuccaaugagaggccuauggcug

SEQ ID NO: 116886 - RNA, 32 nt, Homo Sapiens
cagcagcucugcaaccuccgcuccaccacuga

SEQ ID NO: 116887 - RNA, 32 nt, Homo Sapiens
gagaaaauuaggaugaccuggcaaauaagauc

SEQ ID NO: 116888 - RNA, 32 nt, Homo Sapiens
agauaccugggaugcugagaucagcccaaauc

SEQ ID NO: 116889 - RNA, 32 nt, Homo Sapiens
gccuuaacaauguuaaucaucuccuuggauca

SEQ ID NO: 116890 - RNA, 32 nt, Homo Sapiens
gggaaugcauuacuuuuauuucaaacccucug

SEQ ID NO: 116891 - RNA, 32 nt, Homo Sapiens
uugcacacagccccaggcuccacacagaaaug

SEQ ID NO: 116892 - RNA, 32 nt, Homo Sapiens
aguguaguuguaaugucaaaucaauaagauau

SEQ ID NO: 116893 - RNA, 32 nt, Homo Sapiens
agccccuugugcuuccugggugaggcaaugcc

SEQ ID NO: 116894 - RNA, 27 nt, Homo Sapiens
ugccagcccuucuucuggcuuccccuu

SEQ ID NO: 116895 - RNA, 32 nt, Homo Sapiens
acuucgguaaccucacugucuaccuaaguaau

SEQ ID NO: 116896 - RNA, 32 nt, Homo Sapiens
cuguugccaggcuggaaugcaguggcgucauc

SEQ ID NO: 116897 - RNA, 31 nt, Homo Sapiens
uucugcaaauaaaaacguguguaucaaggac

SEQ ID NO: 116898 - RNA, 32 nt, Homo Sapiens
ggguaucucuacagggguccucggucuccauc

SEQ ID NO: 116899 - RNA, 32 nt, Homo Sapiens
ccagcgcccgcgggggacccaagccccagccu

SEQ ID NO: 116900 - RNA, 32 nt, Homo Sapiens
uuguagcugucauggugcaauuugucuuugga

SEQ ID NO: 116901 - RNA, 32 nt, Homo Sapiens
ccggaaugaaaacaaacggcggccgcugccgc

SEQ ID NO: 116902 - RNA, 32 nt, Homo Sapiens
acaaaacaaaacaaaaaacaaacaaaaacaac

SEQ ID NO: 116903 - RNA, 32 nt, Homo Sapiens
ugacaacaugacgagggguggugcuggagucc

SEQ ID NO: 116904 - RNA, 32 nt, Homo Sapiens
agccaaagacaaagaugacugaagaacuuuag

SEQ ID NO: 116905 - RNA, 32 nt, Homo Sapiens
gcuacagcugaggccuggaucccggccuuucc

SEQ ID NO: 116906 - RNA, 32 nt, Homo Sapiens
uccaucagaacugcgauucagaaggagccucc

SEQ ID NO: 116907 - RNA, 32 nt, Homo Sapiens
ucuacuaccaacaacuaaguaauugggaaaua

SEQ ID NO: 116908 - RNA, 32 nt, Homo Sapiens
gcuauuuaacugguggaaauaaacuggccgau

SEQ ID NO: 116909 - RNA, 32 nt, Homo Sapiens
ccuuuuggagaugauauaggaugugaaauaca

SEQ ID NO: 116910 - RNA, 32 nt, Homo Sapiens
agaugccaccuaaaaacaaagaaaaagggaag

SEQ ID NO: 116911 - RNA, 32 nt, Homo Sapiens
aagauuauauuguaucacuggaccagcauaaa

SEQ ID NO: 116912 - RNA, 32 nt, Homo Sapiens
aaaauuaauauaucauuaucuuugcuguuauu

SEQ ID NO: 116913 - RNA, 32 nt, Homo Sapiens
acccauauuuuaugcaacacaaacacuguccu

SEQ ID NO: 116914 - RNA, 32 nt, Homo Sapiens
ggucuucuuccuccuucccccagccagccagc

SEQ ID NO: 116915 - RNA, 32 nt, Homo Sapiens
caccggaagauaagaagacccaguagcccucc

SEQ ID NO: 116916 - RNA, 32 nt, Homo Sapiens
gaaaugcugcccggcgugucccggcugcacac

SEQ ID NO: 116917 - RNA, 26 nt, Homo Sapiens
gaugggccaagagcuucaaggagaag

SEQ ID NO: 116918 - RNA, 32 nt, Homo Sapiens
cacgcagacgccgggaacgcaggccgcuuuau

SEQ ID NO: 116919 - RNA, 32 nt, Homo Sapiens
gcucccggccccagcuucucugguccuccgag

SEQ ID NO: 116920 - RNA, 32 nt, Homo Sapiens
uaaucagaaagcaauuaaauguaaauaacagu

SEQ ID NO: 116921 - RNA, 32 nt, Homo Sapiens
gaaauaaauucaauacagcaucacgucuguuu

SEQ ID NO: 116922 - RNA, 32 nt, Homo Sapiens
acugauuaaacauuuuugguauuguuaagcau

SEQ ID NO: 116923 - RNA, 32 nt, Homo Sapiens
gccacaggggaagagcugcccaaggcuguggg

SEQ ID NO: 116924 - RNA, 30 nt, Homo Sapiens
gaccugggagguggagguugcggugagcug

SEQ ID NO: 116925 - RNA, 29 nt, Homo Sapiens
caccaugggccgggcccggcgcuuccagu

SEQ ID NO: 116926 - RNA, 32 nt, Homo Sapiens
ggcugggcacgguggcucacgccugucauccc

SEQ ID NO: 116927 - RNA, 32 nt, Homo Sapiens
ugccucugguggcugcagagcaauacccaagc

SEQ ID NO: 116928 - RNA, 32 nt, Homo Sapiens
aucacuuccccucugcauuuucccaucacaua

SEQ ID NO: 116929 - RNA, 32 nt, Homo Sapiens
ucccagccucgcugguaguccuggucaaggag

SEQ ID NO: 116930 - RNA, 32 nt, Homo Sapiens
ccucacaaucccagauggguucuaaugcagcu

SEQ ID NO: 116931 - RNA, 32 nt, Homo Sapiens
augagaggagcagggccuguguauaauaccuu

SEQ ID NO: 116932 - RNA, 32 nt, Homo Sapiens
ugccacucaauccuaucccuaguucccgagcg

SEQ ID NO: 116933 - RNA, 32 nt, Homo Sapiens
auuaaaugauagccuacaaacacacacacaca

SEQ ID NO: 116934 - RNA, 32 nt, Homo Sapiens
cgcacaggucccagccccuucccucucuggga

SEQ ID NO: 116935 - RNA, 32 nt, Homo Sapiens
acucauuuauuguuugacaauuauagauugaa

SEQ ID NO: 116936 - RNA, 32 nt, Homo Sapiens
ugugugccugcagcagccuccacagccacgau

SEQ ID NO: 116937 - RNA, 32 nt, Homo Sapiens
ccauuagauugugauuauuaauuuucuagcua

SEQ ID NO: 116938 - RNA, 32 nt, Homo Sapiens
cugucuucauauuugcagacaucuagaccccu

SEQ ID NO: 116939 - RNA, 32 nt, Homo Sapiens
caaaaauaaaaugcaauguuauauaaagcuau

SEQ ID NO: 116940 - RNA, 32 nt, Homo Sapiens
uguuaagauuguaguagugcugacucuaacuu

SEQ ID NO: 116941 - RNA, 32 nt, Homo Sapiens
uucagauauuccagguaaauauaauugaguca

SEQ ID NO: 116942 - RNA, 32 nt, Homo Sapiens
cugcuauaucuacguguaaaucuuuuuuucuu

SEQ ID NO: 116943 - RNA, 32 nt, Homo Sapiens
ucaaggaaaugaauauauuguuagaccaggua

SEQ ID NO: 116944 - RNA, 32 nt, Homo Sapiens
aauccucacuguuccuucuugaguugaagauc

SEQ ID NO: 116945 - RNA, 32 nt, Homo Sapiens
uauguuuuugucgauugugauccugaaacuca

SEQ ID NO: 116946 - RNA, 32 nt, Homo Sapiens
ccugagcucccacuuccacaccuacuccaggc

SEQ ID NO: 116947 - RNA, 28 nt, Homo Sapiens
ggcugagaaaugauucauuugaagauac

SEQ ID NO: 116948 - RNA, 32 nt, Homo Sapiens
accacugcacuccagccugggcgacagagacu

SEQ ID NO: 116949 - RNA, 32 nt, Homo Sapiens
ggcagucaauuauggauauuuuaauguuggaa

SEQ ID NO: 116950 - RNA, 32 nt, Homo Sapiens
gauauauacuuggugaaacaaaccaguauguu

SEQ ID NO: 116951 - RNA, 32 nt, Homo Sapiens
uuccuaggggguaaaaggaucagagagagaag

SEQ ID NO: 116952 - RNA, 32 nt, Homo Sapiens
ucuucauccuucccuauucccaaagaguaaac

SEQ ID NO: 116953 - RNA, 32 nt, Homo Sapiens
aaggugaguuuggggccugcagagccucgggu

SEQ ID NO: 116954 - RNA, 32 nt, Homo Sapiens
gucacaccaaaauagacuaugaugcuuuuguu

SEQ ID NO: 116955 - RNA, 32 nt, Homo Sapiens
gacuuccacaugccaaaauuaaaagacaaaau

SEQ ID NO: 116956 - RNA, 32 nt, Homo Sapiens
uuauuuuucuccagauauuuaucaccauauga

SEQ ID NO: 116957 - RNA, 32 nt, Homo Sapiens
ugucuguggcuucccaugucuuucuccaaagc

SEQ ID NO: 116958 - RNA, 32 nt, Homo Sapiens
guucaggccugaggacagcagugucugcaaaa

SEQ ID NO: 116959 - RNA, 32 nt, Homo Sapiens
cuacuaaggcugaaaaugugcauauuccauga

SEQ ID NO: 116960 - RNA, 32 nt, Homo Sapiens
cugcuuuuuuaaaaauaaucuuacuguacuua

SEQ ID NO: 116961 - RNA, 32 nt, Homo Sapiens
gagacagggucucacugugucaugcaggcugg

SEQ ID NO: 116962 - RNA, 32 nt, Homo Sapiens
ccucuagugucuggggcuuagauuucucaggu

SEQ ID NO: 116963 - RNA, 32 nt, Homo Sapiens
uuuuuggaguaauucaguauagguucguuuaa

SEQ ID NO: 116964 - RNA, 32 nt, Homo Sapiens
uacaucaucaaauuauuuuucaaaugaauauu

SEQ ID NO: 116965 - RNA, 32 nt, Homo Sapiens
uugaaguagaggggccuucaaacuacuuuaua

SEQ ID NO: 116966 - RNA, 29 nt, Homo Sapiens
auagcaucguguuucaguuggcauuucac

SEQ ID NO: 116967 - RNA, 32 nt, Homo Sapiens
cuggcaucucagggaguugaugaccuuguuuu

SEQ ID NO: 116968 - RNA, 32 nt, Homo Sapiens
gugcccuccugccacagcccccggcccggcca

SEQ ID NO: 116969 - RNA, 32 nt, Homo Sapiens
aaauggugguuguuucuuccaagacuccagcc

SEQ ID NO: 116970 - RNA, 32 nt, Homo Sapiens
cagccugggcgacagggcaaaacccugucucu

SEQ ID NO: 116971 - RNA, 32 nt, Homo Sapiens
ccccuucuacaaccacgagcagaugggccuuc

SEQ ID NO: 116972 - RNA, 32 nt, Homo Sapiens
cuugcguccuuucucuucuccgccauggaauu

SEQ ID NO: 116973 - RNA, 32 nt, Homo Sapiens
auggugaauuguagaauuuugaucuucuuauu

SEQ ID NO: 116974 - RNA, 32 nt, Homo Sapiens
agccaagauugugccacugaacucuagccugg

SEQ ID NO: 116975 - RNA, 32 nt, Homo Sapiens
ccagcacagaccgccgccgggaccccgagucg

SEQ ID NO: 116976 - RNA, 32 nt, Homo Sapiens
uucccuccuuaaaagaaaaauuaccuucuagu

SEQ ID NO: 116977 - RNA, 32 nt, Homo Sapiens
aggguagaugagaguguaaacugcauaugagg

SEQ ID NO: 116978 - RNA, 32 nt, Homo Sapiens
acacagaggcagggcgugucugagagacuaau

SEQ ID NO: 116979 - RNA, 31 nt, Homo Sapiens
gggucgggggcgguggcuccugucuauaauc

SEQ ID NO: 116980 - RNA, 32 nt, Homo Sapiens
ggagccagaaugccaggguucuaacuucagca

SEQ ID NO: 116981 - RNA, 32 nt, Homo Sapiens
agagcagugucuggcacauguucuguaaucca

SEQ ID NO: 116982 - RNA, 32 nt, Homo Sapiens
uaaagguuagacaugaaauagaucugucucua

SEQ ID NO: 116983 - RNA, 32 nt, Homo Sapiens
ggagaggaagcagaucuaagcacacaugggca

SEQ ID NO: 116984 - RNA, 32 nt, Homo Sapiens
ucccuucccuucccuggagcugcccugccuuu

SEQ ID NO: 116985 - RNA, 32 nt, Homo Sapiens
acgggaguuucaucaggagccccagagaccgc

SEQ ID NO: 116986 - RNA, 32 nt, Homo Sapiens
ggaagauccccucuccugcccaagcacuucac

SEQ ID NO: 116987 - RNA, 32 nt, Homo Sapiens
ggcugguccugccuugacccagcccgguggcu

SEQ ID NO: 116988 - RNA, 32 nt, Homo Sapiens
caggaaaaagaaaaaagaccugguuauugaag

SEQ ID NO: 116989 - RNA, 32 nt, Homo Sapiens
ggacucaggccuccagcucccugcccagcgag

SEQ ID NO: 116990 - RNA, 32 nt, Homo Sapiens
ugaggccaaacacacuguauuuuacaagucaa

SEQ ID NO: 116991 - RNA, 32 nt, Homo Sapiens
cuucaucccucauucucuuguauggcaaacgu

SEQ ID NO: 116992 - RNA, 32 nt, Homo Sapiens
gagcuaucuaucuauauucauuucauagccaa

SEQ ID NO: 116993 - RNA, 32 nt, Homo Sapiens
agaugucugugaagaauuauaacugguacaga

SEQ ID NO: 116994 - RNA, 30 nt, Homo Sapiens
acggacgggcccgugcuucugccgcggcug

SEQ ID NO: 116995 - RNA, 32 nt, Homo Sapiens
ggagcacugagaagcacagcacaggggcucag

SEQ ID NO: 116996 - RNA, 32 nt, Homo Sapiens
ggugugggggugggggcgccgcuggggcaggg

SEQ ID NO: 116997 - RNA, 32 nt, Homo Sapiens
uagacugauuuagaaaaacaaaugauuaguua

SEQ ID NO: 116998 - RNA, 32 nt, Homo Sapiens
ccagcagaggaugcgaggacgaugacauugac

SEQ ID NO: 116999 - RNA, 30 nt, Homo Sapiens
ccgggaugaagccgauccuacugcagggcc

SEQ ID NO: 117000 - RNA, 32 nt, Homo Sapiens
ucuucacaggcacugcaucggguugucuggcg

SEQ ID NO: 117001 - RNA, 32 nt, Homo Sapiens
uugaugcuacacagaugguuauaaccuggucc

SEQ ID NO: 117002 - RNA, 32 nt, Homo Sapiens
uugaguacgggcuguccaaaguuuacauuuuc

SEQ ID NO: 117003 - RNA, 32 nt, Homo Sapiens
ugcaggagaagcuaggcaaggagcgucuggaa

SEQ ID NO: 117004 - RNA, 32 nt, Homo Sapiens
acgucgccugucacccaauaucuccagccgcg

SEQ ID NO: 117005 - RNA, 32 nt, Homo Sapiens
uaguuuugcuuuuaccagaauguaauguaguu

SEQ ID NO: 117006 - RNA, 32 nt, Homo Sapiens
cagaaaagagauuuuacacauguauaaaagag

SEQ ID NO: 117007 - RNA, 32 nt, Homo Sapiens
gacugaguacaccggugaggcuggggucucug

SEQ ID NO: 117008 - RNA, 32 nt, Homo Sapiens
ucuagaaagagauaacacauggaaagacggcg

SEQ ID NO: 117009 - RNA, 32 nt, Homo Sapiens
gcagcccucgcaugcuggggucgggccagcuc

SEQ ID NO: 117010 - RNA, 32 nt, Homo Sapiens
aagggucuagaaugcugucuccagguagcugg

SEQ ID NO: 117011 - RNA, 32 nt, Homo Sapiens
caguuguguuuagggaaccuuaagucaugcag

SEQ ID NO: 117012 - RNA, 31 nt, Homo Sapiens
ggagacacaaagagaaugauacaguuuagaa

SEQ ID NO: 117013 - RNA, 32 nt, Homo Sapiens
gaguuaacuuuagaucuuugaaaacccaggac

SEQ ID NO: 117014 - RNA, 32 nt, Homo Sapiens
ggaacaggguucugcccucccagagccuccac

SEQ ID NO: 117015 - RNA, 32 nt, Homo Sapiens
augaaggggucgucuucaucuucgccggauga

SEQ ID NO: 117016 - RNA, 32 nt, Homo Sapiens
gcuagauuaucuuagacgaauuuuacaaugug

SEQ ID NO: 117017 - RNA, 32 nt, Homo Sapiens
ggaaggcgcccggcugcgucugcagaggcggg

SEQ ID NO: 117018 - RNA, 32 nt, Homo Sapiens
cccuuuccuaagaccugcuucccggccagugu

SEQ ID NO: 117019 - RNA, 32 nt, Homo Sapiens
caggaagcgguggcccgggcggccucacaucg

SEQ ID NO: 117020 - RNA, 32 nt, Homo Sapiens
uccuugagcauggauuagauguuuccugggag

SEQ ID NO: 117021 - RNA, 32 nt, Homo Sapiens
uacaauguccccagccccucugcagcccgugg

SEQ ID NO: 117022 - RNA, 32 nt, Homo Sapiens
gaacacuuggacagcccuccccgcccuucguu

SEQ ID NO: 117023 - RNA, 32 nt, Homo Sapiens
agauacggacagagaccaagauggcccauccu

SEQ ID NO: 117024 - RNA, 32 nt, Homo Sapiens
ucccuauccuguccuuucccccuucccagaca

SEQ ID NO: 117025 - RNA, 32 nt, Homo Sapiens
aaaugacucucucccaaaccucuucuuauuuu

SEQ ID NO: 117026 - RNA, 32 nt, Homo Sapiens
agcucguuuuaacugaagugugagaaggaggu

SEQ ID NO: 117027 - RNA, 32 nt, Homo Sapiens
uauugucaagacagugucauggugcagaggua

SEQ ID NO: 117028 - RNA, 32 nt, Homo Sapiens
cuuuaaacauccacaaauucuuaaaaagauug

SEQ ID NO: 117029 - RNA, 32 nt, Homo Sapiens
uagaagugagaugucuuccucuucacuugcuc

SEQ ID NO: 117030 - RNA, 32 nt, Homo Sapiens
ugacuaggaaggaggauggggaggcagggcug

SEQ ID NO: 117031 - RNA, 32 nt, Homo Sapiens
gcccgccucucaccccacccccuccagccaga

SEQ ID NO: 117032 - RNA, 32 nt, Homo Sapiens
gcccaauuuuggaguugagaggguuguuggua

SEQ ID NO: 117033 - RNA, 32 nt, Homo Sapiens
guccgaaauaaucuucuguguccuucaguugg

SEQ ID NO: 117034 - RNA, 32 nt, Homo Sapiens
cugagaugacagauugcuucucuguauuaaau

SEQ ID NO: 117035 - RNA, 32 nt, Homo Sapiens
uuccuugcgcgagccgggcugucggguguguu

SEQ ID NO: 117036 - RNA, 32 nt, Homo Sapiens
cuaggggaaugggaagcagcucaagggacccu

SEQ ID NO: 117037 - RNA, 32 nt, Homo Sapiens
cccauuucuuugagggaucaggaaggaauccu

SEQ ID NO: 117038 - RNA, 32 nt, Homo Sapiens
cccuucugcccccaggcgggcuccccgcugcu

SEQ ID NO: 117039 - RNA, 29 nt, Homo Sapiens
uggcauggagagccucuuuccuuauggcc

SEQ ID NO: 117040 - RNA, 32 nt, Homo Sapiens
uguuucagaaaggaguagaauauaaacacaua

SEQ ID NO: 117041 - RNA, 32 nt, Homo Sapiens
gugagucuuucugcuaaagaggcaugugaggu

SEQ ID NO: 117042 - RNA, 32 nt, Homo Sapiens
guuguaguuuuaguucugaaagucgagcagga

SEQ ID NO: 117043 - RNA, 32 nt, Homo Sapiens
augugacauauccaggcggaacaucaugaugc

SEQ ID NO: 117044 - RNA, 32 nt, Homo Sapiens
auuuauuuuaucauauuuuaggguggguuagg

SEQ ID NO: 117045 - RNA, 32 nt, Homo Sapiens
uuguauacaccuggaggcaucuguuauucagc

SEQ ID NO: 117046 - RNA, 32 nt, Homo Sapiens
cgcugcuguugcuccugaggcugcuggcugag

SEQ ID NO: 117047 - RNA, 32 nt, Homo Sapiens
caacuagauuguaagcacuuggaggugugacu

SEQ ID NO: 117048 - RNA, 32 nt, Homo Sapiens
gccugcuguaugcuauuuucuuagaucuuggu

SEQ ID NO: 117049 - RNA, 32 nt, Homo Sapiens
ugauguaaaagucugggcaaaauguauauaau

SEQ ID NO: 117050 - RNA, 32 nt, Homo Sapiens
aggucagcagaaagccccaggauacuucucuc

SEQ ID NO: 117051 - RNA, 32 nt, Homo Sapiens
cauaaagccuuuugcuuuaugcuugagggaua

SEQ ID NO: 117052 - RNA, 32 nt, Homo Sapiens
cugagccucgcacucugccgcccgcaccaccu

SEQ ID NO: 117053 - RNA, 32 nt, Homo Sapiens
cggccauuucucucucaccucuaggcccucug

SEQ ID NO: 117054 - RNA, 27 nt, Homo Sapiens
ucacucuccuucuuauaucccugggag

SEQ ID NO: 117055 - RNA, 32 nt, Homo Sapiens
gagccgacagccggagcgcccggcaauggcgg

SEQ ID NO: 117056 - RNA, 32 nt, Homo Sapiens
acgucuagggaaucuuagcaucugggaccaag

SEQ ID NO: 117057 - RNA, 32 nt, Homo Sapiens
auguuacugaaucugaaaaacaucuuuaaaau

SEQ ID NO: 117058 - RNA, 32 nt, Homo Sapiens
gcugggcgcgaaccugcccacccaccgguugg

SEQ ID NO: 117059 - RNA, 32 nt, Homo Sapiens
ccuuugcccaauuucagauauuugagcauuuu

SEQ ID NO: 117060 - RNA, 32 nt, Homo Sapiens
acaagacacuuugggaggaaagaagacuaccu

SEQ ID NO: 117061 - RNA, 30 nt, Homo Sapiens
gggccccagaagaugggggacaucccccag

SEQ ID NO: 117062 - RNA, 32 nt, Homo Sapiens
cacugcuuguugcuggagcugcacaguaugau

SEQ ID NO: 117063 - RNA, 32 nt, Homo Sapiens
gagggccacacccacccuguccagaguagagg

SEQ ID NO: 117064 - RNA, 32 nt, Homo Sapiens
guuagcggggagagcacgggguagccggagaa

SEQ ID NO: 117065 - RNA, 32 nt, Homo Sapiens
aauagucuuuuugaguaaagucucucuuuauc

SEQ ID NO: 117066 - RNA, 32 nt, Homo Sapiens
aagaucucaagagagcgagaagacuggaauca

SEQ ID NO: 117067 - RNA, 32 nt, Homo Sapiens
aggcagugagggcgaggcgcucaggugcgagc

SEQ ID NO: 117068 - RNA, 32 nt, Homo Sapiens
ucugagucaacauagcuagaaaaugcuaaacu

SEQ ID NO: 117069 - RNA, 32 nt, Homo Sapiens
uuuguggugggugugaugugguuuauuauuau

SEQ ID NO: 117070 - RNA, 32 nt, Homo Sapiens
uggcuugggccaaaugccaacaaaaccaaccc

SEQ ID NO: 117071 - RNA, 32 nt, Homo Sapiens
ucugacaagaagagaagggucuugagugggga

SEQ ID NO: 117072 - RNA, 32 nt, Homo Sapiens
gggguggcgggggaauagcggcggcagcagcc

SEQ ID NO: 117073 - RNA, 32 nt, Homo Sapiens
cuagggaggcugcggcaggagaauugcuugaa

SEQ ID NO: 117074 - RNA, 32 nt, Homo Sapiens
augggauaaaaauaaucgauguauguuacggg

SEQ ID NO: 117075 - RNA, 32 nt, Homo Sapiens
aaugauaauguacuuauuuacaagguuuuaau

SEQ ID NO: 117076 - RNA, 32 nt, Homo Sapiens
guaauguugcauaauguucacuuuuuauagug

SEQ ID NO: 117077 - RNA, 32 nt, Homo Sapiens
ccucccaauguuaccccuuccaucuuccaaga

SEQ ID NO: 117078 - RNA, 32 nt, Homo Sapiens
gaucuguuucuuuuuucagacauucaaauguu

SEQ ID NO: 117079 - RNA, 30 nt, Homo Sapiens
gccgcuccgaggugaaggcgcgcgccccuc

SEQ ID NO: 117080 - RNA, 30 nt, Homo Sapiens
uugccuccguccgugccgucccugggccac

SEQ ID NO: 117081 - RNA, 32 nt, Homo Sapiens
aaccuagccagcuucacgauuaugacuaaagu

SEQ ID NO: 117082 - RNA, 32 nt, Homo Sapiens
cuugccccagccuguaccccagccccugcagc

SEQ ID NO: 117083 - RNA, 32 nt, Homo Sapiens
gccagcacagaaacagaggagagucccagagc

SEQ ID NO: 117084 - RNA, 32 nt, Homo Sapiens
cuuuuucugaccaagccuuguggcaccagcaa

SEQ ID NO: 117085 - RNA, 32 nt, Homo Sapiens
gcccaucccagcugcacccuagcucccugcuc

SEQ ID NO: 117086 - RNA, 32 nt, Homo Sapiens
uagaggcagaaaguaggaaccagauagagaug

SEQ ID NO: 117087 - RNA, 32 nt, Homo Sapiens
ugggaagcuggaccagggcagcugcacacuua

SEQ ID NO: 117088 - RNA, 32 nt, Homo Sapiens
gggauguguuuguuaugaagaaaaucuggaug

SEQ ID NO: 117089 - RNA, 32 nt, Homo Sapiens
cacauuucuccuguuuacacucgggggauuuu

SEQ ID NO: 117090 - RNA, 32 nt, Homo Sapiens
agcccucuagauucccagguccuuaguuuccu

SEQ ID NO: 117091 - RNA, 32 nt, Homo Sapiens
caugguccugaacauugauuucagucuuugca

SEQ ID NO: 117092 - RNA, 32 nt, Homo Sapiens
guugguggaaaauaaacuaugagcagcagaaa

SEQ ID NO: 117093 - RNA, 32 nt, Homo Sapiens
aaauagucauauuuuacuuaguuuugcuguuu

SEQ ID NO: 117094 - RNA, 32 nt, Homo Sapiens
uuugccaaugaugagggaacauuugaaagaac

SEQ ID NO: 117095 - RNA, 32 nt, Homo Sapiens
acagcacccucaucaauauaaaauaugacuuc

SEQ ID NO: 117096 - RNA, 32 nt, Homo Sapiens
aaagggaaaggcaggucugggguguggucgug

SEQ ID NO: 117097 - RNA, 32 nt, Homo Sapiens
cucuggcauuaguuggucugugucacauuguc

SEQ ID NO: 117098 - RNA, 32 nt, Homo Sapiens
acuuucaugcuucugggguuggagcuuaaaga

SEQ ID NO: 117099 - RNA, 32 nt, Homo Sapiens
caaacagaggcugccacucuaagcaaacagau

SEQ ID NO: 117100 - RNA, 32 nt, Homo Sapiens
uguugugauuaguagaagcuuuguaaucauaa

SEQ ID NO: 117101 - RNA, 32 nt, Homo Sapiens
ggccuuccacacuuccagagaaugucagugug

SEQ ID NO: 117102 - RNA, 32 nt, Homo Sapiens
uuuuugaucagugccguuuuugaaagaguucg

SEQ ID NO: 117103 - RNA, 32 nt, Homo Sapiens
cggcugcugccccgcccgcgccggcggaagga

SEQ ID NO: 117104 - RNA, 32 nt, Homo Sapiens
ugucauuggaauuuauauuuuaggaauaggcu

SEQ ID NO: 117105 - RNA, 32 nt, Homo Sapiens
ggggcagcagauacacacaacaaugagaacuc

SEQ ID NO: 117106 - RNA, 32 nt, Homo Sapiens
uucuaacuuaaaagauuuuucuggagaagaua

SEQ ID NO: 117107 - RNA, 32 nt, Homo Sapiens
ccccggagggugggaggagguugcaguauucu

SEQ ID NO: 117108 - RNA, 27 nt, Homo Sapiens
gugguccccuucuucuccccaccuuau

SEQ ID NO: 117109 - RNA, 32 nt, Homo Sapiens
agacaggggccgcuccucccucccgcucccac

SEQ ID NO: 117110 - RNA, 32 nt, Homo Sapiens
cacaugugugcuugaggguggcugggaaugug

SEQ ID NO: 117111 - RNA, 32 nt, Homo Sapiens
uugaacaaggaagaggagaaaagggaauuuug

SEQ ID NO: 117112 - RNA, 32 nt, Homo Sapiens
ggcucccggcgcccggauuucacguucccccg

SEQ ID NO: 117113 - RNA, 32 nt, Homo Sapiens
aaaagauugcacaacuauauuauugauaaacc

SEQ ID NO: 117114 - RNA, 32 nt, Homo Sapiens
ccccucaagauagauccaaaacauuaccagug

SEQ ID NO: 117115 - RNA, 32 nt, Homo Sapiens
aucagagauaaaauuuguuaugaauuugcuuu

SEQ ID NO: 117116 - RNA, 32 nt, Homo Sapiens
acguuuaaaacagccuaacaaagacacuugcc

SEQ ID NO: 117117 - RNA, 31 nt, Homo Sapiens
cgaugaugaugaugaugaugaugaugucgac

SEQ ID NO: 117118 - RNA, 32 nt, Homo Sapiens
aaauacucacugacaagguggagggcuggacg

SEQ ID NO: 117119 - RNA, 32 nt, Homo Sapiens
gaucuuggcugacugcaacuucugccuccugg

SEQ ID NO: 117120 - RNA, 32 nt, Homo Sapiens
uuugauuuauuuuuauuuucucuuugugggug

SEQ ID NO: 117121 - RNA, 27 nt, Homo Sapiens
ccauggagucggggcugcugcggccgg

SEQ ID NO: 117122 - RNA, 32 nt, Homo Sapiens
agccugggcaaggggagaagguggucccugca

SEQ ID NO: 117123 - RNA, 30 nt, Homo Sapiens
cuggaauccugcggcggcggcggcggcggc

SEQ ID NO: 117124 - RNA, 32 nt, Homo Sapiens
uaccuaacuguaaauaaauguauguauagcau

SEQ ID NO: 117125 - RNA, 32 nt, Homo Sapiens
guuggcacagaaaagggaccaaguuuaaaaaa

SEQ ID NO: 117126 - RNA, 30 nt, Homo Sapiens
agagaaggagguggggauccgagugcagug

SEQ ID NO: 117127 - RNA, 32 nt, Homo Sapiens
ugauguuguuucugccccgcauuguauuuuau

SEQ ID NO: 117128 - RNA, 32 nt, Homo Sapiens
acacaggaagcacuuguuaugcuccuacuggg

SEQ ID NO: 117129 - RNA, 32 nt, Homo Sapiens
aaacuggccuugaucaguguccguauguaagg

SEQ ID NO: 117130 - RNA, 32 nt, Homo Sapiens
aguaaaaacuaaaaggcagaaaugaaauccac

SEQ ID NO: 117131 - RNA, 32 nt, Homo Sapiens
uuuauugugcuuacuugguccaaauacaucug

SEQ ID NO: 117132 - RNA, 32 nt, Homo Sapiens
agcaccgcccgcgcccgccccuggacacuugu

SEQ ID NO: 117133 - RNA, 29 nt, Homo Sapiens
cuaccuauauguaugugcuguaugugggc

SEQ ID NO: 117134 - RNA, 32 nt, Homo Sapiens
gccgggcagggaugcuccugcgcucccgggcg

SEQ ID NO: 117135 - RNA, 32 nt, Homo Sapiens
agccaugcauaagggagaggauaguguguacc

SEQ ID NO: 117136 - RNA, 32 nt, Homo Sapiens
cgacuaaggcggcagaggagcggcggcggugg

SEQ ID NO: 117137 - RNA, 32 nt, Homo Sapiens
ggagccugcuaaggaacaaugccgccugucaa

SEQ ID NO: 117138 - RNA, 32 nt, Homo Sapiens
gcgcgggcgggcgggcuauggcgcaggcgggu

SEQ ID NO: 117139 - RNA, 32 nt, Homo Sapiens
ggugggggcgagaggaggacuugggagcugga

SEQ ID NO: 117140 - RNA, 32 nt, Homo Sapiens
aaaauauacaacucuugauaaaacauaaaggu

SEQ ID NO: 117141 - RNA, 32 nt, Homo Sapiens
gaaaguaauuuucaaaguacauuugcaguucu

SEQ ID NO: 117142 - RNA, 32 nt, Homo Sapiens
gcuguagucacgagggacgggcggcggcuggu

SEQ ID NO: 117143 - RNA, 32 nt, Homo Sapiens
uuauuuacagaaaaggaaauggugggaauuca

SEQ ID NO: 117144 - RNA, 32 nt, Homo Sapiens
cuugaauuuauaaagugcugguaaauuauuuu

SEQ ID NO: 117145 - RNA, 31 nt, Homo Sapiens
ggacagcaggagguugggccaagggccagga

SEQ ID NO: 117146 - RNA, 32 nt, Homo Sapiens
ggcguggcggagccagcuccguucggaacacu

SEQ ID NO: 117147 - RNA, 32 nt, Homo Sapiens
ucuuacugugacuuaaaguuugauggagagaa

SEQ ID NO: 117148 - RNA, 32 nt, Homo Sapiens
cucugugcuauaauuuuuuaauuuaugacaug

SEQ ID NO: 117149 - RNA, 31 nt, Homo Sapiens
ugcgcauguuugacuuuagacuguaaauaga

SEQ ID NO: 117150 - RNA, 32 nt, Homo Sapiens
cuugcccuaggcaucuggggagccugcuggag

SEQ ID NO: 117151 - RNA, 32 nt, Homo Sapiens
caggguaugacgacuugaauguuuauacuuuu

SEQ ID NO: 117152 - RNA, 32 nt, Homo Sapiens
cuccggcgggcucagcggucgaggcgguggca

SEQ ID NO: 117153 - RNA, 32 nt, Homo Sapiens
caguaaaaggacagagauuaagaucagcaaag

SEQ ID NO: 117154 - RNA, 32 nt, Homo Sapiens
uguagguuauaaggcagucacuuuuucucucu

SEQ ID NO: 117155 - RNA, 32 nt, Homo Sapiens
gaugaaaggggaaaauaaaugaaaauuuuacu

SEQ ID NO: 117156 - RNA, 31 nt, Homo Sapiens
gccccugugaacacucuugguucugacacga

SEQ ID NO: 117157 - RNA, 32 nt, Homo Sapiens
ggggguugugggaggaggcagcuccugggccc

SEQ ID NO: 117158 - RNA, 32 nt, Homo Sapiens
ucuugaauauaaaaaaucaugccaguauuuuu

SEQ ID NO: 117159 - RNA, 32 nt, Homo Sapiens
gggggcggcgaggaggccauggccggggccua

SEQ ID NO: 117160 - RNA, 32 nt, Homo Sapiens
aggacccgcaugccccauccggcagcuccucc

SEQ ID NO: 117161 - RNA, 32 nt, Homo Sapiens
ccagccccacccaauggccuuuugugcuuguu

SEQ ID NO: 117162 - RNA, 32 nt, Homo Sapiens
gagccgcagcccggagcgcccggcuucccacg

SEQ ID NO: 117163 - RNA, 32 nt, Homo Sapiens
cuuaacgugucugagagccauaaaugaccuaa

SEQ ID NO: 117164 - RNA, 32 nt, Homo Sapiens
uagaagccgcucuguauccauccacgcgugca

SEQ ID NO: 117165 - RNA, 32 nt, Homo Sapiens
gggguccggggccccaggcauuccgggcugca

SEQ ID NO: 117166 - RNA, 32 nt, Homo Sapiens
gauguuccugcgccuggcugaagcuuucugag

SEQ ID NO: 117167 - RNA, 32 nt, Homo Sapiens
gaucuuugcauucuggcaguucuuuuaggauu

SEQ ID NO: 117168 - RNA, 32 nt, Homo Sapiens
caguucagcuuuggagaauggggugugagugg

SEQ ID NO: 117169 - RNA, 32 nt, Homo Sapiens
ccggcuggccuguguggagacaucacacuucc

SEQ ID NO: 117170 - RNA, 32 nt, Homo Sapiens
cgucuccccgucccccggcggccggcccaugg

SEQ ID NO: 117171 - RNA, 32 nt, Homo Sapiens
gcuacgcuagggcagggagaugucauggaaac

SEQ ID NO: 117172 - RNA, 32 nt, Homo Sapiens
gacuaaaacgaggguccuucccucauggcuga

SEQ ID NO: 117173 - RNA, 32 nt, Homo Sapiens
uugauauuugaaauguuauguacuggaaaggc

SEQ ID NO: 117174 - RNA, 32 nt, Homo Sapiens
aaauccacagaaaauauagaagauuccauuaa

SEQ ID NO: 117175 - RNA, 32 nt, Homo Sapiens
cuauuucacccccuucuuccugucacaugacc

SEQ ID NO: 117176 - RNA, 32 nt, Homo Sapiens
gagacccaccugcagcccccagcccuugccag

SEQ ID NO: 117177 - RNA, 32 nt, Homo Sapiens
ucucauucugucaucagauccagaagaaauau

SEQ ID NO: 117178 - RNA, 30 nt, Homo Sapiens
gugccauggagauggagagcgcggcggccu

SEQ ID NO: 117179 - RNA, 32 nt, Homo Sapiens
ggcggcugucgccgcggccccagcacccagag

SEQ ID NO: 117180 - RNA, 32 nt, Homo Sapiens
caguccugccuggcagaagaucaugcaguuug

SEQ ID NO: 117181 - RNA, 32 nt, Homo Sapiens
ccugacccgcggccgcggaguccggcccccac

SEQ ID NO: 117182 - RNA, 32 nt, Homo Sapiens
agauguugggaggauacagaggagaugccacu

SEQ ID NO: 117183 - RNA, 32 nt, Homo Sapiens
guucaugaagagcuggaaugacugccucaaca

SEQ ID NO: 117184 - RNA, 32 nt, Homo Sapiens
uaggaaauuuggaucaaggaagcuaaaagaau

SEQ ID NO: 117185 - RNA, 30 nt, Homo Sapiens
acauauauuaugccugccuaaguucugaac

SEQ ID NO: 117186 - RNA, 32 nt, Homo Sapiens
auuaaaaaaaauuuuuaaagagugaucauuua

SEQ ID NO: 117187 - RNA, 32 nt, Homo Sapiens
cccguagagaagauccuagagcagaaggagca

SEQ ID NO: 117188 - RNA, 32 nt, Homo Sapiens
cugcccgcgccgggcccaggaagcucggagga

SEQ ID NO: 117189 - RNA, 32 nt, Homo Sapiens
ggccagcaaugugguuccugugcacugagccc

SEQ ID NO: 117190 - RNA, 32 nt, Homo Sapiens
uauauaauauauauuuauaauguauaauuuuu

SEQ ID NO: 117191 - RNA, 32 nt, Homo Sapiens
cgguucuucuauuaccauauauuuguuuugcc

SEQ ID NO: 117192 - RNA, 32 nt, Homo Sapiens
uccucggagcacuuguuucuuuucucagaaag

SEQ ID NO: 117193 - RNA, 32 nt, Homo Sapiens
agaaugugacacauuuucaagggcaucucuau

SEQ ID NO: 117194 - RNA, 32 nt, Homo Sapiens
acggcaggcguuucaccuccuccagccucccc

SEQ ID NO: 117195 - RNA, 32 nt, Homo Sapiens
uucuuagcaaugaaauugcuguuaaaacacaa

SEQ ID NO: 117196 - RNA, 32 nt, Homo Sapiens
cccugacaugcagcccucuggaccccgagguu

SEQ ID NO: 117197 - RNA, 30 nt, Homo Sapiens
ggagaaggcaaccuugaugacucaggacag

SEQ ID NO: 117198 - RNA, 32 nt, Homo Sapiens
gccucucuugugccggccguacgcugucaggc

SEQ ID NO: 117199 - RNA, 32 nt, Homo Sapiens
agguuuuauuuugauuguguucguuucccccc

SEQ ID NO: 117200 - RNA, 32 nt, Homo Sapiens
gcaggccggcgcggcccggccauggaguccua

SEQ ID NO: 117201 - RNA, 32 nt, Homo Sapiens
cccauucucaggugagccuggcuuggucccgu

SEQ ID NO: 117202 - RNA, 32 nt, Homo Sapiens
ucugucauguguagcaaucuuuccaaauuuuu

SEQ ID NO: 117203 - RNA, 32 nt, Homo Sapiens
aguugucugugcuaauaauuggagcccacaca

SEQ ID NO: 117204 - RNA, 32 nt, Homo Sapiens
cacucugugguggucagcccucagagcuguuu

SEQ ID NO: 117205 - RNA, 31 nt, Homo Sapiens
agaacuucuuguaauuaaaagauuucaauuc

SEQ ID NO: 117206 - RNA, 32 nt, Homo Sapiens
aaauuagucaauaaaaaguuuauucaacugaa

SEQ ID NO: 117207 - RNA, 32 nt, Homo Sapiens
ucuucucgccuucgcaucuccuccucgcgcgu

SEQ ID NO: 117208 - RNA, 32 nt, Homo Sapiens
uuuugaaaacgaaauauaaaccauuuuacacu

SEQ ID NO: 117209 - RNA, 32 nt, Homo Sapiens
cacugcccagcccccaucuaccucugagacau

SEQ ID NO: 117210 - RNA, 32 nt, Homo Sapiens
ccccgcggagcccuccuaccccggcccgacgc

SEQ ID NO: 117211 - RNA, 32 nt, Homo Sapiens
ccagggccauggagguccugcugcuggucugg

SEQ ID NO: 117212 - RNA, 32 nt, Homo Sapiens
auggggggaaagggacuucuagcaaaccugca

SEQ ID NO: 117213 - RNA, 32 nt, Homo Sapiens
ccugcaggccaggccagcuuccccucacuuaa

SEQ ID NO: 117214 - RNA, 32 nt, Homo Sapiens
acaaaccagaaagcaucagggaugcuaagugc

SEQ ID NO: 117215 - RNA, 32 nt, Homo Sapiens
gguccuccaucccaacagccaugcccgcauua

SEQ ID NO: 117216 - RNA, 32 nt, Homo Sapiens
gggccgugcaggcuuccccggcggucccuacc

SEQ ID NO: 117217 - RNA, 32 nt, Homo Sapiens
ccauuggaagagaaaaguuugugacuugggcc

SEQ ID NO: 117218 - RNA, 32 nt, Homo Sapiens
agcgcaggcgcucaggccucggaggcggggcg

SEQ ID NO: 117219 - RNA, 32 nt, Homo Sapiens
ggacucugaacaaaacuaaggaaugauuuucu

SEQ ID NO: 117220 - RNA, 32 nt, Homo Sapiens
cgugccacccccagcccuggccccuccaaucc

SEQ ID NO: 117221 - RNA, 32 nt, Homo Sapiens
ccagaugugaauggaaucagauguacgaaauc

SEQ ID NO: 117222 - RNA, 32 nt, Homo Sapiens
uuuaaauugagcauauuuauguauauuggaua

SEQ ID NO: 117223 - RNA, 32 nt, Homo Sapiens
gggaggggacgccagcgccugcagaggcugag

SEQ ID NO: 117224 - RNA, 30 nt, Homo Sapiens
uacucacuggacuguuccaguuuugacagc

SEQ ID NO: 117225 - RNA, 32 nt, Homo Sapiens
cucccggccccgguucccacaggacacgcuaa

SEQ ID NO: 117226 - RNA, 32 nt, Homo Sapiens
acccaacaguuuauauggauauuuuccugcuu

SEQ ID NO: 117227 - RNA, 32 nt, Homo Sapiens
cugcccaaaccccugggccccauccauggcaa

SEQ ID NO: 117228 - RNA, 32 nt, Homo Sapiens
ggacaauuguauacagaguuaaaggcaggucu

SEQ ID NO: 117229 - RNA, 32 nt, Homo Sapiens
gcauaucuaaacaaagauugugccaccgaagu

SEQ ID NO: 117230 - RNA, 32 nt, Homo Sapiens
uaacuggacuuccuaauauauacuucuaucaa

SEQ ID NO: 117231 - RNA, 32 nt, Homo Sapiens
uuguaauuuuuguagagacgggguuucacugu

SEQ ID NO: 117232 - RNA, 32 nt, Homo Sapiens
ugggcuuauaugccuuagacacaacugggauu

SEQ ID NO: 117233 - RNA, 32 nt, Homo Sapiens
gcccaggagguugagaaugcagugagcuugua

SEQ ID NO: 117234 - RNA, 32 nt, Homo Sapiens
agccagcuaccucuccugugccugccacucaa

SEQ ID NO: 117235 - RNA, 32 nt, Homo Sapiens
acagacugacaguugguauauguaccagccaa

SEQ ID NO: 117236 - RNA, 32 nt, Homo Sapiens
aaagacauaaugcauuugaaacuguuuuuggc

SEQ ID NO: 117237 - RNA, 32 nt, Homo Sapiens
cccugcuccuggauggugggggccacugcuca

SEQ ID NO: 117238 - RNA, 32 nt, Homo Sapiens
agccuuccaaucuauguugguuuaccuguagu

SEQ ID NO: 117239 - RNA, 32 nt, Homo Sapiens
accucugcgggaagaccccgucggggagaggg

SEQ ID NO: 117240 - RNA, 30 nt, Homo Sapiens
cgcugcugggcggcggcaggguggcggacg

SEQ ID NO: 117241 - RNA, 32 nt, Homo Sapiens
caccuuguacuaguaaguuuuagcacugaauu

SEQ ID NO: 117242 - RNA, 32 nt, Homo Sapiens
accuuccugccagcuguuugcccuuaggccag

SEQ ID NO: 117243 - RNA, 32 nt, Homo Sapiens
aacuuacuaacaaacagauagguuaugaagaa

SEQ ID NO: 117244 - RNA, 32 nt, Homo Sapiens
uugguguuaggacagaagauccaagacgcguu

SEQ ID NO: 117245 - RNA, 32 nt, Homo Sapiens
gggauugcccaccgucuuccagacaccccacc

SEQ ID NO: 117246 - RNA, 28 nt, Homo Sapiens
ugcaaauguuagauacauuugaaguuug

SEQ ID NO: 117247 - RNA, 32 nt, Homo Sapiens
gcauaucagauacuucaaaauaugaaaaggac

SEQ ID NO: 117248 - RNA, 32 nt, Homo Sapiens
uacccuuuggucgagagggaaagcagaagaag

SEQ ID NO: 117249 - RNA, 32 nt, Homo Sapiens
ucaaggaagaaauaugaaauuugauuauaucc

SEQ ID NO: 117250 - RNA, 32 nt, Homo Sapiens
aaagcugcuaacuggugacaggguggaucaug

SEQ ID NO: 117251 - RNA, 32 nt, Homo Sapiens
auuuggggaaauaugaacuguauuuuaaauuu

SEQ ID NO: 117252 - RNA, 32 nt, Homo Sapiens
aggggcacucuuccuuuuucuguucaggaaua

SEQ ID NO: 117253 - RNA, 32 nt, Homo Sapiens
ggcaguagaacuuaagugucucaucaaauaua

SEQ ID NO: 117254 - RNA, 32 nt, Homo Sapiens
ugacaaagcagaguaaaaauaugcuguuuaca

SEQ ID NO: 117255 - RNA, 32 nt, Homo Sapiens
cuacuuccugucauaaccuucuaacuuguuuc

SEQ ID NO: 117256 - RNA, 32 nt, Homo Sapiens
cuaccucacagacuuguuaugaggauaaagug

SEQ ID NO: 117257 - RNA, 32 nt, Homo Sapiens
uuuguguccugucuuccuuccuccucauauuu

SEQ ID NO: 117258 - RNA, 32 nt, Homo Sapiens
cgcggagcccgcgcgccgagccccacaauggc

SEQ ID NO: 117259 - RNA, 32 nt, Homo Sapiens
uccccuacucccucuucacuguggccacagcc

SEQ ID NO: 117260 - RNA, 32 nt, Homo Sapiens
cgaggaggccgcggcgggcgcagcgggcaccu

SEQ ID NO: 117261 - RNA, 32 nt, Homo Sapiens
agauuuuagcgaagguagaaccaccguaaaca

SEQ ID NO: 117262 - RNA, 32 nt, Homo Sapiens
cugaacacccucaagagacugaagggccugac

SEQ ID NO: 117263 - RNA, 32 nt, Homo Sapiens
ggcaaaaguaugcaggaacauaaaauaaaaua

SEQ ID NO: 117264 - RNA, 32 nt, Homo Sapiens
guaggccuaccugucgcuauucugggaaaccu

SEQ ID NO: 117265 - RNA, 32 nt, Homo Sapiens
ucaucuaaaagcaggaauccuacaucaauuug

SEQ ID NO: 117266 - RNA, 32 nt, Homo Sapiens
ggcuccugguugcagagcuccaaguccucaca

SEQ ID NO: 117267 - RNA, 32 nt, Homo Sapiens
aaacaauugaucccagaagggcaaauuguuug

SEQ ID NO: 117268 - RNA, 32 nt, Homo Sapiens
agcacucguuuuucaacugagacacuacaguc

SEQ ID NO: 117269 - RNA, 32 nt, Homo Sapiens
auguaucuuaugaauagagacauauuaaaaua

SEQ ID NO: 117270 - RNA, 32 nt, Homo Sapiens
ccuguguucgguuuccaguucuaccucuugcu

SEQ ID NO: 117271 - RNA, 32 nt, Homo Sapiens
auccaccaggaacaaggcucuggcgcuuggga

SEQ ID NO: 117272 - RNA, 32 nt, Homo Sapiens
acugaggccaauggaucacucuugauuuaauu

SEQ ID NO: 117273 - RNA, 32 nt, Homo Sapiens
ccaggaagccagcaggcucucaggccagcugc

SEQ ID NO: 117274 - RNA, 32 nt, Homo Sapiens
ccaacacuuaggauugugagacuuuuuaaugu

SEQ ID NO: 117275 - RNA, 32 nt, Homo Sapiens
ccgguugccugccugggccccauguggaaggc

SEQ ID NO: 117276 - RNA, 32 nt, Homo Sapiens
gcguguaccugacuucagcugugucaccaccc

SEQ ID NO: 117277 - RNA, 32 nt, Homo Sapiens
ugguccugcuguuuccuccagucucacugcac

SEQ ID NO: 117278 - RNA, 32 nt, Homo Sapiens
gaaaagcgggcaauuugcacucgugguagaug

SEQ ID NO: 117279 - RNA, 32 nt, Homo Sapiens
uucggaaaaugguuauuuuauaugauuuguca

SEQ ID NO: 117280 - RNA, 32 nt, Homo Sapiens
augugaaauugucucaauucuuucucuuguag

SEQ ID NO: 117281 - RNA, 32 nt, Homo Sapiens
uauugauguauauaaccaucaguuuacauaca

SEQ ID NO: 117282 - RNA, 27 nt, Homo Sapiens
aagagucuuugccucagcccccagagg

SEQ ID NO: 117283 - RNA, 32 nt, Homo Sapiens
gcuuucaccauguuggccaggcuggucucaaa

SEQ ID NO: 117284 - RNA, 32 nt, Homo Sapiens
ucaucuguuucugaaauguucucacuuggcag

SEQ ID NO: 117285 - RNA, 32 nt, Homo Sapiens
ugggagaaaaagaguaagaggaaauauuccca

SEQ ID NO: 117286 - RNA, 30 nt, Homo Sapiens
uugcagugucaccacugguguaagcuacua

SEQ ID NO: 117287 - RNA, 32 nt, Homo Sapiens
aaauauaaaagucugggaagugaggagcaccu

SEQ ID NO: 117288 - RNA, 32 nt, Homo Sapiens
gcuucuuggauacagacacacccagggcagcu

SEQ ID NO: 117289 - RNA, 32 nt, Homo Sapiens
gaaguaaaggauugaucacuuuguuaaaaaua

SEQ ID NO: 117290 - RNA, 32 nt, Homo Sapiens
cucucacucugcagagaccagcggcuucgugg

SEQ ID NO: 117291 - RNA, 32 nt, Homo Sapiens
gucccagccccucccagggccggugggcuccu

SEQ ID NO: 117292 - RNA, 32 nt, Homo Sapiens
ucggggcagaggagggcggggacucggggcgg

SEQ ID NO: 117293 - RNA, 32 nt, Homo Sapiens
acaagacaacgcugaggccaguugucagacug

SEQ ID NO: 117294 - RNA, 32 nt, Homo Sapiens
uauauauggaaaaaaaucauauugccguucuu

SEQ ID NO: 117295 - RNA, 32 nt, Homo Sapiens
aaaaaggaguguaauagaagugaggggagcug

SEQ ID NO: 117296 - RNA, 32 nt, Homo Sapiens
accccuauccccugccucccccucucagaaga

SEQ ID NO: 117297 - RNA, 32 nt, Homo Sapiens
ccacuccucccauuuucaccugcccccauuuu

SEQ ID NO: 117298 - RNA, 32 nt, Homo Sapiens
augaaaggagugauccuggggcaggcaggagg

SEQ ID NO: 117299 - RNA, 32 nt, Homo Sapiens
caguuauaaaagguaauuguugagaucagggg

SEQ ID NO: 117300 - RNA, 32 nt, Homo Sapiens
cgcucuguuguccaggcuggagugcaauggca

SEQ ID NO: 117301 - RNA, 32 nt, Homo Sapiens
cucaguaauggccuggucccccggccccugcc

SEQ ID NO: 117302 - RNA, 32 nt, Homo Sapiens
accucaguuucccccaaagucuucccuggaug

SEQ ID NO: 117303 - RNA, 32 nt, Homo Sapiens
cugauagucuuuaagccauuccagucaugaug

SEQ ID NO: 117304 - RNA, 32 nt, Homo Sapiens
uggauauuuuuccgcuuggcaauuuccuuucc

SEQ ID NO: 117305 - RNA, 32 nt, Homo Sapiens
ggugauuuagaaugcaguauuggccaagucca

SEQ ID NO: 117306 - RNA, 32 nt, Homo Sapiens
ggcacccgcccggcagccuccgcaggaaccag

SEQ ID NO: 117307 - RNA, 32 nt, Homo Sapiens
cccagggacaacuuauaaauauccugauuugc

SEQ ID NO: 117308 - RNA, 32 nt, Homo Sapiens
auaaauaaacacacuauggcaugaaugaaaaa

SEQ ID NO: 117309 - RNA, 32 nt, Homo Sapiens
uagaccaaaccuaauuccauucuuacugauau

SEQ ID NO: 117310 - RNA, 32 nt, Homo Sapiens
gcaguuccaagugacaguacagagcacagcag

SEQ ID NO: 117311 - RNA, 32 nt, Homo Sapiens
uuucuuacugguuuuuccaauaaguaauagca

SEQ ID NO: 117312 - RNA, 32 nt, Homo Sapiens
uuaucuggcaaauagauguaaauaucaacaug

SEQ ID NO: 117313 - RNA, 32 nt, Homo Sapiens
ucugcaggcggaccaagaacugugccacaggg

SEQ ID NO: 117314 - RNA, 32 nt, Homo Sapiens
cccccauuuuuccuuuucacccaaaaaagucc

SEQ ID NO: 117315 - RNA, 32 nt, Homo Sapiens
ccggggcagggccggggccagagcucgcgugu

SEQ ID NO: 117316 - RNA, 32 nt, Homo Sapiens
cuuauucaauuucuaaagcacuuacguugugc

SEQ ID NO: 117317 - RNA, 32 nt, Homo Sapiens
aggaccaggggcacguggaacuucugggccuu

SEQ ID NO: 117318 - RNA, 32 nt, Homo Sapiens
uggggcgccuccccggcccagggccaacuggg

SEQ ID NO: 117319 - RNA, 32 nt, Homo Sapiens
uuuuuagagucuucuuauuucugaagcaugug

SEQ ID NO: 117320 - RNA, 32 nt, Homo Sapiens
auuagucgaacauuuauuaaaaauauaagagc

SEQ ID NO: 117321 - RNA, 32 nt, Homo Sapiens
cgcagccaccugccuccaccccgucugucauc

SEQ ID NO: 117322 - RNA, 32 nt, Homo Sapiens
cuucuuccccuucccuggcccugcagggccuu

SEQ ID NO: 117323 - RNA, 32 nt, Homo Sapiens
uaccgcugcacuccagccugggugauagagca

SEQ ID NO: 117324 - RNA, 32 nt, Homo Sapiens
ugguucggaccucggcaacuggccgcacugac

SEQ ID NO: 117325 - RNA, 32 nt, Homo Sapiens
gccgaggggagaucagccauggagcagccaca

SEQ ID NO: 117326 - RNA, 32 nt, Homo Sapiens
ugagaccaaccuggccaacauguugaaaccuc

SEQ ID NO: 117327 - RNA, 32 nt, Homo Sapiens
uguaaucuugccauuagguuuggaccugccau

SEQ ID NO: 117328 - RNA, 32 nt, Homo Sapiens
gccaaugugaauuguggucuacaaauacauug

SEQ ID NO: 117329 - RNA, 32 nt, Homo Sapiens
aguuucaccauguuggccaggcuggucucgaa

SEQ ID NO: 117330 - RNA, 32 nt, Homo Sapiens
acugauucaauuauaauuguaauggauuuuug

SEQ ID NO: 117331 - RNA, 32 nt, Homo Sapiens
cacacgaucugugcacagugggacagaacaug

SEQ ID NO: 117332 - RNA, 32 nt, Homo Sapiens
accugcuccagugccuggaccucgugguccuc

SEQ ID NO: 117333 - RNA, 32 nt, Homo Sapiens
aaauauuuauuaugauaagaaaugauccuuuc

SEQ ID NO: 117334 - RNA, 32 nt, Homo Sapiens
gugugugccugcgcacccaugcgcaugcaagu

SEQ ID NO: 117335 - RNA, 32 nt, Homo Sapiens
caccggcccucccagcccggccagccugagcu

SEQ ID NO: 117336 - RNA, 32 nt, Homo Sapiens
gaaccagcugcagagaucacccugcccaacac

SEQ ID NO: 117337 - RNA, 32 nt, Homo Sapiens
caguuuuacaauaaagauaauaaaaaccaaca

SEQ ID NO: 117338 - RNA, 32 nt, Homo Sapiens
augauuuaaauaucggcguuaagauuucaaca

SEQ ID NO: 117339 - RNA, 32 nt, Homo Sapiens
cuccagccuuucuggagggaugcagagccuuu

SEQ ID NO: 117340 - RNA, 29 nt, Homo Sapiens
agaaagaugaagaaacuuaugagaccuuu

SEQ ID NO: 117341 - RNA, 32 nt, Homo Sapiens
cucccuguaacugagauuucuaccacaccuuu

SEQ ID NO: 117342 - RNA, 32 nt, Homo Sapiens
gcccuaccauugaggagguggauuagggccuu

SEQ ID NO: 117343 - RNA, 32 nt, Homo Sapiens
acuacaagggaagaaugcagacaaucaaaugu

SEQ ID NO: 117344 - RNA, 32 nt, Homo Sapiens
aguuaccacugggagaccuuugaaaagggucc

SEQ ID NO: 117345 - RNA, 32 nt, Homo Sapiens
gcccgaggcugagacucaccggaggaagcggc

SEQ ID NO: 117346 - RNA, 32 nt, Homo Sapiens
aguauugaaaagacaggagaaaagcaaacaga

SEQ ID NO: 117347 - RNA, 32 nt, Homo Sapiens
cuguggcagcgggaguucccggcccuccacac

SEQ ID NO: 117348 - RNA, 32 nt, Homo Sapiens
aaaaauuagcuaggcgugguggugagagcugg

SEQ ID NO: 117349 - RNA, 32 nt, Homo Sapiens
gaaaagcccaaguucaugcagcuguggcagag

SEQ ID NO: 117350 - RNA, 32 nt, Homo Sapiens
augaacagcaaaaaccagaaaacuauuuuuaa

SEQ ID NO: 117351 - RNA, 32 nt, Homo Sapiens
auuuaauccaaauaauaaauggcuguuucuaa

SEQ ID NO: 117352 - RNA, 32 nt, Homo Sapiens
uaaauuuuaagugguucuuugguuccagugcu

SEQ ID NO: 117353 - RNA, 32 nt, Homo Sapiens
agggaaccacacacucaagcacuuuggaaccc

SEQ ID NO: 117354 - RNA, 32 nt, Homo Sapiens
aacuaaaugcaaagaguuugcauuugaaaaua

SEQ ID NO: 117355 - RNA, 32 nt, Homo Sapiens
uugaagucaucacuuaaaaguucugcuuuaca

SEQ ID NO: 117356 - RNA, 30 nt, Homo Sapiens
gaacgauggcggcggcagcugccgccgggc

SEQ ID NO: 117357 - RNA, 32 nt, Homo Sapiens
cugauauuaaaauauugauuuuaauugaucuu

SEQ ID NO: 117358 - RNA, 32 nt, Homo Sapiens
caauuggcucucuguaaaauggaccaaucagg

SEQ ID NO: 117359 - RNA, 32 nt, Homo Sapiens
agccagccgcuguuuugccggaggagccccuc

SEQ ID NO: 117360 - RNA, 32 nt, Homo Sapiens
augcucuguaucagaugcuaacaucaacacaa

SEQ ID NO: 117361 - RNA, 32 nt, Homo Sapiens
ggguccagugcagcugcugcugggcacuuccu

SEQ ID NO: 117362 - RNA, 32 nt, Homo Sapiens
gugcauauagauauuucuuaaaugaaaaaaaa

SEQ ID NO: 117363 - RNA, 32 nt, Homo Sapiens
auuccaugucucaagauuuucuuaauuuaguu

SEQ ID NO: 117364 - RNA, 32 nt, Homo Sapiens
gcuagcauuggaaacaacaacaacaacaaaac

SEQ ID NO: 117365 - RNA, 32 nt, Homo Sapiens
caaggacgagcuguaagaggccugccuccagg

SEQ ID NO: 117366 - RNA, 32 nt, Homo Sapiens
acacuccauuuucccaugucugacuucguggu

SEQ ID NO: 117367 - RNA, 32 nt, Homo Sapiens
aaauggccuagcuauuugaugagaagaccaaa

SEQ ID NO: 117368 - RNA, 32 nt, Homo Sapiens
uacaggugugagccaccacaccuggccaagaa

SEQ ID NO: 117369 - RNA, 32 nt, Homo Sapiens
aagucaagauuuggaauuuaagucacuggcag

SEQ ID NO: 117370 - RNA, 32 nt, Homo Sapiens
cuauguuacuaagccuuagucuacacugaacu

SEQ ID NO: 117371 - RNA, 32 nt, Homo Sapiens
gagagcugcuaaauuguuuucuuaauaaacau

SEQ ID NO: 117372 - RNA, 32 nt, Homo Sapiens
ugcuuuuccgaguugcucuucuuccaggcucc

SEQ ID NO: 117373 - RNA, 32 nt, Homo Sapiens
aucacuaaaaauuuuuacaaaacugccaaaaa

SEQ ID NO: 117374 - RNA, 32 nt, Homo Sapiens
ucuauuuguguacaaaaugaugucguuuugag

SEQ ID NO: 117375 - RNA, 32 nt, Homo Sapiens
ugaagcugccagaaguuuuuccuuuaacucau

SEQ ID NO: 117376 - RNA, 32 nt, Homo Sapiens
accacaggaauaccuaaugccuuuuuucucuu

SEQ ID NO: 117377 - RNA, 32 nt, Homo Sapiens
acaaaaaguagauaguuucacuuuuuaaaaaa

SEQ ID NO: 117378 - RNA, 28 nt, Homo Sapiens
ugaagcaggagguggcauuugaaaugaa

SEQ ID NO: 117379 - RNA, 32 nt, Homo Sapiens
uucugauuaaccuuaaaccaacuuguagccau

SEQ ID NO: 117380 - RNA, 32 nt, Homo Sapiens
gcauacuuucccugcacccaucugcucaccag

SEQ ID NO: 117381 - RNA, 32 nt, Homo Sapiens
ugucuuuuaaacaguucuaguuucaccuuaca

SEQ ID NO: 117382 - RNA, 32 nt, Homo Sapiens
caccagggccuuguugaacagauccacacugc

SEQ ID NO: 117383 - RNA, 30 nt, Homo Sapiens
gccuuugaucuugccacucaucacaaacau

SEQ ID NO: 117384 - RNA, 31 nt, Homo Sapiens
gaagcuccacggagaggaacgcucucugcuu

SEQ ID NO: 117385 - RNA, 32 nt, Homo Sapiens
gagccugcggcuguggcaaggccuguuucugc

SEQ ID NO: 117386 - RNA, 32 nt, Homo Sapiens
cgugggcgccgacgaguucgaggagagccucc

SEQ ID NO: 117387 - RNA, 32 nt, Homo Sapiens
ugaguaucgaccguauuuuguaaaaggcaaga

SEQ ID NO: 117388 - RNA, 32 nt, Homo Sapiens
uggugugcaccuguaguuucagcuauucggga

SEQ ID NO: 117389 - RNA, 32 nt, Homo Sapiens
cgggagucggugaggcggcugcaggucccucc

SEQ ID NO: 117390 - RNA, 32 nt, Homo Sapiens
uuggaaacgcaguagaaaauggcugccaauuu

SEQ ID NO: 117391 - RNA, 32 nt, Homo Sapiens
aacaaauccaacaauuucugaagcuuagugua

SEQ ID NO: 117392 - RNA, 32 nt, Homo Sapiens
ucucaccaguucuagcgaguaaaauugcgucc

SEQ ID NO: 117393 - RNA, 32 nt, Homo Sapiens
aaaaaauauuuuuuaaacaaaggauauaacca

SEQ ID NO: 117394 - RNA, 32 nt, Homo Sapiens
ccaucccccucauuuuaaauguugcccuaaua

SEQ ID NO: 117395 - RNA, 32 nt, Homo Sapiens
gaggaaguagcuggacaggcccugccccucac

SEQ ID NO: 117396 - RNA, 32 nt, Homo Sapiens
caggacagcuuugaauguggcccaauacaaau

SEQ ID NO: 117397 - RNA, 32 nt, Homo Sapiens
cacaaaaacccaggcgcugcuggcuguaaaca

SEQ ID NO: 117398 - RNA, 32 nt, Homo Sapiens
gaaucugcagagggcucugggacucacugccg

SEQ ID NO: 117399 - RNA, 32 nt, Homo Sapiens
uuuuuuuuuuucuguuagcaaucaugguuauu

SEQ ID NO: 117400 - RNA, 32 nt, Homo Sapiens
cauauuuuauucuuuuuccccugauaacaagu

SEQ ID NO: 117401 - RNA, 32 nt, Homo Sapiens
aauauguuuucaaugccugaugaccuauaaga

SEQ ID NO: 117402 - RNA, 32 nt, Homo Sapiens
uuagauagauaaacuuuuugccacuauaugac

SEQ ID NO: 117403 - RNA, 32 nt, Homo Sapiens
aagaggacuaagcauggauggcagccggagag

SEQ ID NO: 117404 - RNA, 32 nt, Homo Sapiens
cguucccagaggcuccuccugcggugcuccca

SEQ ID NO: 117405 - RNA, 32 nt, Homo Sapiens
cucaugaaauuuaagcaauauagguuuagcua

SEQ ID NO: 117406 - RNA, 30 nt, Homo Sapiens
aaggagagaagacgccacagauuuccuucc

SEQ ID NO: 117407 - RNA, 32 nt, Homo Sapiens
cugacuaucgccauccgcgugcccuacgcccg

SEQ ID NO: 117408 - RNA, 30 nt, Homo Sapiens
agcccgcuugcucgcuugcuggaacacagg

SEQ ID NO: 117409 - RNA, 32 nt, Homo Sapiens
aggauuggaggcacuuuccagcccugugcagu

SEQ ID NO: 117410 - RNA, 32 nt, Homo Sapiens
uguaugucaaccccagaggcccuucaccgcaa

SEQ ID NO: 117411 - RNA, 32 nt, Homo Sapiens
cguuaagcagaagaagucaguaguuauucucc

SEQ ID NO: 117412 - RNA, 32 nt, Homo Sapiens
uggggagcuuggcugagggucugggaaaugag

SEQ ID NO: 117413 - RNA, 32 nt, Homo Sapiens
gaaauccagcagggggugggaugugugauuug

SEQ ID NO: 117414 - RNA, 32 nt, Homo Sapiens
cauucugauuacucuuuuuuuaaguuaaagac

SEQ ID NO: 117415 - RNA, 32 nt, Homo Sapiens
cuuguccuggcuucagcuuccaacuacaaaga

SEQ ID NO: 117416 - RNA, 32 nt, Homo Sapiens
cgcagcggcugcgaccugcggcuggacgcaga

SEQ ID NO: 117417 - RNA, 32 nt, Homo Sapiens
gguucuggcggcacaggccccggaguggaggg

SEQ ID NO: 117418 - RNA, 32 nt, Homo Sapiens
aauguaucuauuuguacaauuuuaaaguucuu

SEQ ID NO: 117419 - RNA, 32 nt, Homo Sapiens
ugaaauucuccuccuucuucccuuuccagcaa

SEQ ID NO: 117420 - RNA, 32 nt, Homo Sapiens
gugucucugugccuauguggcugugcuauggu

SEQ ID NO: 117421 - RNA, 32 nt, Homo Sapiens
ucccacccgaggucuguguccacagccccugc

SEQ ID NO: 117422 - RNA, 32 nt, Homo Sapiens
aagcaucauucaucuccauuuauuucuuuugu

SEQ ID NO: 117423 - RNA, 32 nt, Homo Sapiens
auguauuaacucucuuuggaugaugaaguuua

SEQ ID NO: 117424 - RNA, 32 nt, Homo Sapiens
gcagagccgagggcccgcugccccacaccggu

SEQ ID NO: 117425 - RNA, 32 nt, Homo Sapiens
cauuucaaggcuggcagccaucuuagauuucu

SEQ ID NO: 117426 - RNA, 32 nt, Homo Sapiens
gccaaggcggguggauuacgaggucaggaguu

SEQ ID NO: 117427 - RNA, 32 nt, Homo Sapiens
cacugcacuccagccugggugacagaguaaua

SEQ ID NO: 117428 - RNA, 32 nt, Homo Sapiens
ugcccaggaggaguaggagcaggagcagaagc

SEQ ID NO: 117429 - RNA, 32 nt, Homo Sapiens
ucaucuguccccaggguugaccucaggacugc

SEQ ID NO: 117430 - RNA, 32 nt, Homo Sapiens
acagccuccgucugcuggcucuucguggaagg

SEQ ID NO: 117431 - RNA, 32 nt, Homo Sapiens
cuucuguccuuucuccucuccucaaaucucug

SEQ ID NO: 117432 - RNA, 32 nt, Homo Sapiens
uuuaagaaacaaaacauaguaucuuauggauu

SEQ ID NO: 117433 - RNA, 32 nt, Homo Sapiens
uaucagugcaucuacagaaguguuauuuggua

SEQ ID NO: 117434 - RNA, 32 nt, Homo Sapiens
cuccuuuuugacucccucccccuuuaugcucg

SEQ ID NO: 117435 - RNA, 30 nt, Homo Sapiens
guuaggaauaaaagaugaaacuauuguauc

SEQ ID NO: 117436 - RNA, 32 nt, Homo Sapiens
cuggacacucaccauuggcugugacgaagcag

SEQ ID NO: 117437 - RNA, 32 nt, Homo Sapiens
cgauggcagggcgggguagugcggaggugggg

SEQ ID NO: 117438 - RNA, 32 nt, Homo Sapiens
guucccaggcuggucucaaacuccugggcuca

SEQ ID NO: 117439 - RNA, 32 nt, Homo Sapiens
auaaauaauucaauagaguccuggauacgugc

SEQ ID NO: 117440 - RNA, 32 nt, Homo Sapiens
guaaauagaacacucaaaugucuuaaaauauu

SEQ ID NO: 117441 - RNA, 27 nt, Homo Sapiens
uaugugcucuccuucagcccucuccuu

SEQ ID NO: 117442 - RNA, 32 nt, Homo Sapiens
auauaaaguauaaauauguuuauauucuguac

SEQ ID NO: 117443 - RNA, 32 nt, Homo Sapiens
gcuggggaggggcugccuguuuuacucaccca

SEQ ID NO: 117444 - RNA, 32 nt, Homo Sapiens
cgagaagccaucucgguccuugcuggaaggug

SEQ ID NO: 117445 - RNA, 32 nt, Homo Sapiens
gcaccucuguucauagagcgucucugaaauug

SEQ ID NO: 117446 - RNA, 32 nt, Homo Sapiens
auuaaacgacugugucuuugucaccucugcuu

SEQ ID NO: 117447 - RNA, 32 nt, Homo Sapiens
ucucgggccccggacccaguccgcauccgucg

SEQ ID NO: 117448 - RNA, 32 nt, Homo Sapiens
ccuaaaguuacuaugagaaguggggugaggug

SEQ ID NO: 117449 - RNA, 32 nt, Homo Sapiens
aagacgacacugggcuuugcacagccuggugu

SEQ ID NO: 117450 - RNA, 31 nt, Homo Sapiens
ccgccgcccaaccgccugcccagcgcugagg

SEQ ID NO: 117451 - RNA, 32 nt, Homo Sapiens
ucugacacugccgaguccgaucggagaggggu

SEQ ID NO: 117452 - RNA, 32 nt, Homo Sapiens
uuaccucaguuuccucuuucagucuguggugu

SEQ ID NO: 117453 - RNA, 32 nt, Homo Sapiens
uuuucugugaacucuuuuuuuuuuuuuuuuuu

SEQ ID NO: 117454 - RNA, 32 nt, Homo Sapiens
ggcuauuguuuuuauauuguguaauaacucac

SEQ ID NO: 117455 - RNA, 32 nt, Homo Sapiens
ucccgccgcccggcccgacaugagugaggcgg

SEQ ID NO: 117456 - RNA, 32 nt, Homo Sapiens
auagcuauggacuguuggauacaggauacagu

SEQ ID NO: 117457 - RNA, 32 nt, Homo Sapiens
agauguggaaaggggcugauccagauuggguc

SEQ ID NO: 117458 - RNA, 32 nt, Homo Sapiens
uauguauguaagcucacaggagggauccagca

SEQ ID NO: 117459 - RNA, 32 nt, Homo Sapiens
ccuucagaccaaugagcgucagggccagcgac

SEQ ID NO: 117460 - RNA, 32 nt, Homo Sapiens
agggcuccuggagcugcaggcggcgggagggg

SEQ ID NO: 117461 - RNA, 29 nt, Homo Sapiens
uggacauggccuauguaccuaacguggcc

SEQ ID NO: 117462 - RNA, 32 nt, Homo Sapiens
uuuugugauuuacuuuuucuguaagccuuuug

SEQ ID NO: 117463 - RNA, 32 nt, Homo Sapiens
ugugacuguccccaagcccacuccaaacaaag

SEQ ID NO: 117464 - RNA, 32 nt, Homo Sapiens
auaaccucgaugauguaaauccacccaaagau

SEQ ID NO: 117465 - RNA, 32 nt, Homo Sapiens
ggcuggugagcuuggcgggucugugggcacgg

SEQ ID NO: 117466 - RNA, 32 nt, Homo Sapiens
uuuaguuuggggguuuugcuguuuccuuuuau

SEQ ID NO: 117467 - RNA, 30 nt, Homo Sapiens
ucugaguagaagcuuuaagagucaguguag

SEQ ID NO: 117468 - RNA, 32 nt, Homo Sapiens
ccaccagcuggagcgaggccgacacggagccg

SEQ ID NO: 117469 - RNA, 32 nt, Homo Sapiens
uagauuuuacagcauauaugcaugcauauaua

SEQ ID NO: 117470 - RNA, 31 nt, Homo Sapiens
gagcggucccgcagccaacccccgaagagca

SEQ ID NO: 117471 - RNA, 32 nt, Homo Sapiens
uagccuauuuuugugcuuaagauacugaaugg

SEQ ID NO: 117472 - RNA, 32 nt, Homo Sapiens
cucccaacuaugaauaaagcuuugaaaggcca

SEQ ID NO: 117473 - RNA, 32 nt, Homo Sapiens
ucaggccaguugcagccuucucagccaaacgc

SEQ ID NO: 117474 - RNA, 32 nt, Homo Sapiens
caggccaucuugaacuccugaccugaagugac

SEQ ID NO: 117475 - RNA, 32 nt, Homo Sapiens
cccgggugucguccggccucuugugcucgagc

SEQ ID NO: 117476 - RNA, 32 nt, Homo Sapiens
aagaucugagguuuuuaacauaaagucugaug

SEQ ID NO: 117477 - RNA, 32 nt, Homo Sapiens
aguacaacagcuucuuugaggacccagugggu

SEQ ID NO: 117478 - RNA, 32 nt, Homo Sapiens
uccucuagguagucacacuucacuaaagcguc

SEQ ID NO: 117479 - RNA, 32 nt, Homo Sapiens
aaaugaugaaacaaaaguuugacagugauauu

SEQ ID NO: 117480 - RNA, 32 nt, Homo Sapiens
gcaguuugaccccacgcccagcccuucuggca

SEQ ID NO: 117481 - RNA, 32 nt, Homo Sapiens
cauaaggcggggccggcgcgggccuuuccuuc

SEQ ID NO: 117482 - RNA, 32 nt, Homo Sapiens
ugacagcccccauacacgaucuguaaauaaau

SEQ ID NO: 117483 - RNA, 32 nt, Homo Sapiens
gagacaagcacgccagccauuggcucauaaug

SEQ ID NO: 117484 - RNA, 32 nt, Homo Sapiens
uccuuauuuuugauuucuuuaaaauggaggga

SEQ ID NO: 117485 - RNA, 32 nt, Homo Sapiens
auuucacaaaaauaucuuuugaaauuggcuuu

SEQ ID NO: 117486 - RNA, 32 nt, Homo Sapiens
gauggauguguuugugguuuguaaccauuacg

SEQ ID NO: 117487 - RNA, 32 nt, Homo Sapiens
uuuuaguggaggugggauuuugccauguuggc

SEQ ID NO: 117488 - RNA, 32 nt, Homo Sapiens
ccagcugcuggauaauacagaggaacuucaac

SEQ ID NO: 117489 - RNA, 32 nt, Homo Sapiens
cuaacauuguuguuauaagaaaaugaguuuac

SEQ ID NO: 117490 - RNA, 32 nt, Homo Sapiens
gcacuggagagccauggcagucgugagauauu

SEQ ID NO: 117491 - RNA, 32 nt, Homo Sapiens
gggccggggaggggcuaggagcucggauuucu

SEQ ID NO: 117492 - RNA, 32 nt, Homo Sapiens
cgccucucgcugucacugucccagcggcugcg

SEQ ID NO: 117493 - RNA, 32 nt, Homo Sapiens
aaggaccugacucuguguggacgcaaaggcaa

SEQ ID NO: 117494 - RNA, 32 nt, Homo Sapiens
gggccgcgggcagcgucgccucacgcggagca

SEQ ID NO: 117495 - RNA, 30 nt, Homo Sapiens
uaccugggagguggagggagacaggagaga

SEQ ID NO: 117496 - RNA, 32 nt, Homo Sapiens
aaacaguucauguguucacaaaaauugccucc

SEQ ID NO: 117497 - RNA, 32 nt, Homo Sapiens
gcugccuuuccacagggacccugcacucgacc

SEQ ID NO: 117498 - RNA, 32 nt, Homo Sapiens
uugccuuucuucuugaacugucuugcagaaug

SEQ ID NO: 117499 - RNA, 32 nt, Homo Sapiens
uagagaggacuacacaucagggcuugauuuau

SEQ ID NO: 117500 - RNA, 32 nt, Homo Sapiens
ucugucucugacgacacccccagccagcucag

SEQ ID NO: 117501 - RNA, 32 nt, Homo Sapiens
ugcgucccaagcagccgcagcgcagccgccgg

SEQ ID NO: 117502 - RNA, 32 nt, Homo Sapiens
uugccaucaaaauaaaaauuugagacucguua

SEQ ID NO: 117503 - RNA, 32 nt, Homo Sapiens
gccuuuaaucccaacacuuuggaaggcugagg

SEQ ID NO: 117504 - RNA, 32 nt, Homo Sapiens
agccgcgguccgcgaugucaagcgaggaaagc

SEQ ID NO: 117505 - RNA, 32 nt, Homo Sapiens
acccugagggcuuuuucgaacaaggugucugg

SEQ ID NO: 117506 - RNA, 32 nt, Homo Sapiens
gagacagagucucacugucacccaggcuggag

SEQ ID NO: 117507 - RNA, 32 nt, Homo Sapiens
gcaucuuauagcagugccuuugucucagggcc

SEQ ID NO: 117508 - RNA, 32 nt, Homo Sapiens
cgacuaauuuuuguauuuugaguagagauggg

SEQ ID NO: 117509 - RNA, 32 nt, Homo Sapiens
auccagcccagcuguccccagccccgcgccuc

SEQ ID NO: 117510 - RNA, 32 nt, Homo Sapiens
cuucacugcaagccgaagaguccucccauccc

SEQ ID NO: 117511 - RNA, 32 nt, Homo Sapiens
uccaguggcucugucauggugauaaaaagagu

SEQ ID NO: 117512 - RNA, 32 nt, Homo Sapiens
cugaggaggugcauggccugagcauuguuugu

SEQ ID NO: 117513 - RNA, 29 nt, Homo Sapiens
ccgcuucggggaggaggacgcugaggagg

SEQ ID NO: 117514 - RNA, 32 nt, Homo Sapiens
ccgggaggacaaaggcaggcacgguccccacc

SEQ ID NO: 117515 - RNA, 32 nt, Homo Sapiens
gaaaucacagcccccucgccccugccucccuu

SEQ ID NO: 117516 - RNA, 32 nt, Homo Sapiens
uuguaugaguuguaaguaaucuugccaaaggu

SEQ ID NO: 117517 - RNA, 32 nt, Homo Sapiens
uucacuuaugaauaaacuugauaauggaaacg

SEQ ID NO: 117518 - RNA, 32 nt, Homo Sapiens
gaucacuacaaggagcuguuaucuuuuuucua

SEQ ID NO: 117519 - RNA, 32 nt, Homo Sapiens
auaaaggucauuuaaggacauaaguuuuuaaa

SEQ ID NO: 117520 - RNA, 32 nt, Homo Sapiens
cacccccgggcuucgcagccuugcuuguuuuc

SEQ ID NO: 117521 - RNA, 32 nt, Homo Sapiens
ggcgagagaggaaagcacuguggagaggcaca

SEQ ID NO: 117522 - RNA, 32 nt, Homo Sapiens
ggaugccuuggaagaaaaagggaaacaaaacu

SEQ ID NO: 117523 - RNA, 32 nt, Homo Sapiens
uucugaaacaacaaggagagagucuguuuuuc

SEQ ID NO: 117524 - RNA, 32 nt, Homo Sapiens
ggcaucggaaggccagccuguuguguccguuu

SEQ ID NO: 117525 - RNA, 32 nt, Homo Sapiens
uaagcagcuugccaaucacuccaggucugaaa

SEQ ID NO: 117526 - RNA, 32 nt, Homo Sapiens
aggucagcgcugccucccccgacccacucagc

SEQ ID NO: 117527 - RNA, 32 nt, Homo Sapiens
auaaguguugugaacccccacccaggcaguau

SEQ ID NO: 117528 - RNA, 32 nt, Homo Sapiens
uuguuuugaggcacaaugaaacuuuagccaaa

SEQ ID NO: 117529 - RNA, 32 nt, Homo Sapiens
augcagcuccagcccagccuucuacuuugugu

SEQ ID NO: 117530 - RNA, 32 nt, Homo Sapiens
gccagagaaccauuaagaaggggccuucauuc

SEQ ID NO: 117531 - RNA, 32 nt, Homo Sapiens
aacugcuguccacguggaccgggggugacauc

SEQ ID NO: 117532 - RNA, 32 nt, Homo Sapiens
cuuuccacacucagcucucccuccucaacccc

SEQ ID NO: 117533 - RNA, 32 nt, Homo Sapiens
uccugggcucugccccagcauccccccgagcc

SEQ ID NO: 117534 - RNA, 32 nt, Homo Sapiens
ucauguuugagaauuuuuuuuauugcuuucau

SEQ ID NO: 117535 - RNA, 32 nt, Homo Sapiens
aaauaaaguuuuuauuuuuuuaucaucuuuua

SEQ ID NO: 117536 - RNA, 32 nt, Homo Sapiens
gauuggccgggcgugguggcgcgugccugugg

SEQ ID NO: 117537 - RNA, 32 nt, Homo Sapiens
uuuauuuuucuuuucauuacaucagguauauu

SEQ ID NO: 117538 - RNA, 32 nt, Homo Sapiens
ugaaugauggaaauguuuuucuuaaaauauuu

SEQ ID NO: 117539 - RNA, 32 nt, Homo Sapiens
gaggagaucgugucuccaccgcagggcugggg

SEQ ID NO: 117540 - RNA, 32 nt, Homo Sapiens
cccaucacccccagaugggaccaucuaguugc

SEQ ID NO: 117541 - RNA, 32 nt, Homo Sapiens
caggugcaggggcuucuguuuggcaggccccu

SEQ ID NO: 117542 - RNA, 32 nt, Homo Sapiens
agguaucaaauuaucuccacuuguguuuguau

SEQ ID NO: 117543 - RNA, 32 nt, Homo Sapiens
ucuggcucugcucugugacccuggacaaguca

SEQ ID NO: 117544 - RNA, 32 nt, Homo Sapiens
uuuuaauuuaauaugaaaaaugccacuauauu

SEQ ID NO: 117545 - RNA, 32 nt, Homo Sapiens
cugcuguccuccaugaugugacuagcacaagg

SEQ ID NO: 117546 - RNA, 32 nt, Homo Sapiens
aauacgcgcucccucccucccccuucucuguc

SEQ ID NO: 117547 - RNA, 32 nt, Homo Sapiens
cgacaccgauuuccucucgccgagcggcggug

SEQ ID NO: 117548 - RNA, 31 nt, Homo Sapiens
ccggaugugccacuggagccccgcgggucuc

SEQ ID NO: 117549 - RNA, 32 nt, Homo Sapiens
uucuugguguuguuauggcaaguuuuugguaa

SEQ ID NO: 117550 - RNA, 32 nt, Homo Sapiens
uugaguugaagaucuuugacauagguucuucu

SEQ ID NO: 117551 - RNA, 32 nt, Homo Sapiens
gaaacauaaauaaaaugaccaguaauugugaa

SEQ ID NO: 117552 - RNA, 32 nt, Homo Sapiens
uccugguuugcaagacuaaguguaccuaaucu

SEQ ID NO: 117553 - RNA, 32 nt, Homo Sapiens
acccuggaaaagucuguaauuaccuuagccag

SEQ ID NO: 117554 - RNA, 32 nt, Homo Sapiens
acugucgcucugucauguguagcaaucuuucc

SEQ ID NO: 117555 - RNA, 32 nt, Homo Sapiens
ucugaguguuuaauuuccgauuuuuuccucug

SEQ ID NO: 117556 - RNA, 32 nt, Homo Sapiens
aauugugggugucaagcuucagccacgcaauu

SEQ ID NO: 117557 - RNA, 32 nt, Homo Sapiens
gcggagcugcgcgcacuggguccccaagagcc

SEQ ID NO: 117558 - RNA, 32 nt, Homo Sapiens
aauaauucauuuccugggaaugacagcagaaa

SEQ ID NO: 117559 - RNA, 32 nt, Homo Sapiens
acgaggucaggagaucgagacuauccuggcua

SEQ ID NO: 117560 - RNA, 32 nt, Homo Sapiens
uuuaacaucuuuguuuuuaaaauagaaugaua

SEQ ID NO: 117561 - RNA, 32 nt, Homo Sapiens
aauuacaaauguugaggccuaauucugaaagu

SEQ ID NO: 117562 - RNA, 32 nt, Homo Sapiens
cuguauucuggagaucagcuccagguucuccc

SEQ ID NO: 117563 - RNA, 32 nt, Homo Sapiens
aagaugaggguagaagauguuaagaucccagg

SEQ ID NO: 117564 - RNA, 32 nt, Homo Sapiens
aacuacaugcuugauuaaaccauuaaaugcuu

SEQ ID NO: 117565 - RNA, 32 nt, Homo Sapiens
caagaaaaagaagauaaggaaauggaagcuac

SEQ ID NO: 117566 - RNA, 32 nt, Homo Sapiens
uuugggggaggguggggggagggagggcauug

SEQ ID NO: 117567 - RNA, 32 nt, Homo Sapiens
auaucugguacauguuugauaaugacuugauu

SEQ ID NO: 117568 - RNA, 32 nt, Homo Sapiens
acagggaagcuggccugguccagggcacugau

SEQ ID NO: 117569 - RNA, 32 nt, Homo Sapiens
gaugcucaaauccuaaggugccaagcucuagg

SEQ ID NO: 117570 - RNA, 32 nt, Homo Sapiens
ugaccuccagcuuggugagguugccugaagau

SEQ ID NO: 117571 - RNA, 32 nt, Homo Sapiens
ucugaaacaacaauggucacccucuugagauu

SEQ ID NO: 117572 - RNA, 32 nt, Homo Sapiens
acucaccccgggcuaccauugacaucagggcu

SEQ ID NO: 117573 - RNA, 32 nt, Homo Sapiens
acaccuagcuaauuuuguauuuuuaguagaga

SEQ ID NO: 117574 - RNA, 32 nt, Homo Sapiens
cuggggcggcggugcuggagguugcggcggcg

SEQ ID NO: 117575 - RNA, 32 nt, Homo Sapiens
acauuuucauccuggggucuugcugugggggc

SEQ ID NO: 117576 - RNA, 32 nt, Homo Sapiens
ccucccaaguagcuaagaccacaggcacaugc

SEQ ID NO: 117577 - RNA, 28 nt, Homo Sapiens
auaggaugguuguguauuauaaaaaacg

SEQ ID NO: 117578 - RNA, 30 nt, Homo Sapiens
cacauggccaggcgcgguggcucacacccg

SEQ ID NO: 117579 - RNA, 32 nt, Homo Sapiens
agccccacccucagccagagccaggcccccag

SEQ ID NO: 117580 - RNA, 32 nt, Homo Sapiens
cagucaaauucuuuacuauaaaacagaaagca

SEQ ID NO: 117581 - RNA, 32 nt, Homo Sapiens
aaacaagaauaaaaaauuauguauuaugcaaa

SEQ ID NO: 117582 - RNA, 32 nt, Homo Sapiens
cguucaucaaggaaaccggagaaacuuaaaac

SEQ ID NO: 117583 - RNA, 32 nt, Homo Sapiens
ggaagccaguuuuccaucuccuccacuuccuc

SEQ ID NO: 117584 - RNA, 32 nt, Homo Sapiens
ucuaaguauaaagcugaagugauuucgaaugc

SEQ ID NO: 117585 - RNA, 32 nt, Homo Sapiens
aaaugaagaaauuuuuaagguuucugaguuaa

SEQ ID NO: 117586 - RNA, 32 nt, Homo Sapiens
uggacucugcacucccucuccucuucaggggc

SEQ ID NO: 117587 - RNA, 32 nt, Homo Sapiens
uccagccccguccgggaguccccggcccgcug

SEQ ID NO: 117588 - RNA, 32 nt, Homo Sapiens
ugcaugacacuaagacgcuuguccacagcggc

SEQ ID NO: 117589 - RNA, 32 nt, Homo Sapiens
gugccgcuuguaccggcacgugucgcacgacu

SEQ ID NO: 117590 - RNA, 32 nt, Homo Sapiens
ccuaagcgcucuugaacaucccacuagcagga

SEQ ID NO: 117591 - RNA, 32 nt, Homo Sapiens
uccaaaugaugaugugcaauuucauguuuuaa

SEQ ID NO: 117592 - RNA, 29 nt, Homo Sapiens
cagccuuggcgacagagggagacucuguc

SEQ ID NO: 117593 - RNA, 32 nt, Homo Sapiens
uggagcccggagccuuccuugcuggccugaga

SEQ ID NO: 117594 - RNA, 32 nt, Homo Sapiens
ugccugugaggcgggcgggugccgggggccag

SEQ ID NO: 117595 - RNA, 32 nt, Homo Sapiens
auuaacucggagcccggcgcaguggaaagcgg

SEQ ID NO: 117596 - RNA, 32 nt, Homo Sapiens
uggcugugcuggaagcucucggauaugccuug

SEQ ID NO: 117597 - RNA, 32 nt, Homo Sapiens
gcgguggcgggauggggcugcugcucaugauc

SEQ ID NO: 117598 - RNA, 32 nt, Homo Sapiens
aaauuucuucauuuuucuuucuucgguuucuu

SEQ ID NO: 117599 - RNA, 30 nt, Homo Sapiens
gccucgugucuguccucccaucuuggaaca

SEQ ID NO: 117600 - RNA, 32 nt, Homo Sapiens
agagaggcaccagaggcaccacaggcucccag

SEQ ID NO: 117601 - RNA, 32 nt, Homo Sapiens
agugaaugaauacaugugaugugcugggagca

SEQ ID NO: 117602 - RNA, 32 nt, Homo Sapiens
caugacuugugaugaagucauggauaugucua

SEQ ID NO: 117603 - RNA, 32 nt, Homo Sapiens
uuaguuauuucuggguugucacaaagcucagu

SEQ ID NO: 117604 - RNA, 32 nt, Homo Sapiens
ugcaucagagccauaauuuuggauacugcaug

SEQ ID NO: 117605 - RNA, 32 nt, Homo Sapiens
aucucccuucugagacggcaaguucugggcag

SEQ ID NO: 117606 - RNA, 32 nt, Homo Sapiens
cugguuuugcaagauagagaucaugagguaaa

SEQ ID NO: 117607 - RNA, 32 nt, Homo Sapiens
ggcacagacagccccaccuggggcgcucagcc

SEQ ID NO: 117608 - RNA, 32 nt, Homo Sapiens
aggaccacgggaggcccaggugcggagaggag

SEQ ID NO: 117609 - RNA, 32 nt, Homo Sapiens
cuguugauauaaauauaugacguuacuaaauu

SEQ ID NO: 117610 - RNA, 32 nt, Homo Sapiens
uuaaaaugccucaaauuuuucuuuauucuaag

SEQ ID NO: 117611 - RNA, 32 nt, Homo Sapiens
gggggcugggugucccuggcccacucccaguc

SEQ ID NO: 117612 - RNA, 32 nt, Homo Sapiens
ggaaacaaaaugccaggccucugcucugaaga

SEQ ID NO: 117613 - RNA, 32 nt, Homo Sapiens
caucagucugcaacuucuuuccauagccuuaa

SEQ ID NO: 117614 - RNA, 32 nt, Homo Sapiens
agcaggugagggugggcugggcugaggccauu

SEQ ID NO: 117615 - RNA, 32 nt, Homo Sapiens
auggacagagagccacagaaucaugagugcag

SEQ ID NO: 117616 - RNA, 32 nt, Homo Sapiens
caccaaagaaaauaaauauauccuacuugaaa

SEQ ID NO: 117617 - RNA, 32 nt, Homo Sapiens
uaucaagucaacaugaaauuggaaugcaaaau

SEQ ID NO: 117618 - RNA, 32 nt, Homo Sapiens
aagggugugucugcucuuucccuccccauccu

SEQ ID NO: 117619 - RNA, 32 nt, Homo Sapiens
uuuccucuuaugucgaagaucuaguuuuagac

SEQ ID NO: 117620 - RNA, 32 nt, Homo Sapiens
cugucucccuccucugcccccauccccuggcu

SEQ ID NO: 117621 - RNA, 31 nt, Homo Sapiens
ccaggaacaagcuaauugggaguccaggcac

SEQ ID NO: 117622 - RNA, 29 nt, Homo Sapiens
ugauagcaaaguuuauauuccuuuggagu

SEQ ID NO: 117623 - RNA, 32 nt, Homo Sapiens
aacugcgcuggcgggggcucguccuugggcgc

SEQ ID NO: 117624 - RNA, 32 nt, Homo Sapiens
uucuugaauguuucuucauuccaaugggguca

SEQ ID NO: 117625 - RNA, 32 nt, Homo Sapiens
acgcuuggacauuuaacuaggcauucuuuucu

SEQ ID NO: 117626 - RNA, 32 nt, Homo Sapiens
cgucuggucagagccugcugcagugcagccca

SEQ ID NO: 117627 - RNA, 32 nt, Homo Sapiens
agaaaguaguggggaggaggcgagacgugcgc

SEQ ID NO: 117628 - RNA, 32 nt, Homo Sapiens
uagauggugucuugcgcuccacacgcaggucu

SEQ ID NO: 117629 - RNA, 32 nt, Homo Sapiens
acgagggacgaacgggaagccgggagcucggc

SEQ ID NO: 117630 - RNA, 29 nt, Homo Sapiens
agagccuggugcagauggacgaggucugc

SEQ ID NO: 117631 - RNA, 32 nt, Homo Sapiens
aaggaaugucauuguguugguuaaguaacuug

SEQ ID NO: 117632 - RNA, 32 nt, Homo Sapiens
gagaguagugagaccccuggugcggggcgauu

SEQ ID NO: 117633 - RNA, 32 nt, Homo Sapiens
aguacugcacccagcaucaccagcuagaaagu

SEQ ID NO: 117634 - RNA, 32 nt, Homo Sapiens
acccaaccuuccagcccucaguccugcccuca

SEQ ID NO: 117635 - RNA, 32 nt, Homo Sapiens
cgagugagccaugcaaaaauagcuuuaaaauu

SEQ ID NO: 117636 - RNA, 32 nt, Homo Sapiens
acguuguccgcgaccuggcccggcccaacggg

SEQ ID NO: 117637 - RNA, 32 nt, Homo Sapiens
cacauccaccaagugcacuuugggaggcugag

SEQ ID NO: 117638 - RNA, 32 nt, Homo Sapiens
cgucuccuuugcgcuccgcagcggcgcgccuc

SEQ ID NO: 117639 - RNA, 32 nt, Homo Sapiens
acacacaccaccccugauccagcccucaccca

SEQ ID NO: 117640 - RNA, 32 nt, Homo Sapiens
uucgacacagaaaaagagaaauaugagauuac

SEQ ID NO: 117641 - RNA, 32 nt, Homo Sapiens
caagauuccagaugugucugugagacaacacg

SEQ ID NO: 117642 - RNA, 32 nt, Homo Sapiens
aaaaagcgggaagagucgagaaggcugagugu

SEQ ID NO: 117643 - RNA, 32 nt, Homo Sapiens
ggcaagagguggauccuggggcccuauggaag

SEQ ID NO: 117644 - RNA, 32 nt, Homo Sapiens
uuguuuuccuuccuuucuuuccagauccagga

SEQ ID NO: 117645 - RNA, 32 nt, Homo Sapiens
aacuaaaauauuaaaauaugcauuggggcuuc

SEQ ID NO: 117646 - RNA, 32 nt, Homo Sapiens
uuauagcagaacuuuguuuuugauuaaucagu

SEQ ID NO: 117647 - RNA, 32 nt, Homo Sapiens
uaaacaauguaaauaaaauagcaaaacaaugu

SEQ ID NO: 117648 - RNA, 32 nt, Homo Sapiens
gccagacugccucucuagauuccuccucucug

SEQ ID NO: 117649 - RNA, 32 nt, Homo Sapiens
uaauuugggaauguagguuuuggcuuuuuagu

SEQ ID NO: 117650 - RNA, 28 nt, Homo Sapiens
cuccagccugggcuacagauccuguccc

SEQ ID NO: 117651 - RNA, 32 nt, Homo Sapiens
caccuccaccgccaccuccaccuccggcaccc

SEQ ID NO: 117652 - RNA, 32 nt, Homo Sapiens
aagagcauaauuaacuuuuuaaaagaagcuaa

SEQ ID NO: 117653 - RNA, 32 nt, Homo Sapiens
cugagacuaagacguggacaggggccgcgcag

SEQ ID NO: 117654 - RNA, 32 nt, Homo Sapiens
ccaggagggcuuugugucuggccagcuugauu

SEQ ID NO: 117655 - RNA, 32 nt, Homo Sapiens
caguuuguugaucuuuuaaaguuucuuucccu

SEQ ID NO: 117656 - RNA, 32 nt, Homo Sapiens
ccugggcuccgugucucugagccccggguggc

SEQ ID NO: 117657 - RNA, 32 nt, Homo Sapiens
ggagugccagacuccuggucuuuccaguuuag

SEQ ID NO: 117658 - RNA, 32 nt, Homo Sapiens
uuugguuuuaaguuuaauuguguacggauccu

SEQ ID NO: 117659 - RNA, 32 nt, Homo Sapiens
gaugcugugugagggugauggagcacgggguc

SEQ ID NO: 117660 - RNA, 32 nt, Homo Sapiens
guacgccgcccggcaggccugccgccuaguuc

SEQ ID NO: 117661 - RNA, 32 nt, Homo Sapiens
ggagagggucuguggcagcuuucuggacugau

SEQ ID NO: 117662 - RNA, 32 nt, Homo Sapiens
aaugugaaaauggugcugaugaaaacugaggc

SEQ ID NO: 117663 - RNA, 32 nt, Homo Sapiens
uguggcugcccggcuggugggugcggaucagc

SEQ ID NO: 117664 - RNA, 32 nt, Homo Sapiens
uacauucugaagcucauaaauguaugagaagg

SEQ ID NO: 117665 - RNA, 32 nt, Homo Sapiens
ccuaaggaacuaaauaucauauaguuaauguu

SEQ ID NO: 117666 - RNA, 32 nt, Homo Sapiens
ggcagaacccaccaagugccugugugcagccu

SEQ ID NO: 117667 - RNA, 32 nt, Homo Sapiens
agcccuggagucaugccaagcauuuaauguag

SEQ ID NO: 117668 - RNA, 32 nt, Homo Sapiens
gucucuugucuccuucaguuaauuuucagaau

SEQ ID NO: 117669 - RNA, 32 nt, Homo Sapiens
cacaguuaacuccacagugcauucaugcagcu

SEQ ID NO: 117670 - RNA, 32 nt, Homo Sapiens
acuuuaaaacauuuagaaaacaccccagggua

SEQ ID NO: 117671 - RNA, 31 nt, Homo Sapiens
uccaccuuguacugguuuccaaggguagucg

SEQ ID NO: 117672 - RNA, 32 nt, Homo Sapiens
ugucacacguccggaggccuagccgucgcgua

SEQ ID NO: 117673 - RNA, 32 nt, Homo Sapiens
ugcuaccugccagguggcccccacugcugacg

SEQ ID NO: 117674 - RNA, 32 nt, Homo Sapiens
aauagagaauccagaaauucucauguaugugu

SEQ ID NO: 117675 - RNA, 32 nt, Homo Sapiens
ccgaggucgugccauugcacuccagccugggu

SEQ ID NO: 117676 - RNA, 32 nt, Homo Sapiens
aaauacacuuuuguuggaaauuuuguaacaca

SEQ ID NO: 117677 - RNA, 32 nt, Homo Sapiens
guaaacacggcauuugaaauuuuuugguauug

SEQ ID NO: 117678 - RNA, 32 nt, Homo Sapiens
cugcuguuguggggggaauggcugggagccuu

SEQ ID NO: 117679 - RNA, 32 nt, Homo Sapiens
gaguucagauggcaaaaugcacaggggaaugu

SEQ ID NO: 117680 - RNA, 32 nt, Homo Sapiens
auuuagagaacacauuuaacugauguagcuuu

SEQ ID NO: 117681 - RNA, 32 nt, Homo Sapiens
cuugagaggcccugggguucucccccuuucuc

SEQ ID NO: 117682 - RNA, 32 nt, Homo Sapiens
ccccagugucuaggaagauaacagccagucuc

SEQ ID NO: 117683 - RNA, 32 nt, Homo Sapiens
ggaggaggucagaggagaugggggccggcucu

SEQ ID NO: 117684 - RNA, 32 nt, Homo Sapiens
acauccuuuggugauacuuacugugggauuca

SEQ ID NO: 117685 - RNA, 32 nt, Homo Sapiens
ggggaaaaugaaaucuacuucaugugccuggu

SEQ ID NO: 117686 - RNA, 32 nt, Homo Sapiens
gcuuugauucccuccuccgggcacugucccug

SEQ ID NO: 117687 - RNA, 32 nt, Homo Sapiens
accuguaagcuuucuuuuauccugcuuuggaa

SEQ ID NO: 117688 - RNA, 31 nt, Homo Sapiens
acagcggcggcuaaccugccccggcuucagg

SEQ ID NO: 117689 - RNA, 32 nt, Homo Sapiens
gggcggacuuaccuggcccagcccugccuccc

SEQ ID NO: 117690 - RNA, 32 nt, Homo Sapiens
ccucccugccccaccccagcuccugcccugga

SEQ ID NO: 117691 - RNA, 32 nt, Homo Sapiens
cguucucaaugaaugggccacccauucaacaa

SEQ ID NO: 117692 - RNA, 32 nt, Homo Sapiens
aaaacgccucuuuaauaaacuaccucuaacac

SEQ ID NO: 117693 - RNA, 32 nt, Homo Sapiens
uguuccuggcaacaacgauucaugucaaaaga

SEQ ID NO: 117694 - RNA, 32 nt, Homo Sapiens
acaaucacauauagaagaacggugcuauucag

SEQ ID NO: 117695 - RNA, 32 nt, Homo Sapiens
accauugcaaauaaauugaacaucaaagaucc

SEQ ID NO: 117696 - RNA, 32 nt, Homo Sapiens
cccgaccccuucccgccgccccgcccccagcc

SEQ ID NO: 117697 - RNA, 32 nt, Homo Sapiens
cacuugcugcugccuccugggcucugauagaa

SEQ ID NO: 117698 - RNA, 32 nt, Homo Sapiens
gaggacacaccccacaccccagcccacccugc

SEQ ID NO: 117699 - RNA, 32 nt, Homo Sapiens
gacauggacaaagggcugccuucacccaccag

SEQ ID NO: 117700 - RNA, 32 nt, Homo Sapiens
ggcuaggcggcgggcuccccuccuuuccaccu

SEQ ID NO: 117701 - RNA, 32 nt, Homo Sapiens
gcucaggugaccagcuugugucucugggaggg

SEQ ID NO: 117702 - RNA, 29 nt, Homo Sapiens
accaauaaaguuuuauauuuuguuuacuu

SEQ ID NO: 117703 - RNA, 32 nt, Homo Sapiens
aaguaugcuguuucaauuugaucugcuauuuc

SEQ ID NO: 117704 - RNA, 32 nt, Homo Sapiens
acaccaaagaucuauaucugcuaugauuuuuu

SEQ ID NO: 117705 - RNA, 32 nt, Homo Sapiens
guacacucgagccaucgcgaguguccuugagc

SEQ ID NO: 117706 - RNA, 32 nt, Homo Sapiens
aaauagcguacacuugguuucuuucuuaucug

SEQ ID NO: 117707 - RNA, 32 nt, Homo Sapiens
aagaacacgugucaagagaaaccuaagaauga

SEQ ID NO: 117708 - RNA, 32 nt, Homo Sapiens
aauagcuucggccaaacguucuccucccgcua

SEQ ID NO: 117709 - RNA, 32 nt, Homo Sapiens
gucaggauggucucgauuuccugaccuuguga

SEQ ID NO: 117710 - RNA, 32 nt, Homo Sapiens
uuaagaaugagauugcaauugaaaauagucau

SEQ ID NO: 117711 - RNA, 32 nt, Homo Sapiens
cuccauggcccgggagcgcagcugcggccgag

SEQ ID NO: 117712 - RNA, 29 nt, Homo Sapiens
gcaguuuuuauccaauaacauugugggaa

SEQ ID NO: 117713 - RNA, 32 nt, Homo Sapiens
guauuaacuguaaaaagauuugugaaguuugg

SEQ ID NO: 117714 - RNA, 32 nt, Homo Sapiens
gaggguagaaacaaauaucaaggaugagaaug

SEQ ID NO: 117715 - RNA, 32 nt, Homo Sapiens
ggcuggucuugaacuccugaccucaagcgauc

SEQ ID NO: 117716 - RNA, 31 nt, Homo Sapiens
ggucauuuuuguccuaguucagugugucugu

SEQ ID NO: 117717 - RNA, 32 nt, Homo Sapiens
ccccaccuccccacccuggaaccccugagggc

SEQ ID NO: 117718 - RNA, 32 nt, Homo Sapiens
gcgacagagcgagacuccaucuaccagauccu

SEQ ID NO: 117719 - RNA, 32 nt, Homo Sapiens
cuaacggccugccuaguggaccagagccuucg

SEQ ID NO: 117720 - RNA, 32 nt, Homo Sapiens
gaaagagucauuguuuaaaaucuuaauguauc

SEQ ID NO: 117721 - RNA, 32 nt, Homo Sapiens
ccucguggcccaacgucacacccagagagacc

SEQ ID NO: 117722 - RNA, 32 nt, Homo Sapiens
cgagccugcccccagcucugccgacacuugac

SEQ ID NO: 117723 - RNA, 32 nt, Homo Sapiens
ugacuguaaaaugguaaacguguguauuauau

SEQ ID NO: 117724 - RNA, 32 nt, Homo Sapiens
aguuguguccccagcccuuccacuccaguaaa

SEQ ID NO: 117725 - RNA, 32 nt, Homo Sapiens
ucuaaugcuucuugggagucugaagcucagau

SEQ ID NO: 117726 - RNA, 32 nt, Homo Sapiens
cccucaucaucuccaggaaaguuucugccaaa

SEQ ID NO: 117727 - RNA, 32 nt, Homo Sapiens
aauuaaaggaaccucacugaaaacauauauuu

SEQ ID NO: 117728 - RNA, 32 nt, Homo Sapiens
auuacaaaaauauuguuuguuuuguggcucau

SEQ ID NO: 117729 - RNA, 32 nt, Homo Sapiens
ucaucccaaaaugaaacccuguagccauuaaa

SEQ ID NO: 117730 - RNA, 32 nt, Homo Sapiens
cucuucuaauccuucacccaucugagcuaaag

SEQ ID NO: 117731 - RNA, 32 nt, Homo Sapiens
caggccccgcggcuagccccuucccacaggcu

SEQ ID NO: 117732 - RNA, 32 nt, Homo Sapiens
ggaagacugauguagauguucugugcuguccu

SEQ ID NO: 117733 - RNA, 32 nt, Homo Sapiens
caaagccuucucccuagcuccuccccuuccuc

SEQ ID NO: 117734 - RNA, 32 nt, Homo Sapiens
caauuuaaaauuuugcuuuuuauccuggcacu

SEQ ID NO: 117735 - RNA, 32 nt, Homo Sapiens
aggggaacacaagugcacagagagagaugucu

SEQ ID NO: 117736 - RNA, 32 nt, Homo Sapiens
uuuugauucccuaaaacaaaauuagggaguca

SEQ ID NO: 117737 - RNA, 32 nt, Homo Sapiens
aaugaagacagaggcuagaaagcauccauuaa

SEQ ID NO: 117738 - RNA, 31 nt, Homo Sapiens
cugacauacuggauuuuuaaugcacugguuu

SEQ ID NO: 117739 - RNA, 32 nt, Homo Sapiens
uggaacucaaggaaaucugugucaguggaugc

SEQ ID NO: 117740 - RNA, 32 nt, Homo Sapiens
gccauuaauaauauuacuauuguuaacaccuu

SEQ ID NO: 117741 - RNA, 31 nt, Homo Sapiens
uguuuuccguuauuuugucuaacuugauauu

SEQ ID NO: 117742 - RNA, 32 nt, Homo Sapiens
uuaauaagcugccuauugagugguauagcugu

SEQ ID NO: 117743 - RNA, 27 nt, Homo Sapiens
cagcuguuuuucuucagaacaucaaca

SEQ ID NO: 117744 - RNA, 32 nt, Homo Sapiens
auaggagaguaaggcuuauauauuuuauagua

SEQ ID NO: 117745 - RNA, 32 nt, Homo Sapiens
cuuugcaccccccuguguccagcccucuguuu

SEQ ID NO: 117746 - RNA, 32 nt, Homo Sapiens
uccuggccucaaaugauccauccaccucagcc

SEQ ID NO: 117747 - RNA, 32 nt, Homo Sapiens
cauguauuauguuuucuuucugugggagaggg

SEQ ID NO: 117748 - RNA, 32 nt, Homo Sapiens
caauguaaagugcauauuuacugcacucucug

SEQ ID NO: 117749 - RNA, 32 nt, Homo Sapiens
acuuuaugucauuuagcuucuauuuucugaag

SEQ ID NO: 117750 - RNA, 32 nt, Homo Sapiens
ggguuugggcagucccuggcucuagucucugc

SEQ ID NO: 117751 - RNA, 32 nt, Homo Sapiens
ugguugucuugucauucaugugauacuacuca

SEQ ID NO: 117752 - RNA, 32 nt, Homo Sapiens
uuugguccaaaauaaaaccucagcuagcucca

SEQ ID NO: 117753 - RNA, 32 nt, Homo Sapiens
uguauacaaauauauagaccaauauaauaagu

SEQ ID NO: 117754 - RNA, 32 nt, Homo Sapiens
gccgggccccacuucugagcacagagcagaga

SEQ ID NO: 117755 - RNA, 32 nt, Homo Sapiens
ggacaaagccccagcagccaaggugcuccgug

SEQ ID NO: 117756 - RNA, 32 nt, Homo Sapiens
ugugauccucucugcauauaaaaugguauuuc

SEQ ID NO: 117757 - RNA, 31 nt, Homo Sapiens
cccucccugauuagaggucuaacuuaauccu

SEQ ID NO: 117758 - RNA, 32 nt, Homo Sapiens
uggaugccgcgcgugucuucucuucuuuccag

SEQ ID NO: 117759 - RNA, 32 nt, Homo Sapiens
aguguuuucuucauuugaugcagauauuugca

SEQ ID NO: 117760 - RNA, 32 nt, Homo Sapiens
gguuucuguacagcacagauuaugacagcguc

SEQ ID NO: 117761 - RNA, 32 nt, Homo Sapiens
gccaggagccuccugcccuuaccugccaggaa

SEQ ID NO: 117762 - RNA, 32 nt, Homo Sapiens
uggggccgaggcaggcagaucgcuugagguca

SEQ ID NO: 117763 - RNA, 32 nt, Homo Sapiens
cgcucagcagagcuaccagcugcccuguuggc

SEQ ID NO: 117764 - RNA, 32 nt, Homo Sapiens
cauccaucaaggaguccagagcaggagccagg

SEQ ID NO: 117765 - RNA, 32 nt, Homo Sapiens
uccccagacggcacccacuccucccucagcaa

SEQ ID NO: 117766 - RNA, 32 nt, Homo Sapiens
cugguucuggggaugguuugggggcgggccgg

SEQ ID NO: 117767 - RNA, 32 nt, Homo Sapiens
aaauacaaaaaaaaaaucauuuuucuagagca

SEQ ID NO: 117768 - RNA, 27 nt, Homo Sapiens
ucaaauaaaaauuuaaaaauucaauug

SEQ ID NO: 117769 - RNA, 32 nt, Homo Sapiens
acaggacuaggaugugucuuaagaucauggug

SEQ ID NO: 117770 - RNA, 32 nt, Homo Sapiens
uuguuuacaugaagcagugaaagguuuuugaa

SEQ ID NO: 117771 - RNA, 32 nt, Homo Sapiens
accagccugaccaacauggugaaacacugucu

SEQ ID NO: 117772 - RNA, 32 nt, Homo Sapiens
gcguguacugaaugccagucuggccggcacac

SEQ ID NO: 117773 - RNA, 32 nt, Homo Sapiens
gcccugauucucuccgcccugcacuuuugcca

SEQ ID NO: 117774 - RNA, 32 nt, Homo Sapiens
gccucugguggcugccuaaaaccuggcgccgg

SEQ ID NO: 117775 - RNA, 32 nt, Homo Sapiens
ugaagaagacaauaaaagauaguaguucaggc

SEQ ID NO: 117776 - RNA, 32 nt, Homo Sapiens
cuucggaggaguggggcggggcgggggagggg

SEQ ID NO: 117777 - RNA, 32 nt, Homo Sapiens
gggaagagcuucgccuggcgcuccacacuggu

SEQ ID NO: 117778 - RNA, 32 nt, Homo Sapiens
cggcuaauuuuguauuuuuuuaguagagacag

SEQ ID NO: 117779 - RNA, 32 nt, Homo Sapiens
gggcccuuugccagcccucacccuuuccccag

SEQ ID NO: 117780 - RNA, 32 nt, Homo Sapiens
acauuggaaagagggauucccuuugguguuug

SEQ ID NO: 117781 - RNA, 32 nt, Homo Sapiens
cgcuggcucugcugcugccgccggcgaaggag

SEQ ID NO: 117782 - RNA, 30 nt, Homo Sapiens
ugaagcuggcuuugcugagaagcucccuac

SEQ ID NO: 117783 - RNA, 32 nt, Homo Sapiens
auggacgcggguccggcgcgcgggaggcgaug

SEQ ID NO: 117784 - RNA, 32 nt, Homo Sapiens
uguuuacucugcauacacugaguguugguggu

SEQ ID NO: 117785 - RNA, 32 nt, Homo Sapiens
caucuucacagcacauuuuuaaucaagcaguu

SEQ ID NO: 117786 - RNA, 32 nt, Homo Sapiens
ggucucaaacuccuggccucgagucauccacg

SEQ ID NO: 117787 - RNA, 32 nt, Homo Sapiens
acacacuauugguuuuuccccuuggaaacagc

SEQ ID NO: 117788 - RNA, 32 nt, Homo Sapiens
cucaucucaguggcauguggcuccuggaagaa

SEQ ID NO: 117789 - RNA, 32 nt, Homo Sapiens
uauaugaucuucugcucuucccacuuccuccc

SEQ ID NO: 117790 - RNA, 32 nt, Homo Sapiens
auuguggcauggcacugguugcuggacauucu

SEQ ID NO: 117791 - RNA, 32 nt, Homo Sapiens
gaacugacgaguaaacauguauggaaauuauu

SEQ ID NO: 117792 - RNA, 32 nt, Homo Sapiens
cagugugucaggugcugcagagcguucuugga

SEQ ID NO: 117793 - RNA, 32 nt, Homo Sapiens
uugaaggaguuuuuacagugcuuuuguggaac

SEQ ID NO: 117794 - RNA, 32 nt, Homo Sapiens
auccagggauuguuaagugcugugacuuaaga

SEQ ID NO: 117795 - RNA, 32 nt, Homo Sapiens
gccuguuaaauuucaaauguccuguuugauac

SEQ ID NO: 117796 - RNA, 32 nt, Homo Sapiens
cacuguaauuagagaauuuauuucauauaaaa

SEQ ID NO: 117797 - RNA, 32 nt, Homo Sapiens
augacuuauauucaaaucuguauuuguuucuu

SEQ ID NO: 117798 - RNA, 31 nt, Homo Sapiens
ugguggcgguguuggaggauaugaugguuac

SEQ ID NO: 117799 - RNA, 32 nt, Homo Sapiens
uggaggauuuggaauuaguccugggcgaccug

SEQ ID NO: 117800 - RNA, 32 nt, Homo Sapiens
ggcagcgaggucggcagcggcacagcgagguc

SEQ ID NO: 117801 - RNA, 32 nt, Homo Sapiens
gaugaggcugagcaggugacaccuggcaugga

SEQ ID NO: 117802 - RNA, 32 nt, Homo Sapiens
cuuaaauagaaagugcagguaaagguuuauac

SEQ ID NO: 117803 - RNA, 32 nt, Homo Sapiens
aaaacucuggucuuguaaacuagucuuaagcg

SEQ ID NO: 117804 - RNA, 32 nt, Homo Sapiens
caacaagccacuugcuuucucucgucuucagu

SEQ ID NO: 117805 - RNA, 32 nt, Homo Sapiens
uauucugugucaacaauguauuuauggagaga

SEQ ID NO: 117806 - RNA, 29 nt, Homo Sapiens
aggaggaugaagauggugaagaagaggag

SEQ ID NO: 117807 - RNA, 32 nt, Homo Sapiens
uuuauuaaccauuacagauuuuacaaacagcu

SEQ ID NO: 117808 - RNA, 32 nt, Homo Sapiens
acucaucaaacugggauuauucuuaucaaaac

SEQ ID NO: 117809 - RNA, 32 nt, Homo Sapiens
cuucucccgcggcuucugcgcggagaggcguc

SEQ ID NO: 117810 - RNA, 32 nt, Homo Sapiens
auagaugauuuucaguuuguggugaaauuccg

SEQ ID NO: 117811 - RNA, 32 nt, Homo Sapiens
aaacagggcuugucccuccaacugcaggaaaa

SEQ ID NO: 117812 - RNA, 32 nt, Homo Sapiens
aucuuguuaauuauuuuuaaucuuauuuauug

SEQ ID NO: 117813 - RNA, 32 nt, Homo Sapiens
cacaacaaccaccauuuuauuuggucauaauu

SEQ ID NO: 117814 - RNA, 32 nt, Homo Sapiens
agaggcuuguuccaaaaauguucacaaugggg

SEQ ID NO: 117815 - RNA, 32 nt, Homo Sapiens
uccccggugccuauggggucccgguguaccua

SEQ ID NO: 117816 - RNA, 32 nt, Homo Sapiens
cacgggggcaccuuggaagaccaagagaggcc

SEQ ID NO: 117817 - RNA, 32 nt, Homo Sapiens
auugauauaugauauucuguaaauauuguaca

SEQ ID NO: 117818 - RNA, 32 nt, Homo Sapiens
gaggggccaagcugacauccaaggcugaggac

SEQ ID NO: 117819 - RNA, 32 nt, Homo Sapiens
gagcugauggcacaacugcccagugcccagau

SEQ ID NO: 117820 - RNA, 32 nt, Homo Sapiens
ugguaagacuuguaucuccauccaccugaagg

SEQ ID NO: 117821 - RNA, 32 nt, Homo Sapiens
gggaacuugaaugaggaaugggaugaagauag

SEQ ID NO: 117822 - RNA, 32 nt, Homo Sapiens
cuuucuccaaggaaauaaaaauucugcaguuu

SEQ ID NO: 117823 - RNA, 31 nt, Homo Sapiens
uucauuuuuucuugugaaucaguguauacua

SEQ ID NO: 117824 - RNA, 32 nt, Homo Sapiens
gccucacugccuuguuggucuccaccuuguuc

SEQ ID NO: 117825 - RNA, 32 nt, Homo Sapiens
aaauuucaaaaauuaaaauuuuucauuauuag

SEQ ID NO: 117826 - RNA, 32 nt, Homo Sapiens
guccuccugcagcccaguggcuccucuggugc

SEQ ID NO: 117827 - RNA, 32 nt, Homo Sapiens
ccugcgcaccagucgcugccuacgcgccucgu

SEQ ID NO: 117828 - RNA, 32 nt, Homo Sapiens
uucuuugucaauucaauuuuuaaaagauaccg

SEQ ID NO: 117829 - RNA, 32 nt, Homo Sapiens
cccuccccccgcagcaggggcgccuugggacu

SEQ ID NO: 117830 - RNA, 32 nt, Homo Sapiens
augagacuggcagauagcuauuaauccucuua

SEQ ID NO: 117831 - RNA, 32 nt, Homo Sapiens
ucuccaaauucacuucugccuuccucagguuu

SEQ ID NO: 117832 - RNA, 32 nt, Homo Sapiens
uaguucucagaauucuacagagaaggagggaa

SEQ ID NO: 117833 - RNA, 32 nt, Homo Sapiens
ucaucccccaccugggagagccagcaugcacc

SEQ ID NO: 117834 - RNA, 32 nt, Homo Sapiens
aggagaucaauacaauuccccaauuuccaugg

SEQ ID NO: 117835 - RNA, 32 nt, Homo Sapiens
cgauccugccagcagugggugggcagccugag

SEQ ID NO: 117836 - RNA, 32 nt, Homo Sapiens
uagaaucuguuuacaaaaaugguucgugugug

SEQ ID NO: 117837 - RNA, 32 nt, Homo Sapiens
cagcuacccacuuuccuucaugaacauccccc

SEQ ID NO: 117838 - RNA, 32 nt, Homo Sapiens
cuccagccccgcagcccggcccgggcguccuc

SEQ ID NO: 117839 - RNA, 32 nt, Homo Sapiens
ggcugaggauggcugggcagggggacaguccg

SEQ ID NO: 117840 - RNA, 32 nt, Homo Sapiens
ccaggcugucccccuccucccagggccuccug

SEQ ID NO: 117841 - RNA, 32 nt, Homo Sapiens
ccaaagugaacauggguugcauguaacaggca

SEQ ID NO: 117842 - RNA, 32 nt, Homo Sapiens
aaauagcucuuccccaccuccucauuuuagua

SEQ ID NO: 117843 - RNA, 32 nt, Homo Sapiens
gguuccuucccuuuccucccccucccaugcgu

SEQ ID NO: 117844 - RNA, 32 nt, Homo Sapiens
caggauugacuucuaaggacucuugguacaug

SEQ ID NO: 117845 - RNA, 31 nt, Homo Sapiens
accucauguagaauccaguccacugcucuga

SEQ ID NO: 117846 - RNA, 32 nt, Homo Sapiens
guuuacaccaauaguuucuuguuaauccuucu

SEQ ID NO: 117847 - RNA, 32 nt, Homo Sapiens
acaucacacacacagacagacacacacacaca

SEQ ID NO: 117848 - RNA, 32 nt, Homo Sapiens
cccauuaaaaaggaagcagaaauacugagaca

SEQ ID NO: 117849 - RNA, 32 nt, Homo Sapiens
ugcugucccucccccuuguccuuucccuucag

SEQ ID NO: 117850 - RNA, 32 nt, Homo Sapiens
uguggugagacuuccguuuuuauccagcucuu

SEQ ID NO: 117851 - RNA, 32 nt, Homo Sapiens
auacuuugcucuuuuucuuaaauacucauuaa

SEQ ID NO: 117852 - RNA, 32 nt, Homo Sapiens
acgucuugccugugucccacuuguucgcggcc

SEQ ID NO: 117853 - RNA, 32 nt, Homo Sapiens
aggacuguagggagggcggcaggggccuggag

SEQ ID NO: 117854 - RNA, 32 nt, Homo Sapiens
ggagguugggguaucuuggagcuccucagagc

SEQ ID NO: 117855 - RNA, 32 nt, Homo Sapiens
ggcaggaaggaagcaggugggaggcgggcgga

SEQ ID NO: 117856 - RNA, 32 nt, Homo Sapiens
ucgucagcaguuucccaagaacaagaugugau

SEQ ID NO: 117857 - RNA, 32 nt, Homo Sapiens
uccagaacaaaguuagggagcaaaccaguaac

SEQ ID NO: 117858 - RNA, 32 nt, Homo Sapiens
caugacacagaaagucuaagaggagaaauaug

SEQ ID NO: 117859 - RNA, 32 nt, Homo Sapiens
aggcagcugcugccuccacuaucgaugccucc

SEQ ID NO: 117860 - RNA, 32 nt, Homo Sapiens
ucuggcaaacuuaaaaggccucuuuuuguugc

SEQ ID NO: 117861 - RNA, 32 nt, Homo Sapiens
aaacacggaccaagagagaaggugaugugugc

SEQ ID NO: 117862 - RNA, 32 nt, Homo Sapiens
ggggcucggcccgcugcuuguagagggcuucc

SEQ ID NO: 117863 - RNA, 32 nt, Homo Sapiens
gaggccagaguaaaaagugcugcuugcccaca

SEQ ID NO: 117864 - RNA, 32 nt, Homo Sapiens
ugucuccagccccugguccccagcucuugcca

SEQ ID NO: 117865 - RNA, 32 nt, Homo Sapiens
ccagaagccagcagugggguugcacacgcgcc

SEQ ID NO: 117866 - RNA, 32 nt, Homo Sapiens
aaauccacauaaauagcagauuccuuuguuga

SEQ ID NO: 117867 - RNA, 32 nt, Homo Sapiens
ggccuugucaucaccuuccaagaaaguuuccu

SEQ ID NO: 117868 - RNA, 32 nt, Homo Sapiens
gguuguauauauauguuuuuaaucauuuuggu

SEQ ID NO: 117869 - RNA, 32 nt, Homo Sapiens
cagaaauaauuuccucacaauuguguuaauuc

SEQ ID NO: 117870 - RNA, 32 nt, Homo Sapiens
ugugcauuuaggggugggcggcaccgaggggg

SEQ ID NO: 117871 - RNA, 32 nt, Homo Sapiens
cgcugagaaaaugcaaauauuuguugugacaa

SEQ ID NO: 117872 - RNA, 32 nt, Homo Sapiens
caagugucuuugcaugacaucuucucagagcu

SEQ ID NO: 117873 - RNA, 32 nt, Homo Sapiens
ugggugugcccuaugauguagggccugcugca

SEQ ID NO: 117874 - RNA, 32 nt, Homo Sapiens
guacguugacuucgucaugagcuccgugcaga

SEQ ID NO: 117875 - RNA, 32 nt, Homo Sapiens
ugccugagcuccggagggagcagagcuggcac

SEQ ID NO: 117876 - RNA, 32 nt, Homo Sapiens
ugcaguuucugcauucuggguuuuguuuuucc

SEQ ID NO: 117877 - RNA, 32 nt, Homo Sapiens
cacaugacucaacagcucuaugggauaggaac

SEQ ID NO: 117878 - RNA, 32 nt, Homo Sapiens
uccugggcuucacagacguacacaucagagac

SEQ ID NO: 117879 - RNA, 32 nt, Homo Sapiens
aagcauguaaauauguaccaaauccuuaugaa

SEQ ID NO: 117880 - RNA, 32 nt, Homo Sapiens
uuuuaaggcauucgcuucaagagacaagcagu

SEQ ID NO: 117881 - RNA, 32 nt, Homo Sapiens
cugugccacgugacccgccgccggccaguuaa

SEQ ID NO: 117882 - RNA, 32 nt, Homo Sapiens
uguuuaaacagacagaauauaaaguauugagu

SEQ ID NO: 117883 - RNA, 32 nt, Homo Sapiens
aaacaaagugucuuucuguguuagaauuuuca

SEQ ID NO: 117884 - RNA, 32 nt, Homo Sapiens
aaauauucccagcaguaaccacuuccauuaau

SEQ ID NO: 117885 - RNA, 32 nt, Homo Sapiens
guguccguggugaguucuggggugcgccuagg

SEQ ID NO: 117886 - RNA, 32 nt, Homo Sapiens
ugggugccucucuccuuccucaggguacugca

SEQ ID NO: 117887 - RNA, 32 nt, Homo Sapiens
aaggaccuuucugacauaaucaagcaauuuag

SEQ ID NO: 117888 - RNA, 32 nt, Homo Sapiens
uacuccugucccagcccugccuccagggcucc

SEQ ID NO: 117889 - RNA, 32 nt, Homo Sapiens
ucauguguccacucaacccagcugcccaggac

SEQ ID NO: 117890 - RNA, 32 nt, Homo Sapiens
caaccgugguauaugagguggagaagagguac

SEQ ID NO: 117891 - RNA, 32 nt, Homo Sapiens
gccuccggaccucgcugcagcgcggacccggc

SEQ ID NO: 117892 - RNA, 32 nt, Homo Sapiens
caucuguuuuuggccaaccuugaugagagcug

SEQ ID NO: 117893 - RNA, 32 nt, Homo Sapiens
uuguccgcgggccggagcggcggcggcagcgg

SEQ ID NO: 117894 - RNA, 32 nt, Homo Sapiens
gagucccuuggagaagcaggaaggcaucauga

SEQ ID NO: 117895 - RNA, 32 nt, Homo Sapiens
cuaccgcaguagccgccucugccgccgcggac

SEQ ID NO: 117896 - RNA, 32 nt, Homo Sapiens
ugaaaguggcauucagcugacuugcucauuua

SEQ ID NO: 117897 - RNA, 32 nt, Homo Sapiens
aggccucccgcacggcucagcugcugaauuuu

SEQ ID NO: 117898 - RNA, 32 nt, Homo Sapiens
auaguaauauaaauaaaguaauaguuggaugc

SEQ ID NO: 117899 - RNA, 32 nt, Homo Sapiens
gagggcaggguggagggcaaggcuggggggag

SEQ ID NO: 117900 - RNA, 29 nt, Homo Sapiens
caccauggcuccgcaccgccccgcgcccg

SEQ ID NO: 117901 - RNA, 32 nt, Homo Sapiens
gccgcugcucuucccuucuccucaggaggggg

SEQ ID NO: 117902 - RNA, 32 nt, Homo Sapiens
gugaacauucccagcccagccccgccccguug

SEQ ID NO: 117903 - RNA, 32 nt, Homo Sapiens
uuuaaacugaccaagggacaagccuggagcag

SEQ ID NO: 117904 - RNA, 32 nt, Homo Sapiens
aaaaagcaaaggcgauuaaaggcgcugccagc

SEQ ID NO: 117905 - RNA, 32 nt, Homo Sapiens
agcuguguuuaccuaacccagcccuuaauuag

SEQ ID NO: 117906 - RNA, 32 nt, Homo Sapiens
uuugggaaaaacagacagugcaugugaggccc

SEQ ID NO: 117907 - RNA, 32 nt, Homo Sapiens
uccucagccuccuccgcccagagcggcccccu

SEQ ID NO: 117908 - RNA, 32 nt, Homo Sapiens
aucgcaaaacucucuugcuucuugaauguggg

SEQ ID NO: 117909 - RNA, 32 nt, Homo Sapiens
aaacugcucugacaccauucaggaaucaccua

SEQ ID NO: 117910 - RNA, 32 nt, Homo Sapiens
ggcagccgggagaggagcaagcgcacgccacu

SEQ ID NO: 117911 - RNA, 32 nt, Homo Sapiens
cgccuguaaucccagcacuuugggaggcccug

SEQ ID NO: 117912 - RNA, 32 nt, Homo Sapiens
guguacugggccccgcagcucuggccacaggg

SEQ ID NO: 117913 - RNA, 32 nt, Homo Sapiens
cuuuucacuaacuuauacuugucuaucuagaa

SEQ ID NO: 117914 - RNA, 32 nt, Homo Sapiens
acaagagaaaauacauucauggucauugaaaa

SEQ ID NO: 117915 - RNA, 32 nt, Homo Sapiens
aggcaugugugcggcacagcggccugcagguu

SEQ ID NO: 117916 - RNA, 32 nt, Homo Sapiens
ucacacugcagcaucagcacccggugaaugug

SEQ ID NO: 117917 - RNA, 32 nt, Homo Sapiens
cugauuuucauacuuuuuccucucagucuaca

SEQ ID NO: 117918 - RNA, 32 nt, Homo Sapiens
agagcauguuggggguguaaaagggaaaaaug

SEQ ID NO: 117919 - RNA, 32 nt, Homo Sapiens
ccuuguaaagucacaaaaauaguuuuuaaagg

SEQ ID NO: 117920 - RNA, 32 nt, Homo Sapiens
cugcuacugcuacugcugcugcugccaccgcc

SEQ ID NO: 117921 - RNA, 32 nt, Homo Sapiens
accuauuguaaaagcauuucgugaugagcaug

SEQ ID NO: 117922 - RNA, 32 nt, Homo Sapiens
uaaugagacaccucuuugcuguuuucuuccuc

SEQ ID NO: 117923 - RNA, 29 nt, Homo Sapiens
uuagauccuacuccauaccacagguuuca

SEQ ID NO: 117924 - RNA, 32 nt, Homo Sapiens
ccucaucaugucccaaaccagacaccuggaug

SEQ ID NO: 117925 - RNA, 32 nt, Homo Sapiens
cuucuucagaagcucacugcuuuggcccccuu

SEQ ID NO: 117926 - RNA, 32 nt, Homo Sapiens
uccagcccuagcuacagcggcucucaugaugu

SEQ ID NO: 117927 - RNA, 32 nt, Homo Sapiens
gggaggggcugagcagggagggggccucaggg

SEQ ID NO: 117928 - RNA, 32 nt, Homo Sapiens
gacauaugaagauuaugguucugccagggcuc

SEQ ID NO: 117929 - RNA, 32 nt, Homo Sapiens
agaaaagaugacccaacuugaaauaaaaccug

SEQ ID NO: 117930 - RNA, 32 nt, Homo Sapiens
uagugauggaaugacagggucugguggggacu

SEQ ID NO: 117931 - RNA, 32 nt, Homo Sapiens
uugauguguauucauacugacauuagauugau

SEQ ID NO: 117932 - RNA, 32 nt, Homo Sapiens
gcgaugccuugaaccugggaaacuaugugaag

SEQ ID NO: 117933 - RNA, 32 nt, Homo Sapiens
gcgaugaugaugacgaugauauuuaucccuua

SEQ ID NO: 117934 - RNA, 32 nt, Homo Sapiens
gcguucgcuccuuugggacuuuucaugccucg

SEQ ID NO: 117935 - RNA, 30 nt, Homo Sapiens
guucccgagaucagcggcggcggugaccgc

SEQ ID NO: 117936 - RNA, 32 nt, Homo Sapiens
ugccucuuaaggaauuuuuagacuuaaguuca

SEQ ID NO: 117937 - RNA, 32 nt, Homo Sapiens
ugaugauuaauucaccuuccagugucucggag

SEQ ID NO: 117938 - RNA, 32 nt, Homo Sapiens
aagagacuccugcauuccuccuccccuccuga

SEQ ID NO: 117939 - RNA, 32 nt, Homo Sapiens
cggcucacaccuguaaucccagcacuuuggga

SEQ ID NO: 117940 - RNA, 32 nt, Homo Sapiens
uggcucacaccuguaaccccagcacuuuggga

SEQ ID NO: 117941 - RNA, 32 nt, Homo Sapiens
cuagaaugagccccaaaccuuagccucauuua

SEQ ID NO: 117942 - RNA, 32 nt, Homo Sapiens
uuuggaccuuggagcacacagaggauucuacu

SEQ ID NO: 117943 - RNA, 32 nt, Homo Sapiens
gaacuguaaucccacuacugcauuccagccug

SEQ ID NO: 117944 - RNA, 32 nt, Homo Sapiens
uggaaaguuauauuuauauccaaauauaccua

SEQ ID NO: 117945 - RNA, 32 nt, Homo Sapiens
guucuauuccggauguucuagcuagaagucau

SEQ ID NO: 117946 - RNA, 32 nt, Homo Sapiens
gagcggagggagaacgucgauaccgucaugaa

SEQ ID NO: 117947 - RNA, 32 nt, Homo Sapiens
ccuccugaggcccugucaggguccuuaccccc

SEQ ID NO: 117948 - RNA, 32 nt, Homo Sapiens
uccucaaaaaauaaaaauagaacuaccauaug

SEQ ID NO: 117949 - RNA, 32 nt, Homo Sapiens
agaaaaagcugagacuccuggggaaugacguu

SEQ ID NO: 117950 - RNA, 32 nt, Homo Sapiens
caggugggaucgacuguaaaugaggacuucug

SEQ ID NO: 117951 - RNA, 32 nt, Homo Sapiens
auccugcccuuaagcuuuggaagccucaagcc

SEQ ID NO: 117952 - RNA, 32 nt, Homo Sapiens
caugcacguguaucugucucuuuuaacacuaa

SEQ ID NO: 117953 - RNA, 32 nt, Homo Sapiens
uucuguuuucuugucuauucugcauaucuuuc

SEQ ID NO: 117954 - RNA, 32 nt, Homo Sapiens
augguucaaccucauauaugauacuaugcuuu

SEQ ID NO: 117955 - RNA, 32 nt, Homo Sapiens
ccugaacuccagccaugccauuuugauaccag

SEQ ID NO: 117956 - RNA, 32 nt, Homo Sapiens
uccugaguagaaccuaccucccugcccaguca

SEQ ID NO: 117957 - RNA, 32 nt, Homo Sapiens
ccuaccugcucaagccgcucuuccccaccugc

SEQ ID NO: 117958 - RNA, 32 nt, Homo Sapiens
cacagcuuacaaucgcaaaucaaaacucacaa

SEQ ID NO: 117959 - RNA, 32 nt, Homo Sapiens
gaugccggguucuccuuucuuuccucacccca

SEQ ID NO: 117960 - RNA, 32 nt, Homo Sapiens
cucucugcugccagacacccccugcugcccac

SEQ ID NO: 117961 - RNA, 32 nt, Homo Sapiens
cuacuuugggaaauguucuuuggaaguaaggu

SEQ ID NO: 117962 - RNA, 32 nt, Homo Sapiens
auccgggugcgcgcugucgcaaccugcccuca

SEQ ID NO: 117963 - RNA, 32 nt, Homo Sapiens
aaggaaguaaaaccagauguuuuccaccaaag

SEQ ID NO: 117964 - RNA, 32 nt, Homo Sapiens
gaaacccagaaaccaccugccacgaugugaac

SEQ ID NO: 117965 - RNA, 32 nt, Homo Sapiens
agugaaaaaggaggaagagaaaaaauauuuuc

SEQ ID NO: 117966 - RNA, 32 nt, Homo Sapiens
agaacagaaagaaaacaaaaacaaaccucgua

SEQ ID NO: 117967 - RNA, 32 nt, Homo Sapiens
cccaagcuuagagcaagcugcccugccaaagg

SEQ ID NO: 117968 - RNA, 32 nt, Homo Sapiens
uucaguauuauguaguuguucguugguuauac

SEQ ID NO: 117969 - RNA, 32 nt, Homo Sapiens
ccagcgcuccuggggcucagugcuggucacug

SEQ ID NO: 117970 - RNA, 32 nt, Homo Sapiens
caacccuaggaacucucgggaacuuggcugug

SEQ ID NO: 117971 - RNA, 32 nt, Homo Sapiens
aaggggguggcgggaccguucccaggagguac

SEQ ID NO: 117972 - RNA, 32 nt, Homo Sapiens
cccuucccaucccaccucccgagccuuccucu

SEQ ID NO: 117973 - RNA, 32 nt, Homo Sapiens
ggagaaggccugggcccucccacuggucccuc

SEQ ID NO: 117974 - RNA, 32 nt, Homo Sapiens
uaaguugcuguaaaauuuguguaaauuuguau

SEQ ID NO: 117975 - RNA, 32 nt, Homo Sapiens
cagugcagcaguaauacagucuauacauuguu

SEQ ID NO: 117976 - RNA, 32 nt, Homo Sapiens
caccugcccuucccuguuccuuucuugcacgc

SEQ ID NO: 117977 - RNA, 32 nt, Homo Sapiens
ggcuugcccagcugggaggccccacacgaaag

SEQ ID NO: 117978 - RNA, 32 nt, Homo Sapiens
cagggccaaaguuauuucuguuagacgucaag

SEQ ID NO: 117979 - RNA, 32 nt, Homo Sapiens
gauucaaagcaacaccaccaccacugaaguau

SEQ ID NO: 117980 - RNA, 32 nt, Homo Sapiens
cgaccgcggaguucugcaacaccuggaggauc

SEQ ID NO: 117981 - RNA, 31 nt, Homo Sapiens
cagcccuggcacugccccugcacaggagaca

SEQ ID NO: 117982 - RNA, 32 nt, Homo Sapiens
ugguagucaacagauguuauuucagucucagu

SEQ ID NO: 117983 - RNA, 32 nt, Homo Sapiens
ugugugagucagugguagcuuauuuaaaaagc

SEQ ID NO: 117984 - RNA, 32 nt, Homo Sapiens
ucccaagugcuucauguuagccagcaaaucug

SEQ ID NO: 117985 - RNA, 32 nt, Homo Sapiens
agagcagaaacggaaauugaccuccccgccau

SEQ ID NO: 117986 - RNA, 32 nt, Homo Sapiens
cuauaaacaaaggagcauuuguuuugauuuua

SEQ ID NO: 117987 - RNA, 29 nt, Homo Sapiens
augcaugagaaggugagcugucacucaca

SEQ ID NO: 117988 - RNA, 32 nt, Homo Sapiens
gagcuuggaaaaccaccucuguuuuccuugcu

SEQ ID NO: 117989 - RNA, 32 nt, Homo Sapiens
aaacaugaacucccaaaauacccagcacaagc

SEQ ID NO: 117990 - RNA, 32 nt, Homo Sapiens
cagugcagcaaccuugguuagcucacccauca

SEQ ID NO: 117991 - RNA, 32 nt, Homo Sapiens
uccggcuggcaccugaggagcggcgugacccc

SEQ ID NO: 117992 - RNA, 32 nt, Homo Sapiens
ggaaaggagcagcuguuugcuuugaaacggug

SEQ ID NO: 117993 - RNA, 32 nt, Homo Sapiens
gguuuaggaaauuuaaggccuucuaaaucaua

SEQ ID NO: 117994 - RNA, 32 nt, Homo Sapiens
ugauccugcccccacccuccccaccgccacau

SEQ ID NO: 117995 - RNA, 32 nt, Homo Sapiens
ggguaggggcggggcggggaagugaaccccga

SEQ ID NO: 117996 - RNA, 32 nt, Homo Sapiens
cagccccagcccagccccacuccucugcugac

SEQ ID NO: 117997 - RNA, 32 nt, Homo Sapiens
gcugaaaauuuuguuuuacauagagaaaaacg

SEQ ID NO: 117998 - RNA, 28 nt, Homo Sapiens
uuacuuucacaauaaacuucuguguagu

SEQ ID NO: 117999 - RNA, 31 nt, Homo Sapiens
acaauaaaagcccuuucuugaguuaaaaaga

SEQ ID NO: 118000 - RNA, 32 nt, Homo Sapiens
accugaaaaauaugcuucggaaacugugcaua

SEQ ID NO: 118001 - RNA, 32 nt, Homo Sapiens
uaaaaaugaaacaauuaaucuagauuuuaaca

SEQ ID NO: 118002 - RNA, 32 nt, Homo Sapiens
uuuuuuuuuuuuuuuuuuuuuaaaacaaaaga

SEQ ID NO: 118003 - RNA, 32 nt, Homo Sapiens
gagucaucuaagugagcuuagaugaacugaca

SEQ ID NO: 118004 - RNA, 32 nt, Homo Sapiens
aaauuagcuggguguggugacaggcgccuaua

SEQ ID NO: 118005 - RNA, 32 nt, Homo Sapiens
uauugcacauucagagaauuuuauauauaugu

SEQ ID NO: 118006 - RNA, 32 nt, Homo Sapiens
agaaauuucuggaaucugauugagucuccacu

SEQ ID NO: 118007 - RNA, 32 nt, Homo Sapiens
aauuuaggaguguaauaaaugggaucaagaaa

SEQ ID NO: 118008 - RNA, 31 nt, Homo Sapiens
ucacugcugccggccuuuguaagggggcgcu

SEQ ID NO: 118009 - RNA, 32 nt, Homo Sapiens
agccagucaaaguggcacagcaaaucauauaa

SEQ ID NO: 118010 - RNA, 32 nt, Homo Sapiens
gcccuucuuugcaugaagcaguguugugacuc

SEQ ID NO: 118011 - RNA, 32 nt, Homo Sapiens
acacgcacccccucacugccuacuccugcuuu

SEQ ID NO: 118012 - RNA, 32 nt, Homo Sapiens
uuugcgcaagaggaaauugaauuccagagaga

SEQ ID NO: 118013 - RNA, 32 nt, Homo Sapiens
aaacuguauuuuauguuauuuauagcuguagg

SEQ ID NO: 118014 - RNA, 32 nt, Homo Sapiens
guaaauacacuucaaaaugccuaugauccggu

SEQ ID NO: 118015 - RNA, 32 nt, Homo Sapiens
cgcagagcaauggcggugucugccggguccgc

SEQ ID NO: 118016 - RNA, 32 nt, Homo Sapiens
uuguacauaaggaccuagggacuccgagcuug

SEQ ID NO: 118017 - RNA, 32 nt, Homo Sapiens
caugagccacugcgcccggccugggucuccgu

SEQ ID NO: 118018 - RNA, 32 nt, Homo Sapiens
ccggggcgggagugggggcugucacccucgga

SEQ ID NO: 118019 - RNA, 32 nt, Homo Sapiens
cacagccacgggggacugcgccagguucccca

SEQ ID NO: 118020 - RNA, 32 nt, Homo Sapiens
cucucggcugcagacacaggagucacagaugc

SEQ ID NO: 118021 - RNA, 32 nt, Homo Sapiens
uuuguggcuuuuuaauggaaaccaagccaaug

SEQ ID NO: 118022 - RNA, 32 nt, Homo Sapiens
auauagcauacuucuuuuuuccaguuucaauc

SEQ ID NO: 118023 - RNA, 32 nt, Homo Sapiens
cggugucuggaaaagcacuuuacagaugagau

SEQ ID NO: 118024 - RNA, 32 nt, Homo Sapiens
guuuuuacaucaucucauuugaucucaaaaca

SEQ ID NO: 118025 - RNA, 32 nt, Homo Sapiens
ucuucagcugaaccacuaauagcagucauagu

SEQ ID NO: 118026 - RNA, 32 nt, Homo Sapiens
aucgaaggaaagugauacuaagaaugagguca

SEQ ID NO: 118027 - RNA, 32 nt, Homo Sapiens
agagcugccggccgcugcacagcccucagcag

SEQ ID NO: 118028 - RNA, 32 nt, Homo Sapiens
uugcaagcuguagaaggaaaugucugaauguc

SEQ ID NO: 118029 - RNA, 32 nt, Homo Sapiens
auuaaucugaagauuaaccauuuuuuugucuu

SEQ ID NO: 118030 - RNA, 32 nt, Homo Sapiens
gggcgggaagauggcggcuggguucaaaaccg

SEQ ID NO: 118031 - RNA, 32 nt, Homo Sapiens
guacuguuuauaguucaugacuauggacaacu

SEQ ID NO: 118032 - RNA, 32 nt, Homo Sapiens
uggcuucuuccacugaauguuuucuagggccg

SEQ ID NO: 118033 - RNA, 32 nt, Homo Sapiens
ucaguaggcgcagaaacgccucaugaugaaga

SEQ ID NO: 118034 - RNA, 32 nt, Homo Sapiens
gguuuacacuuaccaguuucuaauggaaauua

SEQ ID NO: 118035 - RNA, 30 nt, Homo Sapiens
ggagaaauggggaugggggaaauacgacuu

SEQ ID NO: 118036 - RNA, 32 nt, Homo Sapiens
cuugcgcagaguuguuaagaaaaaagagaaac

SEQ ID NO: 118037 - RNA, 32 nt, Homo Sapiens
aucauuauauuuguaaucuuuggacuuguaau

SEQ ID NO: 118038 - RNA, 32 nt, Homo Sapiens
cauaauuuuuuuucuuuuuuuauauggagucu

SEQ ID NO: 118039 - RNA, 32 nt, Homo Sapiens
aaaaggcuguggcugcagcugcugcagcugcu

SEQ ID NO: 118040 - RNA, 32 nt, Homo Sapiens
augucacggaugugggaagaccuucuauaaga

SEQ ID NO: 118041 - RNA, 32 nt, Homo Sapiens
guggagggaaaacuuuaaaaauaauaaccaca

SEQ ID NO: 118042 - RNA, 32 nt, Homo Sapiens
ucuuuuuauuuaaaugugaauuucaacuuuug

SEQ ID NO: 118043 - RNA, 32 nt, Homo Sapiens
cugccaucauggggauaaccggaauugauaca

SEQ ID NO: 118044 - RNA, 32 nt, Homo Sapiens
gagcggagaaaggaagggcugcaugcgggcuu

SEQ ID NO: 118045 - RNA, 32 nt, Homo Sapiens
uuccugagcagagaagcagaaaaggagguucc

SEQ ID NO: 118046 - RNA, 32 nt, Homo Sapiens
gagcaaguuccugaacaugaugaccuagaggc

SEQ ID NO: 118047 - RNA, 32 nt, Homo Sapiens
ugaaggagaaaggagccggaccaagaugggca

SEQ ID NO: 118048 - RNA, 32 nt, Homo Sapiens
cacugaauggguaggagcaaccacugacuggu

SEQ ID NO: 118049 - RNA, 29 nt, Homo Sapiens
gggcuuuggggacagauaaugucuccagg

SEQ ID NO: 118050 - RNA, 32 nt, Homo Sapiens
uagaauaauaauaauauaauacaauagcucua

SEQ ID NO: 118051 - RNA, 32 nt, Homo Sapiens
aggaacacaauuaggauauuuucauacacaua

SEQ ID NO: 118052 - RNA, 32 nt, Homo Sapiens
auuuuuucuuauuucauuuuuacaaagaucac

SEQ ID NO: 118053 - RNA, 32 nt, Homo Sapiens
cuaacuccuaucuauugaauggugaaguuuua

SEQ ID NO: 118054 - RNA, 32 nt, Homo Sapiens
agacccuccgcucuugggcacguggguaggcu

SEQ ID NO: 118055 - RNA, 29 nt, Homo Sapiens
uacguauaaaguuuuaguucauugggugu

SEQ ID NO: 118056 - RNA, 32 nt, Homo Sapiens
aauacacacccagacacacacacacacaguuu

SEQ ID NO: 118057 - RNA, 32 nt, Homo Sapiens
gcagucggucugguccagcugcagccucacag

SEQ ID NO: 118058 - RNA, 31 nt, Homo Sapiens
auuccaucccccucagcuuaggggaaugcac

SEQ ID NO: 118059 - RNA, 32 nt, Homo Sapiens
uggauaagauaaagaacaaaacacaugcaucu

SEQ ID NO: 118060 - RNA, 32 nt, Homo Sapiens
acuuauugcuucccuuccuguuucugcaugau

SEQ ID NO: 118061 - RNA, 32 nt, Homo Sapiens
ugauuuggccacuucccuuuucugggacaaac

SEQ ID NO: 118062 - RNA, 32 nt, Homo Sapiens
ugaacuuuaaaaaacuuauuuauuuauuccac

SEQ ID NO: 118063 - RNA, 32 nt, Homo Sapiens
caggaaaucuuacuguagaacaauuuuuuaua

SEQ ID NO: 118064 - RNA, 32 nt, Homo Sapiens
auauacauauauauacauauauaugacuauac

SEQ ID NO: 118065 - RNA, 32 nt, Homo Sapiens
ccgaaaacaacugaaauugagagucauaaaua

SEQ ID NO: 118066 - RNA, 32 nt, Homo Sapiens
cuuugacuaggucccaggauccccuugucccu

SEQ ID NO: 118067 - RNA, 32 nt, Homo Sapiens
cccucccaggacuggucuguugucuuuucauc

SEQ ID NO: 118068 - RNA, 32 nt, Homo Sapiens
cuacuucuguuguuuacgacguugccuggucu

SEQ ID NO: 118069 - RNA, 32 nt, Homo Sapiens
guuucucuugaccuaucuuccacaucaucaag

SEQ ID NO: 118070 - RNA, 32 nt, Homo Sapiens
cucauuugauucauaccccaacuuuguguucu

SEQ ID NO: 118071 - RNA, 32 nt, Homo Sapiens
caaggccccaggcucagagcacucacacgcca

SEQ ID NO: 118072 - RNA, 32 nt, Homo Sapiens
ccgugccccagccuggaccccuggggcucaga

SEQ ID NO: 118073 - RNA, 32 nt, Homo Sapiens
caaagguugggucugacaguaccaguuguuag

SEQ ID NO: 118074 - RNA, 32 nt, Homo Sapiens
cacaaugacaguuucugcaagucuuuccuagu

SEQ ID NO: 118075 - RNA, 32 nt, Homo Sapiens
ggauggcccaggcaaugcugucgcugcuugag

SEQ ID NO: 118076 - RNA, 32 nt, Homo Sapiens
cugcccgugucuuccgaagauaccaagugaaa

SEQ ID NO: 118077 - RNA, 32 nt, Homo Sapiens
gaggggcucugcaacugagcgaagcugcgggc

SEQ ID NO: 118078 - RNA, 32 nt, Homo Sapiens
uauaccuuuccacaggcucgucugugucccug

SEQ ID NO: 118079 - RNA, 32 nt, Homo Sapiens
caaacagaaaaagaagacuaagaugacagaug

SEQ ID NO: 118080 - RNA, 32 nt, Homo Sapiens
aacugaguggaacuccaauuucaaagaacugu

SEQ ID NO: 118081 - RNA, 32 nt, Homo Sapiens
caugcaggggacggcgcgucgcggcggccgcc

SEQ ID NO: 118082 - RNA, 32 nt, Homo Sapiens
gugauccacccgcgcgcacgggccguccucuc

SEQ ID NO: 118083 - RNA, 32 nt, Homo Sapiens
auugaucaaagaugagacaauuugagcaucaa

SEQ ID NO: 118084 - RNA, 32 nt, Homo Sapiens
ugagcacuaccuguaaacaaagggcacagaau

SEQ ID NO: 118085 - RNA, 32 nt, Homo Sapiens
ucuuggcagaucuggguaaugugugugucuca

SEQ ID NO: 118086 - RNA, 32 nt, Homo Sapiens
cuggagagagcggccgggccgcgcucgggccg

SEQ ID NO: 118087 - RNA, 32 nt, Homo Sapiens
uuucuccccacuuucaucuaccuuuucuggca

SEQ ID NO: 118088 - RNA, 32 nt, Homo Sapiens
uauuuucuugucaccaggaaaaggccagcucu

SEQ ID NO: 118089 - RNA, 32 nt, Homo Sapiens
ucggggagagaguggaacagaacauggguuug

SEQ ID NO: 118090 - RNA, 32 nt, Homo Sapiens
gccgcaccgcaccgcgcgggcggccauggagc

SEQ ID NO: 118091 - RNA, 32 nt, Homo Sapiens
auggaucaggcucauaaagauuuuauaauauu

SEQ ID NO: 118092 - RNA, 32 nt, Homo Sapiens
ugacuccugccagcggcugcugaccuuccccu

SEQ ID NO: 118093 - RNA, 32 nt, Homo Sapiens
uauuuguagauuauuuuaaugauaaaaaugac

SEQ ID NO: 118094 - RNA, 32 nt, Homo Sapiens
ugaagaugaagccccacugcucggucagucug

SEQ ID NO: 118095 - RNA, 32 nt, Homo Sapiens
aagugcccacugcaauaaaguaauacguacca

SEQ ID NO: 118096 - RNA, 32 nt, Homo Sapiens
caggcuuuuuaaaugauguaauucccacugua

SEQ ID NO: 118097 - RNA, 32 nt, Homo Sapiens
ucuuaacagaaaaaacaguuuggguucaauag

SEQ ID NO: 118098 - RNA, 32 nt, Homo Sapiens
ggaaacacagcuugugagugcaugucagcugu

SEQ ID NO: 118099 - RNA, 32 nt, Homo Sapiens
guuccaagagaaaauaaggcaacaucaaugaa

SEQ ID NO: 118100 - RNA, 30 nt, Homo Sapiens
uagcugggagguggucugaagcagacaggg

SEQ ID NO: 118101 - RNA, 32 nt, Homo Sapiens
ccuuacuuuacguguguaaauuccuaccagga

SEQ ID NO: 118102 - RNA, 32 nt, Homo Sapiens
agcaaggggccacuuccuacuuccuccuuuag

SEQ ID NO: 118103 - RNA, 32 nt, Homo Sapiens
ggucccggcccccauccuccccgccccaucgg

SEQ ID NO: 118104 - RNA, 32 nt, Homo Sapiens
accauuuucuucugcacucccauuuucucugc

SEQ ID NO: 118105 - RNA, 32 nt, Homo Sapiens
agcaacuuccgcaggcagcugcauaagcugcg

SEQ ID NO: 118106 - RNA, 32 nt, Homo Sapiens
accagcugggcgacgucacccugcucccaccc

SEQ ID NO: 118107 - RNA, 32 nt, Homo Sapiens
ggagugugacccaggugccgcuuccucucgcc

SEQ ID NO: 118108 - RNA, 32 nt, Homo Sapiens
cgcuggacccagggcccucccaggccaucucu

SEQ ID NO: 118109 - RNA, 32 nt, Homo Sapiens
guggcuacuccuggugugaacagcccauccug

SEQ ID NO: 118110 - RNA, 32 nt, Homo Sapiens
cucccgcgccggccccaggagcucccggcuuc

SEQ ID NO: 118111 - RNA, 32 nt, Homo Sapiens
agaugcuguccuugguuuuucuauggaaaguu

SEQ ID NO: 118112 - RNA, 32 nt, Homo Sapiens
acuuuggggcccgcgccgcgcgccggcggcac

SEQ ID NO: 118113 - RNA, 32 nt, Homo Sapiens
acaacuuacaggaacauuuguacuuuaagaaa

SEQ ID NO: 118114 - RNA, 32 nt, Homo Sapiens
gcagucugcgcuuuccucucccgccugccuag

SEQ ID NO: 118115 - RNA, 32 nt, Homo Sapiens
cuuugcuggaagcuuguuucugauuggugaaa

SEQ ID NO: 118116 - RNA, 32 nt, Homo Sapiens
cugcaccacagggaccauuugcuggagaugca

SEQ ID NO: 118117 - RNA, 32 nt, Homo Sapiens
cccgagccugcuagggcgaggggggugaaugg

SEQ ID NO: 118118 - RNA, 32 nt, Homo Sapiens
uauucaaauauuuggggauuucuuauuuaaaa

SEQ ID NO: 118119 - RNA, 32 nt, Homo Sapiens
ucuacuucugguuucagaaaacacgagagaga

SEQ ID NO: 118120 - RNA, 32 nt, Homo Sapiens
cagagagcccccagccagcagcaggccccucu

SEQ ID NO: 118121 - RNA, 32 nt, Homo Sapiens
uaacgcgaggccccggccucgguccccggacu

SEQ ID NO: 118122 - RNA, 32 nt, Homo Sapiens
ucuuuucuaauuucuuuuuuucagugugaaaa

SEQ ID NO: 118123 - RNA, 32 nt, Homo Sapiens
ccagaagaacagaucauuaccugguuccaguu

SEQ ID NO: 118124 - RNA, 32 nt, Homo Sapiens
ggugcugagccugccuuccucaccaccuagcc

SEQ ID NO: 118125 - RNA, 32 nt, Homo Sapiens
aacaucaugugccuguuuccugucucgcucau

SEQ ID NO: 118126 - RNA, 32 nt, Homo Sapiens
uccaucccuccggcccgccccggagaagacgc

SEQ ID NO: 118127 - RNA, 32 nt, Homo Sapiens
ucauacaauucagucaauuuuauuuuuagcau

SEQ ID NO: 118128 - RNA, 32 nt, Homo Sapiens
aaacuuuucuuauuaaaaacguuacaaaguaa

SEQ ID NO: 118129 - RNA, 32 nt, Homo Sapiens
gaccucccuggcacggccgccgccuucaaaua

SEQ ID NO: 118130 - RNA, 32 nt, Homo Sapiens
auugguuuuuauuucuuuugauuuucaagcuc

SEQ ID NO: 118131 - RNA, 27 nt, Homo Sapiens
accccauccuucuuccucuccagagau

SEQ ID NO: 118132 - RNA, 32 nt, Homo Sapiens
auaaacuugggguuguauaaucuauugcaaua

SEQ ID NO: 118133 - RNA, 32 nt, Homo Sapiens
cccgggucaccaugaggacucuccgcagguug

SEQ ID NO: 118134 - RNA, 32 nt, Homo Sapiens
gguccuccacccaacggggucagggagguggu

SEQ ID NO: 118135 - RNA, 32 nt, Homo Sapiens
aggcgccagugcccucacucucgggugaagac

SEQ ID NO: 118136 - RNA, 32 nt, Homo Sapiens
cgcggagaagcagucaucaucauccauggagu

SEQ ID NO: 118137 - RNA, 32 nt, Homo Sapiens
uacuuggugggugaauccaauuuuguagaauu

SEQ ID NO: 118138 - RNA, 32 nt, Homo Sapiens
cauguguuuccacuuccguuucuaguacuauu

SEQ ID NO: 118139 - RNA, 32 nt, Homo Sapiens
cgacuguagugcaacaaauauuuuaaagcccc

SEQ ID NO: 118140 - RNA, 32 nt, Homo Sapiens
aagcgcagccgcggcucuguguuuugagagug

SEQ ID NO: 118141 - RNA, 32 nt, Homo Sapiens
ggaagaaaugcccaaaagagguccuggccauc

SEQ ID NO: 118142 - RNA, 32 nt, Homo Sapiens
guugauccgcgccccaggacccccuucuuugc

SEQ ID NO: 118143 - RNA, 32 nt, Homo Sapiens
ggcugagugguguggaggcagcugcugggcag

SEQ ID NO: 118144 - RNA, 32 nt, Homo Sapiens
cuuacuagucccaauuguuuuguaaccacuuu

SEQ ID NO: 118145 - RNA, 32 nt, Homo Sapiens
cugggcucagagggacaagggcaggacaguag

SEQ ID NO: 118146 - RNA, 32 nt, Homo Sapiens
ugauggagcugaugcuuucucuccuaaucccu

SEQ ID NO: 118147 - RNA, 32 nt, Homo Sapiens
gaaagcgacuucuuaaauauagacauugugag

SEQ ID NO: 118148 - RNA, 32 nt, Homo Sapiens
ggcccuggagagaggggcugguggcuggacag

SEQ ID NO: 118149 - RNA, 32 nt, Homo Sapiens
uuugagguacuguaguuuauauaaaagucgga

SEQ ID NO: 118150 - RNA, 32 nt, Homo Sapiens
gucaggagagggucacuuuuguagcugagacc

SEQ ID NO: 118151 - RNA, 32 nt, Homo Sapiens
cuggucagcgucaggggagcucccuccaauca

SEQ ID NO: 118152 - RNA, 32 nt, Homo Sapiens
guuaaccaaagggcagaauaaauaagcaaaau

SEQ ID NO: 118153 - RNA, 32 nt, Homo Sapiens
gucuggguguggccuggggcucccucugcagg

SEQ ID NO: 118154 - RNA, 32 nt, Homo Sapiens
uguuuucuuucuucuuuuuuaguauuauuuaa

SEQ ID NO: 118155 - RNA, 32 nt, Homo Sapiens
guucaggaugugacagugacucggggcgacca

SEQ ID NO: 118156 - RNA, 32 nt, Homo Sapiens
ggcucacgccuguaaucccagcccuuugggag

SEQ ID NO: 118157 - RNA, 32 nt, Homo Sapiens
aaagaccaucaccagcaucuguccuucagggu

SEQ ID NO: 118158 - RNA, 32 nt, Homo Sapiens
ccuaugcucuugccuucuuuuaucugcaaugu

SEQ ID NO: 118159 - RNA, 32 nt, Homo Sapiens
uggaugcuggcagaagacuuaagauuucugaa

SEQ ID NO: 118160 - RNA, 32 nt, Homo Sapiens
acaggagaggccgcugcugccagccgucauau

SEQ ID NO: 118161 - RNA, 32 nt, Homo Sapiens
auaauuuuuuuuucuuuuuuuccuucuuuuuu

SEQ ID NO: 118162 - RNA, 32 nt, Homo Sapiens
caauagaggauacaacaucacagaaucuuucu

SEQ ID NO: 118163 - RNA, 27 nt, Homo Sapiens
gguccuauuuaagccagcccccaccua

SEQ ID NO: 118164 - RNA, 32 nt, Homo Sapiens
uguuacuuaccuuguuauuaaauauuucuuga

SEQ ID NO: 118165 - RNA, 32 nt, Homo Sapiens
uuagauuaaccgugcugaggcuccacauagcu

SEQ ID NO: 118166 - RNA, 30 nt, Homo Sapiens
cugugauuggcgccugcgccggcggaccgu

SEQ ID NO: 118167 - RNA, 32 nt, Homo Sapiens
ugaaaccaaacgggcauagaaaagguaugugc

SEQ ID NO: 118168 - RNA, 32 nt, Homo Sapiens
acuauacuaccauuuaaauaucauguuuuuau

SEQ ID NO: 118169 - RNA, 32 nt, Homo Sapiens
agggagcccagcugggagggcccaggcaggca

SEQ ID NO: 118170 - RNA, 32 nt, Homo Sapiens
ccuaguggugcugagggagguggggagaggga

SEQ ID NO: 118171 - RNA, 32 nt, Homo Sapiens
gcuuuuauuauuauaauccaguuuuacaaaug

SEQ ID NO: 118172 - RNA, 31 nt, Homo Sapiens
caagugugccugugccugccucagcucggcg

SEQ ID NO: 118173 - RNA, 32 nt, Homo Sapiens
cccccugccccgcucccaccauugccccuccu

SEQ ID NO: 118174 - RNA, 32 nt, Homo Sapiens
acuuuaaaggauuggaacagucuucuagaauu

SEQ ID NO: 118175 - RNA, 32 nt, Homo Sapiens
auuccugugggugggagggaagcuacugcaga

SEQ ID NO: 118176 - RNA, 32 nt, Homo Sapiens
cuccgcugcagucgcugcgucuccaagcaaca

SEQ ID NO: 118177 - RNA, 30 nt, Homo Sapiens
ucaagauggcggacguggcgggccccuccc

SEQ ID NO: 118178 - RNA, 32 nt, Homo Sapiens
uagccuucggcuccauccaucuucccaaauga

SEQ ID NO: 118179 - RNA, 32 nt, Homo Sapiens
agagggaaggcacagugucaccuucguccccu

SEQ ID NO: 118180 - RNA, 32 nt, Homo Sapiens
caaacccuaugaaaguggaauuuucuaacaaa

SEQ ID NO: 118181 - RNA, 32 nt, Homo Sapiens
ggacuaaggcggggcgugcagguagccggccg

SEQ ID NO: 118182 - RNA, 32 nt, Homo Sapiens
cgauuuuggaggaaacaagaaucccaagggcc

SEQ ID NO: 118183 - RNA, 32 nt, Homo Sapiens
acaaagaggagcugcugugggccuggcagggc

SEQ ID NO: 118184 - RNA, 32 nt, Homo Sapiens
gggcuaauccgaaggggcugcgaggucaggcu

SEQ ID NO: 118185 - RNA, 32 nt, Homo Sapiens
uguugcguggcaucacguggacguggcuuaag

SEQ ID NO: 118186 - RNA, 32 nt, Homo Sapiens
gagaggcagugauuccccucccgccccgcaca

SEQ ID NO: 118187 - RNA, 32 nt, Homo Sapiens
gcuuacccgagcucccagugugguuagcacag

SEQ ID NO: 118188 - RNA, 32 nt, Homo Sapiens
uugaagguuucaauguacauauaacuuuugaa

SEQ ID NO: 118189 - RNA, 32 nt, Homo Sapiens
ccauugaaagacuugaagaauacauauacuua

SEQ ID NO: 118190 - RNA, 32 nt, Homo Sapiens
gcucucaggaggauuggagguagaacuggccc

SEQ ID NO: 118191 - RNA, 32 nt, Homo Sapiens
uuggguucugggacaggugacccggcggcggg

SEQ ID NO: 118192 - RNA, 32 nt, Homo Sapiens
agggucuggcacucacaagggcgcacgacuag

SEQ ID NO: 118193 - RNA, 32 nt, Homo Sapiens
cgcgcacgcucgcgcacccggaucccggcucc

SEQ ID NO: 118194 - RNA, 32 nt, Homo Sapiens
agaaugcauuugcugccaaaagacacccccac

SEQ ID NO: 118195 - RNA, 32 nt, Homo Sapiens
cccccaaaauacacaaagcaaauaaggccaaa

SEQ ID NO: 118196 - RNA, 32 nt, Homo Sapiens
aauagcuucuaaaucaaacuuccuucacagug

SEQ ID NO: 118197 - RNA, 32 nt, Homo Sapiens
cuagaccucuuagguaggaaucuggguaagac

SEQ ID NO: 118198 - RNA, 32 nt, Homo Sapiens
uuuaaaaguaggaaauacaauaaauacagaaa

SEQ ID NO: 118199 - RNA, 32 nt, Homo Sapiens
uagguuggucugagguuggcaccucaaucuac

SEQ ID NO: 118200 - RNA, 32 nt, Homo Sapiens
ugcccaauuucagauauuugagcauuuuguua

SEQ ID NO: 118201 - RNA, 32 nt, Homo Sapiens
gagaugccgagcggugcccgggcccgcuuacc

SEQ ID NO: 118202 - RNA, 32 nt, Homo Sapiens
uuguguccuaaauugcucauuaauuuuuauuu

SEQ ID NO: 118203 - RNA, 32 nt, Homo Sapiens
acagacagcugugguccucugauuccaaugag

SEQ ID NO: 118204 - RNA, 32 nt, Homo Sapiens
uggauuaauuuucaaaauauauaagaaauucc

SEQ ID NO: 118205 - RNA, 32 nt, Homo Sapiens
aaccucugcuccaaagagaaaaauagaaugag

SEQ ID NO: 118206 - RNA, 32 nt, Homo Sapiens
accacugcggcaagaggaccccagcuggggug

SEQ ID NO: 118207 - RNA, 32 nt, Homo Sapiens
cucaacaugcagguuucccuucuuauauaccu

SEQ ID NO: 118208 - RNA, 32 nt, Homo Sapiens
ucauaccuuuuggacaguaaguauauuucuag

SEQ ID NO: 118209 - RNA, 31 nt, Homo Sapiens
aguucucccaggagaaagccauguucaguuc

SEQ ID NO: 118210 - RNA, 32 nt, Homo Sapiens
cccugugugucacuuagagacagugaaaaccc

SEQ ID NO: 118211 - RNA, 32 nt, Homo Sapiens
guaacaauucucuuuuccaccuccucacuaaa

SEQ ID NO: 118212 - RNA, 32 nt, Homo Sapiens
uguagaagcaugaggaauaaaagauggucugg

SEQ ID NO: 118213 - RNA, 32 nt, Homo Sapiens
cccggcauugccugaggccccgcugugacagu

SEQ ID NO: 118214 - RNA, 32 nt, Homo Sapiens
uuucccagugccaggagaacccccgcuccgag

SEQ ID NO: 118215 - RNA, 32 nt, Homo Sapiens
cuuuauuguccugauuuguccuguuuguuggu

SEQ ID NO: 118216 - RNA, 32 nt, Homo Sapiens
ggcaggaggaagauugcaggggcgggaagaaa

SEQ ID NO: 118217 - RNA, 32 nt, Homo Sapiens
guaagucaguugacuugccgcacaucucuuug

SEQ ID NO: 118218 - RNA, 32 nt, Homo Sapiens
aaaucucuuucuguugcuggcuuacaguuucu

SEQ ID NO: 118219 - RNA, 32 nt, Homo Sapiens
uguguaugugcagaaguauuauagaaaaauua

SEQ ID NO: 118220 - RNA, 32 nt, Homo Sapiens
ucuccuggguggcaagaacaucuaugcuagug

SEQ ID NO: 118221 - RNA, 32 nt, Homo Sapiens
ggaagaacucaugauuacauuaguaacaggau

SEQ ID NO: 118222 - RNA, 32 nt, Homo Sapiens
cauuugggugguuuuuauuuuuauauacguuu

SEQ ID NO: 118223 - RNA, 32 nt, Homo Sapiens
uuaacugaacuaaaggcagacuuucaguacca

SEQ ID NO: 118224 - RNA, 32 nt, Homo Sapiens
uucagaguucaaggaagaagcaaaauaucaca

SEQ ID NO: 118225 - RNA, 32 nt, Homo Sapiens
gaguagaguuuuguuuucuggaucugucuagu

SEQ ID NO: 118226 - RNA, 32 nt, Homo Sapiens
auggccugagaaauauuuuggaaaaguuaaau

SEQ ID NO: 118227 - RNA, 32 nt, Homo Sapiens
agaaccagggaagagaguagaguacuuucucc

SEQ ID NO: 118228 - RNA, 32 nt, Homo Sapiens
cugugacuugauaaacaagugaaacauucuuu

SEQ ID NO: 118229 - RNA, 32 nt, Homo Sapiens
gucaagaagcaggucucgaucccggaccagaa

SEQ ID NO: 118230 - RNA, 32 nt, Homo Sapiens
cuggcccucccuccccucugcuggccagaggg

SEQ ID NO: 118231 - RNA, 32 nt, Homo Sapiens
guagccuucuugaagcccccagcccuaaucuc

SEQ ID NO: 118232 - RNA, 32 nt, Homo Sapiens
agugaguggcgggcugggcggcggcggccgua

SEQ ID NO: 118233 - RNA, 32 nt, Homo Sapiens
uuugggagcagaaaagcugaaaaacccuuuug

SEQ ID NO: 118234 - RNA, 32 nt, Homo Sapiens
gccugaaaccguuuccucuucucuuucccugg

SEQ ID NO: 118235 - RNA, 32 nt, Homo Sapiens
uccucaaauggcaaaaccagccccuguugagg

SEQ ID NO: 118236 - RNA, 32 nt, Homo Sapiens
guacuugggcagagcuccccgggguucauugu

SEQ ID NO: 118237 - RNA, 32 nt, Homo Sapiens
ggcaggggcgggggguuggguguggugaggga

SEQ ID NO: 118238 - RNA, 32 nt, Homo Sapiens
cccaguugcuguacaagagcaggcuuuacaag

SEQ ID NO: 118239 - RNA, 32 nt, Homo Sapiens
cagucccucgcaccacgugcccuccuggccgc

SEQ ID NO: 118240 - RNA, 32 nt, Homo Sapiens
aggucacugcacaacuaaagcaaaccagcugg

SEQ ID NO: 118241 - RNA, 32 nt, Homo Sapiens
uaaagaaagcuacuucucaaggguauuaugug

SEQ ID NO: 118242 - RNA, 32 nt, Homo Sapiens
uguuuauuaauagaaugauaaauguacagagu

SEQ ID NO: 118243 - RNA, 30 nt, Homo Sapiens
gugccagcgugugccacccauuguacuagg

SEQ ID NO: 118244 - RNA, 31 nt, Homo Sapiens
augccuugguuuugccaaccauggauggcaa

SEQ ID NO: 118245 - RNA, 32 nt, Homo Sapiens
acgacuacaaaauaaaacuugguucugaauau

SEQ ID NO: 118246 - RNA, 32 nt, Homo Sapiens
uguggggagacgggggucuuccuucaccagcu

SEQ ID NO: 118247 - RNA, 32 nt, Homo Sapiens
augacagagucuuucaacacuuugcacaugau

SEQ ID NO: 118248 - RNA, 32 nt, Homo Sapiens
uagcgccccuggagcuccccaaccaugaagcu

SEQ ID NO: 118249 - RNA, 32 nt, Homo Sapiens
ugacggguucaguguaguaauacugugugugg

SEQ ID NO: 118250 - RNA, 32 nt, Homo Sapiens
ccgcgucgucuucgaccucuucgucgguggca

SEQ ID NO: 118251 - RNA, 32 nt, Homo Sapiens
cacauaguauugaucagaaaucuuaugaauca

SEQ ID NO: 118252 - RNA, 32 nt, Homo Sapiens
cacagcuguccguaucuccuuuggauuccaua

SEQ ID NO: 118253 - RNA, 30 nt, Homo Sapiens
ucugcuguggacugcaucaggucucagugu

SEQ ID NO: 118254 - RNA, 32 nt, Homo Sapiens
gcuaugauauucuagaagaaaauaucaaacau

SEQ ID NO: 118255 - RNA, 32 nt, Homo Sapiens
ccgagucaccaaggacaaggguccuucccuca

SEQ ID NO: 118256 - RNA, 32 nt, Homo Sapiens
uuguuauuuaugugcugucaaguuuugaagug

SEQ ID NO: 118257 - RNA, 32 nt, Homo Sapiens
uugcaagguguuuagcagcaucugucuccucc

SEQ ID NO: 118258 - RNA, 32 nt, Homo Sapiens
uugcugaguucugucagcacucugaugugcuc

SEQ ID NO: 118259 - RNA, 32 nt, Homo Sapiens
acugugauuaggugcuggggucuuagcgucca

SEQ ID NO: 118260 - RNA, 32 nt, Homo Sapiens
ggccugccccuucgcuccugccugcauuucca

SEQ ID NO: 118261 - RNA, 31 nt, Homo Sapiens
agccucugcaucugccugccucgggcagagg

SEQ ID NO: 118262 - RNA, 30 nt, Homo Sapiens
uuugguuuucuucuuugggaaaccaaacau

SEQ ID NO: 118263 - RNA, 32 nt, Homo Sapiens
auauauauauauauuuacuagauagauuaagg

SEQ ID NO: 118264 - RNA, 31 nt, Homo Sapiens
uuuaagaacauauugaacaacuuugcuauuu

SEQ ID NO: 118265 - RNA, 32 nt, Homo Sapiens
ugcagugcauucagacaccccgcaaagcagga

SEQ ID NO: 118266 - RNA, 32 nt, Homo Sapiens
cuugccugaaaaaugaaagaggcgcuggcuuu

SEQ ID NO: 118267 - RNA, 32 nt, Homo Sapiens
auggucucuacagggaggggagucuagggaau

SEQ ID NO: 118268 - RNA, 32 nt, Homo Sapiens
ucuucugucucccuguuuuucuaaucaagggg

SEQ ID NO: 118269 - RNA, 32 nt, Homo Sapiens
ggaggguggcagguuggagggcccguaagccu

SEQ ID NO: 118270 - RNA, 32 nt, Homo Sapiens
ucaguacauaucucucuucaauaaauuucauu

SEQ ID NO: 118271 - RNA, 32 nt, Homo Sapiens
caggccauggacaggcugggccccaucagcag

SEQ ID NO: 118272 - RNA, 32 nt, Homo Sapiens
cagaagggcagacaguucuucugggguuggca

SEQ ID NO: 118273 - RNA, 32 nt, Homo Sapiens
aauaggcuucaucauggaaacuucugagcaga

SEQ ID NO: 118274 - RNA, 32 nt, Homo Sapiens
ugaagagcacaguaggaagggaggcggcuccu

SEQ ID NO: 118275 - RNA, 32 nt, Homo Sapiens
cugcuagaggauggcuaugcaaaagcauaacg

SEQ ID NO: 118276 - RNA, 32 nt, Homo Sapiens
gugacuucuccccugcccuuccuccugaugga

SEQ ID NO: 118277 - RNA, 29 nt, Homo Sapiens
uuuacugugacuuuuguuuucugaguuga

SEQ ID NO: 118278 - RNA, 32 nt, Homo Sapiens
ucucauuuccaagucauguauaaucuuuaugg

SEQ ID NO: 118279 - RNA, 32 nt, Homo Sapiens
cuuguguguguguuuuuuuuuaaguucucauc

SEQ ID NO: 118280 - RNA, 32 nt, Homo Sapiens
caggcccagccuuuuugaccugcuugagaggg

SEQ ID NO: 118281 - RNA, 32 nt, Homo Sapiens
ucuuacugacgauaguauauuuuuucaaauuu

SEQ ID NO: 118282 - RNA, 26 nt, Homo Sapiens
ccagaagaaugccucucaagagcuga

SEQ ID NO: 118283 - RNA, 32 nt, Homo Sapiens
cccagccugccugccgcaccccuguggccucc

SEQ ID NO: 118284 - RNA, 31 nt, Homo Sapiens
ucggaaaugugucaaggcaauuccaaaggug

SEQ ID NO: 118285 - RNA, 32 nt, Homo Sapiens
acucuuggacacuggaggaaaugacagcuacu

SEQ ID NO: 118286 - RNA, 32 nt, Homo Sapiens
gcaacucauggacuugacagcaaaccucaauc

SEQ ID NO: 118287 - RNA, 32 nt, Homo Sapiens
cuccugggccugggcuuuagucugggcuacgg

SEQ ID NO: 118288 - RNA, 32 nt, Homo Sapiens
acuucaaauauacagcucuuacggugcauaca

SEQ ID NO: 118289 - RNA, 32 nt, Homo Sapiens
acuaagauuccaaagcacuugaauuuaaaaca

SEQ ID NO: 118290 - RNA, 32 nt, Homo Sapiens
uaaggcuguauauaaauuauaccuuacuaaaa

SEQ ID NO: 118291 - RNA, 31 nt, Homo Sapiens
uucacuguggucauccugccccuggcugugc

SEQ ID NO: 118292 - RNA, 32 nt, Homo Sapiens
aacgaggccugcagcugcacagccagacccgc

SEQ ID NO: 118293 - RNA, 32 nt, Homo Sapiens
ugucagagcuugcaguguaaucagugugcuua

SEQ ID NO: 118294 - RNA, 32 nt, Homo Sapiens
aucaguuauagguaaacauuggaaacuccaua

SEQ ID NO: 118295 - RNA, 32 nt, Homo Sapiens
cccgcccccguggacccggccccaccccgaau

SEQ ID NO: 118296 - RNA, 32 nt, Homo Sapiens
ccugaacauaauguauuuuuaguaagaccaug

SEQ ID NO: 118297 - RNA, 32 nt, Homo Sapiens
ucccgggccagcugccugcggaccgcuuccuu

SEQ ID NO: 118298 - RNA, 32 nt, Homo Sapiens
ugaauggguuuuucuuuuuugaagaagucuaa

SEQ ID NO: 118299 - RNA, 32 nt, Homo Sapiens
gcuaagggaaaauaaaauuuuggaggaaauug

SEQ ID NO: 118300 - RNA, 32 nt, Homo Sapiens
uucucggagguagaagauguuguuagcccaaa

SEQ ID NO: 118301 - RNA, 32 nt, Homo Sapiens
ucggaugguguaaagaaaucacagaccaagga

SEQ ID NO: 118302 - RNA, 32 nt, Homo Sapiens
gccagagcucgggaucucggccccgggaggcg

SEQ ID NO: 118303 - RNA, 32 nt, Homo Sapiens
ucccaaucacccagauucauuauucuuuguuc

SEQ ID NO: 118304 - RNA, 32 nt, Homo Sapiens
acaaaagaacuaagaggcccagcccucagaaa

SEQ ID NO: 118305 - RNA, 32 nt, Homo Sapiens
aaucuuuuggcuucccggggccacauuggaag

SEQ ID NO: 118306 - RNA, 32 nt, Homo Sapiens
cgccagacccaccguguccacacucugcucuc

SEQ ID NO: 118307 - RNA, 32 nt, Homo Sapiens
cggcugcaaugcugagcucccgggccgaggcg

SEQ ID NO: 118308 - RNA, 32 nt, Homo Sapiens
aaguggaucuauucauaagauaaaagauccgg

SEQ ID NO: 118309 - RNA, 32 nt, Homo Sapiens
uucucaucucaaagcaaacuaucauuccagaa

SEQ ID NO: 118310 - RNA, 32 nt, Homo Sapiens
auaucagcaaauaguuuauguuaauuguguca

SEQ ID NO: 118311 - RNA, 32 nt, Homo Sapiens
gaccucccugaacauuucacgcagucagggaa

SEQ ID NO: 118312 - RNA, 32 nt, Homo Sapiens
agugcaggaagaucccaaaaaggcauaugauc

SEQ ID NO: 118313 - RNA, 32 nt, Homo Sapiens
agcaauguucuauuuuuagaaacuauauuaua

SEQ ID NO: 118314 - RNA, 32 nt, Homo Sapiens
cacuuaguucccuccucacaggcaaccauuau

SEQ ID NO: 118315 - RNA, 32 nt, Homo Sapiens
acugcacugaaauaaaacacuaacuacauuau

SEQ ID NO: 118316 - RNA, 32 nt, Homo Sapiens
ucggaggcgaaggagcuuacuccacgggaaca

SEQ ID NO: 118317 - RNA, 32 nt, Homo Sapiens
gacgguacccgcgccccacaguccacccgcuc

SEQ ID NO: 118318 - RNA, 32 nt, Homo Sapiens
gguacuuggggguggggccacaaaucuggcga

SEQ ID NO: 118319 - RNA, 32 nt, Homo Sapiens
uccagcgaggcggacgggcggcgugggcccau

SEQ ID NO: 118320 - RNA, 32 nt, Homo Sapiens
ggugucccugcccccaggacaguccagggcca

SEQ ID NO: 118321 - RNA, 32 nt, Homo Sapiens
ggggcugcuccaugguggcuggucaccucucu

SEQ ID NO: 118322 - RNA, 32 nt, Homo Sapiens
ccaggcugagacucggggcgccaguccgggca

SEQ ID NO: 118323 - RNA, 32 nt, Homo Sapiens
cuuggucugagacgugauaggccugccuucug

SEQ ID NO: 118324 - RNA, 31 nt, Homo Sapiens
auagcuuauaaaagaaaguccacauugaaua

SEQ ID NO: 118325 - RNA, 30 nt, Homo Sapiens
agacugaauauccuuuuuaaugcaccauga

SEQ ID NO: 118326 - RNA, 32 nt, Homo Sapiens
ggcaggcucaggucugucccgcugcccugggc

SEQ ID NO: 118327 - RNA, 32 nt, Homo Sapiens
ucacaucuccuccugcccaagauguaaggaag

SEQ ID NO: 118328 - RNA, 32 nt, Homo Sapiens
gagcccugagauccuccucccagcucaaggga

SEQ ID NO: 118329 - RNA, 32 nt, Homo Sapiens
caucucaauuauagaaggcugcucuuacccuu

SEQ ID NO: 118330 - RNA, 32 nt, Homo Sapiens
uuugauucggaagacuaagucuggagcuagac

SEQ ID NO: 118331 - RNA, 32 nt, Homo Sapiens
aucuaaaaaauauuuaggauagauuuaauaga

SEQ ID NO: 118332 - RNA, 32 nt, Homo Sapiens
ucugugcuucaguuucuucaucuuuaaaauga

SEQ ID NO: 118333 - RNA, 32 nt, Homo Sapiens
uauaugcaauucucccucccccagcccuuccc

SEQ ID NO: 118334 - RNA, 32 nt, Homo Sapiens
cccucuggccggacucggugcuccucaggccc

SEQ ID NO: 118335 - RNA, 32 nt, Homo Sapiens
acugcauuugaaaaguuuuauggagaauaugc

SEQ ID NO: 118336 - RNA, 32 nt, Homo Sapiens
ucaagauaaguuguauuuuaccauggaaaaau

SEQ ID NO: 118337 - RNA, 32 nt, Homo Sapiens
guucacccagugaucuugggcugggguugucu

SEQ ID NO: 118338 - RNA, 32 nt, Homo Sapiens
cggcuguauaauacauaaccacagcaagacug

SEQ ID NO: 118339 - RNA, 32 nt, Homo Sapiens
gauggccucaggaaaauggaaccauuaccugu

SEQ ID NO: 118340 - RNA, 32 nt, Homo Sapiens
ggacguuugucaacagcuguaguauucccaca

SEQ ID NO: 118341 - RNA, 32 nt, Homo Sapiens
gagauuaaugaaagugggaaaauacacaugaa

SEQ ID NO: 118342 - RNA, 32 nt, Homo Sapiens
cuagguccaggccccaggagccaggcccagcc

SEQ ID NO: 118343 - RNA, 32 nt, Homo Sapiens
gauuccuucuauuugcacaagucaccuuggac

SEQ ID NO: 118344 - RNA, 32 nt, Homo Sapiens
ccaggggaaaauugauuauguaagcaagggcu

SEQ ID NO: 118345 - RNA, 32 nt, Homo Sapiens
gcagguugcuuuuauaaagaaggugaacuauu

SEQ ID NO: 118346 - RNA, 32 nt, Homo Sapiens
gucugugcgggaaguaggcccggaguggugcc

SEQ ID NO: 118347 - RNA, 32 nt, Homo Sapiens
ggcgggggccuggagcagcccgaggcacugca

SEQ ID NO: 118348 - RNA, 32 nt, Homo Sapiens
gauuugaaggcacaaugcaggggcucagauug

SEQ ID NO: 118349 - RNA, 32 nt, Homo Sapiens
ccuauaaugaauuguaaaaacaaacauacuug

SEQ ID NO: 118350 - RNA, 32 nt, Homo Sapiens
ucggacuucuauucagagugaacuucaucgag

SEQ ID NO: 118351 - RNA, 32 nt, Homo Sapiens
aaggcuacaucauguugagggugcuggagauu

SEQ ID NO: 118352 - RNA, 32 nt, Homo Sapiens
gccgcuguccccgaagcacccucugugacccc

SEQ ID NO: 118353 - RNA, 32 nt, Homo Sapiens
guggcccuauuuuuuuuuuuuagagaggccuu

SEQ ID NO: 118354 - RNA, 32 nt, Homo Sapiens
caagaucccuuggccuggcacuuagugcucag

SEQ ID NO: 118355 - RNA, 32 nt, Homo Sapiens
auagagaguuugucauggggccucuggcugug

SEQ ID NO: 118356 - RNA, 32 nt, Homo Sapiens
ggaggcgcguuugcucccaacauccuggagaa

SEQ ID NO: 118357 - RNA, 32 nt, Homo Sapiens
ccaugaacccaccagaaggaaaaaacucggaa

SEQ ID NO: 118358 - RNA, 32 nt, Homo Sapiens
cccaaacauuuccuuucagaauaguauuugug

SEQ ID NO: 118359 - RNA, 32 nt, Homo Sapiens
gaagaauuugaaaaacacagcugcugaagaac

SEQ ID NO: 118360 - RNA, 32 nt, Homo Sapiens
gguuggggaaagggccccuccccaccugacac

SEQ ID NO: 118361 - RNA, 32 nt, Homo Sapiens
agaaaugugaaguuuucuuuuacuaucuuuuc

SEQ ID NO: 118362 - RNA, 32 nt, Homo Sapiens
ucuaagaguauacuugaaucagacauuuuaag

SEQ ID NO: 118363 - RNA, 32 nt, Homo Sapiens
acagccuguuacccgacggccuugacagacca

SEQ ID NO: 118364 - RNA, 32 nt, Homo Sapiens
cugcagagggaagaggcagaaagagagaaacu

SEQ ID NO: 118365 - RNA, 32 nt, Homo Sapiens
ccugugacagcggcgccgcugugcucgcgacc

SEQ ID NO: 118366 - RNA, 32 nt, Homo Sapiens
gaggaggagaucugggcugggcgggccagcug

SEQ ID NO: 118367 - RNA, 32 nt, Homo Sapiens
gagacgccguggccgcgccggagcucgggccg

SEQ ID NO: 118368 - RNA, 32 nt, Homo Sapiens
cccccagucucuucuuuuuguguguacaaacu

SEQ ID NO: 118369 - RNA, 32 nt, Homo Sapiens
cccuuuaaaauaugcagugcugaauagcagag

SEQ ID NO: 118370 - RNA, 28 nt, Homo Sapiens
ggccgggggcggccguugaccuggugac

SEQ ID NO: 118371 - RNA, 32 nt, Homo Sapiens
uacauacuaauugcugcagcucuguggcccag

SEQ ID NO: 118372 - RNA, 32 nt, Homo Sapiens
cuuauuccaaaauagcaaaugcagaaucucug

SEQ ID NO: 118373 - RNA, 32 nt, Homo Sapiens
guuauucaacauugcacuggacguccuagcug

SEQ ID NO: 118374 - RNA, 32 nt, Homo Sapiens
gguuagaugcgucccuuuggcuugucagugau

SEQ ID NO: 118375 - RNA, 32 nt, Homo Sapiens
auggcaguauaaauauuagucuguugaauuca

SEQ ID NO: 118376 - RNA, 32 nt, Homo Sapiens
ucuucugacagaggaugucauguuguaugcgg

SEQ ID NO: 118377 - RNA, 32 nt, Homo Sapiens
ccaccuguccuggccuccgacccgggccgacu

SEQ ID NO: 118378 - RNA, 32 nt, Homo Sapiens
caauuaggcugccugccugugggcugggagac

SEQ ID NO: 118379 - RNA, 32 nt, Homo Sapiens
guuacuaguuuauuauaaaggauaucacaaag

SEQ ID NO: 118380 - RNA, 32 nt, Homo Sapiens
ucucugcccuguguacuucccgggccagggcu

SEQ ID NO: 118381 - RNA, 32 nt, Homo Sapiens
agacuaggccucaggacgcggggggagccauc

SEQ ID NO: 118382 - RNA, 32 nt, Homo Sapiens
ugcacccgccccagcuucagggcuugguuggg

SEQ ID NO: 118383 - RNA, 32 nt, Homo Sapiens
acauagaaaacacaaaccacaacugacacagg

SEQ ID NO: 118384 - RNA, 32 nt, Homo Sapiens
uuuucacagccucccccucuuucuucagaccu

SEQ ID NO: 118385 - RNA, 32 nt, Homo Sapiens
gagagggaaugggggaagccugaugacccuca

SEQ ID NO: 118386 - RNA, 32 nt, Homo Sapiens
ugcgugaagagacugagaggccucgaggccug

SEQ ID NO: 118387 - RNA, 32 nt, Homo Sapiens
auuaaauggauuucuaggaaaagcuaccuuaa

SEQ ID NO: 118388 - RNA, 32 nt, Homo Sapiens
uuggcaugaccagugugcacguuuccauccug

SEQ ID NO: 118389 - RNA, 32 nt, Homo Sapiens
ugaaaccccgucucuacuaaaaacagacaaaa

SEQ ID NO: 118390 - RNA, 32 nt, Homo Sapiens
aaaagugcuuugcauugaauuugggauaacuu

SEQ ID NO: 118391 - RNA, 32 nt, Homo Sapiens
aguagggcuggccugaggggcccccugagaua

SEQ ID NO: 118392 - RNA, 32 nt, Homo Sapiens
agaugccggggcagcggcgcgcgcuuuccccc

SEQ ID NO: 118393 - RNA, 32 nt, Homo Sapiens
ccucccucagagcuggggcagcugccucccag

SEQ ID NO: 118394 - RNA, 32 nt, Homo Sapiens
cgcuuccccuucccuuucccggcucaaguccu

SEQ ID NO: 118395 - RNA, 32 nt, Homo Sapiens
gaagccgcuggugagcaauuucaagugccuuu

SEQ ID NO: 118396 - RNA, 32 nt, Homo Sapiens
gcuggcugaaccuggcacuuaagcaccaugug

SEQ ID NO: 118397 - RNA, 32 nt, Homo Sapiens
ugaugcacugccaacauugagaauuagugaac

SEQ ID NO: 118398 - RNA, 30 nt, Homo Sapiens
cuaaaagccaccccacuucucucuaaggag

SEQ ID NO: 118399 - RNA, 32 nt, Homo Sapiens
ucuguaucugggcagcagguguuccaugcugc

SEQ ID NO: 118400 - RNA, 32 nt, Homo Sapiens
aggccagagaaaaugcacaaacuguaggaaac

SEQ ID NO: 118401 - RNA, 32 nt, Homo Sapiens
ucuuuccaacucccuggguccuggauccucca

SEQ ID NO: 118402 - RNA, 32 nt, Homo Sapiens
cauuucuaacuguguaaacuuuuuuuuaacaa

SEQ ID NO: 118403 - RNA, 32 nt, Homo Sapiens
agcaugagcugaugcuaggcugcucuuaccau

SEQ ID NO: 118404 - RNA, 32 nt, Homo Sapiens
augccucucaguggccaacaguugcuuuucuc

SEQ ID NO: 118405 - RNA, 32 nt, Homo Sapiens
auccaagugugugucaucugaacucuugaauc

SEQ ID NO: 118406 - RNA, 32 nt, Homo Sapiens
ucagcacaggcacaaaccauugcccggcacug

SEQ ID NO: 118407 - RNA, 32 nt, Homo Sapiens
aauucaugacacaccuuuuucuuaguuuuuca

SEQ ID NO: 118408 - RNA, 32 nt, Homo Sapiens
gcgacccccguccuucccccaccgcccuccug

SEQ ID NO: 118409 - RNA, 32 nt, Homo Sapiens
ucgccgcggagaaauuguuggaucuggcaguc

SEQ ID NO: 118410 - RNA, 32 nt, Homo Sapiens
auaaggaacaucgaaauuguauacaaagauuu

SEQ ID NO: 118411 - RNA, 32 nt, Homo Sapiens
agcgagucaggagcaggggagacagggcucca

SEQ ID NO: 118412 - RNA, 32 nt, Homo Sapiens
aauuaaugaaaauguucucuuauuuucugggu

SEQ ID NO: 118413 - RNA, 32 nt, Homo Sapiens
acauuuaucagaugccuauuaugggcauaugu

SEQ ID NO: 118414 - RNA, 32 nt, Homo Sapiens
uuccggccaggaugcaggggggaccaguuccg

SEQ ID NO: 118415 - RNA, 32 nt, Homo Sapiens
gggcagaggaaggccagaggugaaggagucag

SEQ ID NO: 118416 - RNA, 32 nt, Homo Sapiens
ggacaugcugggugccccagccugcaggcagg

SEQ ID NO: 118417 - RNA, 32 nt, Homo Sapiens
gguuggagaucguagcugcugcugcuugcaca

SEQ ID NO: 118418 - RNA, 32 nt, Homo Sapiens
ggcguccgccuccuggccuccuggcugagggg

SEQ ID NO: 118419 - RNA, 32 nt, Homo Sapiens
uauucucugugguauguuuucuuuucuuuugu

SEQ ID NO: 118420 - RNA, 32 nt, Homo Sapiens
cggccugauucucuuaaaauugaagaggugcu

SEQ ID NO: 118421 - RNA, 32 nt, Homo Sapiens
ugccuguaaucccagcacuuugggaggcugcg

SEQ ID NO: 118422 - RNA, 32 nt, Homo Sapiens
uaagguguuccugguaaugaaggcauguaagu

SEQ ID NO: 118423 - RNA, 32 nt, Homo Sapiens
auaccaaccugaaaauauuaaaacuuuuuucc

SEQ ID NO: 118424 - RNA, 30 nt, Homo Sapiens
gcgaggcgcccgaagccgucgcggcgggga

SEQ ID NO: 118425 - RNA, 32 nt, Homo Sapiens
gugugaauccugagguccauggaggugcagag

SEQ ID NO: 118426 - RNA, 32 nt, Homo Sapiens
auggucugucuuuugccauuucugggacaaug

SEQ ID NO: 118427 - RNA, 32 nt, Homo Sapiens
gguuugugcucagagccgcugcaccccagcga

SEQ ID NO: 118428 - RNA, 31 nt, Homo Sapiens
acugcacugccgguuucccuggguuaccaag

SEQ ID NO: 118429 - RNA, 32 nt, Homo Sapiens
augaaggugcgaccugccuacccaggccggcc

SEQ ID NO: 118430 - RNA, 32 nt, Homo Sapiens
agcuguuacauguagggcaaucugucuuuaag

SEQ ID NO: 118431 - RNA, 32 nt, Homo Sapiens
ucuggcuaggacuaucaguauaaaguugaaua

SEQ ID NO: 118432 - RNA, 32 nt, Homo Sapiens
gcucuuacuguuuuuauugaagacugccccaa

SEQ ID NO: 118433 - RNA, 32 nt, Homo Sapiens
gcccggcgccuggccuccaggcccgucugucc

SEQ ID NO: 118434 - RNA, 32 nt, Homo Sapiens
guuuccauuuuucccggcacuuaccugccuuu

SEQ ID NO: 118435 - RNA, 32 nt, Homo Sapiens
aaaaugaggaaauuauuuugcuucuauuuaua

SEQ ID NO: 118436 - RNA, 32 nt, Homo Sapiens
agcuggaaaugaauauuaauggcagagauuaa

SEQ ID NO: 118437 - RNA, 32 nt, Homo Sapiens
cauuggaaacaaauagaacacaauauaauuua

SEQ ID NO: 118438 - RNA, 32 nt, Homo Sapiens
uuguaauuuuuuugugggaaauccacacugag

SEQ ID NO: 118439 - RNA, 32 nt, Homo Sapiens
acugucuuaaguuuauacucuuauagacaaca

SEQ ID NO: 118440 - RNA, 31 nt, Homo Sapiens
agccagugaaacacuugcuugccaacugcca

SEQ ID NO: 118441 - RNA, 32 nt, Homo Sapiens
ugugugugcucucgcgcacgugcugucuauau

SEQ ID NO: 118442 - RNA, 32 nt, Homo Sapiens
ccagucaagcucagccagacugcaagaggagg

SEQ ID NO: 118443 - RNA, 32 nt, Homo Sapiens
uaccacguucuauuugugcaugggagcuaaaa

SEQ ID NO: 118444 - RNA, 32 nt, Homo Sapiens
cagucgggggagagguggauugcagcaguauc

SEQ ID NO: 118445 - RNA, 32 nt, Homo Sapiens
ugggcuccacugucuucuggcucccauguguu

SEQ ID NO: 118446 - RNA, 32 nt, Homo Sapiens
ccaggaagcagagcgucaugcaggucuucugg

SEQ ID NO: 118447 - RNA, 32 nt, Homo Sapiens
gaaucagaaagauaguauuuacuaaagaaacg

SEQ ID NO: 118448 - RNA, 32 nt, Homo Sapiens
gagucgcccccgcuuuuuugcccaccccccug

SEQ ID NO: 118449 - RNA, 32 nt, Homo Sapiens
cucggcgccuucaucccgccucgacuccuggc

SEQ ID NO: 118450 - RNA, 32 nt, Homo Sapiens
ggcaccccaagccgaaggcgccuggaagugaa

SEQ ID NO: 118451 - RNA, 30 nt, Homo Sapiens
ggucaggcuggugaaggcggcaggaagcug

SEQ ID NO: 118452 - RNA, 32 nt, Homo Sapiens
caguauuaucauuuugaagucuguaaauugug

SEQ ID NO: 118453 - RNA, 32 nt, Homo Sapiens
aggucaggaguucgagaccagucuggucaaca

SEQ ID NO: 118454 - RNA, 32 nt, Homo Sapiens
gccccgcugggccccgagcagcugcggcaggu

SEQ ID NO: 118455 - RNA, 32 nt, Homo Sapiens
gcuaggaucugcauuuucagguuccgagccug

SEQ ID NO: 118456 - RNA, 32 nt, Homo Sapiens
ucucccugucucagcaccuccucccccaauuc

SEQ ID NO: 118457 - RNA, 32 nt, Homo Sapiens
caccuggcgggggugcugggcgccuggcacau

SEQ ID NO: 118458 - RNA, 32 nt, Homo Sapiens
caguuaacaucccacaacaaccacccggaagc

SEQ ID NO: 118459 - RNA, 32 nt, Homo Sapiens
uuuuagaauauuaaaaccucagauauuuaugu

SEQ ID NO: 118460 - RNA, 32 nt, Homo Sapiens
agaccgugcagggccccggcgugucgugggug

SEQ ID NO: 118461 - RNA, 32 nt, Homo Sapiens
gcuaggcugucugccucgguaccuguuacugc

SEQ ID NO: 118462 - RNA, 32 nt, Homo Sapiens
gcaccggcucugcuuaccugucugcccaccug

SEQ ID NO: 118463 - RNA, 32 nt, Homo Sapiens
aguuagaccacucuggcggacaucagagugac

SEQ ID NO: 118464 - RNA, 32 nt, Homo Sapiens
uaguguagugugugucugauuauuuacaugca

SEQ ID NO: 118465 - RNA, 32 nt, Homo Sapiens
ccucagccccuccugccccauccacccagaca

SEQ ID NO: 118466 - RNA, 32 nt, Homo Sapiens
aagggauaaaacaguuuacuuguuauggagua

SEQ ID NO: 118467 - RNA, 32 nt, Homo Sapiens
caauuccuggcccuguucuccuccccaagucg

SEQ ID NO: 118468 - RNA, 32 nt, Homo Sapiens
ucuuugcucccuccccucucuuagagacugug

SEQ ID NO: 118469 - RNA, 32 nt, Homo Sapiens
caagugaucugccugccucagcuucucaggug

SEQ ID NO: 118470 - RNA, 32 nt, Homo Sapiens
ugaugguuuaaaucaauuaaguggcauuggaa

SEQ ID NO: 118471 - RNA, 32 nt, Homo Sapiens
uccugaugacacugaggauuguggagcugagu

SEQ ID NO: 118472 - RNA, 32 nt, Homo Sapiens
aacaucaggagaagaaagagagagggggauuu

SEQ ID NO: 118473 - RNA, 32 nt, Homo Sapiens
gcucaggcguccccgccccagcuuuucucgga

SEQ ID NO: 118474 - RNA, 32 nt, Homo Sapiens
gcgggccgcagagggagaccaagacaucauug

SEQ ID NO: 118475 - RNA, 32 nt, Homo Sapiens
cccugggcacggcgucauggugcggaacgugg

SEQ ID NO: 118476 - RNA, 32 nt, Homo Sapiens
caccgagcgaggggcgcaagggugggugcauc

SEQ ID NO: 118477 - RNA, 32 nt, Homo Sapiens
gggaagccaaagggcuccuguccacccugaca

SEQ ID NO: 118478 - RNA, 32 nt, Homo Sapiens
gccgggguaggaccaggcuucccggcuaggca

SEQ ID NO: 118479 - RNA, 32 nt, Homo Sapiens
cccccauggcauuguugagaucgaaugugugu

SEQ ID NO: 118480 - RNA, 32 nt, Homo Sapiens
ccacagauagacauuuucgagguagaaaugaa

SEQ ID NO: 118481 - RNA, 32 nt, Homo Sapiens
aaguuucgaacugagaucuagaaggucuuucu

SEQ ID NO: 118482 - RNA, 31 nt, Homo Sapiens
auuaaugaaaauaaaucaaauaauucaaagc

SEQ ID NO: 118483 - RNA, 32 nt, Homo Sapiens
uacuaaagaaagauuauauauaacuaugcuaa

SEQ ID NO: 118484 - RNA, 32 nt, Homo Sapiens
aucucucacccuguccccuccuccccagauuc

SEQ ID NO: 118485 - RNA, 32 nt, Homo Sapiens
uuuaaagucuuagcaauuucuauuacaacuuu

SEQ ID NO: 118486 - RNA, 32 nt, Homo Sapiens
ccauuaaaaccuguuuuguuuuucgcuuugaa

SEQ ID NO: 118487 - RNA, 32 nt, Homo Sapiens
ccagcgcacuuaagauugcuuaccgcauugaa

SEQ ID NO: 118488 - RNA, 32 nt, Homo Sapiens
agucaccccucccccagcccacccaaauaaag

SEQ ID NO: 118489 - RNA, 32 nt, Homo Sapiens
ugugguggggcagcugcaccccgaugaguggc

SEQ ID NO: 118490 - RNA, 32 nt, Homo Sapiens
auaauauccagaagaacaacuuuuuuaaagag

SEQ ID NO: 118491 - RNA, 32 nt, Homo Sapiens
acucaccugugcugagugacuugaaugccauc

SEQ ID NO: 118492 - RNA, 30 nt, Homo Sapiens
caucagaauaaaagacaugcaaaguaaaaa

SEQ ID NO: 118493 - RNA, 32 nt, Homo Sapiens
gugucuuacaagcagccucugagucaaguguu

SEQ ID NO: 118494 - RNA, 31 nt, Homo Sapiens
uuccugcuggagcccucuccaaggcugagac

SEQ ID NO: 118495 - RNA, 32 nt, Homo Sapiens
ccugcucuuggccacugugcucccauuucugu

SEQ ID NO: 118496 - RNA, 32 nt, Homo Sapiens
aaccgugcacugcugcaaugggcucugagcug

SEQ ID NO: 118497 - RNA, 32 nt, Homo Sapiens
uagaaauuauagaaaaucauguuguccguuuu

SEQ ID NO: 118498 - RNA, 32 nt, Homo Sapiens
ugguccccaaaauaaaaccacuuuaaaaaaau

SEQ ID NO: 118499 - RNA, 32 nt, Homo Sapiens
guugguugucacugucaucauugucacucucc

SEQ ID NO: 118500 - RNA, 32 nt, Homo Sapiens
auguuguacgcacuggagcugcacugcauaau

SEQ ID NO: 118501 - RNA, 32 nt, Homo Sapiens
ccccacuuccagcagaguccugccuccuccca

SEQ ID NO: 118502 - RNA, 32 nt, Homo Sapiens
gaaugaaagucuuuuuuuuuuuuuuuuuuuuu

SEQ ID NO: 118503 - RNA, 32 nt, Homo Sapiens
cgugcuccugaacaacguccugguggagagac

SEQ ID NO: 118504 - RNA, 32 nt, Homo Sapiens
gcgaagccgcggucccugccucugagucucuc

SEQ ID NO: 118505 - RNA, 32 nt, Homo Sapiens
guucaacaaaaaugugaugaccaaaugaacaa

SEQ ID NO: 118506 - RNA, 30 nt, Homo Sapiens
aaacuuuccgguagccacacuagaaaaaaa

SEQ ID NO: 118507 - RNA, 32 nt, Homo Sapiens
cuaaggacagcuccuucccuacucauucccug

SEQ ID NO: 118508 - RNA, 32 nt, Homo Sapiens
ccaccaccuucccuccucuccagcccucccag

SEQ ID NO: 118509 - RNA, 32 nt, Homo Sapiens
gggaucucaaggaagcugggagcugagcugag

SEQ ID NO: 118510 - RNA, 32 nt, Homo Sapiens
aguuuuugcauuaauguaucucuacuaaaauu

SEQ ID NO: 118511 - RNA, 32 nt, Homo Sapiens
uucaauuaacucccuuggcuauaagcaucuaa

SEQ ID NO: 118512 - RNA, 32 nt, Homo Sapiens
caccugccugagggcacuucugucccaccagc

SEQ ID NO: 118513 - RNA, 32 nt, Homo Sapiens
cugagucccuggcggggcgcggcgguggaagg

SEQ ID NO: 118514 - RNA, 32 nt, Homo Sapiens
cugacgugagagaaaggaaucuguaaacagug

SEQ ID NO: 118515 - RNA, 32 nt, Homo Sapiens
gcauaacaauucuuaaugaucacauuuuacau

SEQ ID NO: 118516 - RNA, 32 nt, Homo Sapiens
ugacacucauggcucuacuuggacccaccaac

SEQ ID NO: 118517 - RNA, 32 nt, Homo Sapiens
ccucugcccacccgagccccagagcacacgcg

SEQ ID NO: 118518 - RNA, 32 nt, Homo Sapiens
uguucuauccccacaagaaggauuauaucuua

SEQ ID NO: 118519 - RNA, 32 nt, Homo Sapiens
cccuccggaguggucuuccucuggauggggcu

SEQ ID NO: 118520 - RNA, 32 nt, Homo Sapiens
gaaauuuaguggcacagaaaacaaagugaauu

SEQ ID NO: 118521 - RNA, 32 nt, Homo Sapiens
uaccaccucccuuuccucuuacuguacauaaa

SEQ ID NO: 118522 - RNA, 32 nt, Homo Sapiens
cccuuaaagaagaucaagccaagcugaccuug

SEQ ID NO: 118523 - RNA, 32 nt, Homo Sapiens
agaugaggcuacugccucacaacagccuccac

SEQ ID NO: 118524 - RNA, 32 nt, Homo Sapiens
aagggcuuuguuccuggcauggagaauuuguu

SEQ ID NO: 118525 - RNA, 32 nt, Homo Sapiens
cggaagaguagauaaagaaauauuuauuugag

SEQ ID NO: 118526 - RNA, 32 nt, Homo Sapiens
ggcgcuacaaaauaaagcuguucucauuccug

SEQ ID NO: 118527 - RNA, 32 nt, Homo Sapiens
agcuuguuaugaauaccucuauuugcaaaugg

SEQ ID NO: 118528 - RNA, 32 nt, Homo Sapiens
gaggccugacuucauaaauaauucaauagagu

SEQ ID NO: 118529 - RNA, 32 nt, Homo Sapiens
agucacccccacuucccacuugcagucuugua

SEQ ID NO: 118530 - RNA, 32 nt, Homo Sapiens
cuguaugcacacaaacuagaaaaccuagaaaa

SEQ ID NO: 118531 - RNA, 32 nt, Homo Sapiens
gaaggucaccccguccccggcggggcgggcgc

SEQ ID NO: 118532 - RNA, 32 nt, Homo Sapiens
gaguuugcaccucggcugggccggauucggac

SEQ ID NO: 118533 - RNA, 31 nt, Homo Sapiens
gucgaggccgaccccugaguugugagucugg

SEQ ID NO: 118534 - RNA, 32 nt, Homo Sapiens
gggagaauggguggccaccugcccuaaucuca

SEQ ID NO: 118535 - RNA, 32 nt, Homo Sapiens
uuugcuucguuuucuuuuuugcuuuuugagac

SEQ ID NO: 118536 - RNA, 32 nt, Homo Sapiens
agggaggcuggguauuguuuguguauuucaac

SEQ ID NO: 118537 - RNA, 32 nt, Homo Sapiens
guaaaacuaugaauccaaauaaauguuuacaa

SEQ ID NO: 118538 - RNA, 32 nt, Homo Sapiens
gccagagaggggcugcucuccagaaagcuaaa

SEQ ID NO: 118539 - RNA, 32 nt, Homo Sapiens
acagguggcaauggaaaugggugaguggauaa

SEQ ID NO: 118540 - RNA, 32 nt, Homo Sapiens
uuaaaggaaagauauauucuauuugcucacuu

SEQ ID NO: 118541 - RNA, 32 nt, Homo Sapiens
gcccgcguugcccgcgccugcgcaccagucgc

SEQ ID NO: 118542 - RNA, 32 nt, Homo Sapiens
cacaggagggugugagucaguucugugugggu

SEQ ID NO: 118543 - RNA, 32 nt, Homo Sapiens
uuuuaaaugcuaguaaucagcacucuuucuuu

SEQ ID NO: 118544 - RNA, 32 nt, Homo Sapiens
acacaguagggccagaacaccauccccuccac

SEQ ID NO: 118545 - RNA, 32 nt, Homo Sapiens
cucgcugcucccauuagcuggugcaggcuucc

SEQ ID NO: 118546 - RNA, 32 nt, Homo Sapiens
gccgcggcucacaccugagcgcgacugcagag

SEQ ID NO: 118547 - RNA, 32 nt, Homo Sapiens
cucucccuggcacccacccccagggcggguga

SEQ ID NO: 118548 - RNA, 31 nt, Homo Sapiens
gcugcagugauccccgccagagccugugccc

SEQ ID NO: 118549 - RNA, 32 nt, Homo Sapiens
gucuugucagaauaaacuacuaucuugaauaa

SEQ ID NO: 118550 - RNA, 32 nt, Homo Sapiens
cguccacuuaggaggcccaacugcccacccca

SEQ ID NO: 118551 - RNA, 32 nt, Homo Sapiens
aaccuguaaucccagcacuuugggagaccaag

SEQ ID NO: 118552 - RNA, 32 nt, Homo Sapiens
agcacccucccucuagguccagggacuaucac

SEQ ID NO: 118553 - RNA, 32 nt, Homo Sapiens
aggaauuuauaucacaugguaauuguagagaa

SEQ ID NO: 118554 - RNA, 32 nt, Homo Sapiens
ggucaggaaggggaccucuuugaggguaauaa

SEQ ID NO: 118555 - RNA, 32 nt, Homo Sapiens
ccugaagucaauauuaaaaauaugagauauga

SEQ ID NO: 118556 - RNA, 32 nt, Homo Sapiens
cacugaccgagacucagccgguaggucugcag

SEQ ID NO: 118557 - RNA, 32 nt, Homo Sapiens
cccaccacaaccuccagccucccuuuucagag

SEQ ID NO: 118558 - RNA, 32 nt, Homo Sapiens
cugucuguguguccaucccgccggccccccag

SEQ ID NO: 118559 - RNA, 32 nt, Homo Sapiens
ggccuuggggacugaggcccuggcggaucacg

SEQ ID NO: 118560 - RNA, 32 nt, Homo Sapiens
auucuguuuccauagcaccauuccucaagauc

SEQ ID NO: 118561 - RNA, 32 nt, Homo Sapiens
uaauugucuuccucccguauuccuccugaaac

SEQ ID NO: 118562 - RNA, 30 nt, Homo Sapiens
cauuuaggagguggucugaucauagaacac

SEQ ID NO: 118563 - RNA, 32 nt, Homo Sapiens
uguguguuuuauaauguaccuuuaucuucccc

SEQ ID NO: 118564 - RNA, 32 nt, Homo Sapiens
gucacucuagaauuggggcuucauuaucauuc

SEQ ID NO: 118565 - RNA, 32 nt, Homo Sapiens
ucucaguguagaaaucaugucuucuuaauugc

SEQ ID NO: 118566 - RNA, 32 nt, Homo Sapiens
gguuuugccacauuagccaggcuggucucaaa

SEQ ID NO: 118567 - RNA, 32 nt, Homo Sapiens
uuugcucugaugcauggugugaacuuucugag

SEQ ID NO: 118568 - RNA, 32 nt, Homo Sapiens
ugugucccagguuuccucagucucuaacccuu

SEQ ID NO: 118569 - RNA, 32 nt, Homo Sapiens
aaaccgaaguuacuggccucuaucuuccagga

SEQ ID NO: 118570 - RNA, 32 nt, Homo Sapiens
gaaauacaaacuuuuccaauuuuaaaaaauca

SEQ ID NO: 118571 - RNA, 32 nt, Homo Sapiens
uccccaaccaccacccaccccugggcagcagc

SEQ ID NO: 118572 - RNA, 32 nt, Homo Sapiens
acggugccugcacgggacgccgcucgaucccc

SEQ ID NO: 118573 - RNA, 32 nt, Homo Sapiens
uguucuuguccggcgcugcuuagccccuccgc

SEQ ID NO: 118574 - RNA, 32 nt, Homo Sapiens
caugccaguggcaaccugugcucagucugaag

SEQ ID NO: 118575 - RNA, 32 nt, Homo Sapiens
cacauagaauacugaggacgcuuccccuuccu

SEQ ID NO: 118576 - RNA, 32 nt, Homo Sapiens
uuuagggaagagcaagcagagucaugaccagg

SEQ ID NO: 118577 - RNA, 32 nt, Homo Sapiens
ccccgcugaaccuggcuggaccgcgugugaaa

SEQ ID NO: 118578 - RNA, 32 nt, Homo Sapiens
gucuccgacuagccuccagaucagggcuuccu

SEQ ID NO: 118579 - RNA, 32 nt, Homo Sapiens
cccaagugcccuccccucacagugucacuucc

SEQ ID NO: 118580 - RNA, 32 nt, Homo Sapiens
aaauacacacucaaaucaagaaacuuaagguu

SEQ ID NO: 118581 - RNA, 32 nt, Homo Sapiens
caaaucuucuauuguguggaaaauguugugaa

SEQ ID NO: 118582 - RNA, 32 nt, Homo Sapiens
uccuggacagcuagaaaacacaaaaucuugua

SEQ ID NO: 118583 - RNA, 32 nt, Homo Sapiens
ccaugcggagagccgccgggauggaggacuuc

SEQ ID NO: 118584 - RNA, 32 nt, Homo Sapiens
uuuuuuccagaaugagugcucccuuuaugagc

SEQ ID NO: 118585 - RNA, 32 nt, Homo Sapiens
caucuacuuucuccacauaccuuugagagaga

SEQ ID NO: 118586 - RNA, 32 nt, Homo Sapiens
auuagauggggggaugaaggacuggcuagugu

SEQ ID NO: 118587 - RNA, 32 nt, Homo Sapiens
aguaaaaauauuaacugacgaagaagcaacua

SEQ ID NO: 118588 - RNA, 32 nt, Homo Sapiens
gucguagugcuguuucugguauucucaucgcg

SEQ ID NO: 118589 - RNA, 32 nt, Homo Sapiens
gugccugcaggggaaaguggucugcacaugcc

SEQ ID NO: 118590 - RNA, 32 nt, Homo Sapiens
gggacuacaggcagcaaagcaccugcucugag

SEQ ID NO: 118591 - RNA, 32 nt, Homo Sapiens
caaagaguccugcccggcaccggcgccgcgug

SEQ ID NO: 118592 - RNA, 32 nt, Homo Sapiens
accaauugcaacaaaacaaaauguuaagaaau

SEQ ID NO: 118593 - RNA, 32 nt, Homo Sapiens
ccuggucagcccuggcggggcccacucaggac

SEQ ID NO: 118594 - RNA, 32 nt, Homo Sapiens
cugucgcacacacacacacacacacacacaca

SEQ ID NO: 118595 - RNA, 32 nt, Homo Sapiens
guuuuauuauuuaaguuaguuaaacuuuggau

SEQ ID NO: 118596 - RNA, 32 nt, Homo Sapiens
cccggcgcguccucgguuucucgccugucauc

SEQ ID NO: 118597 - RNA, 32 nt, Homo Sapiens
agcuuucucuaaagcagugguccagacuugcc

SEQ ID NO: 118598 - RNA, 32 nt, Homo Sapiens
agaauuucaaggauuaucgacuucauauugca

SEQ ID NO: 118599 - RNA, 32 nt, Homo Sapiens
ccuggcagccucggcccggacucgccgccaac

SEQ ID NO: 118600 - RNA, 32 nt, Homo Sapiens
gugucaagauaaagagauaaaaccagaguuug

SEQ ID NO: 118601 - RNA, 32 nt, Homo Sapiens
ccaccgcguccugccuuggaggugcgagucug

SEQ ID NO: 118602 - RNA, 32 nt, Homo Sapiens
gaggcggcgacgacggugcccgggcucgggcg

SEQ ID NO: 118603 - RNA, 32 nt, Homo Sapiens
cccaacucuuugccgcgccagcgccuggagcg

SEQ ID NO: 118604 - RNA, 32 nt, Homo Sapiens
uuucuuacaaauaaccuuacauuuuguuuaau

SEQ ID NO: 118605 - RNA, 32 nt, Homo Sapiens
gcagccccaaaccccaggacccuaucagcccc

SEQ ID NO: 118606 - RNA, 32 nt, Homo Sapiens
ccugcuggccacacucuggagaagcacuucuc

SEQ ID NO: 118607 - RNA, 29 nt, Homo Sapiens
ggagaauaaaguugacuacauuuuaaaaa

SEQ ID NO: 118608 - RNA, 32 nt, Homo Sapiens
ggacacgcugcgccucaucucuuggggcguuc

SEQ ID NO: 118609 - RNA, 31 nt, Homo Sapiens
uuucuaaaauaaaagggguuguuaggcuacu

SEQ ID NO: 118610 - RNA, 32 nt, Homo Sapiens
ccguguuagagcauuagcagauguccacugcg

SEQ ID NO: 118611 - RNA, 32 nt, Homo Sapiens
gaaaggagccuguggcaacaggcggccgagcu

SEQ ID NO: 118612 - RNA, 32 nt, Homo Sapiens
acccacaccguccucuugcccccgucacuugg

SEQ ID NO: 118613 - RNA, 32 nt, Homo Sapiens
cugcacgccugccugccagggccucucugggg

SEQ ID NO: 118614 - RNA, 32 nt, Homo Sapiens
ggccugguggugaagaagcggggagccuucca

SEQ ID NO: 118615 - RNA, 32 nt, Homo Sapiens
ucggcuccgccuggugcggccgcggccgggag

SEQ ID NO: 118616 - RNA, 32 nt, Homo Sapiens
cagcaucaugcaggggcuuaucugucuggagg

SEQ ID NO: 118617 - RNA, 32 nt, Homo Sapiens
ugcagcugaggccccagguggcagccauggau

SEQ ID NO: 118618 - RNA, 32 nt, Homo Sapiens
uaugaauaauguccaguauaagaauaugcuuc

SEQ ID NO: 118619 - RNA, 32 nt, Homo Sapiens
ccauuuuauugcaucaaaaauugagcauuggg

SEQ ID NO: 118620 - RNA, 32 nt, Homo Sapiens
uuugcacaacucccaaaccagggauuccuuua

SEQ ID NO: 118621 - RNA, 32 nt, Homo Sapiens
acuuuguguuuaagagugucaaacagucugag

SEQ ID NO: 118622 - RNA, 32 nt, Homo Sapiens
cccguggcaugcccggcccgguuuacccagga

SEQ ID NO: 118623 - RNA, 32 nt, Homo Sapiens
cucuccucguccccacccacccccacauuugc

SEQ ID NO: 118624 - RNA, 32 nt, Homo Sapiens
aggaggagccaggaaggcaguuggugggaagu

SEQ ID NO: 118625 - RNA, 32 nt, Homo Sapiens
cgcggugcgggaagcggggacccggguuugaa

SEQ ID NO: 118626 - RNA, 32 nt, Homo Sapiens
ucucgcugcccgcuccccuccgcagccaggca

SEQ ID NO: 118627 - RNA, 32 nt, Homo Sapiens
aagcggccccagcucugcuuuccuagagcugc

SEQ ID NO: 118628 - RNA, 32 nt, Homo Sapiens
caccauguuggccagggcuggucucgaacucc

SEQ ID NO: 118629 - RNA, 32 nt, Homo Sapiens
cgcaccgccccgcucuccagccaagguuccgg

SEQ ID NO: 118630 - RNA, 32 nt, Homo Sapiens
uauuaauuacaauuaauuacuaaaaagcuugg

SEQ ID NO: 118631 - RNA, 32 nt, Homo Sapiens
uccggcagcgggagcgggaggcagcugcggag

SEQ ID NO: 118632 - RNA, 32 nt, Homo Sapiens
caccuggaggcuugggguguggcacccucagc

SEQ ID NO: 118633 - RNA, 32 nt, Homo Sapiens
cugugagcuggaggccugcagcuccgaggccg

SEQ ID NO: 118634 - RNA, 32 nt, Homo Sapiens
auaagacucuuaccuacaaaaugagauuccag

SEQ ID NO: 118635 - RNA, 32 nt, Homo Sapiens
gaggccugggggugggggaggggggaaggggu

SEQ ID NO: 118636 - RNA, 32 nt, Homo Sapiens
ucuccgcagccacuuccuccuuuaacacgcga

SEQ ID NO: 118637 - RNA, 32 nt, Homo Sapiens
gcgucuuccuuccuccucccggucagcgucgg

SEQ ID NO: 118638 - RNA, 32 nt, Homo Sapiens
guaccccagacaccggccacccucuuccagcc

SEQ ID NO: 118639 - RNA, 32 nt, Homo Sapiens
gugcccugacaugugacaucuaccucccgacc

SEQ ID NO: 118640 - RNA, 30 nt, Homo Sapiens
aagagugggaggcgcgcgcggaggccgcga

SEQ ID NO: 118641 - RNA, 32 nt, Homo Sapiens
auuccggaauuaaugcauccuaaugaauguug

SEQ ID NO: 118642 - RNA, 32 nt, Homo Sapiens
gaacaagccagagccgcacccuggcuggaaug

SEQ ID NO: 118643 - RNA, 32 nt, Homo Sapiens
guacuauaucuagguguguguacaagugugug

SEQ ID NO: 118644 - RNA, 32 nt, Homo Sapiens
cuaccagaauaaagaguaacauucagagcuuu

SEQ ID NO: 118645 - RNA, 32 nt, Homo Sapiens
uuugaguacagacuuugagguuucaucaauau

SEQ ID NO: 118646 - RNA, 32 nt, Homo Sapiens
gcugggggcaggcaccccgaaauacaccuucu

SEQ ID NO: 118647 - RNA, 32 nt, Homo Sapiens
cagcaacaguaacagcagcagcaaacuuuucc

SEQ ID NO: 118648 - RNA, 32 nt, Homo Sapiens
cuauccgagaugcuuuuucccugcccaacccu

SEQ ID NO: 118649 - RNA, 32 nt, Homo Sapiens
aacacccgcccgguccgcccuccgcugcacug

SEQ ID NO: 118650 - RNA, 31 nt, Homo Sapiens
cuugugagcacuaugaaaguguuagcuguuc

SEQ ID NO: 118651 - RNA, 32 nt, Homo Sapiens
ucaugugaaaacaaaaucucagcucuuuaucc

SEQ ID NO: 118652 - RNA, 32 nt, Homo Sapiens
cucugugcuccugucccucccucccccuagca

SEQ ID NO: 118653 - RNA, 32 nt, Homo Sapiens
guuuugagacucgcucugucucccaggcugaa

SEQ ID NO: 118654 - RNA, 32 nt, Homo Sapiens
guagcaugucuacuuuuaagucccucaccccc

SEQ ID NO: 118655 - RNA, 32 nt, Homo Sapiens
uaaacaacguguaugcaaauuguuauggauac

SEQ ID NO: 118656 - RNA, 32 nt, Homo Sapiens
cugaaguaaauauacauauauaaauaaaugua

SEQ ID NO: 118657 - RNA, 32 nt, Homo Sapiens
ugaaccuacaaacugguaaaucuuauuaacaa

SEQ ID NO: 118658 - RNA, 32 nt, Homo Sapiens
ggugugaaacaaugguaauuugauauauggua

SEQ ID NO: 118659 - RNA, 32 nt, Homo Sapiens
ggagaagacagaggagaaugccagaugaagac

SEQ ID NO: 118660 - RNA, 32 nt, Homo Sapiens
gucccugcaauaaacaaggggucaguacuuag

SEQ ID NO: 118661 - RNA, 32 nt, Homo Sapiens
uguuuacguguggcaguguuguaaaaagaaac

SEQ ID NO: 118662 - RNA, 32 nt, Homo Sapiens
accagauguccgucucucuugcuugaggaaug

SEQ ID NO: 118663 - RNA, 32 nt, Homo Sapiens
uucuuugacaaugacuaucuggaugacacagg

SEQ ID NO: 118664 - RNA, 32 nt, Homo Sapiens
auaagugcuuagcaauuggcuuccucuuuugu

SEQ ID NO: 118665 - RNA, 32 nt, Homo Sapiens
agguaggagggucagagagaucugaagaugcu

SEQ ID NO: 118666 - RNA, 32 nt, Homo Sapiens
cagagagauaaugcagacugucaugggugggg

SEQ ID NO: 118667 - RNA, 32 nt, Homo Sapiens
uguuuaaaauguuuggaugguuuguuguucug

SEQ ID NO: 118668 - RNA, 32 nt, Homo Sapiens
aaaagucuguccucggauaacuuaucugacag

SEQ ID NO: 118669 - RNA, 32 nt, Homo Sapiens
gguccuggggacggcacccagauaugcagagu

SEQ ID NO: 118670 - RNA, 32 nt, Homo Sapiens
acuaaaacaaacaaaacuuuggaccaaaaucc

SEQ ID NO: 118671 - RNA, 32 nt, Homo Sapiens
cauugcacuccagcuugggugacagagcgaga

SEQ ID NO: 118672 - RNA, 32 nt, Homo Sapiens
gggcugaccugugacuguuuuaucuccagggc

SEQ ID NO: 118673 - RNA, 32 nt, Homo Sapiens
uggacucggagcaaagacguggggccccaucu

SEQ ID NO: 118674 - RNA, 32 nt, Homo Sapiens
acagaguuugaaaaaagggcccagagaaugaa

SEQ ID NO: 118675 - RNA, 32 nt, Homo Sapiens
uagccaggcgugguggugggcgccuguagucc

SEQ ID NO: 118676 - RNA, 32 nt, Homo Sapiens
gggcccgagggccaggguccgacucgggcacc

SEQ ID NO: 118677 - RNA, 32 nt, Homo Sapiens
agcggggcggagaggcagcugcggggggagcc

SEQ ID NO: 118678 - RNA, 32 nt, Homo Sapiens
aaccguguuugguuucaguugggauaggcuug

SEQ ID NO: 118679 - RNA, 32 nt, Homo Sapiens
uucuuacaauuucaaaguuacagucucagaaa

SEQ ID NO: 118680 - RNA, 32 nt, Homo Sapiens
gccauggaagggggugugcacgugccucugug

SEQ ID NO: 118681 - RNA, 32 nt, Homo Sapiens
auugggaucacuuuucccugucuaaacuccag

SEQ ID NO: 118682 - RNA, 32 nt, Homo Sapiens
uugaagaaaagccacagaagauacacuuccgc

SEQ ID NO: 118683 - RNA, 32 nt, Homo Sapiens
ggcgaagcggagaggagccccgcgcgucuccg

SEQ ID NO: 118684 - RNA, 32 nt, Homo Sapiens
cggcggcaccagcaccaccaugucgcgcucag

SEQ ID NO: 118685 - RNA, 32 nt, Homo Sapiens
cucaugauagaguauagcuugggggugggagg

SEQ ID NO: 118686 - RNA, 32 nt, Homo Sapiens
aaccaaaguuauucuuucuggaucugccgugu

SEQ ID NO: 118687 - RNA, 32 nt, Homo Sapiens
gcaauggggagccauggagggauuuggagcag

SEQ ID NO: 118688 - RNA, 32 nt, Homo Sapiens
agaaagcacuaguggcuuguguucagggagag

SEQ ID NO: 118689 - RNA, 32 nt, Homo Sapiens
ugacuucagccuggccucuggauauuuggugg

SEQ ID NO: 118690 - RNA, 27 nt, Homo Sapiens
cugggguccuucuuugugcugcaccca

SEQ ID NO: 118691 - RNA, 32 nt, Homo Sapiens
ugccucccccagcccccuccccaucaauaaaa

SEQ ID NO: 118692 - RNA, 32 nt, Homo Sapiens
gcccuucgagggugggcgccccaucgcaccca

SEQ ID NO: 118693 - RNA, 32 nt, Homo Sapiens
agcuggaggcgccccguccggucagcccucgc

SEQ ID NO: 118694 - RNA, 32 nt, Homo Sapiens
cggaaacccagcuaggccaguuccuccacugc

SEQ ID NO: 118695 - RNA, 32 nt, Homo Sapiens
gccuccacccucagggaaccugaaugggggga

SEQ ID NO: 118696 - RNA, 32 nt, Homo Sapiens
gaacugugaaaauaaauuuguuuuuuacgcca

SEQ ID NO: 118697 - RNA, 32 nt, Homo Sapiens
aucuacaggguucccuaggccagguggagaug

SEQ ID NO: 118698 - RNA, 32 nt, Homo Sapiens
ggaaagaaaaggaaaauaguagcaagagcugc

SEQ ID NO: 118699 - RNA, 32 nt, Homo Sapiens
gugcucugucuccucccaccaguccaguuagc

SEQ ID NO: 118700 - RNA, 32 nt, Homo Sapiens
uucccaccagcgcgcgcagcuggggccccuuc

SEQ ID NO: 118701 - RNA, 32 nt, Homo Sapiens
uugugaucccucaagauguaacacuugguaug

SEQ ID NO: 118702 - RNA, 32 nt, Homo Sapiens
cgcugcuccgcguccaggcccgcgcccaccgg

SEQ ID NO: 118703 - RNA, 32 nt, Homo Sapiens
gcugcggaagcaggagcagcacaugcaccagg

SEQ ID NO: 118704 - RNA, 32 nt, Homo Sapiens
uacuaccuuuugcuuuuaauauaccugguuau

SEQ ID NO: 118705 - RNA, 32 nt, Homo Sapiens
uugcaccgggcagugccccgcugcugaccacc

SEQ ID NO: 118706 - RNA, 32 nt, Homo Sapiens
uaauuugcacaaaacuauucuggcugguuugg

SEQ ID NO: 118707 - RNA, 32 nt, Homo Sapiens
acuaugucaccaucauggccaauauccacuca

SEQ ID NO: 118708 - RNA, 32 nt, Homo Sapiens
uucucucaaguuuuccuccccuaacuuggaca

SEQ ID NO: 118709 - RNA, 32 nt, Homo Sapiens
aaugcuguuugcucaaucuuucuggagaaagu

SEQ ID NO: 118710 - RNA, 32 nt, Homo Sapiens
agccaagauugugccccugcauucuagccugg

SEQ ID NO: 118711 - RNA, 32 nt, Homo Sapiens
uuuuaagcaaucguguugaauuaggaguauac

SEQ ID NO: 118712 - RNA, 32 nt, Homo Sapiens
acccuggagcgggaaugcugcagggcagcucc

SEQ ID NO: 118713 - RNA, 32 nt, Homo Sapiens
ucugaguaguuuccucugcugacauuccaaau

SEQ ID NO: 118714 - RNA, 32 nt, Homo Sapiens
uugaggaggcugaguuauuugagggcugcugc

SEQ ID NO: 118715 - RNA, 32 nt, Homo Sapiens
agaggccuccccagccccucagggcuugcuga

SEQ ID NO: 118716 - RNA, 32 nt, Homo Sapiens
auccaugaauccauggaccccugaacagcugg

SEQ ID NO: 118717 - RNA, 32 nt, Homo Sapiens
cccggccugugcuuaaauauucuaggaguaga

SEQ ID NO: 118718 - RNA, 29 nt, Homo Sapiens
cacucugggaagguggccagaaaccgucc

SEQ ID NO: 118719 - RNA, 32 nt, Homo Sapiens
cauugucuugucagccagcaauugucauggaa

SEQ ID NO: 118720 - RNA, 32 nt, Homo Sapiens
cccagcugcugaauuuaaauaguaaauaucac

SEQ ID NO: 118721 - RNA, 32 nt, Homo Sapiens
gguguggcagacaccuguccccugcccugcau

SEQ ID NO: 118722 - RNA, 32 nt, Homo Sapiens
aauggcaguuuaggcugcacaacugguaaaau

SEQ ID NO: 118723 - RNA, 32 nt, Homo Sapiens
caagauaguuuaucuaacuucgugcgcaauca

SEQ ID NO: 118724 - RNA, 32 nt, Homo Sapiens
accgugcguggugccuacagccugcagucugg

SEQ ID NO: 118725 - RNA, 32 nt, Homo Sapiens
uguaguucuccauggcaugauacaaacagguc

SEQ ID NO: 118726 - RNA, 32 nt, Homo Sapiens
caucuuguucuguguccuuuuaucucucagac

SEQ ID NO: 118727 - RNA, 32 nt, Homo Sapiens
cacuaccuuacagugagggcuauacaugguag

SEQ ID NO: 118728 - RNA, 32 nt, Homo Sapiens
ugugugcgcgucuguguguaugugugcacgcg

SEQ ID NO: 118729 - RNA, 32 nt, Homo Sapiens
acucaugaugagaaauggauguguuauucuug

SEQ ID NO: 118730 - RNA, 32 nt, Homo Sapiens
auaugaggagagaggagcagcaggcaggcagc

SEQ ID NO: 118731 - RNA, 32 nt, Homo Sapiens
gcaagaggagcaugugcagagccugccccucu

SEQ ID NO: 118732 - RNA, 32 nt, Homo Sapiens
guggacugugccgggggcgggggacggagggg

SEQ ID NO: 118733 - RNA, 32 nt, Homo Sapiens
auguagaguauuuucauauguuuuucacagcc

SEQ ID NO: 118734 - RNA, 32 nt, Homo Sapiens
ggucaguuguucuaccucacugagagggaaca

SEQ ID NO: 118735 - RNA, 32 nt, Homo Sapiens
ccugguggcccuggcccuccccuuccucacuc

SEQ ID NO: 118736 - RNA, 32 nt, Homo Sapiens
gcugaugugaucuaugaagaugauucaugcuu

SEQ ID NO: 118737 - RNA, 32 nt, Homo Sapiens
gggaccccggcggcgcggugcgcuucagggcg

SEQ ID NO: 118738 - RNA, 32 nt, Homo Sapiens
uccgcaagcugcagugcuaucccggcauccug

SEQ ID NO: 118739 - RNA, 32 nt, Homo Sapiens
auucugcccucccgucaccccuguuucuggca

SEQ ID NO: 118740 - RNA, 32 nt, Homo Sapiens
aaaauacaaaaauuagcugggugugguggcgg

SEQ ID NO: 118741 - RNA, 32 nt, Homo Sapiens
aaaauacaaaaauuagcugggcgugguggugg

SEQ ID NO: 118742 - RNA, 32 nt, Homo Sapiens
gggccgaagcgucacauagaaacugugggcug

SEQ ID NO: 118743 - RNA, 32 nt, Homo Sapiens
aaaucaauugguuuagaagguuuggacucacu

SEQ ID NO: 118744 - RNA, 32 nt, Homo Sapiens
ccgaaucaugucgaugaguccaaagcacacga

SEQ ID NO: 118745 - RNA, 32 nt, Homo Sapiens
aggggucugcaccuccugggagcagguggguc

SEQ ID NO: 118746 - RNA, 31 nt, Homo Sapiens
gcacggaugccgaaggugaaggcgcugcagu

SEQ ID NO: 118747 - RNA, 32 nt, Homo Sapiens
gaaagauccagaaagcacuguuuuuagcauua

SEQ ID NO: 118748 - RNA, 32 nt, Homo Sapiens
aaaacaaaaaucaaaugccuauaauaccauaa

SEQ ID NO: 118749 - RNA, 32 nt, Homo Sapiens
uucuucucaagccccgggcuagcuuuugaaau

SEQ ID NO: 118750 - RNA, 31 nt, Homo Sapiens
uguaugaaagccaccguggcgguuaaugagc

SEQ ID NO: 118751 - RNA, 32 nt, Homo Sapiens
ggcucucccggggcgggcgcagaugggcgccg

SEQ ID NO: 118752 - RNA, 32 nt, Homo Sapiens
gaggagggcagaucacuuggugccaggaguuc

SEQ ID NO: 118753 - RNA, 32 nt, Homo Sapiens
acugaaacaaaugaaaugauagcuuuauccua

SEQ ID NO: 118754 - RNA, 32 nt, Homo Sapiens
gccacugcguuccagcuugggcgacagagcaa

SEQ ID NO: 118755 - RNA, 29 nt, Homo Sapiens
cccgggagcaucugggcagugaguaaaga

SEQ ID NO: 118756 - RNA, 32 nt, Homo Sapiens
aggcauucaauaaauguugaaauaaugacacc

SEQ ID NO: 118757 - RNA, 32 nt, Homo Sapiens
guaccagagcauauuucuuuacaaaaggggaa

SEQ ID NO: 118758 - RNA, 32 nt, Homo Sapiens
caaaaauuucuuuuucuagaaaaaauaaauac

SEQ ID NO: 118759 - RNA, 32 nt, Homo Sapiens
ccagcaccagggccacugcuggcacgucguag

SEQ ID NO: 118760 - RNA, 32 nt, Homo Sapiens
auacuguaggcaacuauaacacagugguaagu

SEQ ID NO: 118761 - RNA, 32 nt, Homo Sapiens
gaaggaaccaugccucuagaagauuuacuggc

SEQ ID NO: 118762 - RNA, 32 nt, Homo Sapiens
gcaugaaacauuaauugcaaagggcagucaca

SEQ ID NO: 118763 - RNA, 32 nt, Homo Sapiens
ucaggacaguaugugagugucuggagacagca

SEQ ID NO: 118764 - RNA, 32 nt, Homo Sapiens
uacuggcucagaagaauuuaaguucuauucag

SEQ ID NO: 118765 - RNA, 32 nt, Homo Sapiens
cagcacuguacuccagccugggcgauggagca

SEQ ID NO: 118766 - RNA, 32 nt, Homo Sapiens
ggcagagcuaggacacaaaauuccuaauuccu

SEQ ID NO: 118767 - RNA, 32 nt, Homo Sapiens
caaaauuuuuaaaacugcauuuuuaaucagug

SEQ ID NO: 118768 - RNA, 32 nt, Homo Sapiens
auugaaaacaucauuauuaagauccaguaggu

SEQ ID NO: 118769 - RNA, 32 nt, Homo Sapiens
gauuguuaugcuuuccugaugaacugaccuuc

SEQ ID NO: 118770 - RNA, 32 nt, Homo Sapiens
cgagcaucacguguggcuccagcccuuguuuc

SEQ ID NO: 118771 - RNA, 32 nt, Homo Sapiens
acuaccugcuucccaggcguccaugacaugaa

SEQ ID NO: 118772 - RNA, 32 nt, Homo Sapiens
aaacucuggugacgugaugaaugugggaaggg

SEQ ID NO: 118773 - RNA, 32 nt, Homo Sapiens
aagguggggcuauggcagcugcuagggacccu

SEQ ID NO: 118774 - RNA, 32 nt, Homo Sapiens
guugucauggacuggcugccuuacaaaagcug

SEQ ID NO: 118775 - RNA, 32 nt, Homo Sapiens
uauuacaguguccuaccacucuaaucaagaaa

SEQ ID NO: 118776 - RNA, 30 nt, Homo Sapiens
aguccccuggacugagucccccaggccuuc

SEQ ID NO: 118777 - RNA, 32 nt, Homo Sapiens
cucaggcaaccccaccucccccucucccuccu

SEQ ID NO: 118778 - RNA, 32 nt, Homo Sapiens
acuuaaaaaggucagugugcgaaauggcuugc

SEQ ID NO: 118779 - RNA, 32 nt, Homo Sapiens
gggggagccggggcucagggccccugacugca

SEQ ID NO: 118780 - RNA, 32 nt, Homo Sapiens
ugugauggagaucacccaaugccaagggcaga

SEQ ID NO: 118781 - RNA, 32 nt, Homo Sapiens
aaaguaggaaauggaugauuuuuaaaaccagc

SEQ ID NO: 118782 - RNA, 32 nt, Homo Sapiens
ugauguaaccaccucauuuuuuacaaauacag

SEQ ID NO: 118783 - RNA, 32 nt, Homo Sapiens
agcuuggagccgcgcgccggagggaauaggaa

SEQ ID NO: 118784 - RNA, 32 nt, Homo Sapiens
ccagacuaggacugcugaucugcacaauuuaa

SEQ ID NO: 118785 - RNA, 32 nt, Homo Sapiens
uuuuaaaaaguacucuuuaagagugaaauaau

SEQ ID NO: 118786 - RNA, 32 nt, Homo Sapiens
ugaccaggcucuaugugcugcuguagugaaac

SEQ ID NO: 118787 - RNA, 32 nt, Homo Sapiens
agaccugcagcuugcauggggccccucccuuc

SEQ ID NO: 118788 - RNA, 32 nt, Homo Sapiens
gugccgagauggugggggcccugcaggagucu

SEQ ID NO: 118789 - RNA, 32 nt, Homo Sapiens
gcagguuucgggcaggauguauugaucagaca

SEQ ID NO: 118790 - RNA, 32 nt, Homo Sapiens
uuuaaaauuuguauuucuuucauuacaaauaa

SEQ ID NO: 118791 - RNA, 32 nt, Homo Sapiens
cucaaaagugcuuuguuguaaaauaaauuugu

SEQ ID NO: 118792 - RNA, 32 nt, Homo Sapiens
acccuccuaaaaucccaauaccuugagcaaga

SEQ ID NO: 118793 - RNA, 32 nt, Homo Sapiens
gugaaagcaaccaaaggcaacagagucuagcu

SEQ ID NO: 118794 - RNA, 32 nt, Homo Sapiens
cgugcucagauuuuauauaucaccuuaucaau

SEQ ID NO: 118795 - RNA, 32 nt, Homo Sapiens
agcgguagauugggcaggauucgcgccuccau

SEQ ID NO: 118796 - RNA, 32 nt, Homo Sapiens
aagcaaggguccuguggacaucuugcauuuug

SEQ ID NO: 118797 - RNA, 32 nt, Homo Sapiens
gccgccccucugccuccgccagggcuggacca

SEQ ID NO: 118798 - RNA, 32 nt, Homo Sapiens
aggggccuggggagucaugcccaacaaaccau

SEQ ID NO: 118799 - RNA, 32 nt, Homo Sapiens
gcaacaucagagugugccccgcgcucauggau

SEQ ID NO: 118800 - RNA, 32 nt, Homo Sapiens
cuuugaugcagugauguacuuaauggugcaau

SEQ ID NO: 118801 - RNA, 32 nt, Homo Sapiens
guaugcugggcugggggcgcaccacgugcuca

SEQ ID NO: 118802 - RNA, 32 nt, Homo Sapiens
cauccguccuccccgccucgcagaguugggag

SEQ ID NO: 118803 - RNA, 32 nt, Homo Sapiens
gaauugucuuaauguuuuuuuauuaacugaca

SEQ ID NO: 118804 - RNA, 32 nt, Homo Sapiens
guuuguguuucuccucccccuugcuugcaugu

SEQ ID NO: 118805 - RNA, 32 nt, Homo Sapiens
cgcccggcuaauuuuguauuuuucauagagac

SEQ ID NO: 118806 - RNA, 32 nt, Homo Sapiens
augaucuuuuaaaaauauauuuggcuuuuaaa

SEQ ID NO: 118807 - RNA, 32 nt, Homo Sapiens
cuaggaauaguuccucauucauuuuuauauug

SEQ ID NO: 118808 - RNA, 32 nt, Homo Sapiens
cccacugccgccuccuucuuaacucugcagga

SEQ ID NO: 118809 - RNA, 32 nt, Homo Sapiens
uuuuccacagaaagauaagguaaacaagauau

SEQ ID NO: 118810 - RNA, 32 nt, Homo Sapiens
ccugcucugcggcuccucccaccccaccucuu

SEQ ID NO: 118811 - RNA, 32 nt, Homo Sapiens
uaaaaauaaaauaacauuauuacauugccuca

SEQ ID NO: 118812 - RNA, 32 nt, Homo Sapiens
uggguacuguucaaaaaggaaugccccacaag

SEQ ID NO: 118813 - RNA, 30 nt, Homo Sapiens
uaggcccuuaucccuguuuaguucugagag

SEQ ID NO: 118814 - RNA, 32 nt, Homo Sapiens
aaaguaacugaagaggccaggcgugguggcuc

SEQ ID NO: 118815 - RNA, 32 nt, Homo Sapiens
cccacaccaguugcccagaugaacuggccucu

SEQ ID NO: 118816 - RNA, 32 nt, Homo Sapiens
ucccugcagcuaggagggggagggguuguugc

SEQ ID NO: 118817 - RNA, 32 nt, Homo Sapiens
uuucccuuaggacucugcacuuuauagaauau

SEQ ID NO: 118818 - RNA, 32 nt, Homo Sapiens
uuaauaaaaugguucaugaaucggagacuaac

SEQ ID NO: 118819 - RNA, 32 nt, Homo Sapiens
guugcuggccccagcgccuggugcaggaagcg

SEQ ID NO: 118820 - RNA, 32 nt, Homo Sapiens
uccaucucugguugacgggcuguccgugugcc

SEQ ID NO: 118821 - RNA, 30 nt, Homo Sapiens
ccauggggaggugggcucugaaggugaagg

SEQ ID NO: 118822 - RNA, 32 nt, Homo Sapiens
aauaugucaagcuuuuuaggcuugucacaaau

SEQ ID NO: 118823 - RNA, 30 nt, Homo Sapiens
gcagcggguaacccugccuuguucugucau

SEQ ID NO: 118824 - RNA, 32 nt, Homo Sapiens
gcgccguguucgcccucaagguggugccgugu

SEQ ID NO: 118825 - RNA, 32 nt, Homo Sapiens
cgcccagaggaugauccaguaucucucacgga

SEQ ID NO: 118826 - RNA, 32 nt, Homo Sapiens
aaguguuugcagggcauuuuucccucuuaccu

SEQ ID NO: 118827 - RNA, 32 nt, Homo Sapiens
uguuuaguuuuuacaacauaguacuaaauaaa

SEQ ID NO: 118828 - RNA, 32 nt, Homo Sapiens
aauacccccaagccuuugcucuaggccagauc

SEQ ID NO: 118829 - RNA, 32 nt, Homo Sapiens
cgccgcccgcggccgucggggcuauuagugaa

SEQ ID NO: 118830 - RNA, 32 nt, Homo Sapiens
uccguguccggucccccaaaucugucgucccu

SEQ ID NO: 118831 - RNA, 32 nt, Homo Sapiens
cuccuccaccggcgccucccccuccgcucugc

SEQ ID NO: 118832 - RNA, 32 nt, Homo Sapiens
ugguuugcaauaaucaagauaugugucgaguc

SEQ ID NO: 118833 - RNA, 32 nt, Homo Sapiens
gcugcagagcccaacguaauuuuuuaaacagc

SEQ ID NO: 118834 - RNA, 32 nt, Homo Sapiens
aggcauuccuuccugugucccagagcuucacu

SEQ ID NO: 118835 - RNA, 32 nt, Homo Sapiens
ucaaccccacagaugcuccgggccccugcccc

SEQ ID NO: 118836 - RNA, 32 nt, Homo Sapiens
aauauugauauuuggauuguguugcagauuga

SEQ ID NO: 118837 - RNA, 32 nt, Homo Sapiens
cgcugcugggguccucggccaagcccccuucu

SEQ ID NO: 118838 - RNA, 32 nt, Homo Sapiens
gcggcggaucgaggagcucuccaggucguccc

SEQ ID NO: 118839 - RNA, 32 nt, Homo Sapiens
ccagcaugucucugaaucucacccaaggccca

SEQ ID NO: 118840 - RNA, 32 nt, Homo Sapiens
accugcacugggucuggaucagagcugccucg

SEQ ID NO: 118841 - RNA, 32 nt, Homo Sapiens
uccuggagaugggauccaggacguggggccau

SEQ ID NO: 118842 - RNA, 32 nt, Homo Sapiens
ccuauuuguguggacaaaaauauuuacacuua

SEQ ID NO: 118843 - RNA, 32 nt, Homo Sapiens
ugggcuccaaccccuuagcucugucugagaau

SEQ ID NO: 118844 - RNA, 32 nt, Homo Sapiens
gaguccagucaggagcucucucaguggccucc

SEQ ID NO: 118845 - RNA, 32 nt, Homo Sapiens
uggagccuuugaugccagcaguucuuaagcca

SEQ ID NO: 118846 - RNA, 32 nt, Homo Sapiens
uagccagacuuguuuugcuaucuuauaagcag

SEQ ID NO: 118847 - RNA, 32 nt, Homo Sapiens
auuuuaucauaucugcuucuguuuuuccaaaa

SEQ ID NO: 118848 - RNA, 32 nt, Homo Sapiens
caguauguggaaacagaagcuccaugacggua

SEQ ID NO: 118849 - RNA, 32 nt, Homo Sapiens
uccagcucgcccagcucgcccagcguccgccg

SEQ ID NO: 118850 - RNA, 32 nt, Homo Sapiens
ccugccccgcggcgcugccgcacgagccccac

SEQ ID NO: 118851 - RNA, 31 nt, Homo Sapiens
ggaaaucuagccaccaaaacggguuaaucaa

SEQ ID NO: 118852 - RNA, 31 nt, Homo Sapiens
ccccuuuagucuaggaaccaggaugauaaga

SEQ ID NO: 118853 - RNA, 31 nt, Homo Sapiens
uuuuucagugaagcucucagaauguccagua

SEQ ID NO: 118854 - RNA, 32 nt, Homo Sapiens
auaagcaagacugagcagcauuauaauuaauu

SEQ ID NO: 118855 - RNA, 32 nt, Homo Sapiens
auggggaccuacccaaaccaauauucaucccc

SEQ ID NO: 118856 - RNA, 32 nt, Homo Sapiens
aaauguucucauccuuucuccucccucuccuu

SEQ ID NO: 118857 - RNA, 32 nt, Homo Sapiens
gaggucuggggauaagugaaaugaauaugacu

SEQ ID NO: 118858 - RNA, 32 nt, Homo Sapiens
uuggcuuuucccuugcuuccccuuuugccaau

SEQ ID NO: 118859 - RNA, 32 nt, Homo Sapiens
ugauaaaauaggauccuuggugcggagcuuaa

SEQ ID NO: 118860 - RNA, 32 nt, Homo Sapiens
caucauuguaaauuauuucauacaaaacuguu

SEQ ID NO: 118861 - RNA, 32 nt, Homo Sapiens
gccagccccagcugggcccccggggcccacca

SEQ ID NO: 118862 - RNA, 32 nt, Homo Sapiens
ccguaaucauaucuuuuuccuaucuaucugag

SEQ ID NO: 118863 - RNA, 32 nt, Homo Sapiens
cuucuguuccuggaagacccagaguuaaaugc

SEQ ID NO: 118864 - RNA, 32 nt, Homo Sapiens
gagggagccaaggugacacuucacugugaagc

SEQ ID NO: 118865 - RNA, 32 nt, Homo Sapiens
gcacaaggaucugcaucuccaauggauacuga

SEQ ID NO: 118866 - RNA, 32 nt, Homo Sapiens
ucucggcgccagagccgcucuccgcaucccag

SEQ ID NO: 118867 - RNA, 32 nt, Homo Sapiens
gacccacaguuauucuuaauuucugauauuaa

SEQ ID NO: 118868 - RNA, 32 nt, Homo Sapiens
acauguguccaggccccuccccgggagguaca

SEQ ID NO: 118869 - RNA, 32 nt, Homo Sapiens
acuguggugaaacuccuuccaaggcugagggg

SEQ ID NO: 118870 - RNA, 32 nt, Homo Sapiens
gcuguuuaaggguuuuaucugagccacuuuaa

SEQ ID NO: 118871 - RNA, 32 nt, Homo Sapiens
ugucccuggugucuuccuucugaugggccuuc

SEQ ID NO: 118872 - RNA, 32 nt, Homo Sapiens
ccuucuccagcgccgcacacacagaugcucag

SEQ ID NO: 118873 - RNA, 32 nt, Homo Sapiens
aggacgggggucugcacucacugcacauugcc

SEQ ID NO: 118874 - RNA, 32 nt, Homo Sapiens
ugggaacuauaaaucacuaggcgguugccuug

SEQ ID NO: 118875 - RNA, 32 nt, Homo Sapiens
cucuggcuauguucacugggccaggcaccucu

SEQ ID NO: 118876 - RNA, 32 nt, Homo Sapiens
gcuucuuccagguaugggcaccagagagggag

SEQ ID NO: 118877 - RNA, 32 nt, Homo Sapiens
uccccaaaggaagugauggagagccuugagcu

SEQ ID NO: 118878 - RNA, 32 nt, Homo Sapiens
guauuccauagagcaguguuccugcuaccugg

SEQ ID NO: 118879 - RNA, 32 nt, Homo Sapiens
uacaggugagcacuucuguguucccaagaaga

SEQ ID NO: 118880 - RNA, 32 nt, Homo Sapiens
gguagccauaauuauuuauuguccucucuguc

SEQ ID NO: 118881 - RNA, 32 nt, Homo Sapiens
uccacugcaggcugguuuuaggucuugaauua

SEQ ID NO: 118882 - RNA, 32 nt, Homo Sapiens
ugaucuucuauucucauguaagccacaagacc

SEQ ID NO: 118883 - RNA, 32 nt, Homo Sapiens
gggcaauaaaauuuauacucaaccauauaaua

SEQ ID NO: 118884 - RNA, 32 nt, Homo Sapiens
gaauacagaaugcccauccuuuccaggagaaa

SEQ ID NO: 118885 - RNA, 32 nt, Homo Sapiens
aauggagagcuccagcagcgaugaugaggaca

SEQ ID NO: 118886 - RNA, 32 nt, Homo Sapiens
cgggaacuggagucugucucuuucagugcuuu

SEQ ID NO: 118887 - RNA, 30 nt, Homo Sapiens
ugugucgguguuugugacgcccugagaccc

SEQ ID NO: 118888 - RNA, 32 nt, Homo Sapiens
agaucaaacaaaugccaagcuauauuuauaau

SEQ ID NO: 118889 - RNA, 32 nt, Homo Sapiens
ugaauagagaauauuuauaacuuuuguaugag

SEQ ID NO: 118890 - RNA, 32 nt, Homo Sapiens
uguuguuaaauaucaguagaaacucuacauaa

SEQ ID NO: 118891 - RNA, 32 nt, Homo Sapiens
uuaagaagaacaauaaacuaaaggaaagcauu

SEQ ID NO: 118892 - RNA, 32 nt, Homo Sapiens
cucuccucccccagccuuccuccggcuggcag

SEQ ID NO: 118893 - RNA, 32 nt, Homo Sapiens
uagaacagaaaugaauauaugcuaaaucacaa

SEQ ID NO: 118894 - RNA, 32 nt, Homo Sapiens
aaaaaguuuuuugggggagacuugggccuuga

SEQ ID NO: 118895 - RNA, 29 nt, Homo Sapiens
aaucugccagagugauauuuucuguuauu

SEQ ID NO: 118896 - RNA, 32 nt, Homo Sapiens
ucuacaaucugugaguaucacauccuguauag

SEQ ID NO: 118897 - RNA, 32 nt, Homo Sapiens
aaagucaucauucuugggaagacuuuggaggu

SEQ ID NO: 118898 - RNA, 32 nt, Homo Sapiens
acugcucuaguuucuuaguacucuguaaugug

SEQ ID NO: 118899 - RNA, 32 nt, Homo Sapiens
aaccuuguuaaaccuaauauugaacuauuuuu

SEQ ID NO: 118900 - RNA, 32 nt, Homo Sapiens
gauuuuuauuuuuuaaaugcugucaaaguuac

SEQ ID NO: 118901 - RNA, 32 nt, Homo Sapiens
aauuucgauucacaaaaagauacaaauggcca

SEQ ID NO: 118902 - RNA, 32 nt, Homo Sapiens
cuaucccacuccucuucagucuuuacacccug

SEQ ID NO: 118903 - RNA, 32 nt, Homo Sapiens
uuuucuuauuuuugcuuccuauuauaaaaugg

SEQ ID NO: 118904 - RNA, 32 nt, Homo Sapiens
ugcaacgugucuuguagcacaaauaaaauucu

SEQ ID NO: 118905 - RNA, 31 nt, Homo Sapiens
acauuuuacuaaauaaagccaaauaaagccu

SEQ ID NO: 118906 - RNA, 32 nt, Homo Sapiens
uugagugugaauguccaaguaaugguguaugu

SEQ ID NO: 118907 - RNA, 32 nt, Homo Sapiens
aaguuuuaaaacuuaauggaucagacuuugcc

SEQ ID NO: 118908 - RNA, 32 nt, Homo Sapiens
ugaaauugucuuccuuuuuucuucauucagcu

SEQ ID NO: 118909 - RNA, 32 nt, Homo Sapiens
cccauucacuccauccugugagaccacgcccg

SEQ ID NO: 118910 - RNA, 32 nt, Homo Sapiens
aggaauuuuauggaaguaccuaaccaaagcug

SEQ ID NO: 118911 - RNA, 32 nt, Homo Sapiens
ugacccuugggguuuuguaugcccuggagaug

SEQ ID NO: 118912 - RNA, 32 nt, Homo Sapiens
aucaacagaugaauggauaaagaauaugugcu

SEQ ID NO: 118913 - RNA, 32 nt, Homo Sapiens
gcucaagaugagaagcguauugagacaaagaa

SEQ ID NO: 118914 - RNA, 32 nt, Homo Sapiens
aggucuucauucaaaccaaaccuuggauggga

SEQ ID NO: 118915 - RNA, 32 nt, Homo Sapiens
ucccccaccccccauucuaucuuugucauguu

SEQ ID NO: 118916 - RNA, 32 nt, Homo Sapiens
uuguuggaagcagaucagagcacacguacgaa

SEQ ID NO: 118917 - RNA, 32 nt, Homo Sapiens
ucuagguggcuggcagaggcacaugcagaccc

SEQ ID NO: 118918 - RNA, 32 nt, Homo Sapiens
uuuuuggcuuucaucgcuuuuucuacauguuu

SEQ ID NO: 118919 - RNA, 32 nt, Homo Sapiens
uuaugcugaagaggagaauggagcacuagcua

SEQ ID NO: 118920 - RNA, 32 nt, Homo Sapiens
uccauggaguggcugcuggugcccggggagga

SEQ ID NO: 118921 - RNA, 31 nt, Homo Sapiens
ugugucucuacucaauaaaguacaugccucc

SEQ ID NO: 118922 - RNA, 32 nt, Homo Sapiens
uacucuugauucaugcagagugccaauaagau

SEQ ID NO: 118923 - RNA, 32 nt, Homo Sapiens
gggcgggugcgcgggcgggcaggggaccuugg

SEQ ID NO: 118924 - RNA, 32 nt, Homo Sapiens
ccaguccacguguagacuuugcgcuugaugaa

SEQ ID NO: 118925 - RNA, 32 nt, Homo Sapiens
aagacacuuccccuccucccuuugaagugcau

SEQ ID NO: 118926 - RNA, 32 nt, Homo Sapiens
gccugaaguuugugggggccaaaccugggacc

SEQ ID NO: 118927 - RNA, 32 nt, Homo Sapiens
cuguguccucacauggccucuccuuuauuaca

SEQ ID NO: 118928 - RNA, 32 nt, Homo Sapiens
cugcggcggcgcgcuccgagccugcgucuagg

SEQ ID NO: 118929 - RNA, 32 nt, Homo Sapiens
guggagcaggugccggcuccucacacaccaug

SEQ ID NO: 118930 - RNA, 32 nt, Homo Sapiens
aucccggaagguguuaaauacacaugaaagcc

SEQ ID NO: 118931 - RNA, 32 nt, Homo Sapiens
caaccaaacugggguccaccaagugggggaag

SEQ ID NO: 118932 - RNA, 32 nt, Homo Sapiens
aaguaccuugcagcuguauugcucaccugcuu

SEQ ID NO: 118933 - RNA, 32 nt, Homo Sapiens
uuuuuguuguuuacaaauuacccaggcuaagg

SEQ ID NO: 118934 - RNA, 32 nt, Homo Sapiens
caggggggccgcacagcgcggcugggaccgau

SEQ ID NO: 118935 - RNA, 32 nt, Homo Sapiens
uaguucauccaguguuuaaauuccuagcaaag

SEQ ID NO: 118936 - RNA, 32 nt, Homo Sapiens
ggcaggacucgccucacuucuggcgccuccug

SEQ ID NO: 118937 - RNA, 32 nt, Homo Sapiens
gaaacucgaaccaccuaauauuucauaaccuu

SEQ ID NO: 118938 - RNA, 32 nt, Homo Sapiens
gucaugcucacagauugcauaaauucacccau

SEQ ID NO: 118939 - RNA, 32 nt, Homo Sapiens
aagcuggagcaguugcuuuuugaaagaacaug

SEQ ID NO: 118940 - RNA, 32 nt, Homo Sapiens
cucucagaaaauaaacaucuucccaggcugcc

SEQ ID NO: 118941 - RNA, 32 nt, Homo Sapiens
gcgggggcgggggcggggggaggugcacaacu

SEQ ID NO: 118942 - RNA, 32 nt, Homo Sapiens
guggggacauuugguuuucuugcagaucauuu

SEQ ID NO: 118943 - RNA, 32 nt, Homo Sapiens
ggcccugcuggaugugggccaagcccuacagc

SEQ ID NO: 118944 - RNA, 31 nt, Homo Sapiens
uuucuucccauugcucucagagccuguucga

SEQ ID NO: 118945 - RNA, 32 nt, Homo Sapiens
ugggagagaggaaaaaaggaaauucuauagaa

SEQ ID NO: 118946 - RNA, 32 nt, Homo Sapiens
gagugguuguggccauugcacacaggcggauc

SEQ ID NO: 118947 - RNA, 32 nt, Homo Sapiens
cugccaccucccucaccacaacucccaaagca

SEQ ID NO: 118948 - RNA, 31 nt, Homo Sapiens
ucgaagucacggagaagcuggacuccagccc

SEQ ID NO: 118949 - RNA, 27 nt, Homo Sapiens
aaaugcuagugaaaaacaaucaccuuu

SEQ ID NO: 118950 - RNA, 32 nt, Homo Sapiens
augccuuuugaaaagagaaaaagaaugaagua

SEQ ID NO: 118951 - RNA, 32 nt, Homo Sapiens
uuaaaucaccccaaccuuggccaggcauggug

SEQ ID NO: 118952 - RNA, 32 nt, Homo Sapiens
cguuuguaaucccagcacuuugggaggccgag

SEQ ID NO: 118953 - RNA, 32 nt, Homo Sapiens
ugcgagccucagucccuuccaagcugcacugg

SEQ ID NO: 118954 - RNA, 32 nt, Homo Sapiens
cacuaugcugcuaguuacaguguaggcacccc

SEQ ID NO: 118955 - RNA, 32 nt, Homo Sapiens
aaguucugcauaaaauugaguauuaaguauau

SEQ ID NO: 118956 - RNA, 32 nt, Homo Sapiens
gggcgucuccugcgccccugggacgccuggag

SEQ ID NO: 118957 - RNA, 32 nt, Homo Sapiens
uuauuuuucuucauugcaguggauugauuuga

SEQ ID NO: 118958 - RNA, 32 nt, Homo Sapiens
agccugggugacugagcaagacucugccucaa

SEQ ID NO: 118959 - RNA, 32 nt, Homo Sapiens
aggacaccugcaacgccgugcgcuagacuaug

SEQ ID NO: 118960 - RNA, 32 nt, Homo Sapiens
guuaggacguucuuggcuccguuagacaggug

SEQ ID NO: 118961 - RNA, 32 nt, Homo Sapiens
auacauagucuucaggcuguccauuggugaug

SEQ ID NO: 118962 - RNA, 32 nt, Homo Sapiens
gacuaggccggggguuugaggaggcggcucug

SEQ ID NO: 118963 - RNA, 32 nt, Homo Sapiens
uuuuaugcauguauauuggaauauuuuuagcu

SEQ ID NO: 118964 - RNA, 32 nt, Homo Sapiens
cuuuauuuuuacuuuuucauuucaagaaauuu

SEQ ID NO: 118965 - RNA, 32 nt, Homo Sapiens
auggguuuacagcaccuggaggugacaucagg

SEQ ID NO: 118966 - RNA, 32 nt, Homo Sapiens
gucgcagccccggccgcccgccgccgccaugu

SEQ ID NO: 118967 - RNA, 32 nt, Homo Sapiens
acaaaaacaacaaauccucuuaggaugugugc

SEQ ID NO: 118968 - RNA, 32 nt, Homo Sapiens
acacuugauuauuuuucuucauuuucaaaguc

SEQ ID NO: 118969 - RNA, 32 nt, Homo Sapiens
ugggguuccgaugugguccccggagcgggagg

SEQ ID NO: 118970 - RNA, 32 nt, Homo Sapiens
acuucacuaccaucccagaacucuguacuuac

SEQ ID NO: 118971 - RNA, 32 nt, Homo Sapiens
ugagauuaaaaaucuaaaaauuuugcauuuca

SEQ ID NO: 118972 - RNA, 31 nt, Homo Sapiens
cagagguugucucugaaccaggagagaaggu

SEQ ID NO: 118973 - RNA, 32 nt, Homo Sapiens
ccuauugagggccugcuuucugauuauagaag

SEQ ID NO: 118974 - RNA, 32 nt, Homo Sapiens
gaaagcaggaggagguggcggcggcgggaaga

SEQ ID NO: 118975 - RNA, 32 nt, Homo Sapiens
cagaagaggaccgcggacuuaaagcaauaaau

SEQ ID NO: 118976 - RNA, 32 nt, Homo Sapiens
uugcauggucuucggaauuuuuucugugugua

SEQ ID NO: 118977 - RNA, 32 nt, Homo Sapiens
gugaguuuggggccugcagagccucggguagc

SEQ ID NO: 118978 - RNA, 32 nt, Homo Sapiens
agggcacuguucggacaucgagaagugagccg

SEQ ID NO: 118979 - RNA, 32 nt, Homo Sapiens
ccagcccggccgccauggacgacaaggcguuc

SEQ ID NO: 118980 - RNA, 32 nt, Homo Sapiens
ucagaggauguuaugucuuugucauucauuaa

SEQ ID NO: 118981 - RNA, 32 nt, Homo Sapiens
cagcguuuuggcuggaaaauagacagauguag

SEQ ID NO: 118982 - RNA, 32 nt, Homo Sapiens
cuauuaguucccuccuuauucuggaagaauuu

SEQ ID NO: 118983 - RNA, 32 nt, Homo Sapiens
agccacacucgcaccuccugggugcuguaguc

SEQ ID NO: 118984 - RNA, 32 nt, Homo Sapiens
uuuccuucaaccaagugcaggaaagcccugug

SEQ ID NO: 118985 - RNA, 32 nt, Homo Sapiens
acucuaucaaggaaacuaaauucauccaaggu

SEQ ID NO: 118986 - RNA, 32 nt, Homo Sapiens
uggauguagcucacaugucaccaccaccagau

SEQ ID NO: 118987 - RNA, 32 nt, Homo Sapiens
cacccacaucagcuucuguuuaccuuuuuggc

SEQ ID NO: 118988 - RNA, 32 nt, Homo Sapiens
ccucccugcuccaggcaugaagagaaaggaaa

SEQ ID NO: 118989 - RNA, 32 nt, Homo Sapiens
cucucugaaaaaguccuagaaauacuacccuc

SEQ ID NO: 118990 - RNA, 32 nt, Homo Sapiens
aucccauauaaggcccuugauugucuggcauc

SEQ ID NO: 118991 - RNA, 32 nt, Homo Sapiens
ggcacgaggcugcuggcucaccuccgagccac

SEQ ID NO: 118992 - RNA, 32 nt, Homo Sapiens
ucucccccaucccugacacacccagccggggc

SEQ ID NO: 118993 - RNA, 32 nt, Homo Sapiens
uaucccaugcauaaauaaagguaaauauauau

SEQ ID NO: 118994 - RNA, 32 nt, Homo Sapiens
cccuccuccgggcuugggccaggccggccccu

SEQ ID NO: 118995 - RNA, 32 nt, Homo Sapiens
ugcugugaggauagagcagagaggacugugcc

SEQ ID NO: 118996 - RNA, 32 nt, Homo Sapiens
gguaaaugcccccaggccgcauguggcuucau

SEQ ID NO: 118997 - RNA, 32 nt, Homo Sapiens
ggugaugucacccacccucaggcuggggccga

SEQ ID NO: 118998 - RNA, 32 nt, Homo Sapiens
uagaaacccacccaccaccaggauauuuggaa

SEQ ID NO: 118999 - RNA, 32 nt, Homo Sapiens
uggcaacagcuauaguaucaaagugcauuacu

SEQ ID NO: 119000 - RNA, 32 nt, Homo Sapiens
ggagagcagcuuccuuggguguuacaugagcc

SEQ ID NO: 119001 - RNA, 32 nt, Homo Sapiens
cccuggcagggccaggggaccucucuuugguc

SEQ ID NO: 119002 - RNA, 32 nt, Homo Sapiens
aggauggaaaucauaaaauauuucaugggaau

SEQ ID NO: 119003 - RNA, 32 nt, Homo Sapiens
uagaaguguucuuuucuggcuguacugaaggg

SEQ ID NO: 119004 - RNA, 32 nt, Homo Sapiens
cagaaucucccucugucccccaggcuggagug

SEQ ID NO: 119005 - RNA, 32 nt, Homo Sapiens
gcagcaguuccugcagcagagccuugaaagag

SEQ ID NO: 119006 - RNA, 32 nt, Homo Sapiens
cugagcccaagccuucuagcucugaggccacu

SEQ ID NO: 119007 - RNA, 32 nt, Homo Sapiens
ugucuguaaucccagcacuuugugaggcugag

SEQ ID NO: 119008 - RNA, 32 nt, Homo Sapiens
uacucuugauaaaaagaaaaauaccguguuac

SEQ ID NO: 119009 - RNA, 32 nt, Homo Sapiens
ggaacucccagggaugagauuccuccugugac

SEQ ID NO: 119010 - RNA, 32 nt, Homo Sapiens
aaaguuugugacucaccauucaaggccccgag

SEQ ID NO: 119011 - RNA, 32 nt, Homo Sapiens
uggagaagccccagagaaugagcauucccugc

SEQ ID NO: 119012 - RNA, 32 nt, Homo Sapiens
ucuagaaacaauuuuacagaacuucaguugua

SEQ ID NO: 119013 - RNA, 32 nt, Homo Sapiens
aagagccuggggaggaggagcugcgagcgcgg

SEQ ID NO: 119014 - RNA, 32 nt, Homo Sapiens
acuuugaauauucgaguauaaagucuaacauu

SEQ ID NO: 119015 - RNA, 32 nt, Homo Sapiens
cgacuccauuuuccucggugggggcuuagcgc

SEQ ID NO: 119016 - RNA, 31 nt, Homo Sapiens
cuuaagaagaaaaaacagaaggauucacaau

SEQ ID NO: 119017 - RNA, 32 nt, Homo Sapiens
aaucauucauucaauagauaccaccgugugac

SEQ ID NO: 119018 - RNA, 32 nt, Homo Sapiens
ugcuugcuaagugccuucagcugaaugugaag

SEQ ID NO: 119019 - RNA, 32 nt, Homo Sapiens
uuucuucacuuuucuuuuuuuuuuuuuuucgu

SEQ ID NO: 119020 - RNA, 32 nt, Homo Sapiens
uuguaccucuagagcacucucccuuucuguuu

SEQ ID NO: 119021 - RNA, 32 nt, Homo Sapiens
aaguccccacagcuagaaagugccagagucgu

SEQ ID NO: 119022 - RNA, 30 nt, Homo Sapiens
guauucaauaaaccucuucuuuagcaaguu

SEQ ID NO: 119023 - RNA, 32 nt, Homo Sapiens
uggugucugaauagaacuaaaaaucacaaaga

SEQ ID NO: 119024 - RNA, 32 nt, Homo Sapiens
uagaaauaauuucucaacaaauguuguuacua

SEQ ID NO: 119025 - RNA, 32 nt, Homo Sapiens
auucacaugugagcgacacgcagacauccgcg

SEQ ID NO: 119026 - RNA, 32 nt, Homo Sapiens
ggguggugaaggccucccccagcccagacccu

SEQ ID NO: 119027 - RNA, 32 nt, Homo Sapiens
cugaucuuggguuuccuauucugccuccccua

SEQ ID NO: 119028 - RNA, 32 nt, Homo Sapiens
aggucaccugggggcagcuggugccgggucuu

SEQ ID NO: 119029 - RNA, 32 nt, Homo Sapiens
cccgcgccccgcucagccuugcagccccgcgc

SEQ ID NO: 119030 - RNA, 32 nt, Homo Sapiens
gcgcgcgcaccgggccgcucuccuaccucccu

SEQ ID NO: 119031 - RNA, 32 nt, Homo Sapiens
cucuguggcuucuuggagccgcauagaugggu

SEQ ID NO: 119032 - RNA, 32 nt, Homo Sapiens
ucuagugcaguuuuugucauaaauuacaagug

SEQ ID NO: 119033 - RNA, 27 nt, Homo Sapiens
gcaggcuccuucuucuuccgcaagugu

SEQ ID NO: 119034 - RNA, 32 nt, Homo Sapiens
cugcccccggcuucaaggcccgcggaacagcg

SEQ ID NO: 119035 - RNA, 32 nt, Homo Sapiens
ucucaguccuguggcaucuggcacgaagucuc

SEQ ID NO: 119036 - RNA, 32 nt, Homo Sapiens
aucauacagcauguacccuuuugguauuggcu

SEQ ID NO: 119037 - RNA, 32 nt, Homo Sapiens
uguaguggauaagaacagauuuuuguacucua

SEQ ID NO: 119038 - RNA, 32 nt, Homo Sapiens
gcaguuuggcaauaagacuguuuaauggguuc

SEQ ID NO: 119039 - RNA, 32 nt, Homo Sapiens
gcugcauuuuauucuauaucgccuuuuuucuu

SEQ ID NO: 119040 - RNA, 32 nt, Homo Sapiens
auggaacuuaggaucuuuuaacauaggugguu

SEQ ID NO: 119041 - RNA, 32 nt, Homo Sapiens
ggcagcaagaagcaccugaggccuugguucau

SEQ ID NO: 119042 - RNA, 32 nt, Homo Sapiens
augacccugcaaucacaccagacggcuggucg

SEQ ID NO: 119043 - RNA, 32 nt, Homo Sapiens
uacagcuuucaaaauauaauuaauuuuguuuu

SEQ ID NO: 119044 - RNA, 32 nt, Homo Sapiens
ucuguuuuacuuugguuuuugcuucuccauuu

SEQ ID NO: 119045 - RNA, 32 nt, Homo Sapiens
uagggcuauuuccaucgguauuuuaaaugugg

SEQ ID NO: 119046 - RNA, 32 nt, Homo Sapiens
gcuuagggccucuggaaggaagcuucccuguu

SEQ ID NO: 119047 - RNA, 32 nt, Homo Sapiens
aggaaagauaaaaauguaugcaauuccugagu

SEQ ID NO: 119048 - RNA, 32 nt, Homo Sapiens
cucagcaucaagcacacaguaagauuucauaa

SEQ ID NO: 119049 - RNA, 32 nt, Homo Sapiens
agagcacacaggacaggcuggugcaccuccag

SEQ ID NO: 119050 - RNA, 32 nt, Homo Sapiens
acagguuucuuacuuggagacuucacugcacc

SEQ ID NO: 119051 - RNA, 32 nt, Homo Sapiens
acaccaaacaccuuuaguacaguccuugcauc

SEQ ID NO: 119052 - RNA, 29 nt, Homo Sapiens
cagcucaggaggcagaggacgagagcgau

SEQ ID NO: 119053 - RNA, 32 nt, Homo Sapiens
gcccuugccacuuccccaaacaucucaucaag

SEQ ID NO: 119054 - RNA, 32 nt, Homo Sapiens
auuauggcaaaguggauuccauacucuggcac

SEQ ID NO: 119055 - RNA, 32 nt, Homo Sapiens
accugaguugcauagcggcugccuggaugggc

SEQ ID NO: 119056 - RNA, 32 nt, Homo Sapiens
agaaucacauucagggcaggcuagggacacgg

SEQ ID NO: 119057 - RNA, 32 nt, Homo Sapiens
accaugcccuugauauaucuuuugcaccugcu

SEQ ID NO: 119058 - RNA, 32 nt, Homo Sapiens
gccuguaccggaugcuagggggcuugcccacu

SEQ ID NO: 119059 - RNA, 32 nt, Homo Sapiens
auaagaggcuccaagaggacauuuuuggaugu

SEQ ID NO: 119060 - RNA, 31 nt, Homo Sapiens
ugguugcugcuauugcucccaagggcucaga

SEQ ID NO: 119061 - RNA, 32 nt, Homo Sapiens
cauuacuguauauacuuugccuuuccauaauc

SEQ ID NO: 119062 - RNA, 32 nt, Homo Sapiens
gagugagagaaagcggcuccgggggcauagcg

SEQ ID NO: 119063 - RNA, 32 nt, Homo Sapiens
uggugaccacucgccgccccuccggaggcuuc

SEQ ID NO: 119064 - RNA, 32 nt, Homo Sapiens
ugcaggucugucggcugggugcucuccagcag

SEQ ID NO: 119065 - RNA, 32 nt, Homo Sapiens
aaacuggaaucauccuuaaucaccuugaagau

SEQ ID NO: 119066 - RNA, 32 nt, Homo Sapiens
cuaguaauuuuugucagaugccagauguaaca

SEQ ID NO: 119067 - RNA, 32 nt, Homo Sapiens
ugcugcugcucgucgcgccggggcagccagcu

SEQ ID NO: 119068 - RNA, 32 nt, Homo Sapiens
aaugaagggagcagucuaaagaauuguaugca

SEQ ID NO: 119069 - RNA, 32 nt, Homo Sapiens
cagcacuuccagcccacccccauccauauaca

SEQ ID NO: 119070 - RNA, 32 nt, Homo Sapiens
uaacaaaggggaaaaagaauauguaaaaccac

SEQ ID NO: 119071 - RNA, 32 nt, Homo Sapiens
uugagggcagaggaggacuuagucuuucauau

SEQ ID NO: 119072 - RNA, 32 nt, Homo Sapiens
aaagcauaaacuauguuucuuguuacuauuag

SEQ ID NO: 119073 - RNA, 32 nt, Homo Sapiens
gagaagugguggccucaggacugagagcccgg

SEQ ID NO: 119074 - RNA, 32 nt, Homo Sapiens
uagcuuuuucauauuucuuucuuaguuguugg

SEQ ID NO: 119075 - RNA, 32 nt, Homo Sapiens
ucucauuccuuucuguuccccagugccccggg

SEQ ID NO: 119076 - RNA, 32 nt, Homo Sapiens
gaagcacauguacauacauggaccucauucag

SEQ ID NO: 119077 - RNA, 32 nt, Homo Sapiens
gguuucuucuauucaggcuucaauggacaggc

SEQ ID NO: 119078 - RNA, 32 nt, Homo Sapiens
ugugcugggcuuugguaugguaacucuuuggu

SEQ ID NO: 119079 - RNA, 32 nt, Homo Sapiens
ggcuccccggugcccgccccuccgcugcggag

SEQ ID NO: 119080 - RNA, 31 nt, Homo Sapiens
aaccagcuuuggagaaagcccagcuccugug

SEQ ID NO: 119081 - RNA, 32 nt, Homo Sapiens
agauaccaauuuagauaacaaacacucaugcu

SEQ ID NO: 119082 - RNA, 32 nt, Homo Sapiens
gcccagggggagagcggagcgguccgcagccg

SEQ ID NO: 119083 - RNA, 28 nt, Homo Sapiens
aacuuguugacauccaggaugaucagga

SEQ ID NO: 119084 - RNA, 32 nt, Homo Sapiens
gcgcugucgccacgcuguccggcagcgcuucc

SEQ ID NO: 119085 - RNA, 32 nt, Homo Sapiens
ggcccagcuaauucuuuuuuguauuuuuagua

SEQ ID NO: 119086 - RNA, 30 nt, Homo Sapiens
agaaaugucuguguuaagugguuuuuuauu

SEQ ID NO: 119087 - RNA, 32 nt, Homo Sapiens
ugggggcuggaacacagacuuccugggggucc

SEQ ID NO: 119088 - RNA, 32 nt, Homo Sapiens
cagcacaguggagaggccggaagugagacggg

SEQ ID NO: 119089 - RNA, 32 nt, Homo Sapiens
uuauuacaaaaauaaaauacacauugaaauac

SEQ ID NO: 119090 - RNA, 32 nt, Homo Sapiens
aggauaagguuauaucuaggacaacucuuuga

SEQ ID NO: 119091 - RNA, 32 nt, Homo Sapiens
gucugggauuaccacaucuaaaacauuauucu

SEQ ID NO: 119092 - RNA, 32 nt, Homo Sapiens
uguguuuggcuuucuguaaauguaguaggucu

SEQ ID NO: 119093 - RNA, 32 nt, Homo Sapiens
acuucaguucuuaauguaacuguacccuucug

SEQ ID NO: 119094 - RNA, 32 nt, Homo Sapiens
aggggucaggagguggcucgggugugggcugg

SEQ ID NO: 119095 - RNA, 32 nt, Homo Sapiens
guuucuucugcuucuugguuauaggagugcau

SEQ ID NO: 119096 - RNA, 32 nt, Homo Sapiens
uaucuuaggaaauuauuuuuacaguguguuug

SEQ ID NO: 119097 - RNA, 32 nt, Homo Sapiens
auuagcuuuuacauaugauaucuacaauguaa

SEQ ID NO: 119098 - RNA, 29 nt, Homo Sapiens
uuuuuguucugaauuuuccagaccccugu

SEQ ID NO: 119099 - RNA, 32 nt, Homo Sapiens
guaauauaauuuuuuucuucuuuuuuaaaaua

SEQ ID NO: 119100 - RNA, 32 nt, Homo Sapiens
acgccuggccgcgcccuugggcuuccugccuu

SEQ ID NO: 119101 - RNA, 32 nt, Homo Sapiens
cccuuccguccucccugagggcuggcacugcc

SEQ ID NO: 119102 - RNA, 32 nt, Homo Sapiens
gaagcuucuauaccucuuucuucuucgcuucc

SEQ ID NO: 119103 - RNA, 32 nt, Homo Sapiens
ucaccauuucaauuuaauuguuuacuuugaag

SEQ ID NO: 119104 - RNA, 32 nt, Homo Sapiens
uccaucacugguuuuauuguuuugaauaugga

SEQ ID NO: 119105 - RNA, 32 nt, Homo Sapiens
cauuuuccuucuuuuuaauaugucuaucuuga

SEQ ID NO: 119106 - RNA, 32 nt, Homo Sapiens
aggcugaaacagagacucccaccuucccagag

SEQ ID NO: 119107 - RNA, 32 nt, Homo Sapiens
caguuggugucuucauuuuauguauauuuauu

SEQ ID NO: 119108 - RNA, 32 nt, Homo Sapiens
cuggcaggggagaugugcagggugggucuugg

SEQ ID NO: 119109 - RNA, 32 nt, Homo Sapiens
uauacuucauaccccaggaccccuuccccagc

SEQ ID NO: 119110 - RNA, 32 nt, Homo Sapiens
cuuaaaaauugauuugacuccuguucuuaaac

SEQ ID NO: 119111 - RNA, 32 nt, Homo Sapiens
ggugccggcggucaccccugcugcgccuugag

SEQ ID NO: 119112 - RNA, 32 nt, Homo Sapiens
agccaucaaugcauuuuuuuuauuuuuuuuuu

SEQ ID NO: 119113 - RNA, 32 nt, Homo Sapiens
cuguccugcguccucuguccccggguuucaga

SEQ ID NO: 119114 - RNA, 32 nt, Homo Sapiens
aaaugaaauauguaagcacauuggugaccuug

SEQ ID NO: 119115 - RNA, 32 nt, Homo Sapiens
aagaccgagucuucuuuuuuuuaaacaaaaac

SEQ ID NO: 119116 - RNA, 32 nt, Homo Sapiens
uaguccuuuacuaauccaacccaugaugagcu

SEQ ID NO: 119117 - RNA, 32 nt, Homo Sapiens
uaggggacggcuuugggggucccacgagacau

SEQ ID NO: 119118 - RNA, 32 nt, Homo Sapiens
cggcuguaaucccagcacuuugggaggcugag

SEQ ID NO: 119119 - RNA, 32 nt, Homo Sapiens
aaucgauuguggggaugaaaugucauugugua

SEQ ID NO: 119120 - RNA, 32 nt, Homo Sapiens
uuaacauuugucgucauaccucauaagucggu

SEQ ID NO: 119121 - RNA, 32 nt, Homo Sapiens
agugcugcaauaaacuuacaugugcauguguc

SEQ ID NO: 119122 - RNA, 32 nt, Homo Sapiens
gcauuccacagccuguagaaguccucaagcgc

SEQ ID NO: 119123 - RNA, 32 nt, Homo Sapiens
uggaaugauccgaguacuguaucucagagcug

SEQ ID NO: 119124 - RNA, 32 nt, Homo Sapiens
aaacuaaggaaugaagaaaauaaaacauuaca

SEQ ID NO: 119125 - RNA, 32 nt, Homo Sapiens
cguauugucucuucagaaauaaaacuuuauca

SEQ ID NO: 119126 - RNA, 32 nt, Homo Sapiens
cuccugcugccuuuucuggaguuuguaaaauu

SEQ ID NO: 119127 - RNA, 32 nt, Homo Sapiens
aaaauacaaaaauuaggugggugugguggggg

SEQ ID NO: 119128 - RNA, 32 nt, Homo Sapiens
ggggcucgccccacccagggcucccuccugga

SEQ ID NO: 119129 - RNA, 32 nt, Homo Sapiens
agcgugauguccucucccuccauccugcuggu

SEQ ID NO: 119130 - RNA, 32 nt, Homo Sapiens
aacugagcaguuaggauguaaauauacauaag

SEQ ID NO: 119131 - RNA, 32 nt, Homo Sapiens
cguauugaccucuggaagaagacagacacuuu

SEQ ID NO: 119132 - RNA, 32 nt, Homo Sapiens
cacugcacuccagccuaggugauagagcaaga

SEQ ID NO: 119133 - RNA, 32 nt, Homo Sapiens
uuguguaaagauguuuuguaaaacaaaauugu

SEQ ID NO: 119134 - RNA, 32 nt, Homo Sapiens
ggaggaccgggagcuggcucuggaggcugcgg

SEQ ID NO: 119135 - RNA, 32 nt, Homo Sapiens
ucuguugacagaccucuuucuuucaaacuugu

SEQ ID NO: 119136 - RNA, 32 nt, Homo Sapiens
acaggucucgcacccacaaguacuaucugcug

SEQ ID NO: 119137 - RNA, 32 nt, Homo Sapiens
uuagggucagccagaccgugggcuugcuuugg

SEQ ID NO: 119138 - RNA, 32 nt, Homo Sapiens
ucaccagcugucugcuggguucuuuucucaag

SEQ ID NO: 119139 - RNA, 32 nt, Homo Sapiens
aagccucgcuccugggggcgcugcugggaaag

SEQ ID NO: 119140 - RNA, 32 nt, Homo Sapiens
cagucccggggcucccaagggccugugaccga

SEQ ID NO: 119141 - RNA, 32 nt, Homo Sapiens
gucccccgcgcgcaugcgcgcgccccugaagc

SEQ ID NO: 119142 - RNA, 32 nt, Homo Sapiens
gugugggccccggcggcggcggcguggagcag

SEQ ID NO: 119143 - RNA, 32 nt, Homo Sapiens
auuuucugacacacugauggcaugugacuugu

SEQ ID NO: 119144 - RNA, 32 nt, Homo Sapiens
auccugaaggugaaauauauucucuucaauua

SEQ ID NO: 119145 - RNA, 32 nt, Homo Sapiens
ggucagauggauugcaguuugauuccagcuaa

SEQ ID NO: 119146 - RNA, 32 nt, Homo Sapiens
ccguccgcggggcuguggcugcugcugugcau

SEQ ID NO: 119147 - RNA, 32 nt, Homo Sapiens
ccugacaucccaugaugccccucuacuucacu

SEQ ID NO: 119148 - RNA, 32 nt, Homo Sapiens
cgugccgccccagccgcugccgccugcaccgg

SEQ ID NO: 119149 - RNA, 32 nt, Homo Sapiens
ucccgggaaggguggggcgcucggcucuuggg

SEQ ID NO: 119150 - RNA, 32 nt, Homo Sapiens
ucaaggcaguguuccuggaggcucccaucagg

SEQ ID NO: 119151 - RNA, 32 nt, Homo Sapiens
cauggugguuugcugcaccuaucaacccauua

SEQ ID NO: 119152 - RNA, 32 nt, Homo Sapiens
gacucagccagcuccuucccagcccagccucu

SEQ ID NO: 119153 - RNA, 32 nt, Homo Sapiens
gacuguuggugacuccuuccccggcccccaca

SEQ ID NO: 119154 - RNA, 32 nt, Homo Sapiens
uaugauaucuauauuucaaucauggaccaaaa

SEQ ID NO: 119155 - RNA, 32 nt, Homo Sapiens
gucgggucgcggcaggaugguugccucgcauu

SEQ ID NO: 119156 - RNA, 32 nt, Homo Sapiens
ggacaugugucucccccaugggucaguuuggg

SEQ ID NO: 119157 - RNA, 32 nt, Homo Sapiens
gugaccccauccccacaauuaauuuaaaauga

SEQ ID NO: 119158 - RNA, 32 nt, Homo Sapiens
uucauaaacacuuuccacauagaaaauagauu

SEQ ID NO: 119159 - RNA, 32 nt, Homo Sapiens
guucuuuuuuaaaaccuauuauuguuuagugu

SEQ ID NO: 119160 - RNA, 32 nt, Homo Sapiens
gucuagagugggugugggggcuggcagguggg

SEQ ID NO: 119161 - RNA, 32 nt, Homo Sapiens
cuucuuuucuucaugugcuauuuuauacaaga

SEQ ID NO: 119162 - RNA, 32 nt, Homo Sapiens
auuaggccugacguuaaagggcuuucaacgcu

SEQ ID NO: 119163 - RNA, 32 nt, Homo Sapiens
gggcgaugcacagguaggagcuggcagugcag

SEQ ID NO: 119164 - RNA, 32 nt, Homo Sapiens
cggccggggagggacuggagcggcaggaccuc

SEQ ID NO: 119165 - RNA, 32 nt, Homo Sapiens
uaaaccuguggagaaguggagaucugaauuug

SEQ ID NO: 119166 - RNA, 30 nt, Homo Sapiens
gcagcuuccgauaggaccugcccagauuuc

SEQ ID NO: 119167 - RNA, 32 nt, Homo Sapiens
uacacucgcucuuucucuccgguacacacagc

SEQ ID NO: 119168 - RNA, 32 nt, Homo Sapiens
uccgcccccuccccucccccgccgccucgcag

SEQ ID NO: 119169 - RNA, 32 nt, Homo Sapiens
gggggcagcgaggauggacagauuccugguga

SEQ ID NO: 119170 - RNA, 32 nt, Homo Sapiens
auccuuaauuuaauuaauuaucauaugcuuuu

SEQ ID NO: 119171 - RNA, 30 nt, Homo Sapiens
ucugggcuggacuguuuuguauaacuguac

SEQ ID NO: 119172 - RNA, 32 nt, Homo Sapiens
agggggaaaaggagaaugaugaugauaguuuc

SEQ ID NO: 119173 - RNA, 32 nt, Homo Sapiens
cgaugacgaugaugaugaugacuauugcuaug

SEQ ID NO: 119174 - RNA, 32 nt, Homo Sapiens
caaaugucauuuagugcuuuucaccaauccca

SEQ ID NO: 119175 - RNA, 32 nt, Homo Sapiens
cuaaucccuuucagcacccccacuccauuccc

SEQ ID NO: 119176 - RNA, 32 nt, Homo Sapiens
cacuuggaggucggcaggacauauucuguugc

SEQ ID NO: 119177 - RNA, 32 nt, Homo Sapiens
gacauuccaucccaagcuucucccuuacccac

SEQ ID NO: 119178 - RNA, 32 nt, Homo Sapiens
cuggaaggggagacagagguggaggguggcac

SEQ ID NO: 119179 - RNA, 32 nt, Homo Sapiens
agugccccccaaacccagcagucaugucgcga

SEQ ID NO: 119180 - RNA, 32 nt, Homo Sapiens
uaagguuccuccaugucuuuuugugacuugau

SEQ ID NO: 119181 - RNA, 32 nt, Homo Sapiens
ucaucuuuucuuuuuuaauuaagucagauuau

SEQ ID NO: 119182 - RNA, 32 nt, Homo Sapiens
agccacagcucuucuuggcguauuuauacuca

SEQ ID NO: 119183 - RNA, 32 nt, Homo Sapiens
augugaauuaccucuuguuucuuucaccuuug

SEQ ID NO: 119184 - RNA, 32 nt, Homo Sapiens
cgccuccuucggcuccuccucggaauagcucg

SEQ ID NO: 119185 - RNA, 32 nt, Homo Sapiens
gcucaagaggccgagguugcagugagccguga

SEQ ID NO: 119186 - RNA, 32 nt, Homo Sapiens
gcuauuuugugcuugaucuuuauugucuaaga

SEQ ID NO: 119187 - RNA, 32 nt, Homo Sapiens
cgcaggccuuaccauggaaggcugugacucgc

SEQ ID NO: 119188 - RNA, 32 nt, Homo Sapiens
ugcagguuugguuuuuucucauuugucugugg

SEQ ID NO: 119189 - RNA, 32 nt, Homo Sapiens
uauuuuauuuuuauuguaaaucuuagugugga

SEQ ID NO: 119190 - RNA, 32 nt, Homo Sapiens
uccucuaccucucuccucuccgcgcccuccga

SEQ ID NO: 119191 - RNA, 32 nt, Homo Sapiens
aucuaacaucuuggggggaaagaauauuuuga

SEQ ID NO: 119192 - RNA, 32 nt, Homo Sapiens
gcaccucauuuucuuuugccugcuguuaaaga

SEQ ID NO: 119193 - RNA, 32 nt, Homo Sapiens
cuuuugaucuguugcacagcauggugacuaua

SEQ ID NO: 119194 - RNA, 32 nt, Homo Sapiens
cggguguuggcccuuguaugcacaugugugag

SEQ ID NO: 119195 - RNA, 32 nt, Homo Sapiens
uugcacgaugucucaaccaacaucugacaucu

SEQ ID NO: 119196 - RNA, 32 nt, Homo Sapiens
gaaguagaacagaaucgccacaggacuguucu

SEQ ID NO: 119197 - RNA, 32 nt, Homo Sapiens
cuggagggaaaggauaggcuguugcucuaucu

SEQ ID NO: 119198 - RNA, 32 nt, Homo Sapiens
cagcgaaggagcgcgcgggcggucuggccccg

SEQ ID NO: 119199 - RNA, 32 nt, Homo Sapiens
ccaggguccuucugcuggugcccuccgaccau

SEQ ID NO: 119200 - RNA, 32 nt, Homo Sapiens
gacagcgguggcggcuccucggggugcucggc

SEQ ID NO: 119201 - RNA, 30 nt, Homo Sapiens
caacgccucgguggcauacagacuggggac

SEQ ID NO: 119202 - RNA, 32 nt, Homo Sapiens
gcccccacccccacccccacauucugaagaua

SEQ ID NO: 119203 - RNA, 32 nt, Homo Sapiens
cuccaggcugauccugaggccuggacaaaugg

SEQ ID NO: 119204 - RNA, 32 nt, Homo Sapiens
guggccccacuuuccuuuuucuuccuccucca

SEQ ID NO: 119205 - RNA, 32 nt, Homo Sapiens
ugagggaggcggaucacuugaggucaggaguu

SEQ ID NO: 119206 - RNA, 32 nt, Homo Sapiens
auuuucuaaaauuauuggauuuguauuuuguu

SEQ ID NO: 119207 - RNA, 32 nt, Homo Sapiens
agugccgggcaggagcauggggugcuugguug

SEQ ID NO: 119208 - RNA, 32 nt, Homo Sapiens
uuugcgaaaaggaaaacauuucaagucauaga

SEQ ID NO: 119209 - RNA, 32 nt, Homo Sapiens
aguuuuguauaaaucuuuuguguuugagauca

SEQ ID NO: 119210 - RNA, 32 nt, Homo Sapiens
uccagccugugugggggccgucccgucccaca

SEQ ID NO: 119211 - RNA, 32 nt, Homo Sapiens
ccccuggcgggggaggcugggagcugggccuc

SEQ ID NO: 119212 - RNA, 32 nt, Homo Sapiens
gcauuuauuuuaaaggucagaauuuuacucuu

SEQ ID NO: 119213 - RNA, 32 nt, Homo Sapiens
auucuucuccuccuccuugcguagaaguugau

SEQ ID NO: 119214 - RNA, 32 nt, Homo Sapiens
ucaguauccacgcacuauaaagaauauagacu

SEQ ID NO: 119215 - RNA, 32 nt, Homo Sapiens
agcagaugugucgggccuggugagagggugag

SEQ ID NO: 119216 - RNA, 32 nt, Homo Sapiens
uguugggagcccauuguauuaggccguucuug

SEQ ID NO: 119217 - RNA, 32 nt, Homo Sapiens
guagggagccgaucgcccauggagggucuggg

SEQ ID NO: 119218 - RNA, 31 nt, Homo Sapiens
aauguggauacuuuguucagagccugucuuu

SEQ ID NO: 119219 - RNA, 32 nt, Homo Sapiens
gccacccgcccuccgugcgcucugccaccggg

SEQ ID NO: 119220 - RNA, 32 nt, Homo Sapiens
ugcagguggggugauggccagaggaaugaugg

SEQ ID NO: 119221 - RNA, 32 nt, Homo Sapiens
uaaugcauacagaaauauaauaaaauguguug

SEQ ID NO: 119222 - RNA, 32 nt, Homo Sapiens
gugggacagucugucauuuauuuuauuuuauu

SEQ ID NO: 119223 - RNA, 32 nt, Homo Sapiens
gcggaguccccugcgcgggaccaucuggaauu

SEQ ID NO: 119224 - RNA, 32 nt, Homo Sapiens
cuggccgccccucccuccgacgaucggggacc

SEQ ID NO: 119225 - RNA, 32 nt, Homo Sapiens
uggagaugggauggggaaaaauacugauucug

SEQ ID NO: 119226 - RNA, 32 nt, Homo Sapiens
gcuuugggggcccuuccgcggcagccccgggg

SEQ ID NO: 119227 - RNA, 32 nt, Homo Sapiens
gucggcgagugguuugcguccgugacaucauc

SEQ ID NO: 119228 - RNA, 32 nt, Homo Sapiens
acugcccuugaacacucuuacaaaagaaaguu

SEQ ID NO: 119229 - RNA, 32 nt, Homo Sapiens
caagaguuuccacauaaucccaaaaaacccua

SEQ ID NO: 119230 - RNA, 32 nt, Homo Sapiens
acagaugagggugugacuggcccgaggucacg

SEQ ID NO: 119231 - RNA, 32 nt, Homo Sapiens
agagaaauaauuuuauucauugacucuuuaug

SEQ ID NO: 119232 - RNA, 32 nt, Homo Sapiens
guuaauuggagguuauuuuauuuuugguuguc

SEQ ID NO: 119233 - RNA, 32 nt, Homo Sapiens
ugaucgcagaccgggggugcugccaccucugu

SEQ ID NO: 119234 - RNA, 32 nt, Homo Sapiens
cacuugaccucggguggaagccaggcucuuug

SEQ ID NO: 119235 - RNA, 32 nt, Homo Sapiens
caaucaaagggagagaggguguaucggguccu

SEQ ID NO: 119236 - RNA, 32 nt, Homo Sapiens
agccccaagauggugaugcugcugcugcugcu

SEQ ID NO: 119237 - RNA, 32 nt, Homo Sapiens
ugccugauagaguguuuauaaacaugucaugg

SEQ ID NO: 119238 - RNA, 32 nt, Homo Sapiens
uaaaaguguaugccgaauaccuuaaaguaacu

SEQ ID NO: 119239 - RNA, 32 nt, Homo Sapiens
agcgacugcccggcucgcgccgccucgcgcuc

SEQ ID NO: 119240 - RNA, 32 nt, Homo Sapiens
gacaugauuagaggaauucuuuuuuaguauga

SEQ ID NO: 119241 - RNA, 32 nt, Homo Sapiens
uugugcuucugaauuaaccaauccaggaacug

SEQ ID NO: 119242 - RNA, 32 nt, Homo Sapiens
cugagauagugccucugcacuccagccugcgu

SEQ ID NO: 119243 - RNA, 32 nt, Homo Sapiens
guccuucccguccagccccagcccugggccug

SEQ ID NO: 119244 - RNA, 32 nt, Homo Sapiens
caguggcacaaucuuggcucgcugcaaccuuc

SEQ ID NO: 119245 - RNA, 31 nt, Homo Sapiens
cccagguggcacugccaggugcguagacaga

SEQ ID NO: 119246 - RNA, 30 nt, Homo Sapiens
gggaagggcaggcgcgcugggccuugggga

SEQ ID NO: 119247 - RNA, 32 nt, Homo Sapiens
gacuggugcagggaggcaaggcccacauucuc

SEQ ID NO: 119248 - RNA, 32 nt, Homo Sapiens
uauuacuuaugggaguccaacuucuccuuuug

SEQ ID NO: 119249 - RNA, 32 nt, Homo Sapiens
accauaauaaauaaaauggcagcaaauuagga

SEQ ID NO: 119250 - RNA, 32 nt, Homo Sapiens
guguaggcaacgccggugcgcggcuguguggg

SEQ ID NO: 119251 - RNA, 32 nt, Homo Sapiens
agcucucugcaucuacucccaaguaugggguu

SEQ ID NO: 119252 - RNA, 32 nt, Homo Sapiens
uguaccucaauccacauuacagccaugcuccu

SEQ ID NO: 119253 - RNA, 32 nt, Homo Sapiens
agacucgagaacagguccugaugugacaaccu

SEQ ID NO: 119254 - RNA, 32 nt, Homo Sapiens
cagcagacccucacacagaaaaguaccucgaa

SEQ ID NO: 119255 - RNA, 32 nt, Homo Sapiens
cagcccauuuucugccgugaaaccccagccag

SEQ ID NO: 119256 - RNA, 32 nt, Homo Sapiens
aacaguaaaaauuaauauaauauuuuccccac

SEQ ID NO: 119257 - RNA, 32 nt, Homo Sapiens
cuugcccaacucccagccaccaccacuguccc

SEQ ID NO: 119258 - RNA, 32 nt, Homo Sapiens
cagccgccaagccccuccaggcuuugcugagg

SEQ ID NO: 119259 - RNA, 32 nt, Homo Sapiens
ccagguaagggaaagccucagcuccuuccguu

SEQ ID NO: 119260 - RNA, 32 nt, Homo Sapiens
uuuggaaaggauuaaucgagaacuggguucag

SEQ ID NO: 119261 - RNA, 32 nt, Homo Sapiens
gcgacggcggggggaagauggcggaguccggc

SEQ ID NO: 119262 - RNA, 32 nt, Homo Sapiens
auaaaacaagauauacuggaaagaaacauuuc

SEQ ID NO: 119263 - RNA, 32 nt, Homo Sapiens
cuggcuggcuucgccaggcuguguguaggcga

SEQ ID NO: 119264 - RNA, 32 nt, Homo Sapiens
accuggucccaccaccuggcgucuccgcuccc

SEQ ID NO: 119265 - RNA, 32 nt, Homo Sapiens
agacgcggaggcccgggcgcuccagaccagug

SEQ ID NO: 119266 - RNA, 32 nt, Homo Sapiens
ugauuccccgcucgcgacuccccaccccccag

SEQ ID NO: 119267 - RNA, 32 nt, Homo Sapiens
uguccggccgcggcgcuggcuuaagccauggc

SEQ ID NO: 119268 - RNA, 32 nt, Homo Sapiens
auuguaaauguugggcuuuguauuuugaugua

SEQ ID NO: 119269 - RNA, 29 nt, Homo Sapiens
caucgucggggacaucaggcccugacagu

SEQ ID NO: 119270 - RNA, 32 nt, Homo Sapiens
aguggggucaggugccugcagcgcucggcacu

SEQ ID NO: 119271 - RNA, 32 nt, Homo Sapiens
auguucaaggaccuuugccauaguucagcuaa

SEQ ID NO: 119272 - RNA, 32 nt, Homo Sapiens
acagccgcccccagccugcugcccccagcuuu

SEQ ID NO: 119273 - RNA, 32 nt, Homo Sapiens
aggcccgggaugccgcggaucuggcguugcag

SEQ ID NO: 119274 - RNA, 32 nt, Homo Sapiens
uuagucuuuucucuuacuggcuucagccagau

SEQ ID NO: 119275 - RNA, 32 nt, Homo Sapiens
ggccugggugaccccugcagaagcuucugagc

SEQ ID NO: 119276 - RNA, 32 nt, Homo Sapiens
aaugggaacugcuuuuaaaucuguaaauagcu

SEQ ID NO: 119277 - RNA, 32 nt, Homo Sapiens
gggcccccacuuucaccaguuucugcggccuu

SEQ ID NO: 119278 - RNA, 32 nt, Homo Sapiens
ccuuggcucaggugcugucucuucuacucucc

SEQ ID NO: 119279 - RNA, 32 nt, Homo Sapiens
cugugaucgcuuuugccugggaccacuuccuc

SEQ ID NO: 119280 - RNA, 32 nt, Homo Sapiens
agaccccgcggcgcgcuccggucgacgccggg

SEQ ID NO: 119281 - RNA, 32 nt, Homo Sapiens
gcaaaggcuucucgcucaccgcgcucgaggcc

SEQ ID NO: 119282 - RNA, 32 nt, Homo Sapiens
aaaacaaccgccugacuucccgagggcuccca

SEQ ID NO: 119283 - RNA, 31 nt, Homo Sapiens
ccgggucaguccacccugccccgcccacuuu

SEQ ID NO: 119284 - RNA, 32 nt, Homo Sapiens
agaagcaaacuccaaagucuuggacaccuucc

SEQ ID NO: 119285 - RNA, 32 nt, Homo Sapiens
cugaaucauaucuaguugaaugcauguuuaaa

SEQ ID NO: 119286 - RNA, 26 nt, Homo Sapiens
ucaaauaaauaaaaacuaugguaugu

SEQ ID NO: 119287 - RNA, 32 nt, Homo Sapiens
gcccuugagauuugaggccuuggagacucaga

SEQ ID NO: 119288 - RNA, 32 nt, Homo Sapiens
gucuucagaaauuguuuccugugaauucugug

SEQ ID NO: 119289 - RNA, 32 nt, Homo Sapiens
gaagugucuggucaagauaacaugcuggccaa

SEQ ID NO: 119290 - RNA, 32 nt, Homo Sapiens
ucugccccucgagagccaagcgcggacgguag

SEQ ID NO: 119291 - RNA, 32 nt, Homo Sapiens
ucaguagagcagccuucggaguaagggcuaaa

SEQ ID NO: 119292 - RNA, 32 nt, Homo Sapiens
gcaccugucaucccagcuacucgggaggcuga

SEQ ID NO: 119293 - RNA, 32 nt, Homo Sapiens
aaagcuuuucuuuuuuaauuuccaggaaaaaa

SEQ ID NO: 119294 - RNA, 32 nt, Homo Sapiens
uggcguugggcacggaucauggccucgcagaa

SEQ ID NO: 119295 - RNA, 32 nt, Homo Sapiens
auagaaagaacuccuguauaaaaaauaaauuc

SEQ ID NO: 119296 - RNA, 32 nt, Homo Sapiens
uauuaagaaaagacuguaaaucuggaauaaug

SEQ ID NO: 119297 - RNA, 32 nt, Homo Sapiens
caucaacacauugcuuaaaaugaugaaaccaa

SEQ ID NO: 119298 - RNA, 32 nt, Homo Sapiens
cuuaugccauuggccugggggcccucacagcc

SEQ ID NO: 119299 - RNA, 32 nt, Homo Sapiens
ccgcccucuuuugccagcccagccccuccaug

SEQ ID NO: 119300 - RNA, 32 nt, Homo Sapiens
uauauaacugcagaaagauaaauaucacuuug

SEQ ID NO: 119301 - RNA, 32 nt, Homo Sapiens
agacaguucccucuccaacacaugagucuaua

SEQ ID NO: 119302 - RNA, 32 nt, Homo Sapiens
guuugcccuucagcugagacacaaggaguaga

SEQ ID NO: 119303 - RNA, 32 nt, Homo Sapiens
aauguuagcauuaggaaauaaaauccaaaaga

SEQ ID NO: 119304 - RNA, 32 nt, Homo Sapiens
caggaaugacuucagccuuggggcagcuggcu

SEQ ID NO: 119305 - RNA, 32 nt, Homo Sapiens
ggcugccccgcucccgccccagcgccaucccu

SEQ ID NO: 119306 - RNA, 32 nt, Homo Sapiens
uugagcaguauuuuaaccaacuuguauuacag

SEQ ID NO: 119307 - RNA, 32 nt, Homo Sapiens
accccugugcgcgcguucgcggcggugggcgc

SEQ ID NO: 119308 - RNA, 32 nt, Homo Sapiens
ccaugucccuccuaucucuguugaacuuauga

SEQ ID NO: 119309 - RNA, 32 nt, Homo Sapiens
uugaggugucuuuucuuuuucuuucuuuaguu

SEQ ID NO: 119310 - RNA, 32 nt, Homo Sapiens
auggaauugcugaccccuggaacuggcgggua

SEQ ID NO: 119311 - RNA, 32 nt, Homo Sapiens
cuccgcgggcgcaggaaggcgagcagagauau

SEQ ID NO: 119312 - RNA, 32 nt, Homo Sapiens
auuccaucccuaagggacccccagcaggcccc

SEQ ID NO: 119313 - RNA, 32 nt, Homo Sapiens
ugagagggacacugaggcucauggagaugaca

SEQ ID NO: 119314 - RNA, 32 nt, Homo Sapiens
ggcagguguagccagggcuggggaugugcuuu

SEQ ID NO: 119315 - RNA, 32 nt, Homo Sapiens
ccugagcuccgggggucgucgccccgcaggga

SEQ ID NO: 119316 - RNA, 32 nt, Homo Sapiens
augauggaaaucaauugcuuccauugacaaaa

SEQ ID NO: 119317 - RNA, 32 nt, Homo Sapiens
uccucugcccaugcaguccccagcugccacug

SEQ ID NO: 119318 - RNA, 32 nt, Homo Sapiens
ucacugauuucugaaucauguucuaguugcuu

SEQ ID NO: 119319 - RNA, 32 nt, Homo Sapiens
cacaccuuuucucugcugugaauggagauuuc

SEQ ID NO: 119320 - RNA, 32 nt, Homo Sapiens
ugauugcuguuuuacauaaaaucuaugggaac

SEQ ID NO: 119321 - RNA, 32 nt, Homo Sapiens
guggaauccauuaugaagugcaauuagauaga

SEQ ID NO: 119322 - RNA, 29 nt, Homo Sapiens
acaaaggcuguuccgccgccggccgcaca

SEQ ID NO: 119323 - RNA, 32 nt, Homo Sapiens
gugcucucacccucccuucucucccucaauaa

SEQ ID NO: 119324 - RNA, 32 nt, Homo Sapiens
cauugucaauuuugccgguucaucucucaaga

SEQ ID NO: 119325 - RNA, 32 nt, Homo Sapiens
cagcccuaucuggagacagcgaauacagcaaa

SEQ ID NO: 119326 - RNA, 32 nt, Homo Sapiens
aacccuaugugguugggaccauuauuaugcuc

SEQ ID NO: 119327 - RNA, 29 nt, Homo Sapiens
agacaugcugaauuccacgggcgaacugg

SEQ ID NO: 119328 - RNA, 32 nt, Homo Sapiens
uaaccuguacaguaauagauuaugaaggauga

SEQ ID NO: 119329 - RNA, 32 nt, Homo Sapiens
guucucacacugaccacccauccauucaccag

SEQ ID NO: 119330 - RNA, 32 nt, Homo Sapiens
gacucaacaggggacagcguccuggccagggu

SEQ ID NO: 119331 - RNA, 32 nt, Homo Sapiens
aagggcuuucuccugcuucugucacccugugc

SEQ ID NO: 119332 - RNA, 32 nt, Homo Sapiens
cguugaguguggaaaaucauuucgccgaagcu

SEQ ID NO: 119333 - RNA, 32 nt, Homo Sapiens
ucccauccuugaccacagggacaagaggggcc

SEQ ID NO: 119334 - RNA, 32 nt, Homo Sapiens
cagcugcacgacuguugcucauuuuuccaaaa

SEQ ID NO: 119335 - RNA, 32 nt, Homo Sapiens
caaccggggacagucaccccccugcucgggga

SEQ ID NO: 119336 - RNA, 32 nt, Homo Sapiens
agauagcaccucacccccauuaagaaggcuuu

SEQ ID NO: 119337 - RNA, 32 nt, Homo Sapiens
ccgcauuguauccaugggauuucuaaaaguac

SEQ ID NO: 119338 - RNA, 32 nt, Homo Sapiens
agugaacacacgcuuucugguucuaguaaucc

SEQ ID NO: 119339 - RNA, 32 nt, Homo Sapiens
ggaguucaccccagggccccagagggccucau

SEQ ID NO: 119340 - RNA, 32 nt, Homo Sapiens
uggagccccgggccugggcgccaggugggcuc

SEQ ID NO: 119341 - RNA, 28 nt, Homo Sapiens
cacagaaaguuggcuauuauaaagauga

SEQ ID NO: 119342 - RNA, 29 nt, Homo Sapiens
ccaaaaccaaaauaaaacugggucacuuu

SEQ ID NO: 119343 - RNA, 32 nt, Homo Sapiens
ugaauuugauucagguauauuucuucauagcu

SEQ ID NO: 119344 - RNA, 32 nt, Homo Sapiens
acccaggaguccagccccuccucccucagacc

SEQ ID NO: 119345 - RNA, 30 nt, Homo Sapiens
aaucauucuugcggcggcgggucgaacacg

SEQ ID NO: 119346 - RNA, 32 nt, Homo Sapiens
ugcgagccccgcugcgccgcgcccuguccccu

SEQ ID NO: 119347 - RNA, 32 nt, Homo Sapiens
ggggccgugcccaggggcccacagggaacccu

SEQ ID NO: 119348 - RNA, 32 nt, Homo Sapiens
guccgcggguccguggagcuggagcagauccc

SEQ ID NO: 119349 - RNA, 31 nt, Homo Sapiens
agcccucaggagcccuccagagccuguggga

SEQ ID NO: 119350 - RNA, 32 nt, Homo Sapiens
ugggauuccaccgcaguacaaccggguagaug

SEQ ID NO: 119351 - RNA, 32 nt, Homo Sapiens
guauguggcuuuguaaauuaaaguauaggcaa

SEQ ID NO: 119352 - RNA, 32 nt, Homo Sapiens
auguggacacauccggcccuugaaagaaccag

SEQ ID NO: 119353 - RNA, 32 nt, Homo Sapiens
accuaaucaagguuuggaucugcaccacaacu

SEQ ID NO: 119354 - RNA, 32 nt, Homo Sapiens
cugccggggcugggcccggccgcgggaaggac

SEQ ID NO: 119355 - RNA, 32 nt, Homo Sapiens
ccacauuuguggcacauccuuucaggauguau

SEQ ID NO: 119356 - RNA, 32 nt, Homo Sapiens
ugagaagguccuuaaugauccguuccauugca

SEQ ID NO: 119357 - RNA, 32 nt, Homo Sapiens
cgcugguugugggcuuucugcggccgcugagg

SEQ ID NO: 119358 - RNA, 32 nt, Homo Sapiens
ccaggccccccgcccugccccucgguucugcu

SEQ ID NO: 119359 - RNA, 32 nt, Homo Sapiens
aacagguagcauagcucuguacaucuuuuaaa

SEQ ID NO: 119360 - RNA, 32 nt, Homo Sapiens
guccuuuuacacacuuuguacaaguuacuucu

SEQ ID NO: 119361 - RNA, 32 nt, Homo Sapiens
caucucggggagagcgaagggugaggcugggc

SEQ ID NO: 119362 - RNA, 32 nt, Homo Sapiens
auauucuguaacaugaaacuuaccuaaucuuc

SEQ ID NO: 119363 - RNA, 32 nt, Homo Sapiens
auuaaaggcuuagcauuuaaguagcaacauug

SEQ ID NO: 119364 - RNA, 32 nt, Homo Sapiens
uccucaugaaucucucaauuauaggaaaaguu

SEQ ID NO: 119365 - RNA, 32 nt, Homo Sapiens
uuaaauaccugucuuaaccuccugcuuuucuu

SEQ ID NO: 119366 - RNA, 32 nt, Homo Sapiens
gaagcgugagguggagaugggggcggagggag

SEQ ID NO: 119367 - RNA, 32 nt, Homo Sapiens
ucaucugcuccuuuuccauccccugacauacc

SEQ ID NO: 119368 - RNA, 32 nt, Homo Sapiens
cuguuagguuccugggguacgggucccucaaa

SEQ ID NO: 119369 - RNA, 32 nt, Homo Sapiens
cacugacacacacccauugggucacacccccu

SEQ ID NO: 119370 - RNA, 32 nt, Homo Sapiens
auuagagaucauuuacauuuuaaaagauacuu

SEQ ID NO: 119371 - RNA, 32 nt, Homo Sapiens
ccucgagggucgucucugcugggcgcgaaccu

SEQ ID NO: 119372 - RNA, 32 nt, Homo Sapiens
gcugcgcggagcagggaccaggcgguugcggc

SEQ ID NO: 119373 - RNA, 32 nt, Homo Sapiens
auguccugccccaccaagcccugucugaagug

SEQ ID NO: 119374 - RNA, 32 nt, Homo Sapiens
cuuccaugaagaugaggaucccauaggcuccc

SEQ ID NO: 119375 - RNA, 32 nt, Homo Sapiens
ggaaaaacccgucaauguacuaggguacugcu

SEQ ID NO: 119376 - RNA, 31 nt, Homo Sapiens
cagaagcagcgcacagugccaggggcgagug

SEQ ID NO: 119377 - RNA, 32 nt, Homo Sapiens
uguuaacuucuaugauuuaugauaaucaagcu

SEQ ID NO: 119378 - RNA, 32 nt, Homo Sapiens
aaacugcagaacuuagaauuuguacuuuuugu

SEQ ID NO: 119379 - RNA, 32 nt, Homo Sapiens
cgacagugccauccccaccuucaccucggagg

SEQ ID NO: 119380 - RNA, 32 nt, Homo Sapiens
gagugaugucucugcccuuccucuagccucuu

SEQ ID NO: 119381 - RNA, 32 nt, Homo Sapiens
cuuucuccagugccgccaucugucuucugugu

SEQ ID NO: 119382 - RNA, 32 nt, Homo Sapiens
ggcuggcuacuuguuuucccucaugauaauaa

SEQ ID NO: 119383 - RNA, 32 nt, Homo Sapiens
gaaugaaugaggaugccuugaauguguggcca

SEQ ID NO: 119384 - RNA, 32 nt, Homo Sapiens
cucggcaccaugcccccucccccgggcgcucc

SEQ ID NO: 119385 - RNA, 32 nt, Homo Sapiens
aaguagaaauuuaugaaauacuuuugauaaaa

SEQ ID NO: 119386 - RNA, 32 nt, Homo Sapiens
aggguggggucuggucacacacagguguugaa

SEQ ID NO: 119387 - RNA, 32 nt, Homo Sapiens
cuuucugcccuucuccccacucccaucugauu

SEQ ID NO: 119388 - RNA, 32 nt, Homo Sapiens
uuugucucauuucuccaaagaauuaaaucaga

SEQ ID NO: 119389 - RNA, 32 nt, Homo Sapiens
agagaucuuguuucuauuagcagguuuucaug

SEQ ID NO: 119390 - RNA, 32 nt, Homo Sapiens
cgacgcccggugccgugggccugggggcugcc

SEQ ID NO: 119391 - RNA, 32 nt, Homo Sapiens
ggaggaguggcaaugccuggacacuucacagc

SEQ ID NO: 119392 - RNA, 32 nt, Homo Sapiens
auccaugagcuguaucuugaucugucugacug

SEQ ID NO: 119393 - RNA, 32 nt, Homo Sapiens
gcaacugcccugcuaguacaagaagcagauaa

SEQ ID NO: 119394 - RNA, 32 nt, Homo Sapiens
gccgucgcccccgaggcccccggacgccucag

SEQ ID NO: 119395 - RNA, 30 nt, Homo Sapiens
acgcuccucuucggcggcggcggcggcggc

SEQ ID NO: 119396 - RNA, 32 nt, Homo Sapiens
cgcagggcgcgagggaucgcgcggccgagccc

SEQ ID NO: 119397 - RNA, 32 nt, Homo Sapiens
ugaggccccaggugcugauuuuuaugcccagg

SEQ ID NO: 119398 - RNA, 32 nt, Homo Sapiens
gacucagcccggugccagcucggagcuugugc

SEQ ID NO: 119399 - RNA, 32 nt, Homo Sapiens
cuucccucuugcggccaucacugaagcaggag

SEQ ID NO: 119400 - RNA, 27 nt, Homo Sapiens
auuaacauuuacuucugguauggaaca

SEQ ID NO: 119401 - RNA, 30 nt, Homo Sapiens
cgccgccagcccgugcgcccucggcgcgua

SEQ ID NO: 119402 - RNA, 32 nt, Homo Sapiens
cgccccuugucacaaugaccuccccgucccac

SEQ ID NO: 119403 - RNA, 32 nt, Homo Sapiens
auuucgugguaugugaauucuaccucaaucaa

SEQ ID NO: 119404 - RNA, 32 nt, Homo Sapiens
uugggcuggggcuggccggggaggggcucaca

SEQ ID NO: 119405 - RNA, 30 nt, Homo Sapiens
uacugguguuuaaugggggaagaauaugaa

SEQ ID NO: 119406 - RNA, 32 nt, Homo Sapiens
gggucccauggcccugagcagugugggccggg

SEQ ID NO: 119407 - RNA, 32 nt, Homo Sapiens
uuagacuaaaagagccaguuuuuaaauaaugg

SEQ ID NO: 119408 - RNA, 32 nt, Homo Sapiens
uaaucgaagagauggagcugguggcuggaccc

SEQ ID NO: 119409 - RNA, 32 nt, Homo Sapiens
cuacggagaccggcgcaaguuccuccuccuug

SEQ ID NO: 119410 - RNA, 32 nt, Homo Sapiens
ggagcaugggcucucaggcugcugcugagugg

SEQ ID NO: 119411 - RNA, 32 nt, Homo Sapiens
cauuuccuuguacagauaauuuugguggcuuu

SEQ ID NO: 119412 - RNA, 32 nt, Homo Sapiens
uuucuuacagucacaauguggaugccauggcu

SEQ ID NO: 119413 - RNA, 32 nt, Homo Sapiens
caugguguauagcaccaaaaaauggagggauu

SEQ ID NO: 119414 - RNA, 32 nt, Homo Sapiens
uuauauaaaauuguuuaaaauaaaaggugucc

SEQ ID NO: 119415 - RNA, 32 nt, Homo Sapiens
cggcauccaccaagcaucaaguuggagaaaag

SEQ ID NO: 119416 - RNA, 32 nt, Homo Sapiens
cccugaaucugugccugcacugagagggcaag

SEQ ID NO: 119417 - RNA, 32 nt, Homo Sapiens
gauccucucacagauagaggucuuaaagguug

SEQ ID NO: 119418 - RNA, 32 nt, Homo Sapiens
agcggaacuuccggcguccgucgggcagcagc

SEQ ID NO: 119419 - RNA, 32 nt, Homo Sapiens
uaauugcuuuaaagugaacuggcauuaaagug

SEQ ID NO: 119420 - RNA, 32 nt, Homo Sapiens
uuuucuaacaacuguggagauuugagggaaug

SEQ ID NO: 119421 - RNA, 32 nt, Homo Sapiens
ucuucccccacagauacacauccaagcucaca

SEQ ID NO: 119422 - RNA, 32 nt, Homo Sapiens
cacacaucucccugcccuucuggcacugaagg

SEQ ID NO: 119423 - RNA, 32 nt, Homo Sapiens
caugagccucaaaaugaauauauccuugaaua

SEQ ID NO: 119424 - RNA, 32 nt, Homo Sapiens
cugaggcaauggcggcagcugcgccgguggcc

SEQ ID NO: 119425 - RNA, 32 nt, Homo Sapiens
ggccguguuccgugucucuggauucaaguccc

SEQ ID NO: 119426 - RNA, 32 nt, Homo Sapiens
ucaucugcuucuuugaaggaguaaauguguuu

SEQ ID NO: 119427 - RNA, 32 nt, Homo Sapiens
cccgcccaccgcccgcugccucaccugcuucg

SEQ ID NO: 119428 - RNA, 32 nt, Homo Sapiens
cggcacccaugguugcguucggucggccuugg

SEQ ID NO: 119429 - RNA, 29 nt, Homo Sapiens
ugugaauaguguuucaaagguauguaguu

SEQ ID NO: 119430 - RNA, 32 nt, Homo Sapiens
uuauuuuauuuuuuaaaaucgauaaugggacu

SEQ ID NO: 119431 - RNA, 31 nt, Homo Sapiens
uacacacaagagguuuauugauguaaaauua

SEQ ID NO: 119432 - RNA, 32 nt, Homo Sapiens
guuggcugcuaucuaauucuuauucuuucauu

SEQ ID NO: 119433 - RNA, 32 nt, Homo Sapiens
ugauucugaccucagcgucuccauggcagcuc

SEQ ID NO: 119434 - RNA, 32 nt, Homo Sapiens
aaaagaaaaugcaguuauauuccuuuuuuauu

SEQ ID NO: 119435 - RNA, 32 nt, Homo Sapiens
agcccuccucuaccugaauccagugcucaacu

SEQ ID NO: 119436 - RNA, 32 nt, Homo Sapiens
cgggacggggagaggaaccugcagucccuacu

SEQ ID NO: 119437 - RNA, 32 nt, Homo Sapiens
uaguacuagaaaguagaauagcaugaaaaacu

SEQ ID NO: 119438 - RNA, 32 nt, Homo Sapiens
auguaaaauucaguauaguuugaaagcggcac

SEQ ID NO: 119439 - RNA, 32 nt, Homo Sapiens
auacuagaaaacaaaaagauguuagaaaaaua

SEQ ID NO: 119440 - RNA, 32 nt, Homo Sapiens
guuuuaugcagaaagguugaaacuauguaaau

SEQ ID NO: 119441 - RNA, 32 nt, Homo Sapiens
aagauguuucuuauauuauuccaaaguuauuu

SEQ ID NO: 119442 - RNA, 32 nt, Homo Sapiens
cuucuaggccccccucaccucccugcccucau

SEQ ID NO: 119443 - RNA, 32 nt, Homo Sapiens
gccccagcaguccccggaugcucugagucagc

SEQ ID NO: 119444 - RNA, 32 nt, Homo Sapiens
agauguggauaugggaaggaccucuuuggagc

SEQ ID NO: 119445 - RNA, 32 nt, Homo Sapiens
cacuaaaaacuguguuugucaugaccuuugua

SEQ ID NO: 119446 - RNA, 32 nt, Homo Sapiens
gcucuccugcuggcugcccuggaggauuucaa

SEQ ID NO: 119447 - RNA, 32 nt, Homo Sapiens
uguuuuuguuauuugcaaaagaucuuguauuc

SEQ ID NO: 119448 - RNA, 27 nt, Homo Sapiens
acgggcccccuuuccagcccccucugc

SEQ ID NO: 119449 - RNA, 32 nt, Homo Sapiens
gcaaacaaaaucaugcacaauggugaaaggug

SEQ ID NO: 119450 - RNA, 32 nt, Homo Sapiens
gauucaaaaccaguuucucuuuucugcauagg

SEQ ID NO: 119451 - RNA, 32 nt, Homo Sapiens
cuggacugaugguugcuuugagcccacaggag

SEQ ID NO: 119452 - RNA, 32 nt, Homo Sapiens
cccgcuucuccuccuccuccuccacaguugcc

SEQ ID NO: 119453 - RNA, 32 nt, Homo Sapiens
cucacugaccagcccagccccauccgcaagcc

SEQ ID NO: 119454 - RNA, 32 nt, Homo Sapiens
ugcaaaacugauaagaagacaagcauuugggg

SEQ ID NO: 119455 - RNA, 32 nt, Homo Sapiens
aauccaaccaacagauccuuaaaaggcaaacu

SEQ ID NO: 119456 - RNA, 32 nt, Homo Sapiens
uuuuuuaauauuuguuuuugcuuguaaucuca

SEQ ID NO: 119457 - RNA, 32 nt, Homo Sapiens
aacauaagcacuuuauacuaaugggucacaaa

SEQ ID NO: 119458 - RNA, 32 nt, Homo Sapiens
ccuggcguggagucuugaggccugcugagggc

SEQ ID NO: 119459 - RNA, 32 nt, Homo Sapiens
cuucacucuccauggagccagagguaguauga

SEQ ID NO: 119460 - RNA, 32 nt, Homo Sapiens
cagagcaaaaauaaaaugucaacuaugguaag

SEQ ID NO: 119461 - RNA, 32 nt, Homo Sapiens
uugaaagggauggcagguuaccaagaguguca

SEQ ID NO: 119462 - RNA, 32 nt, Homo Sapiens
ccacuacaccugacagagacauccucuacuga

SEQ ID NO: 119463 - RNA, 32 nt, Homo Sapiens
aggauguguucccucuuccagcugugggaccg

SEQ ID NO: 119464 - RNA, 32 nt, Homo Sapiens
ucugagccaccucgggaccccagcgcuccugg

SEQ ID NO: 119465 - RNA, 32 nt, Homo Sapiens
agcacucuaccggcggagccaagcccuagaga

SEQ ID NO: 119466 - RNA, 32 nt, Homo Sapiens
aucgucacgcucgcaucuauagauaacggcuc

SEQ ID NO: 119467 - RNA, 32 nt, Homo Sapiens
ccugugcuguuguuugggaaacagggaagcau

SEQ ID NO: 119468 - RNA, 32 nt, Homo Sapiens
gacaguaacauuucauuaaccaaagaaagugg

SEQ ID NO: 119469 - RNA, 32 nt, Homo Sapiens
uuacgaaggcccuggggugggaugggcacugc

SEQ ID NO: 119470 - RNA, 32 nt, Homo Sapiens
gaccucauuuguuaacuguuaaacagaaaaca

SEQ ID NO: 119471 - RNA, 32 nt, Homo Sapiens
caacaccaaggccacaaggggaccccggccua

SEQ ID NO: 119472 - RNA, 32 nt, Homo Sapiens
gugacugcuuuguugaaucagauaguaacaaa

SEQ ID NO: 119473 - RNA, 32 nt, Homo Sapiens
ggguuccccucuauuguuccccuaucauaaga

SEQ ID NO: 119474 - RNA, 32 nt, Homo Sapiens
ggcagcccgacuccggccgcggugcucauuua

SEQ ID NO: 119475 - RNA, 32 nt, Homo Sapiens
auccugugucuuuuggaguacgauguguaagu

SEQ ID NO: 119476 - RNA, 32 nt, Homo Sapiens
uuugcacaaugucuuugguugcaagucauaag

SEQ ID NO: 119477 - RNA, 32 nt, Homo Sapiens
ucuuaugugcuuaaucaaaagauucuaaaauu

SEQ ID NO: 119478 - RNA, 32 nt, Homo Sapiens
uggggcagugaaugcauagaagauauaaaaau

SEQ ID NO: 119479 - RNA, 32 nt, Homo Sapiens
cugucacaagcacaaaucuuucccacuagcca

SEQ ID NO: 119480 - RNA, 32 nt, Homo Sapiens
agacuuguucagugacuguaaacucuaugaaa

SEQ ID NO: 119481 - RNA, 32 nt, Homo Sapiens
uagagacaaggugcccuccgaccccuucuucc

SEQ ID NO: 119482 - RNA, 32 nt, Homo Sapiens
ggccucuccuuuccuuucccugccuggagccu

SEQ ID NO: 119483 - RNA, 32 nt, Homo Sapiens
ggauaugagaaagcaaacuagauggaauaaau

SEQ ID NO: 119484 - RNA, 32 nt, Homo Sapiens
ccagagcggggccagcugcucacccccuuucc

SEQ ID NO: 119485 - RNA, 32 nt, Homo Sapiens
aaucauguuugaauuguuuucucuuauuuuug

SEQ ID NO: 119486 - RNA, 32 nt, Homo Sapiens
gaagauguuccaaggaaguaugcugaaacaga

SEQ ID NO: 119487 - RNA, 32 nt, Homo Sapiens
agaguugugacaacuuccugagggaucuauac

SEQ ID NO: 119488 - RNA, 32 nt, Homo Sapiens
ccuguacuuucaaugaaauugugaucauuucc

SEQ ID NO: 119489 - RNA, 32 nt, Homo Sapiens
acaugggugccccccacccccaguucagucug

SEQ ID NO: 119490 - RNA, 32 nt, Homo Sapiens
guaguguugacaaauaaauaguugcucuucua

SEQ ID NO: 119491 - RNA, 32 nt, Homo Sapiens
uuaucucuuauuucuguucucuaggcuguuau

SEQ ID NO: 119492 - RNA, 32 nt, Homo Sapiens
gcuuggaaaguggaccugugucugugucuguc

SEQ ID NO: 119493 - RNA, 26 nt, Homo Sapiens
cauggguuucggagaccugaaaaguc

SEQ ID NO: 119494 - RNA, 32 nt, Homo Sapiens
aggaagggccugaaagugacacacaggccugc

SEQ ID NO: 119495 - RNA, 32 nt, Homo Sapiens
acgcggcugucaacugugugcgugguaggcau

SEQ ID NO: 119496 - RNA, 32 nt, Homo Sapiens
gugagaucaaggaauuaccaccaaaaaaggag

SEQ ID NO: 119497 - RNA, 32 nt, Homo Sapiens
ucagugacaaggaaaaggaauucuccaaaaag

SEQ ID NO: 119498 - RNA, 32 nt, Homo Sapiens
auggcugcaauaaaaagcauacuuucagacaa

SEQ ID NO: 119499 - RNA, 32 nt, Homo Sapiens
aaaagaaaaaagaugaaaguauuacaaauuua

SEQ ID NO: 119500 - RNA, 32 nt, Homo Sapiens
cauauuaaaaauuaauacauuuuaaaaauuua

SEQ ID NO: 119501 - RNA, 32 nt, Homo Sapiens
accgugccuucuccaccuuccccuccuuuggc

SEQ ID NO: 119502 - RNA, 32 nt, Homo Sapiens
ugucccucugccucagagcucaucucaaguuu

SEQ ID NO: 119503 - RNA, 32 nt, Homo Sapiens
agagcuggucucccaugagugugcuagagcca

SEQ ID NO: 119504 - RNA, 32 nt, Homo Sapiens
accuuguuccaaaaguuucucuaggucccaug

SEQ ID NO: 119505 - RNA, 32 nt, Homo Sapiens
augcuuuagcugcaacuaaaauaaaaaaguua

SEQ ID NO: 119506 - RNA, 32 nt, Homo Sapiens
gucaagggaagccauacacuuuuuguagacau

SEQ ID NO: 119507 - RNA, 32 nt, Homo Sapiens
gucuuccacccaugcauaucaccuacacauuu

SEQ ID NO: 119508 - RNA, 31 nt, Homo Sapiens
caucucaccaggagaaagagccacaucccca

SEQ ID NO: 119509 - RNA, 32 nt, Homo Sapiens
ucuuauuuguggaaacaaaaccaaucuauaca

SEQ ID NO: 119510 - RNA, 32 nt, Homo Sapiens
aucuuuaacaauuugaauauuuguuuuuacaa

SEQ ID NO: 119511 - RNA, 32 nt, Homo Sapiens
augaagcucucuuugcucuuccugcuuucauu

SEQ ID NO: 119512 - RNA, 32 nt, Homo Sapiens
cccucggccccggccgucucagacucaucaaa

SEQ ID NO: 119513 - RNA, 32 nt, Homo Sapiens
ugaggaaugcaguucuuuugcauaagaaaggc

SEQ ID NO: 119514 - RNA, 32 nt, Homo Sapiens
ccggccccggccccgcgcccgccauggagaag

SEQ ID NO: 119515 - RNA, 32 nt, Homo Sapiens
ugucucagcaaccaagggauuguuccugucaa

SEQ ID NO: 119516 - RNA, 30 nt, Homo Sapiens
ggaucugccgauaugggggauaugaagacc

SEQ ID NO: 119517 - RNA, 32 nt, Homo Sapiens
cucggcggcccggcccggcucgacgccaaugg

SEQ ID NO: 119518 - RNA, 29 nt, Homo Sapiens
caaaaugucagccuccaccuccucgcacc

SEQ ID NO: 119519 - RNA, 32 nt, Homo Sapiens
cugguucuuuggauaauggaguucuuguguua

SEQ ID NO: 119520 - RNA, 32 nt, Homo Sapiens
ugggacccuggaggggacccgggaacaguagu

SEQ ID NO: 119521 - RNA, 32 nt, Homo Sapiens
auauguugccaccagcagccucuuuuugugcc

SEQ ID NO: 119522 - RNA, 32 nt, Homo Sapiens
cacuguagauguggaucagauacgaugauuca

SEQ ID NO: 119523 - RNA, 32 nt, Homo Sapiens
gggccgcccucccggcuggagagcucaggugc

SEQ ID NO: 119524 - RNA, 32 nt, Homo Sapiens
caguguuaucugugaaugcacauauuaaaugu

SEQ ID NO: 119525 - RNA, 28 nt, Homo Sapiens
cuccaggggcggcgcccugggucuggaa

SEQ ID NO: 119526 - RNA, 32 nt, Homo Sapiens
uugugccucucagauugcugaagugcugcugg

SEQ ID NO: 119527 - RNA, 32 nt, Homo Sapiens
gugugcugcugagugguacaaaaggaaauagu

SEQ ID NO: 119528 - RNA, 25 nt, Homo Sapiens
augugucuacuauugggggaagagg

SEQ ID NO: 119529 - RNA, 32 nt, Homo Sapiens
gugaccccaagcaccuuagagaccaugggaag

SEQ ID NO: 119530 - RNA, 32 nt, Homo Sapiens
gggacaaaaaucaauuaucucauuaauguuuu

SEQ ID NO: 119531 - RNA, 32 nt, Homo Sapiens
gccagggcuggccuucagcagggugcgccacc

SEQ ID NO: 119532 - RNA, 32 nt, Homo Sapiens
uuggcucacguucugcagcugcacagaagcau

SEQ ID NO: 119533 - RNA, 32 nt, Homo Sapiens
aagugauucuucugcuucagccucccaaagug

SEQ ID NO: 119534 - RNA, 32 nt, Homo Sapiens
gacgcuaagauugcuaccuggacuuucguuga

SEQ ID NO: 119535 - RNA, 32 nt, Homo Sapiens
ccauaguuuauuguuaguaugaacacaacugu

SEQ ID NO: 119536 - RNA, 32 nt, Homo Sapiens
gggaaaucaauuuaaaggaaaguucuauuauc

SEQ ID NO: 119537 - RNA, 32 nt, Homo Sapiens
cucgugggcuccugcucgguguccuuucuuac

SEQ ID NO: 119538 - RNA, 30 nt, Homo Sapiens
agcaaagagaagcaucagucuaacaagcca

SEQ ID NO: 119539 - RNA, 32 nt, Homo Sapiens
agcuuucuuuugcaaaggagaaaauccuugaa

SEQ ID NO: 119540 - RNA, 32 nt, Homo Sapiens
uguuuuuucuucccuuaaccccacucauaugu

SEQ ID NO: 119541 - RNA, 32 nt, Homo Sapiens
uugguuuuacugcuuuuucucugcuuccaguu

SEQ ID NO: 119542 - RNA, 32 nt, Homo Sapiens
cgccgggagccgacgcgccgcgcggguaccua

SEQ ID NO: 119543 - RNA, 32 nt, Homo Sapiens
aucugauagaaagcaaguguuuuuguaugugu

SEQ ID NO: 119544 - RNA, 29 nt, Homo Sapiens
uuuugcuuccucuacggaggcaaguaaca

SEQ ID NO: 119545 - RNA, 32 nt, Homo Sapiens
aacaaguacuguaucucacuuuaaacucuuug

SEQ ID NO: 119546 - RNA, 32 nt, Homo Sapiens
gacucgacaacaacgagguuuauugaaaauuu

SEQ ID NO: 119547 - RNA, 32 nt, Homo Sapiens
gcaucucugaccagaagacaaaggcccaaaua

SEQ ID NO: 119548 - RNA, 32 nt, Homo Sapiens
gccuucccauucucuuagcccguccacucccc

SEQ ID NO: 119549 - RNA, 32 nt, Homo Sapiens
ggguuauucucauuaugacaccuauugcaaau

SEQ ID NO: 119550 - RNA, 32 nt, Homo Sapiens
guccuugcuggcggcccgccacaggcccccuu

SEQ ID NO: 119551 - RNA, 32 nt, Homo Sapiens
uuccagaugcuaguaauugcuuuaacuugagu

SEQ ID NO: 119552 - RNA, 32 nt, Homo Sapiens
uuuuguuaauaaaacacugaaacuucaaaaaa

SEQ ID NO: 119553 - RNA, 32 nt, Homo Sapiens
gaggaaauaaaaacagaacaggaggugguaga

SEQ ID NO: 119554 - RNA, 32 nt, Homo Sapiens
gcuaccccuggggccuucugcaccccggggug

SEQ ID NO: 119555 - RNA, 32 nt, Homo Sapiens
gggauugccugggggacgacuccuagggcugg

SEQ ID NO: 119556 - RNA, 32 nt, Homo Sapiens
uuggaagagaaauuauuuuucagggggucgug

SEQ ID NO: 119557 - RNA, 32 nt, Homo Sapiens
gccauuuaaaauuuauauaaaacaaccuucca

SEQ ID NO: 119558 - RNA, 32 nt, Homo Sapiens
gucucuuuccacucccccauucccugugcuau

SEQ ID NO: 119559 - RNA, 32 nt, Homo Sapiens
caccugcaccccagccuuggccccugccugcg

SEQ ID NO: 119560 - RNA, 32 nt, Homo Sapiens
cauucuucuuauucuagaggucucucuggaaa

SEQ ID NO: 119561 - RNA, 32 nt, Homo Sapiens
gaaaaaugaucaaaaacaaaguaaggugcaca

SEQ ID NO: 119562 - RNA, 32 nt, Homo Sapiens
uggugguaugugccuguagucucagcuacuca

SEQ ID NO: 119563 - RNA, 32 nt, Homo Sapiens
acgccugucaucccagcuacucgguaggcuga

SEQ ID NO: 119564 - RNA, 32 nt, Homo Sapiens
cauuuguuuuugacuucuaugauagucacugc

SEQ ID NO: 119565 - RNA, 32 nt, Homo Sapiens
uccccgccacgaucgucgcugugcuuggugug

SEQ ID NO: 119566 - RNA, 32 nt, Homo Sapiens
cuguuucaaaaauccagucccugaaggcaauc

SEQ ID NO: 119567 - RNA, 32 nt, Homo Sapiens
gcgggaacaccgagaccccccguccuucagcc

SEQ ID NO: 119568 - RNA, 32 nt, Homo Sapiens
ggcuagcgcgcccucgcccagccccgcgcccc

SEQ ID NO: 119569 - RNA, 32 nt, Homo Sapiens
uucuaaaagaacaacugcuuuuuuacaaugcc

SEQ ID NO: 119570 - RNA, 32 nt, Homo Sapiens
ccucuccagaguuuccucucaccuccguguuc

SEQ ID NO: 119571 - RNA, 32 nt, Homo Sapiens
cuugcauguguaaaguuuucauuuucaggggc

SEQ ID NO: 119572 - RNA, 32 nt, Homo Sapiens
ugagggcugcauuggggucuucugccuagggg

SEQ ID NO: 119573 - RNA, 32 nt, Homo Sapiens
acguccuugaguuggggcagagguggggaugu

SEQ ID NO: 119574 - RNA, 32 nt, Homo Sapiens
ggagugugaaauuugauacauguauauaaugu

SEQ ID NO: 119575 - RNA, 32 nt, Homo Sapiens
caucggcucccucuauccuuugcaacccccua

SEQ ID NO: 119576 - RNA, 29 nt, Homo Sapiens
uguuuuauaaugaugucuuagagggacug

SEQ ID NO: 119577 - RNA, 32 nt, Homo Sapiens
aaaaacaaaagcucagaggccuugagggauau

SEQ ID NO: 119578 - RNA, 32 nt, Homo Sapiens
uaaaaaugaaagcucaaaauggcuaggugaua

SEQ ID NO: 119579 - RNA, 32 nt, Homo Sapiens
ccaaugcugggaggaggcucagacagcaggaa

SEQ ID NO: 119580 - RNA, 32 nt, Homo Sapiens
caacaggacauauguuuccauguguugcuaag

SEQ ID NO: 119581 - RNA, 32 nt, Homo Sapiens
uccucuuuuuaaaccuuuacuuauagcuagaa

SEQ ID NO: 119582 - RNA, 32 nt, Homo Sapiens
cugagcagacagagacaucuuggccugucccu

SEQ ID NO: 119583 - RNA, 32 nt, Homo Sapiens
auucaauaucucggggaaaucaucucuaggug

SEQ ID NO: 119584 - RNA, 32 nt, Homo Sapiens
cccaaagcagugcaugcugucccuuacgugag

SEQ ID NO: 119585 - RNA, 32 nt, Homo Sapiens
aagacugguggaaagcacaucagaagaauaag

SEQ ID NO: 119586 - RNA, 32 nt, Homo Sapiens
ccgguagcugcgucgcccgagccccgggagag

SEQ ID NO: 119587 - RNA, 32 nt, Homo Sapiens
cuaguaaaaucagaagcucaccaaagcaaaaa

SEQ ID NO: 119588 - RNA, 32 nt, Homo Sapiens
ucucaaaaacuuccauuaaucuuaccuccugg

SEQ ID NO: 119589 - RNA, 32 nt, Homo Sapiens
ugggucacaacacugacaaaggggacaauauc

SEQ ID NO: 119590 - RNA, 32 nt, Homo Sapiens
auuaaacaaaaauuagcuuacaaaaaaaaaaa

SEQ ID NO: 119591 - RNA, 32 nt, Homo Sapiens
uaucagcaacuaaaagucuaugcacauccuca

SEQ ID NO: 119592 - RNA, 32 nt, Homo Sapiens
ugaauccuuucugcuaagagagcgaugacagg

SEQ ID NO: 119593 - RNA, 32 nt, Homo Sapiens
cagguaggcagacaaagcgaaauugccuggag

SEQ ID NO: 119594 - RNA, 32 nt, Homo Sapiens
augacaagauuaggaauauuuucuucugcacc

SEQ ID NO: 119595 - RNA, 32 nt, Homo Sapiens
auauauauaauauauaugaagacuguaaaugu

SEQ ID NO: 119596 - RNA, 32 nt, Homo Sapiens
auguccagcuggagaagccgugcaccccuacu

SEQ ID NO: 119597 - RNA, 32 nt, Homo Sapiens
gaagucacagguugggacauuuagacaagagu

SEQ ID NO: 119598 - RNA, 32 nt, Homo Sapiens
ggucuggcuggcggcagcggcgggagggagcc

SEQ ID NO: 119599 - RNA, 32 nt, Homo Sapiens
auggcccgugcagagcagaggacagugagugu

SEQ ID NO: 119600 - RNA, 32 nt, Homo Sapiens
gcuucauccaagcugcugaccuccucauggcc

SEQ ID NO: 119601 - RNA, 32 nt, Homo Sapiens
gccguggcuccagccaccccgggacauugcua

SEQ ID NO: 119602 - RNA, 32 nt, Homo Sapiens
cccauugccacuuauuuauucaucucaggaaa

SEQ ID NO: 119603 - RNA, 32 nt, Homo Sapiens
cuaauucuagaauccgggguuguccuguccug

SEQ ID NO: 119604 - RNA, 32 nt, Homo Sapiens
aaaaccuuccaguagcgauccuugauuugcuc

SEQ ID NO: 119605 - RNA, 31 nt, Homo Sapiens
gugugagagccccacagagcagguguugcca

SEQ ID NO: 119606 - RNA, 32 nt, Homo Sapiens
ccacgcaguacaccccaaucucccaguucauu

SEQ ID NO: 119607 - RNA, 32 nt, Homo Sapiens
uggcaccuacucuuuagagagccccagcaucu

SEQ ID NO: 119608 - RNA, 32 nt, Homo Sapiens
aacaucagaaaagggauugagaaaagggaugg

SEQ ID NO: 119609 - RNA, 32 nt, Homo Sapiens
cacuuuguauuauguauuaacauggcguguuu

SEQ ID NO: 119610 - RNA, 32 nt, Homo Sapiens
acgagucaacccaaaaguugcuggggagaagu

SEQ ID NO: 119611 - RNA, 32 nt, Homo Sapiens
guuuugccagacagcagguugucugaccuuca

SEQ ID NO: 119612 - RNA, 32 nt, Homo Sapiens
gcucuucuucccugcugugucuccaggcccga

SEQ ID NO: 119613 - RNA, 32 nt, Homo Sapiens
gaaaaaauaggugagagcuugguuuuaugaua

SEQ ID NO: 119614 - RNA, 32 nt, Homo Sapiens
ucauuauuggaauuaaccuggugcuggauauu

SEQ ID NO: 119615 - RNA, 32 nt, Homo Sapiens
uccauuaggugauacauagauaagggcuuuuu

SEQ ID NO: 119616 - RNA, 32 nt, Homo Sapiens
uuaauuauguuuccuuuaauuuuuuggaugug

SEQ ID NO: 119617 - RNA, 32 nt, Homo Sapiens
cuaggaccuucagaucaacagacuucagaccc

SEQ ID NO: 119618 - RNA, 32 nt, Homo Sapiens
cgcagccgccgggcaggccugcgugccgggag

SEQ ID NO: 119619 - RNA, 32 nt, Homo Sapiens
aguuugcaggagacaugagagcaguuuuuagc

SEQ ID NO: 119620 - RNA, 32 nt, Homo Sapiens
cuccuccccagcugccagaaccaggcugagcg

SEQ ID NO: 119621 - RNA, 32 nt, Homo Sapiens
agcuucauaaaccaggaaaccuuuuaaauagc

SEQ ID NO: 119622 - RNA, 32 nt, Homo Sapiens
aaauaguguauauacauauaaaauacaagcua

SEQ ID NO: 119623 - RNA, 32 nt, Homo Sapiens
auacuuccuguccuggcucucccggcccugcu

SEQ ID NO: 119624 - RNA, 32 nt, Homo Sapiens
auugaaaguggagaaccugaaaaggaaccugg

SEQ ID NO: 119625 - RNA, 30 nt, Homo Sapiens
gauacagagaagcuccccgucucugcaucc

SEQ ID NO: 119626 - RNA, 32 nt, Homo Sapiens
gggggaaaaacgccuuuuuaggaaaauuauag

SEQ ID NO: 119627 - RNA, 32 nt, Homo Sapiens
aguccuuccucugcaccugcagaagaagcaac

SEQ ID NO: 119628 - RNA, 32 nt, Homo Sapiens
gcggagaaaaggagaagacggugucucuaggg

SEQ ID NO: 119629 - RNA, 32 nt, Homo Sapiens
auaugaaaucaucacauuguaugcauuaaaua

SEQ ID NO: 119630 - RNA, 32 nt, Homo Sapiens
uucugagaugacccagggaauuggccaauccc

SEQ ID NO: 119631 - RNA, 32 nt, Homo Sapiens
aacuaguauaauuuagucuuuucaugaaugua

SEQ ID NO: 119632 - RNA, 32 nt, Homo Sapiens
auuccaugaucaaauggcugaacuauuaaaau

SEQ ID NO: 119633 - RNA, 32 nt, Homo Sapiens
uccucucgagauaguuuuuucuuuuuaaugaa

SEQ ID NO: 119634 - RNA, 32 nt, Homo Sapiens
caugccuuccccacccuccagcuccucuugga

SEQ ID NO: 119635 - RNA, 32 nt, Homo Sapiens
ugucccuccgucugcccaccggccuccccucu

SEQ ID NO: 119636 - RNA, 32 nt, Homo Sapiens
ggaacugugugugaguuaaaccucuuuccuuu

SEQ ID NO: 119637 - RNA, 32 nt, Homo Sapiens
gaaucugauuaguggaucacguagcuacuuuc

SEQ ID NO: 119638 - RNA, 32 nt, Homo Sapiens
aacaaauuuuuaaaagaauauucauaaagugg

SEQ ID NO: 119639 - RNA, 32 nt, Homo Sapiens
caugcacguucagacagcugcauuguaagagu

SEQ ID NO: 119640 - RNA, 32 nt, Homo Sapiens
auacauauauauacguggccaacugccucacc

SEQ ID NO: 119641 - RNA, 32 nt, Homo Sapiens
uacaccucaauguaaccuugaacuccuaggcu

SEQ ID NO: 119642 - RNA, 32 nt, Homo Sapiens
ugccagcaggccaggcucaccauggugccgca

SEQ ID NO: 119643 - RNA, 32 nt, Homo Sapiens
gaguguagggggugcggcgucuggucagccag

SEQ ID NO: 119644 - RNA, 32 nt, Homo Sapiens
cuaaggaccuaaaagcacuuuauguaguuuuu

SEQ ID NO: 119645 - RNA, 32 nt, Homo Sapiens
cucugagcguccucguccagccgccaacuccg

SEQ ID NO: 119646 - RNA, 32 nt, Homo Sapiens
ucuggaauuggaaaagcuuuugcuuguaugga

SEQ ID NO: 119647 - RNA, 32 nt, Homo Sapiens
gguucucauauucuugguauuccuccuggaug

SEQ ID NO: 119648 - RNA, 32 nt, Homo Sapiens
uggcuuaccugccugugccauucuuccucugg

SEQ ID NO: 119649 - RNA, 32 nt, Homo Sapiens
aaaaaccagaauuaggucaaguucauaguuuc

SEQ ID NO: 119650 - RNA, 32 nt, Homo Sapiens
agaacuggauuugaauccucaaauacuugauu

SEQ ID NO: 119651 - RNA, 32 nt, Homo Sapiens
gcagagccucaaugccaccuccccacaccacc

SEQ ID NO: 119652 - RNA, 32 nt, Homo Sapiens
uucaccaacgacugaucucuccauucagaagu

SEQ ID NO: 119653 - RNA, 32 nt, Homo Sapiens
ccaccgugcagguuguggccgguuuucuccgc

SEQ ID NO: 119654 - RNA, 32 nt, Homo Sapiens
gugcuugagagaaucugaauguaggauggguu

SEQ ID NO: 119655 - RNA, 32 nt, Homo Sapiens
agauggcccacaaagaaguucucauucaauga

SEQ ID NO: 119656 - RNA, 32 nt, Homo Sapiens
agaucgggaaacaaaggguauggcccccuagu

SEQ ID NO: 119657 - RNA, 32 nt, Homo Sapiens
cugcucauuggaagaaagaaaaugaaccagga

SEQ ID NO: 119658 - RNA, 32 nt, Homo Sapiens
aaccaggaacucuggaguucaucagaguuaug

SEQ ID NO: 119659 - RNA, 32 nt, Homo Sapiens
augaaauuaaaguaaauuaaauuucacccuau

SEQ ID NO: 119660 - RNA, 32 nt, Homo Sapiens
ugugaugaguggggggcagcaagaugccauuu

SEQ ID NO: 119661 - RNA, 32 nt, Homo Sapiens
guuuucugugcuagaaaugacucuuaauuuga

SEQ ID NO: 119662 - RNA, 32 nt, Homo Sapiens
agccuccuuuccgucccuuuccgggugcaauc

SEQ ID NO: 119663 - RNA, 32 nt, Homo Sapiens
gaucagcauuuucuccuucucuucacacucgc

SEQ ID NO: 119664 - RNA, 32 nt, Homo Sapiens
ucugccuauagccccagcuacuugggaggcug

SEQ ID NO: 119665 - RNA, 32 nt, Homo Sapiens
ucacggcccagcugugugcacaggugcaggag

SEQ ID NO: 119666 - RNA, 32 nt, Homo Sapiens
guaucaagaacaaaaaugggaggaggugucca

SEQ ID NO: 119667 - RNA, 32 nt, Homo Sapiens
cguggcgugcgugggcggcugcgcugaagugu

SEQ ID NO: 119668 - RNA, 32 nt, Homo Sapiens
gccagcggccucagccagggacgaaggccuca

SEQ ID NO: 119669 - RNA, 32 nt, Homo Sapiens
guccgacuacacagcaguguuaacucauuucu

SEQ ID NO: 119670 - RNA, 32 nt, Homo Sapiens
ucacgagcugcccacguccucuccaggagggg

SEQ ID NO: 119671 - RNA, 32 nt, Homo Sapiens
cggggccugggcggggccgcagccacaccgcu

SEQ ID NO: 119672 - RNA, 32 nt, Homo Sapiens
uucaaccccugaacugcuuuucugccucugug

SEQ ID NO: 119673 - RNA, 32 nt, Homo Sapiens
acgccgacagggagggcggucggucgcggcga

SEQ ID NO: 119674 - RNA, 32 nt, Homo Sapiens
gguagauaaccaagaacuaaauaggaacucac

SEQ ID NO: 119675 - RNA, 32 nt, Homo Sapiens
ucaugugugcuggcugcauggugcuggggagg

SEQ ID NO: 119676 - RNA, 32 nt, Homo Sapiens
auauuaucucuuaagcgcauaggaaucucuau

SEQ ID NO: 119677 - RNA, 32 nt, Homo Sapiens
ucuuuaauaacaguuggguuguguacacagag

SEQ ID NO: 119678 - RNA, 32 nt, Homo Sapiens
uugacacauaucugcuuugauaagagacuucc

SEQ ID NO: 119679 - RNA, 32 nt, Homo Sapiens
ggggauggauuauggaauuuaaaccaugucac

SEQ ID NO: 119680 - RNA, 32 nt, Homo Sapiens
cacaucaccaacaaagcucacgcccuaugcag

SEQ ID NO: 119681 - RNA, 32 nt, Homo Sapiens
acucagcguguuuauuuuuuuauuuuuugaga

SEQ ID NO: 119682 - RNA, 32 nt, Homo Sapiens
gcuguggccgcagggagaggagcaggacacgc

SEQ ID NO: 119683 - RNA, 32 nt, Homo Sapiens
ccgagcgucugcacuugguugugaaguuaaug

SEQ ID NO: 119684 - RNA, 32 nt, Homo Sapiens
caccgccggccgcgaccugcugcugcccuccc

SEQ ID NO: 119685 - RNA, 32 nt, Homo Sapiens
gcuugccaauacugacccuccuccucgaugcc

SEQ ID NO: 119686 - RNA, 32 nt, Homo Sapiens
uaggauuuuuaaaagagcuauagguaauuucu

SEQ ID NO: 119687 - RNA, 32 nt, Homo Sapiens
cugggaacuuaggcuuaacauaaagccgaaga

SEQ ID NO: 119688 - RNA, 32 nt, Homo Sapiens
gccacaggaucccagcacuuugggaggccgag

SEQ ID NO: 119689 - RNA, 32 nt, Homo Sapiens
ccuccucaguuucucuccaggccaccaugucu

SEQ ID NO: 119690 - RNA, 32 nt, Homo Sapiens
aucugcuuggugucccacagaacuugcacaag

SEQ ID NO: 119691 - RNA, 32 nt, Homo Sapiens
gaguggcccuuaaauguaucaguucaguccag

SEQ ID NO: 119692 - RNA, 32 nt, Homo Sapiens
gucuaaccaagcccuaggauuggccucuccag

SEQ ID NO: 119693 - RNA, 32 nt, Homo Sapiens
ggguucuuucuuccucugcugaaggaauaaau

SEQ ID NO: 119694 - RNA, 32 nt, Homo Sapiens
guggggccacgcugcaggcaggucucacugcg

SEQ ID NO: 119695 - RNA, 26 nt, Homo Sapiens
gugagaaauaaaugucucuuguuucu

SEQ ID NO: 119696 - RNA, 32 nt, Homo Sapiens
cuugcuuuuuucuguuucauacuuggugcaaa

SEQ ID NO: 119697 - RNA, 32 nt, Homo Sapiens
cggcugccugcgccugagcagugcugaggaga

SEQ ID NO: 119698 - RNA, 32 nt, Homo Sapiens
agcagaucugauguguuuccuauacauguccu

SEQ ID NO: 119699 - RNA, 32 nt, Homo Sapiens
auagggacuuagcucuugggggugggccugga

SEQ ID NO: 119700 - RNA, 32 nt, Homo Sapiens
cuaggcugccagcucacagcccccaccccagg

SEQ ID NO: 119701 - RNA, 32 nt, Homo Sapiens
uuuuauuagcaacacuagauuaugagggguua

SEQ ID NO: 119702 - RNA, 32 nt, Homo Sapiens
cuaaaacacugauuuuaaaaguuuacauucaa

SEQ ID NO: 119703 - RNA, 30 nt, Homo Sapiens
uuuccuguugagaugggggacugagagaca

SEQ ID NO: 119704 - RNA, 32 nt, Homo Sapiens
uccagcuuucccuucucuuaccuguacaguga

SEQ ID NO: 119705 - RNA, 32 nt, Homo Sapiens
ggcaaguuuccagggacaaaaacaucaagcaa

SEQ ID NO: 119706 - RNA, 32 nt, Homo Sapiens
cacauggcccccaggcugcgguugccuggguu

SEQ ID NO: 119707 - RNA, 32 nt, Homo Sapiens
gggcuacccuccccaccccacuucuaucucaa

SEQ ID NO: 119708 - RNA, 32 nt, Homo Sapiens
ucaugccuauauacuguaaaauuuagguauac

SEQ ID NO: 119709 - RNA, 32 nt, Homo Sapiens
gaaacaaaguaugaacugguaacaucaucaag

SEQ ID NO: 119710 - RNA, 32 nt, Homo Sapiens
agacuccacugugccgagguugaacucuuuuu

SEQ ID NO: 119711 - RNA, 32 nt, Homo Sapiens
uccccagcacgcgcauugggaccgcagcgcug

SEQ ID NO: 119712 - RNA, 32 nt, Homo Sapiens
uggaauagcacacacccuauuccacuagccaa

SEQ ID NO: 119713 - RNA, 32 nt, Homo Sapiens
ugcaggggaaagggauggaucgauacaugcaa

SEQ ID NO: 119714 - RNA, 32 nt, Homo Sapiens
cacgauggcagugcagucaucaucuucaggau

SEQ ID NO: 119715 - RNA, 32 nt, Homo Sapiens
uaggaaaggggagaagagccgaagacagcaca

SEQ ID NO: 119716 - RNA, 32 nt, Homo Sapiens
cuagcacuuugggaggccgaggcggccagauc

SEQ ID NO: 119717 - RNA, 32 nt, Homo Sapiens
ucaggagaggggcagaacagccgcuccugucu

SEQ ID NO: 119718 - RNA, 32 nt, Homo Sapiens
cugccugugucugcgacccccauccaugugcc

SEQ ID NO: 119719 - RNA, 32 nt, Homo Sapiens
ugagacagggaagacagcauaaagagcuagug

SEQ ID NO: 119720 - RNA, 32 nt, Homo Sapiens
gaagagugaaagauaaaguagucaauggccgg

SEQ ID NO: 119721 - RNA, 32 nt, Homo Sapiens
aaagucucugggucacguuuugccucaugaac

SEQ ID NO: 119722 - RNA, 32 nt, Homo Sapiens
aagagcuuucagauuucccuccauaggacagg

SEQ ID NO: 119723 - RNA, 32 nt, Homo Sapiens
gacagaaggugauuuuucuggugaucgaggac

SEQ ID NO: 119724 - RNA, 32 nt, Homo Sapiens
gcauaauaaaaagguggcucgaagcaggaacu

SEQ ID NO: 119725 - RNA, 32 nt, Homo Sapiens
aaguacugcuguauccuguguaguacuagauc

SEQ ID NO: 119726 - RNA, 32 nt, Homo Sapiens
cuuuuaaagauuacauguauuaauauauguau

SEQ ID NO: 119727 - RNA, 32 nt, Homo Sapiens
aguggacugcauuuaaauuugauuuccaucuu

SEQ ID NO: 119728 - RNA, 32 nt, Homo Sapiens
aaaagcucauuucacaguaccagagauuuuua

SEQ ID NO: 119729 - RNA, 32 nt, Homo Sapiens
ggaaccaacacaccccuguuccccucagcuuu

SEQ ID NO: 119730 - RNA, 32 nt, Homo Sapiens
guugacaaauugagauuugcugauggaagaag

SEQ ID NO: 119731 - RNA, 32 nt, Homo Sapiens
aauggggagcugaggaggcauuuuuggggggc

SEQ ID NO: 119732 - RNA, 32 nt, Homo Sapiens
aaccccugcggcuccgacacagaugcccacau

SEQ ID NO: 119733 - RNA, 32 nt, Homo Sapiens
gucccuuguccaccucugcccgcggucucucc

SEQ ID NO: 119734 - RNA, 32 nt, Homo Sapiens
agucuccggcauguagaaauggucaguaacuc

SEQ ID NO: 119735 - RNA, 32 nt, Homo Sapiens
cucacugcaaccuccgccucccagguucaggc

SEQ ID NO: 119736 - RNA, 32 nt, Homo Sapiens
cggagaggaucgcuuucuccuggcgucaccag

SEQ ID NO: 119737 - RNA, 32 nt, Homo Sapiens
gacaaacauuagcugggccuguuccauggcau

SEQ ID NO: 119738 - RNA, 32 nt, Homo Sapiens
uggccuagacauugaugacuggagcucugagg

SEQ ID NO: 119739 - RNA, 32 nt, Homo Sapiens
uucugucagcaguaguuucacccauuugcaug

SEQ ID NO: 119740 - RNA, 32 nt, Homo Sapiens
gccugggugacaaagcaagacugugucucaaa

SEQ ID NO: 119741 - RNA, 32 nt, Homo Sapiens
acagagaccacagcuuccuguaacauuuccga

SEQ ID NO: 119742 - RNA, 32 nt, Homo Sapiens
aacccugcaaguguaaagaaugugcuaaaacc

SEQ ID NO: 119743 - RNA, 32 nt, Homo Sapiens
gauauauuggcauaaaaguaauuguacauaua

SEQ ID NO: 119744 - RNA, 32 nt, Homo Sapiens
uauuuuaaugacuuuacuuuuuauuucuaaga

SEQ ID NO: 119745 - RNA, 32 nt, Homo Sapiens
auuuuuccuuuuccuuuagaguuauggucaug

SEQ ID NO: 119746 - RNA, 32 nt, Homo Sapiens
agggcuauuucugaagucuguauguugcugcu

SEQ ID NO: 119747 - RNA, 32 nt, Homo Sapiens
uaugggauaaaaggccacaggaaauaagacug

SEQ ID NO: 119748 - RNA, 32 nt, Homo Sapiens
ucucugagaguuuuaauacuuucaaggacuuu

SEQ ID NO: 119749 - RNA, 32 nt, Homo Sapiens
cgagaacagcacguaacugcaaugcagccugu

SEQ ID NO: 119750 - RNA, 32 nt, Homo Sapiens
agccgaggaagacacagcgccuucccuucagg

SEQ ID NO: 119751 - RNA, 32 nt, Homo Sapiens
agaaacuaucaucagagcaaacagacauucua

SEQ ID NO: 119752 - RNA, 32 nt, Homo Sapiens
cuguaggugcgcacuuaccugcuugagcuuuc

SEQ ID NO: 119753 - RNA, 32 nt, Homo Sapiens
gacuccgcgggaaacggcgggggcggagcggg

SEQ ID NO: 119754 - RNA, 32 nt, Homo Sapiens
uaguuggagugcuuguuuacuaagcaugugcc

SEQ ID NO: 119755 - RNA, 32 nt, Homo Sapiens
agggagggacagagacccagagggcagcguca

SEQ ID NO: 119756 - RNA, 32 nt, Homo Sapiens
gcaggcccccuaggauucccccugcccugugc

SEQ ID NO: 119757 - RNA, 32 nt, Homo Sapiens
uugugauaaauauauuugaucauuaaugugau

SEQ ID NO: 119758 - RNA, 32 nt, Homo Sapiens
gcuucugauuacucagaaacaugccccucuuc

SEQ ID NO: 119759 - RNA, 32 nt, Homo Sapiens
agaaggcaguuugcgcuaaugcuugaacucuu

SEQ ID NO: 119760 - RNA, 32 nt, Homo Sapiens
aauauuuauagaccucuuuuagauauuuuaau

SEQ ID NO: 119761 - RNA, 32 nt, Homo Sapiens
uaggguccaaaaagcaggguucccaucucaca

SEQ ID NO: 119762 - RNA, 32 nt, Homo Sapiens
ggcgcccagaagcuccaccuccaccccggaag

SEQ ID NO: 119763 - RNA, 32 nt, Homo Sapiens
aaacuguuguguuuuucuuaugguuuaaaaaa

SEQ ID NO: 119764 - RNA, 32 nt, Homo Sapiens
ucacacucuaacuguauauuuguaugauauuu

SEQ ID NO: 119765 - RNA, 32 nt, Homo Sapiens
agcugggugaggggcugcugucugcaguguca

SEQ ID NO: 119766 - RNA, 32 nt, Homo Sapiens
auaauccugauacauuccuacaauggccacug

SEQ ID NO: 119767 - RNA, 32 nt, Homo Sapiens
caguguguuugaaaaggaaaacaaagaauguu

SEQ ID NO: 119768 - RNA, 32 nt, Homo Sapiens
acucuaaugcuccaucagcucaacacagcauc

SEQ ID NO: 119769 - RNA, 32 nt, Homo Sapiens
ggcauuuaaggaaaucuguuucucuuuuggau

SEQ ID NO: 119770 - RNA, 32 nt, Homo Sapiens
auuuuaacauuuuuacaauaaaacaugaggug

SEQ ID NO: 119771 - RNA, 32 nt, Homo Sapiens
gccaucuuauuaacuccuucucucuuuuuaac

SEQ ID NO: 119772 - RNA, 32 nt, Homo Sapiens
uccucccuccucugugccccaacagcacgcug

SEQ ID NO: 119773 - RNA, 32 nt, Homo Sapiens
cugcacugaagacauuagacuggccauagaaa

SEQ ID NO: 119774 - RNA, 32 nt, Homo Sapiens
aggaugccuuuucucuucugccuugcgaaaua

SEQ ID NO: 119775 - RNA, 32 nt, Homo Sapiens
caccuguaagcccagcacuuugggaggccaag

SEQ ID NO: 119776 - RNA, 32 nt, Homo Sapiens
acaacugccggggguucaggguugguagcagg

SEQ ID NO: 119777 - RNA, 32 nt, Homo Sapiens
cuccuguaaucccagcacuuugggaagccaag

SEQ ID NO: 119778 - RNA, 32 nt, Homo Sapiens
aucauccacuguaucuucuauuucuaccacau

SEQ ID NO: 119779 - RNA, 32 nt, Homo Sapiens
cgcgcggcgcgucccaguggcccgacucgccg

SEQ ID NO: 119780 - RNA, 32 nt, Homo Sapiens
guguccgugggccccagggccuugcagcgccc

SEQ ID NO: 119781 - RNA, 32 nt, Homo Sapiens
agguggcaccucgguacccagcggguagggcg

SEQ ID NO: 119782 - RNA, 32 nt, Homo Sapiens
gagggagaggaggggcugggggugaggggcca

SEQ ID NO: 119783 - RNA, 32 nt, Homo Sapiens
guagcgugcaugcagcuuugccugaauuucca

SEQ ID NO: 119784 - RNA, 32 nt, Homo Sapiens
cuuuaauucucaaagcacuccugugagguuca

SEQ ID NO: 119785 - RNA, 32 nt, Homo Sapiens
cagcaguguucaauuugcucaccauugguagu

SEQ ID NO: 119786 - RNA, 31 nt, Homo Sapiens
aaccacuccuggagaaagacuuccuugcagg

SEQ ID NO: 119787 - RNA, 32 nt, Homo Sapiens
ugcucagcaccgugagucuuacuguuugaucg

SEQ ID NO: 119788 - RNA, 32 nt, Homo Sapiens
auuuuuuauuuuuucgcaucaguauuaauguu

SEQ ID NO: 119789 - RNA, 32 nt, Homo Sapiens
aaaacuaaacacacacauaaacaguuauaagu

SEQ ID NO: 119790 - RNA, 32 nt, Homo Sapiens
cuuugggguugaacuuuuuuuuuuuuaaagaa

SEQ ID NO: 119791 - RNA, 29 nt, Homo Sapiens
uguuaaauauaaagguauuuucuauguca

SEQ ID NO: 119792 - RNA, 32 nt, Homo Sapiens
ugggcccaacaggcccuugguagagcuggugc

SEQ ID NO: 119793 - RNA, 32 nt, Homo Sapiens
aaaugaauauaaaaugcaucuaaacaugacau

SEQ ID NO: 119794 - RNA, 32 nt, Homo Sapiens
uggcuguggcuuucuucagguaauuuuuguca

SEQ ID NO: 119795 - RNA, 32 nt, Homo Sapiens
ggcucauguucccuuuaguuuauuuuugugag

SEQ ID NO: 119796 - RNA, 32 nt, Homo Sapiens
aaauuccaguaucauuuguaacuuuggguuaa

SEQ ID NO: 119797 - RNA, 32 nt, Homo Sapiens
uccucuuccucuagggccccagcgcagcucgg

SEQ ID NO: 119798 - RNA, 32 nt, Homo Sapiens
aagcugcaaaaauuaaugguuuagauauauuu

SEQ ID NO: 119799 - RNA, 32 nt, Homo Sapiens
ucuauuuguuuguauccucuuuuauuuccuug

SEQ ID NO: 119800 - RNA, 32 nt, Homo Sapiens
ccccccgagcugggcgugcgcggccgcaauga

SEQ ID NO: 119801 - RNA, 32 nt, Homo Sapiens
agagaaaaacaaaaugcauuccgguuugaaag

SEQ ID NO: 119802 - RNA, 32 nt, Homo Sapiens
gguuccggcgagcgccaucccggagcgucagu

SEQ ID NO: 119803 - RNA, 32 nt, Homo Sapiens
aagucuucauggauguucugcaugucaugggg

SEQ ID NO: 119804 - RNA, 32 nt, Homo Sapiens
gcugccuggcucccuuucucagcagcuuugcu

SEQ ID NO: 119805 - RNA, 32 nt, Homo Sapiens
ccugagcccgccggacgggaggcggccccgcc

SEQ ID NO: 119806 - RNA, 32 nt, Homo Sapiens
gcgauauaucuagguaggccaaccagguggac

SEQ ID NO: 119807 - RNA, 32 nt, Homo Sapiens
ggucuggauguagagagggugauaaaaugcca

SEQ ID NO: 119808 - RNA, 32 nt, Homo Sapiens
uacccuuccauuaagaaucuaccaagcauuag

SEQ ID NO: 119809 - RNA, 32 nt, Homo Sapiens
uguugaagccccacagagcagguguugccaau

SEQ ID NO: 119810 - RNA, 32 nt, Homo Sapiens
cagcagagcuccugggccugcugccugcacac

SEQ ID NO: 119811 - RNA, 31 nt, Homo Sapiens
ucggcgucggacucugcgccccgcguaguuc

SEQ ID NO: 119812 - RNA, 32 nt, Homo Sapiens
cuuccagagcauugacuuccucuuccuagacu

SEQ ID NO: 119813 - RNA, 32 nt, Homo Sapiens
uaauuauaucuuucccacauguauguauauuc

SEQ ID NO: 119814 - RNA, 32 nt, Homo Sapiens
uauaaaaaccuggcaguaaaauguagagugaa

SEQ ID NO: 119815 - RNA, 32 nt, Homo Sapiens
uaaagcaaaaacagaguugaaugaaggacacu

SEQ ID NO: 119816 - RNA, 32 nt, Homo Sapiens
cccgcaaaaugggcuuccugccugguuuuucu

SEQ ID NO: 119817 - RNA, 32 nt, Homo Sapiens
acaccaaaacagaaugggugcagacgcucucc

SEQ ID NO: 119818 - RNA, 32 nt, Homo Sapiens
uugagaucaggauucaguaacuguagucuugu

SEQ ID NO: 119819 - RNA, 32 nt, Homo Sapiens
acacccagagcccccuccccagcccucaggcc

SEQ ID NO: 119820 - RNA, 32 nt, Homo Sapiens
auaguuuauuuuuauuccuugccaaucuggga

SEQ ID NO: 119821 - RNA, 32 nt, Homo Sapiens
guuauggaauaaaauguuccuugcacccaaaa

SEQ ID NO: 119822 - RNA, 32 nt, Homo Sapiens
agugcuuuuuaaaauuuuacccauucuuuaau

SEQ ID NO: 119823 - RNA, 32 nt, Homo Sapiens
ucagcugguggauggugacuuuugaagaacaa

SEQ ID NO: 119824 - RNA, 32 nt, Homo Sapiens
accccgcagaaagugccugugcaucagcauuc

SEQ ID NO: 119825 - RNA, 32 nt, Homo Sapiens
gagaaagaggcccucucucagaugaauggaua

SEQ ID NO: 119826 - RNA, 30 nt, Homo Sapiens
cugagcccggcgcagcagcagcagccaggg

SEQ ID NO: 119827 - RNA, 32 nt, Homo Sapiens
uaggguggggaagugaggaagaagggauucua

SEQ ID NO: 119828 - RNA, 32 nt, Homo Sapiens
ccacaggaucaauguggugccucauccagggg

SEQ ID NO: 119829 - RNA, 32 nt, Homo Sapiens
auccuaaagacuagacagaacaauauuuucaa

SEQ ID NO: 119830 - RNA, 32 nt, Homo Sapiens
cuuauggagcagcccccuuugaagaucuccag

SEQ ID NO: 119831 - RNA, 32 nt, Homo Sapiens
ccuugcuguaaauucuuuauugccuauuuaua

SEQ ID NO: 119832 - RNA, 32 nt, Homo Sapiens
agcugggugucccagggcaagccaccuugccu

SEQ ID NO: 119833 - RNA, 32 nt, Homo Sapiens
aggccgcgcuggacgcgccggcggcgccuuug

SEQ ID NO: 119834 - RNA, 32 nt, Homo Sapiens
aagauggcuggcuacucuuguuuucccucaug

SEQ ID NO: 119835 - RNA, 32 nt, Homo Sapiens
ucgccuugggcugggggcgcaccccagggagg

SEQ ID NO: 119836 - RNA, 32 nt, Homo Sapiens
aaacucuuaaucgacuccugcaaaucuauacc

SEQ ID NO: 119837 - RNA, 32 nt, Homo Sapiens
cgcggcgcgcgauggcagcugcuuagcccggc

SEQ ID NO: 119838 - RNA, 32 nt, Homo Sapiens
accaggggcagcucccgagggcacugugaagg

SEQ ID NO: 119839 - RNA, 30 nt, Homo Sapiens
caggaaccggccgugccgcgcggccagcag

SEQ ID NO: 119840 - RNA, 32 nt, Homo Sapiens
uaaccauggagucuucuguuuccugggggaaa

SEQ ID NO: 119841 - RNA, 32 nt, Homo Sapiens
ucuccaugauuuaauaauauacuuguggacua

SEQ ID NO: 119842 - RNA, 32 nt, Homo Sapiens
ucauaaaggagcauauaaggcuaaauguaaaa

SEQ ID NO: 119843 - RNA, 32 nt, Homo Sapiens
uuguauuuuuuuauuuacaaaauauaaauaug

SEQ ID NO: 119844 - RNA, 32 nt, Homo Sapiens
uagaggagcccuuuuccaauggaaauauuaua

SEQ ID NO: 119845 - RNA, 32 nt, Homo Sapiens
ccuaccauuaggcauacuuucagaagcaaccu

SEQ ID NO: 119846 - RNA, 32 nt, Homo Sapiens
ugaacgacacaggcaaugccccugcccugugg

SEQ ID NO: 119847 - RNA, 32 nt, Homo Sapiens
caggauguguucccucuuccagcugugggacc

SEQ ID NO: 119848 - RNA, 32 nt, Homo Sapiens
gcagcacugcacccucacuagccaggguguuc

SEQ ID NO: 119849 - RNA, 31 nt, Homo Sapiens
aaguggagucacugccucugucccucugguc

SEQ ID NO: 119850 - RNA, 32 nt, Homo Sapiens
ugggguuggggauggguuagggacgcaagcuu

SEQ ID NO: 119851 - RNA, 32 nt, Homo Sapiens
cuuaaagaacuaaaaguaaaacuaccauuuga

SEQ ID NO: 119852 - RNA, 32 nt, Homo Sapiens
ugggggcgaaggggcgggggaggccaugaugg

SEQ ID NO: 119853 - RNA, 32 nt, Homo Sapiens
gaaguucgcauguggagugcugccugaggcca

SEQ ID NO: 119854 - RNA, 32 nt, Homo Sapiens
ugaaucggcggcacgcgccgcaggaggcuggg

SEQ ID NO: 119855 - RNA, 32 nt, Homo Sapiens
gaaagggggagcggggcgcccagggccacugg

SEQ ID NO: 119856 - RNA, 32 nt, Homo Sapiens
ucauaaaauuaacaaggaauuuaacauacaaa

SEQ ID NO: 119857 - RNA, 32 nt, Homo Sapiens
gccacugcacuccagccugggcgacagugaga

SEQ ID NO: 119858 - RNA, 32 nt, Homo Sapiens
aggggccucaggcuccucuccucaaaucaagc

SEQ ID NO: 119859 - RNA, 32 nt, Homo Sapiens
gcacguccggcgggcuccuggagccuggagga

SEQ ID NO: 119860 - RNA, 32 nt, Homo Sapiens
uuccuaaauuguagguaugccuuccaguauuu

SEQ ID NO: 119861 - RNA, 32 nt, Homo Sapiens
aaaauuaaccaccuucaaauuucugccagauc

SEQ ID NO: 119862 - RNA, 32 nt, Homo Sapiens
cccggcauucggacuuggacucgggaagggcc

SEQ ID NO: 119863 - RNA, 31 nt, Homo Sapiens
acauuuggaauaaaacaggagcuguuaaauu

SEQ ID NO: 119864 - RNA, 32 nt, Homo Sapiens
agcaaaggaaauguuaccaguguuuucgguuc

SEQ ID NO: 119865 - RNA, 32 nt, Homo Sapiens
auuucuuguaaaaauauuuuguaugugugaau

SEQ ID NO: 119866 - RNA, 32 nt, Homo Sapiens
uuccacaaagauuaaacuggcuaucauuuguu

SEQ ID NO: 119867 - RNA, 32 nt, Homo Sapiens
cccugggguuccagcccuccuaauaccucaua

SEQ ID NO: 119868 - RNA, 32 nt, Homo Sapiens
uuccaguuuuauaaaaaguggagacagacuga

SEQ ID NO: 119869 - RNA, 32 nt, Homo Sapiens
cguggcugccucuacagccuaccuauacgucc

SEQ ID NO: 119870 - RNA, 32 nt, Homo Sapiens
aaucaggcuucaguaacuguagucuugugagc

SEQ ID NO: 119871 - RNA, 32 nt, Homo Sapiens
auuuuucagugcuuuacaaauaaagcaucauu

SEQ ID NO: 119872 - RNA, 32 nt, Homo Sapiens
cugcccgcggggcgcgcaccgccuugacccgg

SEQ ID NO: 119873 - RNA, 28 nt, Homo Sapiens
uuccgagugcggccgcugcugggcuggc

SEQ ID NO: 119874 - RNA, 32 nt, Homo Sapiens
aucauucccgguuucugccccugucugccccc

SEQ ID NO: 119875 - RNA, 32 nt, Homo Sapiens
agaaagagcaccacgccgucuuuaauauaagu

SEQ ID NO: 119876 - RNA, 30 nt, Homo Sapiens
ggagcaugcaucuggagggcagagacggca

SEQ ID NO: 119877 - RNA, 32 nt, Homo Sapiens
ccggaugggaggggcggggccgagugcaguau

SEQ ID NO: 119878 - RNA, 32 nt, Homo Sapiens
cagggagccagccgugggccaggccgcagugu

SEQ ID NO: 119879 - RNA, 32 nt, Homo Sapiens
aauuuguuuuuaguguuauuuaccaagauuag

SEQ ID NO: 119880 - RNA, 32 nt, Homo Sapiens
guggggcgggggagaggacgucucugcgggcc

SEQ ID NO: 119881 - RNA, 32 nt, Homo Sapiens
auaguuuucuauuugucuuuauuucaaguacc

SEQ ID NO: 119882 - RNA, 32 nt, Homo Sapiens
ggccagcgccgcgaccccuucccagcgcuccu

SEQ ID NO: 119883 - RNA, 32 nt, Homo Sapiens
cuuggucccacccacugaaguagcucaucgua

SEQ ID NO: 119884 - RNA, 32 nt, Homo Sapiens
uguucagaaaucaccuuuagucaaaagguuua

SEQ ID NO: 119885 - RNA, 32 nt, Homo Sapiens
cugagagaggacaacaguuugaaacuuacuuu

SEQ ID NO: 119886 - RNA, 32 nt, Homo Sapiens
gaaaaugaaacacauuuauaccucuguucaau

SEQ ID NO: 119887 - RNA, 32 nt, Homo Sapiens
ugagcucugaagauuuucagcauuuaucuccc

SEQ ID NO: 119888 - RNA, 32 nt, Homo Sapiens
ccgauccucuguccccgccgccggccccgcug

SEQ ID NO: 119889 - RNA, 32 nt, Homo Sapiens
guccuugggagaaaaaacuaaaguuuaagugc

SEQ ID NO: 119890 - RNA, 32 nt, Homo Sapiens
cacccucucggccuccucccacaagcaccugc

SEQ ID NO: 119891 - RNA, 32 nt, Homo Sapiens
accuccuucuuacugauaugcaaaauaagaaa

SEQ ID NO: 119892 - RNA, 32 nt, Homo Sapiens
ucuaauguguuggagauuuucauuucaaauau

SEQ ID NO: 119893 - RNA, 32 nt, Homo Sapiens
uuuugugcauuacaggauauuuagcagcacgc

SEQ ID NO: 119894 - RNA, 32 nt, Homo Sapiens
cuccagaaucuuucccaugcagguauucuuac

SEQ ID NO: 119895 - RNA, 32 nt, Homo Sapiens
uaaaaauccaacaaacaaauguguucacaaac

SEQ ID NO: 119896 - RNA, 32 nt, Homo Sapiens
gugauaaaaauauucuaaaauugauuauggug

SEQ ID NO: 119897 - RNA, 32 nt, Homo Sapiens
ugcaaagucacagcccuucucugggucuugaa

SEQ ID NO: 119898 - RNA, 32 nt, Homo Sapiens
uauauuguuucaucauaaaaauuauggcuuug

SEQ ID NO: 119899 - RNA, 32 nt, Homo Sapiens
uggcaguggccagcguccuuguccugcggggg

SEQ ID NO: 119900 - RNA, 32 nt, Homo Sapiens
agccgaggggagaggagcccgcgccucgaguc

SEQ ID NO: 119901 - RNA, 32 nt, Homo Sapiens
aaaaaggaaaaaaacaaacaaacaacaacaac

SEQ ID NO: 119902 - RNA, 32 nt, Homo Sapiens
uucaguauauauuuuguaaauaaaauguuuug

SEQ ID NO: 119903 - RNA, 32 nt, Homo Sapiens
aauucagggacauguaccacggcggccaaagc

SEQ ID NO: 119904 - RNA, 32 nt, Homo Sapiens
cauuuuuguaaaaauaaagcuugauuguucac

SEQ ID NO: 119905 - RNA, 32 nt, Homo Sapiens
ccucccugucccucaugccgcuccucagcucc

SEQ ID NO: 119906 - RNA, 32 nt, Homo Sapiens
guaagaauaaaacagguuuacugggauuuggg

SEQ ID NO: 119907 - RNA, 32 nt, Homo Sapiens
ucuucagcuuugcagugguuugugggaagaca

SEQ ID NO: 119908 - RNA, 32 nt, Homo Sapiens
cucgacccacccagauuugaccguucaggggg

SEQ ID NO: 119909 - RNA, 32 nt, Homo Sapiens
cuuaauccgagccagcagggccuucugcuugc

SEQ ID NO: 119910 - RNA, 32 nt, Homo Sapiens
guacagcccucacagcucuucagagcaagcac

SEQ ID NO: 119911 - RNA, 32 nt, Homo Sapiens
ugccgccugcugagcggggucugugggagcua

SEQ ID NO: 119912 - RNA, 32 nt, Homo Sapiens
cuagcucugguuucccaagauccuugaagccc

SEQ ID NO: 119913 - RNA, 32 nt, Homo Sapiens
gcucacugaaagggcugucaaccccagaaggc

SEQ ID NO: 119914 - RNA, 28 nt, Homo Sapiens
gacaugcccacccagcucgagauggcca

SEQ ID NO: 119915 - RNA, 32 nt, Homo Sapiens
gcucugaccugcccccgcucugccaucagccc

SEQ ID NO: 119916 - RNA, 32 nt, Homo Sapiens
uuucuuucuggugaaauguuacggguaccagc

SEQ ID NO: 119917 - RNA, 32 nt, Homo Sapiens
uagcuggagaaagggaugcacagagagggaaa

SEQ ID NO: 119918 - RNA, 32 nt, Homo Sapiens
cgggguccuucccgaacggcagcggcugcggc

SEQ ID NO: 119919 - RNA, 32 nt, Homo Sapiens
gauuccacaaaaccugcccaaucgagucugua

SEQ ID NO: 119920 - RNA, 32 nt, Homo Sapiens
aggguauguggcgagacagagcccugcacccc

SEQ ID NO: 119921 - RNA, 32 nt, Homo Sapiens
acagucuugagccugggguugacuggguuaga

SEQ ID NO: 119922 - RNA, 32 nt, Homo Sapiens
ccaccauguggcugcaggccaagcucuucauu

SEQ ID NO: 119923 - RNA, 32 nt, Homo Sapiens
ugaaauuuaucugguccauuuuauucaugcua

SEQ ID NO: 119924 - RNA, 32 nt, Homo Sapiens
uaaccauaaacuauauucauaucuguuucauu

SEQ ID NO: 119925 - RNA, 32 nt, Homo Sapiens
auugcaaggaccagucucuaagcuuuuggagg

SEQ ID NO: 119926 - RNA, 32 nt, Homo Sapiens
ggcucggcgcccagccgaugacguacccgcgc

SEQ ID NO: 119927 - RNA, 32 nt, Homo Sapiens
cggcacuguccuugcugcccagccccucucug

SEQ ID NO: 119928 - RNA, 32 nt, Homo Sapiens
gaguaaaggucuggaccccacaugcugggccc

SEQ ID NO: 119929 - RNA, 32 nt, Homo Sapiens
cgccgcugccaccgccugccugagagaagucg

SEQ ID NO: 119930 - RNA, 32 nt, Homo Sapiens
ugcucacugcuguuaugugacucucagucagu

SEQ ID NO: 119931 - RNA, 32 nt, Homo Sapiens
augugaauuuuuauuucuuuuuaauuauuuua

SEQ ID NO: 119932 - RNA, 32 nt, Homo Sapiens
ccaaggugcagguggcucuuccuggagauguu

SEQ ID NO: 119933 - RNA, 32 nt, Homo Sapiens
cagucuugggguugcuccuggaugcugucugg

SEQ ID NO: 119934 - RNA, 32 nt, Homo Sapiens
uggugugcaccuauagccccagcuauucagga

SEQ ID NO: 119935 - RNA, 32 nt, Homo Sapiens
agcucagcuggccuggaaugggccaggcuggu

SEQ ID NO: 119936 - RNA, 32 nt, Homo Sapiens
gcuuuggccuccucaaagcauccaccauggug

SEQ ID NO: 119937 - RNA, 32 nt, Homo Sapiens
ccugcgagcgccagcggccgggacgaggcggc

SEQ ID NO: 119938 - RNA, 32 nt, Homo Sapiens
uaugugaaggcacaauuugaaucaagcuauca

SEQ ID NO: 119939 - RNA, 32 nt, Homo Sapiens
gaagggacggcucaguggcugcaccgacgguc

SEQ ID NO: 119940 - RNA, 32 nt, Homo Sapiens
gcgucagccagcauguccuggccacagacgag

SEQ ID NO: 119941 - RNA, 32 nt, Homo Sapiens
uucacuucaaaaccucuuuuuucugggagagg

SEQ ID NO: 119942 - RNA, 32 nt, Homo Sapiens
agucguucacaucaaauucuuaucuuuuccaa

SEQ ID NO: 119943 - RNA, 32 nt, Homo Sapiens
cuauugacauagugaacaauggaggguccugc

SEQ ID NO: 119944 - RNA, 32 nt, Homo Sapiens
gcccccagcacccacccucccccauuccccag

SEQ ID NO: 119945 - RNA, 32 nt, Homo Sapiens
aacuuuguaaaaacgaaacuauuuaaaaaaca

SEQ ID NO: 119946 - RNA, 32 nt, Homo Sapiens
aauguaccugauugcucccaauuaugagagga

SEQ ID NO: 119947 - RNA, 32 nt, Homo Sapiens
uauagaaacagcuccuuuuuuauuuuaugucc

SEQ ID NO: 119948 - RNA, 32 nt, Homo Sapiens
uuccuccccaggacuuggucuuuuuucugggu

SEQ ID NO: 119949 - RNA, 32 nt, Homo Sapiens
acauuagauacuacauugaacaaaagaaaaaa

SEQ ID NO: 119950 - RNA, 32 nt, Homo Sapiens
acugagacaucuucuguaaacugcuaccccug

SEQ ID NO: 119951 - RNA, 32 nt, Homo Sapiens
augaggcaacaggcaaguggacaggccagcac

SEQ ID NO: 119952 - RNA, 32 nt, Homo Sapiens
uuguugagcuguguugaaaacacacaugaauc

SEQ ID NO: 119953 - RNA, 32 nt, Homo Sapiens
agggaacacugaggcaggaaaagcagggcccu

SEQ ID NO: 119954 - RNA, 32 nt, Homo Sapiens
acagauuugugauucuuugacugugacacuau

SEQ ID NO: 119955 - RNA, 29 nt, Homo Sapiens
uccgcgcacgagagcuucacggcggccga

SEQ ID NO: 119956 - RNA, 31 nt, Homo Sapiens
guuuuuaggaugaaauuuagagccuggccuu

SEQ ID NO: 119957 - RNA, 32 nt, Homo Sapiens
ggugugucccggguguggggaggcgacagagc

SEQ ID NO: 119958 - RNA, 32 nt, Homo Sapiens
uacuauguacugugcuggcccccggucaaggg

SEQ ID NO: 119959 - RNA, 32 nt, Homo Sapiens
aaggucaaaggugagaaggaaggucaggaaga

SEQ ID NO: 119960 - RNA, 32 nt, Homo Sapiens
ugccuguaaucccagcacuuugagagacugag

SEQ ID NO: 119961 - RNA, 32 nt, Homo Sapiens
aacaguaaguagucuauauauuuuauauaggg

SEQ ID NO: 119962 - RNA, 32 nt, Homo Sapiens
guuguagaaagauagcguauuugcauuuacaa

SEQ ID NO: 119963 - RNA, 32 nt, Homo Sapiens
caccauccgggggcgagcucccgggaaggggc

SEQ ID NO: 119964 - RNA, 32 nt, Homo Sapiens
guggucucugucauccucgucucucuucugaa

SEQ ID NO: 119965 - RNA, 32 nt, Homo Sapiens
cagcuucucucucuggauugggucacgugaag

SEQ ID NO: 119966 - RNA, 32 nt, Homo Sapiens
ggacuuacccucaucaccuugcucaccaacuc

SEQ ID NO: 119967 - RNA, 32 nt, Homo Sapiens
ugagaggccggggcucagggaaggggcuggga

SEQ ID NO: 119968 - RNA, 32 nt, Homo Sapiens
uuucauaccugccuacugaugcauagacuuca

SEQ ID NO: 119969 - RNA, 32 nt, Homo Sapiens
cgcagccugugcugguuguguaagccguggga

SEQ ID NO: 119970 - RNA, 32 nt, Homo Sapiens
cuccagggcugugcaacuggcauauuauuuug

SEQ ID NO: 119971 - RNA, 32 nt, Homo Sapiens
aagaacuggagaccugcugaauggcggagcua

SEQ ID NO: 119972 - RNA, 32 nt, Homo Sapiens
ugaacugaagaagcuguuuuauaggguuauag

SEQ ID NO: 119973 - RNA, 32 nt, Homo Sapiens
augaccaggaaagaagcaaagagacggaguug

SEQ ID NO: 119974 - RNA, 32 nt, Homo Sapiens
uagcugggggccugggugggcccugggcucug

SEQ ID NO: 119975 - RNA, 32 nt, Homo Sapiens
ucagagucuggccugccaggcuccucuccccg

SEQ ID NO: 119976 - RNA, 32 nt, Homo Sapiens
uaagcuucacacacaaaaaauuggucuuuguu

SEQ ID NO: 119977 - RNA, 32 nt, Homo Sapiens
gagcagacucuucuccacggacaagccacugc

SEQ ID NO: 119978 - RNA, 32 nt, Homo Sapiens
aaccugaagagugauauuuguacaauagcuuu

SEQ ID NO: 119979 - RNA, 32 nt, Homo Sapiens
uucauuaauguuuugugagcuugcauuuguga

SEQ ID NO: 119980 - RNA, 32 nt, Homo Sapiens
ccuugcucccccacccccugugaggacuucuc

SEQ ID NO: 119981 - RNA, 32 nt, Homo Sapiens
uuuacguaccucuaagaaauaaaagugcuucu

SEQ ID NO: 119982 - RNA, 32 nt, Homo Sapiens
acaguggagagccaguacaucuuaacuacugu

SEQ ID NO: 119983 - RNA, 29 nt, Homo Sapiens
aaccaugaaguggcugcugcugcuggguc

SEQ ID NO: 119984 - RNA, 32 nt, Homo Sapiens
ugagguggggagaggcaacagggcagccccca

SEQ ID NO: 119985 - RNA, 32 nt, Homo Sapiens
ucaucugcgugaauauuuuugaguauggccug

SEQ ID NO: 119986 - RNA, 32 nt, Homo Sapiens
uccccacgcuccugggggcgcagggacugagu

SEQ ID NO: 119987 - RNA, 32 nt, Homo Sapiens
gacaguauuaauauuuuuuuuauauuuucuua

SEQ ID NO: 119988 - RNA, 32 nt, Homo Sapiens
uguuuuagcauuuuuccaacacacacaacgua

SEQ ID NO: 119989 - RNA, 32 nt, Homo Sapiens
uuagggggaaggcugcagauaccauucuaacc

SEQ ID NO: 119990 - RNA, 31 nt, Homo Sapiens
gcugugcagcgcagcgcaccgcgggaagaug

SEQ ID NO: 119991 - RNA, 32 nt, Homo Sapiens
cauugaggcucucauuggcccgccgccccaug

SEQ ID NO: 119992 - RNA, 32 nt, Homo Sapiens
gcucugcagacacuucucauacaccuccccug

SEQ ID NO: 119993 - RNA, 32 nt, Homo Sapiens
guguauuuuuauuauguuuguuucuuucuucg

SEQ ID NO: 119994 - RNA, 32 nt, Homo Sapiens
acucugggaucuccaggugcugcccaaggagu

SEQ ID NO: 119995 - RNA, 32 nt, Homo Sapiens
guauucuccauauugcagaaaucguauuuaga

SEQ ID NO: 119996 - RNA, 32 nt, Homo Sapiens
gguuauggccauuguuuuuuacuacuuugauc

SEQ ID NO: 119997 - RNA, 32 nt, Homo Sapiens
aaucuaauuuucaggcacaucuccagacuuca

SEQ ID NO: 119998 - RNA, 32 nt, Homo Sapiens
gucagguguugcauuuuuccguuagagguggg

SEQ ID NO: 119999 - RNA, 32 nt, Homo Sapiens
ucgggucggagagaggcggcaggggccagaac

SEQ ID NO: 120000 - RNA, 32 nt, Homo Sapiens
cccgcagagggugucgcccaccccuagccccu

SEQ ID NO: 120001 - RNA, 32 nt, Homo Sapiens
aacucagcgggcuggucaggccucgaggacug

SEQ ID NO: 120002 - RNA, 32 nt, Homo Sapiens
aauaaagguaauuuuauugaaucuucauuggu

SEQ ID NO: 120003 - RNA, 32 nt, Homo Sapiens
cuccuuguguaagacaguaacuuuacacuuca

SEQ ID NO: 120004 - RNA, 32 nt, Homo Sapiens
ucaaaauuugaaauaugguaauucagugauaa

SEQ ID NO: 120005 - RNA, 32 nt, Homo Sapiens
ugcaaguguuggccguggguccagccaacaac

SEQ ID NO: 120006 - RNA, 32 nt, Homo Sapiens
gacuucauuuugauacuugucuauccuucaua

SEQ ID NO: 120007 - RNA, 32 nt, Homo Sapiens
cauuuuuacuaccagcaguauguuacuuaaaa

SEQ ID NO: 120008 - RNA, 32 nt, Homo Sapiens
acgcaagcugucaguggaacugucccacaaga

SEQ ID NO: 120009 - RNA, 32 nt, Homo Sapiens
ucccuaagaaagagcugaaaugacugagaacu

SEQ ID NO: 120010 - RNA, 32 nt, Homo Sapiens
caaucaaaguuagauuauucucaaugguaaaa

SEQ ID NO: 120011 - RNA, 32 nt, Homo Sapiens
cugauuuuucuuuuuacaauuaccaaaauaaa

SEQ ID NO: 120012 - RNA, 32 nt, Homo Sapiens
cagaacccagugcacguccuccccuucccacc

SEQ ID NO: 120013 - RNA, 30 nt, Homo Sapiens
ccggggcccguuccggcagcucccagcggu

SEQ ID NO: 120014 - RNA, 32 nt, Homo Sapiens
acaagcgugaauaaaaagacaaauguauuuga

SEQ ID NO: 120015 - RNA, 32 nt, Homo Sapiens
aaacugcuggaacuguccagucccuguggugg

SEQ ID NO: 120016 - RNA, 32 nt, Homo Sapiens
gggggcgggaagggcuguaggguacuugucaa

SEQ ID NO: 120017 - RNA, 32 nt, Homo Sapiens
cccccacgucuuacagucgccauccuccaggc

SEQ ID NO: 120018 - RNA, 32 nt, Homo Sapiens
agcaguaguaucaugaugagcguaacgacccu

SEQ ID NO: 120019 - RNA, 32 nt, Homo Sapiens
aaaauaucuaucuauuuucaaauccuguuuuu

SEQ ID NO: 120020 - RNA, 32 nt, Homo Sapiens
gagggccccccuccacccaaggcuggaucucc

SEQ ID NO: 120021 - RNA, 32 nt, Homo Sapiens
accaccucccaccuccaccccaucccuaguca

SEQ ID NO: 120022 - RNA, 31 nt, Homo Sapiens
acucccaaauaaaaguaucagaauaaacaca

SEQ ID NO: 120023 - RNA, 32 nt, Homo Sapiens
gcugccagugagccacacuccuggacacucuc

SEQ ID NO: 120024 - RNA, 32 nt, Homo Sapiens
gacgcugccaucucucuuucugggaguuuaga

SEQ ID NO: 120025 - RNA, 32 nt, Homo Sapiens
cuuucugaagcucuuauaucaaggaacaugca

SEQ ID NO: 120026 - RNA, 32 nt, Homo Sapiens
gcgugcgccgacggcucggucuaccuccuguc

SEQ ID NO: 120027 - RNA, 32 nt, Homo Sapiens
cccuuuugauaaaagggucuuugcuucugauu

SEQ ID NO: 120028 - RNA, 32 nt, Homo Sapiens
gcuucugaguuauauaaggcuacuucaugaca

SEQ ID NO: 120029 - RNA, 32 nt, Homo Sapiens
ggaggacgcggaagaggagcugugggaagggg

SEQ ID NO: 120030 - RNA, 32 nt, Homo Sapiens
cuuugagaauuguaaauucaucaaauaauugc

SEQ ID NO: 120031 - RNA, 32 nt, Homo Sapiens
agggaggcaguucagcgcggccucgggccucg

SEQ ID NO: 120032 - RNA, 32 nt, Homo Sapiens
acugcugaucgacuuugugucucuguugucua

SEQ ID NO: 120033 - RNA, 32 nt, Homo Sapiens
uaguuagggggcagcuggagaaaauaagcuaa

SEQ ID NO: 120034 - RNA, 32 nt, Homo Sapiens
cauccagcuggguagccgggggagcgcgcgug

SEQ ID NO: 120035 - RNA, 32 nt, Homo Sapiens
ccccggccacuuguuucuuuuaaaugcuuauu

SEQ ID NO: 120036 - RNA, 32 nt, Homo Sapiens
ugcccuaccucacuauaauccaaagugcacua

SEQ ID NO: 120037 - RNA, 22 nt, Homo Sapiens
ccaaaauaaaguucuauauuuu

SEQ ID NO: 120038 - RNA, 32 nt, Homo Sapiens
gguugucucuacauuucuuuaucauuccagug

SEQ ID NO: 120039 - RNA, 32 nt, Homo Sapiens
ugauuauaagcaacaguaaaacaaagauccca

SEQ ID NO: 120040 - RNA, 32 nt, Homo Sapiens
aaaggccacuuuucuuuuuguucugccucuca

SEQ ID NO: 120041 - RNA, 32 nt, Homo Sapiens
aacuaaaucgaaucacucucuaucaugaguua

SEQ ID NO: 120042 - RNA, 32 nt, Homo Sapiens
cccaaggccgccuccugcuagcaagaacagag

SEQ ID NO: 120043 - RNA, 32 nt, Homo Sapiens
caacauuauuuuugcaaaagugaguuggacuc

SEQ ID NO: 120044 - RNA, 32 nt, Homo Sapiens
acauuacaguagcauacauuuauuuuuuccaa

SEQ ID NO: 120045 - RNA, 31 nt, Homo Sapiens
augacuuagugcugaaggauaugaauuaggc

SEQ ID NO: 120046 - RNA, 32 nt, Homo Sapiens
cuucagauuuaccaacagcaugaaucaagaaa

SEQ ID NO: 120047 - RNA, 32 nt, Homo Sapiens
ugagagauuccagcccaagcccggccccccac

SEQ ID NO: 120048 - RNA, 32 nt, Homo Sapiens
gcacacggagcccaauaagaugcugaaaagug

SEQ ID NO: 120049 - RNA, 32 nt, Homo Sapiens
uuucugggcaaguuuuauugugagauuuucua

SEQ ID NO: 120050 - RNA, 32 nt, Homo Sapiens
aggacggcugggguccggccccgggagggccc

SEQ ID NO: 120051 - RNA, 32 nt, Homo Sapiens
cucugucaagggucuccaggaugagugucagu

SEQ ID NO: 120052 - RNA, 32 nt, Homo Sapiens
aaauugaagggagaggcugugauuucuguauu

SEQ ID NO: 120053 - RNA, 32 nt, Homo Sapiens
caaaagugaacauugcaugcauguaaugugau

SEQ ID NO: 120054 - RNA, 32 nt, Homo Sapiens
gauuuuacuuuuuaauagauaugacuuugcuu

SEQ ID NO: 120055 - RNA, 32 nt, Homo Sapiens
ugaggcuggugcccaugcuccacacugggagg

SEQ ID NO: 120056 - RNA, 32 nt, Homo Sapiens
gcuaacccuggccuauuuagauuccuuccucu

SEQ ID NO: 120057 - RNA, 32 nt, Homo Sapiens
gauaugucuccucuccuucucacuaaggagcc

SEQ ID NO: 120058 - RNA, 32 nt, Homo Sapiens
gggcuucuggguggcuccugccacugaccuca

SEQ ID NO: 120059 - RNA, 32 nt, Homo Sapiens
uuuguauaaaaugguguuuucauguaaauaaa

SEQ ID NO: 120060 - RNA, 32 nt, Homo Sapiens
guuaaacuuuagaaugaagaacaaagaauggg

SEQ ID NO: 120061 - RNA, 32 nt, Homo Sapiens
ggcacuuguaaaaauguuucuauaaauaugug

SEQ ID NO: 120062 - RNA, 32 nt, Homo Sapiens
ugguggagggagaugccuggguccuguucuuc

SEQ ID NO: 120063 - RNA, 32 nt, Homo Sapiens
guguggagcaguguaaauauuugaggugguga

SEQ ID NO: 120064 - RNA, 32 nt, Homo Sapiens
uauuccagguuuaaguagauuucaugccuggg

SEQ ID NO: 120065 - RNA, 32 nt, Homo Sapiens
cuuccguucguucuucaaaacccaggcaaaac

SEQ ID NO: 120066 - RNA, 32 nt, Homo Sapiens
gggaggagggccagagaggcaguuggaagaug

SEQ ID NO: 120067 - RNA, 32 nt, Homo Sapiens
gcugacagauuuccaagaacuaccaagaaaau

SEQ ID NO: 120068 - RNA, 32 nt, Homo Sapiens
accuccaacccccugcgccccggagggaggcc

SEQ ID NO: 120069 - RNA, 32 nt, Homo Sapiens
uaaaccauaugaacauauauuuuuuagaaacu

SEQ ID NO: 120070 - RNA, 32 nt, Homo Sapiens
aagggcgugggaagagcagggcuugcccagcg

SEQ ID NO: 120071 - RNA, 32 nt, Homo Sapiens
uuuuuuuuguuuuuuuuuuuuacuguuacuuu

SEQ ID NO: 120072 - RNA, 32 nt, Homo Sapiens
gaccgggcggcacgcacgcggugcaggguaac

SEQ ID NO: 120073 - RNA, 32 nt, Homo Sapiens
caagacaaacaagacuccagugggguggucag

SEQ ID NO: 120074 - RNA, 32 nt, Homo Sapiens
ccacaggggacccagcagccuccaggaagucc

SEQ ID NO: 120075 - RNA, 32 nt, Homo Sapiens
aacacaugggaauucugggagauacaauucaa

SEQ ID NO: 120076 - RNA, 32 nt, Homo Sapiens
gccagagaggggcaggugcugggcggcggcug

SEQ ID NO: 120077 - RNA, 32 nt, Homo Sapiens
gcuugccaggcagcugcaggagagugcugcca

SEQ ID NO: 120078 - RNA, 32 nt, Homo Sapiens
ugagaaaggaguaguuuucuaucccucuaaga

SEQ ID NO: 120079 - RNA, 32 nt, Homo Sapiens
cugcucuuacccauuuuuuuuaccucacaccc

SEQ ID NO: 120080 - RNA, 32 nt, Homo Sapiens
agaacuuagacgggauuugguaggccaaguau

SEQ ID NO: 120081 - RNA, 32 nt, Homo Sapiens
uggcuccagaucuggagguguguccauggcgg

SEQ ID NO: 120082 - RNA, 32 nt, Homo Sapiens
cuguaugaccaggcccuuuugggcauccugca

SEQ ID NO: 120083 - RNA, 28 nt, Homo Sapiens
gcccucaguccucccaggauggccuuga

SEQ ID NO: 120084 - RNA, 32 nt, Homo Sapiens
ugugaggaugcccaugagcuaccgcuguacag

SEQ ID NO: 120085 - RNA, 31 nt, Homo Sapiens
ugaaggaaauaaaaaagucucuauuuaaauu

SEQ ID NO: 120086 - RNA, 32 nt, Homo Sapiens
guaaucacaaaacagacacugagccaggggcc

SEQ ID NO: 120087 - RNA, 32 nt, Homo Sapiens
ggcggcgcaucccuccucucccaccuccuggc

SEQ ID NO: 120088 - RNA, 32 nt, Homo Sapiens
gaaaugccuccugcugccccagccuuagagag

SEQ ID NO: 120089 - RNA, 32 nt, Homo Sapiens
uaaagugaacaaaguuugaauaguuuagagua

SEQ ID NO: 120090 - RNA, 32 nt, Homo Sapiens
auagauguccgaaacagcacgcaacauuuagg

SEQ ID NO: 120091 - RNA, 32 nt, Homo Sapiens
uccacgucucuuucuuuuucucuauuacuaca

SEQ ID NO: 120092 - RNA, 32 nt, Homo Sapiens
guagcuaccacuggugugggcugcuggcugca

SEQ ID NO: 120093 - RNA, 32 nt, Homo Sapiens
gagccuccucaauaagagagaaguucucauug

SEQ ID NO: 120094 - RNA, 32 nt, Homo Sapiens
auuauuuagagggauucuuuuaccaugugaua

SEQ ID NO: 120095 - RNA, 32 nt, Homo Sapiens
gaaacgcuuuuuccccuccuuaauuuuuauau

SEQ ID NO: 120096 - RNA, 32 nt, Homo Sapiens
agccgggugugguggcgggcgccuguaguccc

SEQ ID NO: 120097 - RNA, 30 nt, Homo Sapiens
cugcgguacugaggaagcggcaggaggaga

SEQ ID NO: 120098 - RNA, 32 nt, Homo Sapiens
aaggcuggggcugcgggugcugaccaggggcc

SEQ ID NO: 120099 - RNA, 32 nt, Homo Sapiens
ggggagccagcuugcugggagagcgggacggu

SEQ ID NO: 120100 - RNA, 32 nt, Homo Sapiens
gaagagaguucgcugcagggagugaggaaagg

SEQ ID NO: 120101 - RNA, 32 nt, Homo Sapiens
gacgcgcccuguggggacccggaccaggaggg

SEQ ID NO: 120102 - RNA, 32 nt, Homo Sapiens
caggccacaucuuuuccaaggcaaacccuguu

SEQ ID NO: 120103 - RNA, 32 nt, Homo Sapiens
gugcugcuaggucuggggucauuuucugcuca

SEQ ID NO: 120104 - RNA, 32 nt, Homo Sapiens
cuuuaaaaagagaacauauuuuaacaaaguuu

SEQ ID NO: 120105 - RNA, 32 nt, Homo Sapiens
ugcgcaugugaacacgugugauuucucagugu

SEQ ID NO: 120106 - RNA, 32 nt, Homo Sapiens
guaaucaguacuugcucauuuauuugucugua

SEQ ID NO: 120107 - RNA, 32 nt, Homo Sapiens
ggaacugucggauacuugaacucucaagagcu

SEQ ID NO: 120108 - RNA, 32 nt, Homo Sapiens
gagcugugaucgugccacugaccuccagccug

SEQ ID NO: 120109 - RNA, 32 nt, Homo Sapiens
uuucggacucagcccaccugcacccaggugaa

SEQ ID NO: 120110 - RNA, 32 nt, Homo Sapiens
agugccaagcuuccuuuuuuuuuuuuuccuga

SEQ ID NO: 120111 - RNA, 32 nt, Homo Sapiens
gccaagcacccauucaucccccugcccccauc

SEQ ID NO: 120112 - RNA, 32 nt, Homo Sapiens
gcaaggaccucucauggacacuggccucuagc

SEQ ID NO: 120113 - RNA, 32 nt, Homo Sapiens
agaaugguuuacacuaacauuaugacaaaacu

SEQ ID NO: 120114 - RNA, 32 nt, Homo Sapiens
cucccgucuccaucugucacgugguucaccau

SEQ ID NO: 120115 - RNA, 32 nt, Homo Sapiens
agaggcccacugagauuaaccuuucucaccag

SEQ ID NO: 120116 - RNA, 32 nt, Homo Sapiens
ucuuacauugcucucugaacuacuugaauaua

SEQ ID NO: 120117 - RNA, 32 nt, Homo Sapiens
ucagguauuuagucuuccugcagaucaaaagg

SEQ ID NO: 120118 - RNA, 32 nt, Homo Sapiens
ucugccacuccagcagcccugagugggaggag

SEQ ID NO: 120119 - RNA, 31 nt, Homo Sapiens
guaaaucugaaauaaaaggugcuguuccuuc

SEQ ID NO: 120120 - RNA, 32 nt, Homo Sapiens
ggccaccaggaguucaagaccagcccgggcaa

SEQ ID NO: 120121 - RNA, 32 nt, Homo Sapiens
ugcuuuauuggaaaaaauguuguaauaauuua

SEQ ID NO: 120122 - RNA, 32 nt, Homo Sapiens
acucuggaagucucuuccuccuccuccucuuc

SEQ ID NO: 120123 - RNA, 32 nt, Homo Sapiens
gagcccugccccacccugcugaaaaaacaucc

SEQ ID NO: 120124 - RNA, 32 nt, Homo Sapiens
cuuaucugacuucuguuucuuaucccauaacu

SEQ ID NO: 120125 - RNA, 32 nt, Homo Sapiens
ggcuggaaagcacgguucuccucugccuuaaa

SEQ ID NO: 120126 - RNA, 32 nt, Homo Sapiens
uggccugaagcaaguggagaaucacaaaagaa

SEQ ID NO: 120127 - RNA, 32 nt, Homo Sapiens
guuauuaaaugaauugaauuucaauugcccca

SEQ ID NO: 120128 - RNA, 32 nt, Homo Sapiens
agauauguaaaaagauuccuuuuucuaaccug

SEQ ID NO: 120129 - RNA, 32 nt, Homo Sapiens
uaaaaaaccacaaaacccuuugaaaaaagaug

SEQ ID NO: 120130 - RNA, 32 nt, Homo Sapiens
ugaaucuggcauuguucauaucgcaguucgua

SEQ ID NO: 120131 - RNA, 32 nt, Homo Sapiens
cagggggcggggguggcaugggaaaugaaaga

SEQ ID NO: 120132 - RNA, 32 nt, Homo Sapiens
acucagagggcgccuuccuugccccaggacag

SEQ ID NO: 120133 - RNA, 32 nt, Homo Sapiens
cuuaagacuccgggcaccgccacgcgcuguca

SEQ ID NO: 120134 - RNA, 32 nt, Homo Sapiens
uuuuaauaaaaagcagaauagauguuuguuuu

SEQ ID NO: 120135 - RNA, 32 nt, Homo Sapiens
guuuuauaguaauuuaauuugcuccuguagcu

SEQ ID NO: 120136 - RNA, 32 nt, Homo Sapiens
uaagccagcccacaggguccugcagcuugucc

SEQ ID NO: 120137 - RNA, 32 nt, Homo Sapiens
uuuguauuaucuacaagugccuuuaaacacaa

SEQ ID NO: 120138 - RNA, 32 nt, Homo Sapiens
gagcgaggauuucaggacugaggcagccugug

SEQ ID NO: 120139 - RNA, 32 nt, Homo Sapiens
uuugacguagagguuucaauuuuuucaccuug

SEQ ID NO: 120140 - RNA, 32 nt, Homo Sapiens
aacccuuuacuuugcucaggcuuucaagauug

SEQ ID NO: 120141 - RNA, 32 nt, Homo Sapiens
aacacggaugagaaaagaauguguuacauagg

SEQ ID NO: 120142 - RNA, 32 nt, Homo Sapiens
caccggugccccuagccccgcacaucagcgcg

SEQ ID NO: 120143 - RNA, 32 nt, Homo Sapiens
ucggguaggugacggcuugguuggggucgcug

SEQ ID NO: 120144 - RNA, 32 nt, Homo Sapiens
cagaacaauauuuucaaugucacucuuuucuc

SEQ ID NO: 120145 - RNA, 32 nt, Homo Sapiens
cccagagagagggucagcaggggggccccgcc

SEQ ID NO: 120146 - RNA, 27 nt, Homo Sapiens
uugugagccuccuucagccuuuucccu

SEQ ID NO: 120147 - RNA, 32 nt, Homo Sapiens
ucugagcucuccagcuggcccccaauugcucc

SEQ ID NO: 120148 - RNA, 32 nt, Homo Sapiens
uucagguaaguucagauuuuucccuccaguug

SEQ ID NO: 120149 - RNA, 32 nt, Homo Sapiens
ggccagugucuccaugcagaucagauggaggc

SEQ ID NO: 120150 - RNA, 32 nt, Homo Sapiens
ggaggaaggggaggcugcugcauuguggguga

SEQ ID NO: 120151 - RNA, 32 nt, Homo Sapiens
agcuucuccuuucugggcugggcuuguucaag

SEQ ID NO: 120152 - RNA, 32 nt, Homo Sapiens
guauaggcucugcccagaugccaucacauccc

SEQ ID NO: 120153 - RNA, 32 nt, Homo Sapiens
gaaauaaaacuguaaauuugcauaacuggaug

SEQ ID NO: 120154 - RNA, 32 nt, Homo Sapiens
gcuucuaauuuucaaucaucuguugauauacu

SEQ ID NO: 120155 - RNA, 32 nt, Homo Sapiens
cagcuaauuuuuguauuuuuuguagagauggg

SEQ ID NO: 120156 - RNA, 32 nt, Homo Sapiens
cuggaggccucgcuccggggccgacccgaggc

SEQ ID NO: 120157 - RNA, 32 nt, Homo Sapiens
ccaggcagcaauaaggaaauaguucucuggcu

SEQ ID NO: 120158 - RNA, 32 nt, Homo Sapiens
ggaggggggacgacggcugcugccgcagcagc

SEQ ID NO: 120159 - RNA, 32 nt, Homo Sapiens
aaugugagaacccaaaucauguuuauaaaaua

SEQ ID NO: 120160 - RNA, 32 nt, Homo Sapiens
acgugccccuaguuauuuuuuauuaacaccau

SEQ ID NO: 120161 - RNA, 32 nt, Homo Sapiens
gagauucuuggcauguaauauauaucacugcu

SEQ ID NO: 120162 - RNA, 32 nt, Homo Sapiens
cuuuguuuggcugcugggauagauaagcaugg

SEQ ID NO: 120163 - RNA, 28 nt, Homo Sapiens
aaaucaccguggccgccgcugugaacgc

SEQ ID NO: 120164 - RNA, 32 nt, Homo Sapiens
uccccaggugugugcuuuaggcgugggcugac

SEQ ID NO: 120165 - RNA, 32 nt, Homo Sapiens
uggauccauuuucuauuuuguguuccauuggc

SEQ ID NO: 120166 - RNA, 32 nt, Homo Sapiens
ggcacgaggccagcuccucugcuaccaugaau

SEQ ID NO: 120167 - RNA, 32 nt, Homo Sapiens
cuggcccggacugugcgccuucugggaggggg

SEQ ID NO: 120168 - RNA, 32 nt, Homo Sapiens
uaccaauaauuuucccaaaauaaugaaagacc

SEQ ID NO: 120169 - RNA, 32 nt, Homo Sapiens
cacuuccccgaguauuaagggcccuugguauc

SEQ ID NO: 120170 - RNA, 32 nt, Homo Sapiens
cgugauucaggagacugaagggaccuggugga

SEQ ID NO: 120171 - RNA, 32 nt, Homo Sapiens
uuacauuugauuccagaggcuauguucaguug

SEQ ID NO: 120172 - RNA, 32 nt, Homo Sapiens
caugugcagcuuucuuuuuuguuagaugccac

SEQ ID NO: 120173 - RNA, 32 nt, Homo Sapiens
aaaagaauccuaauuuguacacuuaacaugua

SEQ ID NO: 120174 - RNA, 32 nt, Homo Sapiens
ugcagacugcuucuuauaauucuuagaauucu

SEQ ID NO: 120175 - RNA, 32 nt, Homo Sapiens
uuuuucucuucguugacuuugggguucaggug

SEQ ID NO: 120176 - RNA, 32 nt, Homo Sapiens
gccccuggcugcaacccagacaauggcgagau

SEQ ID NO: 120177 - RNA, 32 nt, Homo Sapiens
cuauagcuacuuaauuuuuaggagacaguaau

SEQ ID NO: 120178 - RNA, 32 nt, Homo Sapiens
gcugaaacccaccugguuccggaauccugucc

SEQ ID NO: 120179 - RNA, 32 nt, Homo Sapiens
agccgagcacgcgggucugucaucaugucgcg

SEQ ID NO: 120180 - RNA, 32 nt, Homo Sapiens
aggaagugacuucaguugaacucuguaccugu

SEQ ID NO: 120181 - RNA, 32 nt, Homo Sapiens
cugcugguucaggguuggccccugcccggcug

SEQ ID NO: 120182 - RNA, 32 nt, Homo Sapiens
cuugcuuauuuuuucuggaugagucugggaca

SEQ ID NO: 120183 - RNA, 32 nt, Homo Sapiens
gggcuggcaggauggaaggacugaggaccagc

SEQ ID NO: 120184 - RNA, 32 nt, Homo Sapiens
ccccaggcuuuagugcagcugccaacgcuguu

SEQ ID NO: 120185 - RNA, 32 nt, Homo Sapiens
caggucuuaggaacagcaaggagcucagugug

SEQ ID NO: 120186 - RNA, 32 nt, Homo Sapiens
cugggucaaagaagccgucuccaggcucucug

SEQ ID NO: 120187 - RNA, 32 nt, Homo Sapiens
ugccuaaaaugaauuuuccagaugauugaaua

SEQ ID NO: 120188 - RNA, 32 nt, Homo Sapiens
aaaugcaaacagaccguucaccaccaucucca

SEQ ID NO: 120189 - RNA, 32 nt, Homo Sapiens
uuuacagucugaucuuuugacuucuacauaua

SEQ ID NO: 120190 - RNA, 32 nt, Homo Sapiens
ggggccggacgggagguggcggagguggcggc

SEQ ID NO: 120191 - RNA, 32 nt, Homo Sapiens
aguacaaagcaugaagaugugaaaauaucauc

SEQ ID NO: 120192 - RNA, 32 nt, Homo Sapiens
uucaguugcauuccuuggugauuuuugugucg

SEQ ID NO: 120193 - RNA, 32 nt, Homo Sapiens
gcaggggccgguacaagauacuuccucuucag

SEQ ID NO: 120194 - RNA, 32 nt, Homo Sapiens
auccuucgugaacauccccucccaucauuacc

SEQ ID NO: 120195 - RNA, 32 nt, Homo Sapiens
aauaacaucugaaaagaaaugcuaauguaauc

SEQ ID NO: 120196 - RNA, 32 nt, Homo Sapiens
auccaaaacugggaugagcagcuugggauaau

SEQ ID NO: 120197 - RNA, 32 nt, Homo Sapiens
agagcuguucuuccaaagcccccaggcuggcu

SEQ ID NO: 120198 - RNA, 32 nt, Homo Sapiens
cuccuccucagcauugaugacaauugcaauua

SEQ ID NO: 120199 - RNA, 32 nt, Homo Sapiens
gguuuuuuuccuuuguuuuaaucuucucacaa

SEQ ID NO: 120200 - RNA, 32 nt, Homo Sapiens
uguuguuuagggggcgcggcaccgcaccgcuc

SEQ ID NO: 120201 - RNA, 30 nt, Homo Sapiens
aaaccugcgcccguggaggggcgcgcagag

SEQ ID NO: 120202 - RNA, 32 nt, Homo Sapiens
ccuccccuuucugauuugcugaacgguaauau

SEQ ID NO: 120203 - RNA, 32 nt, Homo Sapiens
acgggcacugggcgacucugugccucgcugaa

SEQ ID NO: 120204 - RNA, 32 nt, Homo Sapiens
gagucugugugagcugacagcaagacauaucc

SEQ ID NO: 120205 - RNA, 32 nt, Homo Sapiens
gaacuuuuaaacaauucgacauugauuuaaac

SEQ ID NO: 120206 - RNA, 32 nt, Homo Sapiens
ggcugcaugcgugccugaggucacacagcuca

SEQ ID NO: 120207 - RNA, 32 nt, Homo Sapiens
ugcuuuccauucuccagaacucuuuuuuccuu

SEQ ID NO: 120208 - RNA, 32 nt, Homo Sapiens
cuaucaaaacgcuuagacaaacguaugguaaa

SEQ ID NO: 120209 - RNA, 32 nt, Homo Sapiens
guauauuguuaugggucaguacuuauuaguac

SEQ ID NO: 120210 - RNA, 32 nt, Homo Sapiens
acuacggccaccccaaaggaccccgacgccaa

SEQ ID NO: 120211 - RNA, 32 nt, Homo Sapiens
gaagaaaaagaaaaaagaagaggauccugaac

SEQ ID NO: 120212 - RNA, 32 nt, Homo Sapiens
ccuccugagaagcuaggacuacaggcaugcac

SEQ ID NO: 120213 - RNA, 32 nt, Homo Sapiens
ugguuuauggccauacguggagguuuuuuguu

SEQ ID NO: 120214 - RNA, 32 nt, Homo Sapiens
cccauguucagcaaugucaauggcaucaggag

SEQ ID NO: 120215 - RNA, 32 nt, Homo Sapiens
ccacaaggacaaagggagcggccaccucgacc

SEQ ID NO: 120216 - RNA, 32 nt, Homo Sapiens
aagcagaaagaccugauguggacgagaaacga

SEQ ID NO: 120217 - RNA, 32 nt, Homo Sapiens
uugcaggccccucccugugugaugagggauga

SEQ ID NO: 120218 - RNA, 32 nt, Homo Sapiens
ugggccgucagagcuuccagugcgcagccuuc

SEQ ID NO: 120219 - RNA, 32 nt, Homo Sapiens
gcugcuggcgccugcgcagagcccucuguccc

SEQ ID NO: 120220 - RNA, 32 nt, Homo Sapiens
accccugccucuauuuuuuuuaaaaagaaagu

SEQ ID NO: 120221 - RNA, 32 nt, Homo Sapiens
caaacuccaguggaagcagagagaccuguccc

SEQ ID NO: 120222 - RNA, 32 nt, Homo Sapiens
ugaaaagcuauuccuuauaauaaacauggcag

SEQ ID NO: 120223 - RNA, 32 nt, Homo Sapiens
auccauccuuuaauccaacacacaccugcaau

SEQ ID NO: 120224 - RNA, 32 nt, Homo Sapiens
agcaauuaggauaggccagguuaugcuucaaa

SEQ ID NO: 120225 - RNA, 32 nt, Homo Sapiens
aagagcgccucccagccucguaggguggucac

SEQ ID NO: 120226 - RNA, 32 nt, Homo Sapiens
guaaacugugucuacaguuuauccauauaacu

SEQ ID NO: 120227 - RNA, 32 nt, Homo Sapiens
uuagaggcuuugcauucugcacccagcuucac

SEQ ID NO: 120228 - RNA, 32 nt, Homo Sapiens
uguucagugagcugaaaaucugaaucagaaag

SEQ ID NO: 120229 - RNA, 32 nt, Homo Sapiens
aaacagaaacaaaaacacuaaaaauaaaaaug

SEQ ID NO: 120230 - RNA, 32 nt, Homo Sapiens
cuggagcccagcugccuacucagcauuuccac

SEQ ID NO: 120231 - RNA, 32 nt, Homo Sapiens
ugccacccacuuugaugugcgcuauuguuaga

SEQ ID NO: 120232 - RNA, 32 nt, Homo Sapiens
gcuuccuggccucccuucuccuuucuaagccc

SEQ ID NO: 120233 - RNA, 32 nt, Homo Sapiens
cuucaguaaaauguuauaaaacaugagguuua

SEQ ID NO: 120234 - RNA, 32 nt, Homo Sapiens
cuuuaauuuuaagagaaguaauauugugaacu

SEQ ID NO: 120235 - RNA, 32 nt, Homo Sapiens
aauaguugauuuucuuuuuaagcugggcaaua

SEQ ID NO: 120236 - RNA, 32 nt, Homo Sapiens
cuuucucugugccuucagcagccccuguccuc

SEQ ID NO: 120237 - RNA, 32 nt, Homo Sapiens
uauauuucuguagucuucuuuaauuuuucuca

SEQ ID NO: 120238 - RNA, 32 nt, Homo Sapiens
cauuuacuuguacagggaaauggugguuuacu

SEQ ID NO: 120239 - RNA, 32 nt, Homo Sapiens
gggcuguggcuugcagaacaaacuacacuuuu

SEQ ID NO: 120240 - RNA, 32 nt, Homo Sapiens
gguccccagcagcaagagguggggggaggcac

SEQ ID NO: 120241 - RNA, 32 nt, Homo Sapiens
gcgccucuguugcgcaggcgcagaacuacaac

SEQ ID NO: 120242 - RNA, 32 nt, Homo Sapiens
cgccugcuggagcugcugcugcuccucgcuga

SEQ ID NO: 120243 - RNA, 32 nt, Homo Sapiens
aaagugacauccuggccaccucacgcauuuga

SEQ ID NO: 120244 - RNA, 32 nt, Homo Sapiens
ggguaaucaguucuugacuagugaacaaauga

SEQ ID NO: 120245 - RNA, 32 nt, Homo Sapiens
auggaggugggaccagaugcuucccugugcug

SEQ ID NO: 120246 - RNA, 32 nt, Homo Sapiens
cgacccggccccagcgcagcuaugaaccugga

SEQ ID NO: 120247 - RNA, 28 nt, Homo Sapiens
cagacggggcggccgggcagagacgcuc

SEQ ID NO: 120248 - RNA, 32 nt, Homo Sapiens
cugccggcagcucagcuggaaccaugggaggc

SEQ ID NO: 120249 - RNA, 32 nt, Homo Sapiens
aggaauggguccguacagccucugucugcaac

SEQ ID NO: 120250 - RNA, 32 nt, Homo Sapiens
uaggcaccgcauucugaucuggacaaagucgg

SEQ ID NO: 120251 - RNA, 32 nt, Homo Sapiens
uuuagggucuguccucauaccugucacauugg

SEQ ID NO: 120252 - RNA, 32 nt, Homo Sapiens
ugauacugaugcagaagcuaguagauugguua

SEQ ID NO: 120253 - RNA, 32 nt, Homo Sapiens
gcccgaucuuaccccugacccgagggcggccu

SEQ ID NO: 120254 - RNA, 32 nt, Homo Sapiens
ugcagccaguccucgcuuugcugucccuguuc

SEQ ID NO: 120255 - RNA, 32 nt, Homo Sapiens
uuauaauuguuuucuuuuucucacuuaugcuc

SEQ ID NO: 120256 - RNA, 32 nt, Homo Sapiens
cuggucccgacggcgggccugggucucgcgcg

SEQ ID NO: 120257 - RNA, 32 nt, Homo Sapiens
ggcuacucucaaacuccugaccucaggugauc

SEQ ID NO: 120258 - RNA, 32 nt, Homo Sapiens
auuuuuaugcuacuuuccuguuugcacuacua

SEQ ID NO: 120259 - RNA, 32 nt, Homo Sapiens
cuaguacuucauuuucacuggauacauuuuca

SEQ ID NO: 120260 - RNA, 32 nt, Homo Sapiens
caggccacccucauaguaagugguguaguauu

SEQ ID NO: 120261 - RNA, 32 nt, Homo Sapiens
auguaccuauugugaaaaugugaagcuguauu

SEQ ID NO: 120262 - RNA, 32 nt, Homo Sapiens
caaaucagaguucuuugugcaaaauauacgua

SEQ ID NO: 120263 - RNA, 32 nt, Homo Sapiens
guuggaaagauuaucucuagaguuauauuuuc

SEQ ID NO: 120264 - RNA, 32 nt, Homo Sapiens
agugcccuugcagucugacuguguacacuugg

SEQ ID NO: 120265 - RNA, 32 nt, Homo Sapiens
cgcucgcucgagucgccggcugcuugacucca

SEQ ID NO: 120266 - RNA, 32 nt, Homo Sapiens
agcugagauugugcugcugcacuccagccugg

SEQ ID NO: 120267 - RNA, 32 nt, Homo Sapiens
auuugggaggguggagggaggcaguguccuuc

SEQ ID NO: 120268 - RNA, 32 nt, Homo Sapiens
uaaaggauggcauuuuccugcugucuucugug

SEQ ID NO: 120269 - RNA, 32 nt, Homo Sapiens
aaaucuuggccaucguguggccgccaccuccg

SEQ ID NO: 120270 - RNA, 32 nt, Homo Sapiens
aaugcuguaaagaaaauagaaaugcgauagag

SEQ ID NO: 120271 - RNA, 32 nt, Homo Sapiens
uguggcagcuccggcucagcccugcugcccug

SEQ ID NO: 120272 - RNA, 29 nt, Homo Sapiens
agcgcacuccagggcaggacgccgccccc

SEQ ID NO: 120273 - RNA, 27 nt, Homo Sapiens
gcaugugcucacugccugugccccggg

SEQ ID NO: 120274 - RNA, 29 nt, Homo Sapiens
uguuucucuaaguuuaauuuucuagcgug

SEQ ID NO: 120275 - RNA, 32 nt, Homo Sapiens
accugaggaggucugauguguaagcagccucu

SEQ ID NO: 120276 - RNA, 31 nt, Homo Sapiens
uuccuucauuugaguaaauucacuaaauauu

SEQ ID NO: 120277 - RNA, 32 nt, Homo Sapiens
uugcaaaaaaucaagucacuucuuuggaaaga

SEQ ID NO: 120278 - RNA, 32 nt, Homo Sapiens
uuuggggcucugcaguuccugcaucucuaagc

SEQ ID NO: 120279 - RNA, 32 nt, Homo Sapiens
aaaguuucaaaagaaaauguuuauuuguucuc

SEQ ID NO: 120280 - RNA, 32 nt, Homo Sapiens
uguucaggccacgaaugcuaucuugcagccca

SEQ ID NO: 120281 - RNA, 32 nt, Homo Sapiens
ccucccaaguagcugggauuacaguuuccauc

SEQ ID NO: 120282 - RNA, 32 nt, Homo Sapiens
ucccgcgggcccgcggacccagcugucaggca

SEQ ID NO: 120283 - RNA, 32 nt, Homo Sapiens
cagcagucaauaaugccacuuuagacaaaaau

SEQ ID NO: 120284 - RNA, 32 nt, Homo Sapiens
aguguuggggcaggaagguggaugcuguuguc

SEQ ID NO: 120285 - RNA, 32 nt, Homo Sapiens
acuuuagaguagcaugagagaauuguaucauu

SEQ ID NO: 120286 - RNA, 32 nt, Homo Sapiens
auuauaagcuauaugcugaaaauggcuuccau

SEQ ID NO: 120287 - RNA, 32 nt, Homo Sapiens
uuuguauuuuuguagagacaggguuucaccau

SEQ ID NO: 120288 - RNA, 32 nt, Homo Sapiens
ccggccaucuaaaaaucugccauuggugaagu

SEQ ID NO: 120289 - RNA, 32 nt, Homo Sapiens
uccucggucuccuccgccuccagcuccgcgcu

SEQ ID NO: 120290 - RNA, 32 nt, Homo Sapiens
uagcccugagguuuccuccuucccaucuucug

SEQ ID NO: 120291 - RNA, 32 nt, Homo Sapiens
aacaacacagaaauaacaagggcagacuuucu

SEQ ID NO: 120292 - RNA, 32 nt, Homo Sapiens
gugcuuagcaaggccaaguucucccuugguuc

SEQ ID NO: 120293 - RNA, 32 nt, Homo Sapiens
cuccgccauagcuucugucgcuccaucgcccg

SEQ ID NO: 120294 - RNA, 32 nt, Homo Sapiens
cccacaggccccaggccaguguccaucagccu

SEQ ID NO: 120295 - RNA, 32 nt, Homo Sapiens
cuguuuauuuagugaugaggauuacacuugau

SEQ ID NO: 120296 - RNA, 32 nt, Homo Sapiens
uguucaucuguuuuucaauaccuuuaaguuca

SEQ ID NO: 120297 - RNA, 32 nt, Homo Sapiens
cauauagaacaccuuucccaauaggaaacccc

SEQ ID NO: 120298 - RNA, 32 nt, Homo Sapiens
uggggcagugcagcuguaggccaagcuguauc

SEQ ID NO: 120299 - RNA, 32 nt, Homo Sapiens
agaacaacagagcuuggcagagcuaggcugga

SEQ ID NO: 120300 - RNA, 32 nt, Homo Sapiens
uagagacaaaguucggagccccgcccccgccg

SEQ ID NO: 120301 - RNA, 32 nt, Homo Sapiens
cuaagcaaaaauaaaacuuaugguaauucuuu

SEQ ID NO: 120302 - RNA, 32 nt, Homo Sapiens
cccugcaucucauaccuuuaccucuggccagu

SEQ ID NO: 120303 - RNA, 32 nt, Homo Sapiens
ccggaagggcuuugguuccuucucugggucug

SEQ ID NO: 120304 - RNA, 32 nt, Homo Sapiens
uggaggguaaguaacccaaaucguacagcuga

SEQ ID NO: 120305 - RNA, 32 nt, Homo Sapiens
gcccauggugccucgugcugcucuccccaccu

SEQ ID NO: 120306 - RNA, 32 nt, Homo Sapiens
ccuccgcuucccagguaauauuauuuaaauaa

SEQ ID NO: 120307 - RNA, 32 nt, Homo Sapiens
aaguagcuuuuguaaaugauuucuguggaaau

SEQ ID NO: 120308 - RNA, 32 nt, Homo Sapiens
uaucucacaguguggggaaaaggaagagagau

SEQ ID NO: 120309 - RNA, 32 nt, Homo Sapiens
auguuuuauuguaauugucuuaauuugcuaag

SEQ ID NO: 120310 - RNA, 32 nt, Homo Sapiens
uguguuugacuucugcauuugaguaucagucu

SEQ ID NO: 120311 - RNA, 32 nt, Homo Sapiens
gcuggcguccgcugcgccgccccugggcaggc

SEQ ID NO: 120312 - RNA, 32 nt, Homo Sapiens
uagauguuuuauuccauaugucuucacaaguc

SEQ ID NO: 120313 - RNA, 32 nt, Homo Sapiens
guugaaaacaauuacuacagauauuucaucca

SEQ ID NO: 120314 - RNA, 32 nt, Homo Sapiens
ccgaggaggaggagcgcucugcccggccgccg

SEQ ID NO: 120315 - RNA, 32 nt, Homo Sapiens
ccuuguugcuaaggcccggaccgucaucccag

SEQ ID NO: 120316 - RNA, 32 nt, Homo Sapiens
gggaccgggacgggaaggaagaaggaggcuag

SEQ ID NO: 120317 - RNA, 32 nt, Homo Sapiens
uugaaaauuacauaagauuuaaugcccuucaa

SEQ ID NO: 120318 - RNA, 32 nt, Homo Sapiens
uuucucaugagcauccuccauggaucucccug

SEQ ID NO: 120319 - RNA, 32 nt, Homo Sapiens
ugucccauuuuuaauaacuauauucuauuauu

SEQ ID NO: 120320 - RNA, 32 nt, Homo Sapiens
gccucucugcccguggcgcuuacggccaccuu

SEQ ID NO: 120321 - RNA, 32 nt, Homo Sapiens
caaagauguccacacuguuuuaaacuugaccc

SEQ ID NO: 120322 - RNA, 31 nt, Homo Sapiens
cuugcaaagaugcagucaccauagaugucca

SEQ ID NO: 120323 - RNA, 32 nt, Homo Sapiens
aaugaguucuuugcuccuauuugugaacauuc

SEQ ID NO: 120324 - RNA, 32 nt, Homo Sapiens
aagcuccggccgcgucccccgcgccagccccg

SEQ ID NO: 120325 - RNA, 32 nt, Homo Sapiens
uugggagauuccaggagucaggguagagaauu

SEQ ID NO: 120326 - RNA, 32 nt, Homo Sapiens
cugcaaaggaaauggacaaaaaugagaaugaa

SEQ ID NO: 120327 - RNA, 32 nt, Homo Sapiens
gcauaagacaccaugccuggacuugcaugcug

SEQ ID NO: 120328 - RNA, 32 nt, Homo Sapiens
ugcaaaccuucgcuaugucugaugccauuccu

SEQ ID NO: 120329 - RNA, 32 nt, Homo Sapiens
ggccaacuuccacagcagccaugcguccaagg

SEQ ID NO: 120330 - RNA, 31 nt, Homo Sapiens
uaaaguucaaaauaaagauuuauuuucaaac

SEQ ID NO: 120331 - RNA, 32 nt, Homo Sapiens
uaauagcagcuagccauugauugaagaccucu

SEQ ID NO: 120332 - RNA, 32 nt, Homo Sapiens
acacuucaaagcacgucuagcacuaaugcucu

SEQ ID NO: 120333 - RNA, 32 nt, Homo Sapiens
uuuauuuucugaaauacagauuugagcuauca

SEQ ID NO: 120334 - RNA, 32 nt, Homo Sapiens
auucuuagcauuaaccuauuuuuaaagaaacc

SEQ ID NO: 120335 - RNA, 32 nt, Homo Sapiens
caggagugggucuggucucaucagggagggca

SEQ ID NO: 120336 - RNA, 30 nt, Homo Sapiens
cgggccccgacgcgcgcgggucucguuugg

SEQ ID NO: 120337 - RNA, 32 nt, Homo Sapiens
ccuggaagccagcagggccuugccagcaaagc

SEQ ID NO: 120338 - RNA, 31 nt, Homo Sapiens
ggacuagcucaggucgcucuaagcacaaacg

SEQ ID NO: 120339 - RNA, 32 nt, Homo Sapiens
uuuuagaaaaggaaaguagcuaaacucuuggu

SEQ ID NO: 120340 - RNA, 32 nt, Homo Sapiens
uguacuaguuuaugguucugcagucaagguug

SEQ ID NO: 120341 - RNA, 32 nt, Homo Sapiens
uauaggugcacaccaccacaccugacagagua

SEQ ID NO: 120342 - RNA, 32 nt, Homo Sapiens
aacauuuuugcuccagcccccaucccaguccc

SEQ ID NO: 120343 - RNA, 32 nt, Homo Sapiens
ucccccguucaggccgccagccccacauucug

SEQ ID NO: 120344 - RNA, 32 nt, Homo Sapiens
aguauaaaaaauaugugcagaauuugggagug

SEQ ID NO: 120345 - RNA, 32 nt, Homo Sapiens
uaauagcuauaggggagggagccauguuguag

SEQ ID NO: 120346 - RNA, 32 nt, Homo Sapiens
ugcugugcagcucacaccacuccagaaccuga

SEQ ID NO: 120347 - RNA, 32 nt, Homo Sapiens
auuucaguaaguuaaaauauuuucauuguaac

SEQ ID NO: 120348 - RNA, 32 nt, Homo Sapiens
cccaagaaagaggaaaacuuugccuacaacuu

SEQ ID NO: 120349 - RNA, 32 nt, Homo Sapiens
ucggggccgggcccgggaagcgcgaggagcgc

SEQ ID NO: 120350 - RNA, 32 nt, Homo Sapiens
gggucuuaguugaugucuuguuuccugagccu

SEQ ID NO: 120351 - RNA, 32 nt, Homo Sapiens
gucaagauaauguuuguauuuucaguagagau

SEQ ID NO: 120352 - RNA, 32 nt, Homo Sapiens
acuucuaguuuauguuauacagcauauuucau

SEQ ID NO: 120353 - RNA, 32 nt, Homo Sapiens
ccucagcccucccccggucucagagagcccug

SEQ ID NO: 120354 - RNA, 31 nt, Homo Sapiens
aggcaguugaggcccauucagguguuggaac

SEQ ID NO: 120355 - RNA, 32 nt, Homo Sapiens
cccagaaucucugagcuuuuuaucuuacacca

SEQ ID NO: 120356 - RNA, 32 nt, Homo Sapiens
ucuucugaggacacugaugacacugauuaaug

SEQ ID NO: 120357 - RNA, 32 nt, Homo Sapiens
agggucaucauuauuuccaaauauuguuuguc

SEQ ID NO: 120358 - RNA, 32 nt, Homo Sapiens
ugugugcgccggggaggcgccggcuuguacuc

SEQ ID NO: 120359 - RNA, 32 nt, Homo Sapiens
ucugugggacugccuuaagaccccaucgguuc

SEQ ID NO: 120360 - RNA, 32 nt, Homo Sapiens
aaaagguugugugaucuuugauuuuaaaaauu

SEQ ID NO: 120361 - RNA, 32 nt, Homo Sapiens
cuuugaaacauuuaaaaagggauugggguuga

SEQ ID NO: 120362 - RNA, 32 nt, Homo Sapiens
cuagacaggucuuuaacuucaucaguguguug

SEQ ID NO: 120363 - RNA, 32 nt, Homo Sapiens
uggccagccgugcagcugcccaggcgcuaugg

SEQ ID NO: 120364 - RNA, 32 nt, Homo Sapiens
uuccacaagccauugucauccaaauucaacuc

SEQ ID NO: 120365 - RNA, 32 nt, Homo Sapiens
guggaaaaaguacuuuuggaaggcaugggguu

SEQ ID NO: 120366 - RNA, 32 nt, Homo Sapiens
uccauuacuccuuuucucggcccgcggcccga

SEQ ID NO: 120367 - RNA, 32 nt, Homo Sapiens
acacagcgggacgcggccggcggccucagagu

SEQ ID NO: 120368 - RNA, 32 nt, Homo Sapiens
agcaucuccuggguugaggcuggccauguccu

SEQ ID NO: 120369 - RNA, 32 nt, Homo Sapiens
cccacccuccccauggcccacccaucugggcu

SEQ ID NO: 120370 - RNA, 32 nt, Homo Sapiens
aaacaguacacuaucuuaauuauuguacauuu

SEQ ID NO: 120371 - RNA, 32 nt, Homo Sapiens
uaaacuggaaaacaguauuuugguugucuuag

SEQ ID NO: 120372 - RNA, 28 nt, Homo Sapiens
acacucauggcuaccagugggccugcug

SEQ ID NO: 120373 - RNA, 32 nt, Homo Sapiens
aggggcugggcagcugccagugacccaagccc

SEQ ID NO: 120374 - RNA, 32 nt, Homo Sapiens
accuuuacucuucgcccuuccuccuggcaugg

SEQ ID NO: 120375 - RNA, 28 nt, Homo Sapiens
gucaucauuguauauauguguguuuaaa

SEQ ID NO: 120376 - RNA, 32 nt, Homo Sapiens
ugaugcuuaagcaucaagcugauuuuauuggu

SEQ ID NO: 120377 - RNA, 32 nt, Homo Sapiens
guccugcccucccauccagcacucucuaugga

SEQ ID NO: 120378 - RNA, 32 nt, Homo Sapiens
ccccugauucuaugacauuggggcccuucuuu

SEQ ID NO: 120379 - RNA, 32 nt, Homo Sapiens
cuuccuuuccagagccgugaccucaggcucac

SEQ ID NO: 120380 - RNA, 32 nt, Homo Sapiens
ccaucauugacugacuaguccauccuuacccc

SEQ ID NO: 120381 - RNA, 32 nt, Homo Sapiens
aaaaauuauucuaugucuuuguccucaaucua

SEQ ID NO: 120382 - RNA, 32 nt, Homo Sapiens
cgggucuggaggagguagcgcgggucuggagg

SEQ ID NO: 120383 - RNA, 32 nt, Homo Sapiens
gaggcuucaagguuuguucuaggcuucucuag

SEQ ID NO: 120384 - RNA, 32 nt, Homo Sapiens
ccaaguuacuucuuuucuuuuugcauuaucuu

SEQ ID NO: 120385 - RNA, 32 nt, Homo Sapiens
cuugaucugccugucuguggaaugggagguug

SEQ ID NO: 120386 - RNA, 32 nt, Homo Sapiens
acagaaaaaaauucuuuuuuuuuuuuuggaga

SEQ ID NO: 120387 - RNA, 32 nt, Homo Sapiens
gcucucaggaugaacguauuguccucuucccc

SEQ ID NO: 120388 - RNA, 32 nt, Homo Sapiens
cagaaccugccagguguauggcuacaaguuau

SEQ ID NO: 120389 - RNA, 32 nt, Homo Sapiens
ugacagcucgcgcgugcugaugauggcgauuc

SEQ ID NO: 120390 - RNA, 32 nt, Homo Sapiens
auaauuuuuuauucuuucuaguccuuuuccaa

SEQ ID NO: 120391 - RNA, 32 nt, Homo Sapiens
ggaugcaggcucuggagagagaacaggaugcc

SEQ ID NO: 120392 - RNA, 32 nt, Homo Sapiens
ugaggcgagggugucaugucagacaacgagga

SEQ ID NO: 120393 - RNA, 32 nt, Homo Sapiens
cucuuccuuuuggcaggcagguuaucaguccu

SEQ ID NO: 120394 - RNA, 32 nt, Homo Sapiens
uauacuugaaauuuauguccagaaugucacug

SEQ ID NO: 120395 - RNA, 32 nt, Homo Sapiens
ggaaggcaccaauuuucccagccccacuccca

SEQ ID NO: 120396 - RNA, 32 nt, Homo Sapiens
gcauuuauagguuggcaaucuaccaacgaauc

SEQ ID NO: 120397 - RNA, 32 nt, Homo Sapiens
auugcuuauuggcauaugguugggcuuuuaaa

SEQ ID NO: 120398 - RNA, 32 nt, Homo Sapiens
ugucauccucuaugucccacugucucucuccu

SEQ ID NO: 120399 - RNA, 32 nt, Homo Sapiens
accguuucagacuucgcccacccaucccuccc

SEQ ID NO: 120400 - RNA, 32 nt, Homo Sapiens
aaugcugcaucugguuaaaugucgggguaggg

SEQ ID NO: 120401 - RNA, 32 nt, Homo Sapiens
uggacuaccuugggcaagugaccuccuuaaau

SEQ ID NO: 120402 - RNA, 32 nt, Homo Sapiens
uacucuaaguccucccucccccuucuccuuca

SEQ ID NO: 120403 - RNA, 32 nt, Homo Sapiens
cggcuuccuuuuucuccacacuucuagcuacc

SEQ ID NO: 120404 - RNA, 32 nt, Homo Sapiens
ccagaccaaccuggccaacaugguaaaacccu

SEQ ID NO: 120405 - RNA, 32 nt, Homo Sapiens
cgucuggcugaaaagcacuuucaaugagacug

SEQ ID NO: 120406 - RNA, 32 nt, Homo Sapiens
cuggggaggguggggagggcgggggaauggac

SEQ ID NO: 120407 - RNA, 32 nt, Homo Sapiens
uuuuuguuguacguguagaucuguaaauaaaa

SEQ ID NO: 120408 - RNA, 32 nt, Homo Sapiens
caggaaucaaggaacauaauccuguggagggu

SEQ ID NO: 120409 - RNA, 32 nt, Homo Sapiens
aaagccacagaaagccggacccgcaggagcug

SEQ ID NO: 120410 - RNA, 32 nt, Homo Sapiens
uucaucaccucugcuuuuuuuuuuuacucuau

SEQ ID NO: 120411 - RNA, 32 nt, Homo Sapiens
cuggggcaacgcggaagaagcuccaccaugag

SEQ ID NO: 120412 - RNA, 32 nt, Homo Sapiens
aucagccaguagacaugaugagcaucaaagcc

SEQ ID NO: 120413 - RNA, 32 nt, Homo Sapiens
aauuagccgggcgugguggcgggugccuguag

SEQ ID NO: 120414 - RNA, 32 nt, Homo Sapiens
gagggacacagagggcaagacugcaucccagu

SEQ ID NO: 120415 - RNA, 32 nt, Homo Sapiens
agaagccucauagggcccggcgcggcggcuca

SEQ ID NO: 120416 - RNA, 30 nt, Homo Sapiens
uauguugucugugcuuuuuauuuuuagcuu

SEQ ID NO: 120417 - RNA, 32 nt, Homo Sapiens
gggagccaacaugccaguggcccggagcuggg

SEQ ID NO: 120418 - RNA, 32 nt, Homo Sapiens
ccggguugggcugugacgcugcugcugggguc

SEQ ID NO: 120419 - RNA, 32 nt, Homo Sapiens
agauuccagauuucacaucccagcagccgguu

SEQ ID NO: 120420 - RNA, 31 nt, Homo Sapiens
cuggaaaugcaaaggaaaagagucucuucaa

SEQ ID NO: 120421 - RNA, 32 nt, Homo Sapiens
agugcagcgcggcuggggcagcgcgcuggcgg

SEQ ID NO: 120422 - RNA, 32 nt, Homo Sapiens
cgaucuccacuggcaggauagccacuugcagc

SEQ ID NO: 120423 - RNA, 32 nt, Homo Sapiens
ucccccagcccgucucgccgccgccauggcgg

SEQ ID NO: 120424 - RNA, 32 nt, Homo Sapiens
uguuugauucaaaauuugaacaaaauuguuuu

SEQ ID NO: 120425 - RNA, 32 nt, Homo Sapiens
gcgggccccggcucgcuagccguccugcggga

SEQ ID NO: 120426 - RNA, 32 nt, Homo Sapiens
gugagccggagcugcgcgcggggcaugcggcu

SEQ ID NO: 120427 - RNA, 32 nt, Homo Sapiens
cccacuguggguuuccuccuugccacccuucc

SEQ ID NO: 120428 - RNA, 32 nt, Homo Sapiens
aaagcuugucgcuauuugagaaucuguauauu

SEQ ID NO: 120429 - RNA, 32 nt, Homo Sapiens
aucaacugccucugcuggacgcugcccagaga

SEQ ID NO: 120430 - RNA, 32 nt, Homo Sapiens
gccgcccucuccucgggacgauggcgcgcggu

SEQ ID NO: 120431 - RNA, 32 nt, Homo Sapiens
uaguaagggcauguucuuggggcccucgaccu

SEQ ID NO: 120432 - RNA, 32 nt, Homo Sapiens
uugucuuguaaaaacugugagugcuuccaggg

SEQ ID NO: 120433 - RNA, 30 nt, Homo Sapiens
aaagacuuucaccacugucugagugaugau

SEQ ID NO: 120434 - RNA, 32 nt, Homo Sapiens
auggcuaaagcaguuaguugugaguuucugag

SEQ ID NO: 120435 - RNA, 32 nt, Homo Sapiens
cuauuuuauuuuucuuuaaugaaauccuccuc

SEQ ID NO: 120436 - RNA, 32 nt, Homo Sapiens
gccccugucccucucuucuggcccugugguac

SEQ ID NO: 120437 - RNA, 27 nt, Homo Sapiens
cagagugccaccuucagccccuuggga

SEQ ID NO: 120438 - RNA, 32 nt, Homo Sapiens
gaagggacugguuggguuugcuuuaugggauc

SEQ ID NO: 120439 - RNA, 32 nt, Homo Sapiens
ucuguggugaauggguggccugugauggaugg

SEQ ID NO: 120440 - RNA, 28 nt, Homo Sapiens
uucaccgugcuagccaggauggucucga

SEQ ID NO: 120441 - RNA, 32 nt, Homo Sapiens
cauuugauauuuuuaaaccaugcucuggcagu

SEQ ID NO: 120442 - RNA, 32 nt, Homo Sapiens
cacccuuuaccuuccuagauaauuaugucuaa

SEQ ID NO: 120443 - RNA, 32 nt, Homo Sapiens
ugguagcggcggagggcggagggauccggagg

SEQ ID NO: 120444 - RNA, 32 nt, Homo Sapiens
cgacuuucaguccccgacgcgccccgcccaac

SEQ ID NO: 120445 - RNA, 32 nt, Homo Sapiens
ucuucaagucauguaaucgacuuuuuugaauu

SEQ ID NO: 120446 - RNA, 32 nt, Homo Sapiens
gugggcccaucccugccacgguccugaggcug

SEQ ID NO: 120447 - RNA, 32 nt, Homo Sapiens
guuuuuagagagaauuucugcuuccacuauag

SEQ ID NO: 120448 - RNA, 32 nt, Homo Sapiens
agaaagaaagaaaaaagaaaguacaaguuuau

SEQ ID NO: 120449 - RNA, 32 nt, Homo Sapiens
gagaaggcgggaggggggugggggcgagauca

SEQ ID NO: 120450 - RNA, 32 nt, Homo Sapiens
auuucagcaagcuuccacggagcuuccacaga

SEQ ID NO: 120451 - RNA, 32 nt, Homo Sapiens
gacaccacugcccacaccuccaucccguccug

SEQ ID NO: 120452 - RNA, 32 nt, Homo Sapiens
ccagagccccuggccuuucaguucuuaacuau

SEQ ID NO: 120453 - RNA, 32 nt, Homo Sapiens
gaaguccagcccccgcucaucccggcacacua

SEQ ID NO: 120454 - RNA, 32 nt, Homo Sapiens
aacuugauauaaaauuguaaucuucauuuuug

SEQ ID NO: 120455 - RNA, 32 nt, Homo Sapiens
cucuagguuuugaaguuuuucuaauuucuuaa

SEQ ID NO: 120456 - RNA, 32 nt, Homo Sapiens
uaucugggacuacaggcaugcgccaccacgcc

SEQ ID NO: 120457 - RNA, 32 nt, Homo Sapiens
ggaugaaggcugaacacaggcuuguuaauguc

SEQ ID NO: 120458 - RNA, 32 nt, Homo Sapiens
uucuuuagucuucaggacuauugugugaaaac

SEQ ID NO: 120459 - RNA, 32 nt, Homo Sapiens
uugacgaacacgugacgcggucgggcggacca

SEQ ID NO: 120460 - RNA, 32 nt, Homo Sapiens
agggaccugcggcuugcggccccgcccccuuc

SEQ ID NO: 120461 - RNA, 32 nt, Homo Sapiens
agcuucgccgcucuuccagcggcuccgcugcc

SEQ ID NO: 120462 - RNA, 32 nt, Homo Sapiens
gaaacaugaauuacaacuauauuguaugacug

SEQ ID NO: 120463 - RNA, 32 nt, Homo Sapiens
gaggucucacucugucacccaggcugcagugu

SEQ ID NO: 120464 - RNA, 32 nt, Homo Sapiens
augaaacccuguacacaccuaguucauaaucc

SEQ ID NO: 120465 - RNA, 32 nt, Homo Sapiens
accuaucacaaguuuacauguaaccacagaaa

SEQ ID NO: 120466 - RNA, 32 nt, Homo Sapiens
uauagagauguaaaaacaaaacuauaauggau

SEQ ID NO: 120467 - RNA, 32 nt, Homo Sapiens
ugaagggcagaagaggggcggggagcugugug

SEQ ID NO: 120468 - RNA, 32 nt, Homo Sapiens
caucagucaccaugagacuguuuuacuuucag

SEQ ID NO: 120469 - RNA, 31 nt, Homo Sapiens
gcagcuggagggggcgcaggagcagauccgc

SEQ ID NO: 120470 - RNA, 32 nt, Homo Sapiens
caugccugccagcgucucacugccaguggagg

SEQ ID NO: 120471 - RNA, 32 nt, Homo Sapiens
gauuugggggcaauuggaugauauauagagug

SEQ ID NO: 120472 - RNA, 32 nt, Homo Sapiens
cuacccucaaaggagcuggggcuuguggaggg

SEQ ID NO: 120473 - RNA, 32 nt, Homo Sapiens
acugacuugaguuuguguugucuccuuagacu

SEQ ID NO: 120474 - RNA, 32 nt, Homo Sapiens
caaggagccggguggggggcggcggccagcau

SEQ ID NO: 120475 - RNA, 32 nt, Homo Sapiens
gccccugacuuggcuaaagauacuucugcucu

SEQ ID NO: 120476 - RNA, 32 nt, Homo Sapiens
uauuaagcauauauuuuuauauuuacuaaaau

SEQ ID NO: 120477 - RNA, 32 nt, Homo Sapiens
ugcugcacuccagccugggugacagagugaga

SEQ ID NO: 120478 - RNA, 32 nt, Homo Sapiens
acucaggaggaaaagaaaaaacaaaggcagaa

SEQ ID NO: 120479 - RNA, 32 nt, Homo Sapiens
ucggcuguuaccaaaacaaacaucuuaaucug

SEQ ID NO: 120480 - RNA, 32 nt, Homo Sapiens
gggaaaggaaugugcuuauuaaggcccacugu

SEQ ID NO: 120481 - RNA, 32 nt, Homo Sapiens
cggccccagucgcggcgccgggggcgcuguuc

SEQ ID NO: 120482 - RNA, 32 nt, Homo Sapiens
uccccugcaagccccagcaaguuuugcagcca

SEQ ID NO: 120483 - RNA, 32 nt, Homo Sapiens
aaaguuuuuuaaauucuaaacaggauuuagug

SEQ ID NO: 120484 - RNA, 32 nt, Homo Sapiens
agguauauuugacuacauuuugaaaggaaaaa

SEQ ID NO: 120485 - RNA, 32 nt, Homo Sapiens
gcgcggccagcugcagccgccggcgagccgac

SEQ ID NO: 120486 - RNA, 32 nt, Homo Sapiens
gccccuccuggagcagaaagugccuuuaucuc

SEQ ID NO: 120487 - RNA, 32 nt, Homo Sapiens
aauacuuucuaaacuuuuuuuuuuugagaugg

SEQ ID NO: 120488 - RNA, 32 nt, Homo Sapiens
guugguauguugcuauuuuucauuucauagcu

SEQ ID NO: 120489 - RNA, 32 nt, Homo Sapiens
gauccccugugcuaucaggaaagcauguccca

SEQ ID NO: 120490 - RNA, 32 nt, Homo Sapiens
acucccgacccggggcuagcgugcgucccuag

SEQ ID NO: 120491 - RNA, 32 nt, Homo Sapiens
ccgcuuccugucauuaagcaucucagaggaag

SEQ ID NO: 120492 - RNA, 32 nt, Homo Sapiens
uucggcggcccgggcccggccaaggaccggcg

SEQ ID NO: 120493 - RNA, 32 nt, Homo Sapiens
cgcuucacaacaccucaugccaggggccggca

SEQ ID NO: 120494 - RNA, 32 nt, Homo Sapiens
cuggcuggaccaagcccucuccguguucucug

SEQ ID NO: 120495 - RNA, 30 nt, Homo Sapiens
cgccacgucccuugcggcggcgggagagaa

SEQ ID NO: 120496 - RNA, 32 nt, Homo Sapiens
ggucuagccugcuggaggaugagagaucacau

SEQ ID NO: 120497 - RNA, 32 nt, Homo Sapiens
guucuuugaaagaaucucuaaaaggcuuauaa

SEQ ID NO: 120498 - RNA, 30 nt, Homo Sapiens
uuuuaauguugggaaggccagaucugaaaa

SEQ ID NO: 120499 - RNA, 32 nt, Homo Sapiens
cuagcgucgccacccuuugguuauuucagccc

SEQ ID NO: 120500 - RNA, 32 nt, Homo Sapiens
cguuuuuucuaaaagaugaauuccuauggcuc

SEQ ID NO: 120501 - RNA, 32 nt, Homo Sapiens
ugagacuaugcguuuuuauaaaaaauggugcc

SEQ ID NO: 120502 - RNA, 32 nt, Homo Sapiens
uccuccgcugugcccgucucuccggagcccuc

SEQ ID NO: 120503 - RNA, 32 nt, Homo Sapiens
acccugaccugccugggucucccugucucucc

SEQ ID NO: 120504 - RNA, 32 nt, Homo Sapiens
ccccugaccugccuggcuuccuuagcuugccc

SEQ ID NO: 120505 - RNA, 32 nt, Homo Sapiens
agcagaaaaggucuuggugccucugcaguacu

SEQ ID NO: 120506 - RNA, 32 nt, Homo Sapiens
auuuuguauacaaauauuuaauuuggugauug

SEQ ID NO: 120507 - RNA, 32 nt, Homo Sapiens
gccuagccaacauggugaaaccccgucucuau

SEQ ID NO: 120508 - RNA, 32 nt, Homo Sapiens
acuuauucaaccaaccagcccacucauuacuu

SEQ ID NO: 120509 - RNA, 31 nt, Homo Sapiens
uccuagaaauaaaaugaguuaacuucaaaca

SEQ ID NO: 120510 - RNA, 32 nt, Homo Sapiens
ggggacugcagugaccccggcuugccggcagg

SEQ ID NO: 120511 - RNA, 32 nt, Homo Sapiens
gccauggaggggcugcggcgggggcugucgcg

SEQ ID NO: 120512 - RNA, 32 nt, Homo Sapiens
gagggaugggacggaggcuggcgaccaggcga

SEQ ID NO: 120513 - RNA, 32 nt, Homo Sapiens
gcuacacuucccucccuuagugcccgggcaga

SEQ ID NO: 120514 - RNA, 32 nt, Homo Sapiens
auaagcgcuagagcuuccaacuguauauuuuu

SEQ ID NO: 120515 - RNA, 32 nt, Homo Sapiens
uacugugggacggaggacccaggagacccaga

SEQ ID NO: 120516 - RNA, 32 nt, Homo Sapiens
caucagagccuaaauuccauuguugauguuga

SEQ ID NO: 120517 - RNA, 32 nt, Homo Sapiens
ggggagugagaggccauagcugucuggcaugg

SEQ ID NO: 120518 - RNA, 32 nt, Homo Sapiens
aaaacagaacagacccccaucccugggcugga

SEQ ID NO: 120519 - RNA, 30 nt, Homo Sapiens
caaguugaaugugcugcccggggcucugcc

SEQ ID NO: 120520 - RNA, 29 nt, Homo Sapiens
uccaauaaaaacauuugaagaauuguggc

SEQ ID NO: 120521 - RNA, 32 nt, Homo Sapiens
acaugcagcuaaacaagaacugcccucaagau

SEQ ID NO: 120522 - RNA, 32 nt, Homo Sapiens
uacacaugugaaauaaaacucaguauuuuaau

SEQ ID NO: 120523 - RNA, 32 nt, Homo Sapiens
accacaucuaaugaaauccaagguguagcuau

SEQ ID NO: 120524 - RNA, 28 nt, Homo Sapiens
gccucucggcggccgcuccaggugcaaa

SEQ ID NO: 120525 - RNA, 32 nt, Homo Sapiens
ggcccugcuuccaggguccacaaucugcucca

SEQ ID NO: 120526 - RNA, 32 nt, Homo Sapiens
guagggagaagcugccccaggaggcgauguag

SEQ ID NO: 120527 - RNA, 32 nt, Homo Sapiens
gcuuucccucccugccucccccagcucccaca

SEQ ID NO: 120528 - RNA, 32 nt, Homo Sapiens
gggugcucgggcugccguccgcuccgccagaa

SEQ ID NO: 120529 - RNA, 32 nt, Homo Sapiens
acccucggugcuguggggagccccacacuugg

SEQ ID NO: 120530 - RNA, 32 nt, Homo Sapiens
aaacacaacugaaaacaugagggacuauaucc

SEQ ID NO: 120531 - RNA, 32 nt, Homo Sapiens
cccuccuccccuccccagugagggacauuuuu

SEQ ID NO: 120532 - RNA, 32 nt, Homo Sapiens
gggaggcggcgguggcggccauggcggcagau

SEQ ID NO: 120533 - RNA, 32 nt, Homo Sapiens
gcugguugggcugaguuuuuuauuuuuaagug

SEQ ID NO: 120534 - RNA, 32 nt, Homo Sapiens
ucucaaagagaaugaaacuuuugcaccauuuu

SEQ ID NO: 120535 - RNA, 32 nt, Homo Sapiens
guggcacugccagccgacugcugacagcuugg

SEQ ID NO: 120536 - RNA, 32 nt, Homo Sapiens
ucuuuccuggggaucccuugacccuuauaacu

SEQ ID NO: 120537 - RNA, 32 nt, Homo Sapiens
acaucucucucugccaagaauggagaugacgc

SEQ ID NO: 120538 - RNA, 32 nt, Homo Sapiens
aaugauggauuaugcucugugaaaugaaaagu

SEQ ID NO: 120539 - RNA, 32 nt, Homo Sapiens
acugaggugaggcuacaagggguguguaaccg

SEQ ID NO: 120540 - RNA, 32 nt, Homo Sapiens
cgcgcgcugggguugcgccccggaggcggauc

SEQ ID NO: 120541 - RNA, 32 nt, Homo Sapiens
uaguggcacagcuggcgcccccugcuuucuag

SEQ ID NO: 120542 - RNA, 32 nt, Homo Sapiens
uucucuucuuuuucuuuuuuauuaccaggucc

SEQ ID NO: 120543 - RNA, 31 nt, Homo Sapiens
cucggcgggccuggcuggccccgcgcagagc

SEQ ID NO: 120544 - RNA, 32 nt, Homo Sapiens
uugaagccugaccuagccagaagugccugucc

SEQ ID NO: 120545 - RNA, 32 nt, Homo Sapiens
acuuaggaauaauuuaacaaaagaagugcgaa

SEQ ID NO: 120546 - RNA, 32 nt, Homo Sapiens
aggucuggguggcaguggccccauagccucug

SEQ ID NO: 120547 - RNA, 32 nt, Homo Sapiens
agccucuuuccacagacuuaggaagccccccg

SEQ ID NO: 120548 - RNA, 32 nt, Homo Sapiens
ugugagccuaguggggcugcugcgguucucuu

SEQ ID NO: 120549 - RNA, 32 nt, Homo Sapiens
aggcuucugagcagcgagccugcuaguggccg

SEQ ID NO: 120550 - RNA, 32 nt, Homo Sapiens
aacuguguuuuaaaguacuguagucuaguagg

SEQ ID NO: 120551 - RNA, 32 nt, Homo Sapiens
aaucaagaugagauauauagauauauauccau

SEQ ID NO: 120552 - RNA, 30 nt, Homo Sapiens
aaauugagguccaugggggaaaucaaggau

SEQ ID NO: 120553 - RNA, 32 nt, Homo Sapiens
uucccccuugacaauaaacauaaaacuuaaaa

SEQ ID NO: 120554 - RNA, 30 nt, Homo Sapiens
agccugcgcgcgccgcgcccugugucuccg

SEQ ID NO: 120555 - RNA, 32 nt, Homo Sapiens
agcucaccgagucggcgauccaggcgcuccag

SEQ ID NO: 120556 - RNA, 32 nt, Homo Sapiens
ccacucagaaucuccuucuuuccuggacuuaa

SEQ ID NO: 120557 - RNA, 32 nt, Homo Sapiens
agccauaggaaucaaaauaaaaaacuaaaaaa

SEQ ID NO: 120558 - RNA, 32 nt, Homo Sapiens
agccagcccauggcuuuagcuaccucacuaug

SEQ ID NO: 120559 - RNA, 32 nt, Homo Sapiens
gcuguguugacagcugcuaaugagcguguugg

SEQ ID NO: 120560 - RNA, 32 nt, Homo Sapiens
uuuucaagcuuauuuugaaaucuuaaaaauca

SEQ ID NO: 120561 - RNA, 32 nt, Homo Sapiens
uccagaugucugcauggguccucggcacucuu

SEQ ID NO: 120562 - RNA, 32 nt, Homo Sapiens
caaacccucuuguauauaaccaucgcacaaca

SEQ ID NO: 120563 - RNA, 32 nt, Homo Sapiens
ccucccaggaccagagccucucccggccccag

SEQ ID NO: 120564 - RNA, 32 nt, Homo Sapiens
ggcucgcugccucuccuccccaacugcagguu

SEQ ID NO: 120565 - RNA, 32 nt, Homo Sapiens
gcuuuaauuuuaccaaaacccuaugauuuagg

SEQ ID NO: 120566 - RNA, 32 nt, Homo Sapiens
auguuggacuuccaagccuccagaacugugag

SEQ ID NO: 120567 - RNA, 32 nt, Homo Sapiens
gcuaccaaagacaaaaagaaaguaaaacauuu

SEQ ID NO: 120568 - RNA, 32 nt, Homo Sapiens
ugacauuauaaauguuugacuuuucucucuca

SEQ ID NO: 120569 - RNA, 32 nt, Homo Sapiens
gggaacacgugggcgccggcugccggggcggc

SEQ ID NO: 120570 - RNA, 30 nt, Homo Sapiens
uacagggcgcccguggcuggcuucuacgcu

SEQ ID NO: 120571 - RNA, 32 nt, Homo Sapiens
gacauggccgugcggcagcaccugcucacuaa

SEQ ID NO: 120572 - RNA, 32 nt, Homo Sapiens
uuguugcucccucucuccuggaaccuaguuua

SEQ ID NO: 120573 - RNA, 32 nt, Homo Sapiens
ggcgcgggggagaggcgggucuguccucggga

SEQ ID NO: 120574 - RNA, 32 nt, Homo Sapiens
ccuaauguuuaucaauauuucuuaaugaacug

SEQ ID NO: 120575 - RNA, 32 nt, Homo Sapiens
uagagcacccucaggagaaguggcgccgcagg

SEQ ID NO: 120576 - RNA, 32 nt, Homo Sapiens
gggcugggggcggccacagacggccucgaaac

SEQ ID NO: 120577 - RNA, 32 nt, Homo Sapiens
gugccugggugcccggccaugggcuguaucgg

SEQ ID NO: 120578 - RNA, 30 nt, Homo Sapiens
ucaauuugaaauucuacccaucuugaggga

SEQ ID NO: 120579 - RNA, 32 nt, Homo Sapiens
ccaggcaagugggaccaggauacuggacgcug

SEQ ID NO: 120580 - RNA, 32 nt, Homo Sapiens
auuacaggcgcaugccaccaugccaggcuaau

SEQ ID NO: 120581 - RNA, 32 nt, Homo Sapiens
uugagauccacgagccgagaguagggcccacu

SEQ ID NO: 120582 - RNA, 32 nt, Homo Sapiens
cucacaaugcuguaugauacuauuuaaauuug

SEQ ID NO: 120583 - RNA, 32 nt, Homo Sapiens
ugcgugggaguggggaucccccucgccccugc

SEQ ID NO: 120584 - RNA, 32 nt, Homo Sapiens
cuugcuuuuaauaacaaagguacaauauuuug

SEQ ID NO: 120585 - RNA, 32 nt, Homo Sapiens
uuuccauuuucaucauaaaugacuugaaaucc

SEQ ID NO: 120586 - RNA, 32 nt, Homo Sapiens
aaucuagugacaaaggcauagaauucuccucc

SEQ ID NO: 120587 - RNA, 31 nt, Homo Sapiens
accucaucacuggauuugccaacuagaauuc

SEQ ID NO: 120588 - RNA, 32 nt, Homo Sapiens
gcuggaagaaggucacacuaagauauaauuuu

SEQ ID NO: 120589 - RNA, 30 nt, Homo Sapiens
guggcggcgcccgcgcucgcaggccacucu

SEQ ID NO: 120590 - RNA, 32 nt, Homo Sapiens
gugagcuggugccugcuuugacgggccaggcc

SEQ ID NO: 120591 - RNA, 32 nt, Homo Sapiens
uugcuuaaauguuuaaaugaagcuaaaagaag

SEQ ID NO: 120592 - RNA, 32 nt, Homo Sapiens
gguacggcaggcucgcgggcgccgggcuucgu

SEQ ID NO: 120593 - RNA, 32 nt, Homo Sapiens
cauguugagaaagcuuccuggugcuuaaucaa

SEQ ID NO: 120594 - RNA, 32 nt, Homo Sapiens
ggucaaacugguuuugguucugaugguuagga

SEQ ID NO: 120595 - RNA, 32 nt, Homo Sapiens
cuaacuagcucuuuuuuauggguccaugcaca

SEQ ID NO: 120596 - RNA, 32 nt, Homo Sapiens
ccuuguccucaagauuuuuaguuuggcccaag

SEQ ID NO: 120597 - RNA, 32 nt, Homo Sapiens
ggcugaauagacucuguccagcccuguucugu

SEQ ID NO: 120598 - RNA, 32 nt, Homo Sapiens
aguucuauagcauacuugcaucuuuaacaugc

SEQ ID NO: 120599 - RNA, 32 nt, Homo Sapiens
ccacuacuccgggaccuggaaguuaagcgagg

SEQ ID NO: 120600 - RNA, 32 nt, Homo Sapiens
uuuaaauuuaaaucacuguguuugguauuuuu

SEQ ID NO: 120601 - RNA, 32 nt, Homo Sapiens
gcuuccagccccagcccucgaguccccugaau

SEQ ID NO: 120602 - RNA, 32 nt, Homo Sapiens
acgccgcuccccgacgcaccggccgcccccag

SEQ ID NO: 120603 - RNA, 32 nt, Homo Sapiens
aguggaacuauugaguuacauaaagaaaauag

SEQ ID NO: 120604 - RNA, 32 nt, Homo Sapiens
gcuucuggggugggaaucaagucauaguacuu

SEQ ID NO: 120605 - RNA, 32 nt, Homo Sapiens
auagcagggugugacgcuggccaagugauaua

SEQ ID NO: 120606 - RNA, 32 nt, Homo Sapiens
ggcacgaggggugcugcggugcuagagcgcgg

SEQ ID NO: 120607 - RNA, 32 nt, Homo Sapiens
gaguaccagguuuuauuuuucaccuuauucuc

SEQ ID NO: 120608 - RNA, 32 nt, Homo Sapiens
accagugcacuccagccugggcgacagagaga

SEQ ID NO: 120609 - RNA, 32 nt, Homo Sapiens
cagaucugaggccaagcuaugugcuagagccc

SEQ ID NO: 120610 - RNA, 31 nt, Homo Sapiens
cagcaggagagagaagaaacaggccagcugu

SEQ ID NO: 120611 - RNA, 30 nt, Homo Sapiens
ggucagguugucaugggggaaacugaggca

SEQ ID NO: 120612 - RNA, 32 nt, Homo Sapiens
aauuuaaaauuggauuaacauuggagugcugg

SEQ ID NO: 120613 - RNA, 32 nt, Homo Sapiens
cagguaguucaacaucuuccaagugugcuggu

SEQ ID NO: 120614 - RNA, 32 nt, Homo Sapiens
ucaaaaggaccaagaggaaaagagucggaggg

SEQ ID NO: 120615 - RNA, 32 nt, Homo Sapiens
gagcuggagggauugcaaagaccuuuauuaga

SEQ ID NO: 120616 - RNA, 32 nt, Homo Sapiens
acugcgugcgggacaguuauguuuccuugccc

SEQ ID NO: 120617 - RNA, 32 nt, Homo Sapiens
uuccacagcauuaugucuuuaauuguaauauu

SEQ ID NO: 120618 - RNA, 32 nt, Homo Sapiens
uccaggccugaagagacuaugcugagugugag

SEQ ID NO: 120619 - RNA, 32 nt, Homo Sapiens
ucuaaggauagaagcaguuaucaguguuugcu

SEQ ID NO: 120620 - RNA, 32 nt, Homo Sapiens
gcagcucuccaugcucauccuucccguagcau

SEQ ID NO: 120621 - RNA, 32 nt, Homo Sapiens
gcagggggaucuggggacuaccagagacucug

SEQ ID NO: 120622 - RNA, 32 nt, Homo Sapiens
cgacacugcgcgcgccuccaggcaccggcguu

SEQ ID NO: 120623 - RNA, 32 nt, Homo Sapiens
uccccuugucuucuuuccuuuugcgacuuggu

SEQ ID NO: 120624 - RNA, 31 nt, Homo Sapiens
acaugggacagacggggacgcacaggccacc

SEQ ID NO: 120625 - RNA, 32 nt, Homo Sapiens
auuauucaggagaauaaauaacuguuuugugu

SEQ ID NO: 120626 - RNA, 32 nt, Homo Sapiens
cgagccgcugcagcugcggcggcggcagcgaa

SEQ ID NO: 120627 - RNA, 32 nt, Homo Sapiens
cuuggaggguaacagcugcuuuuucacgcaug

SEQ ID NO: 120628 - RNA, 32 nt, Homo Sapiens
aagaacgggaccuagggacagcagcaccacuc

SEQ ID NO: 120629 - RNA, 32 nt, Homo Sapiens
guuuaugaagagaucagcgacccugaggaaga

SEQ ID NO: 120630 - RNA, 32 nt, Homo Sapiens
caggcucugaccaggcagaacaggcaagaggg

SEQ ID NO: 120631 - RNA, 32 nt, Homo Sapiens
ucacaggaccagaaucucugggaaugaagccu

SEQ ID NO: 120632 - RNA, 32 nt, Homo Sapiens
agcaagacagagcugcugccuucccggccuca

SEQ ID NO: 120633 - RNA, 32 nt, Homo Sapiens
uggggcugucuccugaagcucccuccuccacg

SEQ ID NO: 120634 - RNA, 32 nt, Homo Sapiens
uucugggggaaggagagaagggcagcucaggg

SEQ ID NO: 120635 - RNA, 32 nt, Homo Sapiens
guacuuaauugcauagaguuaguuuugcagca

SEQ ID NO: 120636 - RNA, 32 nt, Homo Sapiens
uaacaauuagcguuaccaaaauuaaaguucaa

SEQ ID NO: 120637 - RNA, 32 nt, Homo Sapiens
gcagcuuuguacacgaagaccauccauccucc

SEQ ID NO: 120638 - RNA, 32 nt, Homo Sapiens
gugucucaaagaaggguagaaguucuaauguc

SEQ ID NO: 120639 - RNA, 32 nt, Homo Sapiens
augcccgugcucugcuggcccgccgggcucug

SEQ ID NO: 120640 - RNA, 32 nt, Homo Sapiens
ucauguuggagaucucuauuguaaucucuauu

SEQ ID NO: 120641 - RNA, 32 nt, Homo Sapiens
aagaggaggaggaggagaccggcagcaacucu

SEQ ID NO: 120642 - RNA, 32 nt, Homo Sapiens
uauucccccuccccccuccgcuuuuuaccgua

SEQ ID NO: 120643 - RNA, 32 nt, Homo Sapiens
uuugacuagguccuguauuugagcuuugaaag

SEQ ID NO: 120644 - RNA, 32 nt, Homo Sapiens
cugcaagccucgaaacaguucuccuggaaggg

SEQ ID NO: 120645 - RNA, 32 nt, Homo Sapiens
gcucgauaauaucgcuggccuaagcgucaggc

SEQ ID NO: 120646 - RNA, 32 nt, Homo Sapiens
caguagccuugggcuggcccacgccaacugug

SEQ ID NO: 120647 - RNA, 32 nt, Homo Sapiens
uccccgaggugccggcggaggggguggcucgc

SEQ ID NO: 120648 - RNA, 32 nt, Homo Sapiens
acacuccaguagaugagcacgucuacccagau

SEQ ID NO: 120649 - RNA, 32 nt, Homo Sapiens
uccugugaagcugucagccugaucucaugcca

SEQ ID NO: 120650 - RNA, 32 nt, Homo Sapiens
guaggcgucucgcucugucacccaggcuggag

SEQ ID NO: 120651 - RNA, 32 nt, Homo Sapiens
ccgcgcgccucgccgcuguccuccgggagcgg

SEQ ID NO: 120652 - RNA, 32 nt, Homo Sapiens
aaaugaucagacagaauaauauuuucuaguua

SEQ ID NO: 120653 - RNA, 32 nt, Homo Sapiens
aauggaggaaacaauuuuacaguaagagaaaa

SEQ ID NO: 120654 - RNA, 32 nt, Homo Sapiens
agcaagaaaguggguucucaccagccaucgaa

SEQ ID NO: 120655 - RNA, 32 nt, Homo Sapiens
aguagggaaguggaacuuugguaaaugacugu

SEQ ID NO: 120656 - RNA, 32 nt, Homo Sapiens
agggcccgcccggccgcaccaugagccacggg

SEQ ID NO: 120657 - RNA, 32 nt, Homo Sapiens
uuccaacuuucagguuugauaauaauaguagu

SEQ ID NO: 120658 - RNA, 32 nt, Homo Sapiens
acugcacaaccuguucccugcaauucgaugac

SEQ ID NO: 120659 - RNA, 32 nt, Homo Sapiens
ggcacgaggcggcccccgggagcugugcucua

SEQ ID NO: 120660 - RNA, 32 nt, Homo Sapiens
gcaaagugcaaggaccuaaaacaucucaucag

SEQ ID NO: 120661 - RNA, 32 nt, Homo Sapiens
acucuugcuaagauuuaggaaauauuaacuac

SEQ ID NO: 120662 - RNA, 32 nt, Homo Sapiens
cagggacugcuaugaagaccaauaugacagac

SEQ ID NO: 120663 - RNA, 32 nt, Homo Sapiens
cgaggcggagagagggcgaagcagucgcggca

SEQ ID NO: 120664 - RNA, 32 nt, Homo Sapiens
acuaagucaggaguguaguuggaucucuacau

SEQ ID NO: 120665 - RNA, 32 nt, Homo Sapiens
aaucuuaaaaauuuugccaaagcucuaaauuc

SEQ ID NO: 120666 - RNA, 32 nt, Homo Sapiens
agaauguaagaacuacaaacaaaauuucuauu

SEQ ID NO: 120667 - RNA, 32 nt, Homo Sapiens
aauacuuccucauaggaugcuuuggcccuuca

SEQ ID NO: 120668 - RNA, 32 nt, Homo Sapiens
uucuuuacuuuuuguuugguugagguuucacg

SEQ ID NO: 120669 - RNA, 32 nt, Homo Sapiens
gccuaggauuccacgcagagcacaucuggugu

SEQ ID NO: 120670 - RNA, 32 nt, Homo Sapiens
uuguacguucacaucaggucccggcccgccgg

SEQ ID NO: 120671 - RNA, 32 nt, Homo Sapiens
gcaggcucgcgccuuuuucccuuuucuaagcu

SEQ ID NO: 120672 - RNA, 32 nt, Homo Sapiens
caggugugguggcucacgcauguaaucccagc

SEQ ID NO: 120673 - RNA, 32 nt, Homo Sapiens
uccugcaccagccccagcuccugccuacaucc

SEQ ID NO: 120674 - RNA, 32 nt, Homo Sapiens
cuggugcuucagggaggcgccgugcccuccgc

SEQ ID NO: 120675 - RNA, 32 nt, Homo Sapiens
ccccaggggccccuuuggcuuuuuacaaauaa

SEQ ID NO: 120676 - RNA, 32 nt, Homo Sapiens
acucuuuugaggugaauauaauuuauauuaca

SEQ ID NO: 120677 - RNA, 32 nt, Homo Sapiens
ucacccggacagagccgggagcugggugucgc

SEQ ID NO: 120678 - RNA, 30 nt, Homo Sapiens
ugaugugucugugauggugagaauucccaa

SEQ ID NO: 120679 - RNA, 32 nt, Homo Sapiens
uuucuaccuacuuuauguuuuaucucuaaguu

SEQ ID NO: 120680 - RNA, 32 nt, Homo Sapiens
gugacuuuguaaaaauacagaaggccuuugag

SEQ ID NO: 120681 - RNA, 32 nt, Homo Sapiens
aacaaauuaaaauaaagagauccugggugguu

SEQ ID NO: 120682 - RNA, 32 nt, Homo Sapiens
accaaacuauccacaauuuaaauaaagaacug

SEQ ID NO: 120683 - RNA, 32 nt, Homo Sapiens
cuccucaugcuggccuuucuuggaagaagcca

SEQ ID NO: 120684 - RNA, 32 nt, Homo Sapiens
aggcuacuuuugaagaucccucugccaaaaau

SEQ ID NO: 120685 - RNA, 32 nt, Homo Sapiens
accaggacccagcucugggagugcagcuggaa

SEQ ID NO: 120686 - RNA, 32 nt, Homo Sapiens
uuuauaaaacgaaguguugccuccgaucguuc

SEQ ID NO: 120687 - RNA, 32 nt, Homo Sapiens
gcccaucagucaacaaguggauaaagaaauug

SEQ ID NO: 120688 - RNA, 32 nt, Homo Sapiens
auuucacuuaggauaaggucuucacgguucac

SEQ ID NO: 120689 - RNA, 32 nt, Homo Sapiens
augauugucucccagauacggguugggguugu

SEQ ID NO: 120690 - RNA, 32 nt, Homo Sapiens
acguguucccuacccugccacccagccacccc

SEQ ID NO: 120691 - RNA, 32 nt, Homo Sapiens
uggguaaggcuccucacuuuucugggccucaa

SEQ ID NO: 120692 - RNA, 32 nt, Homo Sapiens
aagaagcagccgccgcagccccgguggaaacu

SEQ ID NO: 120693 - RNA, 32 nt, Homo Sapiens
gaagaccaguguugcccgaggaggggccggcc

SEQ ID NO: 120694 - RNA, 32 nt, Homo Sapiens
cacucucucuguggaaggcuuuuagcguggcu

SEQ ID NO: 120695 - RNA, 32 nt, Homo Sapiens
cacugauaguauguauuucuuuaguaagaaug

SEQ ID NO: 120696 - RNA, 31 nt, Homo Sapiens
cucggcugcugcagccugcccagcagcacau

SEQ ID NO: 120697 - RNA, 32 nt, Homo Sapiens
uguguaucaauauauauugauauguauuacac

SEQ ID NO: 120698 - RNA, 32 nt, Homo Sapiens
guaacugagagaagaguguguguuugugugug

SEQ ID NO: 120699 - RNA, 32 nt, Homo Sapiens
ugauggguagaaauaacguuauccuucaugcc

SEQ ID NO: 120700 - RNA, 32 nt, Homo Sapiens
agggcuugccauaccuggaccccgaggagccu

SEQ ID NO: 120701 - RNA, 32 nt, Homo Sapiens
aacccuuuugaaaaguagcaauuauggaaaaa

SEQ ID NO: 120702 - RNA, 32 nt, Homo Sapiens
ggggcguccuggccagaucuggauggcagguc

SEQ ID NO: 120703 - RNA, 32 nt, Homo Sapiens
auuuuucaguaacuggauugucuuaagaaacu

SEQ ID NO: 120704 - RNA, 32 nt, Homo Sapiens
uguggcucucuguugugagaucuucagcuacc

SEQ ID NO: 120705 - RNA, 32 nt, Homo Sapiens
uguuguuugcuuaacuugcacuuuagagucau

SEQ ID NO: 120706 - RNA, 30 nt, Homo Sapiens
uuggagucugacugcaucuccuguuacccu

SEQ ID NO: 120707 - RNA, 32 nt, Homo Sapiens
uuuuuaaauaaucacacuuggacucuuuucaa

SEQ ID NO: 120708 - RNA, 32 nt, Homo Sapiens
guggugggaagaagaaaguugagcuuuuuccc

SEQ ID NO: 120709 - RNA, 28 nt, Homo Sapiens
aagaguguggaggugccgaggugucuuc

SEQ ID NO: 120710 - RNA, 32 nt, Homo Sapiens
ucugcucccuucugggacccaggcuucagugu

SEQ ID NO: 120711 - RNA, 32 nt, Homo Sapiens
ccuccgcugccgucggcucccggagcccagcc

SEQ ID NO: 120712 - RNA, 32 nt, Homo Sapiens
ggcaccaaggguccugaguccuggagaugucc

SEQ ID NO: 120713 - RNA, 32 nt, Homo Sapiens
gcacccaaacaaagcacauuaaucaaugcaua

SEQ ID NO: 120714 - RNA, 32 nt, Homo Sapiens
uuucuguuguuaccuuuauucuuaaugucauu

SEQ ID NO: 120715 - RNA, 32 nt, Homo Sapiens
cguaucuggcauaguauucuguguagugggau

SEQ ID NO: 120716 - RNA, 32 nt, Homo Sapiens
auaugaaaauaaauuucuuuuuuaugucguga

SEQ ID NO: 120717 - RNA, 32 nt, Homo Sapiens
uguggggccagccccacccccagccaggcuau

SEQ ID NO: 120718 - RNA, 32 nt, Homo Sapiens
ccccugccccacuugcuuggacgacacuuacu

SEQ ID NO: 120719 - RNA, 32 nt, Homo Sapiens
ucaccaacaucugcagaaugggccaccagggu

SEQ ID NO: 120720 - RNA, 32 nt, Homo Sapiens
auauuguuuugucucagccuaaaaguuacggu

SEQ ID NO: 120721 - RNA, 32 nt, Homo Sapiens
aauuuaucucaaccauucgguccuuucucaac

SEQ ID NO: 120722 - RNA, 32 nt, Homo Sapiens
aacaaaaaacaaaacccucccagugugugucc

SEQ ID NO: 120723 - RNA, 32 nt, Homo Sapiens
aaugggggccccagcaguuacagggcccagcc

SEQ ID NO: 120724 - RNA, 32 nt, Homo Sapiens
agaaagcccccucccugcucuaagaaggggcu

SEQ ID NO: 120725 - RNA, 32 nt, Homo Sapiens
caccaccgccccaccgugcacuucuccucucu

SEQ ID NO: 120726 - RNA, 32 nt, Homo Sapiens
uugacgaaaacaaaaaugaauccaaauuagaa

SEQ ID NO: 120727 - RNA, 32 nt, Homo Sapiens
accggggcucgagucccggcccgagcgcggcg

SEQ ID NO: 120728 - RNA, 32 nt, Homo Sapiens
agcuccaugcuggucacuagggugcugugcuc

SEQ ID NO: 120729 - RNA, 32 nt, Homo Sapiens
gacacacaaaacaaaauaucuggaccuuuaca

SEQ ID NO: 120730 - RNA, 30 nt, Homo Sapiens
ccaccaguguccgcugcagagguauccccc

SEQ ID NO: 120731 - RNA, 32 nt, Homo Sapiens
ggaaagccuugugcugcagaucggaccucagg

SEQ ID NO: 120732 - RNA, 32 nt, Homo Sapiens
ggggacugcgccagguuccccagccgcccaca

SEQ ID NO: 120733 - RNA, 32 nt, Homo Sapiens
ucucugccagaucgcgggccugucggugucug

SEQ ID NO: 120734 - RNA, 30 nt, Homo Sapiens
cuccaaccacuugcccugccucaguuucuc

SEQ ID NO: 120735 - RNA, 32 nt, Homo Sapiens
uacuggggcagggcagcaggcuuuuguguucu

SEQ ID NO: 120736 - RNA, 32 nt, Homo Sapiens
accucaagcugagacacuggcagugguggcgg

SEQ ID NO: 120737 - RNA, 32 nt, Homo Sapiens
agccagggggccugggccagaccagggcucug

SEQ ID NO: 120738 - RNA, 32 nt, Homo Sapiens
uuucucccaagcaaaucaggcauacggagagg

SEQ ID NO: 120739 - RNA, 32 nt, Homo Sapiens
aagaaggaagaagccagacugguuagacagua

SEQ ID NO: 120740 - RNA, 32 nt, Homo Sapiens
gcuauguacuaauaauacuuugcuugccaaag

SEQ ID NO: 120741 - RNA, 32 nt, Homo Sapiens
gcuaacccacccaagacuuauacccaggaugg

SEQ ID NO: 120742 - RNA, 32 nt, Homo Sapiens
uauuguauucuuauguaaagugccaaauuuua

SEQ ID NO: 120743 - RNA, 32 nt, Homo Sapiens
uguuaucugaagacuaugaagacuucuaugcu

SEQ ID NO: 120744 - RNA, 32 nt, Homo Sapiens
gggagugugcacacgugcguguguguugcuau

SEQ ID NO: 120745 - RNA, 32 nt, Homo Sapiens
gaaauauacagaaagcacuuaagagaacuuaa

SEQ ID NO: 120746 - RNA, 32 nt, Homo Sapiens
caucacugaggcacugugauguguuagguggg

SEQ ID NO: 120747 - RNA, 32 nt, Homo Sapiens
uaaaagucaguacggauuuuaauagccugggg

SEQ ID NO: 120748 - RNA, 30 nt, Homo Sapiens
ccggcuguuugcaguggggaaaccgaggca

SEQ ID NO: 120749 - RNA, 32 nt, Homo Sapiens
cucacuccaucuggcuaagugaucuugaaaua

SEQ ID NO: 120750 - RNA, 32 nt, Homo Sapiens
aacagacaagucaugcacaauguaaaaccagc

SEQ ID NO: 120751 - RNA, 32 nt, Homo Sapiens
cugaguggcagggcugacucccgucgacacga

SEQ ID NO: 120752 - RNA, 32 nt, Homo Sapiens
gcuuuuuucuuucuuucuuuuuuuugagaugg

SEQ ID NO: 120753 - RNA, 32 nt, Homo Sapiens
gugaugggguggccuuccugcugccccccucc

SEQ ID NO: 120754 - RNA, 32 nt, Homo Sapiens
gauguccguggcgugcgugggcggcugcgcug

SEQ ID NO: 120755 - RNA, 32 nt, Homo Sapiens
uaguagagaaaguuuuaaacugcagaaauugg

SEQ ID NO: 120756 - RNA, 32 nt, Homo Sapiens
caccacguucccaucacccaccucauugaucc

SEQ ID NO: 120757 - RNA, 32 nt, Homo Sapiens
uguuacugugucuacauagaaagggaagacau

SEQ ID NO: 120758 - RNA, 32 nt, Homo Sapiens
ccaagccccagcguggggaagggcccuggaga

SEQ ID NO: 120759 - RNA, 32 nt, Homo Sapiens
ucacucuggagcaggccagcucugcuggacag

SEQ ID NO: 120760 - RNA, 32 nt, Homo Sapiens
aaaaacaguaaaaauaaccacuuuuuguuggg

SEQ ID NO: 120761 - RNA, 28 nt, Homo Sapiens
aggaugggcaagugucguggacuucgua

SEQ ID NO: 120762 - RNA, 32 nt, Homo Sapiens
gaaagcucccgggccucuggccugcagggcag

SEQ ID NO: 120763 - RNA, 32 nt, Homo Sapiens
guuugggagucacagacccuccccucuccuca

SEQ ID NO: 120764 - RNA, 32 nt, Homo Sapiens
auuaaagucuacuuguuuuuuauugcuaaagu

SEQ ID NO: 120765 - RNA, 32 nt, Homo Sapiens
gaggggcccucccuggucucuggccacccucc

SEQ ID NO: 120766 - RNA, 32 nt, Homo Sapiens
agcuccaugcccgugagcugcuacgggguggu

SEQ ID NO: 120767 - RNA, 31 nt, Homo Sapiens
gggacgagggcggcggauggcgucccaugua

SEQ ID NO: 120768 - RNA, 32 nt, Homo Sapiens
acacacucgcuguguccccucuccuccccugu

SEQ ID NO: 120769 - RNA, 32 nt, Homo Sapiens
ccacccaggcugaguaucaucuccugggccac

SEQ ID NO: 120770 - RNA, 32 nt, Homo Sapiens
ggcgacgcgggccuggcgagcuccgggcuccu

SEQ ID NO: 120771 - RNA, 28 nt, Homo Sapiens
gguggaguuacaggcaaagugggaggga

SEQ ID NO: 120772 - RNA, 31 nt, Homo Sapiens
cugcaguggaacuccaugccccgccucccaa

SEQ ID NO: 120773 - RNA, 27 nt, Homo Sapiens
cccauucccagcugcagcccccuaaac

SEQ ID NO: 120774 - RNA, 32 nt, Homo Sapiens
ccagccgucuuguccacgcagcuucgucugua

SEQ ID NO: 120775 - RNA, 32 nt, Homo Sapiens
gacaggagaaaguguauguaaacuaccugaaa

SEQ ID NO: 120776 - RNA, 32 nt, Homo Sapiens
ugucaugucugauagcucuuuggauuuaccaa

SEQ ID NO: 120777 - RNA, 32 nt, Homo Sapiens
uuugacaaaagaguucaacauaaaaguaacaa

SEQ ID NO: 120778 - RNA, 32 nt, Homo Sapiens
accugugugcuaaaaauuuuccagauacuugc

SEQ ID NO: 120779 - RNA, 32 nt, Homo Sapiens
uucuucauuauuuacuuuuucuuacuuguuac

SEQ ID NO: 120780 - RNA, 32 nt, Homo Sapiens
uucaucacauaaacaaaacuaaagauaaaaac

SEQ ID NO: 120781 - RNA, 32 nt, Homo Sapiens
gacgggcggugucacgugaucgcgaggccgcg

SEQ ID NO: 120782 - RNA, 32 nt, Homo Sapiens
aauuuuuguauuucuuuuuuuuuuuuuuguag

SEQ ID NO: 120783 - RNA, 32 nt, Homo Sapiens
guuuuuacauucaauaacaacuauuaugauua

SEQ ID NO: 120784 - RNA, 32 nt, Homo Sapiens
cccaugucauuuaauugucaguuucuuugaca

SEQ ID NO: 120785 - RNA, 32 nt, Homo Sapiens
gaaagaaauagaacaaucauggagccuaggag

SEQ ID NO: 120786 - RNA, 32 nt, Homo Sapiens
aauaaaccaagcauuggggcuuggcacauagu

SEQ ID NO: 120787 - RNA, 32 nt, Homo Sapiens
uuuauuucuucuuuuccaaauacaaauaagau

SEQ ID NO: 120788 - RNA, 32 nt, Homo Sapiens
ccgagauugugcugcugcacuccagccugggu

SEQ ID NO: 120789 - RNA, 32 nt, Homo Sapiens
auccaguguuuggagucaugucguaaauuggc

SEQ ID NO: 120790 - RNA, 32 nt, Homo Sapiens
uauuauggcaucuauuuaggaguuguucaaau

SEQ ID NO: 120791 - RNA, 32 nt, Homo Sapiens
acuuauauugaaauuagguuuuccaagguucu

SEQ ID NO: 120792 - RNA, 32 nt, Homo Sapiens
ccaccuguuuucugccgugaccuuugguccca

SEQ ID NO: 120793 - RNA, 32 nt, Homo Sapiens
ggaacaaaucauaacagauuuuaccuguuuac

SEQ ID NO: 120794 - RNA, 32 nt, Homo Sapiens
gucgcgggucuaagaggacuagggcgggagcg

SEQ ID NO: 120795 - RNA, 32 nt, Homo Sapiens
aggugcagacugccccgugcucuggcuugcag

SEQ ID NO: 120796 - RNA, 32 nt, Homo Sapiens
caaaggggagaccagagggucuguguucucca

SEQ ID NO: 120797 - RNA, 32 nt, Homo Sapiens
aggugggggucaagguggggggaccaggugac

SEQ ID NO: 120798 - RNA, 32 nt, Homo Sapiens
aaauuggcuucuuuuuauugggcuucucugga

SEQ ID NO: 120799 - RNA, 32 nt, Homo Sapiens
uaaguguccauaugcaucuuuuuugguauaau

SEQ ID NO: 120800 - RNA, 32 nt, Homo Sapiens
aaggauucacucuggagagaagucauaugaau

SEQ ID NO: 120801 - RNA, 32 nt, Homo Sapiens
ucucuccggccgccgccgccacccgcugucgc

SEQ ID NO: 120802 - RNA, 32 nt, Homo Sapiens
uggcuccagacaccccggauccucucaccgcg

SEQ ID NO: 120803 - RNA, 32 nt, Homo Sapiens
uccaaacgaccauuuuaucuucgugcucugca

SEQ ID NO: 120804 - RNA, 32 nt, Homo Sapiens
uccauuugcguuccaugaugcugggauuuaca

SEQ ID NO: 120805 - RNA, 32 nt, Homo Sapiens
aggugguuggggcacagcuugguuuuauacau

SEQ ID NO: 120806 - RNA, 32 nt, Homo Sapiens
gaaguuacaaauaguucugaacauuuuucuau

SEQ ID NO: 120807 - RNA, 32 nt, Homo Sapiens
cccagcguggagguagaaaaaauugcuugggc

SEQ ID NO: 120808 - RNA, 32 nt, Homo Sapiens
gcccguucgcaccgcccccgcccgcaagaaag

SEQ ID NO: 120809 - RNA, 32 nt, Homo Sapiens
gguaagagugcuauuuccuccucccuuuagaa

SEQ ID NO: 120810 - RNA, 32 nt, Homo Sapiens
ucuuuguuaugaaaagaaaugauuuugagggc

SEQ ID NO: 120811 - RNA, 32 nt, Homo Sapiens
uccuaugccucuuuuucuuaacuguaaaacau

SEQ ID NO: 120812 - RNA, 32 nt, Homo Sapiens
ugugccucgggcugcuggccgcgcuggcaggg

SEQ ID NO: 120813 - RNA, 32 nt, Homo Sapiens
caauguacaaauaauacagcugugcuaaucuc

SEQ ID NO: 120814 - RNA, 29 nt, Homo Sapiens
uggaauucuucuuucagaggagcgccugg

SEQ ID NO: 120815 - RNA, 32 nt, Homo Sapiens
uacuucagcauuaaaaacagccaaauuauuuu

SEQ ID NO: 120816 - RNA, 32 nt, Homo Sapiens
guugccgggaggggcgaggcuggcugaucugc

SEQ ID NO: 120817 - RNA, 32 nt, Homo Sapiens
gacauuacguucugcuggccuagaggucuuag

SEQ ID NO: 120818 - RNA, 32 nt, Homo Sapiens
ugcgguggccgcggcgcggagccgcacuccgg

SEQ ID NO: 120819 - RNA, 32 nt, Homo Sapiens
ucaagugugcaucacuucuccuguucugccaa

SEQ ID NO: 120820 - RNA, 32 nt, Homo Sapiens
gguggucuaguggcuaggauucggcgcuuuca

SEQ ID NO: 120821 - RNA, 32 nt, Homo Sapiens
acacauuugccuugacaaacuucuuucacuca

SEQ ID NO: 120822 - RNA, 32 nt, Homo Sapiens
agugacuuuguaauaucaaaugccaaagcuac

SEQ ID NO: 120823 - RNA, 32 nt, Homo Sapiens
cagcuccugcuccuucgccgggaggccgcccg

SEQ ID NO: 120824 - RNA, 32 nt, Homo Sapiens
acucagaaaauaaacacagagaaggaaucuca

SEQ ID NO: 120825 - RNA, 32 nt, Homo Sapiens
uuauaaucauaucauguguugaggguauuuuu

SEQ ID NO: 120826 - RNA, 32 nt, Homo Sapiens
ccugcgcaccgcagcccucuccgcugcgccca

SEQ ID NO: 120827 - RNA, 32 nt, Homo Sapiens
ggccagcgcgggcuucggcaugcugacggcac

SEQ ID NO: 120828 - RNA, 32 nt, Homo Sapiens
cuuuuauaccuccccagacuccuucaacaauu

SEQ ID NO: 120829 - RNA, 32 nt, Homo Sapiens
agaggcaggggagaggacacaggguggccuca

SEQ ID NO: 120830 - RNA, 32 nt, Homo Sapiens
ccuuuguaacaaguguacagaaaacucauuuu

SEQ ID NO: 120831 - RNA, 32 nt, Homo Sapiens
ucaagcgauccuccuuccucauccuucuaaag

SEQ ID NO: 120832 - RNA, 32 nt, Homo Sapiens
uuucagccccgggccuggaggggguggggagg

SEQ ID NO: 120833 - RNA, 32 nt, Homo Sapiens
cucaacaagcaucuuugcagucagaaaacaua

SEQ ID NO: 120834 - RNA, 32 nt, Homo Sapiens
cuauuaccaaaguuuaaugaggccacagcauu

SEQ ID NO: 120835 - RNA, 32 nt, Homo Sapiens
aaauaagugaaacuucuuuuuacaaagauaga

SEQ ID NO: 120836 - RNA, 32 nt, Homo Sapiens
agucaaggaaguuuuggaagugaguagcuaug

SEQ ID NO: 120837 - RNA, 32 nt, Homo Sapiens
uuggguugucacucuagagcaugucaaacuuu

SEQ ID NO: 120838 - RNA, 32 nt, Homo Sapiens
cgcuaccccgggugggguagggacccccuuuc

SEQ ID NO: 120839 - RNA, 32 nt, Homo Sapiens
gcgaacacacucucuuggauaauuaccacgau

SEQ ID NO: 120840 - RNA, 32 nt, Homo Sapiens
aaagaauggcuacuuuuuucuaugcuggagua

SEQ ID NO: 120841 - RNA, 32 nt, Homo Sapiens
gccccacagcccugaggaaggcacauauuuag

SEQ ID NO: 120842 - RNA, 32 nt, Homo Sapiens
cacugggaagacugugaagaggacagccacuu

SEQ ID NO: 120843 - RNA, 32 nt, Homo Sapiens
uugccaaucuccuuguuuucuaaugaauaaau

SEQ ID NO: 120844 - RNA, 28 nt, Homo Sapiens
agcugcggcggccgcagguuccaaagcg

SEQ ID NO: 120845 - RNA, 32 nt, Homo Sapiens
gcgccucugucucgcuuuuucuuauuuuuccc

SEQ ID NO: 120846 - RNA, 32 nt, Homo Sapiens
uguugcucccugccccucccccugucuuucca

SEQ ID NO: 120847 - RNA, 32 nt, Homo Sapiens
auuucgccagcuuguacguagcuugccacuca

SEQ ID NO: 120848 - RNA, 32 nt, Homo Sapiens
uggcaucccggggcuccccacgggcuggauga

SEQ ID NO: 120849 - RNA, 32 nt, Homo Sapiens
acgucuguauauuuuauauauagauacauaua

SEQ ID NO: 120850 - RNA, 32 nt, Homo Sapiens
ugugcuuacauaaacauacuuaaaagguuuuc

SEQ ID NO: 120851 - RNA, 32 nt, Homo Sapiens
ggcccaccaacccgcccaccuugacugccccc

SEQ ID NO: 120852 - RNA, 32 nt, Homo Sapiens
uugguuauaucgaaauaguuacaggcauuaaa

SEQ ID NO: 120853 - RNA, 32 nt, Homo Sapiens
gagcugggccgagccgucgccggcgccacgcg

SEQ ID NO: 120854 - RNA, 32 nt, Homo Sapiens
uguacucuuuuggaugguguugcauuuuucac

SEQ ID NO: 120855 - RNA, 32 nt, Homo Sapiens
agcuugaauuuaaugaaauagaauucagugug

SEQ ID NO: 120856 - RNA, 32 nt, Homo Sapiens
agcccagugccuagugucugugccgccuacca

SEQ ID NO: 120857 - RNA, 32 nt, Homo Sapiens
gcuucuguagauaaggguuaaaaacuaauauu

SEQ ID NO: 120858 - RNA, 32 nt, Homo Sapiens
aggcuuggaugcuccaccugcugcgauuuccc

SEQ ID NO: 120859 - RNA, 32 nt, Homo Sapiens
ugggcaagccccagcgccuauauuaggcacau

SEQ ID NO: 120860 - RNA, 32 nt, Homo Sapiens
uugcacagaugagucugguguuagaaucucuc

SEQ ID NO: 120861 - RNA, 32 nt, Homo Sapiens
auuuagggcugauguuaucuggacugucugcc

SEQ ID NO: 120862 - RNA, 32 nt, Homo Sapiens
ggcgccagcaggcccuggugggcuugggagga

SEQ ID NO: 120863 - RNA, 32 nt, Homo Sapiens
ugcucacgaccuccgugccgggcucauaccug

SEQ ID NO: 120864 - RNA, 32 nt, Homo Sapiens
gaaccuuaaugacaacacuuaauagcaacaga

SEQ ID NO: 120865 - RNA, 32 nt, Homo Sapiens
cuaacgcuccagcuccacucaucugcggcauc

SEQ ID NO: 120866 - RNA, 32 nt, Homo Sapiens
caggaucucaaagauuucaugagacaagcugg

SEQ ID NO: 120867 - RNA, 32 nt, Homo Sapiens
auguacauguuuuaccaccacccaggucaaga

SEQ ID NO: 120868 - RNA, 32 nt, Homo Sapiens
ucagcugcaggacaaugcugccagaggccugg

SEQ ID NO: 120869 - RNA, 32 nt, Homo Sapiens
agaggcuuccguguccucucccccaacccccu

SEQ ID NO: 120870 - RNA, 32 nt, Homo Sapiens
aucccacuccucugccagccacuucccagccg

SEQ ID NO: 120871 - RNA, 31 nt, Homo Sapiens
cccacgugugaucuccugccccgugagcugg

SEQ ID NO: 120872 - RNA, 32 nt, Homo Sapiens
aggcgccucacagagcacagacgugcccucgg

SEQ ID NO: 120873 - RNA, 32 nt, Homo Sapiens
uaaccauaaccaaagucacauuugggguuuau

SEQ ID NO: 120874 - RNA, 32 nt, Homo Sapiens
ccuugagagcaagcauuguuucccaugcuguu

SEQ ID NO: 120875 - RNA, 32 nt, Homo Sapiens
ggcccuggcugggggccugagagacagacagg

SEQ ID NO: 120876 - RNA, 32 nt, Homo Sapiens
ggggggaggaggagagaauggaauggcuggac

SEQ ID NO: 120877 - RNA, 32 nt, Homo Sapiens
uuugauucuugauuuucaagcuuucaaauccu

SEQ ID NO: 120878 - RNA, 32 nt, Homo Sapiens
ucuuugcaucuuccuucaguguauuuuuguuu

SEQ ID NO: 120879 - RNA, 32 nt, Homo Sapiens
uacaauccuguuuauggauuuguuugcauauu

SEQ ID NO: 120880 - RNA, 32 nt, Homo Sapiens
uuccugcuuucugcaccucccaccaaaacaaa

SEQ ID NO: 120881 - RNA, 30 nt, Homo Sapiens
gggugaugacgucagggggcggugucggag

SEQ ID NO: 120882 - RNA, 32 nt, Homo Sapiens
gguuuucggguuguggcaaaccccaaagagag

SEQ ID NO: 120883 - RNA, 24 nt, Homo Sapiens
ugaggguccuucuccaucucccag

SEQ ID NO: 120884 - RNA, 32 nt, Homo Sapiens
uucuguugaguugugggauauuaagcuuuuau

SEQ ID NO: 120885 - RNA, 32 nt, Homo Sapiens
gucaugcuguagagccaggauuccuagaccca

SEQ ID NO: 120886 - RNA, 32 nt, Homo Sapiens
uaugauaaauauuuauacuuuauugaucuacu

SEQ ID NO: 120887 - RNA, 32 nt, Homo Sapiens
cacagauuuccuucccucuccuccaggagacc

SEQ ID NO: 120888 - RNA, 32 nt, Homo Sapiens
uaaacuuccaguuaagaaucuagguccgcccu

SEQ ID NO: 120889 - RNA, 32 nt, Homo Sapiens
uuuuggcauaugcuuuggauuauugguccaag

SEQ ID NO: 120890 - RNA, 32 nt, Homo Sapiens
agugauauauuccugcuguuuguuauguuuuc

SEQ ID NO: 120891 - RNA, 32 nt, Homo Sapiens
acacuuucacccauagcagaaaacacuuugug

SEQ ID NO: 120892 - RNA, 32 nt, Homo Sapiens
uucccagucuuuuccuguuccuccucuaggua

SEQ ID NO: 120893 - RNA, 32 nt, Homo Sapiens
auaaccuggaagcuccugaugauuugagauca

SEQ ID NO: 120894 - RNA, 32 nt, Homo Sapiens
gaacugggccuguugcccuuucuguaccauuu

SEQ ID NO: 120895 - RNA, 32 nt, Homo Sapiens
gagcauugggucugggaagagguaagaggaac

SEQ ID NO: 120896 - RNA, 32 nt, Homo Sapiens
ucaucagagauuaagaagcagcaaugccccuc

SEQ ID NO: 120897 - RNA, 32 nt, Homo Sapiens
ggacaaaagcaucucuaaucacucuaaaagau

SEQ ID NO: 120898 - RNA, 32 nt, Homo Sapiens
uacgccuuuaauaucaguacuuugggaggcug

SEQ ID NO: 120899 - RNA, 32 nt, Homo Sapiens
gccugcuucucgcuuccggggucgccagagcg

SEQ ID NO: 120900 - RNA, 32 nt, Homo Sapiens
aucucuuauuuuuucuuuccugucuuaaacuu

SEQ ID NO: 120901 - RNA, 32 nt, Homo Sapiens
gggagcagcugcgcucccggcgcugugcucgu

SEQ ID NO: 120902 - RNA, 32 nt, Homo Sapiens
uugcuucuccucccucccauucucucugcaac

SEQ ID NO: 120903 - RNA, 32 nt, Homo Sapiens
ucuguggugggaauuaaaaauauuauugguau

SEQ ID NO: 120904 - RNA, 32 nt, Homo Sapiens
gcugcccugcccgugcccgccugcagugguug

SEQ ID NO: 120905 - RNA, 32 nt, Homo Sapiens
gcuggugagugcgugacugcuggucaugcccg

SEQ ID NO: 120906 - RNA, 32 nt, Homo Sapiens
ccucuuucucgaccacccaccuaccauucuug

SEQ ID NO: 120907 - RNA, 32 nt, Homo Sapiens
uguguucugucuuuaaaauguaagugaauuuu

SEQ ID NO: 120908 - RNA, 32 nt, Homo Sapiens
agaaugcccaguguuauaucauaaucaaggcu

SEQ ID NO: 120909 - RNA, 30 nt, Homo Sapiens
gacaggaaugucccugccugguacuggugg

SEQ ID NO: 120910 - RNA, 32 nt, Homo Sapiens
cucccucugaccaggacugaggaugaugcgac

SEQ ID NO: 120911 - RNA, 30 nt, Homo Sapiens
ugaacauggcccugccaccauucuucggcc

SEQ ID NO: 120912 - RNA, 32 nt, Homo Sapiens
agucucgagggaagagggucugguggaaggag

SEQ ID NO: 120913 - RNA, 32 nt, Homo Sapiens
gccacgcgggucacgacuaugcgugggaaagu

SEQ ID NO: 120914 - RNA, 32 nt, Homo Sapiens
aaauuuuucaaaggaaucaauuuagagauaga

SEQ ID NO: 120915 - RNA, 32 nt, Homo Sapiens
gccggugugaggagcaucuguucuucccacuc

SEQ ID NO: 120916 - RNA, 32 nt, Homo Sapiens
guaccaguagaguggggugcugccguagauac

SEQ ID NO: 120917 - RNA, 32 nt, Homo Sapiens
gacauccuuuguaaugcuaacauggaauuauu

SEQ ID NO: 120918 - RNA, 32 nt, Homo Sapiens
caggcucgacuucaggggucaguguuccuguc

SEQ ID NO: 120919 - RNA, 32 nt, Homo Sapiens
augcggcgggagaggugcggcgccccccaccc

SEQ ID NO: 120920 - RNA, 32 nt, Homo Sapiens
aaaaagcauagcugcccuuugcuguccucaga

SEQ ID NO: 120921 - RNA, 32 nt, Homo Sapiens
gggcuuggagggugaagaggaugugguccuau

SEQ ID NO: 120922 - RNA, 32 nt, Homo Sapiens
gcaagcccaaaauaaaagaaauccugagaagg

SEQ ID NO: 120923 - RNA, 32 nt, Homo Sapiens
ucucuuuuuuaaaauauagguaucucuuugca

SEQ ID NO: 120924 - RNA, 32 nt, Homo Sapiens
gcgguggccccagacccuccccuguccaaaca

SEQ ID NO: 120925 - RNA, 32 nt, Homo Sapiens
uugaccuugccagcugaccuucaaacccugca

SEQ ID NO: 120926 - RNA, 31 nt, Homo Sapiens
acauugagaucccagaaccagagccacuagc

SEQ ID NO: 120927 - RNA, 32 nt, Homo Sapiens
cucaccgccaccuccgccccccggguucaagc

SEQ ID NO: 120928 - RNA, 32 nt, Homo Sapiens
ugaaauugaaaugguagaauggcugaccacag

SEQ ID NO: 120929 - RNA, 32 nt, Homo Sapiens
cauugcucccauucuucuuccacagggccuua

SEQ ID NO: 120930 - RNA, 32 nt, Homo Sapiens
gccccagauccuucucucuggaggaagaggga

SEQ ID NO: 120931 - RNA, 32 nt, Homo Sapiens
agguucaguggagggacgcugcugccugggaa

SEQ ID NO: 120932 - RNA, 31 nt, Homo Sapiens
gcagcggaggagguuuucaguggcugauuga

SEQ ID NO: 120933 - RNA, 32 nt, Homo Sapiens
uucauaaaugaaauucuauucacauuacugug

SEQ ID NO: 120934 - RNA, 32 nt, Homo Sapiens
gcugcuguugaagcuuugaauuuuacaauaaa

SEQ ID NO: 120935 - RNA, 32 nt, Homo Sapiens
cuguguagaguccagauugugcucuuuguccu

SEQ ID NO: 120936 - RNA, 32 nt, Homo Sapiens
cggccugcguggcgcugccgucccccacgugu

SEQ ID NO: 120937 - RNA, 27 nt, Homo Sapiens
uagaccuccuucuucauccauaagugg

SEQ ID NO: 120938 - RNA, 32 nt, Homo Sapiens
uacauccagaaaguuguguaggcaccaccucu

SEQ ID NO: 120939 - RNA, 32 nt, Homo Sapiens
ggauggcccagcugaucuaaggaccccaguuu

SEQ ID NO: 120940 - RNA, 32 nt, Homo Sapiens
ucugccuugguggcaggagcccggggaggaga

SEQ ID NO: 120941 - RNA, 32 nt, Homo Sapiens
cuccuuggugcaaaaacaaaaugggaaaaaua

SEQ ID NO: 120942 - RNA, 32 nt, Homo Sapiens
cuguaaagcugauuuacccuacugcuggacuu

SEQ ID NO: 120943 - RNA, 32 nt, Homo Sapiens
gagucucacucccacacaugcccauagcuagc

SEQ ID NO: 120944 - RNA, 29 nt, Homo Sapiens
ugggaaguaaagagauauuuuccaguagg

SEQ ID NO: 120945 - RNA, 32 nt, Homo Sapiens
gcuaaaacucauuuuucuuuuggcauuuucuu

SEQ ID NO: 120946 - RNA, 32 nt, Homo Sapiens
cgauaccgucaugaacugguucaccaaggaag

SEQ ID NO: 120947 - RNA, 32 nt, Homo Sapiens
caggagucuucagacccagagaaggacggugc

SEQ ID NO: 120948 - RNA, 32 nt, Homo Sapiens
uuucauuuggaggaaaucacaaguggccgaaa

SEQ ID NO: 120949 - RNA, 30 nt, Homo Sapiens
ggaccugcccgcggcccgccggcgugugca

SEQ ID NO: 120950 - RNA, 32 nt, Homo Sapiens
uauuguuucuaaaacaacuuaaaagguguaga

SEQ ID NO: 120951 - RNA, 32 nt, Homo Sapiens
ucuuuggccccucccgccgggugagguuggca

SEQ ID NO: 120952 - RNA, 32 nt, Homo Sapiens
cgggcggcgcggggcgguccggcggguucaaa

SEQ ID NO: 120953 - RNA, 32 nt, Homo Sapiens
agucaagaaugccagcaguuucuuuguauaaa

SEQ ID NO: 120954 - RNA, 32 nt, Homo Sapiens
gguuggcagcuaggguuuguguuggaggcuuu

SEQ ID NO: 120955 - RNA, 32 nt, Homo Sapiens
guauauuagagccgggacgcggcggccgcagg

SEQ ID NO: 120956 - RNA, 32 nt, Homo Sapiens
accuccgccucccagguucaagcuauucuccu

SEQ ID NO: 120957 - RNA, 32 nt, Homo Sapiens
accuccgccucccaguuucaagcgauucuccu

SEQ ID NO: 120958 - RNA, 32 nt, Homo Sapiens
cgaggaugcucuuuuuaccacaguauguaccu

SEQ ID NO: 120959 - RNA, 29 nt, Homo Sapiens
guggagagcggacagaggggcuggcuguu

SEQ ID NO: 120960 - RNA, 32 nt, Homo Sapiens
ucucugggguggcaggagacaagggcucugga

SEQ ID NO: 120961 - RNA, 32 nt, Homo Sapiens
ggucccuugggucuggcuuuuuuacuuagcua

SEQ ID NO: 120962 - RNA, 32 nt, Homo Sapiens
ugucuuaaugaaauauaucaacccaaaagugu

SEQ ID NO: 120963 - RNA, 31 nt, Homo Sapiens
caugggugcccccagaaguaagcagcucuug

SEQ ID NO: 120964 - RNA, 32 nt, Homo Sapiens
aggggaggggauuuggggcuggggcuccauuc

SEQ ID NO: 120965 - RNA, 32 nt, Homo Sapiens
cugccugggaacuaacacgugccucguaaagg

SEQ ID NO: 120966 - RNA, 32 nt, Homo Sapiens
cgcaccuccaucccgcccuucccacagcauuc

SEQ ID NO: 120967 - RNA, 32 nt, Homo Sapiens
guuuaggauucaguaacagugaaguguuuacu

SEQ ID NO: 120968 - RNA, 32 nt, Homo Sapiens
aauauaucucuuucuuuuucuuccgacauuag

SEQ ID NO: 120969 - RNA, 32 nt, Homo Sapiens
cuugauuccugccuacagauugggguuccggg

SEQ ID NO: 120970 - RNA, 32 nt, Homo Sapiens
aucccugcuaugaagagggaaugccaguacaa

SEQ ID NO: 120971 - RNA, 32 nt, Homo Sapiens
uaaguuuuuaaagaauguaugaagauagucac

SEQ ID NO: 120972 - RNA, 32 nt, Homo Sapiens
agaaaauaagaacaaagagaaaaaauacauag

SEQ ID NO: 120973 - RNA, 32 nt, Homo Sapiens
gucccuagacgccucgucuccucccguguccc

SEQ ID NO: 120974 - RNA, 32 nt, Homo Sapiens
cuucccagccccaccuucuaguucugacuucg

SEQ ID NO: 120975 - RNA, 32 nt, Homo Sapiens
ccuaauuuuuaaaaauagcuuucguuuugagu

SEQ ID NO: 120976 - RNA, 32 nt, Homo Sapiens
gcagcccugccaguuugacuaugccgucuucu

SEQ ID NO: 120977 - RNA, 32 nt, Homo Sapiens
accccccuggggagaagguggccucguugccc

SEQ ID NO: 120978 - RNA, 32 nt, Homo Sapiens
aguguggaggugaaaagguacaauagugcuug

SEQ ID NO: 120979 - RNA, 32 nt, Homo Sapiens
caugaagagguggggggagucaugauucauaa

SEQ ID NO: 120980 - RNA, 32 nt, Homo Sapiens
uuuucugauggacuuuaggugugugcagcaca

SEQ ID NO: 120981 - RNA, 32 nt, Homo Sapiens
guuaccaaaaauacaaagcaaaaggacuauua

SEQ ID NO: 120982 - RNA, 32 nt, Homo Sapiens
cauguggcuuggugcccuuucagagaacacug

SEQ ID NO: 120983 - RNA, 32 nt, Homo Sapiens
acccaucuggacacggagaccaggaauggagu

SEQ ID NO: 120984 - RNA, 32 nt, Homo Sapiens
gaggagcuuagggucuccagggagaaugucug

SEQ ID NO: 120985 - RNA, 32 nt, Homo Sapiens
cuucuucugaccagcuuccucuucugauaggc

SEQ ID NO: 120986 - RNA, 32 nt, Homo Sapiens
ggcugaggggagagggcagcccuuuugugcua

SEQ ID NO: 120987 - RNA, 32 nt, Homo Sapiens
cagacccagggaccacugaggacaaugugacu

SEQ ID NO: 120988 - RNA, 32 nt, Homo Sapiens
acauauaugaaacacaaauuauagcauaacau

SEQ ID NO: 120989 - RNA, 30 nt, Homo Sapiens
uccccacagcccgugccccacgccgccugg

SEQ ID NO: 120990 - RNA, 32 nt, Homo Sapiens
uucgcugcccgggagcgccagcugcgugagga

SEQ ID NO: 120991 - RNA, 32 nt, Homo Sapiens
aagaauaaugguuuccuucuuucucucuuuuc

SEQ ID NO: 120992 - RNA, 32 nt, Homo Sapiens
caguuguaucgcgcccgccgcgcguccccgga

SEQ ID NO: 120993 - RNA, 32 nt, Homo Sapiens
cuauugcaauuucaaaggggcuuugaagcaau

SEQ ID NO: 120994 - RNA, 32 nt, Homo Sapiens
uucuuuagggcauugaauagacaaguaaagcu

SEQ ID NO: 120995 - RNA, 32 nt, Homo Sapiens
uaggaagaacaguaaacagugauguuaaaaua

SEQ ID NO: 120996 - RNA, 32 nt, Homo Sapiens
gugcaggacgcgcgucuccgccgcccgcggug

SEQ ID NO: 120997 - RNA, 32 nt, Homo Sapiens
uaaugagaauugaauuuuuaaguucuaugaaa

SEQ ID NO: 120998 - RNA, 32 nt, Homo Sapiens
accaauuuugggaauaaaagguguuuugguua

SEQ ID NO: 120999 - RNA, 32 nt, Homo Sapiens
uuuuuuuuaccuuuauacuuguagcaaauugu

SEQ ID NO: 121000 - RNA, 32 nt, Homo Sapiens
ugagggcuuugcuaugaccucaguccccucac

SEQ ID NO: 121001 - RNA, 32 nt, Homo Sapiens
gcuggaaguuuaaugaacuguuuucuacauuu

SEQ ID NO: 121002 - RNA, 32 nt, Homo Sapiens
cuacgguucccugccuaggagcuggggaggga

SEQ ID NO: 121003 - RNA, 32 nt, Homo Sapiens
acccucagcacaugugggcaucaggugcggcu

SEQ ID NO: 121004 - RNA, 32 nt, Homo Sapiens
gcauagaaugucaaauuauuuuaaauggugaa

SEQ ID NO: 121005 - RNA, 32 nt, Homo Sapiens
gaagguguuguacuaauagaaacuaaguacag

SEQ ID NO: 121006 - RNA, 32 nt, Homo Sapiens
cacggccaccccccggccucagcgaggagcgg

SEQ ID NO: 121007 - RNA, 32 nt, Homo Sapiens
ccguccggugucaagccccggcgcaggcuugc

SEQ ID NO: 121008 - RNA, 32 nt, Homo Sapiens
ccgcacacauaaaacuuaccaacagauuucau

SEQ ID NO: 121009 - RNA, 29 nt, Homo Sapiens
gaacauggcgaccgcgcgcaccuucgggc

SEQ ID NO: 121010 - RNA, 32 nt, Homo Sapiens
gcccauaggugcugcuggcuccccgccaccag

SEQ ID NO: 121011 - RNA, 32 nt, Homo Sapiens
uucagaaaacaucaagugcuguaaauauguaa

SEQ ID NO: 121012 - RNA, 32 nt, Homo Sapiens
gcuuuaagccuuugauggucaacagcaucaag

SEQ ID NO: 121013 - RNA, 32 nt, Homo Sapiens
uuuuuucuccuccguuuccccagcaugucugc

SEQ ID NO: 121014 - RNA, 32 nt, Homo Sapiens
uacacucaauuacaacgcuuuccucuacuuuu

SEQ ID NO: 121015 - RNA, 32 nt, Homo Sapiens
ucggagcaggugcaaucugugcucuccagcug

SEQ ID NO: 121016 - RNA, 32 nt, Homo Sapiens
gugguucccagccgcacaguagcguguccugg

SEQ ID NO: 121017 - RNA, 32 nt, Homo Sapiens
gacauggaauucaaaucaagcaauauaguucu

SEQ ID NO: 121018 - RNA, 30 nt, Homo Sapiens
ccagcgaaggagcgcgcgggcggucuggcc

SEQ ID NO: 121019 - RNA, 32 nt, Homo Sapiens
acuucucaguguauuuaauuucaaauuguuuu

SEQ ID NO: 121020 - RNA, 32 nt, Homo Sapiens
uaagguuuucuuuguuuauguucagguaagga

SEQ ID NO: 121021 - RNA, 32 nt, Homo Sapiens
cgcacggucucgcgccagcagcagcagcagca

SEQ ID NO: 121022 - RNA, 32 nt, Homo Sapiens
gguggugggauccugaugucuuucauccauuu

SEQ ID NO: 121023 - RNA, 32 nt, Homo Sapiens
aauaaaauuauaccuagcaacauauuauagua

SEQ ID NO: 121024 - RNA, 32 nt, Homo Sapiens
aaacaggccccauuuuguauauaguugcaacu

SEQ ID NO: 121025 - RNA, 32 nt, Homo Sapiens
cccagcagguauaaaaaguaguauaaauacaa

SEQ ID NO: 121026 - RNA, 32 nt, Homo Sapiens
gacccuguuguccccgccugcagcuuugcccc

SEQ ID NO: 121027 - RNA, 32 nt, Homo Sapiens
cuuggcgcgcagcccgggagauccgcccuggg

SEQ ID NO: 121028 - RNA, 32 nt, Homo Sapiens
ggccccauauccucucgcugcacugaccgcag

SEQ ID NO: 121029 - RNA, 32 nt, Homo Sapiens
agaguugauguuucauuccauuuguuuuaucc

SEQ ID NO: 121030 - RNA, 32 nt, Homo Sapiens
uguaaaguaugagccuuaaauaaaucuccaug

SEQ ID NO: 121031 - RNA, 32 nt, Homo Sapiens
agauguaaugugguauccuacauggaauuaua

SEQ ID NO: 121032 - RNA, 32 nt, Homo Sapiens
gcucgaaaacaauuguaauaaugcuaaagaaa

SEQ ID NO: 121033 - RNA, 32 nt, Homo Sapiens
ggugucaaugcagccaggugacacggccgccu

SEQ ID NO: 121034 - RNA, 32 nt, Homo Sapiens
ccguggcgcucugugcgcuaggcagacgcguc

SEQ ID NO: 121035 - RNA, 31 nt, Homo Sapiens
gccuggggccuggacgccacggccucucauc

SEQ ID NO: 121036 - RNA, 32 nt, Homo Sapiens
auaguuggaaaacaaccuaagaaaaucucuua

SEQ ID NO: 121037 - RNA, 32 nt, Homo Sapiens
cuacuguuuacuaccauacuaccaccaaauuu

SEQ ID NO: 121038 - RNA, 32 nt, Homo Sapiens
agcaggcccagcuccaggaucugaauuggaau

SEQ ID NO: 121039 - RNA, 32 nt, Homo Sapiens
guuucuuccaguuagagucuucaucuguccga

SEQ ID NO: 121040 - RNA, 28 nt, Homo Sapiens
uguagacguuguguaauguguuuuuauc

SEQ ID NO: 121041 - RNA, 32 nt, Homo Sapiens
uuguuguaaaucauauuuuuuauuacaacacu

SEQ ID NO: 121042 - RNA, 32 nt, Homo Sapiens
uuuguuaagcuacuuuuucccaccuacccagu

SEQ ID NO: 121043 - RNA, 32 nt, Homo Sapiens
ggcgcagguccuccccuucuguguccugcaga

SEQ ID NO: 121044 - RNA, 32 nt, Homo Sapiens
cuugaacacuuccaagugacucuaccucacca

SEQ ID NO: 121045 - RNA, 32 nt, Homo Sapiens
gguaauauauauauuuuugugaauuauacuuu

SEQ ID NO: 121046 - RNA, 32 nt, Homo Sapiens
cuuuggagaaagugauacaagagcuucugcac

SEQ ID NO: 121047 - RNA, 32 nt, Homo Sapiens
gaagcucgccccaccuccaccugugagauccg

SEQ ID NO: 121048 - RNA, 32 nt, Homo Sapiens
ugaaaaauuacaucuuacuguugauauaugua

SEQ ID NO: 121049 - RNA, 32 nt, Homo Sapiens
uaucuaugaaaggcuuacuuugaaagauggaa

SEQ ID NO: 121050 - RNA, 31 nt, Homo Sapiens
aggcagaaauaaaaauacugaauaucuuugc

SEQ ID NO: 121051 - RNA, 28 nt, Homo Sapiens
uuuugaauggacuacauuauagcuuaac

SEQ ID NO: 121052 - RNA, 32 nt, Homo Sapiens
uccacuucuuccacuccuccccgcaggcccca

SEQ ID NO: 121053 - RNA, 32 nt, Homo Sapiens
caacauuuguaacuuuacaauguaauuuuaua

SEQ ID NO: 121054 - RNA, 31 nt, Homo Sapiens
ccucugaagaaacagaaccagagagggaagg

SEQ ID NO: 121055 - RNA, 30 nt, Homo Sapiens
augagccccggcgguggcggcagcgaaaga

SEQ ID NO: 121056 - RNA, 32 nt, Homo Sapiens
cguuccuaccucuuauuucucauugagccuca

SEQ ID NO: 121057 - RNA, 32 nt, Homo Sapiens
acauuuaaaaacagaauuguguuaugugauca

SEQ ID NO: 121058 - RNA, 32 nt, Homo Sapiens
cuccccacuccagccccugaccccugaccacc

SEQ ID NO: 121059 - RNA, 27 nt, Homo Sapiens
gacaaagccuucuucaauccuuuucau

SEQ ID NO: 121060 - RNA, 32 nt, Homo Sapiens
ggggcuucccuugccuggcccgaagccgugga

SEQ ID NO: 121061 - RNA, 32 nt, Homo Sapiens
uuggaguccgcugacgucgccgcccagauggc

SEQ ID NO: 121062 - RNA, 32 nt, Homo Sapiens
agagaucagguuguugacaguuccugguugac

SEQ ID NO: 121063 - RNA, 32 nt, Homo Sapiens
ucaugauguauuagcuguucaucugcuacugg

SEQ ID NO: 121064 - RNA, 32 nt, Homo Sapiens
ccuuuguuuaaagauaaauguaagcugggugu

SEQ ID NO: 121065 - RNA, 32 nt, Homo Sapiens
ugauauagagcgucucagcaucgccagucuag

SEQ ID NO: 121066 - RNA, 32 nt, Homo Sapiens
aacagccucccucuccuccuccuuccccaggg

SEQ ID NO: 121067 - RNA, 31 nt, Homo Sapiens
guauauuacaaugaucaccgacugaaaauau

SEQ ID NO: 121068 - RNA, 32 nt, Homo Sapiens
uggucuaaacuuauugugguaauggucacaua

SEQ ID NO: 121069 - RNA, 32 nt, Homo Sapiens
cauucauuaucaucaauaaacuggccucuggu

SEQ ID NO: 121070 - RNA, 32 nt, Homo Sapiens
uaaauuuuggaaagauuauccuguuacugaau

SEQ ID NO: 121071 - RNA, 32 nt, Homo Sapiens
ggcucccugaccacccaacucugaaacaaucu

SEQ ID NO: 121072 - RNA, 32 nt, Homo Sapiens
gccaggacagcaaccucuccccuggcccucau

SEQ ID NO: 121073 - RNA, 32 nt, Homo Sapiens
acccgcucugccccacucccagcccuccucag

SEQ ID NO: 121074 - RNA, 32 nt, Homo Sapiens
agcugggcccccggggcccaccacuuaucucc

SEQ ID NO: 121075 - RNA, 32 nt, Homo Sapiens
aacagagaaaaaaagaugugggagaggacaua

SEQ ID NO: 121076 - RNA, 32 nt, Homo Sapiens
agaguguaauauuuuggacugcuguuuuccau

SEQ ID NO: 121077 - RNA, 32 nt, Homo Sapiens
gucugcuauuacucgcaagaaaacauaacugu

SEQ ID NO: 121078 - RNA, 32 nt, Homo Sapiens
guagggagaaaguuaaaacugccaucuaaggg

SEQ ID NO: 121079 - RNA, 32 nt, Homo Sapiens
auuccuggccccagccuggccagggaucccag

SEQ ID NO: 121080 - RNA, 32 nt, Homo Sapiens
aaaaaaguucauacuucuccaauaaauaaagu

SEQ ID NO: 121081 - RNA, 32 nt, Homo Sapiens
auugguguguuccucagcaagucguccaaacc

SEQ ID NO: 121082 - RNA, 32 nt, Homo Sapiens
ggguggaaaacaaaaagagaagaagugauuau

SEQ ID NO: 121083 - RNA, 32 nt, Homo Sapiens
aucuaaauugaauaaugguaccagauaaaauu

SEQ ID NO: 121084 - RNA, 32 nt, Homo Sapiens
uccauauaaaagacauuguaauggaguggauu

SEQ ID NO: 121085 - RNA, 32 nt, Homo Sapiens
caucuaaauggauaccuuuccauccccucaaa

SEQ ID NO: 121086 - RNA, 29 nt, Homo Sapiens
agguuuuggggacaguagaugaugucugg

SEQ ID NO: 121087 - RNA, 32 nt, Homo Sapiens
ucuagcugcaagccagcucuggcuucuggagu

SEQ ID NO: 121088 - RNA, 31 nt, Homo Sapiens
acaggcgggccuuacgcuccaaggcuacagc

SEQ ID NO: 121089 - RNA, 32 nt, Homo Sapiens
aagguggauguguucuaugguauaaagcaucc

SEQ ID NO: 121090 - RNA, 32 nt, Homo Sapiens
uuuuccucuuaagaguucuauucuucagguag

SEQ ID NO: 121091 - RNA, 32 nt, Homo Sapiens
gaaggaucaggaaguucuuagauucuuggaug

SEQ ID NO: 121092 - RNA, 32 nt, Homo Sapiens
aggggaaaggguccugcuuucuccucguucuu

SEQ ID NO: 121093 - RNA, 27 nt, Homo Sapiens
cucaugucauucuucagugcuuugaag

SEQ ID NO: 121094 - RNA, 32 nt, Homo Sapiens
uuggguaggagcuuccaggccugggauuuaca

SEQ ID NO: 121095 - RNA, 32 nt, Homo Sapiens
ugguaaauucuaugaaaaguaagugauuugca

SEQ ID NO: 121096 - RNA, 32 nt, Homo Sapiens
agaacuuuaaaaugguagccuacagaaacaua

SEQ ID NO: 121097 - RNA, 32 nt, Homo Sapiens
agagggagagacacugaguauauuuuaaagca

SEQ ID NO: 121098 - RNA, 32 nt, Homo Sapiens
aagcacgaaaaauuauuuauaauagucuggag

SEQ ID NO: 121099 - RNA, 32 nt, Homo Sapiens
cagugcucacccguguccccgccccgccccuc

SEQ ID NO: 121100 - RNA, 32 nt, Homo Sapiens
gaaguuacaaauauucugaacauuuuucuauu

SEQ ID NO: 121101 - RNA, 32 nt, Homo Sapiens
cagccaaggacacggagaccagggagcgcaug

SEQ ID NO: 121102 - RNA, 32 nt, Homo Sapiens
aggcuugaugagaagagaccccugcccauccu

SEQ ID NO: 121103 - RNA, 32 nt, Homo Sapiens
acucuugcaguugguaaugggguggcaaucaa

SEQ ID NO: 121104 - RNA, 32 nt, Homo Sapiens
ggaguccagacccgacggccggcccaguucca

SEQ ID NO: 121105 - RNA, 32 nt, Homo Sapiens
agcuggccuggcacaagaagaucuacaucuuc

SEQ ID NO: 121106 - RNA, 32 nt, Homo Sapiens
ggucaaguugucagguuauuuauuuuauaaug

SEQ ID NO: 121107 - RNA, 32 nt, Homo Sapiens
gaguuuccuagcuggugccuguccucucuuga

SEQ ID NO: 121108 - RNA, 32 nt, Homo Sapiens
gggcaguauuuugucuuaagauauauuuuuua

SEQ ID NO: 121109 - RNA, 32 nt, Homo Sapiens
uaucauauuucuggugcaguugauuauugaua

SEQ ID NO: 121110 - RNA, 32 nt, Homo Sapiens
cuaauuaugguccuuccacccuuuucaaccac

SEQ ID NO: 121111 - RNA, 32 nt, Homo Sapiens
uucucuagcgcggcgggggccuccugccggcu

SEQ ID NO: 121112 - RNA, 32 nt, Homo Sapiens
cccacuggagucagcaggcccagugcuucaua

SEQ ID NO: 121113 - RNA, 32 nt, Homo Sapiens
aauuuaauauuuucuuuuuaaauuauaucggg

SEQ ID NO: 121114 - RNA, 32 nt, Homo Sapiens
gggcggauggcagcggcuccgcggagcucgag

SEQ ID NO: 121115 - RNA, 32 nt, Homo Sapiens
ggagaaauaucuucagaggaagacugccgcca

SEQ ID NO: 121116 - RNA, 32 nt, Homo Sapiens
ccacuggccccggccaaauucuccucagagau

SEQ ID NO: 121117 - RNA, 32 nt, Homo Sapiens
aucaggaagggagagagcuggggaccauauuc

SEQ ID NO: 121118 - RNA, 32 nt, Homo Sapiens
agauauuuucuuuuuucacacugaaugcaucc

SEQ ID NO: 121119 - RNA, 32 nt, Homo Sapiens
cgcuauguuggccaggcuggucuugacuccug

SEQ ID NO: 121120 - RNA, 32 nt, Homo Sapiens
uggguacagccacagccaaaccauaucaguug

SEQ ID NO: 121121 - RNA, 31 nt, Homo Sapiens
acggcccaagaagucagaggaguccagauuu

SEQ ID NO: 121122 - RNA, 32 nt, Homo Sapiens
gcccaggacgcugggaggagcguucugcgcuc

SEQ ID NO: 121123 - RNA, 32 nt, Homo Sapiens
aacuacaaccagucuuccaucauuccauggaa

SEQ ID NO: 121124 - RNA, 32 nt, Homo Sapiens
gucuuguccaaauaaaagauucaccaguaaaa

SEQ ID NO: 121125 - RNA, 32 nt, Homo Sapiens
cgcuggaaggccaucaaugccuggggcagcug

SEQ ID NO: 121126 - RNA, 32 nt, Homo Sapiens
acauauaaauuaaaugagacgagacaugucga

SEQ ID NO: 121127 - RNA, 32 nt, Homo Sapiens
caccuccacacccacccccucuggagaaggcc

SEQ ID NO: 121128 - RNA, 32 nt, Homo Sapiens
acccugcuguugcaggaugcuauuugcaugug

SEQ ID NO: 121129 - RNA, 32 nt, Homo Sapiens
ugggggagagccagcuugggguaggaaguuaa

SEQ ID NO: 121130 - RNA, 32 nt, Homo Sapiens
auuuuaaagacauaaauauagagagacuuaug

SEQ ID NO: 121131 - RNA, 32 nt, Homo Sapiens
ggauuugcuuguuuuucuuccacuucagaagc

SEQ ID NO: 121132 - RNA, 32 nt, Homo Sapiens
gucuaccaagcugugacagaugaccugccggc

SEQ ID NO: 121133 - RNA, 32 nt, Homo Sapiens
cccucgucguccuggacaccacaggggcaccu

SEQ ID NO: 121134 - RNA, 32 nt, Homo Sapiens
guaccugccgugggcagaucugagcuuucuuc

SEQ ID NO: 121135 - RNA, 32 nt, Homo Sapiens
aggcguggcuguuuuucuucaaauaaagaaca

SEQ ID NO: 121136 - RNA, 32 nt, Homo Sapiens
gcggcuguggcagccuccaucuccagcaaguc

SEQ ID NO: 121137 - RNA, 32 nt, Homo Sapiens
caagauuuuauauuuuuguaaauuauacuuuc

SEQ ID NO: 121138 - RNA, 32 nt, Homo Sapiens
guggagugggcugcaaaacagcagcgcaagag

SEQ ID NO: 121139 - RNA, 32 nt, Homo Sapiens
ugugugaaggcacugcaccaaugaggaaggua

SEQ ID NO: 121140 - RNA, 32 nt, Homo Sapiens
aggcauauuugugguugacauacucuagauag

SEQ ID NO: 121141 - RNA, 32 nt, Homo Sapiens
cuccaugcccucuccuucuguguccccugagu

SEQ ID NO: 121142 - RNA, 32 nt, Homo Sapiens
ucuggggaugccuggguugggaguggagauac

SEQ ID NO: 121143 - RNA, 32 nt, Homo Sapiens
cugcgcacaacacagacagaaggcugggucca

SEQ ID NO: 121144 - RNA, 32 nt, Homo Sapiens
guguuagccaguuguaaugauguaucagaagu

SEQ ID NO: 121145 - RNA, 32 nt, Homo Sapiens
uaagagacagagauuaaaauggcuuccagagg

SEQ ID NO: 121146 - RNA, 30 nt, Homo Sapiens
uucagucuggacuauauugggacugggacu

SEQ ID NO: 121147 - RNA, 32 nt, Homo Sapiens
uugaaugcaaaauaauugacauauagaacuuu

SEQ ID NO: 121148 - RNA, 32 nt, Homo Sapiens
aaccuaucauguuaguuucucauuuuaauuuu

SEQ ID NO: 121149 - RNA, 32 nt, Homo Sapiens
ugggaccugccuggauccuccucccucccguc

SEQ ID NO: 121150 - RNA, 32 nt, Homo Sapiens
aucaccuggguguuucguuuuaucucaguugg

SEQ ID NO: 121151 - RNA, 32 nt, Homo Sapiens
aaauuugcacuggaaauucuguuuccugauaa

SEQ ID NO: 121152 - RNA, 32 nt, Homo Sapiens
uuugccaucccauguuguaaacagcuguucca

SEQ ID NO: 121153 - RNA, 32 nt, Homo Sapiens
ccaagucucuucccuuuccaagccgcuuccga

SEQ ID NO: 121154 - RNA, 32 nt, Homo Sapiens
cugcccacgccccauucgccagcccuccacgu

SEQ ID NO: 121155 - RNA, 32 nt, Homo Sapiens
gcuucuucaaccaaucccuucacacucucucc

SEQ ID NO: 121156 - RNA, 32 nt, Homo Sapiens
aggagugcugguucuucagucuuuguacuggc

SEQ ID NO: 121157 - RNA, 32 nt, Homo Sapiens
aaauggccauuaacuucuaaguguccuugugu

SEQ ID NO: 121158 - RNA, 32 nt, Homo Sapiens
gugagccagggcggagcgcagcugcgccgggc

SEQ ID NO: 121159 - RNA, 32 nt, Homo Sapiens
cccugccccggccccgcuuccaccuugcgcau

SEQ ID NO: 121160 - RNA, 32 nt, Homo Sapiens
gguagauguauuaaagcagcauagaaccauaa

SEQ ID NO: 121161 - RNA, 32 nt, Homo Sapiens
agaacgggugcccuugaggcccugcccccggg

SEQ ID NO: 121162 - RNA, 32 nt, Homo Sapiens
gggggaaauuauuugaaucagauucuauuuag

SEQ ID NO: 121163 - RNA, 32 nt, Homo Sapiens
cuggcguuuuaaaauaaccgguuaauuuauuu

SEQ ID NO: 121164 - RNA, 32 nt, Homo Sapiens
ucagcugggagaggccaccucccucagccaag

SEQ ID NO: 121165 - RNA, 32 nt, Homo Sapiens
ugcaggcuucuugguucagcagacagaggcca

SEQ ID NO: 121166 - RNA, 32 nt, Homo Sapiens
ugaauaaaacgaaugcauguuugugucacgaa

SEQ ID NO: 121167 - RNA, 32 nt, Homo Sapiens
cagauguucauuuaagucagaaccuuaaacau

SEQ ID NO: 121168 - RNA, 32 nt, Homo Sapiens
cuuuguaaucugagagaaaaaauguauaguaa

SEQ ID NO: 121169 - RNA, 32 nt, Homo Sapiens
gugauauucgucauuacucugucucuucaauc

SEQ ID NO: 121170 - RNA, 32 nt, Homo Sapiens
ugggggaccccaugcaggcugaugggccccgg

SEQ ID NO: 121171 - RNA, 32 nt, Homo Sapiens
gaaucagucacagccucugauuuuuuccaaga

SEQ ID NO: 121172 - RNA, 32 nt, Homo Sapiens
cuaugagugagggaugcagagccagggaaggc

SEQ ID NO: 121173 - RNA, 32 nt, Homo Sapiens
ugcaccaugcuucaugguuccugagcucuuuc

SEQ ID NO: 121174 - RNA, 32 nt, Homo Sapiens
aauucgagguuuaaauauaucuuaauagguaa

SEQ ID NO: 121175 - RNA, 32 nt, Homo Sapiens
ucgaggcagugguggcucggcuagagaagcag

SEQ ID NO: 121176 - RNA, 32 nt, Homo Sapiens
auuccuuuaaucgauagcauccuuaucugaaa

SEQ ID NO: 121177 - RNA, 32 nt, Homo Sapiens
ggccgggagagccgugcgggcuugaaggcgac

SEQ ID NO: 121178 - RNA, 32 nt, Homo Sapiens
caggcaaccugaguccaguggaaugcaggugc

SEQ ID NO: 121179 - RNA, 32 nt, Homo Sapiens
auaauuugaagaagauuuuuaguaguacugug

SEQ ID NO: 121180 - RNA, 32 nt, Homo Sapiens
ggguaaaacuaggacacagaaaacauugggaa

SEQ ID NO: 121181 - RNA, 32 nt, Homo Sapiens
caacggaccaaauaaacaauuccugaagacag

SEQ ID NO: 121182 - RNA, 32 nt, Homo Sapiens
uauacaugccuggcucuuucugauggugccuu

SEQ ID NO: 121183 - RNA, 32 nt, Homo Sapiens
ucccgggcugccagcccugacugucgggcccc

SEQ ID NO: 121184 - RNA, 32 nt, Homo Sapiens
uuaugaaaaaaguuuguguuaauauugcauua

SEQ ID NO: 121185 - RNA, 32 nt, Homo Sapiens
uauguuacaagucuuugaaaugggucuggugu

SEQ ID NO: 121186 - RNA, 32 nt, Homo Sapiens
gacgacagaaaguaacagugggaaaugggaca

SEQ ID NO: 121187 - RNA, 32 nt, Homo Sapiens
cgagcugggggcgcgggcgggcggcauguacc

SEQ ID NO: 121188 - RNA, 32 nt, Homo Sapiens
cgccguggagcaggggguggugcucgucgagg

SEQ ID NO: 121189 - RNA, 32 nt, Homo Sapiens
uuauucgacuacuucaacuuacuuucaacuac

SEQ ID NO: 121190 - RNA, 32 nt, Homo Sapiens
cacaguuaaggguaaaagggacugaggucaga

SEQ ID NO: 121191 - RNA, 32 nt, Homo Sapiens
cuguugauuaauuugacugcuucucguugcuc

SEQ ID NO: 121192 - RNA, 32 nt, Homo Sapiens
auucugcagaccagcuuuggcuaccuggaaca

SEQ ID NO: 121193 - RNA, 32 nt, Homo Sapiens
uauuaagauuaauauuugauauauuaaauauu

SEQ ID NO: 121194 - RNA, 32 nt, Homo Sapiens
uuggcuuguuuugacuuaauucuaaaauaggu

SEQ ID NO: 121195 - RNA, 32 nt, Homo Sapiens
aucagaacuuggauuuuaucaaacuugaugac

SEQ ID NO: 121196 - RNA, 32 nt, Homo Sapiens
aauguuaggucaacuggcaaauuggaauauag

SEQ ID NO: 121197 - RNA, 31 nt, Homo Sapiens
agugguuugggccccauucagaacucucaga

SEQ ID NO: 121198 - RNA, 32 nt, Homo Sapiens
acagcuuucggccgcggacccgggccgcgugu

SEQ ID NO: 121199 - RNA, 32 nt, Homo Sapiens
aaauggcuugucuccucccccaucagggccca

SEQ ID NO: 121200 - RNA, 32 nt, Homo Sapiens
auuuaaaaaauauuuucaaagugaagcugaga

SEQ ID NO: 121201 - RNA, 32 nt, Homo Sapiens
ugagcauuauauaaaagagauauuuugcauuu

SEQ ID NO: 121202 - RNA, 32 nt, Homo Sapiens
cggagcgcuucucggcacuucugaugugccuc

SEQ ID NO: 121203 - RNA, 32 nt, Homo Sapiens
ugauguuuuuaaagcucugacagucacauaua

SEQ ID NO: 121204 - RNA, 32 nt, Homo Sapiens
uccugggaggugucucuggggguggggugagg

SEQ ID NO: 121205 - RNA, 32 nt, Homo Sapiens
ucugagcgaugucuuccacacucccugcccug

SEQ ID NO: 121206 - RNA, 32 nt, Homo Sapiens
gcggguggcuggcuuugccauuagcgggggcc

SEQ ID NO: 121207 - RNA, 32 nt, Homo Sapiens
cagccgccuagacacagccaaccccggccccu

SEQ ID NO: 121208 - RNA, 32 nt, Homo Sapiens
aacguggcaacuaugauguggcauggacucca

SEQ ID NO: 121209 - RNA, 32 nt, Homo Sapiens
auuagaaccagaguucagacuccauugggcac

SEQ ID NO: 121210 - RNA, 32 nt, Homo Sapiens
augaauuugugaugucuuugcuguuuacaugc

SEQ ID NO: 121211 - RNA, 32 nt, Homo Sapiens
ggcgguagcggcggcgggaggcaggaugagcg

SEQ ID NO: 121212 - RNA, 32 nt, Homo Sapiens
uugaaagcacuuaacucuuguuuaguauccuc

SEQ ID NO: 121213 - RNA, 32 nt, Homo Sapiens
gccuccgcccuggccuuggagcuggugggcac

SEQ ID NO: 121214 - RNA, 32 nt, Homo Sapiens
auuauuguuguuauuaauguuauuuucagaau

SEQ ID NO: 121215 - RNA, 32 nt, Homo Sapiens
uucagucaaauuauauauuugauacaauacgc

SEQ ID NO: 121216 - RNA, 32 nt, Homo Sapiens
accauccucacagaauuccuggacccaugcgg

SEQ ID NO: 121217 - RNA, 32 nt, Homo Sapiens
aguaaaaccuuuucuuuuuuuccuucuuucuc

SEQ ID NO: 121218 - RNA, 32 nt, Homo Sapiens
aaaacaaguggaaaaaauggagugauguugua

SEQ ID NO: 121219 - RNA, 32 nt, Homo Sapiens
accccugcgccggcccgcgggcuucgcaggcc

SEQ ID NO: 121220 - RNA, 32 nt, Homo Sapiens
agagcacaaagauuaaaaguuacuuuaaauuu

SEQ ID NO: 121221 - RNA, 32 nt, Homo Sapiens
ggcugauauuaaaauauugauuuuaauugauc

SEQ ID NO: 121222 - RNA, 32 nt, Homo Sapiens
uaggcaccuuuuacugugauguuuguguaugu

SEQ ID NO: 121223 - RNA, 32 nt, Homo Sapiens
cugaggugcucuuacagccuguuccaagugug

SEQ ID NO: 121224 - RNA, 32 nt, Homo Sapiens
uacuacauucugguguuuggccuauaugagaa

SEQ ID NO: 121225 - RNA, 32 nt, Homo Sapiens
uuuccuaggucuuuccagggcagcaugugauu

SEQ ID NO: 121226 - RNA, 32 nt, Homo Sapiens
gacugggucuugcucuguuacccaggcuggag

SEQ ID NO: 121227 - RNA, 32 nt, Homo Sapiens
augagaaguccuccccuucuugccucccacac

SEQ ID NO: 121228 - RNA, 32 nt, Homo Sapiens
acuaccaucuuuuauucuuaauaauuauuaau

SEQ ID NO: 121229 - RNA, 31 nt, Homo Sapiens
ggaucugcaggaagccgaggagucccaggaa

SEQ ID NO: 121230 - RNA, 32 nt, Homo Sapiens
caccuaggaugccugccuggaaauguccuugc

SEQ ID NO: 121231 - RNA, 32 nt, Homo Sapiens
ggaugacucggccucuguucucucgucccacc

SEQ ID NO: 121232 - RNA, 32 nt, Homo Sapiens
ccuauaaauugucacuacuuuuccugaucugu

SEQ ID NO: 121233 - RNA, 30 nt, Homo Sapiens
aaugcccagucgucugcggguccugcccug

SEQ ID NO: 121234 - RNA, 32 nt, Homo Sapiens
aaguacaauuuaacuuuuuaaggcagauuuuu

SEQ ID NO: 121235 - RNA, 32 nt, Homo Sapiens
uucuaauaaauaaauugagugauucugguugc

SEQ ID NO: 121236 - RNA, 32 nt, Homo Sapiens
gggcagaucgcggcgcgcaccaggcgccgggg

SEQ ID NO: 121237 - RNA, 32 nt, Homo Sapiens
gugguuccaagcauuuuggauaaggcaaauuc

SEQ ID NO: 121238 - RNA, 28 nt, Homo Sapiens
aaucuauugcacagcaggaugacuauag

SEQ ID NO: 121239 - RNA, 32 nt, Homo Sapiens
ggaacuggaaaacaaagaauacccccauaaaa

SEQ ID NO: 121240 - RNA, 32 nt, Homo Sapiens
acccuccucccgcucccgcgcccuccccucgg

SEQ ID NO: 121241 - RNA, 32 nt, Homo Sapiens
cauuguguugcccagacaagucucaaauucuc

SEQ ID NO: 121242 - RNA, 32 nt, Homo Sapiens
gcaacuggcuccuggcagcugugcuuguccgc

SEQ ID NO: 121243 - RNA, 32 nt, Homo Sapiens
agacauguuucauucacuuaugaugaaccaac

SEQ ID NO: 121244 - RNA, 32 nt, Homo Sapiens
ugacagccacccuggaggagaagaggaaagag

SEQ ID NO: 121245 - RNA, 32 nt, Homo Sapiens
cucucuuggaagcucacagagcgcugggucac

SEQ ID NO: 121246 - RNA, 32 nt, Homo Sapiens
ggcaacucgugugucuucccaguguccuugga

SEQ ID NO: 121247 - RNA, 32 nt, Homo Sapiens
ccugagucaggagcccgggcacagaacugagc

SEQ ID NO: 121248 - RNA, 32 nt, Homo Sapiens
accccuuguauauaaaguguugcacauguauu

SEQ ID NO: 121249 - RNA, 32 nt, Homo Sapiens
uuugcaaggauguuugugaauguacuuuguaa

SEQ ID NO: 121250 - RNA, 32 nt, Homo Sapiens
cgggaccccccucuuccucuccuggguugggg

SEQ ID NO: 121251 - RNA, 32 nt, Homo Sapiens
accgcgcgcucgccccgccgcuccugcugcag

SEQ ID NO: 121252 - RNA, 32 nt, Homo Sapiens
agaacaccaucaaaucucugguaaacaacaga

SEQ ID NO: 121253 - RNA, 32 nt, Homo Sapiens
ucuucaaccugaucaaagauaagauuuacacc

SEQ ID NO: 121254 - RNA, 32 nt, Homo Sapiens
aacaguucugcacucuuguacaaaagaaaaaa

SEQ ID NO: 121255 - RNA, 32 nt, Homo Sapiens
cgauccgcaugucagaggcugccucgcagggg

SEQ ID NO: 121256 - RNA, 32 nt, Homo Sapiens
gucuuuugccucuuuuguuacccagguucgau

SEQ ID NO: 121257 - RNA, 32 nt, Homo Sapiens
aguuggccucgcccggaccauuaggcggacug

SEQ ID NO: 121258 - RNA, 32 nt, Homo Sapiens
gugugauguaauugaaaccacauggaaagacu

SEQ ID NO: 121259 - RNA, 32 nt, Homo Sapiens
gccuaggggugcagggucagugcugaggccug

SEQ ID NO: 121260 - RNA, 32 nt, Homo Sapiens
ggagcaucuauuuaugcaguguucaaaaguac

SEQ ID NO: 121261 - RNA, 31 nt, Homo Sapiens
ccucaagugaucugccugccuuggccuccca

SEQ ID NO: 121262 - RNA, 32 nt, Homo Sapiens
cacaaauuuaguccagcauuuuauugagugcu

SEQ ID NO: 121263 - RNA, 32 nt, Homo Sapiens
aauaacuuauaaaauuuuaaacaucaagugaa

SEQ ID NO: 121264 - RNA, 32 nt, Homo Sapiens
aacaccucguggcugcugcugcuccugcucuc

SEQ ID NO: 121265 - RNA, 32 nt, Homo Sapiens
auaacuuaguuguuacucuuuggaccacuccc

SEQ ID NO: 121266 - RNA, 32 nt, Homo Sapiens
aagccauccuuuaucccagaguguccuggagg

SEQ ID NO: 121267 - RNA, 32 nt, Homo Sapiens
gcgagugugcaccggcggccgggcuggcgccg

SEQ ID NO: 121268 - RNA, 32 nt, Homo Sapiens
uaaauaaacaaauaaauaaauaaauggcuaga

SEQ ID NO: 121269 - RNA, 32 nt, Homo Sapiens
uuggaggcauguacaagaaccugggcucuuca

SEQ ID NO: 121270 - RNA, 32 nt, Homo Sapiens
gcagaggucgagcgcaggccgaaagcuguuca

SEQ ID NO: 121271 - RNA, 32 nt, Homo Sapiens
guuugcuaaugauguguuuuuauauuauacau

SEQ ID NO: 121272 - RNA, 32 nt, Homo Sapiens
ugggggggcguuugggcugcggugcugcguca

SEQ ID NO: 121273 - RNA, 32 nt, Homo Sapiens
ugggaugacccccaagccuccaacauccuguc

SEQ ID NO: 121274 - RNA, 32 nt, Homo Sapiens
cgcccggcucugcgccuucuaugcccgccugu

SEQ ID NO: 121275 - RNA, 32 nt, Homo Sapiens
aaugaccacuucacauacaacuuauauuguaa

SEQ ID NO: 121276 - RNA, 32 nt, Homo Sapiens
gcccggccucgccugcccuccugggccaguca

SEQ ID NO: 121277 - RNA, 32 nt, Homo Sapiens
uaggaaaaagguuggugcaaaaauauuccugg

SEQ ID NO: 121278 - RNA, 32 nt, Homo Sapiens
caaaauccaauagaaguauugcagcuuccuuc

SEQ ID NO: 121279 - RNA, 32 nt, Homo Sapiens
cgagugaggcgaaauacccguauggugauagc

SEQ ID NO: 121280 - RNA, 32 nt, Homo Sapiens
uggagaauuuccccaucuuucucuucuuucca

SEQ ID NO: 121281 - RNA, 32 nt, Homo Sapiens
uuaaaaaaagaaacuguaaauuugacauaauu

SEQ ID NO: 121282 - RNA, 32 nt, Homo Sapiens
ggaaugggguuacaaugcagugaggcggaaag

SEQ ID NO: 121283 - RNA, 32 nt, Homo Sapiens
ggccuagcgcgccugcgugcguggccaccucg

SEQ ID NO: 121284 - RNA, 32 nt, Homo Sapiens
gacggccccucuaagucuguaacuccagagcu

SEQ ID NO: 121285 - RNA, 32 nt, Homo Sapiens
cuugugaugcuacuguuagcccuuaucuucug

SEQ ID NO: 121286 - RNA, 32 nt, Homo Sapiens
uagauccagauauacauuggguaaaaucuacu

SEQ ID NO: 121287 - RNA, 32 nt, Homo Sapiens
aguaagcaagaagagggccugggagaagaguc

SEQ ID NO: 121288 - RNA, 32 nt, Homo Sapiens
ugagcgcucagccuauggguuuaagcagaggg

SEQ ID NO: 121289 - RNA, 32 nt, Homo Sapiens
aaagcccagucuuuacaagugaaacggcuuuu

SEQ ID NO: 121290 - RNA, 32 nt, Homo Sapiens
gccucacgcgcgcccucucccgugccauggcc

SEQ ID NO: 121291 - RNA, 32 nt, Homo Sapiens
aagugaaaauaaauaauguacccugcagcccu

SEQ ID NO: 121292 - RNA, 32 nt, Homo Sapiens
uggguagggggaaaugaccuuuuuacaagaga

SEQ ID NO: 121293 - RNA, 32 nt, Homo Sapiens
cuguucuggcccagccccuucccauccccaag

SEQ ID NO: 121294 - RNA, 32 nt, Homo Sapiens
uacaggugcacaccaccacaccuggcuauuuu

SEQ ID NO: 121295 - RNA, 32 nt, Homo Sapiens
uuaaaaaauuggaaaagaaaccgacccauuuu

SEQ ID NO: 121296 - RNA, 32 nt, Homo Sapiens
cacugugggcuggggacgccugcccuucuguc

SEQ ID NO: 121297 - RNA, 32 nt, Homo Sapiens
aguuccaucauguuggccaggcuggucuugaa

SEQ ID NO: 121298 - RNA, 32 nt, Homo Sapiens
ccuuuucugauuuuuguaguuuggcaauugag

SEQ ID NO: 121299 - RNA, 32 nt, Homo Sapiens
agaucagccacggagccuggagggaugccacc

SEQ ID NO: 121300 - RNA, 32 nt, Homo Sapiens
cggccuggggguacagccgggcaccugggccc

SEQ ID NO: 121301 - RNA, 32 nt, Homo Sapiens
gccugggguucaguuuccuguggcuggugaug

SEQ ID NO: 121302 - RNA, 32 nt, Homo Sapiens
cagguucuccacagcagucuuccacuggccac

SEQ ID NO: 121303 - RNA, 32 nt, Homo Sapiens
cuagcugggcaugguggugaacgcuuguaguc

SEQ ID NO: 121304 - RNA, 32 nt, Homo Sapiens
ccugcccggagccccaguggcccugagcgccu

SEQ ID NO: 121305 - RNA, 32 nt, Homo Sapiens
cucgcagaggccgcuggucacuucgucaucau

SEQ ID NO: 121306 - RNA, 32 nt, Homo Sapiens
uacaugucccgggcaaggucucucggggggac

SEQ ID NO: 121307 - RNA, 32 nt, Homo Sapiens
agacggccucagagaugcugcaggcuggcgag

SEQ ID NO: 121308 - RNA, 32 nt, Homo Sapiens
aucccaucuccacagagcugcauacaagugug

SEQ ID NO: 121309 - RNA, 32 nt, Homo Sapiens
acaugcuuucaaccugucaacaaaaacaaaac

SEQ ID NO: 121310 - RNA, 31 nt, Homo Sapiens
gcggggagggcggcgguggcugcagcggcug

SEQ ID NO: 121311 - RNA, 32 nt, Homo Sapiens
uuugucauguacaaagagaauuuuaugcugcc

SEQ ID NO: 121312 - RNA, 32 nt, Homo Sapiens
cgccuguaguguccgcacuuugggaggccaau

SEQ ID NO: 121313 - RNA, 32 nt, Homo Sapiens
aaugcuuugguguuuacccgacagaggcuuua

SEQ ID NO: 121314 - RNA, 32 nt, Homo Sapiens
agggggcuggcagcugcggugagaguuuacug

SEQ ID NO: 121315 - RNA, 32 nt, Homo Sapiens
aagcugcagacacacacagucauucauuucug

SEQ ID NO: 121316 - RNA, 27 nt, Homo Sapiens
cgauuuucccacuucagccucccgaua

SEQ ID NO: 121317 - RNA, 32 nt, Homo Sapiens
cuauguauuuuuauuucagugagagaaggaaa

SEQ ID NO: 121318 - RNA, 32 nt, Homo Sapiens
cugcugacccucagucuccuccccugcccucu

SEQ ID NO: 121319 - RNA, 32 nt, Homo Sapiens
gcuucccucugccugcccguggaaggagcuuu

SEQ ID NO: 121320 - RNA, 32 nt, Homo Sapiens
agguggggacgccuggacccuggugagcgaac

SEQ ID NO: 121321 - RNA, 32 nt, Homo Sapiens
accccgaaguggccguccccgccgggcucgaa

SEQ ID NO: 121322 - RNA, 32 nt, Homo Sapiens
gauuguuagagguaguuuucuugaauuaauau

SEQ ID NO: 121323 - RNA, 32 nt, Homo Sapiens
ccuucuugaagaaggaccaugugaauuuccug

SEQ ID NO: 121324 - RNA, 32 nt, Homo Sapiens
agcccgccucauugcgcucaucuaguacaaua

SEQ ID NO: 121325 - RNA, 32 nt, Homo Sapiens
acauugcauuguaguguauggccuguuucuug

SEQ ID NO: 121326 - RNA, 32 nt, Homo Sapiens
cuccugcucuguccucauccccggcuuagcug

SEQ ID NO: 121327 - RNA, 32 nt, Homo Sapiens
cagaggaaggagaggagaggggcacagggucu

SEQ ID NO: 121328 - RNA, 32 nt, Homo Sapiens
cucaccccaucccacgacccccgcaacccuuc

SEQ ID NO: 121329 - RNA, 32 nt, Homo Sapiens
guuauuuuucccuuccagaggggucuauaugu

SEQ ID NO: 121330 - RNA, 32 nt, Homo Sapiens
uggugcgguaaccugcguggcuccugauagcg

SEQ ID NO: 121331 - RNA, 32 nt, Homo Sapiens
acuuguuauaaaaucauaauuuaggauaaaug

SEQ ID NO: 121332 - RNA, 32 nt, Homo Sapiens
ccuuuaucaaaguuggggacugggagaggcaa

SEQ ID NO: 121333 - RNA, 32 nt, Homo Sapiens
ugcagacauuugauuucuuuaugaguucccug

SEQ ID NO: 121334 - RNA, 32 nt, Homo Sapiens
cauacgcucuagggauugaaaagcagaaaugc

SEQ ID NO: 121335 - RNA, 32 nt, Homo Sapiens
auguauaaccaccuagcucuuuucaccugacu

SEQ ID NO: 121336 - RNA, 32 nt, Homo Sapiens
uucccuuuuuauuuuaugucaugauuucaaag

SEQ ID NO: 121337 - RNA, 32 nt, Homo Sapiens
aucaugcucagcccuuggugggacauucuaca

SEQ ID NO: 121338 - RNA, 32 nt, Homo Sapiens
ccagaaggcagagggaacuccagggcagggau

SEQ ID NO: 121339 - RNA, 32 nt, Homo Sapiens
aaacuuuuagacaaaauuuguuagggucauuc

SEQ ID NO: 121340 - RNA, 32 nt, Homo Sapiens
guagauuuuuauuuucuacuuuugauuauuga

SEQ ID NO: 121341 - RNA, 32 nt, Homo Sapiens
ugacacccagagcccccuccccagcccucagg

SEQ ID NO: 121342 - RNA, 32 nt, Homo Sapiens
uccgucagaaguaugauguaaaacuggaaucc

SEQ ID NO: 121343 - RNA, 32 nt, Homo Sapiens
gagaaggcgcauccucugggggucguggaccu

SEQ ID NO: 121344 - RNA, 27 nt, Homo Sapiens
cucagugccccgugcacccgcggccgc

SEQ ID NO: 121345 - RNA, 32 nt, Homo Sapiens
gugcuccaggcagacaaggcugacaagcaauc

SEQ ID NO: 121346 - RNA, 32 nt, Homo Sapiens
uuugggaaggauuuuguauauuuuucccccug

SEQ ID NO: 121347 - RNA, 32 nt, Homo Sapiens
uggaacgcggcucggcgggcgggcagugccgg

SEQ ID NO: 121348 - RNA, 32 nt, Homo Sapiens
auucuagggugcaagcacuuaggaugcuuuuu

SEQ ID NO: 121349 - RNA, 32 nt, Homo Sapiens
ucccugucuggccccugcuccccgcccccuca

SEQ ID NO: 121350 - RNA, 32 nt, Homo Sapiens
cuggauggguucuagcagcauuacugucauug

SEQ ID NO: 121351 - RNA, 32 nt, Homo Sapiens
acagauucuuguagugauauuccucuugaaga

SEQ ID NO: 121352 - RNA, 32 nt, Homo Sapiens
ugguuuuuagaaguuauuuagagcagucuugu

SEQ ID NO: 121353 - RNA, 32 nt, Homo Sapiens
ccuugucagaggcuuccacccugcucacaugu

SEQ ID NO: 121354 - RNA, 32 nt, Homo Sapiens
gacuugucaugcucaugguuacauucaggaua

SEQ ID NO: 121355 - RNA, 32 nt, Homo Sapiens
cguacuuggggaugaggagcaaggaauauuac

SEQ ID NO: 121356 - RNA, 32 nt, Homo Sapiens
gccccccuucccgccguggccaggcgcucugu

SEQ ID NO: 121357 - RNA, 28 nt, Homo Sapiens
guguucgggcggccgccaggcuucccgg

SEQ ID NO: 121358 - RNA, 32 nt, Homo Sapiens
uauugugcagagagaguauccuugacugcuua

SEQ ID NO: 121359 - RNA, 32 nt, Homo Sapiens
ccacuuccacccaagacaacagcauaggaaac

SEQ ID NO: 121360 - RNA, 32 nt, Homo Sapiens
auggugaugggauuguccgaaaaggauuucag

SEQ ID NO: 121361 - RNA, 32 nt, Homo Sapiens
aucuguccaaauacgugugaaguaaguuucuu

SEQ ID NO: 121362 - RNA, 32 nt, Homo Sapiens
aacuggucauauaugacagucuacugcauaua

SEQ ID NO: 121363 - RNA, 32 nt, Homo Sapiens
gaaacuccgcaccucccagcucauauuugugu

SEQ ID NO: 121364 - RNA, 31 nt, Homo Sapiens
ccucaagugaucugccugccucggccuccca

SEQ ID NO: 121365 - RNA, 32 nt, Homo Sapiens
gugcgcacucugcggcggccucugcgccucgg

SEQ ID NO: 121366 - RNA, 32 nt, Homo Sapiens
uggugcaugaauauaaacgaaaaaugaaugcu

SEQ ID NO: 121367 - RNA, 32 nt, Homo Sapiens
ggagccaaccgggucuguacuguugugaugga

SEQ ID NO: 121368 - RNA, 32 nt, Homo Sapiens
acgucuauuucaucagaacagcuguugacucu

SEQ ID NO: 121369 - RNA, 32 nt, Homo Sapiens
acuagaagaugaagaagagaugugguuuaaca

SEQ ID NO: 121370 - RNA, 32 nt, Homo Sapiens
aaccuacaagauagugauucuuggaaguuggu

SEQ ID NO: 121371 - RNA, 32 nt, Homo Sapiens
guccuggaacugagccggggcccucacuggcc

SEQ ID NO: 121372 - RNA, 32 nt, Homo Sapiens
augaaugacaaagcagguuaccuaguauaguu

SEQ ID NO: 121373 - RNA, 32 nt, Homo Sapiens
accauaacugaauuauuuuaucucuuauguua

SEQ ID NO: 121374 - RNA, 32 nt, Homo Sapiens
ugccuagcggacugugugguugaugcagccgu

SEQ ID NO: 121375 - RNA, 32 nt, Homo Sapiens
uaacugagggucagcuggcagcgggaugaggc

SEQ ID NO: 121376 - RNA, 30 nt, Homo Sapiens
aauugugucugugguccagaagaaauuauu

SEQ ID NO: 121377 - RNA, 32 nt, Homo Sapiens
cagaagcgcgcccuugggcuucaggcuccuga

SEQ ID NO: 121378 - RNA, 32 nt, Homo Sapiens
caccuguaauuccagcacuuugggaggcugac

SEQ ID NO: 121379 - RNA, 32 nt, Homo Sapiens
guucccaugauuucucauuucauuuauuaaua

SEQ ID NO: 121380 - RNA, 32 nt, Homo Sapiens
ucaagaccagccuggccaacguggugaaaccc

SEQ ID NO: 121381 - RNA, 32 nt, Homo Sapiens
uuucccccaucccauccccacccuggacucau

SEQ ID NO: 121382 - RNA, 32 nt, Homo Sapiens
ugccaugguuggaagaugguaucagagggccu

SEQ ID NO: 121383 - RNA, 32 nt, Homo Sapiens
guuguccgagggugugccccugcgguuccugu

SEQ ID NO: 121384 - RNA, 32 nt, Homo Sapiens
aaggugccauggcagagaaggugcugguaaca

SEQ ID NO: 121385 - RNA, 32 nt, Homo Sapiens
cuuugauauuccacuuagcuguagaguccauc

SEQ ID NO: 121386 - RNA, 32 nt, Homo Sapiens
aaaugacagauugcuuuuaauucuccuugguu

SEQ ID NO: 121387 - RNA, 32 nt, Homo Sapiens
ccuggggggugcacggggcgccgggccuccag

SEQ ID NO: 121388 - RNA, 32 nt, Homo Sapiens
agucacagcccucuccgucugcucuagccagg

SEQ ID NO: 121389 - RNA, 32 nt, Homo Sapiens
cacagcccaucccugcacugcuccugaggcca

SEQ ID NO: 121390 - RNA, 32 nt, Homo Sapiens
gcuaggagcugccugcacccuggcagaggugg

SEQ ID NO: 121391 - RNA, 32 nt, Homo Sapiens
cauuccuuuuauucucuauucuauccuggguc

SEQ ID NO: 121392 - RNA, 30 nt, Homo Sapiens
guucaggucacugcugcaggcggucucgga

SEQ ID NO: 121393 - RNA, 32 nt, Homo Sapiens
uuaggggggugguggcaucuggacaaaugcca

SEQ ID NO: 121394 - RNA, 32 nt, Homo Sapiens
aagcaaauccgguuccuauuaagaagucacuu

SEQ ID NO: 121395 - RNA, 32 nt, Homo Sapiens
aaccccagccccagccucagcccugcccccuu

SEQ ID NO: 121396 - RNA, 32 nt, Homo Sapiens
gccaugagacuuucccaagaauuguggcugag

SEQ ID NO: 121397 - RNA, 32 nt, Homo Sapiens
ugauaauguaucuauuugucauuuguguuaua

SEQ ID NO: 121398 - RNA, 32 nt, Homo Sapiens
gaaauaaaucaucaccaauaccuuugaggucc

SEQ ID NO: 121399 - RNA, 31 nt, Homo Sapiens
uuggggagggcgguggccauggccagucacg

SEQ ID NO: 121400 - RNA, 32 nt, Homo Sapiens
augcuuaaggaaacccggagauaauauuccca

SEQ ID NO: 121401 - RNA, 32 nt, Homo Sapiens
cccucauaagcacuuugguuuuaccgccugca

SEQ ID NO: 121402 - RNA, 32 nt, Homo Sapiens
gugagucgccuggaggcagcgcggcggcugcc

SEQ ID NO: 121403 - RNA, 32 nt, Homo Sapiens
uuccccuccccgggccacccagcccgcccaac

SEQ ID NO: 121404 - RNA, 32 nt, Homo Sapiens
acaugccugugcuguuguuugggaaacaggga

SEQ ID NO: 121405 - RNA, 32 nt, Homo Sapiens
agggguggaaucggagugugucugcccgcccu

SEQ ID NO: 121406 - RNA, 30 nt, Homo Sapiens
uacgaugagaagcuccagagccugcacgag

SEQ ID NO: 121407 - RNA, 32 nt, Homo Sapiens
gagaaccgccgggaccgcacgugggcgccgcg

SEQ ID NO: 121408 - RNA, 32 nt, Homo Sapiens
uccaauucaccaaaagauuaaaugaaaccacc

SEQ ID NO: 121409 - RNA, 32 nt, Homo Sapiens
uuuuuuuggaaauuauuuuccugagccuuuug

SEQ ID NO: 121410 - RNA, 32 nt, Homo Sapiens
caaggcggcuucuggcucuuccgcaggcucag

SEQ ID NO: 121411 - RNA, 32 nt, Homo Sapiens
guguacguucuauuuccugugggagagugcug

SEQ ID NO: 121412 - RNA, 32 nt, Homo Sapiens
ggcacaccugaguacgugcacuuccugguggg

SEQ ID NO: 121413 - RNA, 32 nt, Homo Sapiens
gcggcuggggagaagcgcucucgucgccugcc

SEQ ID NO: 121414 - RNA, 32 nt, Homo Sapiens
cccagucuuuaacucuaugcucugcuaucucu

SEQ ID NO: 121415 - RNA, 32 nt, Homo Sapiens
agggcagcagccagcccugccuggaggaccug

SEQ ID NO: 121416 - RNA, 32 nt, Homo Sapiens
uuacauuuaaguucuuuuuauuuuaugcucua

SEQ ID NO: 121417 - RNA, 32 nt, Homo Sapiens
caaauuaauaaauuaucuuuuacauaaaaaca

SEQ ID NO: 121418 - RNA, 32 nt, Homo Sapiens
ggcgcgggucucccuccucccggaguuuggaa

SEQ ID NO: 121419 - RNA, 32 nt, Homo Sapiens
gugcauagcguccugcccugcccucgggggcc

SEQ ID NO: 121420 - RNA, 32 nt, Homo Sapiens
ucugcagugaggaccagacaccacugauugca

SEQ ID NO: 121421 - RNA, 32 nt, Homo Sapiens
aguggccccuuuucuuuuuguuuguccccuca

SEQ ID NO: 121422 - RNA, 32 nt, Homo Sapiens
gcuaaaucuuuauauacagaaauaucaguacu

SEQ ID NO: 121423 - RNA, 32 nt, Homo Sapiens
gagagcagacgcgccagacgcgccacccucgg

SEQ ID NO: 121424 - RNA, 32 nt, Homo Sapiens
gcgcccagcuggaaugcagagaucgccgcccg

SEQ ID NO: 121425 - RNA, 32 nt, Homo Sapiens
gcuugcugguccuuagacuuggagcaccugau

SEQ ID NO: 121426 - RNA, 32 nt, Homo Sapiens
uacugguuuuuccaauaaguaauagcaaagcc

SEQ ID NO: 121427 - RNA, 32 nt, Homo Sapiens
auggacacuguugagcaauguacaguguaugg

SEQ ID NO: 121428 - RNA, 32 nt, Homo Sapiens
caucagcacuagcaccucacuccaucagcacu

SEQ ID NO: 121429 - RNA, 32 nt, Homo Sapiens
acagaagcuauuauuaacuacugcaagcuaag

SEQ ID NO: 121430 - RNA, 32 nt, Homo Sapiens
gauucacccgcacaccguccgcgcacgccuga

SEQ ID NO: 121431 - RNA, 32 nt, Homo Sapiens
auaggaguuuaacgugucuacguaaccuagaa

SEQ ID NO: 121432 - RNA, 32 nt, Homo Sapiens
gauaagagauaaaacuugaaguacuuuuuuca

SEQ ID NO: 121433 - RNA, 32 nt, Homo Sapiens
aaagaaauaacugaacauauuuuuuaggcaag

SEQ ID NO: 121434 - RNA, 32 nt, Homo Sapiens
uuuuaagacguucggggcagggugggaguggg

SEQ ID NO: 121435 - RNA, 32 nt, Homo Sapiens
agcgugcuuuggacaaacuggauggcacagaa

SEQ ID NO: 121436 - RNA, 32 nt, Homo Sapiens
uuuguaaugaugcuacauaauuuuguggcucc

SEQ ID NO: 121437 - RNA, 32 nt, Homo Sapiens
uuccaguuucucucccuccccccgcauuuugc

SEQ ID NO: 121438 - RNA, 32 nt, Homo Sapiens
agacagcccucugccuuggagcuccagagaga

SEQ ID NO: 121439 - RNA, 32 nt, Homo Sapiens
cuguaacuuacuuccaaaaacaaaaucauacu

SEQ ID NO: 121440 - RNA, 27 nt, Homo Sapiens
cagcauguggucuucagccuccugucu

SEQ ID NO: 121441 - RNA, 32 nt, Homo Sapiens
uuccuggccucagccagcugcccacaagccau

SEQ ID NO: 121442 - RNA, 32 nt, Homo Sapiens
uauuuauacuaaaacuauauaauccuuagauu

SEQ ID NO: 121443 - RNA, 32 nt, Homo Sapiens
auucugcccuucccucuuucucaccaccgccu

SEQ ID NO: 121444 - RNA, 32 nt, Homo Sapiens
agaagugguuuaggaaaaucucagguugauuc

SEQ ID NO: 121445 - RNA, 32 nt, Homo Sapiens
aguugaauaaauagcaucaccauucuuugcug

SEQ ID NO: 121446 - RNA, 32 nt, Homo Sapiens
uugccugagguccgauggcccgagagcuggga

SEQ ID NO: 121447 - RNA, 32 nt, Homo Sapiens
cugcagguugguggcgggaggaggggacagcu

SEQ ID NO: 121448 - RNA, 32 nt, Homo Sapiens
cgcccguggccgccgcgccagcuccuccuccu

SEQ ID NO: 121449 - RNA, 32 nt, Homo Sapiens
gagaagaugcaagagcacuuuggcccaauucu

SEQ ID NO: 121450 - RNA, 32 nt, Homo Sapiens
ucgggggccugccuggccggggucgcagucgg

SEQ ID NO: 121451 - RNA, 32 nt, Homo Sapiens
uggcaaaggcuuuaacuaguccucaguucuua

SEQ ID NO: 121452 - RNA, 32 nt, Homo Sapiens
cgguugucuguggcuccgcgacugggcgcccc

SEQ ID NO: 121453 - RNA, 32 nt, Homo Sapiens
cugggaguguuagugaugucauaauucacuga

SEQ ID NO: 121454 - RNA, 32 nt, Homo Sapiens
caagcaggccuggccucccggggccuggaucc

SEQ ID NO: 121455 - RNA, 32 nt, Homo Sapiens
gucuaccugccagcauucugauauagcacaaa

SEQ ID NO: 121456 - RNA, 32 nt, Homo Sapiens
agcagugaccacugaggauucagacacuguau

SEQ ID NO: 121457 - RNA, 32 nt, Homo Sapiens
ugcauguguuuccacuuccguuucuaguacua

SEQ ID NO: 121458 - RNA, 32 nt, Homo Sapiens
acacggaguuuccauuuggauuuuaaacaaaa

SEQ ID NO: 121459 - RNA, 32 nt, Homo Sapiens
ccggaucgugggcgagcuggugcgggcuggcc

SEQ ID NO: 121460 - RNA, 32 nt, Homo Sapiens
acaaguccuuaaagauguaggaucucucagcu

SEQ ID NO: 121461 - RNA, 32 nt, Homo Sapiens
guguagcaucuugcuguaaauccuguacaaug

SEQ ID NO: 121462 - RNA, 32 nt, Homo Sapiens
aaaguagucuuuucuuuuuuugugugcaauaa

SEQ ID NO: 121463 - RNA, 32 nt, Homo Sapiens
agauaagcuggaugaaguagugugcauuugua

SEQ ID NO: 121464 - RNA, 32 nt, Homo Sapiens
uuuuagaauaccauuaagaauagaggggaggg

SEQ ID NO: 121465 - RNA, 32 nt, Homo Sapiens
ccccuggccgguuguccgucauuuucacggcg

SEQ ID NO: 121466 - RNA, 30 nt, Homo Sapiens
gggccgaacagcccugccugcucugagggc

SEQ ID NO: 121467 - RNA, 32 nt, Homo Sapiens
aaaacacaauaccaggcauacauuuggcagaa

SEQ ID NO: 121468 - RNA, 32 nt, Homo Sapiens
ccugcgggcgaccccgggcuccggacaggcgg

SEQ ID NO: 121469 - RNA, 32 nt, Homo Sapiens
uggagaggcagagcuuucauacugaauuagau

SEQ ID NO: 121470 - RNA, 32 nt, Homo Sapiens
ucuucuucagccuguuuccccagccacaggcc

SEQ ID NO: 121471 - RNA, 32 nt, Homo Sapiens
ccacucaggccagugcaccccugggcagagcc

SEQ ID NO: 121472 - RNA, 32 nt, Homo Sapiens
uuuuuuguguuuuauauuugcuuauuuaaggu

SEQ ID NO: 121473 - RNA, 32 nt, Homo Sapiens
aucacuaaaaauuuguuccuuuuucacuaugg

SEQ ID NO: 121474 - RNA, 32 nt, Homo Sapiens
ucuagcuguuagauagaacugauaaaagcaag

SEQ ID NO: 121475 - RNA, 32 nt, Homo Sapiens
guacuccaccccacccaucuaaguuugacacg

SEQ ID NO: 121476 - RNA, 32 nt, Homo Sapiens
cuggaaccaaaauaugcaguugaaaaaauagu

SEQ ID NO: 121477 - RNA, 32 nt, Homo Sapiens
gccuggcugggccagcuucccucaugggcuug

SEQ ID NO: 121478 - RNA, 32 nt, Homo Sapiens
agaagcuauuuaaugauuaaagucauuugcag

SEQ ID NO: 121479 - RNA, 32 nt, Homo Sapiens
agacuggcagugacaaagauuauuugagugac

SEQ ID NO: 121480 - RNA, 32 nt, Homo Sapiens
aacuguacgcuauucugaaccuugcuuuuuuc

SEQ ID NO: 121481 - RNA, 32 nt, Homo Sapiens
gaggggaggaggaggagcaggccgagcgcauu

SEQ ID NO: 121482 - RNA, 32 nt, Homo Sapiens
gcaagaagguccucuggggugcccugagaucu

SEQ ID NO: 121483 - RNA, 32 nt, Homo Sapiens
cagcggcugcugucaggggccgcgaggcuuuc

SEQ ID NO: 121484 - RNA, 32 nt, Homo Sapiens
agcuggugcaggugguuggcccagccgaugag

SEQ ID NO: 121485 - RNA, 32 nt, Homo Sapiens
ucucaggaaacacuugucggcugacuggugcc

SEQ ID NO: 121486 - RNA, 32 nt, Homo Sapiens
augaagcaaggaucuagucaguguuacagggu

SEQ ID NO: 121487 - RNA, 32 nt, Homo Sapiens
ucuauuaaauguuaaagaaaauguuaugaaaa

SEQ ID NO: 121488 - RNA, 30 nt, Homo Sapiens
gaacaggcuguccuuggcggcaguaggagc

SEQ ID NO: 121489 - RNA, 32 nt, Homo Sapiens
guggaggccggcgcuccgcuccgcuccagcuc

SEQ ID NO: 121490 - RNA, 32 nt, Homo Sapiens
guggcggggcccagcucuugggcuuccucuug

SEQ ID NO: 121491 - RNA, 32 nt, Homo Sapiens
ugccucuagagcacugucucacuacuucuaga

SEQ ID NO: 121492 - RNA, 32 nt, Homo Sapiens
cuaaauaaaaauugaaaguaacuccuaacauu

SEQ ID NO: 121493 - RNA, 32 nt, Homo Sapiens
caguaaaaacaucugaauguagaccaugaucu

SEQ ID NO: 121494 - RNA, 32 nt, Homo Sapiens
ugcgccccagacccugcaggggccccccugcu

SEQ ID NO: 121495 - RNA, 32 nt, Homo Sapiens
cguaaccgucccgcgccucucugaggcggagg

SEQ ID NO: 121496 - RNA, 32 nt, Homo Sapiens
guggcggcgagcgggcgggccuccccacacgc

SEQ ID NO: 121497 - RNA, 32 nt, Homo Sapiens
ucguuggccagcguaaacgccaggcgcugcag

SEQ ID NO: 121498 - RNA, 32 nt, Homo Sapiens
ucacuuagaagcugcacauuauggagcauuaa

SEQ ID NO: 121499 - RNA, 32 nt, Homo Sapiens
uuuggauuuccuucaguucuccagguccaccu

SEQ ID NO: 121500 - RNA, 32 nt, Homo Sapiens
acauacccugggcauguccagaugaacgaagc

SEQ ID NO: 121501 - RNA, 32 nt, Homo Sapiens
ucaaauccaaaauuauuuucaaaucaagaugu

SEQ ID NO: 121502 - RNA, 32 nt, Homo Sapiens
ugauuuuuaugaugaugaaaauuuuaccagca

SEQ ID NO: 121503 - RNA, 32 nt, Homo Sapiens
guucuggagcucuugugucauuguuagaaauc

SEQ ID NO: 121504 - RNA, 32 nt, Homo Sapiens
ucuggacccagcugguuuauaacuucagaaga

SEQ ID NO: 121505 - RNA, 32 nt, Homo Sapiens
aaagucuauguuuucaguuaugacucagguua

SEQ ID NO: 121506 - RNA, 32 nt, Homo Sapiens
cuaaucauuuuucuugagaaugucauguagag

SEQ ID NO: 121507 - RNA, 31 nt, Homo Sapiens
gccgccaugucugcgcaucugcaauggaugg

SEQ ID NO: 121508 - RNA, 32 nt, Homo Sapiens
ccccaaggugaccuggccaaguagcaauaauu

SEQ ID NO: 121509 - RNA, 32 nt, Homo Sapiens
uuuaggguugcggggagggaacugcaagugcc

SEQ ID NO: 121510 - RNA, 32 nt, Homo Sapiens
auccuucaugcaauggauggcuuuguugacca

SEQ ID NO: 121511 - RNA, 32 nt, Homo Sapiens
caguauauucuauugcacgucuacaauuccca

SEQ ID NO: 121512 - RNA, 32 nt, Homo Sapiens
aaaacaaaacaaaugacaguaacccuuccccg

SEQ ID NO: 121513 - RNA, 32 nt, Homo Sapiens
cuauugaugauuagaauuucauuaguuuuguc

SEQ ID NO: 121514 - RNA, 32 nt, Homo Sapiens
uggcacuuuccaccuuuacaacuacgccucca

SEQ ID NO: 121515 - RNA, 32 nt, Homo Sapiens
uuuuuuaauuuuauuuuuuguuuaccucccuc

SEQ ID NO: 121516 - RNA, 32 nt, Homo Sapiens
cauauuuguauauuuuuugucauccugagaua

SEQ ID NO: 121517 - RNA, 30 nt, Homo Sapiens
cgcccaugacggucagcugccaggcgcaca

SEQ ID NO: 121518 - RNA, 32 nt, Homo Sapiens
acagcugcagagaugaauaaacaaagaggaac

SEQ ID NO: 121519 - RNA, 32 nt, Homo Sapiens
ggacagcaccucggggggacuucugggcaacc

SEQ ID NO: 121520 - RNA, 32 nt, Homo Sapiens
caggcugccucggacuccauggcuaagaccac

SEQ ID NO: 121521 - RNA, 32 nt, Homo Sapiens
gcggcaggggccaagccuccucaacuaugacc

SEQ ID NO: 121522 - RNA, 32 nt, Homo Sapiens
cccuucccccaggguugcccagauggggccuc

SEQ ID NO: 121523 - RNA, 32 nt, Homo Sapiens
cuuuucuugugcuguuuaugcguguagagcac

SEQ ID NO: 121524 - RNA, 32 nt, Homo Sapiens
aguaccugccccagccugcccuggcugcagca

SEQ ID NO: 121525 - RNA, 32 nt, Homo Sapiens
agccuggccaacauggggaaaccccgucucua

SEQ ID NO: 121526 - RNA, 32 nt, Homo Sapiens
ucuguggcccaucaccaauccaaaauggggug

SEQ ID NO: 121527 - RNA, 32 nt, Homo Sapiens
ucacuaaugaacaaaggagauuuuaaaguuua

SEQ ID NO: 121528 - RNA, 32 nt, Homo Sapiens
auuccucauuggcaacauggcaaacagaucac

SEQ ID NO: 121529 - RNA, 32 nt, Homo Sapiens
aggccuccacaagcaccaacauaugugagcuc

SEQ ID NO: 121530 - RNA, 30 nt, Homo Sapiens
gcuuggguuucaccugcagaaucgcuugug

SEQ ID NO: 121531 - RNA, 32 nt, Homo Sapiens
ugaaaugugaaucccggcggacacgccaaauu

SEQ ID NO: 121532 - RNA, 32 nt, Homo Sapiens
ugacgggcccgcgcgcacgauggccggcgccg

SEQ ID NO: 121533 - RNA, 32 nt, Homo Sapiens
gaaagacauuuuucuuuggggcaaauuucgug

SEQ ID NO: 121534 - RNA, 32 nt, Homo Sapiens
uuucccugugguucuccguccuucccuggcga

SEQ ID NO: 121535 - RNA, 32 nt, Homo Sapiens
gccuggcaaggcuggcucucugcagggcuggu

SEQ ID NO: 121536 - RNA, 32 nt, Homo Sapiens
ucauuuuguguugaagagcagcuccuuccuag

SEQ ID NO: 121537 - RNA, 32 nt, Homo Sapiens
aucaguguuguaaauuugcuaaacugauucac

SEQ ID NO: 121538 - RNA, 32 nt, Homo Sapiens
acuaucaaacuccugagccaauaacuuaauau

SEQ ID NO: 121539 - RNA, 32 nt, Homo Sapiens
gagucuuauuuuuauuuauagaaauguggaaa

SEQ ID NO: 121540 - RNA, 32 nt, Homo Sapiens
cucccuggcuccuggagcugauugccaaagag

SEQ ID NO: 121541 - RNA, 32 nt, Homo Sapiens
cagcgggguaaguuaagccaggaccuucgcug

SEQ ID NO: 121542 - RNA, 30 nt, Homo Sapiens
agcugccaacuggaugcagaaguucacugg

SEQ ID NO: 121543 - RNA, 32 nt, Homo Sapiens
ggggccgcgggcgggaggcggauaaaaaggcc

SEQ ID NO: 121544 - RNA, 32 nt, Homo Sapiens
auucuuaucucaucuuauuuuaucuuauccuc

SEQ ID NO: 121545 - RNA, 32 nt, Homo Sapiens
auaguuaauauuugaaauaagucuucaaaaga

SEQ ID NO: 121546 - RNA, 32 nt, Homo Sapiens
aguugguggauaugugugauagcugauuucaa

SEQ ID NO: 121547 - RNA, 29 nt, Homo Sapiens
aggauucggacacagaggacgacucugaa

SEQ ID NO: 121548 - RNA, 32 nt, Homo Sapiens
acuuguaaaugaaacaaugcaaucagucuuuu

SEQ ID NO: 121549 - RNA, 32 nt, Homo Sapiens
cuggcacuuugaguuaagucuaucugguauua

SEQ ID NO: 121550 - RNA, 32 nt, Homo Sapiens
ggacucaggacagggauucuccauggcuaggc

SEQ ID NO: 121551 - RNA, 32 nt, Homo Sapiens
cucagaaugcauuaaagcgugcucuuacagag

SEQ ID NO: 121552 - RNA, 32 nt, Homo Sapiens
ggccccggccccagcguucucgcaguggaaua

SEQ ID NO: 121553 - RNA, 32 nt, Homo Sapiens
ccuuuaagaauuuuaaauauuuuggcauugua

SEQ ID NO: 121554 - RNA, 32 nt, Homo Sapiens
gaagaagcagguagaccaccugucccaggcug

SEQ ID NO: 121555 - RNA, 32 nt, Homo Sapiens
acaguuuuaaguguucacuuauacaaagagug

SEQ ID NO: 121556 - RNA, 32 nt, Homo Sapiens
ucccacgugaccgcgccgccccccagcuccac

SEQ ID NO: 121557 - RNA, 32 nt, Homo Sapiens
uccuuuuaacuuucuuuuuguuauuugcuuuu

SEQ ID NO: 121558 - RNA, 32 nt, Homo Sapiens
aaucauaucgucuaaguauaugaugaaucuuu

SEQ ID NO: 121559 - RNA, 32 nt, Homo Sapiens
gcagugcccucccgugggccgcacccuugcca

SEQ ID NO: 121560 - RNA, 32 nt, Homo Sapiens
uagaaaauguagacaugguuaacugggaaaua

SEQ ID NO: 121561 - RNA, 32 nt, Homo Sapiens
ucauuguguuuguuaagaagaugcugcuuuua

SEQ ID NO: 121562 - RNA, 32 nt, Homo Sapiens
gaaaugggggagagggcaggccuagacaccag

SEQ ID NO: 121563 - RNA, 32 nt, Homo Sapiens
gccauuaaugcugugcucacuaucuuguccag

SEQ ID NO: 121564 - RNA, 32 nt, Homo Sapiens
uuucaauuauauuuuucucaguuauacuagaa

SEQ ID NO: 121565 - RNA, 32 nt, Homo Sapiens
cuuugcugaaaggagcuuucuacacagcugga

SEQ ID NO: 121566 - RNA, 32 nt, Homo Sapiens
ggugcaucuucaugguaaguuaggauuucuau

SEQ ID NO: 121567 - RNA, 32 nt, Homo Sapiens
caaaaaccaauauuuauaauguaagcacuauc

SEQ ID NO: 121568 - RNA, 32 nt, Homo Sapiens
caggcggagguugcggugggcugggguggugc

SEQ ID NO: 121569 - RNA, 32 nt, Homo Sapiens
gcccuggcccgucauaggcucggggcccgucg

SEQ ID NO: 121570 - RNA, 32 nt, Homo Sapiens
aaaggaaaacaaagaauguuuugagaaugugu

SEQ ID NO: 121571 - RNA, 32 nt, Homo Sapiens
uuuugucuuuaaaauucaugugguuucuaugc

SEQ ID NO: 121572 - RNA, 32 nt, Homo Sapiens
accccggcccucaucacccacuggcacugauc

SEQ ID NO: 121573 - RNA, 32 nt, Homo Sapiens
ucagacugaugguggggggccugccagggaau

SEQ ID NO: 121574 - RNA, 32 nt, Homo Sapiens
aguuugugguggcaacagcagcaggacagggc

SEQ ID NO: 121575 - RNA, 32 nt, Homo Sapiens
cugcugcggaggaggaggccguuaugaggagu

SEQ ID NO: 121576 - RNA, 29 nt, Homo Sapiens
gcaggcgggggacagaugcugcugggcca

SEQ ID NO: 121577 - RNA, 32 nt, Homo Sapiens
gaagaaagcuuuuggugcuuguccucacaacc

SEQ ID NO: 121578 - RNA, 32 nt, Homo Sapiens
ugguucgcuuacagauuucucuagccauuaau

SEQ ID NO: 121579 - RNA, 32 nt, Homo Sapiens
aguaaggcauauaacauuuacaugagauauua

SEQ ID NO: 121580 - RNA, 32 nt, Homo Sapiens
gugagcguccuggccugggcccuaugcccggg

SEQ ID NO: 121581 - RNA, 32 nt, Homo Sapiens
ucaucaagucuuggguuuuucuuugaugacag

SEQ ID NO: 121582 - RNA, 32 nt, Homo Sapiens
cuaacuaaguuaaauauuucugcacaguguuc

SEQ ID NO: 121583 - RNA, 32 nt, Homo Sapiens
cagguucauuugcggugggucugaggcuaggu

SEQ ID NO: 121584 - RNA, 32 nt, Homo Sapiens
ugccggucccggggcccugcugccggggugcc

SEQ ID NO: 121585 - RNA, 32 nt, Homo Sapiens
uuauggagauaaaguugagauggcauauaauu

SEQ ID NO: 121586 - RNA, 32 nt, Homo Sapiens
ucaggggaacauuucauuuguguuauuucuua

SEQ ID NO: 121587 - RNA, 32 nt, Homo Sapiens
agaacauccccacugucaugugucucagcagu

SEQ ID NO: 121588 - RNA, 32 nt, Homo Sapiens
ucacucugcccggcuccagccagcguccgccg

SEQ ID NO: 121589 - RNA, 32 nt, Homo Sapiens
ugucugucuccaugggaacaaggcuccugcuc

SEQ ID NO: 121590 - RNA, 32 nt, Homo Sapiens
agccauuaucagucaugccuuauuuucuugcu

SEQ ID NO: 121591 - RNA, 32 nt, Homo Sapiens
gugcaaauguuauuauuuuaaacauuaugaug

SEQ ID NO: 121592 - RNA, 32 nt, Homo Sapiens
cgcgcccagccgucacaggauuucauacuuau

SEQ ID NO: 121593 - RNA, 32 nt, Homo Sapiens
gauuugagggcgagaccccagcgcucuccacg

SEQ ID NO: 121594 - RNA, 32 nt, Homo Sapiens
caagcgguucccucccgucucagcucagcgga

SEQ ID NO: 121595 - RNA, 32 nt, Homo Sapiens
accugacccaggcucugugaggaggcaagguu

SEQ ID NO: 121596 - RNA, 32 nt, Homo Sapiens
ucuacauagaaagaauauuaaagaguagguug

SEQ ID NO: 121597 - RNA, 32 nt, Homo Sapiens
uaccaauuuaaccuaaacgcuaugauauauaa

SEQ ID NO: 121598 - RNA, 32 nt, Homo Sapiens
gcacucugcuccaucucagccaaugguaccac

SEQ ID NO: 121599 - RNA, 32 nt, Homo Sapiens
uuauagagaaaauaaacauaaucuauacuccc

SEQ ID NO: 121600 - RNA, 32 nt, Homo Sapiens
ccucuagucagaguugggucagggccacugug

SEQ ID NO: 121601 - RNA, 32 nt, Homo Sapiens
aagacugguuuaggaggaaaaggaaauaagga

SEQ ID NO: 121602 - RNA, 32 nt, Homo Sapiens
gcugagaacucggggccccggcgugggcagcc

SEQ ID NO: 121603 - RNA, 31 nt, Homo Sapiens
ugccucuuuagggcagccccaagggccagcc

SEQ ID NO: 121604 - RNA, 32 nt, Homo Sapiens
uuuucuccaaaaacuaucuauucaauuaucag

SEQ ID NO: 121605 - RNA, 32 nt, Homo Sapiens
ugcagccgccaaaccggugccucggugacgac

SEQ ID NO: 121606 - RNA, 32 nt, Homo Sapiens
uaaacuaauaaauguuauucuuauugguuaau

SEQ ID NO: 121607 - RNA, 32 nt, Homo Sapiens
gcagcuucuuggcuuagguacuucuacucaca

SEQ ID NO: 121608 - RNA, 32 nt, Homo Sapiens
aggcaagaggauguaauugauagcauuacuua

SEQ ID NO: 121609 - RNA, 29 nt, Homo Sapiens
cucaguauauguauaauaucauauuuaau

SEQ ID NO: 121610 - RNA, 32 nt, Homo Sapiens
uuuuauaucuuugaauuaugugauuagauauu

SEQ ID NO: 121611 - RNA, 32 nt, Homo Sapiens
acuaaagcaaccuuggaaaaaagcagaagaau

SEQ ID NO: 121612 - RNA, 32 nt, Homo Sapiens
uucagaucugguugacucaucaucagguguuu

SEQ ID NO: 121613 - RNA, 32 nt, Homo Sapiens
acagggugugcaggggcagagaaggaagggac

SEQ ID NO: 121614 - RNA, 32 nt, Homo Sapiens
ccuucuuacacauaauggugucuuaaaauuga

SEQ ID NO: 121615 - RNA, 32 nt, Homo Sapiens
acccugggcacuuuaagcggcgguggcggcaa

SEQ ID NO: 121616 - RNA, 32 nt, Homo Sapiens
aaaggaaaauggugggucuguuuccagaauaa

SEQ ID NO: 121617 - RNA, 32 nt, Homo Sapiens
gaggaggacaggggcggggggcgggaggcuug

SEQ ID NO: 121618 - RNA, 32 nt, Homo Sapiens
ugcagcccccaccguggguccuuugaccagcu

SEQ ID NO: 121619 - RNA, 32 nt, Homo Sapiens
augugcccuuacaaauaccaaaagcacuguaa

SEQ ID NO: 121620 - RNA, 32 nt, Homo Sapiens
uuauuuuuagcuauggcaaggcacaggccaca

SEQ ID NO: 121621 - RNA, 32 nt, Homo Sapiens
uguccgagcaucacguguggcuccagcccuug

SEQ ID NO: 121622 - RNA, 32 nt, Homo Sapiens
aucaagagcuaauuauuugaaaaaauauaaga

SEQ ID NO: 121623 - RNA, 32 nt, Homo Sapiens
aggcuguagccuccgagagcuagggggccccu

SEQ ID NO: 121624 - RNA, 32 nt, Homo Sapiens
ggcagccaucuaugguaccacugaaacccuga

SEQ ID NO: 121625 - RNA, 32 nt, Homo Sapiens
gaaagucccuccccagcagcccccuccuccug

SEQ ID NO: 121626 - RNA, 32 nt, Homo Sapiens
cggcagagucgguccagaacugcccggacagc

SEQ ID NO: 121627 - RNA, 32 nt, Homo Sapiens
gcgcggagccgaggcccgcggcuggcugcaug

SEQ ID NO: 121628 - RNA, 32 nt, Homo Sapiens
ccauaauccccaccgcuuccugucucagcgga

SEQ ID NO: 121629 - RNA, 32 nt, Homo Sapiens
uuccaaagcucagcacaguuuccuccugggau

SEQ ID NO: 121630 - RNA, 32 nt, Homo Sapiens
uacaugccagaagaaaucauguuuauuuaaau

SEQ ID NO: 121631 - RNA, 32 nt, Homo Sapiens
ggccgcgccggugcgggcuggcgacucugcuc

SEQ ID NO: 121632 - RNA, 32 nt, Homo Sapiens
ucgagcucuuggauguuguauuucagaucagg

SEQ ID NO: 121633 - RNA, 32 nt, Homo Sapiens
ccccauccuccugguccuuuccugcuucugac

SEQ ID NO: 121634 - RNA, 32 nt, Homo Sapiens
uuguccuuucuuggcacaugggugcugaccuc

SEQ ID NO: 121635 - RNA, 32 nt, Homo Sapiens
aaguuauuucuucuugggcuuuauuaucucaa

SEQ ID NO: 121636 - RNA, 32 nt, Homo Sapiens
gcgccaccaaccccacccacacugcugccugg

SEQ ID NO: 121637 - RNA, 32 nt, Homo Sapiens
aaacacaacaaaaccacaugucauagcccuug

SEQ ID NO: 121638 - RNA, 32 nt, Homo Sapiens
ucggaggagggagaggcugagggugggguggc

SEQ ID NO: 121639 - RNA, 32 nt, Homo Sapiens
aagucauagcuucaugucucucugcgcugggc

SEQ ID NO: 121640 - RNA, 32 nt, Homo Sapiens
ugagucaaaucccauuuuauauauacauaaaa

SEQ ID NO: 121641 - RNA, 32 nt, Homo Sapiens
auauuccacagcgcccuccagaguuaccuggg

SEQ ID NO: 121642 - RNA, 32 nt, Homo Sapiens
ccccaucccucccacacacaggaccagacggc

SEQ ID NO: 121643 - RNA, 32 nt, Homo Sapiens
caccacuguggccucuccaagcguccugcacg

SEQ ID NO: 121644 - RNA, 32 nt, Homo Sapiens
aguuucuuccuguaguuccccugcauuccuau

SEQ ID NO: 121645 - RNA, 32 nt, Homo Sapiens
uuccagaaaauauaaaugcaugauuuuauaca

SEQ ID NO: 121646 - RNA, 32 nt, Homo Sapiens
aaugagaaagggggagaaaacacacauugaaa

SEQ ID NO: 121647 - RNA, 32 nt, Homo Sapiens
ugaacucugaagacaucaugcugaguccaagg

SEQ ID NO: 121648 - RNA, 32 nt, Homo Sapiens
uguuggcuguuuuuccccaacaucucaauaaa

SEQ ID NO: 121649 - RNA, 32 nt, Homo Sapiens
uuuggugggggcuguuccuucuuggagaagcc

SEQ ID NO: 121650 - RNA, 32 nt, Homo Sapiens
ggggaaggggagacgugggguagagugaccau

SEQ ID NO: 121651 - RNA, 32 nt, Homo Sapiens
uuuuucagaucuucauuaaauuuuuuccuuaa

SEQ ID NO: 121652 - RNA, 32 nt, Homo Sapiens
ucgggcucaccccaagccccagcccgcgaggc

SEQ ID NO: 121653 - RNA, 32 nt, Homo Sapiens
agaaguugugaggacagcugccgcccggugcc

SEQ ID NO: 121654 - RNA, 32 nt, Homo Sapiens
caggggcggugggcgccgggaccgcggagcug

SEQ ID NO: 121655 - RNA, 32 nt, Homo Sapiens
cagggaaugaacuggagacuguggccucaucc

SEQ ID NO: 121656 - RNA, 32 nt, Homo Sapiens
uugagaugaugugguuuucaucuuucauucug

SEQ ID NO: 121657 - RNA, 32 nt, Homo Sapiens
cacuuccgguugccggcccgcgccucauaacu

SEQ ID NO: 121658 - RNA, 32 nt, Homo Sapiens
gcgaggcgcgcucccugcccggcagcgacucg

SEQ ID NO: 121659 - RNA, 32 nt, Homo Sapiens
gaagccuaauugucacaucaagcaucauuguc

SEQ ID NO: 121660 - RNA, 32 nt, Homo Sapiens
ccaggggagcaccggcuugguucugggggcuc

SEQ ID NO: 121661 - RNA, 32 nt, Homo Sapiens
aaggauaaccaccuucauguuuugaaauaaau

SEQ ID NO: 121662 - RNA, 32 nt, Homo Sapiens
gaggcugccugccuccucuccuaucccuccac

SEQ ID NO: 121663 - RNA, 32 nt, Homo Sapiens
uguguguguuuuugguuuuucuaaauauccaa

SEQ ID NO: 121664 - RNA, 32 nt, Homo Sapiens
gugccaaccgggaaccagagccccacagccau

SEQ ID NO: 121665 - RNA, 32 nt, Homo Sapiens
uuuuaacuaugaaaaucauuaugucauuccau

SEQ ID NO: 121666 - RNA, 32 nt, Homo Sapiens
aaaugcugucugcaaaguagagcuguuauguu

SEQ ID NO: 121667 - RNA, 32 nt, Homo Sapiens
caggccaggugagguccaccggccccuggcag

SEQ ID NO: 121668 - RNA, 32 nt, Homo Sapiens
uugcauuugcacaguauacacaaaagaauaug

SEQ ID NO: 121669 - RNA, 32 nt, Homo Sapiens
agcaggcucauuuuaaagggacuugcaaauuu

SEQ ID NO: 121670 - RNA, 32 nt, Homo Sapiens
ccugcccgccugcccgccugcccgccuacccg

SEQ ID NO: 121671 - RNA, 32 nt, Homo Sapiens
cacgcacacacacacacacacacacacacaca

SEQ ID NO: 121672 - RNA, 32 nt, Homo Sapiens
cacacacacacacacacacacacacacgcaca

SEQ ID NO: 121673 - RNA, 32 nt, Homo Sapiens
aaaacauacacacacacacacacacacacaca

SEQ ID NO: 121674 - RNA, 26 nt, Homo Sapiens
cauggggcuggaggcggcgcgcgagc

SEQ ID NO: 121675 - RNA, 32 nt, Homo Sapiens
uagaaaaaucauaugauuuugggaagagcauu

SEQ ID NO: 121676 - RNA, 32 nt, Homo Sapiens
ccaauuguuuucauucuuucugaaguuuuguu

SEQ ID NO: 121677 - RNA, 29 nt, Homo Sapiens
gccucaugacagauucggacgaggaugcc

SEQ ID NO: 121678 - RNA, 32 nt, Homo Sapiens
aucuuauuuuugauuucacuuaucauagaaca

SEQ ID NO: 121679 - RNA, 32 nt, Homo Sapiens
gagccgagggcgccgcugggcggcagucggag

SEQ ID NO: 121680 - RNA, 32 nt, Homo Sapiens
gaggagcgccaaccucgaagacaacucagcac

SEQ ID NO: 121681 - RNA, 32 nt, Homo Sapiens
aucauauaaaaagcagcagaggugagaacuca

SEQ ID NO: 121682 - RNA, 32 nt, Homo Sapiens
gauggagucucacucuguuacccaggccggag

SEQ ID NO: 121683 - RNA, 32 nt, Homo Sapiens
auguaauuguuucuaaaagaaauguacaaacu

SEQ ID NO: 121684 - RNA, 32 nt, Homo Sapiens
uacaggcagacacgccaugcccggcucauuuu

SEQ ID NO: 121685 - RNA, 32 nt, Homo Sapiens
accaaaccuccacaccaguuggcacuccaccc

SEQ ID NO: 121686 - RNA, 31 nt, Homo Sapiens
cauccuggggcaugccugccucauguggggg

SEQ ID NO: 121687 - RNA, 32 nt, Homo Sapiens
gaggacaacuuugguucuggaacugguuucua

SEQ ID NO: 121688 - RNA, 32 nt, Homo Sapiens
ggugcgcagcucugcccucccugaggcccagg

SEQ ID NO: 121689 - RNA, 32 nt, Homo Sapiens
cuucaaccuuggcagguggacaccauucaaca

SEQ ID NO: 121690 - RNA, 31 nt, Homo Sapiens
caugcguccgccugccugccugcgcuuccau

SEQ ID NO: 121691 - RNA, 32 nt, Homo Sapiens
ggacccagggaacgcggccuggaggacgagga

SEQ ID NO: 121692 - RNA, 28 nt, Homo Sapiens
ucugguggucguaccaggauaggagcug

SEQ ID NO: 121693 - RNA, 32 nt, Homo Sapiens
acuauuaauggugcgucauauuuuuuacuuuu

SEQ ID NO: 121694 - RNA, 32 nt, Homo Sapiens
guagaguuuuuaugccuuucucuccuagugag

SEQ ID NO: 121695 - RNA, 32 nt, Homo Sapiens
cacagaaccauucagaugacuccauugaaaac

SEQ ID NO: 121696 - RNA, 32 nt, Homo Sapiens
gccuucuguuguccuacauguuucacaguuca

SEQ ID NO: 121697 - RNA, 32 nt, Homo Sapiens
uuaauccuuuuuagguuguccuuuaaagaguu

SEQ ID NO: 121698 - RNA, 32 nt, Homo Sapiens
cacaaauugguggaaaucacaucuuaauguca

SEQ ID NO: 121699 - RNA, 32 nt, Homo Sapiens
ucugacuggaaaaugacaguuuugcaaaucag

SEQ ID NO: 121700 - RNA, 32 nt, Homo Sapiens
gugggccagaggugggggacugcuaggucgag

SEQ ID NO: 121701 - RNA, 32 nt, Homo Sapiens
gcccuuuguuuuauaggcugagaagugucucu

SEQ ID NO: 121702 - RNA, 32 nt, Homo Sapiens
gggcggcgaggcucgccgcgggcgcccucugu

SEQ ID NO: 121703 - RNA, 32 nt, Homo Sapiens
acauuuacaaccucuucucuccuuccaaccug

SEQ ID NO: 121704 - RNA, 32 nt, Homo Sapiens
gaggcggagggaagggaggcgaggcugcaccu

SEQ ID NO: 121705 - RNA, 32 nt, Homo Sapiens
caagaagguucagaacagccuggcuuuggaaa

SEQ ID NO: 121706 - RNA, 32 nt, Homo Sapiens
agucagagaaggaaacaggggaucggaauuau

SEQ ID NO: 121707 - RNA, 32 nt, Homo Sapiens
cuuucuauggcugaauaaaauuccauuguaug

SEQ ID NO: 121708 - RNA, 32 nt, Homo Sapiens
uggccgcauaggcccagccagggugugacucg

SEQ ID NO: 121709 - RNA, 27 nt, Homo Sapiens
uuucauuaauaaacauuuauuugaugc

SEQ ID NO: 121710 - RNA, 32 nt, Homo Sapiens
cuuaaaagacaacauaacuuuuuaugucuuuu

SEQ ID NO: 121711 - RNA, 32 nt, Homo Sapiens
uaacugcaaaaauauccuauguaacaacuacc

SEQ ID NO: 121712 - RNA, 32 nt, Homo Sapiens
cugcuccugccgcgcgcacccccggggcuucg

SEQ ID NO: 121713 - RNA, 32 nt, Homo Sapiens
ggaggaggaaagaggaggacauggucuccgag

SEQ ID NO: 121714 - RNA, 32 nt, Homo Sapiens
ucuuuggcccucacuacuugaccagacuggua

SEQ ID NO: 121715 - RNA, 32 nt, Homo Sapiens
ucugcaaggacgcagaauaagcagugagggcg

SEQ ID NO: 121716 - RNA, 32 nt, Homo Sapiens
augcuaugcuguugucuuauuauuauauagaa

SEQ ID NO: 121717 - RNA, 32 nt, Homo Sapiens
gagcgucuuuuguacuuaauucuuacacugug

SEQ ID NO: 121718 - RNA, 32 nt, Homo Sapiens
uuauaagcaaauccaaccuauuucauauaaac

SEQ ID NO: 121719 - RNA, 32 nt, Homo Sapiens
uguuuuuguuuuuguuuuuuuaauuuguaaaa

SEQ ID NO: 121720 - RNA, 32 nt, Homo Sapiens
guuuaacguuugcgauaaacugccguaauuuu

SEQ ID NO: 121721 - RNA, 32 nt, Homo Sapiens
cauucuugucccauuccucacuuuacugcaau

SEQ ID NO: 121722 - RNA, 32 nt, Homo Sapiens
ucuccccgcgcgcccuacugccgcgaggucag

SEQ ID NO: 121723 - RNA, 32 nt, Homo Sapiens
aacgauauauugcuaguuucaugcuuccuccu

SEQ ID NO: 121724 - RNA, 32 nt, Homo Sapiens
uucugguuaagaaaauaauguauugaguuacu

SEQ ID NO: 121725 - RNA, 32 nt, Homo Sapiens
gugggcccuuggggagucggcgccgcucccga

SEQ ID NO: 121726 - RNA, 32 nt, Homo Sapiens
uaauguguuccaaguaaaugucuuaauacagu

SEQ ID NO: 121727 - RNA, 32 nt, Homo Sapiens
cccgagcgcgcccaccugagcccccgcgcugg

SEQ ID NO: 121728 - RNA, 32 nt, Homo Sapiens
ggaggccggcgguggcgcugguuugguagggg

SEQ ID NO: 121729 - RNA, 32 nt, Homo Sapiens
ccacaagcacacccucaggccgagggugcaga

SEQ ID NO: 121730 - RNA, 31 nt, Homo Sapiens
uggauaacacggagaaaccccgucucuacua

SEQ ID NO: 121731 - RNA, 32 nt, Homo Sapiens
gcauguuugcagccuucuucuggaaguugccu

SEQ ID NO: 121732 - RNA, 32 nt, Homo Sapiens
uggccauccccaugccucugaccuccaccgac

SEQ ID NO: 121733 - RNA, 32 nt, Homo Sapiens
auuggagagauuguuggggggaggcgcagaga

SEQ ID NO: 121734 - RNA, 32 nt, Homo Sapiens
aucccaauugguugugcucauaugccaccuuu

SEQ ID NO: 121735 - RNA, 32 nt, Homo Sapiens
ucaaagucugagccccgcuccgcugaugccug

SEQ ID NO: 121736 - RNA, 32 nt, Homo Sapiens
uggacggugcuguuggaccccggcgccgucuc

SEQ ID NO: 121737 - RNA, 32 nt, Homo Sapiens
cugcaccagaaagugucuaaccuuguguuccc

SEQ ID NO: 121738 - RNA, 32 nt, Homo Sapiens
uuacaggugugagccaccacguccggccaauu

SEQ ID NO: 121739 - RNA, 32 nt, Homo Sapiens
cauuaguguacuuucugguagaaaguugcugc

SEQ ID NO: 121740 - RNA, 32 nt, Homo Sapiens
cauggccuaccuugacacuuguuugaucuuaa

SEQ ID NO: 121741 - RNA, 32 nt, Homo Sapiens
cgugacuccgcggccgggccgggacgcgacgg

SEQ ID NO: 121742 - RNA, 32 nt, Homo Sapiens
uucaaaaaaucagguagcaguccuaaauggac

SEQ ID NO: 121743 - RNA, 32 nt, Homo Sapiens
ggaugagccaauucuccuucuuucucuuccug

SEQ ID NO: 121744 - RNA, 32 nt, Homo Sapiens
cacgcacgcgcgccugcgugcggggaugcgcg

SEQ ID NO: 121745 - RNA, 32 nt, Homo Sapiens
uuacaugccguaaaauguacacacuguaauuu

SEQ ID NO: 121746 - RNA, 32 nt, Homo Sapiens
uauuuucuuuuggauuccuguguugcauugag

SEQ ID NO: 121747 - RNA, 32 nt, Homo Sapiens
uaauccccagugcagccagggcccguguguca

SEQ ID NO: 121748 - RNA, 32 nt, Homo Sapiens
acucagaaggcugugugucuucugccccacgc

SEQ ID NO: 121749 - RNA, 32 nt, Homo Sapiens
ggccaccagcucucgggcgaugcacacaacag

SEQ ID NO: 121750 - RNA, 31 nt, Homo Sapiens
accugggucugugcccugccccgcgcugggg

SEQ ID NO: 121751 - RNA, 32 nt, Homo Sapiens
gccacgagaagcugccggugcacguagaagac

SEQ ID NO: 121752 - RNA, 32 nt, Homo Sapiens
guuggggaagacugugcaacagggguacagcu

SEQ ID NO: 121753 - RNA, 32 nt, Homo Sapiens
uaguggugagcugacacguccaggugugaccg

SEQ ID NO: 121754 - RNA, 32 nt, Homo Sapiens
cccucugguagacacaggauagauaacucuuu

SEQ ID NO: 121755 - RNA, 32 nt, Homo Sapiens
uuggcauaaaagacacagguuacaacacgaau

SEQ ID NO: 121756 - RNA, 32 nt, Homo Sapiens
aucagagguucagaauuggaaguacaauuuca

SEQ ID NO: 121757 - RNA, 32 nt, Homo Sapiens
agaucuugguuggacguuuguuuucuccuuag

SEQ ID NO: 121758 - RNA, 32 nt, Homo Sapiens
cuccguggugccuggagaucaguuggacaaca

SEQ ID NO: 121759 - RNA, 32 nt, Homo Sapiens
acugauguaaaaauacucuuuucuuugaccug

SEQ ID NO: 121760 - RNA, 32 nt, Homo Sapiens
ucugauggacuuggcuuaggcccugcugggac

SEQ ID NO: 121761 - RNA, 32 nt, Homo Sapiens
uguuguuuucuuuuuaaagcauaguuuuagua

SEQ ID NO: 121762 - RNA, 32 nt, Homo Sapiens
cuugaagaaacgcuucagaacucguugcuuug

SEQ ID NO: 121763 - RNA, 32 nt, Homo Sapiens
acguuguaaaauguuuucauauuaagaaugua

SEQ ID NO: 121764 - RNA, 32 nt, Homo Sapiens
ccauguaggccgugcuuaggccucuguggaca

SEQ ID NO: 121765 - RNA, 32 nt, Homo Sapiens
cgaaccgaggccacccggagccgugcccaguc

SEQ ID NO: 121766 - RNA, 32 nt, Homo Sapiens
cuuuggacacucaggccuaacuaguuaucaaa

SEQ ID NO: 121767 - RNA, 32 nt, Homo Sapiens
agugacccagaugguaggaaaagggaaaagag

SEQ ID NO: 121768 - RNA, 32 nt, Homo Sapiens
guuccucagguccaacaaaacauugacauuau

SEQ ID NO: 121769 - RNA, 32 nt, Homo Sapiens
guuaacaugcccaauuauuguucuuuuaugaa

SEQ ID NO: 121770 - RNA, 32 nt, Homo Sapiens
uuuuuucuuaugucucuuguugaguuuuauau

SEQ ID NO: 121771 - RNA, 32 nt, Homo Sapiens
ugccugggugcccggccaugggcuguaucggc

SEQ ID NO: 121772 - RNA, 30 nt, Homo Sapiens
uacagaugccuuccuuaggaguucuugcuu

SEQ ID NO: 121773 - RNA, 32 nt, Homo Sapiens
uuuccuguuugauauucuuacaaaagauguuu

SEQ ID NO: 121774 - RNA, 32 nt, Homo Sapiens
agugugguuauuuuuucuuugguugguuuuug

SEQ ID NO: 121775 - RNA, 32 nt, Homo Sapiens
cucugcauucaucauucaggaauaccaccaau

SEQ ID NO: 121776 - RNA, 32 nt, Homo Sapiens
aggggucauuggccuuuuugucagcacaaacc

SEQ ID NO: 121777 - RNA, 32 nt, Homo Sapiens
ucuuuuucagauuuuucuuucuuucuuuaaug

SEQ ID NO: 121778 - RNA, 32 nt, Homo Sapiens
gggcagcgggagaggaggagccgcaggagcug

SEQ ID NO: 121779 - RNA, 32 nt, Homo Sapiens
gcuucuggacauuuucaagagcuuacaaaaac

SEQ ID NO: 121780 - RNA, 32 nt, Homo Sapiens
agagcuuuacuuuguggauauauuuaaaauuc

SEQ ID NO: 121781 - RNA, 32 nt, Homo Sapiens
acuccaugcugaaggagaaguacucucagaug

SEQ ID NO: 121782 - RNA, 32 nt, Homo Sapiens
ccucccccagggcuccuccccagccggugacu

SEQ ID NO: 121783 - RNA, 32 nt, Homo Sapiens
uuuuguugucccauguggacaccuguguucgg

SEQ ID NO: 121784 - RNA, 32 nt, Homo Sapiens
auaacaaccucuaaagcuguauggagcagucu

SEQ ID NO: 121785 - RNA, 32 nt, Homo Sapiens
cuguccuguaucuggaauuccugggaaggcug

SEQ ID NO: 121786 - RNA, 32 nt, Homo Sapiens
caaucagaauggaagcacuuugaguaucugaa

SEQ ID NO: 121787 - RNA, 32 nt, Homo Sapiens
ugccagcccuccccuuucaguccuuggcugug

SEQ ID NO: 121788 - RNA, 32 nt, Homo Sapiens
uuaauaaggcuuaaaccaagaccuugucuaga

SEQ ID NO: 121789 - RNA, 32 nt, Homo Sapiens
uuguuguaaaaauuauuauaggccagcuacau

SEQ ID NO: 121790 - RNA, 32 nt, Homo Sapiens
gaaugcacccucaggcacgaccauggagaaag

SEQ ID NO: 121791 - RNA, 32 nt, Homo Sapiens
cucccgucaucgaggaggacgaguggcagugc

SEQ ID NO: 121792 - RNA, 32 nt, Homo Sapiens
uucagaaggagaaggcuggagaaggacaugag

SEQ ID NO: 121793 - RNA, 32 nt, Homo Sapiens
acauauuuucuuugcccacuuuaaauaaaaac

SEQ ID NO: 121794 - RNA, 32 nt, Homo Sapiens
gcccuccgcccgcucucgccucggcgcccgca

SEQ ID NO: 121795 - RNA, 32 nt, Homo Sapiens
ggccaggagagcccgcguucaguauggguuga

SEQ ID NO: 121796 - RNA, 32 nt, Homo Sapiens
ggaggagagggcgcagggguccuucuggccgu

SEQ ID NO: 121797 - RNA, 32 nt, Homo Sapiens
ccguugcugcccggcccggagagaugagcacg

SEQ ID NO: 121798 - RNA, 32 nt, Homo Sapiens
caaaguuaauuuugucccaaaggucuaaauaa

SEQ ID NO: 121799 - RNA, 32 nt, Homo Sapiens
caguguugguauauuuuauauuacugacauuu

SEQ ID NO: 121800 - RNA, 32 nt, Homo Sapiens
gccccgcggcggugcgcgcgugagagggagcg

SEQ ID NO: 121801 - RNA, 32 nt, Homo Sapiens
guugcucgcugggcagacccaggucgcgcucc

SEQ ID NO: 121802 - RNA, 32 nt, Homo Sapiens
ugaauggugucugcauuaaaauuauuaucugg

SEQ ID NO: 121803 - RNA, 30 nt, Homo Sapiens
cuggggagcaggcgcuggguggugguucug

SEQ ID NO: 121804 - RNA, 32 nt, Homo Sapiens
cucucucauaugcccaacacgaccacugccuc

SEQ ID NO: 121805 - RNA, 32 nt, Homo Sapiens
agggaggcgcugagccgcgccacgcugcaacg

SEQ ID NO: 121806 - RNA, 32 nt, Homo Sapiens
agaagguuauuuaacaaagugguacaaacagu

SEQ ID NO: 121807 - RNA, 32 nt, Homo Sapiens
acgcagggacugggggcgggcgggagggagcc

SEQ ID NO: 121808 - RNA, 32 nt, Homo Sapiens
uugaccacuccauauuuugcuaccucuacagu

SEQ ID NO: 121809 - RNA, 32 nt, Homo Sapiens
accuuguugcuuaaucccugcagcauucaagg

SEQ ID NO: 121810 - RNA, 32 nt, Homo Sapiens
aggacaaagggagagggaggugcaggucgcuc

SEQ ID NO: 121811 - RNA, 32 nt, Homo Sapiens
augcggagggugagggcuggcgcacgggaggc

SEQ ID NO: 121812 - RNA, 32 nt, Homo Sapiens
uccauguggagauggaagguagagaaggauac

SEQ ID NO: 121813 - RNA, 32 nt, Homo Sapiens
aucucaauaguuacaagaauuaaaagagauac

SEQ ID NO: 121814 - RNA, 32 nt, Homo Sapiens
gggaggaaggguggaggggccccaggggucac

SEQ ID NO: 121815 - RNA, 32 nt, Homo Sapiens
aaauaugugaaugauaauaaaaguugcugacu

SEQ ID NO: 121816 - RNA, 32 nt, Homo Sapiens
ugucacccgcuuucccucccagcccccacauc

SEQ ID NO: 121817 - RNA, 32 nt, Homo Sapiens
cacagaauggugcuaucaggagacauuuugga

SEQ ID NO: 121818 - RNA, 32 nt, Homo Sapiens
aaagauaugggaagaaugggaaaaacaaacug

SEQ ID NO: 121819 - RNA, 32 nt, Homo Sapiens
uuggcuccccauugccugcccgaggugcaagg

SEQ ID NO: 121820 - RNA, 32 nt, Homo Sapiens
uguuucguuuuuccuagcaggggaaccuuagu

SEQ ID NO: 121821 - RNA, 32 nt, Homo Sapiens
acguagaaaaggaaaagaaggcgcaggaagca

SEQ ID NO: 121822 - RNA, 32 nt, Homo Sapiens
cagaugaauaguuugcaaauauuuucacccau

SEQ ID NO: 121823 - RNA, 32 nt, Homo Sapiens
acugugaaugacaaaaucuggcaggaacacag

SEQ ID NO: 121824 - RNA, 32 nt, Homo Sapiens
ggcugauacacuuguaaacacacacacacaca

SEQ ID NO: 121825 - RNA, 32 nt, Homo Sapiens
gguccagagcuguggggugccuccgcgcgguc

SEQ ID NO: 121826 - RNA, 32 nt, Homo Sapiens
ccaggaagaaugccugggggauucccuguugg

SEQ ID NO: 121827 - RNA, 32 nt, Homo Sapiens
gcccuuccccagcaguggcucgguggccaugu

SEQ ID NO: 121828 - RNA, 32 nt, Homo Sapiens
gggggcuggcuguaaauugacguggcauggaa

SEQ ID NO: 121829 - RNA, 32 nt, Homo Sapiens
aagaauuguuguaaguuuuugauucuacucuu

SEQ ID NO: 121830 - RNA, 32 nt, Homo Sapiens
cuggaguguguugggcagccaguguccccaga

SEQ ID NO: 121831 - RNA, 32 nt, Homo Sapiens
uuccggagccccacggggcacgcguuaggaaa

SEQ ID NO: 121832 - RNA, 32 nt, Homo Sapiens
gugucucaaauuauauuuaugaaggguuauca

SEQ ID NO: 121833 - RNA, 32 nt, Homo Sapiens
ugaaaauuaguccuucuggacuuuucuugcaa

SEQ ID NO: 121834 - RNA, 32 nt, Homo Sapiens
aggguagggaaugaaguacccuuaaugcaggg

SEQ ID NO: 121835 - RNA, 32 nt, Homo Sapiens
aaaauugcacaaagcaggccaggcacgguggc

SEQ ID NO: 121836 - RNA, 32 nt, Homo Sapiens
ggauguaacggucgcccgccuccggcgugacg

SEQ ID NO: 121837 - RNA, 32 nt, Homo Sapiens
cccucuuugcuuccucgguuuuuucaaaaaua

SEQ ID NO: 121838 - RNA, 32 nt, Homo Sapiens
aauugagcuuugcaaagccacuugcaaggaag

SEQ ID NO: 121839 - RNA, 32 nt, Homo Sapiens
accaguggcuauuugcaagagccuguuuccag

SEQ ID NO: 121840 - RNA, 32 nt, Homo Sapiens
ccuuaaauauauauacuuuuaugugucaauua

SEQ ID NO: 121841 - RNA, 32 nt, Homo Sapiens
ugccagaggggagggggcaguuagauucccca

SEQ ID NO: 121842 - RNA, 32 nt, Homo Sapiens
ggugguuccuaagggaaagggaagcacaugau

SEQ ID NO: 121843 - RNA, 32 nt, Homo Sapiens
cagccucuagaaugguaacaaaucagccaauu

SEQ ID NO: 121844 - RNA, 32 nt, Homo Sapiens
ccucccuccgcacacaccccaccccagccugc

SEQ ID NO: 121845 - RNA, 32 nt, Homo Sapiens
ucaugggcagcugaagggggagcuuucuaccc

SEQ ID NO: 121846 - RNA, 32 nt, Homo Sapiens
ugggacagcaacaaaaucauggcuuaggaucg

SEQ ID NO: 121847 - RNA, 32 nt, Homo Sapiens
uaugccuuuuucugcgggaguagguggggaga

SEQ ID NO: 121848 - RNA, 32 nt, Homo Sapiens
ccuucacuccagcaaggagggugcugggugac

SEQ ID NO: 121849 - RNA, 32 nt, Homo Sapiens
uauuuauuguaaguguagaaaaucacagagaa

SEQ ID NO: 121850 - RNA, 32 nt, Homo Sapiens
ccccacccuuuccccgggccugcugugcugcu

SEQ ID NO: 121851 - RNA, 32 nt, Homo Sapiens
acuuccucugggguggcugugcucauggaugc

SEQ ID NO: 121852 - RNA, 32 nt, Homo Sapiens
guaauaauucuauuuauguaaguuaugaugac

SEQ ID NO: 121853 - RNA, 32 nt, Homo Sapiens
uguucagagucuuguaaauguuauuuuaauaa

SEQ ID NO: 121854 - RNA, 32 nt, Homo Sapiens
gcgcuuccaccucggggccuuggcucugccac

SEQ ID NO: 121855 - RNA, 32 nt, Homo Sapiens
ccacuucccaguccuccggggcgacacuuccu

SEQ ID NO: 121856 - RNA, 32 nt, Homo Sapiens
aaggcgcgauccaagagggauuuaagcagccc

SEQ ID NO: 121857 - RNA, 32 nt, Homo Sapiens
uuauauaguauagucuauguagauaaaaagua

SEQ ID NO: 121858 - RNA, 32 nt, Homo Sapiens
uuauuuuauuuuuugagauggaguuucacccu

SEQ ID NO: 121859 - RNA, 32 nt, Homo Sapiens
agggcgggcuggcgugcggcgccguugcgggc

SEQ ID NO: 121860 - RNA, 32 nt, Homo Sapiens
aaugcacugguuugaaaauaugccagacuuca

SEQ ID NO: 121861 - RNA, 32 nt, Homo Sapiens
guucccgguggcggcgcccuggacucccgggc

SEQ ID NO: 121862 - RNA, 32 nt, Homo Sapiens
acuagggucucacucugucacccagguuggag

SEQ ID NO: 121863 - RNA, 32 nt, Homo Sapiens
ggagcaaugucacaggguggcuccauuuucca

SEQ ID NO: 121864 - RNA, 32 nt, Homo Sapiens
cccccuuuuacugguauaguacacuccaguga

SEQ ID NO: 121865 - RNA, 32 nt, Homo Sapiens
uuggcuuagauauacaaucuggaaaaauauuc

SEQ ID NO: 121866 - RNA, 32 nt, Homo Sapiens
auaacuguaggacuucuguuuccugguaacaa

SEQ ID NO: 121867 - RNA, 32 nt, Homo Sapiens
agagugggccccuggcugcugcucgggguggc

SEQ ID NO: 121868 - RNA, 32 nt, Homo Sapiens
ggugcucuguggugaauggguggccuguggug

SEQ ID NO: 121869 - RNA, 32 nt, Homo Sapiens
uuuugguaaaauuuaugugaacuuuuaaagcu

SEQ ID NO: 121870 - RNA, 32 nt, Homo Sapiens
agcccuggggaucauuuuucucuucugaaccc

SEQ ID NO: 121871 - RNA, 32 nt, Homo Sapiens
guagagccacuacuuucuuuuucccugagaau

SEQ ID NO: 121872 - RNA, 32 nt, Homo Sapiens
gauggagcucacggcuuaaagcccaagcucug

SEQ ID NO: 121873 - RNA, 32 nt, Homo Sapiens
uucccacccacuuucccuggucccaauccuuu

SEQ ID NO: 121874 - RNA, 32 nt, Homo Sapiens
guugcaaagucuacauuuuaugcugaaucugc

SEQ ID NO: 121875 - RNA, 32 nt, Homo Sapiens
caacggagugagacccugucuugaaaauaaua

SEQ ID NO: 121876 - RNA, 32 nt, Homo Sapiens
uggccgcagggcccgccccauggagcccccug

SEQ ID NO: 121877 - RNA, 32 nt, Homo Sapiens
cucuuguauggcaaaauaauuagugaguuuaa

SEQ ID NO: 121878 - RNA, 32 nt, Homo Sapiens
uccaguagacauuuucuuucugaggcaucgug

SEQ ID NO: 121879 - RNA, 32 nt, Homo Sapiens
cccuuguugcuguagaugugcgugcagucugg

SEQ ID NO: 121880 - RNA, 32 nt, Homo Sapiens
ggacgccuggcccuucccucccaccggguccu

SEQ ID NO: 121881 - RNA, 32 nt, Homo Sapiens
ucagccaugagcagggaaagaacucucccaac

SEQ ID NO: 121882 - RNA, 32 nt, Homo Sapiens
aggcggcccucccuccucccgcggggcccucc

SEQ ID NO: 121883 - RNA, 32 nt, Homo Sapiens
aucuauuuguuguuuaagagugugguguuuaa

SEQ ID NO: 121884 - RNA, 32 nt, Homo Sapiens
cuaucaaaggauuauagcaauccuggugauuu

SEQ ID NO: 121885 - RNA, 32 nt, Homo Sapiens
gcccccagccccacugugaagucaguccugca

SEQ ID NO: 121886 - RNA, 32 nt, Homo Sapiens
cagcagcaauugcagcagcagcagucacugca

SEQ ID NO: 121887 - RNA, 31 nt, Homo Sapiens
uaggucuuaaagagaaagucaaucuaaugcc

SEQ ID NO: 121888 - RNA, 32 nt, Homo Sapiens
cccgggaggacgggacccugagccugugugug

SEQ ID NO: 121889 - RNA, 32 nt, Homo Sapiens
ugagugugggccgggcgggagugcggcgagag

SEQ ID NO: 121890 - RNA, 32 nt, Homo Sapiens
gccgugcacuccuacacacacacacacacaca

SEQ ID NO: 121891 - RNA, 32 nt, Homo Sapiens
gucuugcacacauuucuagaucuugcacuguc

SEQ ID NO: 121892 - RNA, 32 nt, Homo Sapiens
caugguggugggcagcgacggcagguacuuua

SEQ ID NO: 121893 - RNA, 32 nt, Homo Sapiens
agucauuucuccaagcucccuuuagugcaggg

SEQ ID NO: 121894 - RNA, 32 nt, Homo Sapiens
gcugcugcucgccgagcucccggagcugggug

SEQ ID NO: 121895 - RNA, 32 nt, Homo Sapiens
ggaaagaggaagaggcugccuggggcugggcc

SEQ ID NO: 121896 - RNA, 32 nt, Homo Sapiens
cugcgcuuccuucucccucucuccagacgucg

SEQ ID NO: 121897 - RNA, 32 nt, Homo Sapiens
acuugcuaucucuugcugcugcuguuucaugg

SEQ ID NO: 121898 - RNA, 32 nt, Homo Sapiens
ucugagaucuauuugcagagugggugcuuagc

SEQ ID NO: 121899 - RNA, 32 nt, Homo Sapiens
cucuccuuuaccuuuaccuuuaccacagugca

SEQ ID NO: 121900 - RNA, 32 nt, Homo Sapiens
auuguaugaucaaguuguauauuuaagucuua

SEQ ID NO: 121901 - RNA, 30 nt, Homo Sapiens
uugaaugucugugcuuaugagaggcagugg

SEQ ID NO: 121902 - RNA, 32 nt, Homo Sapiens
accaauguaaaaauguucuuuuaucucaaauu

SEQ ID NO: 121903 - RNA, 32 nt, Homo Sapiens
ccuuuccccccuccgugcuuuucugguugaga

SEQ ID NO: 121904 - RNA, 32 nt, Homo Sapiens
cgggaggcgucagagcaaaaccaaaccccagg

SEQ ID NO: 121905 - RNA, 32 nt, Homo Sapiens
ccgcaucugcgguuaacauagcaucccuaugg

SEQ ID NO: 121906 - RNA, 32 nt, Homo Sapiens
ccccugguaacccagcagcaccguaccucugc

SEQ ID NO: 121907 - RNA, 32 nt, Homo Sapiens
cagcccagugacugcgggcuguggcuccuccu

SEQ ID NO: 121908 - RNA, 32 nt, Homo Sapiens
uguguguguuugugucugucugugggucucga

SEQ ID NO: 121909 - RNA, 32 nt, Homo Sapiens
auuaguaagcaaugaguauaucaucaguacac

SEQ ID NO: 121910 - RNA, 32 nt, Homo Sapiens
auaauaaauaaaacuuuuucuuuuagcucaau

SEQ ID NO: 121911 - RNA, 32 nt, Homo Sapiens
gcugcaccagcgccuggcaccaugaggacgcc

SEQ ID NO: 121912 - RNA, 32 nt, Homo Sapiens
gaaggagggucucuugcccaucucuccggcca

SEQ ID NO: 121913 - RNA, 32 nt, Homo Sapiens
uugccccuggggauuacgcagcugauguuuac

SEQ ID NO: 121914 - RNA, 32 nt, Homo Sapiens
ggggagcucgucgccgccgccggcggcuagcg

SEQ ID NO: 121915 - RNA, 32 nt, Homo Sapiens
ccuguggccaugucgcccacuccuuccacucu

SEQ ID NO: 121916 - RNA, 32 nt, Homo Sapiens
gugaagacacaagcucuuucuggauacagaga

SEQ ID NO: 121917 - RNA, 32 nt, Homo Sapiens
auauaauggcaauagguagagauacaacaaau

SEQ ID NO: 121918 - RNA, 32 nt, Homo Sapiens
cacaaagagaaaauaugaacaauauaaagcac

SEQ ID NO: 121919 - RNA, 32 nt, Homo Sapiens
auagaugucuucuuguguaccuguguaagaau

SEQ ID NO: 121920 - RNA, 32 nt, Homo Sapiens
aaacccuauaaauguuuggaaugugacaaggc

SEQ ID NO: 121921 - RNA, 32 nt, Homo Sapiens
ggcaguaugcaucggugucuagcugaaguugu

SEQ ID NO: 121922 - RNA, 32 nt, Homo Sapiens
aauauuauuauuuccagcuuagacauuguucu

SEQ ID NO: 121923 - RNA, 32 nt, Homo Sapiens
ucaucagauugugagacugcuuccuugaaaca

SEQ ID NO: 121924 - RNA, 32 nt, Homo Sapiens
agggaaaugaaaaucaaaaccacaaugagaua

SEQ ID NO: 121925 - RNA, 32 nt, Homo Sapiens
gaaacucuagcaaaguaauauuuaacauuuuc

SEQ ID NO: 121926 - RNA, 32 nt, Homo Sapiens
aauagacuaaggaugccuuugcagaacaccaa

SEQ ID NO: 121927 - RNA, 32 nt, Homo Sapiens
agcauaggaaaagcuuccuugaugugagcucu

SEQ ID NO: 121928 - RNA, 32 nt, Homo Sapiens
gaggccuguguucgggagggccugggagaagg

SEQ ID NO: 121929 - RNA, 32 nt, Homo Sapiens
auauguguuauuucuuuuuugcaaugcuagau

SEQ ID NO: 121930 - RNA, 32 nt, Homo Sapiens
aauuaauaauguagcuaaacuaugauauuuau

SEQ ID NO: 121931 - RNA, 32 nt, Homo Sapiens
uguauguaagacacuuggcacaaaaccuggca

SEQ ID NO: 121932 - RNA, 32 nt, Homo Sapiens
aaggucuugggccugcccuuggguccugggga

SEQ ID NO: 121933 - RNA, 32 nt, Homo Sapiens
guccucaugcuccucaguguccacacuucaag

SEQ ID NO: 121934 - RNA, 32 nt, Homo Sapiens
aaaggccccuccccccagccuuccaagcccau

SEQ ID NO: 121935 - RNA, 32 nt, Homo Sapiens
ccggcauguucagaauccuuguccuuuaaccu

SEQ ID NO: 121936 - RNA, 32 nt, Homo Sapiens
gcaggucucgcucucggcacccucccggcgcc

SEQ ID NO: 121937 - RNA, 32 nt, Homo Sapiens
agaaaaugauugccaaagaauaguauuaagga

SEQ ID NO: 121938 - RNA, 32 nt, Homo Sapiens
ugcuuugaaauauugauguggggagguuuauu

SEQ ID NO: 121939 - RNA, 32 nt, Homo Sapiens
auaaaaaugcuguucaauaucuaaugauuucu

SEQ ID NO: 121940 - RNA, 31 nt, Homo Sapiens
gccagagugcucgcacuucuccuaggggcac

SEQ ID NO: 121941 - RNA, 32 nt, Homo Sapiens
uggaaagggucucuugucagggcuugaauuuu

SEQ ID NO: 121942 - RNA, 27 nt, Homo Sapiens
ccgagggcccucuucagcucucuggag

SEQ ID NO: 121943 - RNA, 32 nt, Homo Sapiens
ggggagccgaggcgagcgcgagcgagguccag

SEQ ID NO: 121944 - RNA, 32 nt, Homo Sapiens
agauucggucgguauuucccccaggggaaaca

SEQ ID NO: 121945 - RNA, 32 nt, Homo Sapiens
gagcaggacaaggccccuguugcugaugauaa

SEQ ID NO: 121946 - RNA, 32 nt, Homo Sapiens
ucgacgccgccgcucguccguccucccguccg

SEQ ID NO: 121947 - RNA, 32 nt, Homo Sapiens
gucgccggggcugcgcgcgccauggagccgcg

SEQ ID NO: 121948 - RNA, 32 nt, Homo Sapiens
auuccucgcggugcccucuggaacugcuucca

SEQ ID NO: 121949 - RNA, 32 nt, Homo Sapiens
cggggcuucaagaccgcugucuggaguccccc

SEQ ID NO: 121950 - RNA, 32 nt, Homo Sapiens
cugugcuugugcuuuauacaaagagaaagagg

SEQ ID NO: 121951 - RNA, 32 nt, Homo Sapiens
accuugauucagaaccauuucagcuguuucac

SEQ ID NO: 121952 - RNA, 32 nt, Homo Sapiens
acuuaaacagaaacacauaaaggucagcaauu

SEQ ID NO: 121953 - RNA, 32 nt, Homo Sapiens
cagacacagucguuaacagaaaauaguauucu

SEQ ID NO: 121954 - RNA, 32 nt, Homo Sapiens
caaacgcugcuucguggcccccgggggcacaa

SEQ ID NO: 121955 - RNA, 32 nt, Homo Sapiens
cucuacguucccuguucucgccugcagcuccg

SEQ ID NO: 121956 - RNA, 32 nt, Homo Sapiens
cgagaccugccagccccggcauccuggaaguc

SEQ ID NO: 121957 - RNA, 28 nt, Homo Sapiens
aagucaccugccuguauguguuuccuca

SEQ ID NO: 121958 - RNA, 32 nt, Homo Sapiens
ggagccccgcggcggccugggcagcgccugug

SEQ ID NO: 121959 - RNA, 32 nt, Homo Sapiens
ccauguaaaaauuuuauagcuuaaauguaguc

SEQ ID NO: 121960 - RNA, 32 nt, Homo Sapiens
gcgggggcggccugucagccgcugcuuugucu

SEQ ID NO: 121961 - RNA, 32 nt, Homo Sapiens
aggccgugcuguugaauugaucuucuauuuuu

SEQ ID NO: 121962 - RNA, 32 nt, Homo Sapiens
gaugcgagagcagguuggcggcuggaccgugg

SEQ ID NO: 121963 - RNA, 32 nt, Homo Sapiens
acugugaauuugcugauguucuuccaacucag

SEQ ID NO: 121964 - RNA, 32 nt, Homo Sapiens
agucaugaauuuauacugauauuuucaauuca

SEQ ID NO: 121965 - RNA, 32 nt, Homo Sapiens
aaaaugaaaaagaacaggaaauucugaauaga

SEQ ID NO: 121966 - RNA, 32 nt, Homo Sapiens
cagggcagccagcaggcaggucuuguugccaa

SEQ ID NO: 121967 - RNA, 32 nt, Homo Sapiens
gaaucccuggggauccugagacccuuucagac

SEQ ID NO: 121968 - RNA, 32 nt, Homo Sapiens
uccuccccgcucguccuccccgggcccagagg

SEQ ID NO: 121969 - RNA, 32 nt, Homo Sapiens
ggguuuuucuucagagucuauuuuuucagcga

SEQ ID NO: 121970 - RNA, 32 nt, Homo Sapiens
caagguaauaggaaaaguuugaguuaaguguu

SEQ ID NO: 121971 - RNA, 32 nt, Homo Sapiens
cugcaggggagcuucuuagcaggccuggggcu

SEQ ID NO: 121972 - RNA, 32 nt, Homo Sapiens
uaaugauguuaaauucuuaaaucauauuugcu

SEQ ID NO: 121973 - RNA, 32 nt, Homo Sapiens
gcccggcccucgucucaccgcauaaagucuuu

SEQ ID NO: 121974 - RNA, 32 nt, Homo Sapiens
uuacuuuaaugauuauaaucauacugucugcu

SEQ ID NO: 121975 - RNA, 32 nt, Homo Sapiens
cagccucccuccccucuccacccuucagugcu

SEQ ID NO: 121976 - RNA, 32 nt, Homo Sapiens
cgccugcccgcggcuggggaaccaagggccug

SEQ ID NO: 121977 - RNA, 32 nt, Homo Sapiens
caaccuguauauauauuuuuuaaucgacguga

SEQ ID NO: 121978 - RNA, 32 nt, Homo Sapiens
ugcuagacgcguugcccgucccugcguggugc

SEQ ID NO: 121979 - RNA, 32 nt, Homo Sapiens
aacguuauguccugugucgaggagagacgacg

SEQ ID NO: 121980 - RNA, 32 nt, Homo Sapiens
ggcaggcccgcaccccacauuccguccuguuu

SEQ ID NO: 121981 - RNA, 32 nt, Homo Sapiens
ccaauggcuuugcaagaagaugacauuucaga

SEQ ID NO: 121982 - RNA, 32 nt, Homo Sapiens
uagaauggugccuuucugagugucuaaaacuu

SEQ ID NO: 121983 - RNA, 32 nt, Homo Sapiens
uuuggagagggucagggaccugagcugacccc

SEQ ID NO: 121984 - RNA, 32 nt, Homo Sapiens
caagauggguggcaccaaccuugcugggacuu

SEQ ID NO: 121985 - RNA, 32 nt, Homo Sapiens
ucacugucuuaucugcagaaauuugcugucaa

SEQ ID NO: 121986 - RNA, 32 nt, Homo Sapiens
cggaggagcaugggcaccuugcgggauuuaca

SEQ ID NO: 121987 - RNA, 32 nt, Homo Sapiens
gauuagaauguuuacuuauauagaauuuauga

SEQ ID NO: 121988 - RNA, 32 nt, Homo Sapiens
cucacuuuucccuuuucauucccacccccuag

SEQ ID NO: 121989 - RNA, 32 nt, Homo Sapiens
caugaaguugcaucugagauguguguauauga

SEQ ID NO: 121990 - RNA, 32 nt, Homo Sapiens
caguagcucuuuuuuucuuaauuugcaaaguc

SEQ ID NO: 121991 - RNA, 32 nt, Homo Sapiens
uaaugcguuguuguuguuuucuuucucucuug

SEQ ID NO: 121992 - RNA, 32 nt, Homo Sapiens
caccaacuaaauuaaaucaugcuauuuaauuu

SEQ ID NO: 121993 - RNA, 32 nt, Homo Sapiens
caggagcagaguacagucuguugugguuuccc

SEQ ID NO: 121994 - RNA, 32 nt, Homo Sapiens
gcaagaccccaccuccacgggcucuccugggc

SEQ ID NO: 121995 - RNA, 29 nt, Homo Sapiens
cggcauguggggcuaccugucgcugaugc

SEQ ID NO: 121996 - RNA, 32 nt, Homo Sapiens
gguucucuggucucagcaaggcuuuuccuguu

SEQ ID NO: 121997 - RNA, 31 nt, Homo Sapiens
caccucugggagcuggaguccacuggggugg

SEQ ID NO: 121998 - RNA, 32 nt, Homo Sapiens
gccaggagcuuagggcuuugcauugugucuaa

SEQ ID NO: 121999 - RNA, 32 nt, Homo Sapiens
cuuauaggacccugugccaauaaacagacaug

SEQ ID NO: 122000 - RNA, 32 nt, Homo Sapiens
ggauaagaaggugauuuuuuuauuauuuuuau

SEQ ID NO: 122001 - RNA, 32 nt, Homo Sapiens
uuuaauuucuuugcuguaucuggugaaaccca

SEQ ID NO: 122002 - RNA, 32 nt, Homo Sapiens
gcuacuacuacagccgcaaggugauccgcgcc

SEQ ID NO: 122003 - RNA, 32 nt, Homo Sapiens
ccaaccuugccucaccacucccggcccuaguc

SEQ ID NO: 122004 - RNA, 32 nt, Homo Sapiens
ugcugguaguuugugagaagugacccgcacgc

SEQ ID NO: 122005 - RNA, 32 nt, Homo Sapiens
gaaaggguaaagggcuuggucuggauucccag

SEQ ID NO: 122006 - RNA, 32 nt, Homo Sapiens
ucaccacccuccccuuccagccaccacccuuu

SEQ ID NO: 122007 - RNA, 32 nt, Homo Sapiens
gagcgcagggcggcgcggcgucggucccggga

SEQ ID NO: 122008 - RNA, 28 nt, Homo Sapiens
aggcccggagcgucgccgagguuugagg

SEQ ID NO: 122009 - RNA, 32 nt, Homo Sapiens
uugauauuugggucacugcagaucucugaguc

SEQ ID NO: 122010 - RNA, 31 nt, Homo Sapiens
gcccaagagccccagagacugugccaggggc

SEQ ID NO: 122011 - RNA, 32 nt, Homo Sapiens
ugaagagaacgcuggaaggcugcgagaggacu

SEQ ID NO: 122012 - RNA, 32 nt, Homo Sapiens
ucaguggggaaguggaggagccacaucaaaac

SEQ ID NO: 122013 - RNA, 32 nt, Homo Sapiens
uucgccgccccgcucgccgccgcgaugccagu

SEQ ID NO: 122014 - RNA, 32 nt, Homo Sapiens
ucugugcagccuggcagcggcggcgcugcgcu

SEQ ID NO: 122015 - RNA, 32 nt, Homo Sapiens
gaaaacaaaugaaaacaaaauuagagcaaagc

SEQ ID NO: 122016 - RNA, 32 nt, Homo Sapiens
cuucacccugucaaccaccucugaauccccac

SEQ ID NO: 122017 - RNA, 32 nt, Homo Sapiens
caauugcacaucaaaaucaguucccgugagga

SEQ ID NO: 122018 - RNA, 32 nt, Homo Sapiens
guaacaccuucuaaccugugaauuggcagaaa

SEQ ID NO: 122019 - RNA, 32 nt, Homo Sapiens
ccacgaacccaccagaaggaagaaacuccaaa

SEQ ID NO: 122020 - RNA, 32 nt, Homo Sapiens
cucgcugcaaccuccgccucccggguucaagc

SEQ ID NO: 122021 - RNA, 32 nt, Homo Sapiens
aucccagugaaccuaaugccaucacgaggguu

SEQ ID NO: 122022 - RNA, 32 nt, Homo Sapiens
gcuguggagcagccucucuccuuggaccuccu

SEQ ID NO: 122023 - RNA, 32 nt, Homo Sapiens
aucagcauuuaaaauagacaaacaagcauuuu

SEQ ID NO: 122024 - RNA, 32 nt, Homo Sapiens
aggaauggucuaaagaaaugaccauucacacu

SEQ ID NO: 122025 - RNA, 32 nt, Homo Sapiens
cgcacucccacccugggugcugcagggucucc

SEQ ID NO: 122026 - RNA, 32 nt, Homo Sapiens
aggaagccacuggccgcguccagggucaccug

SEQ ID NO: 122027 - RNA, 32 nt, Homo Sapiens
aaauguguguucaggagcaugacuccagugcu

SEQ ID NO: 122028 - RNA, 32 nt, Homo Sapiens
aaagcacccaagucaucaacugccaaccaagg

SEQ ID NO: 122029 - RNA, 32 nt, Homo Sapiens
auauacauauauauaauauauaugaagacugu

SEQ ID NO: 122030 - RNA, 32 nt, Homo Sapiens
gucaccggcagagcugggauuacgucuaagau

SEQ ID NO: 122031 - RNA, 25 nt, Homo Sapiens
augggcuuccugcaccagcugcagc

SEQ ID NO: 122032 - RNA, 32 nt, Homo Sapiens
auguccucacgcugucgccgcgcgguuucccu

SEQ ID NO: 122033 - RNA, 32 nt, Homo Sapiens
aaccucugcagaaacuggaugcucuuaaccuc

SEQ ID NO: 122034 - RNA, 32 nt, Homo Sapiens
uagguaucuguaagcauagaagaauaggguga

SEQ ID NO: 122035 - RNA, 32 nt, Homo Sapiens
caccacuguauuccagccugggugacugagac

SEQ ID NO: 122036 - RNA, 32 nt, Homo Sapiens
ggcugggcaaaguuaagacuugcuugucagug

SEQ ID NO: 122037 - RNA, 32 nt, Homo Sapiens
agccaagguaaagccaggaucgcugccaaguu

SEQ ID NO: 122038 - RNA, 25 nt, Homo Sapiens
auuuaaauaaaguggauuugaacac

SEQ ID NO: 122039 - RNA, 32 nt, Homo Sapiens
cgcuccccauccccgccccucccgccgccacc

SEQ ID NO: 122040 - RNA, 32 nt, Homo Sapiens
caccggccgcccagcccacccagcgcacaguc

SEQ ID NO: 122041 - RNA, 32 nt, Homo Sapiens
aaucauuuuuauuacccaccacucugcuuaaa

SEQ ID NO: 122042 - RNA, 32 nt, Homo Sapiens
cuuccccuuacgagcagugagaccuaggcuac

SEQ ID NO: 122043 - RNA, 32 nt, Homo Sapiens
ccccgagggguuucugccuccuccccacccag

SEQ ID NO: 122044 - RNA, 32 nt, Homo Sapiens
cuggcaagcucuuucacaacccuacauauuuc

SEQ ID NO: 122045 - RNA, 32 nt, Homo Sapiens
cuggcuugacuuuuaugggaaaaguuauuuua

SEQ ID NO: 122046 - RNA, 32 nt, Homo Sapiens
acccauuuacacauauccacaaaugacugcaa

SEQ ID NO: 122047 - RNA, 32 nt, Homo Sapiens
gacugcgcacugaguacaaaugugugacugcu

SEQ ID NO: 122048 - RNA, 32 nt, Homo Sapiens
ucuuaacucugaauuaaugacuguauauauca

SEQ ID NO: 122049 - RNA, 32 nt, Homo Sapiens
uauguaaaagagaaagagacucucuaaaaaua

SEQ ID NO: 122050 - RNA, 32 nt, Homo Sapiens
uguggcucucagggcccggcucuguggcacuu

SEQ ID NO: 122051 - RNA, 32 nt, Homo Sapiens
gggccaugagaugcuggggagaucuggcgaug

SEQ ID NO: 122052 - RNA, 32 nt, Homo Sapiens
ggagaccccgguuauuuccucagcuguuucca

SEQ ID NO: 122053 - RNA, 32 nt, Homo Sapiens
cgugcgauugcccucuccugcugcuggacuuc

SEQ ID NO: 122054 - RNA, 32 nt, Homo Sapiens
agucuccuccucacccgcacaucgcggggcua

SEQ ID NO: 122055 - RNA, 32 nt, Homo Sapiens
gguggcucucgcuuggccuccuugucugcaag

SEQ ID NO: 122056 - RNA, 32 nt, Homo Sapiens
aucucugaagaacccacagaccaggugaauua

SEQ ID NO: 122057 - RNA, 32 nt, Homo Sapiens
gcauacaguaccuugcucuuucugguggcauc

SEQ ID NO: 122058 - RNA, 32 nt, Homo Sapiens
ggggcacgagccauauggggucugcacaagag

SEQ ID NO: 122059 - RNA, 32 nt, Homo Sapiens
aguuuugccauguuggccaggcuggucuugaa

SEQ ID NO: 122060 - RNA, 32 nt, Homo Sapiens
gcccccuccccucccccgccgccucgcagaua

SEQ ID NO: 122061 - RNA, 32 nt, Homo Sapiens
acugggaggcugcgugucucccaugcauggcc

SEQ ID NO: 122062 - RNA, 32 nt, Homo Sapiens
cucuacaccuugcaugagagaaaaccuuccau

SEQ ID NO: 122063 - RNA, 32 nt, Homo Sapiens
gcuguuuccuggguaaaucuagagugggguuu

SEQ ID NO: 122064 - RNA, 32 nt, Homo Sapiens
aaaaaauggaaauauuugaacuuucuauugaa

SEQ ID NO: 122065 - RNA, 32 nt, Homo Sapiens
acgguugagggugaggcccaacaccugccuua

SEQ ID NO: 122066 - RNA, 32 nt, Homo Sapiens
ucucuuagcuccugccuucucuaugcagccug

SEQ ID NO: 122067 - RNA, 32 nt, Homo Sapiens
cccaccccaccggcagcguccaggugcggggc

SEQ ID NO: 122068 - RNA, 32 nt, Homo Sapiens
gaaaaaauauaaaacagaucuaauuucaugaa

SEQ ID NO: 122069 - RNA, 32 nt, Homo Sapiens
uaauacaggauaucagcauauuugugcaccuu

SEQ ID NO: 122070 - RNA, 32 nt, Homo Sapiens
aaacaaacaaacaaacaaaacaacuagcuagg

SEQ ID NO: 122071 - RNA, 32 nt, Homo Sapiens
uuuucaagagaaaagcaaaaccauuagaauug

SEQ ID NO: 122072 - RNA, 32 nt, Homo Sapiens
uguguuaaauguuggcauuuacuuguauugac

SEQ ID NO: 122073 - RNA, 32 nt, Homo Sapiens
uugcaauaucauauaaauuuuuugugaucagu

SEQ ID NO: 122074 - RNA, 32 nt, Homo Sapiens
cagguucccgguuucuucuaggucgcccuggu

SEQ ID NO: 122075 - RNA, 32 nt, Homo Sapiens
caccaagugcggguccggcagcuucugccccc

SEQ ID NO: 122076 - RNA, 32 nt, Homo Sapiens
aauuacaguguuuaauucucuuuuccuauuac

SEQ ID NO: 122077 - RNA, 32 nt, Homo Sapiens
aguuguaucagcacguguggccuguucuucua

SEQ ID NO: 122078 - RNA, 32 nt, Homo Sapiens
cucauuugucauuguuguucuauuuuguuuug

SEQ ID NO: 122079 - RNA, 32 nt, Homo Sapiens
agugucuguauauaaggaccuuggaaugacgu

SEQ ID NO: 122080 - RNA, 32 nt, Homo Sapiens
ccccuuuccccacaccucccccugcugcugcu

SEQ ID NO: 122081 - RNA, 32 nt, Homo Sapiens
aaagucuucuauuuuaaaauuuagagaaaaau

SEQ ID NO: 122082 - RNA, 32 nt, Homo Sapiens
gagcucuugugcuugaguucaguguuaguggu

SEQ ID NO: 122083 - RNA, 32 nt, Homo Sapiens
gugguuuagucuuuuuuuuuuuuuuuuuuuuu

SEQ ID NO: 122084 - RNA, 32 nt, Homo Sapiens
uauuuuguuggggauuuuugcaucgauguuca

SEQ ID NO: 122085 - RNA, 32 nt, Homo Sapiens
ucugggcucaggugauccuuccgccucacccu

SEQ ID NO: 122086 - RNA, 32 nt, Homo Sapiens
augacagaaaucaccuauguuuacagcgacag

SEQ ID NO: 122087 - RNA, 32 nt, Homo Sapiens
uuuuauagagauggggguuuugccauguugcc

SEQ ID NO: 122088 - RNA, 32 nt, Homo Sapiens
ugggugauguuaguaacauaauaacaaguugu

SEQ ID NO: 122089 - RNA, 32 nt, Homo Sapiens
uacagcucaaaagauuuauaaaagauuuuaac

SEQ ID NO: 122090 - RNA, 32 nt, Homo Sapiens
gaauguuagacauucagaaauuacuguuucug

SEQ ID NO: 122091 - RNA, 32 nt, Homo Sapiens
cguuggauaaaacuguauugugauaucuauuu

SEQ ID NO: 122092 - RNA, 32 nt, Homo Sapiens
ucacgugacccggcgucauuggcucgcucgcg

SEQ ID NO: 122093 - RNA, 32 nt, Homo Sapiens
agguaaucugcacuguuuguuugauggauaaa

SEQ ID NO: 122094 - RNA, 32 nt, Homo Sapiens
gaaguuaaaaauuuugaaaagucucaguccug

SEQ ID NO: 122095 - RNA, 32 nt, Homo Sapiens
aggaggugcagggccuggccagagcgggccug

SEQ ID NO: 122096 - RNA, 32 nt, Homo Sapiens
ugggagguggaagcagaggcccugcccccacc

SEQ ID NO: 122097 - RNA, 27 nt, Homo Sapiens
aucuuguccuucucagucuccagaacu

SEQ ID NO: 122098 - RNA, 32 nt, Homo Sapiens
uucuggcucaggugaaauccaugcccuucugc

SEQ ID NO: 122099 - RNA, 32 nt, Homo Sapiens
gguuuggaccugggucacuagagcagagccuc

SEQ ID NO: 122100 - RNA, 32 nt, Homo Sapiens
aagcuugucuuugcucuuucugaugcucucaa

SEQ ID NO: 122101 - RNA, 32 nt, Homo Sapiens
uuuaauaaaaauuuauuuuuguaaaaaaaaaa

SEQ ID NO: 122102 - RNA, 32 nt, Homo Sapiens
ucugccuggaguagaacggcccgggcggaacc

SEQ ID NO: 122103 - RNA, 32 nt, Homo Sapiens
uuacaucauuuuuguaucuacaucuuuuuuca

SEQ ID NO: 122104 - RNA, 32 nt, Homo Sapiens
gcagguggcaaggccuggccgggccuuccuuc

SEQ ID NO: 122105 - RNA, 31 nt, Homo Sapiens
gcagcagccccaguucugccccguccaucuc

SEQ ID NO: 122106 - RNA, 32 nt, Homo Sapiens
augcauacaaauaaaaaacauaaaacaaaaau

SEQ ID NO: 122107 - RNA, 32 nt, Homo Sapiens
caguaguauaauguaugaauuuuguaaguaua

SEQ ID NO: 122108 - RNA, 32 nt, Homo Sapiens
cugcgccccucuccccgcaccccgaggcagag

SEQ ID NO: 122109 - RNA, 32 nt, Homo Sapiens
gaaaaaaauagauaaacuuaagcauauuaaaa

SEQ ID NO: 122110 - RNA, 32 nt, Homo Sapiens
ucuccuuugugugaauucauauauuauagcaa

SEQ ID NO: 122111 - RNA, 32 nt, Homo Sapiens
acuugcaaaauuuugcagaauuccuccuuucu

SEQ ID NO: 122112 - RNA, 32 nt, Homo Sapiens
uuuaaagcaaaauaaaguuuuuuaaauaaaug

SEQ ID NO: 122113 - RNA, 32 nt, Homo Sapiens
ggcggggaaggggaaggggaaugcagguggua

SEQ ID NO: 122114 - RNA, 32 nt, Homo Sapiens
cuuccuguuggcugucuggccuuggagcaggu

SEQ ID NO: 122115 - RNA, 32 nt, Homo Sapiens
augacucagguuaguggaccgaaugcucagcu

SEQ ID NO: 122116 - RNA, 32 nt, Homo Sapiens
ucauuccugagugagggguucagacacccagu

SEQ ID NO: 122117 - RNA, 32 nt, Homo Sapiens
gacacacaugucugaagacuuauuuucaaaga

SEQ ID NO: 122118 - RNA, 32 nt, Homo Sapiens
ugacuuuuacacacauucacacaagaaaaaaa

SEQ ID NO: 122119 - RNA, 32 nt, Homo Sapiens
uaguauggaaaauggauggcaguagaauaaag

SEQ ID NO: 122120 - RNA, 32 nt, Homo Sapiens
cuggaccccacuugcuccagcuuugcacaugg

SEQ ID NO: 122121 - RNA, 32 nt, Homo Sapiens
uguccuguagcccagugcggcuccacagcaug

SEQ ID NO: 122122 - RNA, 32 nt, Homo Sapiens
aauaaguuugacuuguguuuuaucuuaaccac

SEQ ID NO: 122123 - RNA, 32 nt, Homo Sapiens
uuccacagacuuuuugcugaggacuugagagc

SEQ ID NO: 122124 - RNA, 32 nt, Homo Sapiens
cccaugcucgggcuggacuccagugugacuuu

SEQ ID NO: 122125 - RNA, 32 nt, Homo Sapiens
uuacccaggaugcagcaggugugugcagguau

SEQ ID NO: 122126 - RNA, 32 nt, Homo Sapiens
cuugacuacuaaaaacgucuccauggcggggg

SEQ ID NO: 122127 - RNA, 32 nt, Homo Sapiens
gagugacuugugucuauugaaaguauauccgu

SEQ ID NO: 122128 - RNA, 32 nt, Homo Sapiens
auacuauguaaaauaucuuccaaaaugcuuuu

SEQ ID NO: 122129 - RNA, 32 nt, Homo Sapiens
uguuuuuaaaagacaaaaacccaacucuuugu

SEQ ID NO: 122130 - RNA, 32 nt, Homo Sapiens
aaauaauaguguuccugcagggaugucugaag

SEQ ID NO: 122131 - RNA, 32 nt, Homo Sapiens
ccuaguuccuuccacaucccuacaacucggac

SEQ ID NO: 122132 - RNA, 32 nt, Homo Sapiens
uccuuuguuuuguguuucagucuuaaaacuuu

SEQ ID NO: 122133 - RNA, 32 nt, Homo Sapiens
ccucucccauucagcaaucaaccagacuaagg

SEQ ID NO: 122134 - RNA, 32 nt, Homo Sapiens
ugagugaaucauguuaaagcugucugagucua

SEQ ID NO: 122135 - RNA, 32 nt, Homo Sapiens
gcagcgcgcgcccuuggaugccgucccgcagc

SEQ ID NO: 122136 - RNA, 32 nt, Homo Sapiens
uccuggagugggaguggggaaugccuucuaug

SEQ ID NO: 122137 - RNA, 32 nt, Homo Sapiens
acuggagcaaaggggacucuuguuauguuuua

SEQ ID NO: 122138 - RNA, 32 nt, Homo Sapiens
uagucgugacuucauuucuaaaacagagccug

SEQ ID NO: 122139 - RNA, 32 nt, Homo Sapiens
gcaagcaagcgcgggcggcauccgcagucucc

SEQ ID NO: 122140 - RNA, 32 nt, Homo Sapiens
aaaaacuuuuuggcagggcacaguggcucacg

SEQ ID NO: 122141 - RNA, 30 nt, Homo Sapiens
gcgggucuuagucacggcggcaggggcuuu

SEQ ID NO: 122142 - RNA, 32 nt, Homo Sapiens
agagcccggcgccgcacuagcgcuuaucuccg

SEQ ID NO: 122143 - RNA, 32 nt, Homo Sapiens
acccuagauugugaaggacccacuguucuucu

SEQ ID NO: 122144 - RNA, 32 nt, Homo Sapiens
uccgcgggaaagggcuucucugucguucagcc

SEQ ID NO: 122145 - RNA, 31 nt, Homo Sapiens
auuuaguuguguuuucucagagccgccacaa

SEQ ID NO: 122146 - RNA, 30 nt, Homo Sapiens
aacccgggagguggagauugcagugagccc

SEQ ID NO: 122147 - RNA, 32 nt, Homo Sapiens
ugcccuuucugcuacaugcaaauggccucuaa

SEQ ID NO: 122148 - RNA, 32 nt, Homo Sapiens
caacuuggaucuuuagaccucaucuauaaauu

SEQ ID NO: 122149 - RNA, 32 nt, Homo Sapiens
ugcaauggcuauauggcaagaaagcugguaaa

SEQ ID NO: 122150 - RNA, 32 nt, Homo Sapiens
gugggagucucgcuccuccaccaguuuauugc

SEQ ID NO: 122151 - RNA, 32 nt, Homo Sapiens
cggcccgcccaaggcguccgggacccgcccag

SEQ ID NO: 122152 - RNA, 32 nt, Homo Sapiens
cucugucagacaccuguccuuccuucuacaga

SEQ ID NO: 122153 - RNA, 32 nt, Homo Sapiens
cagcugcucccgggugcccccgccgccgcccu

SEQ ID NO: 122154 - RNA, 32 nt, Homo Sapiens
uaaugaaaucauaguauuuuguguagcuucuc

SEQ ID NO: 122155 - RNA, 32 nt, Homo Sapiens
gacauagcaaugggugagucuuucucacccuc

SEQ ID NO: 122156 - RNA, 32 nt, Homo Sapiens
ugguuugucaucccugcccuagcccaaucuga

SEQ ID NO: 122157 - RNA, 32 nt, Homo Sapiens
uacugcggguccugggucuucaccugcggagc

SEQ ID NO: 122158 - RNA, 32 nt, Homo Sapiens
agaaucagaugaugaaaaaccuuuggaugaug

SEQ ID NO: 122159 - RNA, 32 nt, Homo Sapiens
caucucaacucccaguucccagcccucuaagc

SEQ ID NO: 122160 - RNA, 32 nt, Homo Sapiens
ccccuccuccaguccuucuccucaguucuugu

SEQ ID NO: 122161 - RNA, 32 nt, Homo Sapiens
uggcuucucuauugaauucuuaaaggggggug

SEQ ID NO: 122162 - RNA, 32 nt, Homo Sapiens
aacaggagauauugaggauauuuagaguuacu

SEQ ID NO: 122163 - RNA, 32 nt, Homo Sapiens
aaaacuccuuguuauccuuguuuccuuagcuu

SEQ ID NO: 122164 - RNA, 32 nt, Homo Sapiens
uguggaggcgacggagcagggggccagugggg

SEQ ID NO: 122165 - RNA, 32 nt, Homo Sapiens
gaggugaaaaacaaacaaaaaaaaccaaaaac

SEQ ID NO: 122166 - RNA, 32 nt, Homo Sapiens
uuguuuaaagcugcauucaacgucaaaauuac

SEQ ID NO: 122167 - RNA, 32 nt, Homo Sapiens
aaauuauucuuguuuaacaauaugcguuuauu

SEQ ID NO: 122168 - RNA, 32 nt, Homo Sapiens
cuuggcgcggcgggggcgccccgggggugccc

SEQ ID NO: 122169 - RNA, 32 nt, Homo Sapiens
aauuucucugguucuuggcagcuccauuuggc

SEQ ID NO: 122170 - RNA, 32 nt, Homo Sapiens
ccggcgccaugugagggggcucgggggccgcg

SEQ ID NO: 122171 - RNA, 32 nt, Homo Sapiens
cagcuggagacgguucugguuucaacuacggu

SEQ ID NO: 122172 - RNA, 32 nt, Homo Sapiens
guccuuuccauagcccuuuuuggaccuuuaga

SEQ ID NO: 122173 - RNA, 32 nt, Homo Sapiens
ucagagagcaccggauguaucaucucaaacac

SEQ ID NO: 122174 - RNA, 32 nt, Homo Sapiens
ucucauguuuggaagcgcuacugcgggguugu

SEQ ID NO: 122175 - RNA, 31 nt, Homo Sapiens
cguggccucaauggucuugaguagcagggug

SEQ ID NO: 122176 - RNA, 32 nt, Homo Sapiens
gugccuggucucccggcccuagcgcccgccaa

SEQ ID NO: 122177 - RNA, 32 nt, Homo Sapiens
gugagugaagaaagcuaaguugugaacaagag

SEQ ID NO: 122178 - RNA, 32 nt, Homo Sapiens
cccaguucaaagaaacaaaaaguggaagcuau

SEQ ID NO: 122179 - RNA, 31 nt, Homo Sapiens
ugccagagauucaccaccuggggcccaggau

SEQ ID NO: 122180 - RNA, 32 nt, Homo Sapiens
cauguguguggcagcagggccaugguggggug

SEQ ID NO: 122181 - RNA, 32 nt, Homo Sapiens
gcaccuguuccacagcuaaguacagcccuagg

SEQ ID NO: 122182 - RNA, 32 nt, Homo Sapiens
ccgcgauccugccugcgcccucugcccaggac

SEQ ID NO: 122183 - RNA, 32 nt, Homo Sapiens
aacaaaauaaaauaaagcacaaugaaauguca

SEQ ID NO: 122184 - RNA, 32 nt, Homo Sapiens
gugccagcaccaggggcagagccccuuccagg

SEQ ID NO: 122185 - RNA, 32 nt, Homo Sapiens
augccugucauccaagcuacucaagagacuga

SEQ ID NO: 122186 - RNA, 32 nt, Homo Sapiens
gcgcccggcucaguacugcgcgcgcccugcgg

SEQ ID NO: 122187 - RNA, 32 nt, Homo Sapiens
cugaaucacaauguaaauauuacacaucaagc

SEQ ID NO: 122188 - RNA, 32 nt, Homo Sapiens
uugaaaacaauacauuaauauaccauaacacu

SEQ ID NO: 122189 - RNA, 32 nt, Homo Sapiens
agagaccaggccugcuggguguguacauaguu

SEQ ID NO: 122190 - RNA, 32 nt, Homo Sapiens
uuuauuuauuacaaaaucaaagacauggguga

SEQ ID NO: 122191 - RNA, 32 nt, Homo Sapiens
uuguggaaaaagauuuagcaggcuagaccauc

SEQ ID NO: 122192 - RNA, 32 nt, Homo Sapiens
ggcuugccuguggacccuccccggcucugggg

SEQ ID NO: 122193 - RNA, 32 nt, Homo Sapiens
cagauucauacacaaaauguaagauaauuuau

SEQ ID NO: 122194 - RNA, 32 nt, Homo Sapiens
ucauuacauaucugucucauucugccuuuuau

SEQ ID NO: 122195 - RNA, 32 nt, Homo Sapiens
uuaagauaauuuguauuuuugcacacugagau

SEQ ID NO: 122196 - RNA, 32 nt, Homo Sapiens
cuugggcugaaggaucgcuuugagaucugagg

SEQ ID NO: 122197 - RNA, 32 nt, Homo Sapiens
ugcaagcuccuuggcucccccggagggagcaa

SEQ ID NO: 122198 - RNA, 32 nt, Homo Sapiens
aguuaaaaacaaacauaggaaaugugaaaaua

SEQ ID NO: 122199 - RNA, 32 nt, Homo Sapiens
gcuuucacuuaagugucuggcccgcaauacug

SEQ ID NO: 122200 - RNA, 32 nt, Homo Sapiens
uuggagaaaauauuuguaaacuauguaucuga

SEQ ID NO: 122201 - RNA, 32 nt, Homo Sapiens
auagaagagugugucauuucuaugauaagcau

SEQ ID NO: 122202 - RNA, 32 nt, Homo Sapiens
cugcacucuauuucugugucugucuuuaauuc

SEQ ID NO: 122203 - RNA, 32 nt, Homo Sapiens
gcuuuugagagaacauagaucaauuauacuac

SEQ ID NO: 122204 - RNA, 32 nt, Homo Sapiens
cgcucggaggguccucgcccccggccugccua

SEQ ID NO: 122205 - RNA, 32 nt, Homo Sapiens
acaaggucaggagauagagaccauccuggcca

SEQ ID NO: 122206 - RNA, 32 nt, Homo Sapiens
uauaaguggagcaaacugacucuagggagaag

SEQ ID NO: 122207 - RNA, 32 nt, Homo Sapiens
uuccaugaccuccccuccccagcccaaugcca

SEQ ID NO: 122208 - RNA, 32 nt, Homo Sapiens
cggauucaacuaugagaagagaaguggcagca

SEQ ID NO: 122209 - RNA, 32 nt, Homo Sapiens
cacuuucugagaugcuuucuaaaaccaaccaa

SEQ ID NO: 122210 - RNA, 32 nt, Homo Sapiens
gcugcaggggagagggaagcagccgugcuguc

SEQ ID NO: 122211 - RNA, 32 nt, Homo Sapiens
aggagccagcagccuuguguccugggaucccc

SEQ ID NO: 122212 - RNA, 32 nt, Homo Sapiens
acgguggccgacacccgcagggacgcccgccg

SEQ ID NO: 122213 - RNA, 32 nt, Homo Sapiens
auuuggauuuaaggaagaaaucaauaaauaua

SEQ ID NO: 122214 - RNA, 32 nt, Homo Sapiens
auaaaugggaauggaaacguguguguuccucc

SEQ ID NO: 122215 - RNA, 32 nt, Homo Sapiens
cucguguguuucuuuucuuuuuuuucuuuuug

SEQ ID NO: 122216 - RNA, 32 nt, Homo Sapiens
gguguggccccgggcgggcggcaccgcgucca

SEQ ID NO: 122217 - RNA, 32 nt, Homo Sapiens
uaaagcuuugauguccagugcuauagaaucaa

SEQ ID NO: 122218 - RNA, 32 nt, Homo Sapiens
gcagcggggcgcaccaggccgaaggcucacgc

SEQ ID NO: 122219 - RNA, 30 nt, Homo Sapiens
aagcucuagguguugggggaaaggaaagaa

SEQ ID NO: 122220 - RNA, 32 nt, Homo Sapiens
ccacuggggguggaaugggguagggugggaua

SEQ ID NO: 122221 - RNA, 32 nt, Homo Sapiens
ggccucccccgggaacagcugugcuggacagu

SEQ ID NO: 122222 - RNA, 32 nt, Homo Sapiens
caagaguaucacgguuuaucacggcugcuaau

SEQ ID NO: 122223 - RNA, 32 nt, Homo Sapiens
uauaauguauaaugggaaauguuuggccaugc

SEQ ID NO: 122224 - RNA, 32 nt, Homo Sapiens
cuauuuuggccacaaacaaacauauucaacug

SEQ ID NO: 122225 - RNA, 32 nt, Homo Sapiens
caaauaaauauuauuaaaaauauagggccuua

SEQ ID NO: 122226 - RNA, 32 nt, Homo Sapiens
ucgcccagagacaaacuuaaggugaggagaaa

SEQ ID NO: 122227 - RNA, 32 nt, Homo Sapiens
gccgcaggaaggcagaauaaauccuugggagu

SEQ ID NO: 122228 - RNA, 32 nt, Homo Sapiens
gcggcauccucccgccgcccagcccccgcacg

SEQ ID NO: 122229 - RNA, 32 nt, Homo Sapiens
ugaaauauuuuuguuuauagaauugaagguuc

SEQ ID NO: 122230 - RNA, 32 nt, Homo Sapiens
cuccugcgggacaaagagcuccuguggggcuc

SEQ ID NO: 122231 - RNA, 32 nt, Homo Sapiens
augagagcuucauucagaagagucacaaaauc

SEQ ID NO: 122232 - RNA, 29 nt, Homo Sapiens
gauacaaaagguuuauauucagcaucuga

SEQ ID NO: 122233 - RNA, 32 nt, Homo Sapiens
aaaggcuuuacuauuuacuuaagacguguggu

SEQ ID NO: 122234 - RNA, 32 nt, Homo Sapiens
uacucuguuaccaugagaaaaguuuggguguc

SEQ ID NO: 122235 - RNA, 32 nt, Homo Sapiens
aucuguuuuuauauuucuguuaaaauauauga

SEQ ID NO: 122236 - RNA, 32 nt, Homo Sapiens
gcauauuuggaauuguuauacuuuguugcuga

SEQ ID NO: 122237 - RNA, 32 nt, Homo Sapiens
gggagcaggucucuggcagagaaggauguccg

SEQ ID NO: 122238 - RNA, 32 nt, Homo Sapiens
cuagaguuuccuugauucagacuuugaaugua

SEQ ID NO: 122239 - RNA, 32 nt, Homo Sapiens
guccccaaccgugucugucuggcacgugggug

SEQ ID NO: 122240 - RNA, 32 nt, Homo Sapiens
uggcucgagccucuccugcucagcaccauggc

SEQ ID NO: 122241 - RNA, 28 nt, Homo Sapiens
agggaagcugcaggaccaaggugaagau

SEQ ID NO: 122242 - RNA, 32 nt, Homo Sapiens
cguaucauaauuucuuuuugguaaauaugaga

SEQ ID NO: 122243 - RNA, 32 nt, Homo Sapiens
ugugcuuccuguaccaucuacuggaccgugag

SEQ ID NO: 122244 - RNA, 32 nt, Homo Sapiens
ccacuggaggggcuguggccaucagcucuggc

SEQ ID NO: 122245 - RNA, 32 nt, Homo Sapiens
uuuuguuuugguuuuugguuuuugggucaggg

SEQ ID NO: 122246 - RNA, 32 nt, Homo Sapiens
augaggccaccucagcccugacaccaaccccg

SEQ ID NO: 122247 - RNA, 32 nt, Homo Sapiens
uacuuuaaauguucugccaucauuucaccuga

SEQ ID NO: 122248 - RNA, 32 nt, Homo Sapiens
aggcagaagaacccuggccugagaagguuugg

SEQ ID NO: 122249 - RNA, 32 nt, Homo Sapiens
cgcgcagcaggaagggagcggcugccacggaa

SEQ ID NO: 122250 - RNA, 32 nt, Homo Sapiens
gggcucaucuaagcaugcuguugugugccagg

SEQ ID NO: 122251 - RNA, 32 nt, Homo Sapiens
acaaaaggcuugcgguauggaaaaacaaauuu

SEQ ID NO: 122252 - RNA, 32 nt, Homo Sapiens
acaguacaaaagauuauuaaaaauauucccaa

SEQ ID NO: 122253 - RNA, 32 nt, Homo Sapiens
uucauucuugcuuugugucccauuccaucucu

SEQ ID NO: 122254 - RNA, 32 nt, Homo Sapiens
ccuccuagcauuaguuuagaucaacucaagga

SEQ ID NO: 122255 - RNA, 32 nt, Homo Sapiens
accugcuuucccggcccggcugaggccaucau

SEQ ID NO: 122256 - RNA, 32 nt, Homo Sapiens
aagagcagaaaaauaugucuugguuuucauuu

SEQ ID NO: 122257 - RNA, 32 nt, Homo Sapiens
ugcaucuugaauuuucaagugaauucagaucu

SEQ ID NO: 122258 - RNA, 32 nt, Homo Sapiens
aaaaguaugaccuuuuuaaaucaaccuuauuu

SEQ ID NO: 122259 - RNA, 32 nt, Homo Sapiens
cuuccucccccgcuuccuccuagcccuguggg

SEQ ID NO: 122260 - RNA, 32 nt, Homo Sapiens
cuuccgaccgcgaagcccggcgcgagaagcga

SEQ ID NO: 122261 - RNA, 32 nt, Homo Sapiens
guuaggcuuuaaaauaaagcauguuauacaga

SEQ ID NO: 122262 - RNA, 32 nt, Homo Sapiens
ccagcccaacuuuucucccagagaguaucaug

SEQ ID NO: 122263 - RNA, 32 nt, Homo Sapiens
ggugagaauaauuaagacuacucuucaaacca

SEQ ID NO: 122264 - RNA, 32 nt, Homo Sapiens
aaaagucaggcaccccaccuuagaccucguau

SEQ ID NO: 122265 - RNA, 32 nt, Homo Sapiens
cccccagacguuuaucuucaccgacggggacg

SEQ ID NO: 122266 - RNA, 27 nt, Homo Sapiens
ugauccuccugcuucagccuccagagc

SEQ ID NO: 122267 - RNA, 32 nt, Homo Sapiens
uggugugcaguuauuuuaaaaacuacagauca

SEQ ID NO: 122268 - RNA, 32 nt, Homo Sapiens
aauuuagcuggguguaguggugcacaccugua

SEQ ID NO: 122269 - RNA, 32 nt, Homo Sapiens
cuggcacuguggcgagcccucaguggagccug

SEQ ID NO: 122270 - RNA, 32 nt, Homo Sapiens
uucagccaaggggacggucuggacaggcagcu

SEQ ID NO: 122271 - RNA, 32 nt, Homo Sapiens
ucagcagccucagcgucuccccggccaugugu

SEQ ID NO: 122272 - RNA, 32 nt, Homo Sapiens
ccuccagcgcuggguuugucgagugagagaga

SEQ ID NO: 122273 - RNA, 31 nt, Homo Sapiens
aagugguguaacauguaagcugagcacggua

SEQ ID NO: 122274 - RNA, 32 nt, Homo Sapiens
uauaaagacaccuuucccgauaacccauacua

SEQ ID NO: 122275 - RNA, 32 nt, Homo Sapiens
uacaauauucacaaaauucuuauguucucuua

SEQ ID NO: 122276 - RNA, 32 nt, Homo Sapiens
cuaguaaaaguuuuuuuuuuuaaaccugcuag

SEQ ID NO: 122277 - RNA, 32 nt, Homo Sapiens
aacaaaagaacaauaaccugaagggaccauga

SEQ ID NO: 122278 - RNA, 32 nt, Homo Sapiens
aggucucucugcagaggcccaggccugggcac

SEQ ID NO: 122279 - RNA, 32 nt, Homo Sapiens
gaucgcucaagccccggaguuggagaccagcc

SEQ ID NO: 122280 - RNA, 32 nt, Homo Sapiens
cugaaguaguggguuuugauugaguugacugu

SEQ ID NO: 122281 - RNA, 31 nt, Homo Sapiens
gcggugauggugguuagcaagaugaacaaag

SEQ ID NO: 122282 - RNA, 32 nt, Homo Sapiens
gugacauccuuccccuuccacccugcucccug

SEQ ID NO: 122283 - RNA, 32 nt, Homo Sapiens
cugcagaugcucugugugugugugugugugug

SEQ ID NO: 122284 - RNA, 32 nt, Homo Sapiens
cccugucuuuauccuaguuccacaccuuggug

SEQ ID NO: 122285 - RNA, 32 nt, Homo Sapiens
ggagggggccgagguggcagggggcuggcaug

SEQ ID NO: 122286 - RNA, 32 nt, Homo Sapiens
cccgauuuuaaugugauauuuaggcuuucauu

SEQ ID NO: 122287 - RNA, 32 nt, Homo Sapiens
ucaaacuuuccuccuuuccccguuuucugggg

SEQ ID NO: 122288 - RNA, 32 nt, Homo Sapiens
gaaguucagauauauugaaacuuucuuaggac

SEQ ID NO: 122289 - RNA, 32 nt, Homo Sapiens
aacaucucucucucuuuuuuuaaaauacaagg

SEQ ID NO: 122290 - RNA, 32 nt, Homo Sapiens
aaugacaugaauggaggguaguccucaguaaa

SEQ ID NO: 122291 - RNA, 32 nt, Homo Sapiens
uugaagagcuacgaaaucccuucuggugaugu

SEQ ID NO: 122292 - RNA, 32 nt, Homo Sapiens
gagaucggugcuaccaaggaagagagcacaca

SEQ ID NO: 122293 - RNA, 32 nt, Homo Sapiens
ccuuguuggggaugcuauacagaaagcccagg

SEQ ID NO: 122294 - RNA, 32 nt, Homo Sapiens
uuggacacaauuucacgaaguauacaaagcaa

SEQ ID NO: 122295 - RNA, 32 nt, Homo Sapiens
cccccgucuaaaugccagaaccagcggguggc

SEQ ID NO: 122296 - RNA, 32 nt, Homo Sapiens
cuuuaaaacgacccucuuucagguggauucag

SEQ ID NO: 122297 - RNA, 32 nt, Homo Sapiens
cuggagaucacaaaugcauuuauucuuuuuca

SEQ ID NO: 122298 - RNA, 32 nt, Homo Sapiens
caaugccauucucuccuucccaggcuacugau

SEQ ID NO: 122299 - RNA, 32 nt, Homo Sapiens
agugauguguuggaucacugggcugacaugga

SEQ ID NO: 122300 - RNA, 32 nt, Homo Sapiens
agaucguuuuuaaagcuuaaauuuaugaacca

SEQ ID NO: 122301 - RNA, 32 nt, Homo Sapiens
ugugaguguuggaaaaaccaaaaacugcauug

SEQ ID NO: 122302 - RNA, 30 nt, Homo Sapiens
gagccuuuggacugcuguauggacaacaua

SEQ ID NO: 122303 - RNA, 32 nt, Homo Sapiens
ucagaucuaaacuuauauucuugcuggcuaau

SEQ ID NO: 122304 - RNA, 32 nt, Homo Sapiens
ggccugccuuuugccuggcccaggcucacccc

SEQ ID NO: 122305 - RNA, 32 nt, Homo Sapiens
aggggugaaacacuucagaagcaccgugucug

SEQ ID NO: 122306 - RNA, 32 nt, Homo Sapiens
cuuaucuuuuuaaaacuaaccaaaaaaggcug

SEQ ID NO: 122307 - RNA, 32 nt, Homo Sapiens
uacauauuuuuccuuccaaugcagaggaaggc

SEQ ID NO: 122308 - RNA, 32 nt, Homo Sapiens
gauuguuucuucauucuucugacagcccccau

SEQ ID NO: 122309 - RNA, 32 nt, Homo Sapiens
gaaagaaggggagagggcucccggcagcacca

SEQ ID NO: 122310 - RNA, 32 nt, Homo Sapiens
ucccugggcccggcccuggacccgucaggugc

SEQ ID NO: 122311 - RNA, 32 nt, Homo Sapiens
cuccgcgccgccugggucucuaccucauccgu

SEQ ID NO: 122312 - RNA, 32 nt, Homo Sapiens
uaaauauguacaagugcaucacugguacaauu

SEQ ID NO: 122313 - RNA, 32 nt, Homo Sapiens
cccuccuagcacaaggagugcccgccuugagu

SEQ ID NO: 122314 - RNA, 32 nt, Homo Sapiens
caccccagcugcagccucuccucucccccacc

SEQ ID NO: 122315 - RNA, 32 nt, Homo Sapiens
gugacaguauuggugaggaaugaaauugcagc

SEQ ID NO: 122316 - RNA, 32 nt, Homo Sapiens
aaccaaaaugugccuuuuuuuuuuuuuuuuug

SEQ ID NO: 122317 - RNA, 32 nt, Homo Sapiens
aucaccuucugggcuaaaaauucuuuggcuaa

SEQ ID NO: 122318 - RNA, 32 nt, Homo Sapiens
gcaucaggccccagccuuggccugaaaccuca

SEQ ID NO: 122319 - RNA, 32 nt, Homo Sapiens
cacucccuaccuuggccugguguccuugagac

SEQ ID NO: 122320 - RNA, 32 nt, Homo Sapiens
aguugugcacaaaaauuaggucaugccuucag

SEQ ID NO: 122321 - RNA, 32 nt, Homo Sapiens
aagacaaaaagucaaaacaaaaauauuuucua

SEQ ID NO: 122322 - RNA, 32 nt, Homo Sapiens
ucuuuaaacaauuaaaguuuuccauuuuauaa

SEQ ID NO: 122323 - RNA, 32 nt, Homo Sapiens
augcuguguacaaauagaauuauuacuucuag

SEQ ID NO: 122324 - RNA, 32 nt, Homo Sapiens
uguuaggaugccucagccugaacucuucacug

SEQ ID NO: 122325 - RNA, 32 nt, Homo Sapiens
auucuaacccucaaugugaugguauuaggaga

SEQ ID NO: 122326 - RNA, 32 nt, Homo Sapiens
ucccccuauccuggaagucaguggggagaggu

SEQ ID NO: 122327 - RNA, 32 nt, Homo Sapiens
caggccucugccugcuuucucagacccucauc

SEQ ID NO: 122328 - RNA, 29 nt, Homo Sapiens
uguguuucuaucccguguacagagagauc

SEQ ID NO: 122329 - RNA, 32 nt, Homo Sapiens
acggaagaucuuuuauuuucuauuauuuauaa

SEQ ID NO: 122330 - RNA, 32 nt, Homo Sapiens
gucuccaggccucccaggauucucagcugcgc

SEQ ID NO: 122331 - RNA, 32 nt, Homo Sapiens
ggaguccaaacgcaguacagcagaagaguuaa

SEQ ID NO: 122332 - RNA, 32 nt, Homo Sapiens
gcccagagccgggugcugcugcuccugcugcu

SEQ ID NO: 122333 - RNA, 32 nt, Homo Sapiens
ccuaaaaaugugccaggcaugcucuguuugag

SEQ ID NO: 122334 - RNA, 32 nt, Homo Sapiens
gggugggugggaaccccggggaggcgacggag

SEQ ID NO: 122335 - RNA, 32 nt, Homo Sapiens
uuuaauuuuuaauauuauaagcuuacauuugc

SEQ ID NO: 122336 - RNA, 32 nt, Homo Sapiens
acaugacguugaucauuugggcaaauuuuacg

SEQ ID NO: 122337 - RNA, 32 nt, Homo Sapiens
uggggauugguaaagauugugaguaaaugaca

SEQ ID NO: 122338 - RNA, 32 nt, Homo Sapiens
agggcuggaguucuaggcaaccuugagcuaag

SEQ ID NO: 122339 - RNA, 32 nt, Homo Sapiens
uggacgagaaacgaucugaucuucuuaaacuu

SEQ ID NO: 122340 - RNA, 32 nt, Homo Sapiens
aaauacuuuuacauuuaaggagauaaaggaug

SEQ ID NO: 122341 - RNA, 32 nt, Homo Sapiens
aaaaaaacaacuguuucuuuucuuauuccacu

SEQ ID NO: 122342 - RNA, 32 nt, Homo Sapiens
augagccucaaauucagagagcuuaagcaacc

SEQ ID NO: 122343 - RNA, 32 nt, Homo Sapiens
aggaagcugggcguccucugggccccccaaca

SEQ ID NO: 122344 - RNA, 32 nt, Homo Sapiens
uacgggcccacuuuugaauuucagugaauacc

SEQ ID NO: 122345 - RNA, 27 nt, Homo Sapiens
caaaaucauuaauuaugaguagcauga

SEQ ID NO: 122346 - RNA, 32 nt, Homo Sapiens
gcugcucguccggccccggcccggaaccgggc

SEQ ID NO: 122347 - RNA, 32 nt, Homo Sapiens
cugcuccguggcgcuaguccagcacgcccagg

SEQ ID NO: 122348 - RNA, 32 nt, Homo Sapiens
augcuuuaaaaugucuguguaggagagaagug

SEQ ID NO: 122349 - RNA, 32 nt, Homo Sapiens
aaacagcugugcccucuuugccuuuuugcuga

SEQ ID NO: 122350 - RNA, 32 nt, Homo Sapiens
uucuagcuacucuggaggcugaggcaggagaa

SEQ ID NO: 122351 - RNA, 32 nt, Homo Sapiens
uccuagcuauucuggaggcugaggcaggagaa

SEQ ID NO: 122352 - RNA, 31 nt, Homo Sapiens
gcaaggcugccggguaguucaagaccaaagu

SEQ ID NO: 122353 - RNA, 32 nt, Homo Sapiens
ugggggugaacaugugcaggaacagcuagagg

SEQ ID NO: 122354 - RNA, 31 nt, Homo Sapiens
ugcagaucuugguguuaauagaccaaauaaa

SEQ ID NO: 122355 - RNA, 32 nt, Homo Sapiens
gaguucucauuuuuuuaaccuguuauagauuu

SEQ ID NO: 122356 - RNA, 32 nt, Homo Sapiens
auauauuuaaguguacuggaucuggaauggug

SEQ ID NO: 122357 - RNA, 32 nt, Homo Sapiens
gguguucacacuucuucaguaaugucugaacu

SEQ ID NO: 122358 - RNA, 32 nt, Homo Sapiens
ggaaaccccacccccacccccaccuugcccca

SEQ ID NO: 122359 - RNA, 32 nt, Homo Sapiens
ccgugugcgccggcuccgcggaagaugccgga

SEQ ID NO: 122360 - RNA, 32 nt, Homo Sapiens
cucccgcccgcacacagcggcgcgcucauccu

SEQ ID NO: 122361 - RNA, 32 nt, Homo Sapiens
uucucugauauuaagcaggaaggcauuuuaau

SEQ ID NO: 122362 - RNA, 32 nt, Homo Sapiens
accucauaacugugauuaauaucaauaaaaag

SEQ ID NO: 122363 - RNA, 32 nt, Homo Sapiens
gaccugugggccggugaugcgggcacugcaga

SEQ ID NO: 122364 - RNA, 32 nt, Homo Sapiens
cuacucaguuauaaaaagaaaugaaauaaugu

SEQ ID NO: 122365 - RNA, 32 nt, Homo Sapiens
gugcuucucccucugccacgcuuaggcugggg

SEQ ID NO: 122366 - RNA, 32 nt, Homo Sapiens
uacuaaugaaaauuauucucuagcauuuucau

SEQ ID NO: 122367 - RNA, 32 nt, Homo Sapiens
acaaacaaaaacucaagauccucauaguagac

SEQ ID NO: 122368 - RNA, 32 nt, Homo Sapiens
caugaugaaaaauuauaguagcuuauaagagg

SEQ ID NO: 122369 - RNA, 32 nt, Homo Sapiens
uacacaaguaaaaauggaggaaaugucuugaa

SEQ ID NO: 122370 - RNA, 32 nt, Homo Sapiens
ccguccccggcacacgcgcagccccggccucu

SEQ ID NO: 122371 - RNA, 32 nt, Homo Sapiens
cgccuccucucccccaucccagcccucagcau

SEQ ID NO: 122372 - RNA, 32 nt, Homo Sapiens
cagauauagagguuaugucauuuuauaaagac

SEQ ID NO: 122373 - RNA, 32 nt, Homo Sapiens
acugggagagggagacaaaaccucauggcaau

SEQ ID NO: 122374 - RNA, 32 nt, Homo Sapiens
ggcgcagccgcucagcugcggaccgggggcgu

SEQ ID NO: 122375 - RNA, 32 nt, Homo Sapiens
uuuuuuuuuuuuuguauagaaacagauccauu

SEQ ID NO: 122376 - RNA, 32 nt, Homo Sapiens
gacacugcccuggcccuccauacucugcuccc

SEQ ID NO: 122377 - RNA, 32 nt, Homo Sapiens
cagguugccaaugguuugugacugugagaaaa

SEQ ID NO: 122378 - RNA, 32 nt, Homo Sapiens
auccagacugguuauacguaccuucaguccuu

SEQ ID NO: 122379 - RNA, 32 nt, Homo Sapiens
acugaagacaccugggacccgcagguggggug

SEQ ID NO: 122380 - RNA, 32 nt, Homo Sapiens
cccggggaucucugcuggccccauccuacauc

SEQ ID NO: 122381 - RNA, 32 nt, Homo Sapiens
cuggacugccccuuccucccccaucgcccgcc

SEQ ID NO: 122382 - RNA, 32 nt, Homo Sapiens
gccggcaccugggggcacacacaugcaggcgg

SEQ ID NO: 122383 - RNA, 29 nt, Homo Sapiens
uggcagguaaugagccggacgaggggagc

SEQ ID NO: 122384 - RNA, 32 nt, Homo Sapiens
ugcuuuuccagaauaaagaaguuauuaauaaa

SEQ ID NO: 122385 - RNA, 32 nt, Homo Sapiens
gccugguuaauuuuuguauuuauaguggagau

SEQ ID NO: 122386 - RNA, 32 nt, Homo Sapiens
aagacauccaacauggggcaucucccagagca

SEQ ID NO: 122387 - RNA, 32 nt, Homo Sapiens
aagucacuuucagauagcacuguggguggcug

SEQ ID NO: 122388 - RNA, 32 nt, Homo Sapiens
uacaucugugguuuuuaaucugugcuagacuu

SEQ ID NO: 122389 - RNA, 32 nt, Homo Sapiens
cuccgcuccccucccccgcauccgcgacccuc

SEQ ID NO: 122390 - RNA, 32 nt, Homo Sapiens
acaacaguuguauucagccugaagguccucgc

SEQ ID NO: 122391 - RNA, 32 nt, Homo Sapiens
agaugaguauuugcagagcggugcuggaaucc

SEQ ID NO: 122392 - RNA, 32 nt, Homo Sapiens
aauaucuauuggguuccccccuccccccaccu

SEQ ID NO: 122393 - RNA, 32 nt, Homo Sapiens
ccaugucagaucuuuuugguaaaagaguuaau

SEQ ID NO: 122394 - RNA, 32 nt, Homo Sapiens
ccugcuuuugcauaaugcaaucaaaaauaugu

SEQ ID NO: 122395 - RNA, 31 nt, Homo Sapiens
gcuagagaaaagaaaauguuacuuagaaaau

SEQ ID NO: 122396 - RNA, 29 nt, Homo Sapiens
ggcuguuggggacagugcgugauuucuca

SEQ ID NO: 122397 - RNA, 32 nt, Homo Sapiens
ccuccccaggacuuggucuuuuuucugggucu

SEQ ID NO: 122398 - RNA, 32 nt, Homo Sapiens
ccaccccuccagaaccucuggaugucaacaga

SEQ ID NO: 122399 - RNA, 30 nt, Homo Sapiens
ggcgggggagguggaggugcgaguauaaau

SEQ ID NO: 122400 - RNA, 32 nt, Homo Sapiens
guguguuagacuccucccuaguucugugcucu

SEQ ID NO: 122401 - RNA, 32 nt, Homo Sapiens
cuagugacuuugauucccauggaggggacugu

SEQ ID NO: 122402 - RNA, 32 nt, Homo Sapiens
aacuuguaauaaauuuagacagaaauuuuaug

SEQ ID NO: 122403 - RNA, 32 nt, Homo Sapiens
ccagguaguuuaggaauaaaauuggguuguau

SEQ ID NO: 122404 - RNA, 32 nt, Homo Sapiens
cgaacacacgcgagaagagcaaagaaguuaaa

SEQ ID NO: 122405 - RNA, 32 nt, Homo Sapiens
aauuacgauaaggaagaaacagaagagagaag

SEQ ID NO: 122406 - RNA, 32 nt, Homo Sapiens
ggccguccucuguccguaccgcccccggagcc

SEQ ID NO: 122407 - RNA, 32 nt, Homo Sapiens
ccccacuccccucccucuaacagcaggcugug

SEQ ID NO: 122408 - RNA, 32 nt, Homo Sapiens
cucccuuuucuccacacccacacgccucccgc

SEQ ID NO: 122409 - RNA, 32 nt, Homo Sapiens
gcugaaacugaacaucuccuggguucuucaug

SEQ ID NO: 122410 - RNA, 32 nt, Homo Sapiens
uccagaaauuacugaggccaguggugaaguga

SEQ ID NO: 122411 - RNA, 32 nt, Homo Sapiens
uggcuugguucgagauaggagcuuuucugugu

SEQ ID NO: 122412 - RNA, 32 nt, Homo Sapiens
guggccagggaccccugggucccccaggccug

SEQ ID NO: 122413 - RNA, 32 nt, Homo Sapiens
ggcguggaggggcuucccggacaccgcccacc

SEQ ID NO: 122414 - RNA, 32 nt, Homo Sapiens
uggaaguguugccgccucucgguuucgcucuc

SEQ ID NO: 122415 - RNA, 32 nt, Homo Sapiens
ggaaaaacagagaaacuguuccaauuaaagau

SEQ ID NO: 122416 - RNA, 32 nt, Homo Sapiens
aauuacugccuugccauucugccccuggaccc

SEQ ID NO: 122417 - RNA, 32 nt, Homo Sapiens
cggugauagauauaaagaaaggaaaagaucuc

SEQ ID NO: 122418 - RNA, 32 nt, Homo Sapiens
aauauaauuggaaaacguggcuauguggagga

SEQ ID NO: 122419 - RNA, 32 nt, Homo Sapiens
ugggaagacucuccuuucuuuaucucuaucuc

SEQ ID NO: 122420 - RNA, 32 nt, Homo Sapiens
aaugucaguauuaucugacaucuuucuuuuca

SEQ ID NO: 122421 - RNA, 32 nt, Homo Sapiens
gucugucccaggccgacccaagggagugucag

SEQ ID NO: 122422 - RNA, 32 nt, Homo Sapiens
uucggggagacggccgugcucgacgccuucua

SEQ ID NO: 122423 - RNA, 32 nt, Homo Sapiens
ggcaucucauuucgccuacaguagaaggaaaa

SEQ ID NO: 122424 - RNA, 32 nt, Homo Sapiens
aggcccugccccccagccccacccacucauga

SEQ ID NO: 122425 - RNA, 32 nt, Homo Sapiens
caaauaaacuaaagccuggauuugauauuaca

SEQ ID NO: 122426 - RNA, 32 nt, Homo Sapiens
cggagcggggccugcaugggcgggucuguggg

SEQ ID NO: 122427 - RNA, 32 nt, Homo Sapiens
uggagggcaucugucugccaucgcccgcugcc

SEQ ID NO: 122428 - RNA, 32 nt, Homo Sapiens
uuuuaauaaaaauuauuaagccaaugaaccca

SEQ ID NO: 122429 - RNA, 32 nt, Homo Sapiens
gggccucgccuggcugcagccugcgccaccgc

SEQ ID NO: 122430 - RNA, 32 nt, Homo Sapiens
gugaaagaacuaauguucuccucagcugaaau

SEQ ID NO: 122431 - RNA, 32 nt, Homo Sapiens
agguaaggccugaaaaaguaaaauucaaucuu

SEQ ID NO: 122432 - RNA, 32 nt, Homo Sapiens
gccaguuugcuuaguucucacugucuccuggu

SEQ ID NO: 122433 - RNA, 32 nt, Homo Sapiens
cccggcccgggcugcguacacccuugcccugc

SEQ ID NO: 122434 - RNA, 32 nt, Homo Sapiens
ggagucugugugcuggugcaaggucugggaca

SEQ ID NO: 122435 - RNA, 32 nt, Homo Sapiens
ugcagggaaugcggaaaggccuuuuuccagaa

SEQ ID NO: 122436 - RNA, 32 nt, Homo Sapiens
ugugucauuuuuuuuucuuuuuguaauuauuu

SEQ ID NO: 122437 - RNA, 32 nt, Homo Sapiens
cuuguugcuauggaacaugaaacuguguguca

SEQ ID NO: 122438 - RNA, 28 nt, Homo Sapiens
gaucccuuggggccgccggcggcgaggc

SEQ ID NO: 122439 - RNA, 32 nt, Homo Sapiens
guaaauacaaaaugcuucuuccaauuagucuc

SEQ ID NO: 122440 - RNA, 32 nt, Homo Sapiens
uguguaaggggaggaaagccaccuugacagcc

SEQ ID NO: 122441 - RNA, 31 nt, Homo Sapiens
guuaugugaaacacuuugccgcaggccgccu

SEQ ID NO: 122442 - RNA, 32 nt, Homo Sapiens
uuccuucauuuucucugauuguuuuguuuuag

SEQ ID NO: 122443 - RNA, 32 nt, Homo Sapiens
gcuuucaccagcugcagggucugcuuuuacuu

SEQ ID NO: 122444 - RNA, 32 nt, Homo Sapiens
aagucuaaucugaaucauaaaaacagagucac

SEQ ID NO: 122445 - RNA, 32 nt, Homo Sapiens
cucgcggggggaggagccaggggcccaauccg

SEQ ID NO: 122446 - RNA, 32 nt, Homo Sapiens
ugcauauauaugauuguuuuucuuauaacuuu

SEQ ID NO: 122447 - RNA, 32 nt, Homo Sapiens
agcagaggaauauugucagugccaaguaaugg

SEQ ID NO: 122448 - RNA, 32 nt, Homo Sapiens
cauuuuccagggugggugggagugggcugagg

SEQ ID NO: 122449 - RNA, 32 nt, Homo Sapiens
acgguucagucaccuuaaccguuauuauucac

SEQ ID NO: 122450 - RNA, 32 nt, Homo Sapiens
gugagaugagccaacagcaccggauccacaga

SEQ ID NO: 122451 - RNA, 32 nt, Homo Sapiens
gucgaaucuuccaagaggcucuugcaaagacc

SEQ ID NO: 122452 - RNA, 32 nt, Homo Sapiens
gcuuauuuuuugauuuuuugcagagaugaggu

SEQ ID NO: 122453 - RNA, 32 nt, Homo Sapiens
aagccccccacccaaguguggagcccugcuca

SEQ ID NO: 122454 - RNA, 32 nt, Homo Sapiens
agggguuccagcugcacgucccaggcucucca

SEQ ID NO: 122455 - RNA, 32 nt, Homo Sapiens
acucuguguagcuguauauaacuauuaauuuc

SEQ ID NO: 122456 - RNA, 32 nt, Homo Sapiens
agcugaaucugugccuacgaaugcaaucaaag

SEQ ID NO: 122457 - RNA, 32 nt, Homo Sapiens
cugcaucuuauaaugguaaccaauuaagcuug

SEQ ID NO: 122458 - RNA, 32 nt, Homo Sapiens
caccucuuuccaccaugauugccuccccuugc

SEQ ID NO: 122459 - RNA, 32 nt, Homo Sapiens
accguggccguggagcagucguggugaaaccg

SEQ ID NO: 122460 - RNA, 32 nt, Homo Sapiens
uuguaaugaugaugaagauguugcaccauugu

SEQ ID NO: 122461 - RNA, 32 nt, Homo Sapiens
aacuuccaaacacaaauucauacagagaaguu

SEQ ID NO: 122462 - RNA, 32 nt, Homo Sapiens
agccggcaggagaggagaacgauguuuaacuc

SEQ ID NO: 122463 - RNA, 32 nt, Homo Sapiens
cucccuacgacaauuugcugccccuccccaaa

SEQ ID NO: 122464 - RNA, 32 nt, Homo Sapiens
caaggugaggcaauugauugaguauauuuccc

SEQ ID NO: 122465 - RNA, 32 nt, Homo Sapiens
ccugcucuaguggcucuugcugcugugcccuc

SEQ ID NO: 122466 - RNA, 32 nt, Homo Sapiens
cacaauuuuguuuugaaauguauaaagaacau

SEQ ID NO: 122467 - RNA, 32 nt, Homo Sapiens
acucugugcgagcuucuuucuguguauauauu

SEQ ID NO: 122468 - RNA, 32 nt, Homo Sapiens
gccgggucucaacaacaucgugcgaggagaca

SEQ ID NO: 122469 - RNA, 32 nt, Homo Sapiens
gaccagaaaaagacucaggaauacuggccuug

SEQ ID NO: 122470 - RNA, 32 nt, Homo Sapiens
cuggcuggccuuaaggcuuccacguuggggga

SEQ ID NO: 122471 - RNA, 32 nt, Homo Sapiens
uaagcacauuuugaaacaaacaauaugcacuu

SEQ ID NO: 122472 - RNA, 32 nt, Homo Sapiens
ugcaggagugaugcggccggcuuccguaccuc

SEQ ID NO: 122473 - RNA, 32 nt, Homo Sapiens
aauaaaauauuuuaaaaucuacuuuuuggugu

SEQ ID NO: 122474 - RNA, 32 nt, Homo Sapiens
cgaagccagccuggaccauacacugccuggag

SEQ ID NO: 122475 - RNA, 32 nt, Homo Sapiens
gccagcgccgucugcccggccccgcccucuuu

SEQ ID NO: 122476 - RNA, 32 nt, Homo Sapiens
ugcaggcaaccugggacucacaugaucguugg

SEQ ID NO: 122477 - RNA, 32 nt, Homo Sapiens
aacaucuucuggaaacaaaaagaguagaaaag

SEQ ID NO: 122478 - RNA, 30 nt, Homo Sapiens
uucuagaacaucccugccagcucuucugcc

SEQ ID NO: 122479 - RNA, 32 nt, Homo Sapiens
ccagacccuuuugugguuucuauuuguaccac

SEQ ID NO: 122480 - RNA, 32 nt, Homo Sapiens
uccgcgcucccuccccauggccgggagcgggc

SEQ ID NO: 122481 - RNA, 32 nt, Homo Sapiens
ugcaauuuccauauccuaaugauucaaucucc

SEQ ID NO: 122482 - RNA, 32 nt, Homo Sapiens
aaaauuagccagacgugauggcacauaccugu

SEQ ID NO: 122483 - RNA, 32 nt, Homo Sapiens
cgcucaggaaagacacacugcagacuccaccg

SEQ ID NO: 122484 - RNA, 32 nt, Homo Sapiens
cuggccucuaaaggauggcacugaggcaccgg

SEQ ID NO: 122485 - RNA, 32 nt, Homo Sapiens
uccagagcuucagccucucuucgucgucuuac

SEQ ID NO: 122486 - RNA, 32 nt, Homo Sapiens
gaccgugugccuggggguguuguaggcacucc

SEQ ID NO: 122487 - RNA, 32 nt, Homo Sapiens
ugauguguggaggggaagcaagauggguaagg

SEQ ID NO: 122488 - RNA, 32 nt, Homo Sapiens
aauagaaaauaauaaauaauagcugauuaggg

SEQ ID NO: 122489 - RNA, 32 nt, Homo Sapiens
cugcggccggugguggugagggggguggugac

SEQ ID NO: 122490 - RNA, 32 nt, Homo Sapiens
cuuaggccaaguagagagcaucaggguaaaug

SEQ ID NO: 122491 - RNA, 32 nt, Homo Sapiens
uaacaaugaagauugaacagaguucagcaauu

SEQ ID NO: 122492 - RNA, 32 nt, Homo Sapiens
auauuucugaccaaccccagggagauguuugc

SEQ ID NO: 122493 - RNA, 32 nt, Homo Sapiens
uugugacgcuauaagacagagcaggccacaug

SEQ ID NO: 122494 - RNA, 32 nt, Homo Sapiens
ccacaacaagccuuguuuguuccgauaggaau

SEQ ID NO: 122495 - RNA, 32 nt, Homo Sapiens
ugacuuuuguucaacaaaaggauuguacugua

SEQ ID NO: 122496 - RNA, 32 nt, Homo Sapiens
cuuuauuucucucaucuguuacacaaagaacc

SEQ ID NO: 122497 - RNA, 32 nt, Homo Sapiens
uuguccuucucuuaacuucucauuccucuaua

SEQ ID NO: 122498 - RNA, 32 nt, Homo Sapiens
caggagaugaugugauggaacacacacacacg

SEQ ID NO: 122499 - RNA, 32 nt, Homo Sapiens
uucuuuggagaagccacagaccaccugucuuc

SEQ ID NO: 122500 - RNA, 32 nt, Homo Sapiens
uagcagucaggaacuaggcauaucaugccuuu

SEQ ID NO: 122501 - RNA, 32 nt, Homo Sapiens
caggugcagacacugaacagggucucaaacac

SEQ ID NO: 122502 - RNA, 32 nt, Homo Sapiens
gaagaggaggugggaccccccaccgccccccg

SEQ ID NO: 122503 - RNA, 32 nt, Homo Sapiens
guggagcaauagaguucuccauuuuacagaag

SEQ ID NO: 122504 - RNA, 32 nt, Homo Sapiens
aagaauauuaaugagaaagaaaaggaagacag

SEQ ID NO: 122505 - RNA, 32 nt, Homo Sapiens
ccgcuguuccggggcucugccucucgcugaac

SEQ ID NO: 122506 - RNA, 32 nt, Homo Sapiens
acagaagauacaaaaaccacaaaaaguagccg

SEQ ID NO: 122507 - RNA, 32 nt, Homo Sapiens
caacacagacucauuuucuacuccgugugaau

SEQ ID NO: 122508 - RNA, 32 nt, Homo Sapiens
ugcaugaugauccggauuuaauuugauaucac

SEQ ID NO: 122509 - RNA, 32 nt, Homo Sapiens
cccgcuucgccccgaggcgccgccgauggucc

SEQ ID NO: 122510 - RNA, 32 nt, Homo Sapiens
uccagaugccagcagccugucaaucacucgcc

SEQ ID NO: 122511 - RNA, 32 nt, Homo Sapiens
ggugugccacgcgcuccgcgaccucgugucug

SEQ ID NO: 122512 - RNA, 32 nt, Homo Sapiens
uucugaggugacgccgcccacaccgggcuucu

SEQ ID NO: 122513 - RNA, 32 nt, Homo Sapiens
gcagaaaacaacagcucaagccccaggggugg

SEQ ID NO: 122514 - RNA, 32 nt, Homo Sapiens
uuaauuuucuauuuucaaaacaaauauuuacu

SEQ ID NO: 122515 - RNA, 32 nt, Homo Sapiens
cucccacugaccccacccacaagagcauucag

SEQ ID NO: 122516 - RNA, 32 nt, Homo Sapiens
aagaugccugaaguguuggggaggaugacaau

SEQ ID NO: 122517 - RNA, 32 nt, Homo Sapiens
gucccugccaucucgccacugcagcucggguc

SEQ ID NO: 122518 - RNA, 32 nt, Homo Sapiens
caacgggauugugagaauuaagucacucucgu

SEQ ID NO: 122519 - RNA, 32 nt, Homo Sapiens
cuugacaagucuuuuuauuuuugugacuugug

SEQ ID NO: 122520 - RNA, 32 nt, Homo Sapiens
caaacgaggauacagugucuggaacuauuggu

SEQ ID NO: 122521 - RNA, 32 nt, Homo Sapiens
uaugauuuuacauuauuuuaaauauuugggag

SEQ ID NO: 122522 - RNA, 32 nt, Homo Sapiens
cuugccucggugcccgccgccggagccuccga

SEQ ID NO: 122523 - RNA, 32 nt, Homo Sapiens
aaguagcccuccccugucucaucgauccagca

SEQ ID NO: 122524 - RNA, 32 nt, Homo Sapiens
uggggaaugggaagaaguaguuuacuuuggac

SEQ ID NO: 122525 - RNA, 32 nt, Homo Sapiens
uuuaaaaauguaaguuucucugcacaagcucu

SEQ ID NO: 122526 - RNA, 32 nt, Homo Sapiens
ucaagugguggaacauggugcccuggcccauc

SEQ ID NO: 122527 - RNA, 32 nt, Homo Sapiens
agaggaaacacuuuccaccucuuggauaugga

SEQ ID NO: 122528 - RNA, 32 nt, Homo Sapiens
caauaaucuaucugguucauuaacucaugcac

SEQ ID NO: 122529 - RNA, 32 nt, Homo Sapiens
accaucaugccccccaccuggugguccuuauc

SEQ ID NO: 122530 - RNA, 32 nt, Homo Sapiens
aacaagaaggcacaaauccacacuugccaaca

SEQ ID NO: 122531 - RNA, 32 nt, Homo Sapiens
uugguccuuguuuccacuggcuuuccaucccc

SEQ ID NO: 122532 - RNA, 32 nt, Homo Sapiens
gacaaugcagguauagagaguggcaaaggggu

SEQ ID NO: 122533 - RNA, 32 nt, Homo Sapiens
guuuauaaauguaugauuuauaaguucugaau

SEQ ID NO: 122534 - RNA, 32 nt, Homo Sapiens
gcaagaauagugauaagaugcuaucaggucag

SEQ ID NO: 122535 - RNA, 31 nt, Homo Sapiens
agugccuauucagaguuucagaauuuuaaaa

SEQ ID NO: 122536 - RNA, 32 nt, Homo Sapiens
ucagugccgccgcgcccggccucccgcacgcc

SEQ ID NO: 122537 - RNA, 32 nt, Homo Sapiens
augcaguauuuauguuuuaaagcacaggugua

SEQ ID NO: 122538 - RNA, 32 nt, Homo Sapiens
gccugcggccccagcgccacugccuguggagg

SEQ ID NO: 122539 - RNA, 32 nt, Homo Sapiens
uuuuaguuccauuauaugaacacuggauaacc

SEQ ID NO: 122540 - RNA, 32 nt, Homo Sapiens
gaacucgccaggggcgccgccggcggcggagg

SEQ ID NO: 122541 - RNA, 32 nt, Homo Sapiens
caugcccugcgcgcuccgggggucguagcugc

SEQ ID NO: 122542 - RNA, 32 nt, Homo Sapiens
cugaguuguuuuuauguauugauggggacuuu

SEQ ID NO: 122543 - RNA, 32 nt, Homo Sapiens
ggacaaauguagauauuuuucuuaaaaacucu

SEQ ID NO: 122544 - RNA, 32 nt, Homo Sapiens
uauuuuugacauuugggcggccuauguaguuc

SEQ ID NO: 122545 - RNA, 32 nt, Homo Sapiens
ccguagaaauaccauauccagccucaaagcau

SEQ ID NO: 122546 - RNA, 32 nt, Homo Sapiens
gcaaguaaaaauacaaauuuaauuacuuagaa

SEQ ID NO: 122547 - RNA, 32 nt, Homo Sapiens
auuccagcugucuugucuuuuuccaaaaaagu

SEQ ID NO: 122548 - RNA, 32 nt, Homo Sapiens
ggcuguggcgucgacuccgacccaggcagcca

SEQ ID NO: 122549 - RNA, 32 nt, Homo Sapiens
uggaggcagaagcgcagaggcugagcccgccc

SEQ ID NO: 122550 - RNA, 31 nt, Homo Sapiens
aucauagaaauuguucaaguauaucaguaac

SEQ ID NO: 122551 - RNA, 32 nt, Homo Sapiens
aggugaauuuuuuguaucacugccuguggaaa

SEQ ID NO: 122552 - RNA, 27 nt, Homo Sapiens
uguguacauuucuucaguccuuagcuu

SEQ ID NO: 122553 - RNA, 32 nt, Homo Sapiens
cacuacuguagacuuuuauaaacacuauauac

SEQ ID NO: 122554 - RNA, 32 nt, Homo Sapiens
uuaaaugugaagcaaaauaaauuuauauaaug

SEQ ID NO: 122555 - RNA, 32 nt, Homo Sapiens
ucgguaagggugccccaccugaaucagugcuc

SEQ ID NO: 122556 - RNA, 32 nt, Homo Sapiens
uaucuauauauuauuuaauguuacuguucugg

SEQ ID NO: 122557 - RNA, 32 nt, Homo Sapiens
uacauuaugauaaaguggaaauacauuacgau

SEQ ID NO: 122558 - RNA, 32 nt, Homo Sapiens
aacuaaccauccuugagcccagauggggcuca

SEQ ID NO: 122559 - RNA, 32 nt, Homo Sapiens
gcgcagccugcgcugacuuccccgagacgcgc

SEQ ID NO: 122560 - RNA, 32 nt, Homo Sapiens
aacacaaaaacuacaugacugaagauagaaga

SEQ ID NO: 122561 - RNA, 32 nt, Homo Sapiens
aagagauuucauaauuucuacugcacuuacau

SEQ ID NO: 122562 - RNA, 32 nt, Homo Sapiens
agagagacagagcuggacauccuggcccgaug

SEQ ID NO: 122563 - RNA, 32 nt, Homo Sapiens
uuccaccgccgacuucggggaccucccacugc

SEQ ID NO: 122564 - RNA, 32 nt, Homo Sapiens
gugaagucaauacagagaccuccaggcgagug

SEQ ID NO: 122565 - RNA, 32 nt, Homo Sapiens
guggggaugaacugcaugaggcucugauuaag

SEQ ID NO: 122566 - RNA, 32 nt, Homo Sapiens
caccgagccucuggugggacaccugggcagga

SEQ ID NO: 122567 - RNA, 32 nt, Homo Sapiens
uggaauucauucucuucauuggcaguucuagu

SEQ ID NO: 122568 - RNA, 32 nt, Homo Sapiens
auggagaaauuguagaaacgacaaacacugug

SEQ ID NO: 122569 - RNA, 32 nt, Homo Sapiens
gaguugcauuuguauuaacaagaaauuuguau

SEQ ID NO: 122570 - RNA, 32 nt, Homo Sapiens
uuccccgcgggccuuccuagccgccauggagg

SEQ ID NO: 122571 - RNA, 32 nt, Homo Sapiens
cucugaaaaaauaguugugcacaacaucugcu

SEQ ID NO: 122572 - RNA, 32 nt, Homo Sapiens
ucuggauuccacucacagggagaugggauucc

SEQ ID NO: 122573 - RNA, 32 nt, Homo Sapiens
uggcaguguuggagacuugcuccggcgcgggg

SEQ ID NO: 122574 - RNA, 32 nt, Homo Sapiens
cauggauccgggcaguggcggcggcggcggcg

SEQ ID NO: 122575 - RNA, 32 nt, Homo Sapiens
agcagcccuggccgaguugucucugugguuuc

SEQ ID NO: 122576 - RNA, 32 nt, Homo Sapiens
cgccaccgggcggaggcugcgcggcgcagacc

SEQ ID NO: 122577 - RNA, 32 nt, Homo Sapiens
ugauaggacauaguaguagcgguggucagaca

SEQ ID NO: 122578 - RNA, 32 nt, Homo Sapiens
cccggccguccccccucaucgccccgcgccca

SEQ ID NO: 122579 - RNA, 32 nt, Homo Sapiens
cuaaguuugcuaauaaagcuuuauugagucuu

SEQ ID NO: 122580 - RNA, 32 nt, Homo Sapiens
aaaaugcacgggggcaugcugagccacuggag

SEQ ID NO: 122581 - RNA, 32 nt, Homo Sapiens
ccugucugucauugaugggcauuuaguuugau

SEQ ID NO: 122582 - RNA, 32 nt, Homo Sapiens
ccgcuucccucgccgccgccccgccagcaugc

SEQ ID NO: 122583 - RNA, 32 nt, Homo Sapiens
ugacagcugucaaccucagaguaacuauuucu

SEQ ID NO: 122584 - RNA, 32 nt, Homo Sapiens
ugugggaaggcacuccucuuggcauuugcuua

SEQ ID NO: 122585 - RNA, 32 nt, Homo Sapiens
gaaagaucucaaauuaagaacuuacaucacaa

SEQ ID NO: 122586 - RNA, 32 nt, Homo Sapiens
gcaauaggggagagaaucugugugcuuaugga

SEQ ID NO: 122587 - RNA, 28 nt, Homo Sapiens
cacgugcuggcgaacaaauguaaacacg

SEQ ID NO: 122588 - RNA, 32 nt, Homo Sapiens
cucuacuaaaauuugggggaauuuuaaaacua

SEQ ID NO: 122589 - RNA, 32 nt, Homo Sapiens
gaaaaugcuucuuggcuggggccacuaccucc

SEQ ID NO: 122590 - RNA, 32 nt, Homo Sapiens
uagagaaaugcaaaccucgacucucaaggaug

SEQ ID NO: 122591 - RNA, 32 nt, Homo Sapiens
uauuauugauuaauucaacaaacaguuaugua

SEQ ID NO: 122592 - RNA, 32 nt, Homo Sapiens
cucucaaacuuguuuucgaaucuccugggagu

SEQ ID NO: 122593 - RNA, 32 nt, Homo Sapiens
uacuagaauauuaaaaagccagguauaaugaa

SEQ ID NO: 122594 - RNA, 32 nt, Homo Sapiens
cucaggccaaccccagccaccgccagccugag

SEQ ID NO: 122595 - RNA, 32 nt, Homo Sapiens
guaucaacccacaaaauggauuucauaaccca

SEQ ID NO: 122596 - RNA, 32 nt, Homo Sapiens
ucauggugggaaaugcugaugaucucugaugg

SEQ ID NO: 122597 - RNA, 32 nt, Homo Sapiens
gccccgggccgcgcccgccauguccuacccgc

SEQ ID NO: 122598 - RNA, 32 nt, Homo Sapiens
gagagcaguguuuuuccagcuucuguguuggu

SEQ ID NO: 122599 - RNA, 32 nt, Homo Sapiens
gguggugugcgcuuguaguaccagcuacuugg

SEQ ID NO: 122600 - RNA, 29 nt, Homo Sapiens
uuuuucuggcgucucaguugacaugaucu

SEQ ID NO: 122601 - RNA, 32 nt, Homo Sapiens
gggcucgcggguucuccugggcuggccagggc

SEQ ID NO: 122602 - RNA, 32 nt, Homo Sapiens
gcuaauaauuuaauuuguuguuuguuaaaaau

SEQ ID NO: 122603 - RNA, 32 nt, Homo Sapiens
cauuuuuuaauuuacuuuuuuauuugucauuu

SEQ ID NO: 122604 - RNA, 32 nt, Homo Sapiens
aauggacugcuggugcagaagaauaaacaacu

SEQ ID NO: 122605 - RNA, 32 nt, Homo Sapiens
agggaaggcuggaacucuuaacucuguacccc

SEQ ID NO: 122606 - RNA, 32 nt, Homo Sapiens
cuucgggcuuugugugcucacucuacacagca

SEQ ID NO: 122607 - RNA, 32 nt, Homo Sapiens
ggaauuuucaacauggucuaauuauuuacuca

SEQ ID NO: 122608 - RNA, 32 nt, Homo Sapiens
aaaagccaguccuggcaggagcucugguaccu

SEQ ID NO: 122609 - RNA, 32 nt, Homo Sapiens
ugcccugccuacuccuucucaauaggccacag

SEQ ID NO: 122610 - RNA, 32 nt, Homo Sapiens
agacugauauucaaaugcuguaguguugaaua

SEQ ID NO: 122611 - RNA, 28 nt, Homo Sapiens
aauuaguugucuaaauauuuuucaguga

SEQ ID NO: 122612 - RNA, 32 nt, Homo Sapiens
ccacagccuggcuggcagcugcucuguggagg

SEQ ID NO: 122613 - RNA, 32 nt, Homo Sapiens
cccggaagagauggaccgcgugaccagauacc

SEQ ID NO: 122614 - RNA, 32 nt, Homo Sapiens
ccaagccgcagaccccaccgcccucccucucc

SEQ ID NO: 122615 - RNA, 32 nt, Homo Sapiens
gccacaguguccccggcuucuaagccuccaau

SEQ ID NO: 122616 - RNA, 28 nt, Homo Sapiens
augaggaggcggccgccccagugcugau

SEQ ID NO: 122617 - RNA, 32 nt, Homo Sapiens
aauaaauugucuccuaaugaugacuugagccc

SEQ ID NO: 122618 - RNA, 32 nt, Homo Sapiens
uuucccccguuugcaagcuccuccccucugug

SEQ ID NO: 122619 - RNA, 32 nt, Homo Sapiens
gagaauuggccauccggaacccgcugacgauc

SEQ ID NO: 122620 - RNA, 32 nt, Homo Sapiens
cgccggccucccgcugcugcuccggagaagcg

SEQ ID NO: 122621 - RNA, 32 nt, Homo Sapiens
caguguuggucuguguccaucagugaccacca

SEQ ID NO: 122622 - RNA, 32 nt, Homo Sapiens
ccuagccccucccagagcaucucacccccacc

SEQ ID NO: 122623 - RNA, 32 nt, Homo Sapiens
guugcccaggaggggaccgugugggggagggg

SEQ ID NO: 122624 - RNA, 31 nt, Homo Sapiens
uaucuucuugguacaucaauauauuaauugu

SEQ ID NO: 122625 - RNA, 32 nt, Homo Sapiens
cuaggagcccgccccacccucccaggggcucc

SEQ ID NO: 122626 - RNA, 32 nt, Homo Sapiens
ucagaucugugguuuuucuacuugaaggacac

SEQ ID NO: 122627 - RNA, 32 nt, Homo Sapiens
auuuuacauaugcuaugugguugccuuugggu

SEQ ID NO: 122628 - RNA, 32 nt, Homo Sapiens
agacgaggcccucgggcccagcccccacagug

SEQ ID NO: 122629 - RNA, 32 nt, Homo Sapiens
caauccgccucccagguucaagcgauucuccc

SEQ ID NO: 122630 - RNA, 32 nt, Homo Sapiens
acuugacuacacaacauaaaucacuuuuuaaa

SEQ ID NO: 122631 - RNA, 32 nt, Homo Sapiens
ggcucggcaagcauaggcgaguuggcagugga

SEQ ID NO: 122632 - RNA, 32 nt, Homo Sapiens
uagcagugguccuaaccagcuaggagacccug

SEQ ID NO: 122633 - RNA, 32 nt, Homo Sapiens
aaaauaagcuuuauaaaaaccaauuuccugau

SEQ ID NO: 122634 - RNA, 29 nt, Homo Sapiens
aauuuguauuuucuauuauuaugugcaua

SEQ ID NO: 122635 - RNA, 32 nt, Homo Sapiens
gcaaagcuggaacaacagaggcguguuguggg

SEQ ID NO: 122636 - RNA, 32 nt, Homo Sapiens
ugggccccggcuagaggcgccgccgccgccgg

SEQ ID NO: 122637 - RNA, 32 nt, Homo Sapiens
auuggauuaugaugaagaugcuagugcaaugc

SEQ ID NO: 122638 - RNA, 32 nt, Homo Sapiens
ggaugcaucuucuuccuucccuuuccucuugc

SEQ ID NO: 122639 - RNA, 32 nt, Homo Sapiens
cucaugagugaguuaaugugggaaauuuguua

SEQ ID NO: 122640 - RNA, 32 nt, Homo Sapiens
ccuuuaaauggcaacagaugcuuacaguucag

SEQ ID NO: 122641 - RNA, 32 nt, Homo Sapiens
uuuuuccccccucucccucucagaaaauugcu

SEQ ID NO: 122642 - RNA, 32 nt, Homo Sapiens
uucaaucccaggucguuuucccuuucagcugc

SEQ ID NO: 122643 - RNA, 31 nt, Homo Sapiens
ccccuugcgaucggggucccaagggccaggg

SEQ ID NO: 122644 - RNA, 32 nt, Homo Sapiens
cugcagugccaaacagaagggacugggcggag

SEQ ID NO: 122645 - RNA, 32 nt, Homo Sapiens
aacauuucaugaaaucaguuauuuacuuacua

SEQ ID NO: 122646 - RNA, 32 nt, Homo Sapiens
uaaccucuuuaaagugaccuuguuagacaauu

SEQ ID NO: 122647 - RNA, 32 nt, Homo Sapiens
cuggggcggugacacgauucuguguuucuaac

SEQ ID NO: 122648 - RNA, 32 nt, Homo Sapiens
aagagaaaacaguggcgacuuagagaugguga

SEQ ID NO: 122649 - RNA, 32 nt, Homo Sapiens
aggggauggagagcccugguguccugacggga

SEQ ID NO: 122650 - RNA, 32 nt, Homo Sapiens
cgccgcccgcggcucccgauggagacugacgc

SEQ ID NO: 122651 - RNA, 32 nt, Homo Sapiens
auaguaaaaggcaaaguauugaagauacuacg

SEQ ID NO: 122652 - RNA, 32 nt, Homo Sapiens
ucaucucgccuggccucccccugagucagugg

SEQ ID NO: 122653 - RNA, 32 nt, Homo Sapiens
ugcuccuggucucuccuuccugaggucacagg

SEQ ID NO: 122654 - RNA, 32 nt, Homo Sapiens
aggcaaagcauuuuaaugauggcucacagagg

SEQ ID NO: 122655 - RNA, 32 nt, Homo Sapiens
cuggccgugggcucacaagaccucuucacugc

SEQ ID NO: 122656 - RNA, 32 nt, Homo Sapiens
guuucauaaaaugaauugugugaguuagcuau

SEQ ID NO: 122657 - RNA, 32 nt, Homo Sapiens
acccuguucuuugaagcacccaugucaguauu

SEQ ID NO: 122658 - RNA, 32 nt, Homo Sapiens
ccggcucccaccgcagcccacccggcagagga

SEQ ID NO: 122659 - RNA, 32 nt, Homo Sapiens
uaauuucagugaagucauuuugcuucaggggu

SEQ ID NO: 122660 - RNA, 32 nt, Homo Sapiens
ccuugcgccgcacugcucgccgggccaguccg

SEQ ID NO: 122661 - RNA, 32 nt, Homo Sapiens
ucucaaaccaugccaguaacuuccuuggugaa

SEQ ID NO: 122662 - RNA, 32 nt, Homo Sapiens
aaccaacuucccucccccacugccagugcugc

SEQ ID NO: 122663 - RNA, 32 nt, Homo Sapiens
cucugaucuauuuuuccucaucuguaaaauag

SEQ ID NO: 122664 - RNA, 30 nt, Homo Sapiens
accaggggaggugggguuuggugagagacg

SEQ ID NO: 122665 - RNA, 32 nt, Homo Sapiens
cucucggugagcugugcagugccggccccaga

SEQ ID NO: 122666 - RNA, 32 nt, Homo Sapiens
uauugcuuauuuuucuucuguaguggauguga

SEQ ID NO: 122667 - RNA, 32 nt, Homo Sapiens
ugguggugaacuacagugguagcuuuagcccu

SEQ ID NO: 122668 - RNA, 32 nt, Homo Sapiens
guacaccuaccuucagauuucugcuuacacuu

SEQ ID NO: 122669 - RNA, 32 nt, Homo Sapiens
agcucuguuuuaaagccgaagaagaaaacauu

SEQ ID NO: 122670 - RNA, 32 nt, Homo Sapiens
gaccgaccaauauguugacauacugauccucu

SEQ ID NO: 122671 - RNA, 32 nt, Homo Sapiens
ugacuugagagaaaaggaauguugcacaaggg

SEQ ID NO: 122672 - RNA, 32 nt, Homo Sapiens
gguuggugauggggcucugggccuucaaggcc

SEQ ID NO: 122673 - RNA, 32 nt, Homo Sapiens
uuuucccuauuauauuuuugguucuauuagga

SEQ ID NO: 122674 - RNA, 32 nt, Homo Sapiens
gaggggucaggagaggcgggagcaaugagauu

SEQ ID NO: 122675 - RNA, 32 nt, Homo Sapiens
uuccaacgugcccacagcgucugagcuauuga

SEQ ID NO: 122676 - RNA, 32 nt, Homo Sapiens
gcugucacccucggaccccggcgugagagggg

SEQ ID NO: 122677 - RNA, 32 nt, Homo Sapiens
cggcagagcccuugacccuggugcugggccca

SEQ ID NO: 122678 - RNA, 32 nt, Homo Sapiens
aauauuuguguaauucuuaugaaacaggcugg

SEQ ID NO: 122679 - RNA, 32 nt, Homo Sapiens
auggcagaaaaccaaaaacuaaauuuauggua

SEQ ID NO: 122680 - RNA, 32 nt, Homo Sapiens
gugcucaccacauaaccucugggugcuggaaa

SEQ ID NO: 122681 - RNA, 32 nt, Homo Sapiens
gauacugggucugcgaugcagcggcgugaggc

SEQ ID NO: 122682 - RNA, 32 nt, Homo Sapiens
gaggacccucaugcugccccugaccgagggcu

SEQ ID NO: 122683 - RNA, 32 nt, Homo Sapiens
ccugggcccucccgacagaggccccaggugcg

SEQ ID NO: 122684 - RNA, 32 nt, Homo Sapiens
gaaaaaggugacucaccccucauuuccagagu

SEQ ID NO: 122685 - RNA, 32 nt, Homo Sapiens
aauuacuagugcuauuuucauuauuauuguaa

SEQ ID NO: 122686 - RNA, 32 nt, Homo Sapiens
gcugcuggccaagccaaagacccguguaggau

SEQ ID NO: 122687 - RNA, 32 nt, Homo Sapiens
uauuaauacacauuugcagggauuguuuguua

SEQ ID NO: 122688 - RNA, 32 nt, Homo Sapiens
uuuaucugcugcuuauuuguggaaugaaaccu

SEQ ID NO: 122689 - RNA, 32 nt, Homo Sapiens
gaauauuuugauaauaauauuguuuuucuuuc

SEQ ID NO: 122690 - RNA, 32 nt, Homo Sapiens
gaugcagacuuaccccacccuccaccccuagc

SEQ ID NO: 122691 - RNA, 32 nt, Homo Sapiens
gaggagggucugccaagcuacugcaacaucug

SEQ ID NO: 122692 - RNA, 32 nt, Homo Sapiens
ggagacaggaggacuaggaaagagcaguggca

SEQ ID NO: 122693 - RNA, 32 nt, Homo Sapiens
uagauuacuuuuucaacuguaaauaauguaca

SEQ ID NO: 122694 - RNA, 32 nt, Homo Sapiens
acacauucgccuuuucuaggauugcauuuccc

SEQ ID NO: 122695 - RNA, 32 nt, Homo Sapiens
aaauacuugggguuuuccaauaaagauuguug

SEQ ID NO: 122696 - RNA, 32 nt, Homo Sapiens
caauggaauaacuucaaucacacuucaaaaac

SEQ ID NO: 122697 - RNA, 32 nt, Homo Sapiens
uggagaugagagagggugagagauggagggcg

SEQ ID NO: 122698 - RNA, 32 nt, Homo Sapiens
uugcucccuaaaauaugcauaaaguagaaauu

SEQ ID NO: 122699 - RNA, 32 nt, Homo Sapiens
uuccucugcugagacugagacaagcagggcuu

SEQ ID NO: 122700 - RNA, 32 nt, Homo Sapiens
guugugcccuccccagccccucacagcuuaua

SEQ ID NO: 122701 - RNA, 32 nt, Homo Sapiens
ccuguuugaugaugaagaugaagaggauaauc

SEQ ID NO: 122702 - RNA, 32 nt, Homo Sapiens
aucucugcugugcuugaccccgagggucuucc

SEQ ID NO: 122703 - RNA, 32 nt, Homo Sapiens
cacacaugaacacaugcacaugugcacacaca

SEQ ID NO: 122704 - RNA, 32 nt, Homo Sapiens
auuaccaggcuggugggcagcuccucaccaug

SEQ ID NO: 122705 - RNA, 32 nt, Homo Sapiens
gagcuggaccagccuggguuucaucucccaca

SEQ ID NO: 122706 - RNA, 32 nt, Homo Sapiens
uguaugccuguguguauauauagaagucauua

SEQ ID NO: 122707 - RNA, 32 nt, Homo Sapiens
aucagaaaguugaauuguuuucugccuacacc

SEQ ID NO: 122708 - RNA, 32 nt, Homo Sapiens
uguauuuugacaaaaauguuuguacuuuuuaa

SEQ ID NO: 122709 - RNA, 32 nt, Homo Sapiens
gaaaacuagaauaaugcuuuuacaaauaauua

SEQ ID NO: 122710 - RNA, 32 nt, Homo Sapiens
gggugaaacugggguaccaugagggguggaac

SEQ ID NO: 122711 - RNA, 32 nt, Homo Sapiens
ucauguaauuuauuuuugaaagcuuuguugaa

SEQ ID NO: 122712 - RNA, 32 nt, Homo Sapiens
accacaagauaaagauguuacauugucaaagc

SEQ ID NO: 122713 - RNA, 32 nt, Homo Sapiens
cgcucccaugcacaacucuccaaaacacuuau

SEQ ID NO: 122714 - RNA, 32 nt, Homo Sapiens
ucaauaucauccacaaaucuguguugaaagaa

SEQ ID NO: 122715 - RNA, 32 nt, Homo Sapiens
cauuugauauccacaacuuauuuuugguagga

SEQ ID NO: 122716 - RNA, 32 nt, Homo Sapiens
auauuuugcuccuuuuuaaauuuuguagcuca

SEQ ID NO: 122717 - RNA, 32 nt, Homo Sapiens
guguaaaaaguacucagaaaaacaucuaaagc

SEQ ID NO: 122718 - RNA, 32 nt, Homo Sapiens
gcccaccgccuuggccagccaagcccugccga

SEQ ID NO: 122719 - RNA, 32 nt, Homo Sapiens
ucacccucuaggacccugauugaguccucgga

SEQ ID NO: 122720 - RNA, 32 nt, Homo Sapiens
gccuuccucccucugccuuccuuccccacggc

SEQ ID NO: 122721 - RNA, 32 nt, Homo Sapiens
gguggggaggguggggguagggaccacgcaug

SEQ ID NO: 122722 - RNA, 32 nt, Homo Sapiens
gcaaucaugcugaugaugaugaagauaaagau

SEQ ID NO: 122723 - RNA, 32 nt, Homo Sapiens
ggucccagcuccgccugccuuuccuccuucug

SEQ ID NO: 122724 - RNA, 32 nt, Homo Sapiens
uguacacaaaaauauuuuccuuguagaaaaua

SEQ ID NO: 122725 - RNA, 32 nt, Homo Sapiens
ggccucugucucccgggcguccuccagcagcg

SEQ ID NO: 122726 - RNA, 32 nt, Homo Sapiens
auuagaagacauuagaagaaauaaucagccuu

SEQ ID NO: 122727 - RNA, 31 nt, Homo Sapiens
ucauaucuuucucuuugcuagauuagaauaa

SEQ ID NO: 122728 - RNA, 31 nt, Homo Sapiens
aacuucugaaacacacaccagcccugaguuc

SEQ ID NO: 122729 - RNA, 32 nt, Homo Sapiens
ucgcgcucgcgguucuggcgcugcuggaaagg

SEQ ID NO: 122730 - RNA, 32 nt, Homo Sapiens
augucuguacaggcuguacugaagcggccugu

SEQ ID NO: 122731 - RNA, 32 nt, Homo Sapiens
ccagcagcagugccagccuggugcgagcuaag

SEQ ID NO: 122732 - RNA, 32 nt, Homo Sapiens
ggagcugcagcgccagcgggaccggcuggagg

SEQ ID NO: 122733 - RNA, 32 nt, Homo Sapiens
accagccuggacaacauagugagaccuugucu

SEQ ID NO: 122734 - RNA, 32 nt, Homo Sapiens
uuuuaauucagcuacuuuuuccccucaguuaa

SEQ ID NO: 122735 - RNA, 32 nt, Homo Sapiens
uuauuauauuuuuugcagauguuuccauacaa

SEQ ID NO: 122736 - RNA, 32 nt, Homo Sapiens
cuugaacauuuugcuuguuuuguuuuucuuuu

SEQ ID NO: 122737 - RNA, 32 nt, Homo Sapiens
cuggugcccugccaagcuuccuccccucccuu

SEQ ID NO: 122738 - RNA, 32 nt, Homo Sapiens
guggcucauuuucuuuccccgaacgccaugac

SEQ ID NO: 122739 - RNA, 32 nt, Homo Sapiens
gcacugugugggaauguccgccaggcagagcu

SEQ ID NO: 122740 - RNA, 32 nt, Homo Sapiens
uuccgucguccguaccagcgggccccugguca

SEQ ID NO: 122741 - RNA, 32 nt, Homo Sapiens
cguccgugucucugauuccgccggcggcaaaa

SEQ ID NO: 122742 - RNA, 32 nt, Homo Sapiens
acccaggaggcugagguugcagugagccagga

SEQ ID NO: 122743 - RNA, 32 nt, Homo Sapiens
ugcuggccuggccuggcccacccugcuccucc

SEQ ID NO: 122744 - RNA, 32 nt, Homo Sapiens
uuaacuaaaaauacaugaaugcuaccgaagau

SEQ ID NO: 122745 - RNA, 32 nt, Homo Sapiens
gugccaggcccagugcagcaguguccugcuca

SEQ ID NO: 122746 - RNA, 32 nt, Homo Sapiens
caaugauauauuccaacucgaguccacaugua

SEQ ID NO: 122747 - RNA, 32 nt, Homo Sapiens
gcccugcguggcaguugaaagaguggcgggag

SEQ ID NO: 122748 - RNA, 32 nt, Homo Sapiens
uaagaaagccauccuauuuuuaucucaagaug

SEQ ID NO: 122749 - RNA, 32 nt, Homo Sapiens
ucgaccgugacugucuuccucagucugugccu

SEQ ID NO: 122750 - RNA, 32 nt, Homo Sapiens
cagggguagagggacaggagacaaccaucuuc

SEQ ID NO: 122751 - RNA, 32 nt, Homo Sapiens
gucugagaaaccccaaaccaggaaaccccacc

SEQ ID NO: 122752 - RNA, 32 nt, Homo Sapiens
aguacauuuuuuccuguuuucacaauuagacu

SEQ ID NO: 122753 - RNA, 32 nt, Homo Sapiens
ggcggcggccccagcggagacuagccagaacu

SEQ ID NO: 122754 - RNA, 32 nt, Homo Sapiens
agucacauccugaugccuggaaggggcguggg

SEQ ID NO: 122755 - RNA, 32 nt, Homo Sapiens
agggucgggaggagggcagacacgccgcuuuu

SEQ ID NO: 122756 - RNA, 32 nt, Homo Sapiens
cuuagcacauuuuuaaguuuuaucuuaaggga

SEQ ID NO: 122757 - RNA, 32 nt, Homo Sapiens
agugccagauggaauuuaaagaauuaauuaau

SEQ ID NO: 122758 - RNA, 32 nt, Homo Sapiens
gcucaggccacuuuuuucagacuuuuaagugu

SEQ ID NO: 122759 - RNA, 32 nt, Homo Sapiens
cuugggugauuugguggauagacccaugaaug

SEQ ID NO: 122760 - RNA, 30 nt, Homo Sapiens
cugggacuggcagagcugccggcgccggac

SEQ ID NO: 122761 - RNA, 32 nt, Homo Sapiens
uuauuauccacaugguaacaguguuuauccac

SEQ ID NO: 122762 - RNA, 32 nt, Homo Sapiens
cccaggaagagauaccuucuuuacaggagagg

SEQ ID NO: 122763 - RNA, 32 nt, Homo Sapiens
uaaagaaaauguuuuucucaauuuaaaauaau

SEQ ID NO: 122764 - RNA, 32 nt, Homo Sapiens
aguucucugucccuccucccaaccccuccuuu

SEQ ID NO: 122765 - RNA, 32 nt, Homo Sapiens
agagcuugucuccuuggcuuccaaccccagaa

SEQ ID NO: 122766 - RNA, 32 nt, Homo Sapiens
gaugccccgucccccucuggcuccagcuggcc

SEQ ID NO: 122767 - RNA, 32 nt, Homo Sapiens
ggcugcccugucacacugguccccguauuuuc

SEQ ID NO: 122768 - RNA, 32 nt, Homo Sapiens
gaaccccgcaaccuccuccccaccucccaucu

SEQ ID NO: 122769 - RNA, 32 nt, Homo Sapiens
cccucgggccccacccugccaagcucugagcu

SEQ ID NO: 122770 - RNA, 32 nt, Homo Sapiens
gcuuuuugcugccucucaucaccucugccuca

SEQ ID NO: 122771 - RNA, 32 nt, Homo Sapiens
uguaugugaauagacuuugaaaaaauacagaa

SEQ ID NO: 122772 - RNA, 32 nt, Homo Sapiens
cucaggaaggguagguucucagacacugccga

SEQ ID NO: 122773 - RNA, 32 nt, Homo Sapiens
ugcuugauuuuuaauguauucucuacuguuuu

SEQ ID NO: 122774 - RNA, 32 nt, Homo Sapiens
aaaacaaagugcaguuccaacaauauuuucuu

SEQ ID NO: 122775 - RNA, 32 nt, Homo Sapiens
uggaagggcagcauauaaaaacaucagucccg

SEQ ID NO: 122776 - RNA, 32 nt, Homo Sapiens
uaucgccugggccccaggcuucuccauggcca

SEQ ID NO: 122777 - RNA, 32 nt, Homo Sapiens
gccuguguacuauuuguaaauucagguucaau

SEQ ID NO: 122778 - RNA, 32 nt, Homo Sapiens
aguggggggaaauuucuaaguauuuuaacuga

SEQ ID NO: 122779 - RNA, 32 nt, Homo Sapiens
acagcgcuggaacccauucgguggggccuggg

SEQ ID NO: 122780 - RNA, 32 nt, Homo Sapiens
uagcacuuaauuuucacuggcucccaaguggu

SEQ ID NO: 122781 - RNA, 32 nt, Homo Sapiens
cagcaggucccucgggccccagcccucgcugc

SEQ ID NO: 122782 - RNA, 32 nt, Homo Sapiens
guuuugaaguguuuuaucuggauuuagcaugu

SEQ ID NO: 122783 - RNA, 32 nt, Homo Sapiens
agcaacgaaaacaaaaugcacagccugaaugg

SEQ ID NO: 122784 - RNA, 31 nt, Homo Sapiens
ggccaaacaaauucucacuuuggauguagau

SEQ ID NO: 122785 - RNA, 32 nt, Homo Sapiens
ugaguucagagcaguauuaaaugcgugcacuu

SEQ ID NO: 122786 - RNA, 32 nt, Homo Sapiens
ccgucgaguuccgucccggcccugcucacagc

SEQ ID NO: 122787 - RNA, 32 nt, Homo Sapiens
uucaccauguuggccaggcagaucucaaacuc

SEQ ID NO: 122788 - RNA, 32 nt, Homo Sapiens
ugagaaguugaauugcuugaagaguucaucac

SEQ ID NO: 122789 - RNA, 32 nt, Homo Sapiens
gagguggggccccagcagcucugguccuccug

SEQ ID NO: 122790 - RNA, 32 nt, Homo Sapiens
ucagaauauaauauuucuuaguuaucaaaagu

SEQ ID NO: 122791 - RNA, 32 nt, Homo Sapiens
uauuucacaaaacauguggcugggcgcagcgg

SEQ ID NO: 122792 - RNA, 32 nt, Homo Sapiens
uaugucuuuacuauguauuggcccuaccaaaa

SEQ ID NO: 122793 - RNA, 32 nt, Homo Sapiens
uuggaggcugguugcuucggauaaugaccucc

SEQ ID NO: 122794 - RNA, 32 nt, Homo Sapiens
auuccuugguuauaaaaugaaauggcauaugu

SEQ ID NO: 122795 - RNA, 32 nt, Homo Sapiens
ucuuuugauaaauucuauuuaguagcaugcag

SEQ ID NO: 122796 - RNA, 32 nt, Homo Sapiens
uuugaaucucaaccgagguccagggcaugaca

SEQ ID NO: 122797 - RNA, 32 nt, Homo Sapiens
gguaccagcucagauuccauuguucaucauuu

SEQ ID NO: 122798 - RNA, 32 nt, Homo Sapiens
cuguccuccugucugugccaggaggcaccuga

SEQ ID NO: 122799 - RNA, 32 nt, Homo Sapiens
cgggaguuucucugcccuguccccuccucacc

SEQ ID NO: 122800 - RNA, 32 nt, Homo Sapiens
gacagagauucaguuugucacccaggcuggag

SEQ ID NO: 122801 - RNA, 32 nt, Homo Sapiens
gcagaagcuuccauuuuuguccuuccuaagac

SEQ ID NO: 122802 - RNA, 32 nt, Homo Sapiens
guuuucuuucuuucuuuuuguuuuugacacag

SEQ ID NO: 122803 - RNA, 32 nt, Homo Sapiens
aggcggggcccggaugggaggggcggggccga

SEQ ID NO: 122804 - RNA, 32 nt, Homo Sapiens
agugaagaggggcagcccuugcuuguugggau

SEQ ID NO: 122805 - RNA, 32 nt, Homo Sapiens
uugacauugaauucucuuucucauagccucuc

SEQ ID NO: 122806 - RNA, 32 nt, Homo Sapiens
aguucccauuugugucccauugucuuuguggu

SEQ ID NO: 122807 - RNA, 30 nt, Homo Sapiens
uccugcugugagcggcaccagugggguuug

SEQ ID NO: 122808 - RNA, 32 nt, Homo Sapiens
auuuauguagacauuguaaauaaauuuugugc

SEQ ID NO: 122809 - RNA, 32 nt, Homo Sapiens
cgggagccggagggaaaggaagucggaaggug

SEQ ID NO: 122810 - RNA, 32 nt, Homo Sapiens
aauagacauccaaagaauuucaauugcuuugu

SEQ ID NO: 122811 - RNA, 31 nt, Homo Sapiens
ccugucauucggagaaacucuggcucugggg

SEQ ID NO: 122812 - RNA, 32 nt, Homo Sapiens
ugguuugacaauuuaaaauauuauuaacuuaa

SEQ ID NO: 122813 - RNA, 32 nt, Homo Sapiens
uaguuuuuucuuuuaaccucuuuaaguauuga

SEQ ID NO: 122814 - RNA, 32 nt, Homo Sapiens
gcuccuuguucaguagggauagaugugcuagu

SEQ ID NO: 122815 - RNA, 29 nt, Homo Sapiens
cuugaaaagaauguauauuuucugauuau

SEQ ID NO: 122816 - RNA, 32 nt, Homo Sapiens
acagcgcgugcgcguagcgaccucuuugcgcc

SEQ ID NO: 122817 - RNA, 32 nt, Homo Sapiens
uugaggucaggaguuugagaucagccuggcca

SEQ ID NO: 122818 - RNA, 32 nt, Homo Sapiens
cauuagcuugcuugaagugcugauuccauuuc

SEQ ID NO: 122819 - RNA, 32 nt, Homo Sapiens
acugaguugguauccugaagaacuugccuggc

SEQ ID NO: 122820 - RNA, 32 nt, Homo Sapiens
ggaucuacccacuuacugaaaucuaaauuuua

SEQ ID NO: 122821 - RNA, 32 nt, Homo Sapiens
gcucguuuucuuuuccucuaggcagagaagag

SEQ ID NO: 122822 - RNA, 32 nt, Homo Sapiens
gagcaacuauuagaccauuuaucacauuauac

SEQ ID NO: 122823 - RNA, 32 nt, Homo Sapiens
uuguacuguauauauauuauaguauaugucug

SEQ ID NO: 122824 - RNA, 32 nt, Homo Sapiens
gugggucuuugagcccgggguccaauucuucc

SEQ ID NO: 122825 - RNA, 32 nt, Homo Sapiens
caacugaaagggaaaagugcuucagccaucuu

SEQ ID NO: 122826 - RNA, 32 nt, Homo Sapiens
cagucuacugauucaaaugcuaaucucuucca

SEQ ID NO: 122827 - RNA, 32 nt, Homo Sapiens
aucagauugagcccuggcgugauccagucaga

SEQ ID NO: 122828 - RNA, 32 nt, Homo Sapiens
gaaaguaaaaauacacauuggaacugccucug

SEQ ID NO: 122829 - RNA, 32 nt, Homo Sapiens
ucuugauauuuuacuuuuguuccuuuucccua

SEQ ID NO: 122830 - RNA, 32 nt, Homo Sapiens
ucccuacccaggcuucugucuuucucaguaag

SEQ ID NO: 122831 - RNA, 32 nt, Homo Sapiens
uaaacacuuaggauguggcaaucuuaaguauc

SEQ ID NO: 122832 - RNA, 32 nt, Homo Sapiens
gcuaaaugucauucuccaucucuuuguuuuag

SEQ ID NO: 122833 - RNA, 32 nt, Homo Sapiens
uuucucugcaccucgagauaacguagaauauu

SEQ ID NO: 122834 - RNA, 32 nt, Homo Sapiens
gaguuucaugaggauuuacacauggcauucag

SEQ ID NO: 122835 - RNA, 32 nt, Homo Sapiens
uaaauucagaagccuccacugccauggagacu

SEQ ID NO: 122836 - RNA, 32 nt, Homo Sapiens
gcggcgcugccuguggagauccgcggaggccg

SEQ ID NO: 122837 - RNA, 32 nt, Homo Sapiens
gguuguagacgcugcggcccggcccggcgggu

SEQ ID NO: 122838 - RNA, 32 nt, Homo Sapiens
uacagaugaaaucucacugcuaaugcucagag

SEQ ID NO: 122839 - RNA, 32 nt, Homo Sapiens
ccaguccgagcgcggacccggcgcccgcagcc

SEQ ID NO: 122840 - RNA, 32 nt, Homo Sapiens
uguuaggggaggcuaugaaaauacuauauuau

SEQ ID NO: 122841 - RNA, 32 nt, Homo Sapiens
cugucauggagggggaggaggaggcggcggcg

SEQ ID NO: 122842 - RNA, 32 nt, Homo Sapiens
gcccuggccccggccgggccggauggaacccc

SEQ ID NO: 122843 - RNA, 32 nt, Homo Sapiens
ccgcuggucgcugccggacggcgugggcggug

SEQ ID NO: 122844 - RNA, 32 nt, Homo Sapiens
cccagccccucagcccucccagcccacuucug

SEQ ID NO: 122845 - RNA, 32 nt, Homo Sapiens
ugcuguuauccugguucucaccaggagguguc

SEQ ID NO: 122846 - RNA, 32 nt, Homo Sapiens
gccucccgaguagcuggaaccacagaacauca

SEQ ID NO: 122847 - RNA, 32 nt, Homo Sapiens
ucucagaccgugcaugccuuguccucuuaaga

SEQ ID NO: 122848 - RNA, 32 nt, Homo Sapiens
cauucuaaauaccauaacuaagauuuacauug

SEQ ID NO: 122849 - RNA, 32 nt, Homo Sapiens
gcauugccacuuuagcugcugccucccucuga

SEQ ID NO: 122850 - RNA, 32 nt, Homo Sapiens
uuccucuguucauuccguucucuucaaccuaa

SEQ ID NO: 122851 - RNA, 32 nt, Homo Sapiens
ccucacccgguccgccacugccgcgccucaga

SEQ ID NO: 122852 - RNA, 32 nt, Homo Sapiens
uuucaggaaggggugucaguacuuucuuucug

SEQ ID NO: 122853 - RNA, 32 nt, Homo Sapiens
aguucccuauuuuaaccucaauuaugcauuug

SEQ ID NO: 122854 - RNA, 32 nt, Homo Sapiens
guggcccggccuccuccugccacucugagcac

SEQ ID NO: 122855 - RNA, 32 nt, Homo Sapiens
uccuguguuauuacuaauccuuagaggaagau

SEQ ID NO: 122856 - RNA, 30 nt, Homo Sapiens
gaggcugcgccgcagcacccgguuggucag

SEQ ID NO: 122857 - RNA, 32 nt, Homo Sapiens
auugaggaagaaagagcugucuggccaaagga

SEQ ID NO: 122858 - RNA, 32 nt, Homo Sapiens
gcagaaggagaugcucagggcuccugggggga

SEQ ID NO: 122859 - RNA, 32 nt, Homo Sapiens
ggagaaggggagagcaucuaggcaggcaaaca

SEQ ID NO: 122860 - RNA, 32 nt, Homo Sapiens
caaguguggcguugcacggacaggcggugccg

SEQ ID NO: 122861 - RNA, 32 nt, Homo Sapiens
guuuccacacuuuaaaccugaacucuuuuauc

SEQ ID NO: 122862 - RNA, 32 nt, Homo Sapiens
auuuuaucucuuauguuaacaugagaaaugua

SEQ ID NO: 122863 - RNA, 32 nt, Homo Sapiens
guuuccugccguccuuuucccuuuaccauguc

SEQ ID NO: 122864 - RNA, 32 nt, Homo Sapiens
ggaccuggaugaagcugaaaaccaucauccuc

SEQ ID NO: 122865 - RNA, 32 nt, Homo Sapiens
ccaaucggaggguaaaugccagcaaaccuacu

SEQ ID NO: 122866 - RNA, 32 nt, Homo Sapiens
gagccaccgcggguccuuccccggccccgagg

SEQ ID NO: 122867 - RNA, 32 nt, Homo Sapiens
ugcgggguccgggagagcgggaugcuggccgg

SEQ ID NO: 122868 - RNA, 32 nt, Homo Sapiens
agcagagggucuccaagggcaucacugggucu

SEQ ID NO: 122869 - RNA, 32 nt, Homo Sapiens
ccuguaucagacugccuauugaaguucaaccu

SEQ ID NO: 122870 - RNA, 32 nt, Homo Sapiens
agcauggagaggaggaagagggggccccuagu

SEQ ID NO: 122871 - RNA, 32 nt, Homo Sapiens
aagacccuggaagcugacggccagagggaggg

SEQ ID NO: 122872 - RNA, 32 nt, Homo Sapiens
ugagguuuuuaaaauaagguuuucuaguuuug

SEQ ID NO: 122873 - RNA, 32 nt, Homo Sapiens
aggcuguuauuaccaggaggaagagaaagagg

SEQ ID NO: 122874 - RNA, 32 nt, Homo Sapiens
auuucaacuggucuuguagaauuuaagcaacu

SEQ ID NO: 122875 - RNA, 32 nt, Homo Sapiens
auagaaucuuuauacucuuuuacugugugguu

SEQ ID NO: 122876 - RNA, 32 nt, Homo Sapiens
gccugcccugguuccuccccagccugagucag

SEQ ID NO: 122877 - RNA, 32 nt, Homo Sapiens
aggagaagaaacugaggccuggaauuugauua

SEQ ID NO: 122878 - RNA, 32 nt, Homo Sapiens
gggugcugggaucgauuccuagcuuuaccacu

SEQ ID NO: 122879 - RNA, 32 nt, Homo Sapiens
guguuucugagcuuggcaucaaggcugaugga

SEQ ID NO: 122880 - RNA, 32 nt, Homo Sapiens
cauguauauguugucuguuguaaaauguuaac

SEQ ID NO: 122881 - RNA, 32 nt, Homo Sapiens
acaccaggcgcugguguguuugccagagaccc

SEQ ID NO: 122882 - RNA, 32 nt, Homo Sapiens
gucugggcucaguugagaagauaggaucuccc

SEQ ID NO: 122883 - RNA, 32 nt, Homo Sapiens
gaccagaacugggagaggaagagagcaggaca

SEQ ID NO: 122884 - RNA, 32 nt, Homo Sapiens
gagucacagcuauugauaugauguacaaggag

SEQ ID NO: 122885 - RNA, 32 nt, Homo Sapiens
ccgcuccccggggaccgggccggcgccaugga

SEQ ID NO: 122886 - RNA, 32 nt, Homo Sapiens
ugggggguucccucauuaccccucugggcuua

SEQ ID NO: 122887 - RNA, 32 nt, Homo Sapiens
ccuaccucaaaauaauaagaaccauauguaau

SEQ ID NO: 122888 - RNA, 32 nt, Homo Sapiens
aggccugggcugugacgcgcgcgccggagcgg

SEQ ID NO: 122889 - RNA, 32 nt, Homo Sapiens
cuccagccugggcaacagagccaggcccugua

SEQ ID NO: 122890 - RNA, 32 nt, Homo Sapiens
ggaguuugaagcugcagugagccaugauugca

SEQ ID NO: 122891 - RNA, 30 nt, Homo Sapiens
aaauguaccacuguugcagaagcuccucac

SEQ ID NO: 122892 - RNA, 32 nt, Homo Sapiens
ugagcagcgggcccagacugcgcuccggccgc

SEQ ID NO: 122893 - RNA, 31 nt, Homo Sapiens
auguuauauugaaaaaauagagccugaggga

SEQ ID NO: 122894 - RNA, 32 nt, Homo Sapiens
ccucacccacccaggacuucaugcagggcugg

SEQ ID NO: 122895 - RNA, 32 nt, Homo Sapiens
ggcagcucugggaccuaggaguuugcuucuga

SEQ ID NO: 122896 - RNA, 32 nt, Homo Sapiens
gaaagccaagcugagaauaaacccagagacaa

SEQ ID NO: 122897 - RNA, 32 nt, Homo Sapiens
caugaaccugguuuuuuuuuauucuguugugg

SEQ ID NO: 122898 - RNA, 32 nt, Homo Sapiens
gcaggagacagagauaaagagagauucauaua

SEQ ID NO: 122899 - RNA, 32 nt, Homo Sapiens
cgcccccggcccagcccugccuugcgccaccc

SEQ ID NO: 122900 - RNA, 32 nt, Homo Sapiens
cggagucgcccgagaaguaguuuguguguaag

SEQ ID NO: 122901 - RNA, 32 nt, Homo Sapiens
aguuuuguggguuuucuucuauguguggaauu

SEQ ID NO: 122902 - RNA, 32 nt, Homo Sapiens
ugacagcucagagagagaaagaucugagggaa

SEQ ID NO: 122903 - RNA, 29 nt, Homo Sapiens
cugccuaaaaugaagugaaagcugcacuu

SEQ ID NO: 122904 - RNA, 32 nt, Homo Sapiens
aauucacaaggcaagagcugguguacagguuu

SEQ ID NO: 122905 - RNA, 32 nt, Homo Sapiens
cuaccuggggccuauuucuacuuucauuuugu

SEQ ID NO: 122906 - RNA, 31 nt, Homo Sapiens
uuuguaacaaagaacugaagcucuuauuaua

SEQ ID NO: 122907 - RNA, 32 nt, Homo Sapiens
guggacgccccucccccacuggguggcgcaga

SEQ ID NO: 122908 - RNA, 32 nt, Homo Sapiens
ccuuucugcuccacugcucagcaagaugaggu

SEQ ID NO: 122909 - RNA, 30 nt, Homo Sapiens
caaagaggcaggcggaugauccccauccua

SEQ ID NO: 122910 - RNA, 32 nt, Homo Sapiens
gccauuuauagcaaacugccugacuuuggagu

SEQ ID NO: 122911 - RNA, 32 nt, Homo Sapiens
ggagagccgagccgggggcgcugugcgcagcg

SEQ ID NO: 122912 - RNA, 32 nt, Homo Sapiens
guacauagccuauauuuacagugaaaauguaa

SEQ ID NO: 122913 - RNA, 32 nt, Homo Sapiens
acauaacugaucuauuuauuaucgcauacaga

SEQ ID NO: 122914 - RNA, 32 nt, Homo Sapiens
ggcuucaggaaacagaguugugaggagaaaga

SEQ ID NO: 122915 - RNA, 32 nt, Homo Sapiens
agagaugccuucuucggugacggcgcuggguc

SEQ ID NO: 122916 - RNA, 32 nt, Homo Sapiens
acagagguuguauaacagcacaacaaagacaa

SEQ ID NO: 122917 - RNA, 32 nt, Homo Sapiens
ggcgcguagagcuggaaggagguccccuugac

SEQ ID NO: 122918 - RNA, 32 nt, Homo Sapiens
gguuucauuauguuggccaggcuggucuccaa

SEQ ID NO: 122919 - RNA, 32 nt, Homo Sapiens
agcauguguacuuauagauucauuuggguggc

SEQ ID NO: 122920 - RNA, 32 nt, Homo Sapiens
ugcuucccuacauagacuagagggcuaaggau

SEQ ID NO: 122921 - RNA, 30 nt, Homo Sapiens
ggggcugcgagugagcaccagcgauugguu

SEQ ID NO: 122922 - RNA, 32 nt, Homo Sapiens
uugcccgaagguacggggagccaggacgaccc

SEQ ID NO: 122923 - RNA, 32 nt, Homo Sapiens
ggcgaauccggcggguaucagagccaucagaa

SEQ ID NO: 122924 - RNA, 32 nt, Homo Sapiens
ccacgggaccccagcccugaccaacccauggu

SEQ ID NO: 122925 - RNA, 32 nt, Homo Sapiens
gcccccgcucggcgcccgcugcacccuuagca

SEQ ID NO: 122926 - RNA, 32 nt, Homo Sapiens
agugcgaggggaggacaggcgaagcgcgcguc

SEQ ID NO: 122927 - RNA, 32 nt, Homo Sapiens
cugucuccaaaaaugcuauuguugcaauaucu

SEQ ID NO: 122928 - RNA, 32 nt, Homo Sapiens
ccaaaaaucugccacagccugccuccaucagc

SEQ ID NO: 122929 - RNA, 32 nt, Homo Sapiens
gguacucacuggaugcacccaggccggcccga

SEQ ID NO: 122930 - RNA, 32 nt, Homo Sapiens
acugugaaauguuugucuuuucuguuuuuuaa

SEQ ID NO: 122931 - RNA, 32 nt, Homo Sapiens
uauuguguuggcuuuacaaauaauuuuuugca

SEQ ID NO: 122932 - RNA, 32 nt, Homo Sapiens
ugugauggcgacaagauugaagcuaggucuca

SEQ ID NO: 122933 - RNA, 32 nt, Homo Sapiens
uguucauccaaguuuuaaguccuccacccugu

SEQ ID NO: 122934 - RNA, 32 nt, Homo Sapiens
aaccagguguggauugugaucagaccuagaau

SEQ ID NO: 122935 - RNA, 32 nt, Homo Sapiens
gcuacagucaauccugcucuguuugccucauu

SEQ ID NO: 122936 - RNA, 32 nt, Homo Sapiens
uugguugaaaccacugaggagcaucacccugg

SEQ ID NO: 122937 - RNA, 32 nt, Homo Sapiens
acaauugccacccaucggguuuugggugugug

SEQ ID NO: 122938 - RNA, 32 nt, Homo Sapiens
uuuucuggaagacauggcuugguuggaagacg

SEQ ID NO: 122939 - RNA, 32 nt, Homo Sapiens
ggcauggcaaaguggaaauaauucauuuuggc

SEQ ID NO: 122940 - RNA, 30 nt, Homo Sapiens
cggguguggggcgcguguggaacgugugug

SEQ ID NO: 122941 - RNA, 32 nt, Homo Sapiens
uaaaaauaaaaagccagugucugccagcacua

SEQ ID NO: 122942 - RNA, 32 nt, Homo Sapiens
gggcgggggaggaggaccccagcuggccugag

SEQ ID NO: 122943 - RNA, 32 nt, Homo Sapiens
ugauuauaauauuuuuaaauguaggaugaguc

SEQ ID NO: 122944 - RNA, 32 nt, Homo Sapiens
uguccucuuguuaaagauuuuucaaugacacu

SEQ ID NO: 122945 - RNA, 32 nt, Homo Sapiens
cugcuccaaggagggagggagcgcagggaaaa

SEQ ID NO: 122946 - RNA, 32 nt, Homo Sapiens
ucagaugucuucugccuguuauaacucugcac

SEQ ID NO: 122947 - RNA, 32 nt, Homo Sapiens
uuucuaccugcucuauacuuggcacucaauua

SEQ ID NO: 122948 - RNA, 32 nt, Homo Sapiens
aaguaauuacacaauuagugacuccagcuuau

SEQ ID NO: 122949 - RNA, 32 nt, Homo Sapiens
gugaaucucugcaguggcuauguuguuucuua

SEQ ID NO: 122950 - RNA, 32 nt, Homo Sapiens
cuccgagacuggccggccgcgggaucccagga

SEQ ID NO: 122951 - RNA, 32 nt, Homo Sapiens
ucuucagcacccgcggccgccaucgccgucgc

SEQ ID NO: 122952 - RNA, 32 nt, Homo Sapiens
ugcuggagguccucagcacacccacgcccuuc

SEQ ID NO: 122953 - RNA, 32 nt, Homo Sapiens
uaaagacaggagcuggcauuuaugacagacaa

SEQ ID NO: 122954 - RNA, 32 nt, Homo Sapiens
ucccggacccggcagcccgagcaggagccgug

SEQ ID NO: 122955 - RNA, 32 nt, Homo Sapiens
acucucccaucaccugcucugcucuuacaagg

SEQ ID NO: 122956 - RNA, 32 nt, Homo Sapiens
cccaggcagagugagcucucuggccucuuggu

SEQ ID NO: 122957 - RNA, 32 nt, Homo Sapiens
gaggggggccccaggaaugcagugcuuggagc

SEQ ID NO: 122958 - RNA, 32 nt, Homo Sapiens
cuucacucaagagcuuacuaugugucuaaguc

SEQ ID NO: 122959 - RNA, 32 nt, Homo Sapiens
ugcauauuuccacuucucuucuguggccagau

SEQ ID NO: 122960 - RNA, 32 nt, Homo Sapiens
cugcgguuccccgaggugcccgggcuggccgg

SEQ ID NO: 122961 - RNA, 32 nt, Homo Sapiens
uauguguaaaaugugaagugaaugaaacacuc

SEQ ID NO: 122962 - RNA, 32 nt, Homo Sapiens
ggguggggaaaggggucggcugaccaugcuca

SEQ ID NO: 122963 - RNA, 32 nt, Homo Sapiens
guacaugcuguaaaauggucauuuguucuggc

SEQ ID NO: 122964 - RNA, 32 nt, Homo Sapiens
uguagcccuugagugacuuugguuaacuuggu

SEQ ID NO: 122965 - RNA, 32 nt, Homo Sapiens
uuccugcagagucuguagcaagagggaaagua

SEQ ID NO: 122966 - RNA, 32 nt, Homo Sapiens
uuucagguuuuugcaaguagauuuuguaaugu

SEQ ID NO: 122967 - RNA, 32 nt, Homo Sapiens
aggcaaaacaccuggugggaaguuguaucuug

SEQ ID NO: 122968 - RNA, 32 nt, Homo Sapiens
auugcuagacccaggauguaucuuuaauucuu

SEQ ID NO: 122969 - RNA, 32 nt, Homo Sapiens
ggggugugguggcucaugccuguaauccuagc

SEQ ID NO: 122970 - RNA, 32 nt, Homo Sapiens
ccuagccgagaccgguaagccgaagcccuuga

SEQ ID NO: 122971 - RNA, 32 nt, Homo Sapiens
uaagaagcccugcagagcacaaacuucagaaa

SEQ ID NO: 122972 - RNA, 32 nt, Homo Sapiens
cuucaccgguguuccugcagggacccuccguc

SEQ ID NO: 122973 - RNA, 32 nt, Homo Sapiens
cccuccugccuccacgcccacccagcgucgac

SEQ ID NO: 122974 - RNA, 32 nt, Homo Sapiens
ucccuccgucccuccgcccaccgagggucggc

SEQ ID NO: 122975 - RNA, 32 nt, Homo Sapiens
cuucauuccucuuaggagagugccaaacucag

SEQ ID NO: 122976 - RNA, 32 nt, Homo Sapiens
ggucgggaggucgucucucaucccugccucau

SEQ ID NO: 122977 - RNA, 32 nt, Homo Sapiens
uggcucacaccuguaaucacugcacuccaacc

SEQ ID NO: 122978 - RNA, 32 nt, Homo Sapiens
guuccaggcuccagcccucccccucgcccugc

SEQ ID NO: 122979 - RNA, 28 nt, Homo Sapiens
gucugacucuggaguauuauaaaguccu

SEQ ID NO: 122980 - RNA, 32 nt, Homo Sapiens
uaauuuuauuucauguuaauuagcuuaacuuu

SEQ ID NO: 122981 - RNA, 32 nt, Homo Sapiens
ccacagugugaggauaaauguagaaucguggu

SEQ ID NO: 122982 - RNA, 32 nt, Homo Sapiens
gggcgcccggccuguuccccagcccugccugg

SEQ ID NO: 122983 - RNA, 32 nt, Homo Sapiens
uuucuagauccuaugugaaaagaaaagugaag

SEQ ID NO: 122984 - RNA, 32 nt, Homo Sapiens
uacagcccauagaacaaaucuagcccaccacc

SEQ ID NO: 122985 - RNA, 32 nt, Homo Sapiens
guauauuaggauuuaaauuuaugccacaauuu

SEQ ID NO: 122986 - RNA, 32 nt, Homo Sapiens
caagggcaggccagguaaggcuuggguguucc

SEQ ID NO: 122987 - RNA, 32 nt, Homo Sapiens
caggccauuuuucaaauuuacaucaaagauac

SEQ ID NO: 122988 - RNA, 32 nt, Homo Sapiens
ccacagccaccaucgugucagcagcacguuga

SEQ ID NO: 122989 - RNA, 32 nt, Homo Sapiens
uccccuccaccccacacccuguguccauauca

SEQ ID NO: 122990 - RNA, 32 nt, Homo Sapiens
gaccccgguggcaguggaaaaaucagaagcac

SEQ ID NO: 122991 - RNA, 32 nt, Homo Sapiens
uuuccuguguuuuuuuuuuuuagaauucauua

SEQ ID NO: 122992 - RNA, 32 nt, Homo Sapiens
agugcacauaauguuuuaugauuuggauguca

SEQ ID NO: 122993 - RNA, 32 nt, Homo Sapiens
cugacggaaugggcaacuuucgccccuguggg

SEQ ID NO: 122994 - RNA, 32 nt, Homo Sapiens
aauaaagauuuuauuuuuuagagcaguuucau

SEQ ID NO: 122995 - RNA, 32 nt, Homo Sapiens
cuccccaaggccagggcagcugugcggccugg

SEQ ID NO: 122996 - RNA, 32 nt, Homo Sapiens
cuguggcuuucugcaaucacgugcgcacugaa

SEQ ID NO: 122997 - RNA, 32 nt, Homo Sapiens
gcugaugauggcuccaccuggaccugccaacu

SEQ ID NO: 122998 - RNA, 31 nt, Homo Sapiens
aguuuaucauugacuuuaagagguagaaaug

SEQ ID NO: 122999 - RNA, 32 nt, Homo Sapiens
gcuuauuuauauccuuuuuuuucauuuuaaau

SEQ ID NO: 123000 - RNA, 32 nt, Homo Sapiens
gggucuccgcaugcugcagcugcucccgggug

SEQ ID NO: 123001 - RNA, 32 nt, Homo Sapiens
gcauuguacagccccccacuccccucaccacc

SEQ ID NO: 123002 - RNA, 32 nt, Homo Sapiens
gugauguauccacaacucucccgcaaguuaca

SEQ ID NO: 123003 - RNA, 32 nt, Homo Sapiens
agccauguuguuuugccugucaaaccuaaaag

SEQ ID NO: 123004 - RNA, 32 nt, Homo Sapiens
cgccuguaaccccagcacuuugggaggcugag

SEQ ID NO: 123005 - RNA, 32 nt, Homo Sapiens
gugaggcgaggccgcgucgcucaguucuggcc

SEQ ID NO: 123006 - RNA, 30 nt, Homo Sapiens
uaggccaagcccgugccucagggcagccuu

SEQ ID NO: 123007 - RNA, 32 nt, Homo Sapiens
cccugaaacugggauuuuaaaaugagccugga

SEQ ID NO: 123008 - RNA, 32 nt, Homo Sapiens
uauuguuuuguuguuguugugaaugacaaguc

SEQ ID NO: 123009 - RNA, 32 nt, Homo Sapiens
cuaaagccagagccuucacgugaagguggcag

SEQ ID NO: 123010 - RNA, 32 nt, Homo Sapiens
uuaaacaaauaugaaaaauguaaauacucaug

SEQ ID NO: 123011 - RNA, 32 nt, Homo Sapiens
aucaaagaaaccgacccugauuacgaggaugu

SEQ ID NO: 123012 - RNA, 32 nt, Homo Sapiens
cugaggucgggauuuugagaccagccugacca

SEQ ID NO: 123013 - RNA, 32 nt, Homo Sapiens
ugucaaguauaaagucaggaccuggcuuggcu

SEQ ID NO: 123014 - RNA, 32 nt, Homo Sapiens
auuugcuuagaaauuccuuuuaucauaaaagu

SEQ ID NO: 123015 - RNA, 32 nt, Homo Sapiens
uccccagaccaagcuaagcaaaaauuaaccaa

SEQ ID NO: 123016 - RNA, 32 nt, Homo Sapiens
uggcagagaaacugagagaaaagggauggaga

SEQ ID NO: 123017 - RNA, 32 nt, Homo Sapiens
gugagcaauuuugauucccauguaucacauga

SEQ ID NO: 123018 - RNA, 32 nt, Homo Sapiens
uacugagccucucaccucccagcccucagcca

SEQ ID NO: 123019 - RNA, 32 nt, Homo Sapiens
cuagaagcgcugcgggaagcagggacagugga

SEQ ID NO: 123020 - RNA, 32 nt, Homo Sapiens
acuccaggacaccaccugcguagaucguguug

SEQ ID NO: 123021 - RNA, 32 nt, Homo Sapiens
uggcuuaccaggggaaguugacaacuuguugg

SEQ ID NO: 123022 - RNA, 32 nt, Homo Sapiens
agagguggcagccgcaccuuucugugagaacg

SEQ ID NO: 123023 - RNA, 32 nt, Homo Sapiens
gcuuuacugcgcgcucugguacugcuguggcu

SEQ ID NO: 123024 - RNA, 32 nt, Homo Sapiens
uagguugucauucagacuuuaacauuaauuuc

SEQ ID NO: 123025 - RNA, 32 nt, Homo Sapiens
gugguucuaagccccagcacgucugccucugg

SEQ ID NO: 123026 - RNA, 32 nt, Homo Sapiens
ucaauauggcagaugauuuacaguccauuaua

SEQ ID NO: 123027 - RNA, 32 nt, Homo Sapiens
ucacguccagcgcccaucuccccuuccgugcc

SEQ ID NO: 123028 - RNA, 32 nt, Homo Sapiens
gggccauggcugacaccuccagguccgccugg

SEQ ID NO: 123029 - RNA, 32 nt, Homo Sapiens
auacauuuaauuuuaaaaucugcaacauuuca

SEQ ID NO: 123030 - RNA, 32 nt, Homo Sapiens
ugggguuauguggucaugcucagaucuaccua

SEQ ID NO: 123031 - RNA, 32 nt, Homo Sapiens
aaguccaguguuucuuuuuuuuuuuuuuuuug

SEQ ID NO: 123032 - RNA, 32 nt, Homo Sapiens
ccacugccucaccuccccuguaucugcagcac

SEQ ID NO: 123033 - RNA, 32 nt, Homo Sapiens
aaucuuuucuguaccuccacucagcacaguuc

SEQ ID NO: 123034 - RNA, 32 nt, Homo Sapiens
ggccccggggccggagaugggcacucucgggu

SEQ ID NO: 123035 - RNA, 32 nt, Homo Sapiens
acuaauuuuuaaauacuuacuagcucugaaau

SEQ ID NO: 123036 - RNA, 32 nt, Homo Sapiens
uuguuguaaccugagguauccaaaugcuacag

SEQ ID NO: 123037 - RNA, 32 nt, Homo Sapiens
auucugaaauuaaggaaggagaaggacuugaa

SEQ ID NO: 123038 - RNA, 32 nt, Homo Sapiens
ggcugggacuuccucugagugaugccugaggg

SEQ ID NO: 123039 - RNA, 32 nt, Homo Sapiens
cugcuuggcuggauguacaaagaaauaggcau

SEQ ID NO: 123040 - RNA, 32 nt, Homo Sapiens
uggcgugcaccuguaaucccagcuacuaggga

SEQ ID NO: 123041 - RNA, 32 nt, Homo Sapiens
gugcucagcuggggguguggacagguaggggu

SEQ ID NO: 123042 - RNA, 32 nt, Homo Sapiens
ggcaaagguauuauguaaaaauauuuaauaau

SEQ ID NO: 123043 - RNA, 32 nt, Homo Sapiens
cuccugugcuccaagguucugaagauaucuuc

SEQ ID NO: 123044 - RNA, 32 nt, Homo Sapiens
gaaucgucucggugggggugccggggccuggc

SEQ ID NO: 123045 - RNA, 32 nt, Homo Sapiens
gucuagguuugugugaguaagcaagaaauaaa

SEQ ID NO: 123046 - RNA, 32 nt, Homo Sapiens
uccugaucuagccccagaccuggccaggccag

SEQ ID NO: 123047 - RNA, 32 nt, Homo Sapiens
ugccuuaaauuaauagcagccucucaagucca

SEQ ID NO: 123048 - RNA, 32 nt, Homo Sapiens
gccguucuguucccaggcaucuccaggcaccc

SEQ ID NO: 123049 - RNA, 30 nt, Homo Sapiens
cuagcuuguagaaugggggaacccacugua

SEQ ID NO: 123050 - RNA, 32 nt, Homo Sapiens
cgagaacgacccggcggccaguucucuuccuc

SEQ ID NO: 123051 - RNA, 32 nt, Homo Sapiens
cggaggcgggguggagggggucggggcucgcg

SEQ ID NO: 123052 - RNA, 32 nt, Homo Sapiens
aaagauuuacacagauuugaauagcaguguua

SEQ ID NO: 123053 - RNA, 32 nt, Homo Sapiens
uuuauuuuuuggccuuagaaucugcagaaauu

SEQ ID NO: 123054 - RNA, 32 nt, Homo Sapiens
cuccuuuaggcuguaauugcuuccuacacacg

SEQ ID NO: 123055 - RNA, 32 nt, Homo Sapiens
cguuuucaaacacaaggucucuuacagguaua

SEQ ID NO: 123056 - RNA, 32 nt, Homo Sapiens
agcggcggcggcgcucggacugucccauccgc

SEQ ID NO: 123057 - RNA, 32 nt, Homo Sapiens
uaacccacauuguaaagccgugaauguuuuua

SEQ ID NO: 123058 - RNA, 32 nt, Homo Sapiens
cucucccugcuugggcgccgccgcgcgagcgc

SEQ ID NO: 123059 - RNA, 32 nt, Homo Sapiens
aguuacggcuggaagcauccacaucagaccca

SEQ ID NO: 123060 - RNA, 32 nt, Homo Sapiens
gcuguuguacuauucccauuucaaugcucaau

SEQ ID NO: 123061 - RNA, 32 nt, Homo Sapiens
caucaagaauuugaaugucaauaucuuugccu

SEQ ID NO: 123062 - RNA, 32 nt, Homo Sapiens
uuugcagggccaccuggaggcuggggugcugg

SEQ ID NO: 123063 - RNA, 32 nt, Homo Sapiens
gagccucugcagucggaagagugggcgcagca

SEQ ID NO: 123064 - RNA, 32 nt, Homo Sapiens
ggaggacaagguggggacagacuugcuggagg

SEQ ID NO: 123065 - RNA, 32 nt, Homo Sapiens
cugggucgaguggucagagcuccggacuccag

SEQ ID NO: 123066 - RNA, 32 nt, Homo Sapiens
gcguuuguagcuccggccccgccguuccgacc

SEQ ID NO: 123067 - RNA, 32 nt, Homo Sapiens
acacucgcucuuucucuccgguacacacagcu

SEQ ID NO: 123068 - RNA, 32 nt, Homo Sapiens
uacaauuuuaaaccucucuuuaauuaaaagau

SEQ ID NO: 123069 - RNA, 32 nt, Homo Sapiens
acuauaucaaggacaugaaggagaacugagug

SEQ ID NO: 123070 - RNA, 32 nt, Homo Sapiens
ccgugguggcucaagucuggccccacaccagc

SEQ ID NO: 123071 - RNA, 32 nt, Homo Sapiens
uccugguuguauguggccuguuuacaugaugu

SEQ ID NO: 123072 - RNA, 32 nt, Homo Sapiens
auucggugccuuucuguuuaccagcuacuuca

SEQ ID NO: 123073 - RNA, 32 nt, Homo Sapiens
acucagaacacuacagcggagacgccacccgg

SEQ ID NO: 123074 - RNA, 32 nt, Homo Sapiens
gcaugugcuguaaaaauaguuaacagggaaau

SEQ ID NO: 123075 - RNA, 32 nt, Homo Sapiens
ggagagcucaggugcuggucccguccccugca

SEQ ID NO: 123076 - RNA, 32 nt, Homo Sapiens
ggcaagucuuuaggucuuuguaagaacuaaag

SEQ ID NO: 123077 - RNA, 32 nt, Homo Sapiens
cagguuuugauaaccacugaaaugguagaaua

SEQ ID NO: 123078 - RNA, 32 nt, Homo Sapiens
uuuguuccugacuagcuuaacccauuaucuuc

SEQ ID NO: 123079 - RNA, 32 nt, Homo Sapiens
cuaaaaucuauuucuaguagcuuuuucauguc

SEQ ID NO: 123080 - RNA, 32 nt, Homo Sapiens
ucugggaccugccagcaccguuuuugucguua

SEQ ID NO: 123081 - RNA, 32 nt, Homo Sapiens
aggagagcaaaggcauuagacacuaggccaua

SEQ ID NO: 123082 - RNA, 32 nt, Homo Sapiens
cgcgcgcggcaaugcugaggcugcuggcgucc

SEQ ID NO: 123083 - RNA, 32 nt, Homo Sapiens
aaaauaacaaaauaaauaaucuacuguacaca

SEQ ID NO: 123084 - RNA, 32 nt, Homo Sapiens
uuuccagauuuccugaaaaauaaaaguuuaca

SEQ ID NO: 123085 - RNA, 32 nt, Homo Sapiens
gggaaggcauuuugguuuuuuauuccacgcug

SEQ ID NO: 123086 - RNA, 32 nt, Homo Sapiens
cauccagccucccagaagaauacucaacaacc

SEQ ID NO: 123087 - RNA, 32 nt, Homo Sapiens
guucucugugcccccagagcugugcucuccuu

SEQ ID NO: 123088 - RNA, 32 nt, Homo Sapiens
ggauggaggcggagaaaccgaagucugugcug

SEQ ID NO: 123089 - RNA, 32 nt, Homo Sapiens
ugccccguuuuaaauugucaguuuucccucug

SEQ ID NO: 123090 - RNA, 32 nt, Homo Sapiens
aaucauuguaaauuauauuuuagcauggucug

SEQ ID NO: 123091 - RNA, 32 nt, Homo Sapiens
ggagcucuuugagaaugggacguugcugugga

SEQ ID NO: 123092 - RNA, 32 nt, Homo Sapiens
gugcauuaaaauugguuucuguaaaacgugua

SEQ ID NO: 123093 - RNA, 32 nt, Homo Sapiens
cauaaaagauggaaagaaaacacacaccgaag

SEQ ID NO: 123094 - RNA, 32 nt, Homo Sapiens
ggcaaaguucccugcccaccgacgccagccug

SEQ ID NO: 123095 - RNA, 32 nt, Homo Sapiens
acuuucugccagcaucugcagccagcaagcug

SEQ ID NO: 123096 - RNA, 31 nt, Homo Sapiens
uaaaugaguuuuacgaaccagggaaaaaaaa

SEQ ID NO: 123097 - RNA, 32 nt, Homo Sapiens
gacauuguuaaaugagcaaaaugugugauuuc

SEQ ID NO: 123098 - RNA, 32 nt, Homo Sapiens
ugggccugguaguuuuccaucuuguucuggcc

SEQ ID NO: 123099 - RNA, 32 nt, Homo Sapiens
ggaguaacugguuuuucuuggguggcugauga

SEQ ID NO: 123100 - RNA, 32 nt, Homo Sapiens
aaagauggcuuuagguuuuucuugaagaauua

SEQ ID NO: 123101 - RNA, 32 nt, Homo Sapiens
uacuuuuaaaacagcuuuagcuguucuuuauc

SEQ ID NO: 123102 - RNA, 32 nt, Homo Sapiens
caccccgaggugccccccuggaccacugccuc

SEQ ID NO: 123103 - RNA, 32 nt, Homo Sapiens
auuuggauaguauggugaaaaaucuacauucu

SEQ ID NO: 123104 - RNA, 32 nt, Homo Sapiens
ccaggaauagauuuuucuuacucuacauaugu

SEQ ID NO: 123105 - RNA, 31 nt, Homo Sapiens
uaagcuuugugcuuagagaauguauguguuu

SEQ ID NO: 123106 - RNA, 32 nt, Homo Sapiens
uagcaauauuauauuucuacuaaaaaaaaaaa

SEQ ID NO: 123107 - RNA, 32 nt, Homo Sapiens
aaagaguuaaggaaacuugaucuugguuggcu

SEQ ID NO: 123108 - RNA, 32 nt, Homo Sapiens
gacuugggggagugaaggcagagccuggugca

SEQ ID NO: 123109 - RNA, 32 nt, Homo Sapiens
acuggaccccuacaggaagcuccgugugccca

SEQ ID NO: 123110 - RNA, 32 nt, Homo Sapiens
gccaucauaugcuuuuaaucuuuguuucaguu

SEQ ID NO: 123111 - RNA, 32 nt, Homo Sapiens
gcauugugucauugggccuuccaguuccucaa

SEQ ID NO: 123112 - RNA, 32 nt, Homo Sapiens
uacaaaaaaaauuuuuuuuuuaauuagccagg

SEQ ID NO: 123113 - RNA, 32 nt, Homo Sapiens
gggguuggaggccuggcugaccaagaagccaa

SEQ ID NO: 123114 - RNA, 32 nt, Homo Sapiens
auuuggauauuguaaaauccacauggcuccaa

SEQ ID NO: 123115 - RNA, 32 nt, Homo Sapiens
agaauuauguucauucuccuuaauuccuuaac

SEQ ID NO: 123116 - RNA, 32 nt, Homo Sapiens
ccgagacucccccaucugcgcccccgcccugc

SEQ ID NO: 123117 - RNA, 32 nt, Homo Sapiens
aggucgggggcucagucugggagguaauaaaa

SEQ ID NO: 123118 - RNA, 32 nt, Homo Sapiens
cuuuuucaaugagaagcucgucuacuagggaa

SEQ ID NO: 123119 - RNA, 32 nt, Homo Sapiens
ggagguggccccugcccucccucuggaccccc

SEQ ID NO: 123120 - RNA, 32 nt, Homo Sapiens
gcgggagcucugcgaggccgggcgccgccaug

SEQ ID NO: 123121 - RNA, 32 nt, Homo Sapiens
ugacguauuuccccuucuguccccuaguaagc

SEQ ID NO: 123122 - RNA, 32 nt, Homo Sapiens
cgcuaguaacugugauaccauacuauaaaaca

SEQ ID NO: 123123 - RNA, 32 nt, Homo Sapiens
ucacaaaaaccagugccaaaaccaucaaaaaa

SEQ ID NO: 123124 - RNA, 32 nt, Homo Sapiens
gccacucugugccacuccgugccaggcccuga

SEQ ID NO: 123125 - RNA, 32 nt, Homo Sapiens
agugcccgccccucuaagcccggagcccggcg

SEQ ID NO: 123126 - RNA, 32 nt, Homo Sapiens
ggggaggauccacuucugugccuuuccagcuu

SEQ ID NO: 123127 - RNA, 32 nt, Homo Sapiens
uagagccgagccgcugguacccgcccgguacc

SEQ ID NO: 123128 - RNA, 32 nt, Homo Sapiens
agauggguggcagauggcccacaggggccugu

SEQ ID NO: 123129 - RNA, 32 nt, Homo Sapiens
ugugugcucccuguuaucuacauugccuggac

SEQ ID NO: 123130 - RNA, 32 nt, Homo Sapiens
ucuggaagcaaaauauauuaugcugaugguaa

SEQ ID NO: 123131 - RNA, 32 nt, Homo Sapiens
agugagguaaggccucuuucuaaggaaguuug

SEQ ID NO: 123132 - RNA, 32 nt, Homo Sapiens
gggggagagauggggcggggcuuggaaggagc

SEQ ID NO: 123133 - RNA, 32 nt, Homo Sapiens
ugguagccgacugugaggaaaagcagagggaa

SEQ ID NO: 123134 - RNA, 32 nt, Homo Sapiens
uccggagguggcggggguguuggggacgggug

SEQ ID NO: 123135 - RNA, 32 nt, Homo Sapiens
cacuugaugagagaugagagugucacauuaau

SEQ ID NO: 123136 - RNA, 32 nt, Homo Sapiens
gggagccgcccggugcccguguguccguuccu

SEQ ID NO: 123137 - RNA, 32 nt, Homo Sapiens
caugcccacagcagccucggugacgagagcac

SEQ ID NO: 123138 - RNA, 32 nt, Homo Sapiens
uguuauuuuuuggagggcuagugauacauggu

SEQ ID NO: 123139 - RNA, 31 nt, Homo Sapiens
ccccuggucccacuccugcccccgcccuacc

SEQ ID NO: 123140 - RNA, 32 nt, Homo Sapiens
ccaccauacugccaguacacgucuacccucug

SEQ ID NO: 123141 - RNA, 32 nt, Homo Sapiens
ccggagcccagcccccugccccggcccugcuc

SEQ ID NO: 123142 - RNA, 32 nt, Homo Sapiens
gcaaggcccugcgugccugcugcuggccgggc

SEQ ID NO: 123143 - RNA, 32 nt, Homo Sapiens
agauggccaccucguggugcugcggugacuuu

SEQ ID NO: 123144 - RNA, 32 nt, Homo Sapiens
gaggcagcagaaguugcagagaagagugaggc

SEQ ID NO: 123145 - RNA, 27 nt, Homo Sapiens
gacaagcccuucuucagcacuacaggg

SEQ ID NO: 123146 - RNA, 31 nt, Homo Sapiens
ggaugugugcggugaaggauguuuugauacc

SEQ ID NO: 123147 - RNA, 32 nt, Homo Sapiens
ggccucagacugcacccaggaggggaacacug

SEQ ID NO: 123148 - RNA, 32 nt, Homo Sapiens
ccggacuguguugccugggugcucauucagag

SEQ ID NO: 123149 - RNA, 32 nt, Homo Sapiens
uacuugauaaccucuuaaggaaaauuugcuuc

SEQ ID NO: 123150 - RNA, 32 nt, Homo Sapiens
cucgccugcccccacgccgcccgccacccagg

SEQ ID NO: 123151 - RNA, 32 nt, Homo Sapiens
cugccuugggucuggaaacuguuagaggaaac

SEQ ID NO: 123152 - RNA, 32 nt, Homo Sapiens
uuuuagaagcuaauguaggacuguauagguag

SEQ ID NO: 123153 - RNA, 32 nt, Homo Sapiens
guuaacauuuuucuuucugcagagaggaagau

SEQ ID NO: 123154 - RNA, 32 nt, Homo Sapiens
gccauugcucccuugucaagugucucacaagg

SEQ ID NO: 123155 - RNA, 32 nt, Homo Sapiens
ccugucugucuccacucucaucccaggcaauc

SEQ ID NO: 123156 - RNA, 32 nt, Homo Sapiens
aacuggccgcgugaggggccugaggcgagcgg

SEQ ID NO: 123157 - RNA, 32 nt, Homo Sapiens
agaggggugcggcagcuucaggaggcagaaac

SEQ ID NO: 123158 - RNA, 32 nt, Homo Sapiens
uacaaucaaauuauagaaauuacuuguguaaa

SEQ ID NO: 123159 - RNA, 32 nt, Homo Sapiens
aaaaaccugccccugcuccccccucccgccac

SEQ ID NO: 123160 - RNA, 32 nt, Homo Sapiens
ugaaaguugagucuuucuuaaucuagacagca

SEQ ID NO: 123161 - RNA, 32 nt, Homo Sapiens
agcauuuuuuaaaauacaggauuuuaaaagca

SEQ ID NO: 123162 - RNA, 31 nt, Homo Sapiens
acucgucauuugauuuauuaaaagccaagau

SEQ ID NO: 123163 - RNA, 32 nt, Homo Sapiens
uuguguuuuuauucuaacaugcucacuugggc

SEQ ID NO: 123164 - RNA, 32 nt, Homo Sapiens
uuuuuuuguuuuaugaaagaggauaauaauag

SEQ ID NO: 123165 - RNA, 32 nt, Homo Sapiens
cuuguuucuaguauguacuuugaaaugcuaac

SEQ ID NO: 123166 - RNA, 32 nt, Homo Sapiens
cagcgguggcggcuccucggggugcucggcuc

SEQ ID NO: 123167 - RNA, 32 nt, Homo Sapiens
augcaucaggacgaccccgggacggcuguggg

SEQ ID NO: 123168 - RNA, 32 nt, Homo Sapiens
cucucccugccuguuuuccccaaaguggaaag

SEQ ID NO: 123169 - RNA, 32 nt, Homo Sapiens
gaucacuugagcccgggagguugaggcugcag

SEQ ID NO: 123170 - RNA, 32 nt, Homo Sapiens
uuuucccuggaaaguucuuucuguagaucuuu

SEQ ID NO: 123171 - RNA, 32 nt, Homo Sapiens
gggucacagguacuagucuuggaggaggaacu

SEQ ID NO: 123172 - RNA, 32 nt, Homo Sapiens
acucuaggaucaugaagugcuaugcuauuucc

SEQ ID NO: 123173 - RNA, 32 nt, Homo Sapiens
agcaaauguauuauuuaucuaacuuuuggaau

SEQ ID NO: 123174 - RNA, 32 nt, Homo Sapiens
aacucuacagcauuccuuuccuugaagucuuc

SEQ ID NO: 123175 - RNA, 32 nt, Homo Sapiens
gcgcacucucuagcccggcagaugaaggcgaa

SEQ ID NO: 123176 - RNA, 32 nt, Homo Sapiens
agcaugagggagguuggaaaagauaaugaaag

SEQ ID NO: 123177 - RNA, 32 nt, Homo Sapiens
gagagaccaacccacaccccaccccaggucau

SEQ ID NO: 123178 - RNA, 32 nt, Homo Sapiens
caggaagccccagcugccccuggcgggugugg

SEQ ID NO: 123179 - RNA, 32 nt, Homo Sapiens
cagugcuuccuccaugaauuugaaagacauau

SEQ ID NO: 123180 - RNA, 32 nt, Homo Sapiens
cacgugcgagggugcacgugucaggcaagauc

SEQ ID NO: 123181 - RNA, 32 nt, Homo Sapiens
gacauuccugucauccaugccaacuaccuaac

SEQ ID NO: 123182 - RNA, 32 nt, Homo Sapiens
ggggcucgcaggcgcgcaucccuccugacugg

SEQ ID NO: 123183 - RNA, 32 nt, Homo Sapiens
gagugcaguggcaugaugucggcucacugcaa

SEQ ID NO: 123184 - RNA, 32 nt, Homo Sapiens
uuucagcguggcggcgcuggugcuggcguugg

SEQ ID NO: 123185 - RNA, 32 nt, Homo Sapiens
cccacagcugucuaacggcagggggcagggaa

SEQ ID NO: 123186 - RNA, 32 nt, Homo Sapiens
ccagugcccuuugcaucguccccucccccacc

SEQ ID NO: 123187 - RNA, 32 nt, Homo Sapiens
ggcccagucaucagcccucuuuuccggugccg

SEQ ID NO: 123188 - RNA, 32 nt, Homo Sapiens
ccugugcaauaaauacaccuugauuugaguuu

SEQ ID NO: 123189 - RNA, 32 nt, Homo Sapiens
agcugcugccuggccccccgcaggccccgagg

SEQ ID NO: 123190 - RNA, 32 nt, Homo Sapiens
gaggugccaagagauggcucuugcuauuauuu

SEQ ID NO: 123191 - RNA, 32 nt, Homo Sapiens
gucucuuguuuuuucuuccugguucaggauac

SEQ ID NO: 123192 - RNA, 32 nt, Homo Sapiens
acuguccacaguguucaugugcuggagucagg

SEQ ID NO: 123193 - RNA, 32 nt, Homo Sapiens
gcgggccugaggcgaaggagcggccgggagcc

SEQ ID NO: 123194 - RNA, 32 nt, Homo Sapiens
auuuggggaugugaguguuagagcuggugaga

SEQ ID NO: 123195 - RNA, 31 nt, Homo Sapiens
uuagaacuuugugugaaauagauuggccaac

SEQ ID NO: 123196 - RNA, 32 nt, Homo Sapiens
auacagccaucuuuuagcaucuguaaacucau

SEQ ID NO: 123197 - RNA, 32 nt, Homo Sapiens
cgccucgggaugccccacacugcccagagcca

SEQ ID NO: 123198 - RNA, 32 nt, Homo Sapiens
cgccccgggauagcugcaggugccccggaaua

SEQ ID NO: 123199 - RNA, 32 nt, Homo Sapiens
auaggauagaaaggcaggcucagaacuaaugc

SEQ ID NO: 123200 - RNA, 32 nt, Homo Sapiens
uuccuguguggcccuccugucuggagugacau

SEQ ID NO: 123201 - RNA, 32 nt, Homo Sapiens
caaggcaugcaaacaaacaagaaaguauaaua

SEQ ID NO: 123202 - RNA, 32 nt, Homo Sapiens
aaagugcugggaugccaggcgugagucaccga

SEQ ID NO: 123203 - RNA, 32 nt, Homo Sapiens
ggcuggucuaaaacuccugaccucaagugauc

SEQ ID NO: 123204 - RNA, 32 nt, Homo Sapiens
uuugguucaacaacuggaacaagcauuggaag

SEQ ID NO: 123205 - RNA, 32 nt, Homo Sapiens
uaucuaaaaaccgaaaggccagaguugccaug

SEQ ID NO: 123206 - RNA, 32 nt, Homo Sapiens
agcaaaagauauuaaauaugcuaacauagcua

SEQ ID NO: 123207 - RNA, 32 nt, Homo Sapiens
aagacauaaaguggagaccaagaugaguucac

SEQ ID NO: 123208 - RNA, 32 nt, Homo Sapiens
ccagccuggccgccuggcauggggacugguug

SEQ ID NO: 123209 - RNA, 32 nt, Homo Sapiens
caucccuuuucacaugguuucuccauguauau

SEQ ID NO: 123210 - RNA, 32 nt, Homo Sapiens
aagaaugaacaaauugaacucuuugaaugaca

SEQ ID NO: 123211 - RNA, 32 nt, Homo Sapiens
aauaaaauauaauuguuuuuuaucuuuucuac

SEQ ID NO: 123212 - RNA, 32 nt, Homo Sapiens
ucucagucaggagaucgagaccauccuggcua

SEQ ID NO: 123213 - RNA, 32 nt, Homo Sapiens
gguggcgcaugccuauaaucccagguacucag

SEQ ID NO: 123214 - RNA, 32 nt, Homo Sapiens
ugaauccccccuccuugaccccgaacagugaa

SEQ ID NO: 123215 - RNA, 31 nt, Homo Sapiens
cuuggcacaaauuguacauuugagugucuuu

SEQ ID NO: 123216 - RNA, 32 nt, Homo Sapiens
aaauaauuauacauuucaucauaauguagaau

SEQ ID NO: 123217 - RNA, 28 nt, Homo Sapiens
acuguggcuucaggaugaagacaugaga

SEQ ID NO: 123218 - RNA, 32 nt, Homo Sapiens
aucuggccgugcucugagccccccgcccuucu

SEQ ID NO: 123219 - RNA, 31 nt, Homo Sapiens
uugaggaacauauugagaaagguucagauug

SEQ ID NO: 123220 - RNA, 32 nt, Homo Sapiens
gagucauccuugcugcagcaucgcuugcacau

SEQ ID NO: 123221 - RNA, 32 nt, Homo Sapiens
gagaaccguuuggcaauauguacgacgcggau

SEQ ID NO: 123222 - RNA, 30 nt, Homo Sapiens
agaaugcuaauauuuggggaaacuaugcag

SEQ ID NO: 123223 - RNA, 32 nt, Homo Sapiens
uaggggagauaauaucagcaucaaauucuuug

SEQ ID NO: 123224 - RNA, 30 nt, Homo Sapiens
acaaaagcgggcggcggcggcaggaugaac

SEQ ID NO: 123225 - RNA, 32 nt, Homo Sapiens
cccgggcagacacucucucccucaggaagagg

SEQ ID NO: 123226 - RNA, 32 nt, Homo Sapiens
gagccugggugacagggcaagacccugucuca

SEQ ID NO: 123227 - RNA, 32 nt, Homo Sapiens
ccagacccccugagcccucccagggacccucc

SEQ ID NO: 123228 - RNA, 32 nt, Homo Sapiens
ucuuggcucugcagcccucuggggagccugcg

SEQ ID NO: 123229 - RNA, 32 nt, Homo Sapiens
uaauggugauacucaaguaugauacaaaaaga

SEQ ID NO: 123230 - RNA, 32 nt, Homo Sapiens
aaaaauuaauacuacuagcuuccagacaauca

SEQ ID NO: 123231 - RNA, 32 nt, Homo Sapiens
uaccccgcgcccgcggcgcccgguagccagga

SEQ ID NO: 123232 - RNA, 32 nt, Homo Sapiens
gugauguuggagacuuaacuuuaagcaagagg

SEQ ID NO: 123233 - RNA, 32 nt, Homo Sapiens
aucuuggucccugugaugucaagcccauugcu

SEQ ID NO: 123234 - RNA, 32 nt, Homo Sapiens
aaaaaugugcauguaaauauauacucucaaca

SEQ ID NO: 123235 - RNA, 32 nt, Homo Sapiens
ggugugagccgcugcgcucggccuucuuugau

SEQ ID NO: 123236 - RNA, 32 nt, Homo Sapiens
agccauuuaacuggagcuccgauuuaacuggg

SEQ ID NO: 123237 - RNA, 32 nt, Homo Sapiens
gggguagugagcgcgucacuuccugccgcugc

SEQ ID NO: 123238 - RNA, 32 nt, Homo Sapiens
ugagaggcauauauuuauugcacuauuaaauu

SEQ ID NO: 123239 - RNA, 32 nt, Homo Sapiens
gagcuugcagugagccgagauagcgccacugc

SEQ ID NO: 123240 - RNA, 32 nt, Homo Sapiens
gaggcuuggccccuccucucccaagccuggca

SEQ ID NO: 123241 - RNA, 32 nt, Homo Sapiens
ucucccaauuaauagauuuuaaaugaaucuua

SEQ ID NO: 123242 - RNA, 32 nt, Homo Sapiens
guuuuggcuuucaugaacaaguaaauuacagu

SEQ ID NO: 123243 - RNA, 32 nt, Homo Sapiens
uucuguaaauguuuuguaaacauauuaccuca

SEQ ID NO: 123244 - RNA, 32 nt, Homo Sapiens
uauuccuuauucuuuaagcaguguuggcuucc

SEQ ID NO: 123245 - RNA, 32 nt, Homo Sapiens
gcauuguucuugauuaguuuggcacuccauua

SEQ ID NO: 123246 - RNA, 32 nt, Homo Sapiens
uuuuguuggccauauuacugccacacaugaga

SEQ ID NO: 123247 - RNA, 32 nt, Homo Sapiens
uuuucuggaaaacagacggauuuuacuucugg

SEQ ID NO: 123248 - RNA, 32 nt, Homo Sapiens
ccggucgggggaagagaccugacagguaauua

SEQ ID NO: 123249 - RNA, 32 nt, Homo Sapiens
acccagcagaaucaaaguggauccagugucag

SEQ ID NO: 123250 - RNA, 32 nt, Homo Sapiens
ugcuccauuguuaauugagaaacuguuucaau

SEQ ID NO: 123251 - RNA, 32 nt, Homo Sapiens
ugccuccagccgccggcugugcaguccugggu

SEQ ID NO: 123252 - RNA, 32 nt, Homo Sapiens
ugagaaagacaucugaggaaaauggaagaccu

SEQ ID NO: 123253 - RNA, 32 nt, Homo Sapiens
auuucucaauuauauuaaaucuucugugaaua

SEQ ID NO: 123254 - RNA, 32 nt, Homo Sapiens
gcccugcccucccccacggccgucccugacuu

SEQ ID NO: 123255 - RNA, 32 nt, Homo Sapiens
gggcggucggagccgccgggagcuguaguucu

SEQ ID NO: 123256 - RNA, 32 nt, Homo Sapiens
acaggcaaaggcuggaacaguuuggagggcuc

SEQ ID NO: 123257 - RNA, 32 nt, Homo Sapiens
aaggagggcuaggcaaauuuaguucucauuua

SEQ ID NO: 123258 - RNA, 32 nt, Homo Sapiens
gccugaaaaauauauagaaacugauauacaau

SEQ ID NO: 123259 - RNA, 32 nt, Homo Sapiens
uccauauuaaaaauguuuuaaauauuuugauu

SEQ ID NO: 123260 - RNA, 32 nt, Homo Sapiens
aaagauuuuccacagcuacuugagugucuaac

SEQ ID NO: 123261 - RNA, 32 nt, Homo Sapiens
ggcgcuugcgcggcggcggcuauggcggcgga

SEQ ID NO: 123262 - RNA, 32 nt, Homo Sapiens
gagcagugcuguccaugauguaauggaagcua

SEQ ID NO: 123263 - RNA, 32 nt, Homo Sapiens
cccuaguugcugucucggcugcucucccauag

SEQ ID NO: 123264 - RNA, 32 nt, Homo Sapiens
uuugagcacaggaggaaaugcaaccagucagg

SEQ ID NO: 123265 - RNA, 32 nt, Homo Sapiens
cccccuuucacagauggcaccccugggcaucu

SEQ ID NO: 123266 - RNA, 32 nt, Homo Sapiens
cggcggagcuggaagagugagggugaaggcaa

SEQ ID NO: 123267 - RNA, 29 nt, Homo Sapiens
ggcacaaugaauguauauuuuguguuauu

SEQ ID NO: 123268 - RNA, 32 nt, Homo Sapiens
caccaccuggaacacagcugugacuugauaaa

SEQ ID NO: 123269 - RNA, 32 nt, Homo Sapiens
cggccaguggcaacaaggagcugagcaugaag

SEQ ID NO: 123270 - RNA, 32 nt, Homo Sapiens
ccaaagaacugaugcuuaaacacacaggugug

SEQ ID NO: 123271 - RNA, 32 nt, Homo Sapiens
agccaacccagcuggacuggccuuacuucugc

SEQ ID NO: 123272 - RNA, 32 nt, Homo Sapiens
cgugcugcccgacgaggagcugcagugggugu

SEQ ID NO: 123273 - RNA, 32 nt, Homo Sapiens
gguaagggaaaggcuagguaccuaccauguau

SEQ ID NO: 123274 - RNA, 32 nt, Homo Sapiens
ccugccaccauguaagacgugccuuccugcug

SEQ ID NO: 123275 - RNA, 32 nt, Homo Sapiens
cacugcacuccagccugggugacaaagcaaga

SEQ ID NO: 123276 - RNA, 32 nt, Homo Sapiens
cacuacacuccagccugggugacaaagcgaga

SEQ ID NO: 123277 - RNA, 32 nt, Homo Sapiens
cacugcacuccagccuaggugacagagcaaga

SEQ ID NO: 123278 - RNA, 32 nt, Homo Sapiens
agucugucucuucgccgguucccggccccgug

SEQ ID NO: 123279 - RNA, 32 nt, Homo Sapiens
gcaggcggagcugcuaagagccugcugacaug

SEQ ID NO: 123280 - RNA, 32 nt, Homo Sapiens
aaccuucaguccuuauucaaauuuauaaguug

SEQ ID NO: 123281 - RNA, 32 nt, Homo Sapiens
ucgcagcaggaaccaggcuccaggcgccggcg

SEQ ID NO: 123282 - RNA, 32 nt, Homo Sapiens
ccgggcgcucgcagccgagcgcggccggggaa

SEQ ID NO: 123283 - RNA, 32 nt, Homo Sapiens
uuuuuucuauagaccauuaacauaauuugacu

SEQ ID NO: 123284 - RNA, 32 nt, Homo Sapiens
agaggagcaggagggcggggcaagggucuccc

SEQ ID NO: 123285 - RNA, 32 nt, Homo Sapiens
ucuccuccccaucgagcccaccccuccuuucc

SEQ ID NO: 123286 - RNA, 32 nt, Homo Sapiens
uuuugauuaagagaaaaauguaauacaauuac

SEQ ID NO: 123287 - RNA, 32 nt, Homo Sapiens
cuaaauccauuuguuucuuuggaccaaaaaug

SEQ ID NO: 123288 - RNA, 32 nt, Homo Sapiens
gccuggagaugacuugaggccuuacuuaaacc

SEQ ID NO: 123289 - RNA, 32 nt, Homo Sapiens
ugacaaaugaggaaacagguuauggaagggaa

SEQ ID NO: 123290 - RNA, 29 nt, Homo Sapiens
ggccauggaggagcccccugugcgagaag

SEQ ID NO: 123291 - RNA, 32 nt, Homo Sapiens
gcuguuccuugaaaauguguuguugcuguguc

SEQ ID NO: 123292 - RNA, 32 nt, Homo Sapiens
aaacaagcccucacugaaccaacuccagaugc

SEQ ID NO: 123293 - RNA, 30 nt, Homo Sapiens
aguuucugauaaugacggauaucaacaauu

SEQ ID NO: 123294 - RNA, 32 nt, Homo Sapiens
ggcaaggcugcugcagcuccgcuggcugugca

SEQ ID NO: 123295 - RNA, 32 nt, Homo Sapiens
ggcuugcccagcugggaagcccaucaaaccuc

SEQ ID NO: 123296 - RNA, 32 nt, Homo Sapiens
uucugccucuacauuucuuuuuguuuguucgu

SEQ ID NO: 123297 - RNA, 32 nt, Homo Sapiens
ccuuccacuggccagcauucuccucuauuaga

SEQ ID NO: 123298 - RNA, 32 nt, Homo Sapiens
auguccuggcuuuguggcaaccccagggaggu

SEQ ID NO: 123299 - RNA, 32 nt, Homo Sapiens
acagcccggccgcgcggcgguuggugccggcg

SEQ ID NO: 123300 - RNA, 32 nt, Homo Sapiens
cacuuuccuuccuuuuuccuuuccagucauac

SEQ ID NO: 123301 - RNA, 29 nt, Homo Sapiens
gaauccauauguagacuucauggagacua

SEQ ID NO: 123302 - RNA, 27 nt, Homo Sapiens
gggcaucccuucuucguucccaucaug

SEQ ID NO: 123303 - RNA, 31 nt, Homo Sapiens
cacaaugcuagcugccugccccgcagccagu

SEQ ID NO: 123304 - RNA, 29 nt, Homo Sapiens
gaugugugagaauaaacuagacucugaac

SEQ ID NO: 123305 - RNA, 32 nt, Homo Sapiens
gaggacgaacagagauccugaaauucugacuu

SEQ ID NO: 123306 - RNA, 32 nt, Homo Sapiens
acuaaguguuuucaauacaauuuuuuccguau

SEQ ID NO: 123307 - RNA, 32 nt, Homo Sapiens
ugaggccuaggguccccuccccgggccucugc

SEQ ID NO: 123308 - RNA, 32 nt, Homo Sapiens
gugaaguucagcagagaaacacguuggaagaa

SEQ ID NO: 123309 - RNA, 32 nt, Homo Sapiens
auaauauccaggaaacacuugcuggagccacu

SEQ ID NO: 123310 - RNA, 32 nt, Homo Sapiens
agaauuaaaaauauuucucaaacaacuguauc

SEQ ID NO: 123311 - RNA, 32 nt, Homo Sapiens
cguccgggaugggaaaagaauggaacuguccc

SEQ ID NO: 123312 - RNA, 32 nt, Homo Sapiens
gcacuccagccuuagccugggcgacagagcga

SEQ ID NO: 123313 - RNA, 32 nt, Homo Sapiens
gccuuaagaaaagaaugccggagggcccuugg

SEQ ID NO: 123314 - RNA, 32 nt, Homo Sapiens
auuuggggcccccuccuucucugucagggcug

SEQ ID NO: 123315 - RNA, 32 nt, Homo Sapiens
uugccucgggcugcgugaccgccccuccucca

SEQ ID NO: 123316 - RNA, 32 nt, Homo Sapiens
ccagcuauuuuuguauuuuuaguagagauggg

SEQ ID NO: 123317 - RNA, 32 nt, Homo Sapiens
aaaucuucugguguuuaauugugauaauaaga

SEQ ID NO: 123318 - RNA, 32 nt, Homo Sapiens
gcaaggcugcuguucuggauuaucuaaugcuc

SEQ ID NO: 123319 - RNA, 32 nt, Homo Sapiens
gauggugcugaauuguugcuuggauggaaaaa

SEQ ID NO: 123320 - RNA, 32 nt, Homo Sapiens
uugugcuguuuucaauuuugugcuaucgcaaa

SEQ ID NO: 123321 - RNA, 32 nt, Homo Sapiens
ggguauucgcgccgccgccgcccgccaugcgc

SEQ ID NO: 123322 - RNA, 32 nt, Homo Sapiens
agcagguggaggaggacggcgccugugcccac

SEQ ID NO: 123323 - RNA, 32 nt, Homo Sapiens
ggagcacgacugugucccaaacaaacaaaaaa

SEQ ID NO: 123324 - RNA, 32 nt, Homo Sapiens
ccugcggcgccuccugucggcccgagaaggga

SEQ ID NO: 123325 - RNA, 32 nt, Homo Sapiens
uggccugccugccgguugucgguggccccgau

SEQ ID NO: 123326 - RNA, 32 nt, Homo Sapiens
aacagaaaaucgucuuauaguugagaauuuau

SEQ ID NO: 123327 - RNA, 31 nt, Homo Sapiens
guuuggaugccggcgcugcugccuguggccu

SEQ ID NO: 123328 - RNA, 32 nt, Homo Sapiens
auucagggcccccaauucguacguggagaagu

SEQ ID NO: 123329 - RNA, 32 nt, Homo Sapiens
uccuucuuauuuuguuaugcuggcagccauuu

SEQ ID NO: 123330 - RNA, 32 nt, Homo Sapiens
cgcgucgugcugcgcgcacaccuucagcucca

SEQ ID NO: 123331 - RNA, 32 nt, Homo Sapiens
ccccagucgccuccccgcaccgcuguggccag

SEQ ID NO: 123332 - RNA, 32 nt, Homo Sapiens
gcucucagccccacagggaaccugcccagaga

SEQ ID NO: 123333 - RNA, 32 nt, Homo Sapiens
cauugcacuccagcugagagugugacccuguc

SEQ ID NO: 123334 - RNA, 32 nt, Homo Sapiens
gaggggaaaaagaugacagagaaguggacucc

SEQ ID NO: 123335 - RNA, 32 nt, Homo Sapiens
uaaauagcucccauuuacccaaaauaacuagu

SEQ ID NO: 123336 - RNA, 32 nt, Homo Sapiens
ugaaguacuacagauagcacaaggaagaccau

SEQ ID NO: 123337 - RNA, 32 nt, Homo Sapiens
gaacauuucugugucauuucuaccacagaugc

SEQ ID NO: 123338 - RNA, 32 nt, Homo Sapiens
augaaagugccuuuuguugacuucuaacuucc

SEQ ID NO: 123339 - RNA, 32 nt, Homo Sapiens
augggguuggguggaggaggagccuacuauua

SEQ ID NO: 123340 - RNA, 32 nt, Homo Sapiens
aguaccccaagaguggugaaaaccccucccac

SEQ ID NO: 123341 - RNA, 32 nt, Homo Sapiens
uuuuuccgcacuucuccaccccucccacauuu

SEQ ID NO: 123342 - RNA, 32 nt, Homo Sapiens
uacaagccacuaccuucugaccuccccacccc

SEQ ID NO: 123343 - RNA, 32 nt, Homo Sapiens
uccgucuuuuucuccuuuuuucuaaaugucgg

SEQ ID NO: 123344 - RNA, 32 nt, Homo Sapiens
uuaaaggcauuuggauaccuuugugauagaaa

SEQ ID NO: 123345 - RNA, 32 nt, Homo Sapiens
gggcccgguucuccaucgcgcgcacggcagcc

SEQ ID NO: 123346 - RNA, 32 nt, Homo Sapiens
cccaaauccuucccggcugcagcuguccugcc

SEQ ID NO: 123347 - RNA, 32 nt, Homo Sapiens
cggggagggaaggaaacccaccccgacucccc

SEQ ID NO: 123348 - RNA, 32 nt, Homo Sapiens
uuauacaaugucccauuuucuggauuugucug

SEQ ID NO: 123349 - RNA, 32 nt, Homo Sapiens
ccccaggggaggaggagaugggcaggauuuag

SEQ ID NO: 123350 - RNA, 32 nt, Homo Sapiens
ucauaaaaaguuaugugauuuccuccucuguc

SEQ ID NO: 123351 - RNA, 32 nt, Homo Sapiens
cagucaccaagucuguauuucuaggccugacc

SEQ ID NO: 123352 - RNA, 32 nt, Homo Sapiens
cuagcagaauuguggcugaaaccuggugccca

SEQ ID NO: 123353 - RNA, 32 nt, Homo Sapiens
accugcgggugguggagugcaagccccagccc

SEQ ID NO: 123354 - RNA, 32 nt, Homo Sapiens
uuacaggugugagccaccacacuuggccagua

SEQ ID NO: 123355 - RNA, 32 nt, Homo Sapiens
ugaauccuuuuuaucaguuuggcacucgacag

SEQ ID NO: 123356 - RNA, 32 nt, Homo Sapiens
gauucagaaguuucaggggucuguuucuauac

SEQ ID NO: 123357 - RNA, 32 nt, Homo Sapiens
gacuggaugcccaagugauuuucucuaauaau

SEQ ID NO: 123358 - RNA, 32 nt, Homo Sapiens
gucacagagccgcaugcucccggagcccagcc

SEQ ID NO: 123359 - RNA, 32 nt, Homo Sapiens
uguguuaaugaauaguuuuucuugguuaaugc

SEQ ID NO: 123360 - RNA, 32 nt, Homo Sapiens
acugcugccauuuuuggaaacaucugcccaau

SEQ ID NO: 123361 - RNA, 32 nt, Homo Sapiens
cucauuuuguaaguauauguguuauagcaguu

SEQ ID NO: 123362 - RNA, 32 nt, Homo Sapiens
caagaaggaauuauucagaaaaacacugacag

SEQ ID NO: 123363 - RNA, 32 nt, Homo Sapiens
gaagucaaccgagcucccuuccaggucaaucc

SEQ ID NO: 123364 - RNA, 32 nt, Homo Sapiens
uccugcuguauauuuucucauuuuuugcguaa

SEQ ID NO: 123365 - RNA, 32 nt, Homo Sapiens
uucuugggcagggcuggcuacggcaagaggga

SEQ ID NO: 123366 - RNA, 32 nt, Homo Sapiens
ucuacaccuacaucggugaggugcuggugucc

SEQ ID NO: 123367 - RNA, 32 nt, Homo Sapiens
gcagccucuuaugcaggaggaccuccugaggc

SEQ ID NO: 123368 - RNA, 32 nt, Homo Sapiens
cccgggagcucgccgcgcgccggggaccagga

SEQ ID NO: 123369 - RNA, 32 nt, Homo Sapiens
accugugaacacacuuaugcauucaaauagau

SEQ ID NO: 123370 - RNA, 32 nt, Homo Sapiens
ugaccugggagcccuccucuaccugaauccag

SEQ ID NO: 123371 - RNA, 32 nt, Homo Sapiens
auuuguacauucaaguuguacuuguuauaucu

SEQ ID NO: 123372 - RNA, 32 nt, Homo Sapiens
ggccuuuggcuuucuucaguuucacugguauc

SEQ ID NO: 123373 - RNA, 32 nt, Homo Sapiens
ccagggccuaauuuauacuaauugaaucugaa

SEQ ID NO: 123374 - RNA, 32 nt, Homo Sapiens
ggaugaugagagauuauaaggugauuucauaa

SEQ ID NO: 123375 - RNA, 32 nt, Homo Sapiens
ugugucugcuuugauggagaucuguaauaaaa

SEQ ID NO: 123376 - RNA, 29 nt, Homo Sapiens
cgccauggucuuccucaccgcgcagcucu

SEQ ID NO: 123377 - RNA, 32 nt, Homo Sapiens
uaucgcugcccucccacccccauucccggcca

SEQ ID NO: 123378 - RNA, 32 nt, Homo Sapiens
ccugggcggggcggggcuacaagugcgguggg

SEQ ID NO: 123379 - RNA, 32 nt, Homo Sapiens
guguuccugcuucuccuucaguagcugcacaa

SEQ ID NO: 123380 - RNA, 32 nt, Homo Sapiens
augugguauguggagaaguucuguaugugagg

SEQ ID NO: 123381 - RNA, 32 nt, Homo Sapiens
uuaucugguccauuuuauucaugcuacuaaga

SEQ ID NO: 123382 - RNA, 32 nt, Homo Sapiens
aaccaguggucgcgacaaaaccauuccugugg

SEQ ID NO: 123383 - RNA, 32 nt, Homo Sapiens
cuacaaguacgacaguaccucagacgacagca

SEQ ID NO: 123384 - RNA, 32 nt, Homo Sapiens
uuuuugguguguuuuuuuuuuaaaucuuucau

SEQ ID NO: 123385 - RNA, 32 nt, Homo Sapiens
agaaacugaaucuuuuucauauucuaauaaau

SEQ ID NO: 123386 - RNA, 32 nt, Homo Sapiens
ugucaucugcaaacagggacaauuugacuucc

SEQ ID NO: 123387 - RNA, 32 nt, Homo Sapiens
auccaagaagcaugcagagaagaauugguuug

SEQ ID NO: 123388 - RNA, 32 nt, Homo Sapiens
uuuuaaaaacaaaaacagggaauaaaagcuuu

SEQ ID NO: 123389 - RNA, 31 nt, Homo Sapiens
ugaaaguguggucuguuucagaaugcugugg

SEQ ID NO: 123390 - RNA, 29 nt, Homo Sapiens
uuccuuucuauccuacaacaagaguuuau

SEQ ID NO: 123391 - RNA, 32 nt, Homo Sapiens
cugcgggggaggaggagggucugaagguggga

SEQ ID NO: 123392 - RNA, 32 nt, Homo Sapiens
cucuucgacagggaaccccgaggggacagugg

SEQ ID NO: 123393 - RNA, 32 nt, Homo Sapiens
agagaaaccccgagacacuguacacuguuccu

SEQ ID NO: 123394 - RNA, 32 nt, Homo Sapiens
auccugaguagacgcacccauccaucauagug

SEQ ID NO: 123395 - RNA, 32 nt, Homo Sapiens
uugaauacuguaaaacugugauaaacuuuaua

SEQ ID NO: 123396 - RNA, 32 nt, Homo Sapiens
uaggaaacaaaguccauuguaagaguccaugu

SEQ ID NO: 123397 - RNA, 32 nt, Homo Sapiens
ggaccgcuccagggccccggagcacagcgccc

SEQ ID NO: 123398 - RNA, 32 nt, Homo Sapiens
auauguauauauacauacacgcaauguauuca

SEQ ID NO: 123399 - RNA, 32 nt, Homo Sapiens
ugaaaauccaacagucugcauuccacagugac

SEQ ID NO: 123400 - RNA, 32 nt, Homo Sapiens
uggcuccagggccaguguuacaguguuacccu

SEQ ID NO: 123401 - RNA, 32 nt, Homo Sapiens
ugguguguacuauucaucagcuugggcugcca

SEQ ID NO: 123402 - RNA, 32 nt, Homo Sapiens
uuacuacauaucuaguaaaaccuuguuuaaua

SEQ ID NO: 123403 - RNA, 32 nt, Homo Sapiens
uggagaaaaaauagcugguuucuauuaauuau

SEQ ID NO: 123404 - RNA, 32 nt, Homo Sapiens
gccuucucauuuccgccucuccagacacugcg

SEQ ID NO: 123405 - RNA, 32 nt, Homo Sapiens
cacuacacuccagccugggugacagcaagaga

SEQ ID NO: 123406 - RNA, 32 nt, Homo Sapiens
cagcccagccccacccagacccauggcuggac

SEQ ID NO: 123407 - RNA, 32 nt, Homo Sapiens
aggcuucgcggaacgcucucggcgccaggacu

SEQ ID NO: 123408 - RNA, 32 nt, Homo Sapiens
uaggguuuuuauuuucuucuuucuuugucuuu

SEQ ID NO: 123409 - RNA, 32 nt, Homo Sapiens
cucacucuggccucagccgacugcacagcggc

SEQ ID NO: 123410 - RNA, 32 nt, Homo Sapiens
cagguucucccucugcccuccacugggcccag

SEQ ID NO: 123411 - RNA, 32 nt, Homo Sapiens
accccacccccuccaagcuggguucuuugugg

SEQ ID NO: 123412 - RNA, 32 nt, Homo Sapiens
gugauacauaucaguuuauagaucucagucua

SEQ ID NO: 123413 - RNA, 31 nt, Homo Sapiens
caugcaugcugggagcugccaagggcuuaca

SEQ ID NO: 123414 - RNA, 32 nt, Homo Sapiens
ccuuuaugacagacaucucagaauuaaaauca

SEQ ID NO: 123415 - RNA, 32 nt, Homo Sapiens
uguggccccagagcccagaccacagccugcag

SEQ ID NO: 123416 - RNA, 32 nt, Homo Sapiens
gggcgguaauggcggagcuggugcaggggcag

SEQ ID NO: 123417 - RNA, 32 nt, Homo Sapiens
aaguacagaccaucugcauauuuuguagcaaa

SEQ ID NO: 123418 - RNA, 32 nt, Homo Sapiens
agggaaagugaaccgacuuccccuucccauac

SEQ ID NO: 123419 - RNA, 32 nt, Homo Sapiens
cgugcuuccuuccugauugucucuagagcuuc

SEQ ID NO: 123420 - RNA, 32 nt, Homo Sapiens
cgcugcacggcugccggagccgggccaucacc

SEQ ID NO: 123421 - RNA, 32 nt, Homo Sapiens
aggagcccaagccaaaucugcuggcccaccca

SEQ ID NO: 123422 - RNA, 32 nt, Homo Sapiens
aagccuccaggauuuggugccgaacaucucuc

SEQ ID NO: 123423 - RNA, 32 nt, Homo Sapiens
cucaggaggccugcagaagagaacugauuggu

SEQ ID NO: 123424 - RNA, 32 nt, Homo Sapiens
gccugagcaacgucuccgagcaggcgcugggc

SEQ ID NO: 123425 - RNA, 32 nt, Homo Sapiens
agucuaaauaaauuaaugauguuuauuggguu

SEQ ID NO: 123426 - RNA, 32 nt, Homo Sapiens
ccagcugggaugaagacaguuuucugcaggua

SEQ ID NO: 123427 - RNA, 32 nt, Homo Sapiens
cagcuaccugcacuucuagaugcuccccaggu

SEQ ID NO: 123428 - RNA, 32 nt, Homo Sapiens
caccggagagugagcaggcggagacuccaagc

SEQ ID NO: 123429 - RNA, 32 nt, Homo Sapiens
aguguaaaauaaaacugacacaagcccaugua

SEQ ID NO: 123430 - RNA, 32 nt, Homo Sapiens
ccccagcccagccccagccucugcucuuuuga

SEQ ID NO: 123431 - RNA, 32 nt, Homo Sapiens
cuggcugcaggaauuucaauauguagaaacgc

SEQ ID NO: 123432 - RNA, 32 nt, Homo Sapiens
uuuuuauguuucuggugugugaacuuuauggu

SEQ ID NO: 123433 - RNA, 32 nt, Homo Sapiens
cccucccacugcacacucccacuuccucagcg

SEQ ID NO: 123434 - RNA, 32 nt, Homo Sapiens
accccguuagcuguuuucaauguaaugcugcc

SEQ ID NO: 123435 - RNA, 32 nt, Homo Sapiens
cacaagaaagagggcaaggaaaaaaggcugga

SEQ ID NO: 123436 - RNA, 32 nt, Homo Sapiens
gugauuuuuuucuggagaauuguaaaauaaag

SEQ ID NO: 123437 - RNA, 32 nt, Homo Sapiens
ucaacugaggaggggaagaaaguucuacguaa

SEQ ID NO: 123438 - RNA, 32 nt, Homo Sapiens
caaagccugggcccacagcugcaccggcagcc

SEQ ID NO: 123439 - RNA, 32 nt, Homo Sapiens
cugcagaaacagugcaaggaagggcagcgacu

SEQ ID NO: 123440 - RNA, 32 nt, Homo Sapiens
auucccaggcuuccuggugggugcagcccaau

SEQ ID NO: 123441 - RNA, 32 nt, Homo Sapiens
aacacuuugggcugggguuggccaccguagcu

SEQ ID NO: 123442 - RNA, 32 nt, Homo Sapiens
gcggcuugugagguccucuggagucagaagau

SEQ ID NO: 123443 - RNA, 32 nt, Homo Sapiens
uaaaagaaagagaaucucagaaguaguuugcu

SEQ ID NO: 123444 - RNA, 32 nt, Homo Sapiens
cugccacccucaggccugggccccagagcuca

SEQ ID NO: 123445 - RNA, 32 nt, Homo Sapiens
uaccaccagcugcuucauccacagaaggcgcu

SEQ ID NO: 123446 - RNA, 32 nt, Homo Sapiens
aagcugcuucugcccagucccagccgcggccc

SEQ ID NO: 123447 - RNA, 32 nt, Homo Sapiens
aggaugaggagcaaaguugggauuuggcagaa

SEQ ID NO: 123448 - RNA, 32 nt, Homo Sapiens
cucggcccacuuucccuccguuuguuuucuuu

SEQ ID NO: 123449 - RNA, 32 nt, Homo Sapiens
acccggcgccccggcgugugcgguuguggggg

SEQ ID NO: 123450 - RNA, 32 nt, Homo Sapiens
gcuccgugcagggcuguugcuaucacuuggag

SEQ ID NO: 123451 - RNA, 32 nt, Homo Sapiens
ucagauuccccucugggaucugucuucagaau

SEQ ID NO: 123452 - RNA, 32 nt, Homo Sapiens
ucacuuuguucgcuccucagucguccaggcgg

SEQ ID NO: 123453 - RNA, 32 nt, Homo Sapiens
gcccagccccacuucuccaucgcagccccacc

SEQ ID NO: 123454 - RNA, 32 nt, Homo Sapiens
acgauggaacagaggcacucaaauucuacaca

SEQ ID NO: 123455 - RNA, 32 nt, Homo Sapiens
ggcuugcugcuucauuacucaccuggaugggg

SEQ ID NO: 123456 - RNA, 32 nt, Homo Sapiens
cuuucucugaauggagagauugagagggaugu

SEQ ID NO: 123457 - RNA, 32 nt, Homo Sapiens
uauuucugauacagcugaaagcacuaaacuac

SEQ ID NO: 123458 - RNA, 32 nt, Homo Sapiens
cuggcacgcgagggccccggcggggcuguuag

SEQ ID NO: 123459 - RNA, 32 nt, Homo Sapiens
cagaacuuauguuguucucuauggagaacuaa

SEQ ID NO: 123460 - RNA, 32 nt, Homo Sapiens
auuuuaauuuaaaagaaagaucaauuauaucc

SEQ ID NO: 123461 - RNA, 32 nt, Homo Sapiens
uagauucucuucauugucuccauuucucuuuc

SEQ ID NO: 123462 - RNA, 32 nt, Homo Sapiens
ggaucuuucuugcugcagccugcuccagccug

SEQ ID NO: 123463 - RNA, 32 nt, Homo Sapiens
gguuccuaaaauugcguauagaauuaaggcac

SEQ ID NO: 123464 - RNA, 32 nt, Homo Sapiens
uuugcaaacaauuuuaaugaugguguuaaagc

SEQ ID NO: 123465 - RNA, 32 nt, Homo Sapiens
gcaaugcaaccgcagccaagaugucuuuagau

SEQ ID NO: 123466 - RNA, 32 nt, Homo Sapiens
cacauacaugaaauagugauacuucauucuca

SEQ ID NO: 123467 - RNA, 32 nt, Homo Sapiens
uuaaaaggaaggggcccggccgggcacagugg

SEQ ID NO: 123468 - RNA, 32 nt, Homo Sapiens
gugaaggaggaacugucaaacacauaaaccca

SEQ ID NO: 123469 - RNA, 32 nt, Homo Sapiens
ugcugggaggaugaccauggcugggggcagga

SEQ ID NO: 123470 - RNA, 32 nt, Homo Sapiens
auuuuggagauggaaauugacgaggagggaag

SEQ ID NO: 123471 - RNA, 32 nt, Homo Sapiens
uuaguagcaaccgacagaguggcaagggauuu

SEQ ID NO: 123472 - RNA, 32 nt, Homo Sapiens
uguugaagucuuuuucuguaauugcagauuug

SEQ ID NO: 123473 - RNA, 32 nt, Homo Sapiens
ugccuagcuguuguaaguuuucaucaguagcu

SEQ ID NO: 123474 - RNA, 32 nt, Homo Sapiens
ucuuaguuauuuauaguuaaaguugguacuaa

SEQ ID NO: 123475 - RNA, 32 nt, Homo Sapiens
cucccucuccggagugacaggcacauacauga

SEQ ID NO: 123476 - RNA, 27 nt, Homo Sapiens
uaaauuugcuucuucagccuucuuucc

SEQ ID NO: 123477 - RNA, 32 nt, Homo Sapiens
uaccacccgcccuggcuccccagcugcagguu

SEQ ID NO: 123478 - RNA, 32 nt, Homo Sapiens
gcccaaccgcaccucaggcaucuuuaacguca

SEQ ID NO: 123479 - RNA, 32 nt, Homo Sapiens
agguaccuuuccgcugccuccucccugcucuc

SEQ ID NO: 123480 - RNA, 32 nt, Homo Sapiens
cuccucuagauugaaguuuguuuucugaugcu

SEQ ID NO: 123481 - RNA, 32 nt, Homo Sapiens
cccagccaugcaauguuccuggaaggccgucc

SEQ ID NO: 123482 - RNA, 27 nt, Homo Sapiens
aaaaacuauuucuucagccccuucucu

SEQ ID NO: 123483 - RNA, 32 nt, Homo Sapiens
auugcuggguugggggcgugggaggcagaaga

SEQ ID NO: 123484 - RNA, 32 nt, Homo Sapiens
ccuuauuccggcugggacccaggacuucaagc

SEQ ID NO: 123485 - RNA, 32 nt, Homo Sapiens
cccggacccugaugaccgcgcgugcuucuaga

SEQ ID NO: 123486 - RNA, 32 nt, Homo Sapiens
uuuaccuugugucaggaaaaaaugugggguau

SEQ ID NO: 123487 - RNA, 32 nt, Homo Sapiens
uacacugccccauuuuagagguggggaaacaa

SEQ ID NO: 123488 - RNA, 32 nt, Homo Sapiens
ggugugugcagggcugcauccgcagauggcug

SEQ ID NO: 123489 - RNA, 32 nt, Homo Sapiens
gaucugcaguugggggcguggcggggcaggag

SEQ ID NO: 123490 - RNA, 32 nt, Homo Sapiens
uucagcaaccgcucccaccuccuccagcaccg

SEQ ID NO: 123491 - RNA, 32 nt, Homo Sapiens
auuauguggugacacuacuucaagagaaccuc

SEQ ID NO: 123492 - RNA, 32 nt, Homo Sapiens
ugcugguuagacagucuugguuucucuuucag

SEQ ID NO: 123493 - RNA, 32 nt, Homo Sapiens
gcuugagcugucaucagcugcuccccacuacc

SEQ ID NO: 123494 - RNA, 32 nt, Homo Sapiens
cacagagccaucuccugccugugaguuaggcc

SEQ ID NO: 123495 - RNA, 32 nt, Homo Sapiens
acucuucuaugaaaugcagaauuucuaguacc

SEQ ID NO: 123496 - RNA, 32 nt, Homo Sapiens
cucgagcucacaccaacagacacacgcgcgca

SEQ ID NO: 123497 - RNA, 32 nt, Homo Sapiens
cgcaguccccgcggacggccgggccgcggaga

SEQ ID NO: 123498 - RNA, 32 nt, Homo Sapiens
uugaauuguauauauuuauuuugcuuuacaga

SEQ ID NO: 123499 - RNA, 29 nt, Homo Sapiens
uugauggggagucucaguggauguuugac

SEQ ID NO: 123500 - RNA, 32 nt, Homo Sapiens
agcaggugggauagucaagugauucuauuugc

SEQ ID NO: 123501 - RNA, 32 nt, Homo Sapiens
uuugagcacuguauuuaucuguucuugcacug

SEQ ID NO: 123502 - RNA, 32 nt, Homo Sapiens
gcugcuugugaaucucuuucuggauugcucuu

SEQ ID NO: 123503 - RNA, 32 nt, Homo Sapiens
aacuggcaaaauuuacuuucaagcagaaguca

SEQ ID NO: 123504 - RNA, 32 nt, Homo Sapiens
gcuaugacaaagauggaaaagauggaaaagcg

SEQ ID NO: 123505 - RNA, 31 nt, Homo Sapiens
gaaucuuugugcucucgcugcaguucccuuu

SEQ ID NO: 123506 - RNA, 32 nt, Homo Sapiens
uaggacggaggcgucgcuaggcagcuucgaac

SEQ ID NO: 123507 - RNA, 32 nt, Homo Sapiens
ugagagacaaagguaauuauaaaccuauuuga

SEQ ID NO: 123508 - RNA, 32 nt, Homo Sapiens
uccaguguccccaagagguauuagaaucuugc

SEQ ID NO: 123509 - RNA, 32 nt, Homo Sapiens
gucauuaaaucgaauguauauuauuacuuuuu

SEQ ID NO: 123510 - RNA, 32 nt, Homo Sapiens
aggagccugggaaagcacuucgacgagaauag

SEQ ID NO: 123511 - RNA, 32 nt, Homo Sapiens
acccuugcuguaaaguaggauaacuugaauau

SEQ ID NO: 123512 - RNA, 32 nt, Homo Sapiens
ggucccggccagcucuggaguucucucaucgg

SEQ ID NO: 123513 - RNA, 32 nt, Homo Sapiens
agcggagagcgucccccggcgaggacgagcga

SEQ ID NO: 123514 - RNA, 32 nt, Homo Sapiens
acaucagaaucgucugagggacuuguucacug

SEQ ID NO: 123515 - RNA, 32 nt, Homo Sapiens
uugugucaaaaagguacagugauucagccauu

SEQ ID NO: 123516 - RNA, 32 nt, Homo Sapiens
cuuacacauguauaaacaacacugcaauuugu

SEQ ID NO: 123517 - RNA, 32 nt, Homo Sapiens
gcucgcggcuugccgcggcccggagcgcagcc

SEQ ID NO: 123518 - RNA, 32 nt, Homo Sapiens
agccaccuggggaggggaggcucaacccccua

SEQ ID NO: 123519 - RNA, 32 nt, Homo Sapiens
cccaaaagcuccacccaaugacuucugcuucc

SEQ ID NO: 123520 - RNA, 32 nt, Homo Sapiens
cuggcaucaguguaaagggcucugcccauagc

SEQ ID NO: 123521 - RNA, 32 nt, Homo Sapiens
gaaugaaaaauauguaagagucugcuuuauau

SEQ ID NO: 123522 - RNA, 32 nt, Homo Sapiens
aaaugcuugggaccagaaguguuucagauuuc

SEQ ID NO: 123523 - RNA, 32 nt, Homo Sapiens
ugcccgcccacuuugccuuaacuacccgcccg

SEQ ID NO: 123524 - RNA, 32 nt, Homo Sapiens
uaguuugcuuugcugaccaaaugccugguacc

SEQ ID NO: 123525 - RNA, 29 nt, Homo Sapiens
gaagaugcaacgugcccugccaggcgccc

SEQ ID NO: 123526 - RNA, 32 nt, Homo Sapiens
gcaggagggucucauugacucagcgccugcgc

SEQ ID NO: 123527 - RNA, 32 nt, Homo Sapiens
ccuugucgcucuugggucgggccccaggagcc

SEQ ID NO: 123528 - RNA, 32 nt, Homo Sapiens
cuggugggggagaguccgacgcgccuggcuag

SEQ ID NO: 123529 - RNA, 32 nt, Homo Sapiens
gugcugaggcggguaucaugggugcugugccc

SEQ ID NO: 123530 - RNA, 32 nt, Homo Sapiens
uuuguaaauguugauucagaaaaggaaagcac

SEQ ID NO: 123531 - RNA, 32 nt, Homo Sapiens
cuaaguguaaaaaagaaauaacuaagacuccu

SEQ ID NO: 123532 - RNA, 32 nt, Homo Sapiens
gguaggaaaaggaaaaggcccuucccuucccu

SEQ ID NO: 123533 - RNA, 32 nt, Homo Sapiens
caccuaaaccaaagaucacugaagauaaugua

SEQ ID NO: 123534 - RNA, 32 nt, Homo Sapiens
caaaaaauauaaaagucagccaggcguugugg

SEQ ID NO: 123535 - RNA, 32 nt, Homo Sapiens
gccgugccaaacuggagauucuucaccuucgc

SEQ ID NO: 123536 - RNA, 32 nt, Homo Sapiens
aaucuuuucuguacaagauaggauucauugca

SEQ ID NO: 123537 - RNA, 32 nt, Homo Sapiens
auuggugucugaguauguuauucaucugccgu

SEQ ID NO: 123538 - RNA, 32 nt, Homo Sapiens
ggacuuggggugaguuuguaacuguugcugcc

SEQ ID NO: 123539 - RNA, 32 nt, Homo Sapiens
agucugugcugucuuggcaugccuuggguuuc

SEQ ID NO: 123540 - RNA, 32 nt, Homo Sapiens
cuggucccuggcccugaacccugccuucuucc

SEQ ID NO: 123541 - RNA, 32 nt, Homo Sapiens
cccugccuggagcagagcugacucggagacag

SEQ ID NO: 123542 - RNA, 32 nt, Homo Sapiens
gauauuucaucaugacuguuaagaaaagguaa

SEQ ID NO: 123543 - RNA, 32 nt, Homo Sapiens
cuggguucaagagcuugcugggcuucuacaug

SEQ ID NO: 123544 - RNA, 32 nt, Homo Sapiens
gauucacuaaaauuauauaauuuaaauguauu

SEQ ID NO: 123545 - RNA, 32 nt, Homo Sapiens
uucuuuguucauucuuuucuggauaguguguc

SEQ ID NO: 123546 - RNA, 32 nt, Homo Sapiens
uaaagggcccaugacucaguccguucaggcug

SEQ ID NO: 123547 - RNA, 32 nt, Homo Sapiens
acaauggcuaaugauaauuuagcuuuauuaua

SEQ ID NO: 123548 - RNA, 32 nt, Homo Sapiens
agagagaguuuuuuuuuuuuuacuacaaauuu

SEQ ID NO: 123549 - RNA, 32 nt, Homo Sapiens
guuucuuaaaagacccuggagaaagaguggca

SEQ ID NO: 123550 - RNA, 32 nt, Homo Sapiens
acgagccagaaagggcccucugcuguggucug

SEQ ID NO: 123551 - RNA, 32 nt, Homo Sapiens
aauggcaaacucccuuuaagcaagaauucaug

SEQ ID NO: 123552 - RNA, 32 nt, Homo Sapiens
cagcaucccccuccuugacggugcuggcagga

SEQ ID NO: 123553 - RNA, 32 nt, Homo Sapiens
gacggcauuccuaccccucccccauucccagc

SEQ ID NO: 123554 - RNA, 32 nt, Homo Sapiens
cacuaacauugaugaaccagaugcaugucacc

SEQ ID NO: 123555 - RNA, 32 nt, Homo Sapiens
auaagaauauuuuguuucugcugcuucugucc

SEQ ID NO: 123556 - RNA, 32 nt, Homo Sapiens
cagaggguccucagcccuccugccugggcuau

SEQ ID NO: 123557 - RNA, 32 nt, Homo Sapiens
cccaagucauguuuuuaauagacugcuaauau

SEQ ID NO: 123558 - RNA, 29 nt, Homo Sapiens
uccuccaaaaguuuauaaucuacuagaug

SEQ ID NO: 123559 - RNA, 32 nt, Homo Sapiens
uugugucuuuugcuaaauaugaccuuucuaua

SEQ ID NO: 123560 - RNA, 32 nt, Homo Sapiens
gaaaugggagcacaguacugggaaaugggcau

SEQ ID NO: 123561 - RNA, 32 nt, Homo Sapiens
cuagguaaguuuauaugaccuaacuuaauugu

SEQ ID NO: 123562 - RNA, 32 nt, Homo Sapiens
aauaaugcaaggaaaaagguagccaccuucuc

SEQ ID NO: 123563 - RNA, 32 nt, Homo Sapiens
gcagaugaugugaaguuaucaguuggaggagc

SEQ ID NO: 123564 - RNA, 32 nt, Homo Sapiens
aaauaauugacaaagugguuuucacguguguc

SEQ ID NO: 123565 - RNA, 32 nt, Homo Sapiens
ugaagccaaauauuaggcuuaaaaacugaaaa

SEQ ID NO: 123566 - RNA, 26 nt, Homo Sapiens
gauggcggcguuagccggcgucuucg

SEQ ID NO: 123567 - RNA, 32 nt, Homo Sapiens
auucaagagacugaaucacuuuucucauugau

SEQ ID NO: 123568 - RNA, 32 nt, Homo Sapiens
uuuccuguuucauguagaauaguguuugucaa

SEQ ID NO: 123569 - RNA, 32 nt, Homo Sapiens
auaauggcucagaauacauauuugaacaucau

SEQ ID NO: 123570 - RNA, 32 nt, Homo Sapiens
ccccauucuucucaagcaaggauugccagcgc

SEQ ID NO: 123571 - RNA, 32 nt, Homo Sapiens
ggugagguuggaaaaaggcuccuguaacccuc

SEQ ID NO: 123572 - RNA, 32 nt, Homo Sapiens
agcccugcggcgggcgggaggaggugagcacc

SEQ ID NO: 123573 - RNA, 32 nt, Homo Sapiens
guaccuguguucccucaccaggccauccuguc

SEQ ID NO: 123574 - RNA, 32 nt, Homo Sapiens
uacaauuugccagcuguuacugaaccuucuau

SEQ ID NO: 123575 - RNA, 32 nt, Homo Sapiens
aaaugguuugaauacuaauacaaaagagauua

SEQ ID NO: 123576 - RNA, 32 nt, Homo Sapiens
ugauacucgaguauauaucugggauccacaua

SEQ ID NO: 123577 - RNA, 32 nt, Homo Sapiens
cgcaggaucccggccuggucaucgggcagugu

SEQ ID NO: 123578 - RNA, 32 nt, Homo Sapiens
ucggaggacaucgucuguguccaggucagaaa

SEQ ID NO: 123579 - RNA, 32 nt, Homo Sapiens
auggagucgucccgcggccgccggcggcaagg

SEQ ID NO: 123580 - RNA, 32 nt, Homo Sapiens
agaaugggagcacaccuggugcccagauuuug

SEQ ID NO: 123581 - RNA, 32 nt, Homo Sapiens
cugaguggucuugggugaaucacuucaucugc

SEQ ID NO: 123582 - RNA, 32 nt, Homo Sapiens
uuaugcuguauauggcauguuuugauacaggu

SEQ ID NO: 123583 - RNA, 32 nt, Homo Sapiens
acuuacauggcaggagcucuaauuaugcuuua

SEQ ID NO: 123584 - RNA, 32 nt, Homo Sapiens
agguguuuuuuuuuuccaauaugaacucaugc

SEQ ID NO: 123585 - RNA, 32 nt, Homo Sapiens
gagccggcugagaacggcagcggcgagggcuc

SEQ ID NO: 123586 - RNA, 32 nt, Homo Sapiens
cugaaaauuugaaagaaaagccuauaaaagug

SEQ ID NO: 123587 - RNA, 32 nt, Homo Sapiens
cuagcgucauauuuuucucacccaaauuacgu

SEQ ID NO: 123588 - RNA, 32 nt, Homo Sapiens
gcagcuguagcauuuauuaaaugcacgucaca

SEQ ID NO: 123589 - RNA, 30 nt, Homo Sapiens
cacugcaaccucccugccugauucucuugc

SEQ ID NO: 123590 - RNA, 32 nt, Homo Sapiens
cacccagguucaagugauucucgugucucagc

SEQ ID NO: 123591 - RNA, 32 nt, Homo Sapiens
gcuggccgccccacccuaagcuuauuaugcaa

SEQ ID NO: 123592 - RNA, 31 nt, Homo Sapiens
cuuuguggacucugccugcauggcuuaguag

SEQ ID NO: 123593 - RNA, 32 nt, Homo Sapiens
gggaaaugggagcacaguacuaggaaauggga

SEQ ID NO: 123594 - RNA, 32 nt, Homo Sapiens
cagaaugaaaauagaggucuaggaauuaucaa

SEQ ID NO: 123595 - RNA, 32 nt, Homo Sapiens
aagcauccaaauuuaaagggccgguacauagg

SEQ ID NO: 123596 - RNA, 32 nt, Homo Sapiens
gaccgagucugcuuucugugccuaguugaacg

SEQ ID NO: 123597 - RNA, 32 nt, Homo Sapiens
ggaaaaauucuguucucuuccuccuccaucuu

SEQ ID NO: 123598 - RNA, 32 nt, Homo Sapiens
cuccccugaggguggaggagcugugccugcau

SEQ ID NO: 123599 - RNA, 32 nt, Homo Sapiens
acauucagcagcaggugcuuuuuuauggccuu

SEQ ID NO: 123600 - RNA, 32 nt, Homo Sapiens
gggacuguuuacaaaugagugauuccaguauu

SEQ ID NO: 123601 - RNA, 32 nt, Homo Sapiens
ugagauaugagcaugagcccauuuugggguaa

SEQ ID NO: 123602 - RNA, 32 nt, Homo Sapiens
gaaaagccauauguaucauaaauaucagaugu

SEQ ID NO: 123603 - RNA, 32 nt, Homo Sapiens
gggugggcccucaaaugaaauguggaggcucc

SEQ ID NO: 123604 - RNA, 32 nt, Homo Sapiens
guuaaaguggguaaucauaagcuccuuuuuau

SEQ ID NO: 123605 - RNA, 32 nt, Homo Sapiens
aaaacaaaaaugaaacaaaaaaauucuuucaa

SEQ ID NO: 123606 - RNA, 32 nt, Homo Sapiens
accaauugggaggagggaaauuaagaggcucc

SEQ ID NO: 123607 - RNA, 32 nt, Homo Sapiens
aagcauucagcuugcuuaauugcuuucauaga

SEQ ID NO: 123608 - RNA, 32 nt, Homo Sapiens
gaauagguucuuucguuccugcuauugucuua

SEQ ID NO: 123609 - RNA, 32 nt, Homo Sapiens
accuuggcacacacugcagagccacagggaug

SEQ ID NO: 123610 - RNA, 32 nt, Homo Sapiens
uuucaguuuucauuucgacaaacaagcacugu

SEQ ID NO: 123611 - RNA, 32 nt, Homo Sapiens
acguaauguacaugcauauagguggcaugaca

SEQ ID NO: 123612 - RNA, 32 nt, Homo Sapiens
uuuguguugcgggggccggacuucaagagaga

SEQ ID NO: 123613 - RNA, 32 nt, Homo Sapiens
cauuuauuuaucgaggacccucugagcaccug

SEQ ID NO: 123614 - RNA, 32 nt, Homo Sapiens
ccuaaguauguggagcucugcuuuggcacugc

SEQ ID NO: 123615 - RNA, 32 nt, Homo Sapiens
gcggccuagcgggaaaaguaaaagaugucuga

SEQ ID NO: 123616 - RNA, 32 nt, Homo Sapiens
aaaaugcaaaaauuagcugggugugggugugg

SEQ ID NO: 123617 - RNA, 32 nt, Homo Sapiens
gcgggcaagcguugugcagagcccauagccag

SEQ ID NO: 123618 - RNA, 32 nt, Homo Sapiens
cucagcaggaggacaggugccggagcagcucg

SEQ ID NO: 123619 - RNA, 32 nt, Homo Sapiens
aggaccuuucccuguacuuaccuuucaacaug

SEQ ID NO: 123620 - RNA, 32 nt, Homo Sapiens
acuucccugccaguuugucucauguggcauuc

SEQ ID NO: 123621 - RNA, 32 nt, Homo Sapiens
auuuguccacccugagagaacucugagcaccu

SEQ ID NO: 123622 - RNA, 32 nt, Homo Sapiens
cagggggccggggccccgcgaagcugugcccu

SEQ ID NO: 123623 - RNA, 32 nt, Homo Sapiens
ccugcugcggccuggccguucuuggggaaucu

SEQ ID NO: 123624 - RNA, 32 nt, Homo Sapiens
ccacauuuucugccccaccuuacuucuccucc

SEQ ID NO: 123625 - RNA, 32 nt, Homo Sapiens
gauguaagguaauuucuguguauuuugagaua

SEQ ID NO: 123626 - RNA, 32 nt, Homo Sapiens
gacuucaauauuaaaugacuuuggggaauguc

SEQ ID NO: 123627 - RNA, 32 nt, Homo Sapiens
cacagaaagggaggggagaccugggaagacuu

SEQ ID NO: 123628 - RNA, 32 nt, Homo Sapiens
gggcgacugccugccaggcagacgcugcagcu

SEQ ID NO: 123629 - RNA, 32 nt, Homo Sapiens
agucgccgccuggccgggcguagacgcggugg

SEQ ID NO: 123630 - RNA, 32 nt, Homo Sapiens
gagguuagacuuuaccuuucugacucugucgu

SEQ ID NO: 123631 - RNA, 32 nt, Homo Sapiens
ugauaggguuucuaaugguuauauguauauca

SEQ ID NO: 123632 - RNA, 32 nt, Homo Sapiens
gguaaggauuuauguagugucuggcuguaagc

SEQ ID NO: 123633 - RNA, 32 nt, Homo Sapiens
ggcuggggaauggcugcugccauggugccggg

SEQ ID NO: 123634 - RNA, 32 nt, Homo Sapiens
ugccguguggacccguaaaauaaaaugggauu

SEQ ID NO: 123635 - RNA, 30 nt, Homo Sapiens
ccugggguagguggcagcugcugacuacag

SEQ ID NO: 123636 - RNA, 32 nt, Homo Sapiens
uguucuccaucauuuuaauguggcaggcuguu

SEQ ID NO: 123637 - RNA, 32 nt, Homo Sapiens
auauugcuccacuuacugaaguacagagauga

SEQ ID NO: 123638 - RNA, 32 nt, Homo Sapiens
uucaucauccuaaacugaaacucuguacccac

SEQ ID NO: 123639 - RNA, 32 nt, Homo Sapiens
ugacuauccaaauuaagggaccugagacuccu

SEQ ID NO: 123640 - RNA, 32 nt, Homo Sapiens
gcggagcaugucgaccccggcccggaggaggc

SEQ ID NO: 123641 - RNA, 32 nt, Homo Sapiens
acgcggcgccccagcccggcuguguccccggc

SEQ ID NO: 123642 - RNA, 32 nt, Homo Sapiens
uacacuuucacguauuuuugaaguaugucaag

SEQ ID NO: 123643 - RNA, 32 nt, Homo Sapiens
uauuuaaucuccaaauaaaggaaauaauaagg

SEQ ID NO: 123644 - RNA, 32 nt, Homo Sapiens
ugacuuccuguuuuccuccaauaaagacaauu

SEQ ID NO: 123645 - RNA, 32 nt, Homo Sapiens
uacucuaaugucgccugcuuaagcaaaucaug

SEQ ID NO: 123646 - RNA, 32 nt, Homo Sapiens
acccgacgccuggccugccagggaugggcccc

SEQ ID NO: 123647 - RNA, 32 nt, Homo Sapiens
aacaacaacaacaucaugcaaaaacccugcaa

SEQ ID NO: 123648 - RNA, 32 nt, Homo Sapiens
cuuuuuauggugcugauuaauggugaucaagg

SEQ ID NO: 123649 - RNA, 32 nt, Homo Sapiens
uuuccucaaauuaauauugguguucaagacua

SEQ ID NO: 123650 - RNA, 32 nt, Homo Sapiens
aguugguccacagcaucuccggggcuuugugg

SEQ ID NO: 123651 - RNA, 32 nt, Homo Sapiens
uuaaagagugaacacuguccacugucucggcc

SEQ ID NO: 123652 - RNA, 32 nt, Homo Sapiens
caugauuuuuaaagguauuuauuagaaaucaa

SEQ ID NO: 123653 - RNA, 32 nt, Homo Sapiens
gcgaggauuguuaaaaugagucuucggaagca

SEQ ID NO: 123654 - RNA, 32 nt, Homo Sapiens
aaggaaauuacauucauguuguauuaccacaa

SEQ ID NO: 123655 - RNA, 32 nt, Homo Sapiens
aacagagcauggugaauacaugcugaauugca

SEQ ID NO: 123656 - RNA, 32 nt, Homo Sapiens
gcaggaacgggggaccauugcauugugcccaa

SEQ ID NO: 123657 - RNA, 32 nt, Homo Sapiens
gggguccccagccccgcccccaucggacgccu

SEQ ID NO: 123658 - RNA, 32 nt, Homo Sapiens
ccgcugcaggguaaaugggauuccuugccacc

SEQ ID NO: 123659 - RNA, 32 nt, Homo Sapiens
cugggggccucccagccccggagccucauaga

SEQ ID NO: 123660 - RNA, 32 nt, Homo Sapiens
agcuguguuuuaauuugagaaucuugagggua

SEQ ID NO: 123661 - RNA, 32 nt, Homo Sapiens
uuuuuagauagcuuagcuuguuuucuggugcu

SEQ ID NO: 123662 - RNA, 32 nt, Homo Sapiens
ugaagccuucuucccugcuacuccaugcuggu

SEQ ID NO: 123663 - RNA, 32 nt, Homo Sapiens
cccugccccguccccaccucgggacaccaugg

SEQ ID NO: 123664 - RNA, 29 nt, Homo Sapiens
cucaugcuugacagcuugguaaggucaac

SEQ ID NO: 123665 - RNA, 32 nt, Homo Sapiens
aacacagauaauuuuuucuuaagucggccaag

SEQ ID NO: 123666 - RNA, 30 nt, Homo Sapiens
ccguccgcucugcugccgccgcuguugcag

SEQ ID NO: 123667 - RNA, 32 nt, Homo Sapiens
agacuacuuacuacucagcaauaaaaaugaag

SEQ ID NO: 123668 - RNA, 32 nt, Homo Sapiens
uacagauaauugaacagaauugauuuguuaga

SEQ ID NO: 123669 - RNA, 32 nt, Homo Sapiens
aauaauuaaaacaaaauccuugccuucaaacg

SEQ ID NO: 123670 - RNA, 32 nt, Homo Sapiens
cuuuuaugcgcaaauacaaaaugauugucuuu

SEQ ID NO: 123671 - RNA, 32 nt, Homo Sapiens
acaccaugaaaguuaccacauaaaaagaaguc

SEQ ID NO: 123672 - RNA, 32 nt, Homo Sapiens
cuuuaccaagcagcugcacagucaggccuuug

SEQ ID NO: 123673 - RNA, 32 nt, Homo Sapiens
ccugcuccgcagcgacaagcucugcguggacg

SEQ ID NO: 123674 - RNA, 32 nt, Homo Sapiens
aaaaaauaaacuagauguuugugucuacaugu

SEQ ID NO: 123675 - RNA, 32 nt, Homo Sapiens
ugucucagauauauauacuaacaugucuaaua

SEQ ID NO: 123676 - RNA, 32 nt, Homo Sapiens
uaugaauugucaacaucuuuuuuacaagugug

SEQ ID NO: 123677 - RNA, 32 nt, Homo Sapiens
ucuuccauaguugacuugaacuucugaugcuu

SEQ ID NO: 123678 - RNA, 32 nt, Homo Sapiens
agcaggggacaccaagacucugcacaaccaga

SEQ ID NO: 123679 - RNA, 32 nt, Homo Sapiens
uaucuuuacucccucuuucucauggcaacccu

SEQ ID NO: 123680 - RNA, 32 nt, Homo Sapiens
ucccagcgccccgaucccggcgccccaacccc

SEQ ID NO: 123681 - RNA, 32 nt, Homo Sapiens
gagcccgccuagcccggcccagcccagcucag

SEQ ID NO: 123682 - RNA, 32 nt, Homo Sapiens
ugcagaggcugggagaugcugcuguuuccaga

SEQ ID NO: 123683 - RNA, 32 nt, Homo Sapiens
auacuguuuuuauugagagacuugauuuuuau

SEQ ID NO: 123684 - RNA, 32 nt, Homo Sapiens
guuauggggucucagagauuauagacuauugu

SEQ ID NO: 123685 - RNA, 32 nt, Homo Sapiens
gcauugucauauugccaucuccauuagcucac

SEQ ID NO: 123686 - RNA, 32 nt, Homo Sapiens
cccgggaggaggaggaggagguugcagugagc

SEQ ID NO: 123687 - RNA, 32 nt, Homo Sapiens
auacuggaaaauucaggugccacugaaagcca

SEQ ID NO: 123688 - RNA, 32 nt, Homo Sapiens
cagaaaugggccgugagcucucacaggcucag

SEQ ID NO: 123689 - RNA, 32 nt, Homo Sapiens
gacaccuuucuaaaaagacucccugugguguu

SEQ ID NO: 123690 - RNA, 32 nt, Homo Sapiens
cggugugcuggggcuccugccuggugugggag

SEQ ID NO: 123691 - RNA, 32 nt, Homo Sapiens
gguguggguaccuguguucccaguuacuuggg

SEQ ID NO: 123692 - RNA, 32 nt, Homo Sapiens
ccgagucccgagagccugggggcgcgcccagc

SEQ ID NO: 123693 - RNA, 30 nt, Homo Sapiens
ucuucugucugugacacaguggccauugua

SEQ ID NO: 123694 - RNA, 32 nt, Homo Sapiens
caaacggagggcaaaccgaugaucuaaaccaa

SEQ ID NO: 123695 - RNA, 32 nt, Homo Sapiens
guuucauugauuucuacuuuuaucuuuauuau

SEQ ID NO: 123696 - RNA, 32 nt, Homo Sapiens
cuuggugcagcuugagcuucugagagaaucau

SEQ ID NO: 123697 - RNA, 32 nt, Homo Sapiens
aauauuuguacauuuucuuagucucuuuccaa

SEQ ID NO: 123698 - RNA, 32 nt, Homo Sapiens
cgucagacccacugggagauggcugcuugcca

SEQ ID NO: 123699 - RNA, 32 nt, Homo Sapiens
uauacuuguuuaucuuguugcugcaaugagaa

SEQ ID NO: 123700 - RNA, 32 nt, Homo Sapiens
cgcaaugugggcacuuaccauguuccuggcac

SEQ ID NO: 123701 - RNA, 32 nt, Homo Sapiens
acuuucagcuggaguuacaaaccaucaaauua

SEQ ID NO: 123702 - RNA, 32 nt, Homo Sapiens
gcugaaggccccagucuggacucucugcccuc

SEQ ID NO: 123703 - RNA, 32 nt, Homo Sapiens
uucuguacugcgcgcgcacaugcgcgcaaacc

SEQ ID NO: 123704 - RNA, 32 nt, Homo Sapiens
cagacucccucucucugcacagaugaacacca

SEQ ID NO: 123705 - RNA, 32 nt, Homo Sapiens
ccuaggaaaaauuugcaggaacacgaaacaag

SEQ ID NO: 123706 - RNA, 32 nt, Homo Sapiens
ugguuaccgagcggucuugucugauguuucug

SEQ ID NO: 123707 - RNA, 32 nt, Homo Sapiens
ccggaggaacagaggcccgagccucccguggc

SEQ ID NO: 123708 - RNA, 32 nt, Homo Sapiens
aaaguacaucagaaauaaagcuguaucugcca

SEQ ID NO: 123709 - RNA, 32 nt, Homo Sapiens
guggugcauccacgcacccccacccugggacu

SEQ ID NO: 123710 - RNA, 32 nt, Homo Sapiens
uggaaacugcucuucagacuccauuuaugaaa

SEQ ID NO: 123711 - RNA, 32 nt, Homo Sapiens
gggaggguccuagagggcaggggaacaaccau

SEQ ID NO: 123712 - RNA, 32 nt, Homo Sapiens
ggcagaaacuggacacaaugugccgcuaccag

SEQ ID NO: 123713 - RNA, 32 nt, Homo Sapiens
ggggagccugggcucagcuccucccccugccg

SEQ ID NO: 123714 - RNA, 32 nt, Homo Sapiens
ggcucacgggguguuuuccaccccccugcagc

SEQ ID NO: 123715 - RNA, 32 nt, Homo Sapiens
uccgggucaaggcccggucgagugcaguacca

SEQ ID NO: 123716 - RNA, 32 nt, Homo Sapiens
uuauccacuucagauuucauguuuucauuugu

SEQ ID NO: 123717 - RNA, 32 nt, Homo Sapiens
uuuugcucaugguggaaggcgaagggggagca

SEQ ID NO: 123718 - RNA, 32 nt, Homo Sapiens
ucagucucuggauggauguguuugugguuugu

SEQ ID NO: 123719 - RNA, 32 nt, Homo Sapiens
auuuuuaacaaaugucauagcuaugucaccuu

SEQ ID NO: 123720 - RNA, 32 nt, Homo Sapiens
gaugcucugaccacagcagcugugaagggcau

SEQ ID NO: 123721 - RNA, 30 nt, Homo Sapiens
acucccugaaauuguaugcaaaauguuguu

SEQ ID NO: 123722 - RNA, 32 nt, Homo Sapiens
uuaagaagucuagcuuccugugaaaugugaga

SEQ ID NO: 123723 - RNA, 32 nt, Homo Sapiens
ggccccugcccacucaccugcccgccugcccg

SEQ ID NO: 123724 - RNA, 32 nt, Homo Sapiens
gucugccugccaguuuccugcguccccggaga

SEQ ID NO: 123725 - RNA, 32 nt, Homo Sapiens
uaauaaugaugaugaugaugaugaaaacuaag

SEQ ID NO: 123726 - RNA, 32 nt, Homo Sapiens
agccuugagcgcacgcacacaccacacacaua

SEQ ID NO: 123727 - RNA, 32 nt, Homo Sapiens
ggagcucaggacuagcggagcggccagacguc

SEQ ID NO: 123728 - RNA, 30 nt, Homo Sapiens
agcggggccaggcgcgguggcucgugccug

SEQ ID NO: 123729 - RNA, 32 nt, Homo Sapiens
ucaccccccuccccagcuucuggacgcguuug

SEQ ID NO: 123730 - RNA, 32 nt, Homo Sapiens
ugccucacuccccuccucccgcuccaaacccg

SEQ ID NO: 123731 - RNA, 32 nt, Homo Sapiens
ggcacgaggccugcccacaacaccccagcuug

SEQ ID NO: 123732 - RNA, 32 nt, Homo Sapiens
ggaaucaggaccacaaugugcucccacccuag

SEQ ID NO: 123733 - RNA, 32 nt, Homo Sapiens
acccuauguauuauuacagauggaaguaauua

SEQ ID NO: 123734 - RNA, 32 nt, Homo Sapiens
uuauacagauuggguuuaccgaaguauaaucu

SEQ ID NO: 123735 - RNA, 32 nt, Homo Sapiens
gacaugcugaacugaagaagaugccucaaggg

SEQ ID NO: 123736 - RNA, 31 nt, Homo Sapiens
gaauauuuauauaaaaacgaguguuacaaug

SEQ ID NO: 123737 - RNA, 32 nt, Homo Sapiens
auauguauauauuugcaggcaugugugaggcg

SEQ ID NO: 123738 - RNA, 32 nt, Homo Sapiens
gccuggacugguuuuuacauuuuuaaaauauu

SEQ ID NO: 123739 - RNA, 31 nt, Homo Sapiens
aggccgugaaacagccguuugaguuuggcug

SEQ ID NO: 123740 - RNA, 32 nt, Homo Sapiens
auguaaauauauauguguaacaugagaauuuc

SEQ ID NO: 123741 - RNA, 32 nt, Homo Sapiens
aaaagacacuguauccccuaaaauauuucuga

SEQ ID NO: 123742 - RNA, 32 nt, Homo Sapiens
ucccacacgugaaaccagcaugugcuaguuac

SEQ ID NO: 123743 - RNA, 32 nt, Homo Sapiens
gccuggcaguuggccaaaaggcuggucuacuu

SEQ ID NO: 123744 - RNA, 32 nt, Homo Sapiens
gaagaaggggagaggagguugugugggacaag

SEQ ID NO: 123745 - RNA, 32 nt, Homo Sapiens
caaauggggaauaaaaauagcagguaacacgu

SEQ ID NO: 123746 - RNA, 32 nt, Homo Sapiens
ccuguccuggaaagauugggagggggccagac

SEQ ID NO: 123747 - RNA, 32 nt, Homo Sapiens
accucagugaaaugaagugcucaguucuuuua

SEQ ID NO: 123748 - RNA, 32 nt, Homo Sapiens
ccgggccaccaggaagagccugcugcaugucc

SEQ ID NO: 123749 - RNA, 32 nt, Homo Sapiens
aggggcagaccacgcugauucaguacaccagc

SEQ ID NO: 123750 - RNA, 32 nt, Homo Sapiens
cuggggcuguccucgggcuguuucagccccgg

SEQ ID NO: 123751 - RNA, 32 nt, Homo Sapiens
gugcucccuaaaaguuguacuucauuucuuuu

SEQ ID NO: 123752 - RNA, 32 nt, Homo Sapiens
gugaccuagagcauguccuuuuucccgucggu

SEQ ID NO: 123753 - RNA, 32 nt, Homo Sapiens
cucuucaucugucagccuuuuggaccaagaag

SEQ ID NO: 123754 - RNA, 32 nt, Homo Sapiens
uuuguugguauaaaagacaaaauacacugguc

SEQ ID NO: 123755 - RNA, 32 nt, Homo Sapiens
gaauuauggaagaaauuguuaacugugacgca

SEQ ID NO: 123756 - RNA, 32 nt, Homo Sapiens
ggagagaucugugugacacaagaugcuuuugu

SEQ ID NO: 123757 - RNA, 32 nt, Homo Sapiens
auagccugagagugucuuggggagaccuugca

SEQ ID NO: 123758 - RNA, 32 nt, Homo Sapiens
aaauaaccaaaauaaagugcuuugaauggaau

SEQ ID NO: 123759 - RNA, 32 nt, Homo Sapiens
cacucacuagccccgcuuugggcccccuccug

SEQ ID NO: 123760 - RNA, 32 nt, Homo Sapiens
uguuguccuucaucagccaaguggcuucagaa

SEQ ID NO: 123761 - RNA, 32 nt, Homo Sapiens
gaauuuuauuuuuucuacucccaauuaaucag

SEQ ID NO: 123762 - RNA, 32 nt, Homo Sapiens
uuuuuaguagccacauaguguuucaauguaug

SEQ ID NO: 123763 - RNA, 32 nt, Homo Sapiens
uccacugggcacagaacuuauguuguucucua

SEQ ID NO: 123764 - RNA, 32 nt, Homo Sapiens
acaaauaguuuauguacugcucuuagguuguu

SEQ ID NO: 123765 - RNA, 32 nt, Homo Sapiens
cuccccaccacauaaacacauggacacacacc

SEQ ID NO: 123766 - RNA, 32 nt, Homo Sapiens
cuggcuuuaguuguaacaaacgauuuuauucu

SEQ ID NO: 123767 - RNA, 32 nt, Homo Sapiens
uggcuaauuuuuuguauauuuaguggagaugg

SEQ ID NO: 123768 - RNA, 32 nt, Homo Sapiens
aacgcuguugcgccgcgcgccccgcccagccc

SEQ ID NO: 123769 - RNA, 32 nt, Homo Sapiens
agacgccgcccggcucugcgccuucuaugccc

SEQ ID NO: 123770 - RNA, 32 nt, Homo Sapiens
ggcugggucugcuugagcaacuggugaaacuc

SEQ ID NO: 123771 - RNA, 32 nt, Homo Sapiens
ccggccggcggggaugcgggaccggcugccag

SEQ ID NO: 123772 - RNA, 32 nt, Homo Sapiens
ugcaggaagccgccgcgccgccgcuuuuguug

SEQ ID NO: 123773 - RNA, 31 nt, Homo Sapiens
gccucuggucucugccugcccugggugcuca

SEQ ID NO: 123774 - RNA, 32 nt, Homo Sapiens
acuuucuggguugccuuuguuuuuggcguggc

SEQ ID NO: 123775 - RNA, 32 nt, Homo Sapiens
gaucugcgcgcggccuagcccgggccucauuu

SEQ ID NO: 123776 - RNA, 32 nt, Homo Sapiens
uguguacauaucuuaggaggguuaucuauguu

SEQ ID NO: 123777 - RNA, 32 nt, Homo Sapiens
ggaaaucccagcugccucucccugcacccugg

SEQ ID NO: 123778 - RNA, 32 nt, Homo Sapiens
uuucaucccacuuuucaggacuuaauuuguuu

SEQ ID NO: 123779 - RNA, 32 nt, Homo Sapiens
acauacccaacugcuguaaacccauaccggcg

SEQ ID NO: 123780 - RNA, 32 nt, Homo Sapiens
gaaaggcuccacguggcaacacugugcuaaaa

SEQ ID NO: 123781 - RNA, 32 nt, Homo Sapiens
uagaaaaagcccugguaagaaaauauuugaau

SEQ ID NO: 123782 - RNA, 32 nt, Homo Sapiens
ggagcggacaggcuggugggcgagcgagaggc

SEQ ID NO: 123783 - RNA, 32 nt, Homo Sapiens
ucaccccacucuguacagcugcucuuacccau

SEQ ID NO: 123784 - RNA, 32 nt, Homo Sapiens
ucaggggagcggggaggcagcugcuggccggc

SEQ ID NO: 123785 - RNA, 32 nt, Homo Sapiens
aaacacuauguaaaugugaauggaaacuugga

SEQ ID NO: 123786 - RNA, 32 nt, Homo Sapiens
acugggaaggcuugggauuugcuguguaaaaa

SEQ ID NO: 123787 - RNA, 32 nt, Homo Sapiens
cuggcacccagcugcuauaaccaaguguccac

SEQ ID NO: 123788 - RNA, 32 nt, Homo Sapiens
agggcacugcccugcucccaaucaaacuuagu

SEQ ID NO: 123789 - RNA, 32 nt, Homo Sapiens
gcuggauggguacccucaccccugccucaggc

SEQ ID NO: 123790 - RNA, 32 nt, Homo Sapiens
gggacggaauccacccacaacgcgcuugguuu

SEQ ID NO: 123791 - RNA, 32 nt, Homo Sapiens
cgggcuggggacggugguucacaccuguaauc

SEQ ID NO: 123792 - RNA, 32 nt, Homo Sapiens
uguggguuuccauggcuucccagaguucccuc

SEQ ID NO: 123793 - RNA, 32 nt, Homo Sapiens
cuggcugcugccgcugccuccuccuggguaag

SEQ ID NO: 123794 - RNA, 32 nt, Homo Sapiens
ggggaacauguauuuuuuaacauagaacagaa

SEQ ID NO: 123795 - RNA, 32 nt, Homo Sapiens
cagauaccuuuaaauuuaggggcgcuaaggaa

SEQ ID NO: 123796 - RNA, 32 nt, Homo Sapiens
uggcagggucuugguggccugcagcuucccuu

SEQ ID NO: 123797 - RNA, 32 nt, Homo Sapiens
aguaaaauuggaagaaucauguuuaugguguu

SEQ ID NO: 123798 - RNA, 32 nt, Homo Sapiens
ucuuuuggaagugauaaaaauauucuaaaauu

SEQ ID NO: 123799 - RNA, 32 nt, Homo Sapiens
ccaacacuuuugcuuucuucuccaucucugaa

SEQ ID NO: 123800 - RNA, 32 nt, Homo Sapiens
uucagggggucuuuuuuuuaauacauauccaa

SEQ ID NO: 123801 - RNA, 32 nt, Homo Sapiens
accacuauuuuacuggccuuugaaagaacaaa

SEQ ID NO: 123802 - RNA, 32 nt, Homo Sapiens
cuuugggagguagaggcaggcagaucacgagg

SEQ ID NO: 123803 - RNA, 32 nt, Homo Sapiens
gaucucccgagaguuggcgcagggccacuugg

SEQ ID NO: 123804 - RNA, 32 nt, Homo Sapiens
gagaagauccugaguacacuaggugcaaacca

SEQ ID NO: 123805 - RNA, 32 nt, Homo Sapiens
uggcaugaaaauaaaacaaagguuuucguugu

SEQ ID NO: 123806 - RNA, 32 nt, Homo Sapiens
aguuuuugauaaauuuuuuaaauuauaggaua

SEQ ID NO: 123807 - RNA, 32 nt, Homo Sapiens
uaauuuaaaaauuguuagaauggaaaaauucc

SEQ ID NO: 123808 - RNA, 32 nt, Homo Sapiens
gauggagcugggugaggggcugcugucugcag

SEQ ID NO: 123809 - RNA, 32 nt, Homo Sapiens
caacacccacgucuccaguaauccauucuuug

SEQ ID NO: 123810 - RNA, 32 nt, Homo Sapiens
uggaaacuaggaugucugaauaucaaggaaga

SEQ ID NO: 123811 - RNA, 32 nt, Homo Sapiens
cccgcccgcucgccggccgggccagugugagc

SEQ ID NO: 123812 - RNA, 32 nt, Homo Sapiens
ucauuugacaauaccaaucuagaggugagcuu

SEQ ID NO: 123813 - RNA, 32 nt, Homo Sapiens
gggcgggcgaggggcccaagggacgggcucca

SEQ ID NO: 123814 - RNA, 32 nt, Homo Sapiens
gugagguggcugcccaauguccucugcaccau

SEQ ID NO: 123815 - RNA, 27 nt, Homo Sapiens
ucauggaggcgccagccgccggcuugu

SEQ ID NO: 123816 - RNA, 32 nt, Homo Sapiens
uuucuccugagcucagauuguguauuucccaa

SEQ ID NO: 123817 - RNA, 32 nt, Homo Sapiens
gaaauacaaaaauuagucaggcaugguggugg

SEQ ID NO: 123818 - RNA, 32 nt, Homo Sapiens
aucuuaucaggagacagggucugagagcagac

SEQ ID NO: 123819 - RNA, 32 nt, Homo Sapiens
aaauauuauggacuuuguuaaacuugaaaguu

SEQ ID NO: 123820 - RNA, 32 nt, Homo Sapiens
cugcacugccccagcccagccccagccucugc

SEQ ID NO: 123821 - RNA, 29 nt, Homo Sapiens
cuguuucggggacucggggcggccaguac

SEQ ID NO: 123822 - RNA, 32 nt, Homo Sapiens
cucggacuagguuagcauccugcccgagggca

SEQ ID NO: 123823 - RNA, 32 nt, Homo Sapiens
gacuuaaugggccggucggggagggggaggcg

SEQ ID NO: 123824 - RNA, 32 nt, Homo Sapiens
uuaggcagauggcgcgaucucggcuccugggu

SEQ ID NO: 123825 - RNA, 32 nt, Homo Sapiens
agggguuagugucgagcucaccccagcauccu

SEQ ID NO: 123826 - RNA, 32 nt, Homo Sapiens
auacuaagacuguuugggaauuuuaaaaagcu

SEQ ID NO: 123827 - RNA, 32 nt, Homo Sapiens
uaugcuucugaauaaucaaagacuaauuugug

SEQ ID NO: 123828 - RNA, 32 nt, Homo Sapiens
cccuggggguugcaggcugcggugccucaggc

SEQ ID NO: 123829 - RNA, 32 nt, Homo Sapiens
gcagaacuggaauucauacucuguggaaugaa

SEQ ID NO: 123830 - RNA, 32 nt, Homo Sapiens
uugccuuuccccagagaacaagagggagggcg

SEQ ID NO: 123831 - RNA, 32 nt, Homo Sapiens
acauugaaggcacagaauuugcuaccaucucu

SEQ ID NO: 123832 - RNA, 32 nt, Homo Sapiens
auaucuuuaagaaaauuucuuaaaggaaaaga

SEQ ID NO: 123833 - RNA, 32 nt, Homo Sapiens
uuaaguauuuaguuggaaauuucacacuggca

SEQ ID NO: 123834 - RNA, 32 nt, Homo Sapiens
ccccuccacagccacagcccccgcccccucca

SEQ ID NO: 123835 - RNA, 32 nt, Homo Sapiens
aucaguggauacuggauuugcuccugucaaug

SEQ ID NO: 123836 - RNA, 32 nt, Homo Sapiens
uucagaaggaacucaagcuucugagaggaaaa

SEQ ID NO: 123837 - RNA, 32 nt, Homo Sapiens
accuuacaaaaauuuagacuaguaacuuauuu

SEQ ID NO: 123838 - RNA, 32 nt, Homo Sapiens
uacggcggccccaaccggccggaccucagcaa

SEQ ID NO: 123839 - RNA, 32 nt, Homo Sapiens
cccgugcaucuuccucagucaguuucugaaua

SEQ ID NO: 123840 - RNA, 31 nt, Homo Sapiens
acucccgagccccacacccacaucacccaug

SEQ ID NO: 123841 - RNA, 32 nt, Homo Sapiens
gcugucacaacacaccgacguguagguccugg

SEQ ID NO: 123842 - RNA, 32 nt, Homo Sapiens
cugccgggccgcggcgccggcucccaggaugc

SEQ ID NO: 123843 - RNA, 32 nt, Homo Sapiens
uccuccccaaaauagccuugugauuucggaag

SEQ ID NO: 123844 - RNA, 32 nt, Homo Sapiens
cuggaucugcugcauccaggacugugccagca

SEQ ID NO: 123845 - RNA, 32 nt, Homo Sapiens
augugagguuucuuugugcacauuaaagucuu

SEQ ID NO: 123846 - RNA, 32 nt, Homo Sapiens
guuguuaggccugccgcaggccccacccucaa

SEQ ID NO: 123847 - RNA, 32 nt, Homo Sapiens
ccccgucaugcaacaucuggacaccacuaaca

SEQ ID NO: 123848 - RNA, 32 nt, Homo Sapiens
ggacuguacuauuguaaggucuauauucugua

SEQ ID NO: 123849 - RNA, 30 nt, Homo Sapiens
cucuggcccugcucccuccgagcgcuccgc

SEQ ID NO: 123850 - RNA, 32 nt, Homo Sapiens
uuuaauuugugcuuaugugguguuugguguga

SEQ ID NO: 123851 - RNA, 31 nt, Homo Sapiens
guucaagaguaaaaacaauauaugcaauuuu

SEQ ID NO: 123852 - RNA, 32 nt, Homo Sapiens
uggugcuagaaagcgugauguucgccauacuu

SEQ ID NO: 123853 - RNA, 32 nt, Homo Sapiens
ucugauccuugcaccuucuuuuggggaaacgg

SEQ ID NO: 123854 - RNA, 27 nt, Homo Sapiens
ccauucucguccuucagccuccugagu

SEQ ID NO: 123855 - RNA, 32 nt, Homo Sapiens
ucugggcugcauuuuucuuauugauuuggaau

SEQ ID NO: 123856 - RNA, 32 nt, Homo Sapiens
uaugccuaaaauuuauucacuuaguuuuccuu

SEQ ID NO: 123857 - RNA, 32 nt, Homo Sapiens
augaggugagaggaugacacgucugccggcuc

SEQ ID NO: 123858 - RNA, 32 nt, Homo Sapiens
gaggugcagaauauuuacucuuucuguccaac

SEQ ID NO: 123859 - RNA, 32 nt, Homo Sapiens
augaauggcagguguucauuauaaucuguauu

SEQ ID NO: 123860 - RNA, 32 nt, Homo Sapiens
ugcccguguccuaugcacacaccgucaaggcc

SEQ ID NO: 123861 - RNA, 32 nt, Homo Sapiens
uaaccugaugcagcuguuuauagcucagaggc

SEQ ID NO: 123862 - RNA, 32 nt, Homo Sapiens
caggaaggaaaggguauugccaccucagggaa

SEQ ID NO: 123863 - RNA, 32 nt, Homo Sapiens
uuggcuguaaguugccauuugaacuaaacgaa

SEQ ID NO: 123864 - RNA, 32 nt, Homo Sapiens
ggcagagguuguggugagccaacaucacacca

SEQ ID NO: 123865 - RNA, 32 nt, Homo Sapiens
ggagaaaacaauuguuuuuaaaucacacagcu

SEQ ID NO: 123866 - RNA, 32 nt, Homo Sapiens
uuguauuuucuuuacagcauagauagaaaaau

SEQ ID NO: 123867 - RNA, 32 nt, Homo Sapiens
gagaccugccgccccucgggcccgccacgcug

SEQ ID NO: 123868 - RNA, 32 nt, Homo Sapiens
gucaacacauaguguaaaauaauuacaugccu

SEQ ID NO: 123869 - RNA, 32 nt, Homo Sapiens
cugagguugcgugagauccccuccccugugcc

SEQ ID NO: 123870 - RNA, 32 nt, Homo Sapiens
caaccacgucccggcccccgaccgcgagcagc

SEQ ID NO: 123871 - RNA, 32 nt, Homo Sapiens
ugauaauaaacaguugacuaucaucaauuuca

SEQ ID NO: 123872 - RNA, 32 nt, Homo Sapiens
gagcccgggaagcucaagggcugagagggagc

SEQ ID NO: 123873 - RNA, 32 nt, Homo Sapiens
aaagccacgcguaugcugcccucuacaggcug

SEQ ID NO: 123874 - RNA, 32 nt, Homo Sapiens
guauguguguguaugccuggagauugguguuu

SEQ ID NO: 123875 - RNA, 32 nt, Homo Sapiens
uugccagugaacgcaggguuugccauugcuac

SEQ ID NO: 123876 - RNA, 32 nt, Homo Sapiens
gcggccccggaaaaugggcggcuggggggugu

SEQ ID NO: 123877 - RNA, 32 nt, Homo Sapiens
aaaguaugguaauucuauuauuaaauaauucu

SEQ ID NO: 123878 - RNA, 32 nt, Homo Sapiens
cuauaugccaggugcugugcuaaaugcuuuau

SEQ ID NO: 123879 - RNA, 32 nt, Homo Sapiens
aaauguggaaaaaccuuugagaaggauuuuug

SEQ ID NO: 123880 - RNA, 32 nt, Homo Sapiens
gauaacugcauaaaugaauaaauucagaauua

SEQ ID NO: 123881 - RNA, 32 nt, Homo Sapiens
aauauaugaacaaaaaagcugcaaggauaaau

SEQ ID NO: 123882 - RNA, 32 nt, Homo Sapiens
agcuugcccucccacacuuggcauccaugcug

SEQ ID NO: 123883 - RNA, 32 nt, Homo Sapiens
cuuuuugcuucugguuuggagcuccggaccag

SEQ ID NO: 123884 - RNA, 32 nt, Homo Sapiens
gggugcccaacgcaauccuugggggugcaggg

SEQ ID NO: 123885 - RNA, 32 nt, Homo Sapiens
aguucucacgaaaguauuuacuuuuuaaaaau

SEQ ID NO: 123886 - RNA, 32 nt, Homo Sapiens
augaauuccuggaauuucugugccucuuuuau

SEQ ID NO: 123887 - RNA, 32 nt, Homo Sapiens
agaagugccggggauucuggacuggcucccuc

SEQ ID NO: 123888 - RNA, 32 nt, Homo Sapiens
cugagacggcagagaccccaggaucccagagc

SEQ ID NO: 123889 - RNA, 32 nt, Homo Sapiens
uauaaguaugucccaagucuuaaaagaggacu

SEQ ID NO: 123890 - RNA, 32 nt, Homo Sapiens
ucucucaugcacuuuccuuuccagguccccaa

SEQ ID NO: 123891 - RNA, 32 nt, Homo Sapiens
agcuccucacucucuuuuuucucauuuucucc

SEQ ID NO: 123892 - RNA, 32 nt, Homo Sapiens
uuuuuaaaucauggucauaauuuuucuuuuuu

SEQ ID NO: 123893 - RNA, 32 nt, Homo Sapiens
gaggaaagggaaggaggaggcuaaggcugccc

SEQ ID NO: 123894 - RNA, 32 nt, Homo Sapiens
auguaaaauauaaucacugcugugauaaauaa

SEQ ID NO: 123895 - RNA, 32 nt, Homo Sapiens
ugauuuauuuuuauuuucucuuuguggguguu

SEQ ID NO: 123896 - RNA, 32 nt, Homo Sapiens
aggaugugcagguguuguucaugcgcuccgau

SEQ ID NO: 123897 - RNA, 32 nt, Homo Sapiens
ggcaggaggaucgcuugagaccaagaguuuga

SEQ ID NO: 123898 - RNA, 32 nt, Homo Sapiens
cugucuuuagcacccuuuaaaagaacugugcc

SEQ ID NO: 123899 - RNA, 32 nt, Homo Sapiens
ggggcgagcuagccggcuccgcgccucuccgc

SEQ ID NO: 123900 - RNA, 32 nt, Homo Sapiens
agagccgacccggagaugcacauugagaaccu

SEQ ID NO: 123901 - RNA, 32 nt, Homo Sapiens
gcaauccagagccaugggggcuuuccauggga

SEQ ID NO: 123902 - RNA, 29 nt, Homo Sapiens
auacgauaaaguuugcacagucuuacuuc

SEQ ID NO: 123903 - RNA, 32 nt, Homo Sapiens
aucuaaaaaacacaaucagaaaugacaaaggg

SEQ ID NO: 123904 - RNA, 32 nt, Homo Sapiens
cgccgccagcagaacggccgacgcugcggagg

SEQ ID NO: 123905 - RNA, 32 nt, Homo Sapiens
aggaaggaugcaaaaacuacaaaaauggaggc

SEQ ID NO: 123906 - RNA, 32 nt, Homo Sapiens
cuccccaucauugguacccacuugcuuuuaaa

SEQ ID NO: 123907 - RNA, 32 nt, Homo Sapiens
gucauacuauaauuauuuaaaauguaauuaau

SEQ ID NO: 123908 - RNA, 32 nt, Homo Sapiens
augugauuuucccccuauuuucucucuccaaa

SEQ ID NO: 123909 - RNA, 32 nt, Homo Sapiens
ccuagucccuuccacacccccaccccuugcuc

SEQ ID NO: 123910 - RNA, 32 nt, Homo Sapiens
aguaaaaaaaaauaaaguuaaacuuuuaaaac

SEQ ID NO: 123911 - RNA, 32 nt, Homo Sapiens
uuucuuuuucuuuuuucuuuuucuuuuuuuuu

SEQ ID NO: 123912 - RNA, 32 nt, Homo Sapiens
caucaugauguauaaauugauauaucuacaug

SEQ ID NO: 123913 - RNA, 32 nt, Homo Sapiens
ucugccgacccggcgcgcucggcugcgggcgg

SEQ ID NO: 123914 - RNA, 32 nt, Homo Sapiens
aguauuuaucccauuuuaugcaauuaaccaaa

SEQ ID NO: 123915 - RNA, 32 nt, Homo Sapiens
ucgguugaacaaaguuggcuuuuugagucacu

SEQ ID NO: 123916 - RNA, 32 nt, Homo Sapiens
cccaugagacugccugucacuggaggauggcc

SEQ ID NO: 123917 - RNA, 32 nt, Homo Sapiens
ccgcacgcggcccagggcagcggucuaggggc

SEQ ID NO: 123918 - RNA, 32 nt, Homo Sapiens
auaauaccgcugaaaacaaaacucagacucac

SEQ ID NO: 123919 - RNA, 32 nt, Homo Sapiens
uagggcaggcagcugggggcacuugguuccau

SEQ ID NO: 123920 - RNA, 32 nt, Homo Sapiens
aggugguuaaaggacacugggaggcggggcag

SEQ ID NO: 123921 - RNA, 32 nt, Homo Sapiens
gagaccccuggagaggcggacgaugggcccua

SEQ ID NO: 123922 - RNA, 32 nt, Homo Sapiens
cucagucccuucaccuggccccuggcagcuuc

SEQ ID NO: 123923 - RNA, 32 nt, Homo Sapiens
auuucccaggccuugaggggccccacccuguc

SEQ ID NO: 123924 - RNA, 28 nt, Homo Sapiens
aucaaauaaaguuuuguuuucuacuuuu

SEQ ID NO: 123925 - RNA, 32 nt, Homo Sapiens
gagcuuggagccgcgcgccggagggaauagga

SEQ ID NO: 123926 - RNA, 32 nt, Homo Sapiens
gucauauguguucauagaaacauggaauucuc

SEQ ID NO: 123927 - RNA, 32 nt, Homo Sapiens
uccccacccacuuuuuauuuuuuaaugauaau

SEQ ID NO: 123928 - RNA, 32 nt, Homo Sapiens
ugaaaauaauaacagcuauguggcauaauuau

SEQ ID NO: 123929 - RNA, 32 nt, Homo Sapiens
uugcauuagucuuuucaguuaucuucuaccuc

SEQ ID NO: 123930 - RNA, 32 nt, Homo Sapiens
uucaucucuguuuuccucuucaaauuccagag

SEQ ID NO: 123931 - RNA, 32 nt, Homo Sapiens
agacgccacucccagauggcucuuucuauccu

SEQ ID NO: 123932 - RNA, 32 nt, Homo Sapiens
guugguucuuccacuacuggauuuuguaaucu

SEQ ID NO: 123933 - RNA, 32 nt, Homo Sapiens
uggcuggggcucucgggcaugcuugggagugc

SEQ ID NO: 123934 - RNA, 32 nt, Homo Sapiens
agugcuuugaggcaggugaugugcugggagug

SEQ ID NO: 123935 - RNA, 32 nt, Homo Sapiens
uacuguuguuuaaagggauguuauuuuaaagc

SEQ ID NO: 123936 - RNA, 32 nt, Homo Sapiens
gggauaugcuuacugaaccagauggucaagag

SEQ ID NO: 123937 - RNA, 32 nt, Homo Sapiens
agacauuaagaguuccugaaauuuauaucugg

SEQ ID NO: 123938 - RNA, 32 nt, Homo Sapiens
cggcaacuuucugacaucccacagcagucuca

SEQ ID NO: 123939 - RNA, 29 nt, Homo Sapiens
aaauaaaggugucuguauuuucuguaaug

SEQ ID NO: 123940 - RNA, 32 nt, Homo Sapiens
cagcagucucaccuaauguugcuggagccuug

SEQ ID NO: 123941 - RNA, 32 nt, Homo Sapiens
augcccgccuuucugcccccaauuucacacau

SEQ ID NO: 123942 - RNA, 32 nt, Homo Sapiens
uaacacuucuaaagaucaccauuucugagaag

SEQ ID NO: 123943 - RNA, 32 nt, Homo Sapiens
uaaucgaaugucaaucagagggugauaucaag

SEQ ID NO: 123944 - RNA, 32 nt, Homo Sapiens
uuaguuuucuaaaacucaacuaucuuuaguca

SEQ ID NO: 123945 - RNA, 32 nt, Homo Sapiens
gaacuagcauauagccauugaucauaaacuga

SEQ ID NO: 123946 - RNA, 32 nt, Homo Sapiens
ugccaugccugugcugcuugggcuugcuggcc

SEQ ID NO: 123947 - RNA, 32 nt, Homo Sapiens
cccugccaauuccuuccuucucuucuguacag

SEQ ID NO: 123948 - RNA, 32 nt, Homo Sapiens
cuugucuccugggauaaaucucuucugccuau

SEQ ID NO: 123949 - RNA, 32 nt, Homo Sapiens
gauguacauuuuaugaagaauuacaauccguc

SEQ ID NO: 123950 - RNA, 32 nt, Homo Sapiens
cccccuugccuuuaaccucuaguuuagucuuu

SEQ ID NO: 123951 - RNA, 32 nt, Homo Sapiens
aaguuauaaacuacucaaugucguuaagccca

SEQ ID NO: 123952 - RNA, 32 nt, Homo Sapiens
gcuggagggagccuggccccuugcccggucuc

SEQ ID NO: 123953 - RNA, 32 nt, Homo Sapiens
acugacuugcugugaccauccaaauaauuuuc

SEQ ID NO: 123954 - RNA, 32 nt, Homo Sapiens
aacaacgugucuaugcaucaccauaugugggu

SEQ ID NO: 123955 - RNA, 32 nt, Homo Sapiens
cuguauugugcacgucagaacugcacagagaa

SEQ ID NO: 123956 - RNA, 32 nt, Homo Sapiens
cucccaccaggucagacccaguccuggacuuc

SEQ ID NO: 123957 - RNA, 32 nt, Homo Sapiens
aguggugcgaucucagcucccugcaaccucca

SEQ ID NO: 123958 - RNA, 32 nt, Homo Sapiens
ugacacacuccagcccaucacccagucagugu

SEQ ID NO: 123959 - RNA, 32 nt, Homo Sapiens
agacuuuuaagcauuaaacauaaauaacuucu

SEQ ID NO: 123960 - RNA, 32 nt, Homo Sapiens
gacacucauauagacaugugggacaugcgaaa

SEQ ID NO: 123961 - RNA, 32 nt, Homo Sapiens
gagcucuucaacgcugagagccaggccauccc

SEQ ID NO: 123962 - RNA, 32 nt, Homo Sapiens
ucugaagaagaugaagcagaaagagcgggagc

SEQ ID NO: 123963 - RNA, 32 nt, Homo Sapiens
ggccugaagguauggucgauggauaauaguua

SEQ ID NO: 123964 - RNA, 28 nt, Homo Sapiens
uaacgugcugucagcauuauaaaccccu

SEQ ID NO: 123965 - RNA, 32 nt, Homo Sapiens
ggcuggagugcaguggcaugaucauggcuuac

SEQ ID NO: 123966 - RNA, 31 nt, Homo Sapiens
cccauccucagacauuaaagagccugaaugc

SEQ ID NO: 123967 - RNA, 32 nt, Homo Sapiens
caaaugguguaaacuaguuuugaaaaguggua

SEQ ID NO: 123968 - RNA, 32 nt, Homo Sapiens
ggcuggugcugcgggggccccgggagguugaa

SEQ ID NO: 123969 - RNA, 32 nt, Homo Sapiens
uagggauuauaauucaagaugauaucugggug

SEQ ID NO: 123970 - RNA, 32 nt, Homo Sapiens
aaucucuucuauuuauagcuauugguaguucc

SEQ ID NO: 123971 - RNA, 32 nt, Homo Sapiens
agagacagguuagagggaaagaggcuugggaa

SEQ ID NO: 123972 - RNA, 32 nt, Homo Sapiens
uguacuacuugagauuugauuaugagaugugc

SEQ ID NO: 123973 - RNA, 32 nt, Homo Sapiens
augcauccagaaaucgcugugcauguuugagg

SEQ ID NO: 123974 - RNA, 32 nt, Homo Sapiens
uggccaaaagcacuuuaaugcugcugacauug

SEQ ID NO: 123975 - RNA, 32 nt, Homo Sapiens
gagcggcucgaggcugggggaccgcgggcgcg

SEQ ID NO: 123976 - RNA, 32 nt, Homo Sapiens
agaggaaauaaucuaaauguuuguggauuccu

SEQ ID NO: 123977 - RNA, 32 nt, Homo Sapiens
gaugaacuucagggccuuccgacgccuugucu

SEQ ID NO: 123978 - RNA, 32 nt, Homo Sapiens
cugugcucacuuuauuaaaaauucuuuugcac

SEQ ID NO: 123979 - RNA, 32 nt, Homo Sapiens
guugucccgagcgccgggaggcguugggcaga

SEQ ID NO: 123980 - RNA, 32 nt, Homo Sapiens
cgacccaggauucccccuccccuucccaaaua

SEQ ID NO: 123981 - RNA, 32 nt, Homo Sapiens
aggaaaagcaucugccacaaaaauguucacuu

SEQ ID NO: 123982 - RNA, 32 nt, Homo Sapiens
uggcaugcaccuguagucucaccuacuccgga

SEQ ID NO: 123983 - RNA, 32 nt, Homo Sapiens
auaauaugaaaugaguauaaaaucauguauug

SEQ ID NO: 123984 - RNA, 32 nt, Homo Sapiens
ccugcuuccagacgagcaaggagacucauggu

SEQ ID NO: 123985 - RNA, 32 nt, Homo Sapiens
ccauccugguagcggcuucgguaguggccgcc

SEQ ID NO: 123986 - RNA, 27 nt, Homo Sapiens
ggaggguccuucuacugucagcgccuc

SEQ ID NO: 123987 - RNA, 32 nt, Homo Sapiens
caggcuaugccauggcagcugcagaggcccag

SEQ ID NO: 123988 - RNA, 32 nt, Homo Sapiens
uacaggggccugggcagggcggugucuggcag

SEQ ID NO: 123989 - RNA, 32 nt, Homo Sapiens
gacccccucucaaaaauaaauaaaauaaagua

SEQ ID NO: 123990 - RNA, 32 nt, Homo Sapiens
cagcuaugagaggacuggcucccaucuuuugu

SEQ ID NO: 123991 - RNA, 32 nt, Homo Sapiens
ggcugagaggggagggggcggcggcggccgag

SEQ ID NO: 123992 - RNA, 32 nt, Homo Sapiens
ugaaagacguuuccauacaguuccucgcucag

SEQ ID NO: 123993 - RNA, 32 nt, Homo Sapiens
accaaugcaucucuuuaaaggcaaauauuauc

SEQ ID NO: 123994 - RNA, 32 nt, Homo Sapiens
gccucuguagugaauguacaaauucuaaugug

SEQ ID NO: 123995 - RNA, 32 nt, Homo Sapiens
aucuuccuguuguuccaauucuguggguuuuu

SEQ ID NO: 123996 - RNA, 32 nt, Homo Sapiens
gcugcaccucgggccagcuuucugccugucug

SEQ ID NO: 123997 - RNA, 32 nt, Homo Sapiens
aguccuaauggggaucuccagcuccuuccugu

SEQ ID NO: 123998 - RNA, 32 nt, Homo Sapiens
uguugcuaaaauuguuuuauuguagcuccaca

SEQ ID NO: 123999 - RNA, 32 nt, Homo Sapiens
agugucauucauauagaaaaacaucauuacug

SEQ ID NO: 124000 - RNA, 32 nt, Homo Sapiens
uuuggccaaaaauuuuuuuaaaaaucauauua

SEQ ID NO: 124001 - RNA, 32 nt, Homo Sapiens
uaaggcgggacuuccggcaccgcuccgagaug

SEQ ID NO: 124002 - RNA, 32 nt, Homo Sapiens
gagagcccauccccuccccccagaaccugcgu

SEQ ID NO: 124003 - RNA, 32 nt, Homo Sapiens
gaagugagaagcuguucucagccacgaguccu

SEQ ID NO: 124004 - RNA, 32 nt, Homo Sapiens
gagaccgugugaccacgcguggcacuggccua

SEQ ID NO: 124005 - RNA, 32 nt, Homo Sapiens
aaacaaacucguuuuuuacaaagcccuuuuau

SEQ ID NO: 124006 - RNA, 32 nt, Homo Sapiens
gaucuguguucuaagcccagacucacugucac

SEQ ID NO: 124007 - RNA, 32 nt, Homo Sapiens
cuuuccuuaaaucuccucccucugccaaaaua

SEQ ID NO: 124008 - RNA, 32 nt, Homo Sapiens
uugaaauauucccccaaaauauucucagacua

SEQ ID NO: 124009 - RNA, 32 nt, Homo Sapiens
gcggcggugaccccggccuggaacugccccgg

SEQ ID NO: 124010 - RNA, 32 nt, Homo Sapiens
gggcagggggcugggagaaggcuaagccgagg

SEQ ID NO: 124011 - RNA, 32 nt, Homo Sapiens
cgggaaagagaaagcaccuugcagcuccugag

SEQ ID NO: 124012 - RNA, 32 nt, Homo Sapiens
gcaaaaaugcaaauaagguuauguuagaauuu

SEQ ID NO: 124013 - RNA, 32 nt, Homo Sapiens
aacccagguggccacuauuacuuugucgucuu

SEQ ID NO: 124014 - RNA, 32 nt, Homo Sapiens
guucccgcagccuauggcccaggccgccuugg

SEQ ID NO: 124015 - RNA, 32 nt, Homo Sapiens
guccaauagaaauauaacaugagcuauauaua

SEQ ID NO: 124016 - RNA, 32 nt, Homo Sapiens
cucagaaaacaauaccccaagauaauguucaa

SEQ ID NO: 124017 - RNA, 32 nt, Homo Sapiens
ccccacuuccucaaaacaaacaagagauggca

SEQ ID NO: 124018 - RNA, 32 nt, Homo Sapiens
agcuguccggugcuaccacaccgugcccucag

SEQ ID NO: 124019 - RNA, 32 nt, Homo Sapiens
uggccuuagaucucuugacuagucaaggacug

SEQ ID NO: 124020 - RNA, 32 nt, Homo Sapiens
guguuuucucccauccuuucccuuuaacccuc

SEQ ID NO: 124021 - RNA, 32 nt, Homo Sapiens
aaaaguuuuuugggggagacuugggccuugag

SEQ ID NO: 124022 - RNA, 32 nt, Homo Sapiens
uaggcauagcaccguugcuaccgagugucugu

SEQ ID NO: 124023 - RNA, 32 nt, Homo Sapiens
ccaagugggcccagcccuggcuccugcgcccu

SEQ ID NO: 124024 - RNA, 32 nt, Homo Sapiens
aaucaaucuucuuaucuuuucuuaaaagaaaa

SEQ ID NO: 124025 - RNA, 32 nt, Homo Sapiens
cucacuacacuucagcuugggcgacagagcga

SEQ ID NO: 124026 - RNA, 30 nt, Homo Sapiens
auuuauaucuauucauccaagaguacuucu

SEQ ID NO: 124027 - RNA, 32 nt, Homo Sapiens
aauauauguacaaaaauuacugaaaggcuuca

SEQ ID NO: 124028 - RNA, 32 nt, Homo Sapiens
agaggcuuuaaaccucaucuugauucagacug

SEQ ID NO: 124029 - RNA, 32 nt, Homo Sapiens
gaaaaaagccuucuagcaaggaaauucaagau

SEQ ID NO: 124030 - RNA, 28 nt, Homo Sapiens
uuauggagguuucauauguguuucuaca

SEQ ID NO: 124031 - RNA, 32 nt, Homo Sapiens
auucaugagcaguuaaaacaaaucacaaaagg

SEQ ID NO: 124032 - RNA, 32 nt, Homo Sapiens
guggaaacauucaaagcagaacuucucaucau

SEQ ID NO: 124033 - RNA, 32 nt, Homo Sapiens
aaauaaaauugaguucuguuuucaugcaccaa

SEQ ID NO: 124034 - RNA, 32 nt, Homo Sapiens
agcagaaucgucauguuuuucugaugcaccgc

SEQ ID NO: 124035 - RNA, 32 nt, Homo Sapiens
gcccggagcggggaagcacgccgccucccuac

SEQ ID NO: 124036 - RNA, 32 nt, Homo Sapiens
uaucaaggauauauuuaguuugaguggaauuu

SEQ ID NO: 124037 - RNA, 32 nt, Homo Sapiens
cuuguucugauauguccaguacucacuggaaa

SEQ ID NO: 124038 - RNA, 32 nt, Homo Sapiens
guuacuuuuuaaaagcaccugaaaucuggccg

SEQ ID NO: 124039 - RNA, 32 nt, Homo Sapiens
uccacaggugcggccuggcccggccuccuaaa

SEQ ID NO: 124040 - RNA, 32 nt, Homo Sapiens
ugaccauggcugccuucugucuaguucuagag

SEQ ID NO: 124041 - RNA, 32 nt, Homo Sapiens
aaaaauugggagauuucacauaaaauuaaaag

SEQ ID NO: 124042 - RNA, 32 nt, Homo Sapiens
ccauuucauacacccucgaggaugagacccaa

SEQ ID NO: 124043 - RNA, 32 nt, Homo Sapiens
aagccuuuauugacauucaaguguuuauguua

SEQ ID NO: 124044 - RNA, 32 nt, Homo Sapiens
aaugacugacagugcaaguggauacauaccuc

SEQ ID NO: 124045 - RNA, 32 nt, Homo Sapiens
ugaugacuuuaggguagcacaaacaaaacucc

SEQ ID NO: 124046 - RNA, 32 nt, Homo Sapiens
gugaaagcgauaaaguccucuaagaugucaua

SEQ ID NO: 124047 - RNA, 32 nt, Homo Sapiens
cugaagggguaccauggaugccagcaccacca

SEQ ID NO: 124048 - RNA, 32 nt, Homo Sapiens
uuggccuguuaaguuaaaugugggugucaacc

SEQ ID NO: 124049 - RNA, 32 nt, Homo Sapiens
ggaacaaguaugggaugagaucaauaagccua

SEQ ID NO: 124050 - RNA, 26 nt, Homo Sapiens
uaugagugaaacaucuuucaaccuaa

SEQ ID NO: 124051 - RNA, 32 nt, Homo Sapiens
gagcuguguggccgcucuccucacuggucccu

SEQ ID NO: 124052 - RNA, 32 nt, Homo Sapiens
uacacauauguguguugaauaauuacuauugg

SEQ ID NO: 124053 - RNA, 28 nt, Homo Sapiens
gccaugcagaacuaacauuuggauacca

SEQ ID NO: 124054 - RNA, 32 nt, Homo Sapiens
aagucucuuauguuucaauauuucuuaacugg

SEQ ID NO: 124055 - RNA, 32 nt, Homo Sapiens
gcaggugagggccagagaagggguucucaaac

SEQ ID NO: 124056 - RNA, 32 nt, Homo Sapiens
ucuguuaggggugaccugaggucccugcuuug

SEQ ID NO: 124057 - RNA, 32 nt, Homo Sapiens
guguauuuuagaaauaguaacuucuaaagagu

SEQ ID NO: 124058 - RNA, 32 nt, Homo Sapiens
uaauauuuacuuucuauuucaguggcuuaaau

SEQ ID NO: 124059 - RNA, 32 nt, Homo Sapiens
gcgccgcuccagcgaggcgcgggcuguggggc

SEQ ID NO: 124060 - RNA, 32 nt, Homo Sapiens
ugcacaguggagagggcagcagcguggccuga

SEQ ID NO: 124061 - RNA, 31 nt, Homo Sapiens
cuagaacaagaggcuuaaaaccgggcuuuca

SEQ ID NO: 124062 - RNA, 32 nt, Homo Sapiens
aggguaugaugaugaaauucaaaaucuuauuu

SEQ ID NO: 124063 - RNA, 32 nt, Homo Sapiens
uaaggcuauggacuuugagauaauucugagcc

SEQ ID NO: 124064 - RNA, 32 nt, Homo Sapiens
ccguggacugcugggagggagggggcagcagg

SEQ ID NO: 124065 - RNA, 32 nt, Homo Sapiens
cacuuggagcccagguccagcguucccccgac

SEQ ID NO: 124066 - RNA, 32 nt, Homo Sapiens
cagcgggagcacugugcugugcuccuuucagu

SEQ ID NO: 124067 - RNA, 32 nt, Homo Sapiens
ucguuguaccagugcauggagagaaaauuuug

SEQ ID NO: 124068 - RNA, 32 nt, Homo Sapiens
cgcucccccacuucccgcccucccucccaccu

SEQ ID NO: 124069 - RNA, 32 nt, Homo Sapiens
aaggagauuguggccuuccucaagcgcacgcu

SEQ ID NO: 124070 - RNA, 32 nt, Homo Sapiens
aaacauacaaacaaaauuuuccuuuuacuuuc

SEQ ID NO: 124071 - RNA, 32 nt, Homo Sapiens
uauuuuuaugacuauuuauuccaauguuuuaa

SEQ ID NO: 124072 - RNA, 32 nt, Homo Sapiens
acguuccuaugcaaccgagagccccggcaaau

SEQ ID NO: 124073 - RNA, 32 nt, Homo Sapiens
uuuuaggacaccuguuuacuagcuagcuuuac

SEQ ID NO: 124074 - RNA, 32 nt, Homo Sapiens
cagagagaggagaggaggaagauugagcuggg

SEQ ID NO: 124075 - RNA, 32 nt, Homo Sapiens
caggaggaccucugggccaggccugaaccuuc

SEQ ID NO: 124076 - RNA, 32 nt, Homo Sapiens
cgaccccucccgcaaugcccgccccgccgugc

SEQ ID NO: 124077 - RNA, 32 nt, Homo Sapiens
guagguacucuuuugaaacuagguuuuagaau

SEQ ID NO: 124078 - RNA, 32 nt, Homo Sapiens
agagaauggaacaaaauuauuauaauaaauau

SEQ ID NO: 124079 - RNA, 32 nt, Homo Sapiens
ggcuuaggccaucacccuucccuuggcuggaa

SEQ ID NO: 124080 - RNA, 32 nt, Homo Sapiens
cuugauuaaaauuggggauuaauuuuagaguu

SEQ ID NO: 124081 - RNA, 32 nt, Homo Sapiens
gaggccaguaggagacacgacagcacacacag

SEQ ID NO: 124082 - RNA, 32 nt, Homo Sapiens
cuccauuccuuccccaccuggcgcgcaccugc

SEQ ID NO: 124083 - RNA, 32 nt, Homo Sapiens
ucccugccaguccguccgccuguccguccgug

SEQ ID NO: 124084 - RNA, 32 nt, Homo Sapiens
aacaaggaaagaaacguguuagccauaagaca

SEQ ID NO: 124085 - RNA, 32 nt, Homo Sapiens
ucuucugggggcuccagucagaggcgccgccc

SEQ ID NO: 124086 - RNA, 32 nt, Homo Sapiens
ugccaaaaaaagacagggcugauaagcuaaca

SEQ ID NO: 124087 - RNA, 32 nt, Homo Sapiens
ccagcucuccccugcgcaggcccuccgcgggg

SEQ ID NO: 124088 - RNA, 32 nt, Homo Sapiens
uggcucccuucccccauucgccuucccagaau

SEQ ID NO: 124089 - RNA, 30 nt, Homo Sapiens
cuucaugagcacuuaauccaucuuaguguc

SEQ ID NO: 124090 - RNA, 32 nt, Homo Sapiens
uccucagcuacuuuuccgaagcagaaugucau

SEQ ID NO: 124091 - RNA, 32 nt, Homo Sapiens
ucaggauauaugagaaugagauauaugccaaa

SEQ ID NO: 124092 - RNA, 32 nt, Homo Sapiens
auaacgaggguggucacgguggugguaaccua

SEQ ID NO: 124093 - RNA, 32 nt, Homo Sapiens
cuacugcucccucccucucuugccucuuaagu

SEQ ID NO: 124094 - RNA, 32 nt, Homo Sapiens
cucuccccuagagcccucuccucccucugucc

SEQ ID NO: 124095 - RNA, 32 nt, Homo Sapiens
gcaggaaccagacaaucucguagguguccugc

SEQ ID NO: 124096 - RNA, 30 nt, Homo Sapiens
uauguugucugugcugcagauuggcccaug

SEQ ID NO: 124097 - RNA, 32 nt, Homo Sapiens
agccucuuuuuaaagugugauguuuugccuuu

SEQ ID NO: 124098 - RNA, 29 nt, Homo Sapiens
ccugugagaucuuuccugcuggcucagug

SEQ ID NO: 124099 - RNA, 32 nt, Homo Sapiens
aaaaauacggacguccuuuggugcugggaacu

SEQ ID NO: 124100 - RNA, 32 nt, Homo Sapiens
uucaucucauucucccuucugcccugcagauu

SEQ ID NO: 124101 - RNA, 32 nt, Homo Sapiens
cgucuccaccgccaccgccucagccgccucgc

SEQ ID NO: 124102 - RNA, 32 nt, Homo Sapiens
acugcauauggaccuguaaucaacuuuugaua

SEQ ID NO: 124103 - RNA, 32 nt, Homo Sapiens
cagugaaccaggaaagcuuucagguacaaaua

SEQ ID NO: 124104 - RNA, 31 nt, Homo Sapiens
cauguacuugguaaggugugggugaugggug

SEQ ID NO: 124105 - RNA, 32 nt, Homo Sapiens
caguauggaaaagacuggaaggggaaaggaag

SEQ ID NO: 124106 - RNA, 32 nt, Homo Sapiens
cuugcugcgcagaacagcuugcuggcagcugg

SEQ ID NO: 124107 - RNA, 32 nt, Homo Sapiens
cugccaaaaaauuuuuuaaacuauuagccugg

SEQ ID NO: 124108 - RNA, 32 nt, Homo Sapiens
ugcuuauuuuuccuuuaucagagagaguuaag

SEQ ID NO: 124109 - RNA, 32 nt, Homo Sapiens
ccccugccggggccccgaccccggcccuaucc

SEQ ID NO: 124110 - RNA, 32 nt, Homo Sapiens
ccagccucgccaggccagcaggggcgucguuu

SEQ ID NO: 124111 - RNA, 32 nt, Homo Sapiens
uuuaauagagcaaacuaacaacagacuguagu

SEQ ID NO: 124112 - RNA, 32 nt, Homo Sapiens
gaaggggcuucaaaccacuuaggaccgacugc

SEQ ID NO: 124113 - RNA, 32 nt, Homo Sapiens
uuuucuccccuuccucacuuacagucagcugu

SEQ ID NO: 124114 - RNA, 32 nt, Homo Sapiens
ccgaggagccggucuaggacgcagcagauugg

SEQ ID NO: 124115 - RNA, 32 nt, Homo Sapiens
gacagcaucagcuuggcccgcuccaucagcaa

SEQ ID NO: 124116 - RNA, 32 nt, Homo Sapiens
ccuaggcuagaggggguaucccuaguuagacu

SEQ ID NO: 124117 - RNA, 32 nt, Homo Sapiens
uugggcuccuuaaccugaaggcaaauugcuac

SEQ ID NO: 124118 - RNA, 32 nt, Homo Sapiens
gccgaggcggguggaucacaaggucaggaguu

SEQ ID NO: 124119 - RNA, 32 nt, Homo Sapiens
ugaguggauguuuugggggauggccccugugg

SEQ ID NO: 124120 - RNA, 32 nt, Homo Sapiens
aaaagcccuucucuccuuuguuuggggugcuc

SEQ ID NO: 124121 - RNA, 32 nt, Homo Sapiens
caggcccagccuccacucuccucgucuagguu

SEQ ID NO: 124122 - RNA, 32 nt, Homo Sapiens
uaggccccaggcugccggguggcacccuuuac

SEQ ID NO: 124123 - RNA, 32 nt, Homo Sapiens
agaagucgaaacaaaacaagccgcuaaggcgg

SEQ ID NO: 124124 - RNA, 32 nt, Homo Sapiens
uaaucuaccugggcuuuuuuuguuuguuuguu

SEQ ID NO: 124125 - RNA, 32 nt, Homo Sapiens
ccggcgugcuccauggcaggcgugggugggga

SEQ ID NO: 124126 - RNA, 32 nt, Homo Sapiens
ucauuucuauuaugauuuguccuguggaaugu

SEQ ID NO: 124127 - RNA, 32 nt, Homo Sapiens
gauugcuugagcucaggaguuugagaccaggc

SEQ ID NO: 124128 - RNA, 32 nt, Homo Sapiens
agccguggccccagccaacccauggagguggg

SEQ ID NO: 124129 - RNA, 32 nt, Homo Sapiens
agguugaggcugcagugagcugugauugugcc

SEQ ID NO: 124130 - RNA, 32 nt, Homo Sapiens
ugggcgcugcuuggagauacugggcuauaaaa

SEQ ID NO: 124131 - RNA, 32 nt, Homo Sapiens
aucuuuccccaacagcacagcuaaauuuccaa

SEQ ID NO: 124132 - RNA, 32 nt, Homo Sapiens
gacauucuggaaaaggcaagaauagagaggca

SEQ ID NO: 124133 - RNA, 32 nt, Homo Sapiens
uccugggccaggacuaacacggcuccucaaau

SEQ ID NO: 124134 - RNA, 32 nt, Homo Sapiens
auugaaauguaucaagaauuuauauuuugccu

SEQ ID NO: 124135 - RNA, 32 nt, Homo Sapiens
ugccuccaggccuggggugcggcggccacggg

SEQ ID NO: 124136 - RNA, 32 nt, Homo Sapiens
ugggauuacaggcgugagcaaccgcgccuggc

SEQ ID NO: 124137 - RNA, 32 nt, Homo Sapiens
ugcuaggauaaaacauuaagcggcuguuaaaa

SEQ ID NO: 124138 - RNA, 32 nt, Homo Sapiens
uauuuaugggcaguguagaaugugcuacaaag

SEQ ID NO: 124139 - RNA, 32 nt, Homo Sapiens
uuuaaauuguacaaucucuguauuauagcuau

SEQ ID NO: 124140 - RNA, 32 nt, Homo Sapiens
gugaacuuuccucauuaccauccugaagucac

SEQ ID NO: 124141 - RNA, 32 nt, Homo Sapiens
gcacuguaagaaaaaauaauagggaguuaaag

SEQ ID NO: 124142 - RNA, 32 nt, Homo Sapiens
uguauaaacaauuugcuccaaauauuuuguuu

SEQ ID NO: 124143 - RNA, 32 nt, Homo Sapiens
caauuccagcuagcacccuuuccacuaaggac

SEQ ID NO: 124144 - RNA, 32 nt, Homo Sapiens
aucugcuugaguaucagcuaugcugaaggaaa

SEQ ID NO: 124145 - RNA, 31 nt, Homo Sapiens
ggccauggcugcugccugcaccugccccagg

SEQ ID NO: 124146 - RNA, 32 nt, Homo Sapiens
uacagugccuucucccaggggcugggugaugg

SEQ ID NO: 124147 - RNA, 32 nt, Homo Sapiens
ucagaggagcagcuaucugauuggaaaccugc

SEQ ID NO: 124148 - RNA, 32 nt, Homo Sapiens
ugcccugaucacaaacaaaagccugaauguac

SEQ ID NO: 124149 - RNA, 32 nt, Homo Sapiens
cacugucagagcccguaacauaagauaaauca

SEQ ID NO: 124150 - RNA, 32 nt, Homo Sapiens
gggaggcagggccacugagcccuccucagaug

SEQ ID NO: 124151 - RNA, 32 nt, Homo Sapiens
cggggcugccagcgcauccagccagcccagcc

SEQ ID NO: 124152 - RNA, 32 nt, Homo Sapiens
aacaacaacugccccucauguacgccaaggau

SEQ ID NO: 124153 - RNA, 32 nt, Homo Sapiens
guggggcggcggcgccagagcugcuggagcgc

SEQ ID NO: 124154 - RNA, 27 nt, Homo Sapiens
aagccauucugcuucagccccaaguag

SEQ ID NO: 124155 - RNA, 32 nt, Homo Sapiens
aguaagaagcuauaacucuguuagaaccucga

SEQ ID NO: 124156 - RNA, 32 nt, Homo Sapiens
ucuuuuucuuuuucuuuuuuuuuuuuuuuuga

SEQ ID NO: 124157 - RNA, 32 nt, Homo Sapiens
uuggugcuugaagauaaaugugcuguuucuag

SEQ ID NO: 124158 - RNA, 32 nt, Homo Sapiens
gagcggggccggcagagcgcgcggcgucggug

SEQ ID NO: 124159 - RNA, 32 nt, Homo Sapiens
aagaagucgccguagccgucgcggccgggacu

SEQ ID NO: 124160 - RNA, 32 nt, Homo Sapiens
gacuugggccugggaggucgcgguggggcgag

SEQ ID NO: 124161 - RNA, 32 nt, Homo Sapiens
gaacaagugauagcugcagauggcgaaagaaa

SEQ ID NO: 124162 - RNA, 32 nt, Homo Sapiens
ggagaaaccgucugccuggcucccugucuuca

SEQ ID NO: 124163 - RNA, 32 nt, Homo Sapiens
agggccgaggcucgcgacugcuggggugggcg

SEQ ID NO: 124164 - RNA, 32 nt, Homo Sapiens
ggacagugccccacccccaauccggcugaggg

SEQ ID NO: 124165 - RNA, 32 nt, Homo Sapiens
aggccugggguggaaaggcaggggagggaggg

SEQ ID NO: 124166 - RNA, 32 nt, Homo Sapiens
accacugcacuccagucugggcgacagaguga

SEQ ID NO: 124167 - RNA, 32 nt, Homo Sapiens
aagauugaucuugccaagagugagggcagaug

SEQ ID NO: 124168 - RNA, 32 nt, Homo Sapiens
acccuuggggacgagggccugggccgcgguga

SEQ ID NO: 124169 - RNA, 32 nt, Homo Sapiens
ccgggaaugggagauggcaacagucccuguca

SEQ ID NO: 124170 - RNA, 32 nt, Homo Sapiens
caaauuauuaaacacuccuugagugaaauaau

SEQ ID NO: 124171 - RNA, 30 nt, Homo Sapiens
cguguccgcuaggggccgccggcgcccuuc

SEQ ID NO: 124172 - RNA, 32 nt, Homo Sapiens
cccaucccaucccaucccgcucuuuuccuacu

SEQ ID NO: 124173 - RNA, 32 nt, Homo Sapiens
uccuauaauuuugauagugggaccacauacgu

SEQ ID NO: 124174 - RNA, 32 nt, Homo Sapiens
aacuaauacuuaucuuuaaaauaguaaauagg

SEQ ID NO: 124175 - RNA, 32 nt, Homo Sapiens
agggaaaggugggaggaaugggaagcagcugu

SEQ ID NO: 124176 - RNA, 32 nt, Homo Sapiens
aguggaaaggauugggaugaacuggaggaaga

SEQ ID NO: 124177 - RNA, 29 nt, Homo Sapiens
uaguucugacuucucaguuuaauguggga

SEQ ID NO: 124178 - RNA, 32 nt, Homo Sapiens
uuagcuccuugacuccuugugguuuaugucau

SEQ ID NO: 124179 - RNA, 32 nt, Homo Sapiens
cucaagcacagcagaaucauggccccucucca

SEQ ID NO: 124180 - RNA, 32 nt, Homo Sapiens
caccacaaauuuggaaaugauaccuuacaaaa

SEQ ID NO: 124181 - RNA, 32 nt, Homo Sapiens
accuacauaaacuagaggcauuugagaacgaa

SEQ ID NO: 124182 - RNA, 32 nt, Homo Sapiens
guugaagagcaaacagaaagguuuucucuugg

SEQ ID NO: 124183 - RNA, 32 nt, Homo Sapiens
gaggccggguccgcggcagaccagggcagcga

SEQ ID NO: 124184 - RNA, 30 nt, Homo Sapiens
gcucuagucucugcugcagauucucaggac

SEQ ID NO: 124185 - RNA, 32 nt, Homo Sapiens
uccuccagcugccuacaccccccuaggucagu

SEQ ID NO: 124186 - RNA, 32 nt, Homo Sapiens
gugcacgauccugaaggggagcuccgaggggc

SEQ ID NO: 124187 - RNA, 32 nt, Homo Sapiens
uuuuuccuuuuggcugaggcugcaauauggcc

SEQ ID NO: 124188 - RNA, 32 nt, Homo Sapiens
gucaccccgccagccuacacugccagccgcca

SEQ ID NO: 124189 - RNA, 32 nt, Homo Sapiens
ccaacugcgggacaggaaguggccguagcggc

SEQ ID NO: 124190 - RNA, 32 nt, Homo Sapiens
gcucccuccucggauuugauugucuuccgugc

SEQ ID NO: 124191 - RNA, 32 nt, Homo Sapiens
uggaagcugacgggaaaggaagagucgguguu

SEQ ID NO: 124192 - RNA, 32 nt, Homo Sapiens
ugcuuccagugaaugugaacuucuuuucccug

SEQ ID NO: 124193 - RNA, 32 nt, Homo Sapiens
cugugccgcggccuugggagcaugucacugug

SEQ ID NO: 124194 - RNA, 32 nt, Homo Sapiens
ugcuuccuuccgucuuuccccaaggacuauca

SEQ ID NO: 124195 - RNA, 32 nt, Homo Sapiens
cagccugguacuuguaccuccggugucgugug

SEQ ID NO: 124196 - RNA, 32 nt, Homo Sapiens
cuucuuggccccagauggcaccucccugcacc

SEQ ID NO: 124197 - RNA, 32 nt, Homo Sapiens
aagggccguuugcaguggcucaagccuguaau

SEQ ID NO: 124198 - RNA, 27 nt, Homo Sapiens
gcccuauuuuaauucugcuauagaaaa

SEQ ID NO: 124199 - RNA, 32 nt, Homo Sapiens
cagauccggaagcugaucaaagaugggcugau

SEQ ID NO: 124200 - RNA, 32 nt, Homo Sapiens
ggcccaccggccgccgccccagccauggagca

SEQ ID NO: 124201 - RNA, 32 nt, Homo Sapiens
uaccaaaugcaaacacaucugggucugcgauu

SEQ ID NO: 124202 - RNA, 32 nt, Homo Sapiens
agacaagguagaugacaaaugguuaaugacuu

SEQ ID NO: 124203 - RNA, 32 nt, Homo Sapiens
guccgcaucgacgcacacauuccagaguacag

SEQ ID NO: 124204 - RNA, 32 nt, Homo Sapiens
agcagcguguggaaauggugaccuuugucugc

SEQ ID NO: 124205 - RNA, 32 nt, Homo Sapiens
gaaugugaaggcuagggcaguacuguauacua

SEQ ID NO: 124206 - RNA, 32 nt, Homo Sapiens
cggcggcggcggcagcagcugcagcaucaucu

SEQ ID NO: 124207 - RNA, 32 nt, Homo Sapiens
gaggcugaaagcugugucguugccagagacag

SEQ ID NO: 124208 - RNA, 32 nt, Homo Sapiens
gacgccuggaggucuggcacggcgggcgcugg

SEQ ID NO: 124209 - RNA, 32 nt, Homo Sapiens
uacaaggagcccacucagcaguuuucuuaccu

SEQ ID NO: 124210 - RNA, 32 nt, Homo Sapiens
cuuuauuuuuuuucuuuuuuuaagacagaguc

SEQ ID NO: 124211 - RNA, 32 nt, Homo Sapiens
gacaugggacucucauguuaacaaagaauaaa

SEQ ID NO: 124212 - RNA, 32 nt, Homo Sapiens
ugauccacacacagucaggccagucugcuucu

SEQ ID NO: 124213 - RNA, 32 nt, Homo Sapiens
caauucugauuuucuuuuucuuuugcaagucu

SEQ ID NO: 124214 - RNA, 32 nt, Homo Sapiens
gccgaaccucuccugauccgccggcagcaacg

SEQ ID NO: 124215 - RNA, 32 nt, Homo Sapiens
cguucccggcucggcucuggcagccccagcuc

SEQ ID NO: 124216 - RNA, 32 nt, Homo Sapiens
cagaccugcgcugccacugccaucgccaucca

SEQ ID NO: 124217 - RNA, 32 nt, Homo Sapiens
cucugauugugaggucacugugaaugauuaaa

SEQ ID NO: 124218 - RNA, 32 nt, Homo Sapiens
uauuucccuaaaauguuucuauagguugcagg

SEQ ID NO: 124219 - RNA, 32 nt, Homo Sapiens
gcuuuggaaaaaucuuuuuuuuuuuuuuuuuu

SEQ ID NO: 124220 - RNA, 32 nt, Homo Sapiens
ugcugaggcuucauaaucauggcucuuagaaa

SEQ ID NO: 124221 - RNA, 32 nt, Homo Sapiens
cuccucagaguacuuugcuauagugcacauac

SEQ ID NO: 124222 - RNA, 32 nt, Homo Sapiens
uaggcuccagagcuuccuaaccuaguaaaaug

SEQ ID NO: 124223 - RNA, 32 nt, Homo Sapiens
ggcugaauauccacuuuguuuuuauggauggc

SEQ ID NO: 124224 - RNA, 32 nt, Homo Sapiens
uguaggggcuuagaggcaugggcuugcugugg

SEQ ID NO: 124225 - RNA, 32 nt, Homo Sapiens
uuccuucuggggauuccugggcacugaaacuc

SEQ ID NO: 124226 - RNA, 32 nt, Homo Sapiens
ucgggggacugggggccccgccggcagagguc

SEQ ID NO: 124227 - RNA, 29 nt, Homo Sapiens
uggggaucgguccgggggaggccugaggc

SEQ ID NO: 124228 - RNA, 32 nt, Homo Sapiens
ccuucugcacccuggggugaggacggcuugga

SEQ ID NO: 124229 - RNA, 32 nt, Homo Sapiens
cauccucacggcauggccucugccuuccccag

SEQ ID NO: 124230 - RNA, 32 nt, Homo Sapiens
ccuacuuuagcucuccuuucucuagaccucac

SEQ ID NO: 124231 - RNA, 32 nt, Homo Sapiens
aguuuuucuuuguguuuggaucaaaaagaaac

SEQ ID NO: 124232 - RNA, 32 nt, Homo Sapiens
cugguuugacuguccuuaccccggggaggcag

SEQ ID NO: 124233 - RNA, 32 nt, Homo Sapiens
gcauauaaacagauaaaagaucgaguguucac

SEQ ID NO: 124234 - RNA, 32 nt, Homo Sapiens
uugugauucauuuucuuaauccaaauauauau

SEQ ID NO: 124235 - RNA, 32 nt, Homo Sapiens
gacgggagcucugcucaggcuucaacauggcg

SEQ ID NO: 124236 - RNA, 32 nt, Homo Sapiens
agacuguaaugcuuucaugccaaguaaauggu

SEQ ID NO: 124237 - RNA, 32 nt, Homo Sapiens
aaaacuuuuuuuacuuuuuuuccacaauuuuu

SEQ ID NO: 124238 - RNA, 32 nt, Homo Sapiens
aggauuaaaaggaaaagguggaccuggacuga

SEQ ID NO: 124239 - RNA, 32 nt, Homo Sapiens
cuuucccaacacuuaaucauggcagccaggau

SEQ ID NO: 124240 - RNA, 32 nt, Homo Sapiens
auagaagaaaauaguggugcuucuuucugauc

SEQ ID NO: 124241 - RNA, 32 nt, Homo Sapiens
gcacgcacuggccccggcgcccacccgcaccc

SEQ ID NO: 124242 - RNA, 32 nt, Homo Sapiens
ggaagcggaggcgcgagcuggaggcggcggcu

SEQ ID NO: 124243 - RNA, 32 nt, Homo Sapiens
ggacgggagcgcgggcguccgcgguggcugca

SEQ ID NO: 124244 - RNA, 31 nt, Homo Sapiens
aaggaggcgggcccugcgcgcagcauuuugg

SEQ ID NO: 124245 - RNA, 32 nt, Homo Sapiens
gaucugccuccagucucggacuugguuguugc

SEQ ID NO: 124246 - RNA, 32 nt, Homo Sapiens
uucugcuggggguggggcuucacaggaggcaa

SEQ ID NO: 124247 - RNA, 32 nt, Homo Sapiens
uaagacuaaggguuuaaaucugcuugcacuag

SEQ ID NO: 124248 - RNA, 32 nt, Homo Sapiens
uuguuuuggugcccugacccucugaagugccc

SEQ ID NO: 124249 - RNA, 32 nt, Homo Sapiens
ccuccuggagaccccugucaccuccugaccaa

SEQ ID NO: 124250 - RNA, 32 nt, Homo Sapiens
ccugcgugcagccccaaggaggaggcgcgcua

SEQ ID NO: 124251 - RNA, 32 nt, Homo Sapiens
gcuuugcuucauacaucaauaaugauauggug

SEQ ID NO: 124252 - RNA, 32 nt, Homo Sapiens
aaaaauacauguuuuuaagaaaacauugagca

SEQ ID NO: 124253 - RNA, 32 nt, Homo Sapiens
auguuugaugacuggggaaaaaauaagcucga

SEQ ID NO: 124254 - RNA, 32 nt, Homo Sapiens
ccaggguguugcaaacucauggccuugggcca

SEQ ID NO: 124255 - RNA, 32 nt, Homo Sapiens
ucuguuugcggcuaguuuuucuuucuguuucc

SEQ ID NO: 124256 - RNA, 32 nt, Homo Sapiens
caggguugggccgcauguggaagggcucugag

SEQ ID NO: 124257 - RNA, 32 nt, Homo Sapiens
agagccaucuucgaucuuugcggccugaggca

SEQ ID NO: 124258 - RNA, 32 nt, Homo Sapiens
caggcugccccucuccuuccccggcucgcagg

SEQ ID NO: 124259 - RNA, 32 nt, Homo Sapiens
cucuugcucccucauucacuagggcaaauguc

SEQ ID NO: 124260 - RNA, 32 nt, Homo Sapiens
cggggcucccucacugcacagaacccaccccu

SEQ ID NO: 124261 - RNA, 32 nt, Homo Sapiens
gacucgggcccggcccggaggggacaccucac

SEQ ID NO: 124262 - RNA, 32 nt, Homo Sapiens
ugauagagaaaagaugagagaggggacuaauu

SEQ ID NO: 124263 - RNA, 32 nt, Homo Sapiens
agaucuauuugguugcucuauagucaaacagc

SEQ ID NO: 124264 - RNA, 32 nt, Homo Sapiens
uauuucuucuucauuaauucuccaucuagucu

SEQ ID NO: 124265 - RNA, 32 nt, Homo Sapiens
cuugucaucuaccuguuuaccucuaacagaag

SEQ ID NO: 124266 - RNA, 32 nt, Homo Sapiens
gucccauuucuaccccucuggaugccccaguc

SEQ ID NO: 124267 - RNA, 32 nt, Homo Sapiens
ucaguuccagccuuccucuccaacucuucagc

SEQ ID NO: 124268 - RNA, 32 nt, Homo Sapiens
acuuaauuuggaaaacauguauguagccagug

SEQ ID NO: 124269 - RNA, 32 nt, Homo Sapiens
ggccccagcgucgugggccgcgcacggcccug

SEQ ID NO: 124270 - RNA, 32 nt, Homo Sapiens
agacgcaacugcaggcugaggaccgcgacaag

SEQ ID NO: 124271 - RNA, 32 nt, Homo Sapiens
cgcugccgccacugucgccgccgccgccgagc

SEQ ID NO: 124272 - RNA, 32 nt, Homo Sapiens
ucuuugaacuguccccgccuucucccgccuug

SEQ ID NO: 124273 - RNA, 32 nt, Homo Sapiens
cggaaaguuugggagcccgagcaggcucggcu

SEQ ID NO: 124274 - RNA, 32 nt, Homo Sapiens
ucguugaguuagagaggaaaacaucggauaaa

SEQ ID NO: 124275 - RNA, 32 nt, Homo Sapiens
agcaaggccacuuuucagaagauaagaguuca

SEQ ID NO: 124276 - RNA, 32 nt, Homo Sapiens
ccuuuuugaacugaaagugacucucgaagccu

SEQ ID NO: 124277 - RNA, 32 nt, Homo Sapiens
ugccccucuaaagucuugucuuggagucacau

SEQ ID NO: 124278 - RNA, 32 nt, Homo Sapiens
ucaccucaggccagaagccccuggacacuccg

SEQ ID NO: 124279 - RNA, 32 nt, Homo Sapiens
aaaggugcucucagaaucaucaucugcauuug

SEQ ID NO: 124280 - RNA, 32 nt, Homo Sapiens
cggacagcaaagugguuuuaaugcaagcccaa

SEQ ID NO: 124281 - RNA, 31 nt, Homo Sapiens
agucugauacagugaaggagauaaacacuuc

SEQ ID NO: 124282 - RNA, 32 nt, Homo Sapiens
cucccuggagaaugguggcuaagaacacggag

SEQ ID NO: 124283 - RNA, 32 nt, Homo Sapiens
aaaauaaaauguauagcuuaagaucaaaacag

SEQ ID NO: 124284 - RNA, 32 nt, Homo Sapiens
uucauuuucucauuuuaagccaauuaaauauu

SEQ ID NO: 124285 - RNA, 32 nt, Homo Sapiens
cugcgguguauauuaacaucuugaugagacag

SEQ ID NO: 124286 - RNA, 32 nt, Homo Sapiens
ccauuuaaguuucaaaaucccuuauaaaauaa

SEQ ID NO: 124287 - RNA, 32 nt, Homo Sapiens
cugugacugaagugauacacuaaucacgggga

SEQ ID NO: 124288 - RNA, 30 nt, Homo Sapiens
ggcguggcugugggucccggauuagcggcg

SEQ ID NO: 124289 - RNA, 32 nt, Homo Sapiens
uaggggauugguuaagcaaacuggugcuucca

SEQ ID NO: 124290 - RNA, 32 nt, Homo Sapiens
cccuugucuuguaugcaauaaauaucagugca

SEQ ID NO: 124291 - RNA, 32 nt, Homo Sapiens
guugguugggacccgcuccaacccucgguucu

SEQ ID NO: 124292 - RNA, 32 nt, Homo Sapiens
gccaggcacugccugcccccaucugaguaagg

SEQ ID NO: 124293 - RNA, 32 nt, Homo Sapiens
uacaggcuggagcagcagcugcauccugcauu

SEQ ID NO: 124294 - RNA, 32 nt, Homo Sapiens
gaauaguguucaguaaaaugaagcagucuuaa

SEQ ID NO: 124295 - RNA, 32 nt, Homo Sapiens
gccgcggucagccggcauuccggagcagcgcg

SEQ ID NO: 124296 - RNA, 32 nt, Homo Sapiens
acagugucagggauuauauucguuuuacuaua

SEQ ID NO: 124297 - RNA, 32 nt, Homo Sapiens
ucuugauuucauauuuccuucucuaaauauau

SEQ ID NO: 124298 - RNA, 32 nt, Homo Sapiens
gaguggcccuguacauagacugcuggggauug

SEQ ID NO: 124299 - RNA, 32 nt, Homo Sapiens
agcuuagaaaauaccagaggccucauacuaaa

SEQ ID NO: 124300 - RNA, 32 nt, Homo Sapiens
ccgggucaggugccucgagaucgggcuugggc

SEQ ID NO: 124301 - RNA, 32 nt, Homo Sapiens
ggcguguggggcggggcggggcagggcaggga

SEQ ID NO: 124302 - RNA, 32 nt, Homo Sapiens
uucaaaagcucauagaaacagcccuuaccaag

SEQ ID NO: 124303 - RNA, 32 nt, Homo Sapiens
gacgugagcguagugugccgcgcaaggcucug

SEQ ID NO: 124304 - RNA, 32 nt, Homo Sapiens
caugauuuugcacacucucuccguggacaucc

SEQ ID NO: 124305 - RNA, 32 nt, Homo Sapiens
agugugcccuuuuaaucuuuacuaguuauugu

SEQ ID NO: 124306 - RNA, 32 nt, Homo Sapiens
ggagagaagcuuccagaccagcccuucacaca

SEQ ID NO: 124307 - RNA, 32 nt, Homo Sapiens
uccugggcggguguugaugggacccagggaga

SEQ ID NO: 124308 - RNA, 32 nt, Homo Sapiens
uuuaacaucuucuuuccuaugcccucucugug

SEQ ID NO: 124309 - RNA, 32 nt, Homo Sapiens
aaaagaacacuuucugcucauaucauaaccag

SEQ ID NO: 124310 - RNA, 32 nt, Homo Sapiens
uggaagcgcccucucccucagucauggagaaa

SEQ ID NO: 124311 - RNA, 32 nt, Homo Sapiens
caugagugguggcuaaccugaccaauaaaguu

SEQ ID NO: 124312 - RNA, 32 nt, Homo Sapiens
ggaacgcuccagcucucagacccucuuccucc

SEQ ID NO: 124313 - RNA, 32 nt, Homo Sapiens
ggaacaggccuugggcuguuuccgugugacca

SEQ ID NO: 124314 - RNA, 32 nt, Homo Sapiens
aaaugcaucgccaagcuguuucugggucaucc

SEQ ID NO: 124315 - RNA, 32 nt, Homo Sapiens
cauuguauucagaaaaccugugucacauuaaa

SEQ ID NO: 124316 - RNA, 32 nt, Homo Sapiens
cuauggcaaagucucaggauccuguucagaua

SEQ ID NO: 124317 - RNA, 32 nt, Homo Sapiens
guauaagugaauauauacacacacauacagac

SEQ ID NO: 124318 - RNA, 32 nt, Homo Sapiens
uucuugcagauuacauguuuuuacaguggccu

SEQ ID NO: 124319 - RNA, 32 nt, Homo Sapiens
ggucaaaacauuuugugggaaauauccuguuc

SEQ ID NO: 124320 - RNA, 32 nt, Homo Sapiens
caggggcuucccgggcugcugcugucccgccc

SEQ ID NO: 124321 - RNA, 32 nt, Homo Sapiens
gauagagcaaggaaaccagaaagguguaauau

SEQ ID NO: 124322 - RNA, 30 nt, Homo Sapiens
cggggcgcgcagcucgcgggucuuuggaca

SEQ ID NO: 124323 - RNA, 32 nt, Homo Sapiens
ccaccucagccugccaguggcuagaacuacag

SEQ ID NO: 124324 - RNA, 32 nt, Homo Sapiens
cuugguguauuuuuauuuuaaauauuaacucu

SEQ ID NO: 124325 - RNA, 32 nt, Homo Sapiens
aauuccuuaaauugauuuggaauuuuuguuaa

SEQ ID NO: 124326 - RNA, 32 nt, Homo Sapiens
ugugguuggagaugaagugguguugauaaacc

SEQ ID NO: 124327 - RNA, 27 nt, Homo Sapiens
gaguuugccucccccagcccccucccc

SEQ ID NO: 124328 - RNA, 28 nt, Homo Sapiens
agcacaggggggccgccgguuugaguga

SEQ ID NO: 124329 - RNA, 32 nt, Homo Sapiens
aaguauuaaaacugugaagcuuucucagugca

SEQ ID NO: 124330 - RNA, 32 nt, Homo Sapiens
cccgagcugguggggagggucccggccggugg

SEQ ID NO: 124331 - RNA, 32 nt, Homo Sapiens
ugagccugggccacuccucccuggccuucuua

SEQ ID NO: 124332 - RNA, 32 nt, Homo Sapiens
uuuuguuaauuuuguucauauuuaucgggaug

SEQ ID NO: 124333 - RNA, 32 nt, Homo Sapiens
ugagcugcacacucaagggugugauaaccagc

SEQ ID NO: 124334 - RNA, 32 nt, Homo Sapiens
auaaauguacaauauucguuuacaauguuagc

SEQ ID NO: 124335 - RNA, 32 nt, Homo Sapiens
uuggugucugguuucuguccccggggcauugg

SEQ ID NO: 124336 - RNA, 32 nt, Homo Sapiens
ucuuuacaaaauguaugguaauagaaccaagg

SEQ ID NO: 124337 - RNA, 32 nt, Homo Sapiens
agcuccugggcaagaacaccuuugaguuccug

SEQ ID NO: 124338 - RNA, 32 nt, Homo Sapiens
accuguagucccaggcacuuugggaggccgag

SEQ ID NO: 124339 - RNA, 32 nt, Homo Sapiens
aacaaacgguguuuuucuuuuaaacaggugau

SEQ ID NO: 124340 - RNA, 32 nt, Homo Sapiens
caacauuugucaaccauccacaagugucuaca

SEQ ID NO: 124341 - RNA, 32 nt, Homo Sapiens
uaaguguuuguuuccaggauauuuucuuuuua

SEQ ID NO: 124342 - RNA, 31 nt, Homo Sapiens
aaagcugaggccuggcucagagccuguuugc

SEQ ID NO: 124343 - RNA, 30 nt, Homo Sapiens
gagccucccucugcugcaggagcucgucca

SEQ ID NO: 124344 - RNA, 32 nt, Homo Sapiens
cacuguucccccugugcagccgcugagcgagg

SEQ ID NO: 124345 - RNA, 32 nt, Homo Sapiens
guacuccguugcuguuuuuuuauaaacacacu

SEQ ID NO: 124346 - RNA, 32 nt, Homo Sapiens
ccugcgcggagcggagcggcgcggcguccacc

SEQ ID NO: 124347 - RNA, 32 nt, Homo Sapiens
aaagcaccaaaauaagaaaagauguagauuua

SEQ ID NO: 124348 - RNA, 32 nt, Homo Sapiens
uggauagacauucuggugaugauuuaggggcu

SEQ ID NO: 124349 - RNA, 32 nt, Homo Sapiens
ucaggagaaaauuuaaacucuucagccaggca

SEQ ID NO: 124350 - RNA, 32 nt, Homo Sapiens
caguauugggggugguucgggggagggguguu

SEQ ID NO: 124351 - RNA, 32 nt, Homo Sapiens
aaaaaagucucaacaagaagucuguggaguug

SEQ ID NO: 124352 - RNA, 32 nt, Homo Sapiens
aacuuuuauucaauauguauuuccugaaauua

SEQ ID NO: 124353 - RNA, 32 nt, Homo Sapiens
acucugcccucccgcggcccgggcucgcgccg

SEQ ID NO: 124354 - RNA, 32 nt, Homo Sapiens
ugccaaccaucuuguaaauauuguaauacuuu

SEQ ID NO: 124355 - RNA, 32 nt, Homo Sapiens
cagaaacccgucaugacgcggcugcuucggaa

SEQ ID NO: 124356 - RNA, 32 nt, Homo Sapiens
guauaucugugugucaauguguguguuggcau

SEQ ID NO: 124357 - RNA, 32 nt, Homo Sapiens
auuuuuauuuaacgugauuacugaucauuacu

SEQ ID NO: 124358 - RNA, 32 nt, Homo Sapiens
uuuuuucgagccaagcuuaguuagacucuuuu

SEQ ID NO: 124359 - RNA, 32 nt, Homo Sapiens
ggccuaagaggagagggaaccagggagaaaag

SEQ ID NO: 124360 - RNA, 32 nt, Homo Sapiens
ucaagugcuguaauuugacauuuucagaaauu

SEQ ID NO: 124361 - RNA, 32 nt, Homo Sapiens
ucccgccgucagugccuucucauccuccaagg

SEQ ID NO: 124362 - RNA, 32 nt, Homo Sapiens
ccagcagcagcaggcagccggagggagugaga

SEQ ID NO: 124363 - RNA, 32 nt, Homo Sapiens
uauauauguacaacaguguguuuguaaauaua

SEQ ID NO: 124364 - RNA, 32 nt, Homo Sapiens
ggcggcggugcucaugcaccacagcaaggagg

SEQ ID NO: 124365 - RNA, 32 nt, Homo Sapiens
cagcccucugcgcgccagugcugugcggucuc

SEQ ID NO: 124366 - RNA, 32 nt, Homo Sapiens
agcagggaagcagcaugcaggcuucacagcuu

SEQ ID NO: 124367 - RNA, 32 nt, Homo Sapiens
auaugcauguaauugcaaauguuagauacauu

SEQ ID NO: 124368 - RNA, 32 nt, Homo Sapiens
uaucauaaaaauuuauuuuaauauuuaucaca

SEQ ID NO: 124369 - RNA, 32 nt, Homo Sapiens
guagagaugugguuuuaccauguuugccagga

SEQ ID NO: 124370 - RNA, 32 nt, Homo Sapiens
gugagucucacuauuuuugaugggcgagcucu

SEQ ID NO: 124371 - RNA, 32 nt, Homo Sapiens
cuagauuagucuuugguuuucuuucuuuuguc

SEQ ID NO: 124372 - RNA, 32 nt, Homo Sapiens
ccuuacgcgcccgacgcgcgccacccgcggcc

SEQ ID NO: 124373 - RNA, 32 nt, Homo Sapiens
gggacggguaugggcgggagguaggggcgcgg

SEQ ID NO: 124374 - RNA, 32 nt, Homo Sapiens
gaagaguugaauaagcaaauagaagaugaccg

SEQ ID NO: 124375 - RNA, 32 nt, Homo Sapiens
uuuaggaagaucugaugggcucuaacagugcu

SEQ ID NO: 124376 - RNA, 32 nt, Homo Sapiens
aagagcgggcuaagacgccggaggagguggcg

SEQ ID NO: 124377 - RNA, 32 nt, Homo Sapiens
auuuucuggccuuucauggcaaugaaaauuuu

SEQ ID NO: 124378 - RNA, 32 nt, Homo Sapiens
cuacaaauagagaggcagaauaggugggguau

SEQ ID NO: 124379 - RNA, 32 nt, Homo Sapiens
uaguauuucuauuuguacuuuaagucaaaugc

SEQ ID NO: 124380 - RNA, 32 nt, Homo Sapiens
acugagugaugaaggaagacuugaaccuagaa

SEQ ID NO: 124381 - RNA, 32 nt, Homo Sapiens
acucauuccuuccuuuccucaugcaggaggcg

SEQ ID NO: 124382 - RNA, 32 nt, Homo Sapiens
cauuuggaaaaauaaaggcaucugaaguacaa

SEQ ID NO: 124383 - RNA, 29 nt, Homo Sapiens
ucccaugaacuguguuccggauguuauca

SEQ ID NO: 124384 - RNA, 32 nt, Homo Sapiens
gggcagauggguggacagcugcugcugcccug

SEQ ID NO: 124385 - RNA, 28 nt, Homo Sapiens
gaagacagaggcaggaggaugacccagg

SEQ ID NO: 124386 - RNA, 32 nt, Homo Sapiens
aaugguuaaaaugguuauauguuaugugcauu

SEQ ID NO: 124387 - RNA, 32 nt, Homo Sapiens
gccacugccucuuccucccucauuccaccuuc

SEQ ID NO: 124388 - RNA, 32 nt, Homo Sapiens
ggacggggggcaugcuggccucaugggcuugg

SEQ ID NO: 124389 - RNA, 29 nt, Homo Sapiens
uucuuuuguaacaguuaccacaaagauau

SEQ ID NO: 124390 - RNA, 32 nt, Homo Sapiens
ugucccggaagcccuccuucgggagaacugua

SEQ ID NO: 124391 - RNA, 32 nt, Homo Sapiens
cucuucgcgcccacccccguuauucuucacuu

SEQ ID NO: 124392 - RNA, 32 nt, Homo Sapiens
ccaaaggaugccaaagauugacagccaccacc

SEQ ID NO: 124393 - RNA, 32 nt, Homo Sapiens
uuccgccgcugccuaguuuccucccccuccuc

SEQ ID NO: 124394 - RNA, 32 nt, Homo Sapiens
gcucccaaauuucaaauuuuggcacgaugaau

SEQ ID NO: 124395 - RNA, 32 nt, Homo Sapiens
aacgcggugcuugcuccucccggaguggccuu

SEQ ID NO: 124396 - RNA, 32 nt, Homo Sapiens
uuaacuguugguauaugggaaugcuagugguu

SEQ ID NO: 124397 - RNA, 32 nt, Homo Sapiens
guuguauaaacuaaucuuugcuuguuuucuac

SEQ ID NO: 124398 - RNA, 32 nt, Homo Sapiens
ugugccuagacaaugugaauuccuguguugcu

SEQ ID NO: 124399 - RNA, 32 nt, Homo Sapiens
agcccaggaaagauuauaccuaugacucggcu

SEQ ID NO: 124400 - RNA, 32 nt, Homo Sapiens
ccugccagcugcucccgagguggccuugagaa

SEQ ID NO: 124401 - RNA, 32 nt, Homo Sapiens
cagacaagugcagcugcugugccugugccagg

SEQ ID NO: 124402 - RNA, 32 nt, Homo Sapiens
auggauauuucugaaugucucuuuggccaaau

SEQ ID NO: 124403 - RNA, 32 nt, Homo Sapiens
ggugccagugccugcuccugccauggggcccg

SEQ ID NO: 124404 - RNA, 32 nt, Homo Sapiens
ccccacugugacucaccuucuucugcccccac

SEQ ID NO: 124405 - RNA, 32 nt, Homo Sapiens
uauauggugcccuucugaugcuaagacuccag

SEQ ID NO: 124406 - RNA, 32 nt, Homo Sapiens
acauguuuuuuguaaggcugguaaauaaauua

SEQ ID NO: 124407 - RNA, 32 nt, Homo Sapiens
ccccuucgccccagccccccagcagcacccgc

SEQ ID NO: 124408 - RNA, 32 nt, Homo Sapiens
cacugcacuccagccugggugacacagcgaca

SEQ ID NO: 124409 - RNA, 32 nt, Homo Sapiens
cuuguuuguaauuauuugcuccuuugaaaauu

SEQ ID NO: 124410 - RNA, 32 nt, Homo Sapiens
guaaaaggaaucaacaccuuuacauugcucaa

SEQ ID NO: 124411 - RNA, 32 nt, Homo Sapiens
aaaauugugcagauacuagugaagauacuagu

SEQ ID NO: 124412 - RNA, 32 nt, Homo Sapiens
aaauacguauuuuuaaaacauggcuuuugaua

SEQ ID NO: 124413 - RNA, 31 nt, Homo Sapiens
gaaaaggccagacccugcugaguuagaggcu

SEQ ID NO: 124414 - RNA, 32 nt, Homo Sapiens
aaugaagccucccaggcacccgcugaauuucu

SEQ ID NO: 124415 - RNA, 30 nt, Homo Sapiens
aagggcccuguggugccgccgcccuuccuu

SEQ ID NO: 124416 - RNA, 32 nt, Homo Sapiens
ccacuuguccuuagccuggaccucugacagca

SEQ ID NO: 124417 - RNA, 32 nt, Homo Sapiens
cucacgcugucgccgcgcgguuucccuucgca

SEQ ID NO: 124418 - RNA, 32 nt, Homo Sapiens
ccuccagcggaagccauacacccacgggagcc

SEQ ID NO: 124419 - RNA, 32 nt, Homo Sapiens
aaagugaugaacuggcagggauaacaaagaac

SEQ ID NO: 124420 - RNA, 32 nt, Homo Sapiens
gcggccgcgaggggagggggagucccgucuga

SEQ ID NO: 124421 - RNA, 32 nt, Homo Sapiens
uggccagccaagguucacggcgauucucccca

SEQ ID NO: 124422 - RNA, 28 nt, Homo Sapiens
uucaaaauugcuaaaauguguuugagcu

SEQ ID NO: 124423 - RNA, 30 nt, Homo Sapiens
aacccgggagguggagcuugcagugagccg

SEQ ID NO: 124424 - RNA, 31 nt, Homo Sapiens
gccccuccgagcgguccccagaauuagcugg

SEQ ID NO: 124425 - RNA, 32 nt, Homo Sapiens
acuuuagcauagaaaagcaaauccauaacacc

SEQ ID NO: 124426 - RNA, 32 nt, Homo Sapiens
ucagggcggggccagccucucuguccaaugcu

SEQ ID NO: 124427 - RNA, 32 nt, Homo Sapiens
cgccuguaauccccgcacuuugggaggccgag

SEQ ID NO: 124428 - RNA, 32 nt, Homo Sapiens
uugugcaagugccuuccugagcagaagaacug

SEQ ID NO: 124429 - RNA, 32 nt, Homo Sapiens
ucuuuucucuaccccuguguccugcuucucac

SEQ ID NO: 124430 - RNA, 32 nt, Homo Sapiens
cagaaauucagaaacguaauucuuacauugug

SEQ ID NO: 124431 - RNA, 32 nt, Homo Sapiens
uucacuucauacauccaucuaaauggauaccu

SEQ ID NO: 124432 - RNA, 32 nt, Homo Sapiens
gagauagagucuuguucugcugcccaagcugg

SEQ ID NO: 124433 - RNA, 32 nt, Homo Sapiens
caggugaccagaaugaggcacaugacaguggu

SEQ ID NO: 124434 - RNA, 32 nt, Homo Sapiens
gugggcugggucacgugggucucgcugggacc

SEQ ID NO: 124435 - RNA, 29 nt, Homo Sapiens
acucauggccccagcugccuccugggcuc

SEQ ID NO: 124436 - RNA, 32 nt, Homo Sapiens
auaguccuaaaauuucccagcguagaacaaga

SEQ ID NO: 124437 - RNA, 32 nt, Homo Sapiens
ggcucacugccuuaucaggaccucugaguuuu

SEQ ID NO: 124438 - RNA, 32 nt, Homo Sapiens
gagugagucaaugagagggaaccaacauuugc

SEQ ID NO: 124439 - RNA, 32 nt, Homo Sapiens
ccagacuuccucugcuggucuggccuggugac

SEQ ID NO: 124440 - RNA, 32 nt, Homo Sapiens
guucuuuaauaaauagcuauauggaucuuacu

SEQ ID NO: 124441 - RNA, 32 nt, Homo Sapiens
agucacaacaacugauaaaaucugaaaguaac

SEQ ID NO: 124442 - RNA, 32 nt, Homo Sapiens
gagcagcccgugugggggcccgagggacccac

SEQ ID NO: 124443 - RNA, 32 nt, Homo Sapiens
ccugccccucccugacccggggcccccuuucc

SEQ ID NO: 124444 - RNA, 30 nt, Homo Sapiens
agacaugauaaaagaaacauuuguauguuc

SEQ ID NO: 124445 - RNA, 32 nt, Homo Sapiens
cugcggccugcgggccaccuccucuuccuugg

SEQ ID NO: 124446 - RNA, 32 nt, Homo Sapiens
guuauuaaacucuuuaaauaugucauagaaaa

SEQ ID NO: 124447 - RNA, 32 nt, Homo Sapiens
gccccagccuggcacaaauggaugcauacagu

SEQ ID NO: 124448 - RNA, 32 nt, Homo Sapiens
uucaaaaaugauagcuuagaaaacacuagagu

SEQ ID NO: 124449 - RNA, 32 nt, Homo Sapiens
gacccuuggcaagucaguuaaucuugguaaac

SEQ ID NO: 124450 - RNA, 32 nt, Homo Sapiens
gaggggccguccccgugugccgcguuuggcgg

SEQ ID NO: 124451 - RNA, 32 nt, Homo Sapiens
augaggucaggagaucaagaccauccuggcua

SEQ ID NO: 124452 - RNA, 32 nt, Homo Sapiens
uuuuacugcuuccuaaggauagauuaucaaga

SEQ ID NO: 124453 - RNA, 32 nt, Homo Sapiens
cugaggcuuggaaaacaaguccugcugcucuc

SEQ ID NO: 124454 - RNA, 32 nt, Homo Sapiens
cuaagaauuucugcuaaauaucaccuagcaug

SEQ ID NO: 124455 - RNA, 32 nt, Homo Sapiens
augcuucuaccaaaguaaaacucugugaguug

SEQ ID NO: 124456 - RNA, 32 nt, Homo Sapiens
guccuaaagcuacucagccuuuaaucuuacac

SEQ ID NO: 124457 - RNA, 32 nt, Homo Sapiens
gcaguucuuauuaugauucagagaagagcaaa

SEQ ID NO: 124458 - RNA, 32 nt, Homo Sapiens
aagaaaacccucaauucuuaauagauauaaga

SEQ ID NO: 124459 - RNA, 32 nt, Homo Sapiens
uguuuucuuuugcuuaagcacuucaucaauug

SEQ ID NO: 124460 - RNA, 32 nt, Homo Sapiens
gugagauggucagcuuuggugcucuccacaac

SEQ ID NO: 124461 - RNA, 32 nt, Homo Sapiens
uaguagcugccaggcugucccccgcccugccc

SEQ ID NO: 124462 - RNA, 32 nt, Homo Sapiens
uaagggagaaaaccugugaaggucucagaagg

SEQ ID NO: 124463 - RNA, 32 nt, Homo Sapiens
aauucucuguggauguugcuguaaaguaugca

SEQ ID NO: 124464 - RNA, 32 nt, Homo Sapiens
caggggccaaaggagucauucucuacucagac

SEQ ID NO: 124465 - RNA, 32 nt, Homo Sapiens
aauuuucacaugccucagcuuagaaaaauaaa

SEQ ID NO: 124466 - RNA, 32 nt, Homo Sapiens
cuuuuucuggccucuuuucucuagucggccac

SEQ ID NO: 124467 - RNA, 32 nt, Homo Sapiens
cagcgggccccggcgugggucucccgccaggc

SEQ ID NO: 124468 - RNA, 32 nt, Homo Sapiens
uuugauuaacccccauaaggcaugugugugua

SEQ ID NO: 124469 - RNA, 32 nt, Homo Sapiens
uccaucaaggcacagcucaaaugacaucagcu

SEQ ID NO: 124470 - RNA, 32 nt, Homo Sapiens
gagagaagauggaaacaacauugcuuuucuuu

SEQ ID NO: 124471 - RNA, 32 nt, Homo Sapiens
cacuuugugggaaagacagaggcgggaggauu

SEQ ID NO: 124472 - RNA, 32 nt, Homo Sapiens
gcaagaauauuuugugcuuucuuuagaaacac

SEQ ID NO: 124473 - RNA, 32 nt, Homo Sapiens
uuugccaaauuugaugaagugcaaaguucagg

SEQ ID NO: 124474 - RNA, 32 nt, Homo Sapiens
ccgccgcuuccagcuuccucugagccgcaggg

SEQ ID NO: 124475 - RNA, 30 nt, Homo Sapiens
cucgcugggaagcuugaucgccgccuguuc

SEQ ID NO: 124476 - RNA, 32 nt, Homo Sapiens
caggcuugagugcaguggugugaucuuggcuc

SEQ ID NO: 124477 - RNA, 32 nt, Homo Sapiens
caggggcccucccggucacgauccucaucgug

SEQ ID NO: 124478 - RNA, 32 nt, Homo Sapiens
agauaacuuuuuuuuucuuuauaagaaagccu

SEQ ID NO: 124479 - RNA, 31 nt, Homo Sapiens
gacaggcugggccccaucagcagagccacca

SEQ ID NO: 124480 - RNA, 32 nt, Homo Sapiens
gaggaaugaagagaggcggccgggccccgcgc

SEQ ID NO: 124481 - RNA, 32 nt, Homo Sapiens
aagagagaaaucauuuuaccuaagagaacuaa

SEQ ID NO: 124482 - RNA, 32 nt, Homo Sapiens
aggaucggacacggcccggcccggccauggcc

SEQ ID NO: 124483 - RNA, 32 nt, Homo Sapiens
aaucucucauagcuuucuuuuccauuuucccc

SEQ ID NO: 124484 - RNA, 32 nt, Homo Sapiens
gauaggggccgccggcuggcugccggcuccau

SEQ ID NO: 124485 - RNA, 31 nt, Homo Sapiens
gugggcaccuacggccugcccuguuagcuuu

SEQ ID NO: 124486 - RNA, 32 nt, Homo Sapiens
cgaaauauguacacagagaaaaaucacaugaa

SEQ ID NO: 124487 - RNA, 32 nt, Homo Sapiens
cauguggugucugagcagggcccgagaccuuc

SEQ ID NO: 124488 - RNA, 32 nt, Homo Sapiens
aucuuuuuacuuugagcauauauuuuagaaua

SEQ ID NO: 124489 - RNA, 32 nt, Homo Sapiens
augcaggcucccuagggccccaucccagugcc

SEQ ID NO: 124490 - RNA, 32 nt, Homo Sapiens
ucucggagccccagccggcuccgcccgcuucg

SEQ ID NO: 124491 - RNA, 32 nt, Homo Sapiens
cucauuuugacucguuuggacaagugaguuac

SEQ ID NO: 124492 - RNA, 32 nt, Homo Sapiens
gccuuggcaaaauaaacuucuccauugaucga

SEQ ID NO: 124493 - RNA, 32 nt, Homo Sapiens
gauuugcuccuaaaccauugagcuagcgauuu

SEQ ID NO: 124494 - RNA, 32 nt, Homo Sapiens
cuaccaaguuuuggggaaauuuguuaugcagu

SEQ ID NO: 124495 - RNA, 32 nt, Homo Sapiens
ugccuuaaaaacagugcccaacagugaacugc

SEQ ID NO: 124496 - RNA, 32 nt, Homo Sapiens
ugcgcagccacggccccacccacagccugguc

SEQ ID NO: 124497 - RNA, 32 nt, Homo Sapiens
ggccagguggaguacaucuucuccgacaagac

SEQ ID NO: 124498 - RNA, 32 nt, Homo Sapiens
gaaaauaggcacucacaaugacaaccagagcc

SEQ ID NO: 124499 - RNA, 32 nt, Homo Sapiens
cacagcggcagugucccuccccuccccccacu

SEQ ID NO: 124500 - RNA, 32 nt, Homo Sapiens
gccuaguugugaaccaaaugugaaaaaaccuc

SEQ ID NO: 124501 - RNA, 32 nt, Homo Sapiens
ggggaggggaaggagcggcacaugggguugag

SEQ ID NO: 124502 - RNA, 32 nt, Homo Sapiens
ggcuuuuucuuuucuuucucuuuuaaaacaca

SEQ ID NO: 124503 - RNA, 32 nt, Homo Sapiens
ggcuggcugggaacaaggagcaguauguugag

SEQ ID NO: 124504 - RNA, 32 nt, Homo Sapiens
aguuucgccauguuggccaggcuggucucgaa

SEQ ID NO: 124505 - RNA, 29 nt, Homo Sapiens
ucuuuuucaaguauguaccauaggacuua

SEQ ID NO: 124506 - RNA, 32 nt, Homo Sapiens
uguaggaggaagaauaucaagguuguggaaaa

SEQ ID NO: 124507 - RNA, 32 nt, Homo Sapiens
ccauccuucuauucucuggucuucuauuuuug

SEQ ID NO: 124508 - RNA, 32 nt, Homo Sapiens
ugguguuaucuaacauguuaacuagauuguag

SEQ ID NO: 124509 - RNA, 32 nt, Homo Sapiens
acuugccuuccacgguggccagcccugcugcc

SEQ ID NO: 124510 - RNA, 32 nt, Homo Sapiens
gcuggaaguauuuuauucauauguauauuuau

SEQ ID NO: 124511 - RNA, 32 nt, Homo Sapiens
caaugcucugucaucucccuacugggucuccu

SEQ ID NO: 124512 - RNA, 32 nt, Homo Sapiens
cucuacuguauaaauuuguuuuugauccaggg

SEQ ID NO: 124513 - RNA, 32 nt, Homo Sapiens
cagggcgcaggugggcagcgcgcacggccugc

SEQ ID NO: 124514 - RNA, 32 nt, Homo Sapiens
gcauuguagugucucaaagacacaauaaacuu

SEQ ID NO: 124515 - RNA, 32 nt, Homo Sapiens
aauccucaucuucaaagucuuaccacucugau

SEQ ID NO: 124516 - RNA, 32 nt, Homo Sapiens
uuuauccacagugucauuuuuuacugucagaa

SEQ ID NO: 124517 - RNA, 32 nt, Homo Sapiens
cucaggcaggucccucaguucucacgccuucc

SEQ ID NO: 124518 - RNA, 32 nt, Homo Sapiens
caggugcucuccuggggcugaaguugggagca

SEQ ID NO: 124519 - RNA, 32 nt, Homo Sapiens
aaugaagaaaucagugucaucucuacucuccu

SEQ ID NO: 124520 - RNA, 32 nt, Homo Sapiens
ugccccaaauggaaaaaagauacucacacaga

SEQ ID NO: 124521 - RNA, 32 nt, Homo Sapiens
ccagggggccccacccgggccuuccagugauc

SEQ ID NO: 124522 - RNA, 32 nt, Homo Sapiens
uguaaugaaaagguggcaauuaaugaaaaaau

SEQ ID NO: 124523 - RNA, 32 nt, Homo Sapiens
cccccgccgcggcucggggacccguagagccc

SEQ ID NO: 124524 - RNA, 32 nt, Homo Sapiens
gccuggcccugagacuggggaguggcuccaau

SEQ ID NO: 124525 - RNA, 30 nt, Homo Sapiens
gcaggauggaucuugaugugguuaacaugu

SEQ ID NO: 124526 - RNA, 32 nt, Homo Sapiens
uguuggcaaccugguaccucuacuuuuagcca

SEQ ID NO: 124527 - RNA, 32 nt, Homo Sapiens
accaauaaccccgaugaacauugaugcaaaaa

SEQ ID NO: 124528 - RNA, 32 nt, Homo Sapiens
uguaaaugauauauuuuuggugaaaugcaacc

SEQ ID NO: 124529 - RNA, 32 nt, Homo Sapiens
ccgucgcccgcaccauguccgcggccgccuac

SEQ ID NO: 124530 - RNA, 32 nt, Homo Sapiens
cgucuccgcgcgcggcccaagcccggcaggag

SEQ ID NO: 124531 - RNA, 32 nt, Homo Sapiens
acuucuaccuggaguucgcagagacugguagc

SEQ ID NO: 124532 - RNA, 32 nt, Homo Sapiens
cuuaacuuguguuaaggccuguguguagcauu

SEQ ID NO: 124533 - RNA, 32 nt, Homo Sapiens
ucccgggaaugucaaggccacccugggcuuga

SEQ ID NO: 124534 - RNA, 32 nt, Homo Sapiens
agauggaguuucacucuguuucccaggcuggu

SEQ ID NO: 124535 - RNA, 32 nt, Homo Sapiens
aaauaagaauuaaauccagaauaaucauucac

SEQ ID NO: 124536 - RNA, 32 nt, Homo Sapiens
caucacugcaguccagccuggaugacagagug

SEQ ID NO: 124537 - RNA, 32 nt, Homo Sapiens
gagguguuagaaaggggaauuguuggcuaggg

SEQ ID NO: 124538 - RNA, 32 nt, Homo Sapiens
cagccacgcucuccggcgcgccgcccgcggag

SEQ ID NO: 124539 - RNA, 28 nt, Homo Sapiens
gggauguggagagugcggaaaaggggcu

SEQ ID NO: 124540 - RNA, 32 nt, Homo Sapiens
agaacgggcagacugccuccucaagugggucc

SEQ ID NO: 124541 - RNA, 32 nt, Homo Sapiens
agauggcggcggugacugugacggugacgaag

SEQ ID NO: 124542 - RNA, 32 nt, Homo Sapiens
uaggaaaaacuauuuauaaacuguauauccag

SEQ ID NO: 124543 - RNA, 32 nt, Homo Sapiens
agaauugccaagaagaugcuuuuagaagaaau

SEQ ID NO: 124544 - RNA, 32 nt, Homo Sapiens
uucauuugacauuuaguagaauuccucuuugg

SEQ ID NO: 124545 - RNA, 32 nt, Homo Sapiens
ugucugcgacagagcuggggaggacauucugg

SEQ ID NO: 124546 - RNA, 32 nt, Homo Sapiens
caucaaaaacaucaccuguaaccccaagcaaa

SEQ ID NO: 124547 - RNA, 32 nt, Homo Sapiens
acuccuugcagcugaagcugcagcugggcaga

SEQ ID NO: 124548 - RNA, 32 nt, Homo Sapiens
ccucuccccgaccuccucccaccaaguccucu

SEQ ID NO: 124549 - RNA, 32 nt, Homo Sapiens
gguugucauuuuuugcagaagucauaugauag

SEQ ID NO: 124550 - RNA, 32 nt, Homo Sapiens
caguuuagcauuaaggguuucuauuaaugaca

SEQ ID NO: 124551 - RNA, 32 nt, Homo Sapiens
acuuggguucuccuaagaccagcccuuccgga

SEQ ID NO: 124552 - RNA, 32 nt, Homo Sapiens
uuucucuuuuuuagagccaccaauacuggauu

SEQ ID NO: 124553 - RNA, 32 nt, Homo Sapiens
gggugcggguccgggugaagcgggaggcagcc

SEQ ID NO: 124554 - RNA, 28 nt, Homo Sapiens
aaugccuuuguacauauguguguuuaau

SEQ ID NO: 124555 - RNA, 32 nt, Homo Sapiens
agugucuguauauuugugaugcaauggucuug

SEQ ID NO: 124556 - RNA, 32 nt, Homo Sapiens
agcaccagcacguuucacaccucccccuuccc

SEQ ID NO: 124557 - RNA, 32 nt, Homo Sapiens
gguguccccuaccccaccuguucucggagaac

SEQ ID NO: 124558 - RNA, 32 nt, Homo Sapiens
gacuuaaguuuuugcuguuuucguuuucccgc

SEQ ID NO: 124559 - RNA, 32 nt, Homo Sapiens
cuucccuguaucugccucucccuucccucaau

SEQ ID NO: 124560 - RNA, 32 nt, Homo Sapiens
gggagaucucagguucugggggugcccuaaag

SEQ ID NO: 124561 - RNA, 32 nt, Homo Sapiens
auuuuagauacgguguaacaugugcaauucag

SEQ ID NO: 124562 - RNA, 32 nt, Homo Sapiens
agugaugccccucuccccucuacuacccccca

SEQ ID NO: 124563 - RNA, 32 nt, Homo Sapiens
uugugauugugacccaugaguggaggaacuuu

SEQ ID NO: 124564 - RNA, 32 nt, Homo Sapiens
cucuccuucauuucagaaucugcaucugagaa

SEQ ID NO: 124565 - RNA, 32 nt, Homo Sapiens
ccggacucaucaguaaaccuguagaagugucg

SEQ ID NO: 124566 - RNA, 32 nt, Homo Sapiens
uauuuuaucucuagugauugcauauuauuucc

SEQ ID NO: 124567 - RNA, 32 nt, Homo Sapiens
agccagguggccccggccuagaccugccuagg

SEQ ID NO: 124568 - RNA, 30 nt, Homo Sapiens
auuuaucuugcaggcggcggaggagauggc

SEQ ID NO: 124569 - RNA, 32 nt, Homo Sapiens
caggccucuggcuaccacuuggaccuuuauug

SEQ ID NO: 124570 - RNA, 32 nt, Homo Sapiens
cacuauuucuggaaugcuucugcaucaaagga

SEQ ID NO: 124571 - RNA, 32 nt, Homo Sapiens
agcgcaagaagcggcgggaggcgcgggggcug

SEQ ID NO: 124572 - RNA, 32 nt, Homo Sapiens
acacgaugccagcaaggaugacguccugccac

SEQ ID NO: 124573 - RNA, 32 nt, Homo Sapiens
cccugccucauggcuuuagugagccaugauug

SEQ ID NO: 124574 - RNA, 32 nt, Homo Sapiens
cacaguggcagagcacacaugugcacagguuc

SEQ ID NO: 124575 - RNA, 32 nt, Homo Sapiens
gacuguguggguuucuuaccugccugagccac

SEQ ID NO: 124576 - RNA, 32 nt, Homo Sapiens
gaaaggaaaucgagacuggacuccuucugacu

SEQ ID NO: 124577 - RNA, 32 nt, Homo Sapiens
uaauuugggcauuugggaggugggguuuugcc

SEQ ID NO: 124578 - RNA, 32 nt, Homo Sapiens
cagcgagcccaacgugauccuggacaucucca

SEQ ID NO: 124579 - RNA, 32 nt, Homo Sapiens
aaugaacaucagaaaaggcaaaacugaccagg

SEQ ID NO: 124580 - RNA, 32 nt, Homo Sapiens
gcgcgggggccgcccccuccccuucccuccac

SEQ ID NO: 124581 - RNA, 32 nt, Homo Sapiens
aaggcuggcaucuucgugagugccaaucguug

SEQ ID NO: 124582 - RNA, 32 nt, Homo Sapiens
uuccuuuuuuuaaacaaacaaacauacaaaaa

SEQ ID NO: 124583 - RNA, 32 nt, Homo Sapiens
agacauuuaugcggccaaaaaacauaugaaaa

SEQ ID NO: 124584 - RNA, 32 nt, Homo Sapiens
gguuucuuucuuucuuuuuuuuuuuuuugaga

SEQ ID NO: 124585 - RNA, 32 nt, Homo Sapiens
ugaaagccucaagugaaggaucuugcagcuug

SEQ ID NO: 124586 - RNA, 32 nt, Homo Sapiens
guccugggaaagggcacccagaagcuccagag

SEQ ID NO: 124587 - RNA, 32 nt, Homo Sapiens
gagucucuguccuacaaaucuacacuuuuaag

SEQ ID NO: 124588 - RNA, 32 nt, Homo Sapiens
aucuggaagcagaauaaaauauuuacauagaa

SEQ ID NO: 124589 - RNA, 32 nt, Homo Sapiens
gcgcggugcuccguggcugcgcugcuggaacc

SEQ ID NO: 124590 - RNA, 32 nt, Homo Sapiens
cccaggcugaagaucuguucuuuuuaaguuga

SEQ ID NO: 124591 - RNA, 32 nt, Homo Sapiens
caacgcgaagcccuuccacucggaccucauga

SEQ ID NO: 124592 - RNA, 32 nt, Homo Sapiens
uuguuugguugccagucauacaaauuaaaauc

SEQ ID NO: 124593 - RNA, 32 nt, Homo Sapiens
gcggcagccggucuggacgcgcggccggggcu

SEQ ID NO: 124594 - RNA, 32 nt, Homo Sapiens
auuuuaaguugcagacaacugauuccaaacua

SEQ ID NO: 124595 - RNA, 32 nt, Homo Sapiens
augggaaggagaagcaguggcuuuugugggca

SEQ ID NO: 124596 - RNA, 32 nt, Homo Sapiens
cagcccauaaaacugaugugauuguuauguua

SEQ ID NO: 124597 - RNA, 32 nt, Homo Sapiens
gucaggauggagauccggcagcacgaguggcu

SEQ ID NO: 124598 - RNA, 32 nt, Homo Sapiens
ucauggucuccuuccaccaaaucuucaucugg

SEQ ID NO: 124599 - RNA, 32 nt, Homo Sapiens
auuugaauuggaaagagaagagugaagaucca

SEQ ID NO: 124600 - RNA, 32 nt, Homo Sapiens
augaauauauauauuuacuaaagcuaauugaa

SEQ ID NO: 124601 - RNA, 32 nt, Homo Sapiens
cggacccggccgcugcaaggcucuggcggucc

SEQ ID NO: 124602 - RNA, 32 nt, Homo Sapiens
acagguauuucugcaacacaauguaaugagug

SEQ ID NO: 124603 - RNA, 32 nt, Homo Sapiens
ucugcacaaucgugcauagaauugccucaagu

SEQ ID NO: 124604 - RNA, 32 nt, Homo Sapiens
aucaagcagacaccucaccuaaccuggaacau

SEQ ID NO: 124605 - RNA, 32 nt, Homo Sapiens
gugacuccggcggaagaggacaaggcagaaug

SEQ ID NO: 124606 - RNA, 32 nt, Homo Sapiens
agcaccugccagcaccggcagccccucgaucc

SEQ ID NO: 124607 - RNA, 32 nt, Homo Sapiens
gggccuuuuuauuuuuauuuuauuuuuuauuu

SEQ ID NO: 124608 - RNA, 32 nt, Homo Sapiens
ucaguacaagagagaugcaaaaaacuaaguug

SEQ ID NO: 124609 - RNA, 32 nt, Homo Sapiens
ccauucucccucccuuuccaccagugccacag

SEQ ID NO: 124610 - RNA, 32 nt, Homo Sapiens
agauggggaggaggggcggggaagcgcuucca

SEQ ID NO: 124611 - RNA, 32 nt, Homo Sapiens
gagagggggguaucaggcagggagggggcaga

SEQ ID NO: 124612 - RNA, 32 nt, Homo Sapiens
ggugaaagggguccuuggugauggaucauuau

SEQ ID NO: 124613 - RNA, 32 nt, Homo Sapiens
aaaaagauauugcaguuguguuguaagcgucc

SEQ ID NO: 124614 - RNA, 32 nt, Homo Sapiens
gacaagcucucgcucugucacccaggcuggag

SEQ ID NO: 124615 - RNA, 32 nt, Homo Sapiens
gggguuaauaucugaggccucagaugacuuug

SEQ ID NO: 124616 - RNA, 32 nt, Homo Sapiens
cgucugggaagacaaguugcuguuuuuauggg

SEQ ID NO: 124617 - RNA, 32 nt, Homo Sapiens
uccgccggugccgcggcgccucauggaagccc

SEQ ID NO: 124618 - RNA, 32 nt, Homo Sapiens
accacugaacuccagccugggcgacaagaggg

SEQ ID NO: 124619 - RNA, 32 nt, Homo Sapiens
acuuugacaaauaaauuuggggucauauuauc

SEQ ID NO: 124620 - RNA, 32 nt, Homo Sapiens
uuacaaugugaauaauggcacugaccggugcu

SEQ ID NO: 124621 - RNA, 32 nt, Homo Sapiens
uaaauuuucuucugcaaauguuuucuugucau

SEQ ID NO: 124622 - RNA, 32 nt, Homo Sapiens
guaaguuauauggucuuaauuugguacuugua

SEQ ID NO: 124623 - RNA, 32 nt, Homo Sapiens
aggucugauaacuugaaaauagguuuuuagga

SEQ ID NO: 124624 - RNA, 32 nt, Homo Sapiens
agaagaugacucggauugagaccuucaacacc

SEQ ID NO: 124625 - RNA, 32 nt, Homo Sapiens
cugugagugugagccacacagcagucacacaa

SEQ ID NO: 124626 - RNA, 32 nt, Homo Sapiens
aaggauuguaaauucuuggaagcaacgggggg

SEQ ID NO: 124627 - RNA, 32 nt, Homo Sapiens
aauaagguggcgcauuccuucuacagaggaca

SEQ ID NO: 124628 - RNA, 32 nt, Homo Sapiens
guggagacgcucgagucaggcugacgcgcgcg

SEQ ID NO: 124629 - RNA, 32 nt, Homo Sapiens
cagcaggaacuaaaaacuucugccccacucuu

SEQ ID NO: 124630 - RNA, 32 nt, Homo Sapiens
aaaauaaaguuccugauaauaaagugacugaa

SEQ ID NO: 124631 - RNA, 32 nt, Homo Sapiens
ccagggcccagcugcguccaacccagcccccc

SEQ ID NO: 124632 - RNA, 32 nt, Homo Sapiens
uuaaagucaucuuuauuuuaaaugcagugaua

SEQ ID NO: 124633 - RNA, 29 nt, Homo Sapiens
agaauuuaaguuuucagagguaagucugu

SEQ ID NO: 124634 - RNA, 32 nt, Homo Sapiens
cgcccggggaguccagcgguguccuguggagc

SEQ ID NO: 124635 - RNA, 32 nt, Homo Sapiens
agcuuggagcagagaccccccgaggcaucugc

SEQ ID NO: 124636 - RNA, 32 nt, Homo Sapiens
cccuuagcugaaugcagauggaugcugggaga

SEQ ID NO: 124637 - RNA, 32 nt, Homo Sapiens
aagugcccaagguuuguuuagggccugggaau

SEQ ID NO: 124638 - RNA, 32 nt, Homo Sapiens
cagcagaaaaauuuaaaaaucaaguaauuaac

SEQ ID NO: 124639 - RNA, 32 nt, Homo Sapiens
auuuuaccauugcuguugggaggaagcagagg

SEQ ID NO: 124640 - RNA, 32 nt, Homo Sapiens
ugucuguuaaauuuauuaugcccaaaucaacc

SEQ ID NO: 124641 - RNA, 32 nt, Homo Sapiens
caaacaaaaugaugaacuuugauuugaacagg

SEQ ID NO: 124642 - RNA, 32 nt, Homo Sapiens
uacuugagaauauuuuuggugaauuacuuugu

SEQ ID NO: 124643 - RNA, 32 nt, Homo Sapiens
ggcagaggaggaggagucaagggagcagggca

SEQ ID NO: 124644 - RNA, 32 nt, Homo Sapiens
uaguaguccuauggcacccccaccccaucccu

SEQ ID NO: 124645 - RNA, 32 nt, Homo Sapiens
uaaugaugaaaauaaaucauguaauggguaac

SEQ ID NO: 124646 - RNA, 31 nt, Homo Sapiens
uuuggcaugaguuuuaaagacaaagaugaga

SEQ ID NO: 124647 - RNA, 32 nt, Homo Sapiens
aaaguggaagcuaccagacggaggaagcauaa

SEQ ID NO: 124648 - RNA, 32 nt, Homo Sapiens
ugcuuccuccguguccccugcuccucaccccu

SEQ ID NO: 124649 - RNA, 32 nt, Homo Sapiens
acaaagcuccugggccccuccucccuucaagg

SEQ ID NO: 124650 - RNA, 32 nt, Homo Sapiens
ccucugagcucuucuuucugaucaagcccugc

SEQ ID NO: 124651 - RNA, 32 nt, Homo Sapiens
ggggcucuguguuaggaugcggcuuucucugc

SEQ ID NO: 124652 - RNA, 32 nt, Homo Sapiens
cuucagaggaagaauuaaggggcauguuggug

SEQ ID NO: 124653 - RNA, 32 nt, Homo Sapiens
cggagacagcccgggcgggggccuaccuuccc

SEQ ID NO: 124654 - RNA, 32 nt, Homo Sapiens
uguuugaugauuagacggucaucucuaacuac

SEQ ID NO: 124655 - RNA, 32 nt, Homo Sapiens
cggcgggucccgucucgacaggucuucucugu

SEQ ID NO: 124656 - RNA, 30 nt, Homo Sapiens
ugcagcugaugggggaucgcaauuaggagc

SEQ ID NO: 124657 - RNA, 32 nt, Homo Sapiens
accgcuagcgcgcgccacccaccccacaugaa

SEQ ID NO: 124658 - RNA, 32 nt, Homo Sapiens
uaauaacugacaaaaaucaguauguuguagcu

SEQ ID NO: 124659 - RNA, 32 nt, Homo Sapiens
cguucgaccucagccaggauccggacuuccug

SEQ ID NO: 124660 - RNA, 32 nt, Homo Sapiens
ccucuucaagucuguuuucucaucugcaaaac

SEQ ID NO: 124661 - RNA, 32 nt, Homo Sapiens
gucccaggccccaggcaucuuugccugcccug

SEQ ID NO: 124662 - RNA, 32 nt, Homo Sapiens
ccguggaccuucuggaggaagguggggguuuc

SEQ ID NO: 124663 - RNA, 32 nt, Homo Sapiens
gaauaagcuaucaauauauaauuuaaguacaa

SEQ ID NO: 124664 - RNA, 32 nt, Homo Sapiens
gagaaguugcugucagaugaaugugagcaguc

SEQ ID NO: 124665 - RNA, 31 nt, Homo Sapiens
uacccgcggcacuggcugcgagcgccgggcc

SEQ ID NO: 124666 - RNA, 32 nt, Homo Sapiens
cggccccgcgcgcgccucgaggccgagucaag

SEQ ID NO: 124667 - RNA, 32 nt, Homo Sapiens
gacaugaacucauccuuuuuuauggcugcaua

SEQ ID NO: 124668 - RNA, 32 nt, Homo Sapiens
cgagugagggcgcacagccgggacgccgaggc

SEQ ID NO: 124669 - RNA, 32 nt, Homo Sapiens
caucuucccaggggccucagaagaaggaauua

SEQ ID NO: 124670 - RNA, 32 nt, Homo Sapiens
gaagaagcgccugccuguuuuccccggggaga

SEQ ID NO: 124671 - RNA, 32 nt, Homo Sapiens
uggucuuggccugugaaugugccucguucauc

SEQ ID NO: 124672 - RNA, 32 nt, Homo Sapiens
uguauaauguaugccuuuccaagcuugccagu

SEQ ID NO: 124673 - RNA, 32 nt, Homo Sapiens
ucuuguuucacucagauucagaauucacuaaa

SEQ ID NO: 124674 - RNA, 32 nt, Homo Sapiens
ggcacacuuccacuacucucuagaccuccugc

SEQ ID NO: 124675 - RNA, 32 nt, Homo Sapiens
cuuugaggugagaguuaccaucauugccuagu

SEQ ID NO: 124676 - RNA, 32 nt, Homo Sapiens
uugaaugcacaaaaugacuuaaaccauucaua

SEQ ID NO: 124677 - RNA, 32 nt, Homo Sapiens
ggcccgggcgacagccgagacguggagcgcgc

SEQ ID NO: 124678 - RNA, 32 nt, Homo Sapiens
aggcccagggcaugguccugcugcuucacccc

SEQ ID NO: 124679 - RNA, 32 nt, Homo Sapiens
gguuuugaaaagacauaauuuuacuugaaucu

SEQ ID NO: 124680 - RNA, 32 nt, Homo Sapiens
ugacucacuuagaaacuugaacaaagagcggc

SEQ ID NO: 124681 - RNA, 32 nt, Homo Sapiens
ggaaagcggaccagcccuucugcaggucugcg

SEQ ID NO: 124682 - RNA, 32 nt, Homo Sapiens
uuuugaauuuaaaccagaaccuucuaaaauag

SEQ ID NO: 124683 - RNA, 32 nt, Homo Sapiens
cuagucagauacauuuacauuuaugcaaauuu

SEQ ID NO: 124684 - RNA, 32 nt, Homo Sapiens
gaacuucagugggggccaagggugcugagaac

SEQ ID NO: 124685 - RNA, 32 nt, Homo Sapiens
uuuaacaaaaauuucuugauuagaggcacagu

SEQ ID NO: 124686 - RNA, 32 nt, Homo Sapiens
uuguucccucuccuccucccuucuucccggga

SEQ ID NO: 124687 - RNA, 32 nt, Homo Sapiens
uguccaccuuggagauggacgaacgggugucu

SEQ ID NO: 124688 - RNA, 31 nt, Homo Sapiens
acauuuuguuaguacauuucaguguagucau

SEQ ID NO: 124689 - RNA, 32 nt, Homo Sapiens
acucucagaaaaggaagauugaauuagcgugu

SEQ ID NO: 124690 - RNA, 32 nt, Homo Sapiens
auugcccacuugcuagacuagcaagagagcga

SEQ ID NO: 124691 - RNA, 32 nt, Homo Sapiens
ugucagacucucagaagggucuguggguguug

SEQ ID NO: 124692 - RNA, 32 nt, Homo Sapiens
aauugauaccuguuccuuuuucuggguuuugu

SEQ ID NO: 124693 - RNA, 32 nt, Homo Sapiens
cuccugggcaaugcuccuggggagucuguggg

SEQ ID NO: 124694 - RNA, 32 nt, Homo Sapiens
cuucuccagcgcagacuuuugcuggaugaaag

SEQ ID NO: 124695 - RNA, 32 nt, Homo Sapiens
gcugcgggaggcggccgggcggcccgagcuuc

SEQ ID NO: 124696 - RNA, 32 nt, Homo Sapiens
cccugaaaugucacgaaguugaugcaaugaaa

SEQ ID NO: 124697 - RNA, 32 nt, Homo Sapiens
aaugcauugaacaaaggagauguuuagacaac

SEQ ID NO: 124698 - RNA, 32 nt, Homo Sapiens
ccaaagacacuaccacuccccauccccgucug

SEQ ID NO: 124699 - RNA, 32 nt, Homo Sapiens
agcuccgccucccagguucaugccauucuccu

SEQ ID NO: 124700 - RNA, 32 nt, Homo Sapiens
auuaucgaggcccugcuaugcugugugucugg

SEQ ID NO: 124701 - RNA, 32 nt, Homo Sapiens
ccaaauaagauuacaaagaauaagcagcaaua

SEQ ID NO: 124702 - RNA, 32 nt, Homo Sapiens
uuccguauuucuucuuuucacuuuaccagaaa

SEQ ID NO: 124703 - RNA, 32 nt, Homo Sapiens
aucggggcggggguuggggggcaagcggcuca

SEQ ID NO: 124704 - RNA, 32 nt, Homo Sapiens
gaagagcuaaaagacaaggaaacaaacuacuu

SEQ ID NO: 124705 - RNA, 32 nt, Homo Sapiens
ucuccuuccuucccuaccagcaacaugucaug

SEQ ID NO: 124706 - RNA, 32 nt, Homo Sapiens
uuuucaguccgcgucccucccugggccgggcu

SEQ ID NO: 124707 - RNA, 32 nt, Homo Sapiens
uaaaaaaaaaaguuacagaaauacuauaacau

SEQ ID NO: 124708 - RNA, 32 nt, Homo Sapiens
cucuggguaaagcugcuugugaauuuucugag

SEQ ID NO: 124709 - RNA, 32 nt, Homo Sapiens
gcaaccaaacucccaucagcccaaucccugau

SEQ ID NO: 124710 - RNA, 32 nt, Homo Sapiens
gcaccuggccaggggaagcccgggggucuggg

SEQ ID NO: 124711 - RNA, 32 nt, Homo Sapiens
ugugcacccagcauagagaggauggcugccca

SEQ ID NO: 124712 - RNA, 32 nt, Homo Sapiens
gcuuguggcccgcgcaggggcggggucggaag

SEQ ID NO: 124713 - RNA, 32 nt, Homo Sapiens
aagucaaaguguugcuguggcuccauauuuca

SEQ ID NO: 124714 - RNA, 32 nt, Homo Sapiens
auggaugcagacgacuugaugaagaucuuaau

SEQ ID NO: 124715 - RNA, 28 nt, Homo Sapiens
ugccuauuguccgagauguguuuuagac

SEQ ID NO: 124716 - RNA, 32 nt, Homo Sapiens
cuauaacagaggaagaacauguugcgauugaa

SEQ ID NO: 124717 - RNA, 32 nt, Homo Sapiens
gggaggugccggucgggcgcgccccguggaga

SEQ ID NO: 124718 - RNA, 32 nt, Homo Sapiens
agcagucaugcaucgugcaccacagugucagg

SEQ ID NO: 124719 - RNA, 32 nt, Homo Sapiens
uucucugggaauuggugauuuuuuacugugaa

SEQ ID NO: 124720 - RNA, 32 nt, Homo Sapiens
uuuaccuuuuggauuuuguaaaacagaaguuu

SEQ ID NO: 124721 - RNA, 32 nt, Homo Sapiens
ccuugaaaccaccuuuuauuacauggggucua

SEQ ID NO: 124722 - RNA, 32 nt, Homo Sapiens
gcugccguguuguuugacucagaaggcccuuc

SEQ ID NO: 124723 - RNA, 32 nt, Homo Sapiens
agcucugcgucgguccuggugcccuggaugcc

SEQ ID NO: 124724 - RNA, 32 nt, Homo Sapiens
gagaagcccugugaauacagugaauguaagga

SEQ ID NO: 124725 - RNA, 32 nt, Homo Sapiens
gcuucggauggcggcgggagguugauggcgag

SEQ ID NO: 124726 - RNA, 32 nt, Homo Sapiens
uaggguucuucagauguaauauuuuacuggua

SEQ ID NO: 124727 - RNA, 32 nt, Homo Sapiens
gcaacuuccgccuccuggggucaagcaguucu

SEQ ID NO: 124728 - RNA, 32 nt, Homo Sapiens
cagcacugugcacuauuuucagggccacucag

SEQ ID NO: 124729 - RNA, 32 nt, Homo Sapiens
cuauguugcuuaaagguagucuggcugcugaa

SEQ ID NO: 124730 - RNA, 32 nt, Homo Sapiens
uaacucaaaauuuucaguaggcaaauagguaa

SEQ ID NO: 124731 - RNA, 32 nt, Homo Sapiens
cacugagcgaucagaagcuggguuucacauac

SEQ ID NO: 124732 - RNA, 32 nt, Homo Sapiens
uugguuacaaauauucuguagauuaauauggu

SEQ ID NO: 124733 - RNA, 32 nt, Homo Sapiens
ucugucucaacaaacaaacaaacaaagaaaaa

SEQ ID NO: 124734 - RNA, 32 nt, Homo Sapiens
acaaagggucagcauuuccaaaucuuagacuu

SEQ ID NO: 124735 - RNA, 32 nt, Homo Sapiens
accuccuaagcaugcuuaagcauuucaggucc

SEQ ID NO: 124736 - RNA, 31 nt, Homo Sapiens
uuaaccaaccuuguuuaauagauuuggguca

SEQ ID NO: 124737 - RNA, 32 nt, Homo Sapiens
gggcccuguccagcugcaggcaugcacaaugg

SEQ ID NO: 124738 - RNA, 32 nt, Homo Sapiens
uucagccuaugaugaaguauuugauuauuaga

SEQ ID NO: 124739 - RNA, 32 nt, Homo Sapiens
ucaucucaauuucaacuuuaaagcagcuuaau

SEQ ID NO: 124740 - RNA, 32 nt, Homo Sapiens
uggccucagccagugccuccccggcccaucug

SEQ ID NO: 124741 - RNA, 32 nt, Homo Sapiens
uaacaccucucgacccuguccuccccccgcca

SEQ ID NO: 124742 - RNA, 32 nt, Homo Sapiens
auccugaugcuuucccucccccugcccccuca

SEQ ID NO: 124743 - RNA, 32 nt, Homo Sapiens
cccugucgcgggcacagcccaaggcugccucc

SEQ ID NO: 124744 - RNA, 32 nt, Homo Sapiens
cccgccccugcccccacccccggagccugcaa

SEQ ID NO: 124745 - RNA, 32 nt, Homo Sapiens
ggggaaggagcagucucccagcccugggucug

SEQ ID NO: 124746 - RNA, 32 nt, Homo Sapiens
ccagccaugcuuccuguacagccuguggaacu

SEQ ID NO: 124747 - RNA, 32 nt, Homo Sapiens
uccugaccaagcccugucacugcugcccagcc

SEQ ID NO: 124748 - RNA, 32 nt, Homo Sapiens
aagacugggucuccucccuccucccccuucac

SEQ ID NO: 124749 - RNA, 30 nt, Homo Sapiens
aauucugauaauaaaaugauaugcacgcug

SEQ ID NO: 124750 - RNA, 32 nt, Homo Sapiens
ccuggggcgggcggcgcgugucugcagcugcu

SEQ ID NO: 124751 - RNA, 32 nt, Homo Sapiens
gcccauguuucaaauacuuagagcagugaaga

SEQ ID NO: 124752 - RNA, 32 nt, Homo Sapiens
agauuugauuaugagaugugcauauugcuuug

SEQ ID NO: 124753 - RNA, 32 nt, Homo Sapiens
agaaaacagaucuggaggcagcagugcuggau

SEQ ID NO: 124754 - RNA, 32 nt, Homo Sapiens
gcaccgagcucggcaccuccccggccucucuc

SEQ ID NO: 124755 - RNA, 32 nt, Homo Sapiens
gaaauccuauauauuucuuguguguucuuuuc

SEQ ID NO: 124756 - RNA, 27 nt, Homo Sapiens
caauggccagcgccagcugcagccccg

SEQ ID NO: 124757 - RNA, 32 nt, Homo Sapiens
uuucuuucagcuggucuaccgaugcacagcaa

SEQ ID NO: 124758 - RNA, 32 nt, Homo Sapiens
ccguuagccaccuggguccacauccugcuaag

SEQ ID NO: 124759 - RNA, 32 nt, Homo Sapiens
ucacccuucagauuccaccccauccccucagg

SEQ ID NO: 124760 - RNA, 32 nt, Homo Sapiens
uagcagcaaccugguucuuaaacacaaaguaa

SEQ ID NO: 124761 - RNA, 32 nt, Homo Sapiens
acuaugaugguuuuuucuucauucuauaaucu

SEQ ID NO: 124762 - RNA, 32 nt, Homo Sapiens
ucuaacuggauuaguacuaauuuuauacaugc

SEQ ID NO: 124763 - RNA, 32 nt, Homo Sapiens
uugggacacuuaagugacuuugaaauccaucc

SEQ ID NO: 124764 - RNA, 32 nt, Homo Sapiens
ugagcgaggcgggugagggucuggagaguggg

SEQ ID NO: 124765 - RNA, 30 nt, Homo Sapiens
ggaagccacugaugaggggaaacacagugu

SEQ ID NO: 124766 - RNA, 32 nt, Homo Sapiens
gggcugggaacuguuccuggaccuccugggcc

SEQ ID NO: 124767 - RNA, 32 nt, Homo Sapiens
ugggaagugaagacuggaagcuaauuugcauu

SEQ ID NO: 124768 - RNA, 32 nt, Homo Sapiens
agugcauuuagacaggcaucuauuuggaccug

SEQ ID NO: 124769 - RNA, 32 nt, Homo Sapiens
cuugauaguccgucuuggugugaggcaugccu

SEQ ID NO: 124770 - RNA, 32 nt, Homo Sapiens
ugggguuuuagccucuggcccgggaguuaugu

SEQ ID NO: 124771 - RNA, 32 nt, Homo Sapiens
ccuccauaguguaucauguuccugcuaccuuc

SEQ ID NO: 124772 - RNA, 32 nt, Homo Sapiens
auccacguucuggaaccccgaggcgggagaag

SEQ ID NO: 124773 - RNA, 32 nt, Homo Sapiens
caaucuuuuucccaggccccagccucucuggc

SEQ ID NO: 124774 - RNA, 32 nt, Homo Sapiens
uggucucacguggcaagaagugccuuuagcuc

SEQ ID NO: 124775 - RNA, 32 nt, Homo Sapiens
auuucagugugacuguuguugcuuuaguaagc

SEQ ID NO: 124776 - RNA, 32 nt, Homo Sapiens
gggccuccugucuggugggaggaggccgcagc

SEQ ID NO: 124777 - RNA, 32 nt, Homo Sapiens
caggccggcugaccgugguggugcuggaggcu

SEQ ID NO: 124778 - RNA, 32 nt, Homo Sapiens
acgaggccccuugaggcugaaccugagaccua

SEQ ID NO: 124779 - RNA, 32 nt, Homo Sapiens
gcuggggugggaagauucucgcugcuggggug

SEQ ID NO: 124780 - RNA, 31 nt, Homo Sapiens
caccgccagcgcuccaggccccgcgcucccc

SEQ ID NO: 124781 - RNA, 32 nt, Homo Sapiens
cgcgagcugugaccacagcacccucaagcaua

SEQ ID NO: 124782 - RNA, 32 nt, Homo Sapiens
gaugcagaauacuggaucuaacuggguaccug

SEQ ID NO: 124783 - RNA, 32 nt, Homo Sapiens
ccacccggaccucggcggggagauggaggucc

SEQ ID NO: 124784 - RNA, 32 nt, Homo Sapiens
aucucuguaguugcuaaaacacuuccucuugg

SEQ ID NO: 124785 - RNA, 32 nt, Homo Sapiens
gcccggguuccgaaagucucggggguggcuau

SEQ ID NO: 124786 - RNA, 32 nt, Homo Sapiens
gacgaccagggaggaggaaucggcggacgcgg

SEQ ID NO: 124787 - RNA, 32 nt, Homo Sapiens
uuuuccugaacuuauuuuuucuuaauucaagu

SEQ ID NO: 124788 - RNA, 32 nt, Homo Sapiens
cacacagugucuguguacauguacagauauac

SEQ ID NO: 124789 - RNA, 32 nt, Homo Sapiens
auagccaugcgugcgguuuauaacuccuguau

SEQ ID NO: 124790 - RNA, 32 nt, Homo Sapiens
uggcugaagcuacuuccucgagcagauggcag

SEQ ID NO: 124791 - RNA, 32 nt, Homo Sapiens
uguucucccuucccucccccaguuguggggaa

SEQ ID NO: 124792 - RNA, 32 nt, Homo Sapiens
ccuuuccuccccaccuuccccagacucagcuc

SEQ ID NO: 124793 - RNA, 32 nt, Homo Sapiens
auggcuggcgccuguuuucucauucuuaccuc

SEQ ID NO: 124794 - RNA, 32 nt, Homo Sapiens
cuaaggcggacggggaggugaaaaaucggccu

SEQ ID NO: 124795 - RNA, 32 nt, Homo Sapiens
uugcaagaaggagaggaaugggggagaggacg

SEQ ID NO: 124796 - RNA, 32 nt, Homo Sapiens
cccguccgcgcgcgucccccggugaccucggg

SEQ ID NO: 124797 - RNA, 32 nt, Homo Sapiens
uauugucccugggccuggccuugagcgggucc

SEQ ID NO: 124798 - RNA, 32 nt, Homo Sapiens
aguacuaagagauuuauaaucauaauguuuac

SEQ ID NO: 124799 - RNA, 32 nt, Homo Sapiens
cuccuucucucuuacauugaauguagagaaug

SEQ ID NO: 124800 - RNA, 32 nt, Homo Sapiens
cauuuuaaaagcuuaugggaaacucaauuuga

SEQ ID NO: 124801 - RNA, 32 nt, Homo Sapiens
ggccgccgccuccgccgcugcugcugccgcca

SEQ ID NO: 124802 - RNA, 32 nt, Homo Sapiens
gcgaggccaguguccgucggggugugugucua

SEQ ID NO: 124803 - RNA, 32 nt, Homo Sapiens
uugggcagacgcugcgcgugcccagagggagg

SEQ ID NO: 124804 - RNA, 32 nt, Homo Sapiens
aggcggacggaucaccugaggucaggaguucg

SEQ ID NO: 124805 - RNA, 32 nt, Homo Sapiens
aaaguguauguggauaaauuuuuuguaaucuu

SEQ ID NO: 124806 - RNA, 32 nt, Homo Sapiens
ggcgcccggccccuggccccagcacccugucc

SEQ ID NO: 124807 - RNA, 32 nt, Homo Sapiens
gcugugucugcacuucaugguaaacgggaucu

SEQ ID NO: 124808 - RNA, 32 nt, Homo Sapiens
ggagccccauccccacccuccuuggggggcuc

SEQ ID NO: 124809 - RNA, 32 nt, Homo Sapiens
gguaugaggcuggggcggggcuggagguggcg

SEQ ID NO: 124810 - RNA, 32 nt, Homo Sapiens
auaauuuaaaaggaaaacuaaaaacuauuuug

SEQ ID NO: 124811 - RNA, 32 nt, Homo Sapiens
cucaguaaucacaagcagcauccguuuuguuu

SEQ ID NO: 124812 - RNA, 32 nt, Homo Sapiens
gguggccggugauucuaaugcucagauguaug

SEQ ID NO: 124813 - RNA, 32 nt, Homo Sapiens
gucccaccucccgggggcggggcgagggcgga

SEQ ID NO: 124814 - RNA, 32 nt, Homo Sapiens
uuuauuuuuguuuguuuuuuuacaauuauucc

SEQ ID NO: 124815 - RNA, 32 nt, Homo Sapiens
aaguuggucuuucccggugcuauacuugccuc

SEQ ID NO: 124816 - RNA, 32 nt, Homo Sapiens
accauggguugucaaccauccucggugucuac

SEQ ID NO: 124817 - RNA, 32 nt, Homo Sapiens
acugcgcgcuucgcucuccgccgcccgaggcc

SEQ ID NO: 124818 - RNA, 32 nt, Homo Sapiens
ccagugcgcccuugaaacuuuccucgccuucc

SEQ ID NO: 124819 - RNA, 32 nt, Homo Sapiens
aaaaucagcuucaggucugcaaucaaauucug

SEQ ID NO: 124820 - RNA, 32 nt, Homo Sapiens
acuuaauauuauccuuuucuaauagucucaug

SEQ ID NO: 124821 - RNA, 32 nt, Homo Sapiens
cugcugccucuuugcuuucucucugagaugcc

SEQ ID NO: 124822 - RNA, 32 nt, Homo Sapiens
gggguggaggggcuuucuuuccugcgcccugc

SEQ ID NO: 124823 - RNA, 32 nt, Homo Sapiens
aguucaaagaacccuagcacaaauuugcuuug

SEQ ID NO: 124824 - RNA, 32 nt, Homo Sapiens
gaauuccuauuauaguccauuguccucccuca

SEQ ID NO: 124825 - RNA, 32 nt, Homo Sapiens
guguucgugugaguguuuacucaacaaauguu

SEQ ID NO: 124826 - RNA, 32 nt, Homo Sapiens
gaaggagcagccugggcagccaucacaccacg

SEQ ID NO: 124827 - RNA, 32 nt, Homo Sapiens
ucucuggcugugagccugggggugcugggcug

SEQ ID NO: 124828 - RNA, 32 nt, Homo Sapiens
cagcaagcccacugggaccccgacaccaggcc

SEQ ID NO: 124829 - RNA, 32 nt, Homo Sapiens
aaagaaaauuaaaauuugaaugcugaauauuc

SEQ ID NO: 124830 - RNA, 32 nt, Homo Sapiens
gaaacuauuucuguuccagucacauugccauc

SEQ ID NO: 124831 - RNA, 31 nt, Homo Sapiens
cgccgcucacggaggaggacguccuguucaa

SEQ ID NO: 124832 - RNA, 32 nt, Homo Sapiens
cuuuagcuagguuggcccgagugaggccucug

SEQ ID NO: 124833 - RNA, 32 nt, Homo Sapiens
aauauggagauguugugugcaaugcuggccug

SEQ ID NO: 124834 - RNA, 32 nt, Homo Sapiens
uucgucuuucgagagugacucccgcgguccca

SEQ ID NO: 124835 - RNA, 32 nt, Homo Sapiens
gccuuucuccuagagaucugugccuccuggcg

SEQ ID NO: 124836 - RNA, 32 nt, Homo Sapiens
auucgccgcccgcuccgagccuggugcuuccg

SEQ ID NO: 124837 - RNA, 32 nt, Homo Sapiens
ucuucuggguggcaaaguuacuacuggaaaaa

SEQ ID NO: 124838 - RNA, 32 nt, Homo Sapiens
uccgucuuccuucuccuucugggccugcccau

SEQ ID NO: 124839 - RNA, 32 nt, Homo Sapiens
aaaauuauucugcaucucaucacgucacagua

SEQ ID NO: 124840 - RNA, 32 nt, Homo Sapiens
cccccgcccugugcccacggcgcggccccuuu

SEQ ID NO: 124841 - RNA, 32 nt, Homo Sapiens
ccuggucugugggauguagaaacuaugggaaa

SEQ ID NO: 124842 - RNA, 32 nt, Homo Sapiens
ccuccuauuggucagaguugggcugagcacag

SEQ ID NO: 124843 - RNA, 32 nt, Homo Sapiens
accauaccccuacuccagcccaccccagacag

SEQ ID NO: 124844 - RNA, 32 nt, Homo Sapiens
cuguggcggcgccucgagcggcugcagguucu

SEQ ID NO: 124845 - RNA, 32 nt, Homo Sapiens
uuagugauguugagcaccuuuucauguguuua

SEQ ID NO: 124846 - RNA, 32 nt, Homo Sapiens
uuguggaagggaggagacggucaugacacaaa

SEQ ID NO: 124847 - RNA, 32 nt, Homo Sapiens
gccgcugcggccggguccggcgcgggcggcgc

SEQ ID NO: 124848 - RNA, 32 nt, Homo Sapiens
aggaaggagacgccuuccugaguccuggaucu

SEQ ID NO: 124849 - RNA, 32 nt, Homo Sapiens
auaguuaagggaaacacuggcuuuuguuacgg

SEQ ID NO: 124850 - RNA, 32 nt, Homo Sapiens
ggaccuagugaauggucuuuacuguugcuaug

SEQ ID NO: 124851 - RNA, 32 nt, Homo Sapiens
agagccgcagcgccgccucuucucucgcgccc

SEQ ID NO: 124852 - RNA, 32 nt, Homo Sapiens
cuuuaaguaaaaauaugcuguuuuaauauuua

SEQ ID NO: 124853 - RNA, 32 nt, Homo Sapiens
cagagccaccgaggagcagagagguugagaac

SEQ ID NO: 124854 - RNA, 32 nt, Homo Sapiens
cgcuacccgcggcgccgcgacgucugcacggc

SEQ ID NO: 124855 - RNA, 32 nt, Homo Sapiens
ggauauuggaguagcaagaggcugggaagcca

SEQ ID NO: 124856 - RNA, 32 nt, Homo Sapiens
ggagcggaggggaggccgugccaggcagggcc

SEQ ID NO: 124857 - RNA, 32 nt, Homo Sapiens
cccccggacgcuauggcccaccccuccggcug

SEQ ID NO: 124858 - RNA, 30 nt, Homo Sapiens
auucuaccacuugcacuuacucaucuucua

SEQ ID NO: 124859 - RNA, 32 nt, Homo Sapiens
ccugacaaacaccugcagauggcugcugcccc

SEQ ID NO: 124860 - RNA, 32 nt, Homo Sapiens
aaaagacaaucaugcaguagauaauuaagugu

SEQ ID NO: 124861 - RNA, 32 nt, Homo Sapiens
agccggcacgguggagaacgggagcuuaacuc

SEQ ID NO: 124862 - RNA, 32 nt, Homo Sapiens
uggggaucuucagaucccuugggccugggaua

SEQ ID NO: 124863 - RNA, 32 nt, Homo Sapiens
aauuuggaaugaaaugaaggaauagaaaucca

SEQ ID NO: 124864 - RNA, 32 nt, Homo Sapiens
guuuuuaaggacuggucaguugugauagaaaa

SEQ ID NO: 124865 - RNA, 32 nt, Homo Sapiens
ccacaccccccgcccccggccuccgcagcucg

SEQ ID NO: 124866 - RNA, 32 nt, Homo Sapiens
aacucugccuucuugaguccaaaugucuucaa

SEQ ID NO: 124867 - RNA, 32 nt, Homo Sapiens
uggaauacagaaaaucgaaaaccuggaggccc

SEQ ID NO: 124868 - RNA, 32 nt, Homo Sapiens
ccggugggacgccuugccagagcagugugugg

SEQ ID NO: 124869 - RNA, 32 nt, Homo Sapiens
cgcuuaaaaccaaugcucccaagcugaauauu

SEQ ID NO: 124870 - RNA, 32 nt, Homo Sapiens
auagaauguauuuuauauaucguucauuguaa

SEQ ID NO: 124871 - RNA, 32 nt, Homo Sapiens
ugcagagauggggcuggcaggggggcuauggg

SEQ ID NO: 124872 - RNA, 32 nt, Homo Sapiens
gcugucagcucuuucccuaccuucaagucaag

SEQ ID NO: 124873 - RNA, 32 nt, Homo Sapiens
ccgccagcgagccggagcugccgccgccccug

SEQ ID NO: 124874 - RNA, 32 nt, Homo Sapiens
auugugauucccuuucagcuuuucagaggcac

SEQ ID NO: 124875 - RNA, 32 nt, Homo Sapiens
acaugcuccaggaaacagacacccacuccaua

SEQ ID NO: 124876 - RNA, 32 nt, Homo Sapiens
auuguuuucuuauguuuuggguguaauagucc

SEQ ID NO: 124877 - RNA, 32 nt, Homo Sapiens
ugcggaggggcucuccggugcugcugggcugg

SEQ ID NO: 124878 - RNA, 32 nt, Homo Sapiens
uacuuucugacuacaaagaaaagcagaugcca

SEQ ID NO: 124879 - RNA, 32 nt, Homo Sapiens
ucucggcccuccccccagcccucucccuaucc

SEQ ID NO: 124880 - RNA, 32 nt, Homo Sapiens
gcagcgccgcauccgugagcugcaggcaccug

SEQ ID NO: 124881 - RNA, 32 nt, Homo Sapiens
caagauuaaggaaaccacaguguacuuugaca

SEQ ID NO: 124882 - RNA, 32 nt, Homo Sapiens
aagagauagcacauauagcaucagucauuguc

SEQ ID NO: 124883 - RNA, 32 nt, Homo Sapiens
ucaagaaaagcauggaaagacaauauaugaug

SEQ ID NO: 124884 - RNA, 32 nt, Homo Sapiens
gugccugauaguguaaaaaauaaaaauaaaaa

SEQ ID NO: 124885 - RNA, 32 nt, Homo Sapiens
accgacccggugccgccggagcuggcccugug

SEQ ID NO: 124886 - RNA, 32 nt, Homo Sapiens
gucauagcauuuauguuauuuucagaugccau

SEQ ID NO: 124887 - RNA, 32 nt, Homo Sapiens
gauuaagaaaccuugcucuccucaucuccaag

SEQ ID NO: 124888 - RNA, 32 nt, Homo Sapiens
accuugcugagccuccuugucuauccuuccuc

SEQ ID NO: 124889 - RNA, 32 nt, Homo Sapiens
gagucacuugucuaaaaaguagccucaggugg

SEQ ID NO: 124890 - RNA, 27 nt, Homo Sapiens
uggcuccccaucgccagccccccacgc

SEQ ID NO: 124891 - RNA, 32 nt, Homo Sapiens
acucagaucugccugcccuugccguagcccug

SEQ ID NO: 124892 - RNA, 32 nt, Homo Sapiens
ucucugcgcuccuacagggcagcccucucugg

SEQ ID NO: 124893 - RNA, 28 nt, Homo Sapiens
aggauggccgcggcggcucugaggagau

SEQ ID NO: 124894 - RNA, 32 nt, Homo Sapiens
cccagggguggcggcugcggcagggggucccg

SEQ ID NO: 124895 - RNA, 32 nt, Homo Sapiens
ggucggcccucgcccccucccccaggcccagc

SEQ ID NO: 124896 - RNA, 32 nt, Homo Sapiens
uuuuaccucgaaaccaggcaucuccuaggaaa

SEQ ID NO: 124897 - RNA, 32 nt, Homo Sapiens
uguaguaauaacugcuuuacaaaauccuuaaa

SEQ ID NO: 124898 - RNA, 32 nt, Homo Sapiens
uaucacauuuaaaaauauaguuacaaaaugcc

SEQ ID NO: 124899 - RNA, 32 nt, Homo Sapiens
agaaauaaaaauugaccuuagaauuuaucguc

SEQ ID NO: 124900 - RNA, 32 nt, Homo Sapiens
aagauccuccugcagggcuaggcggauuguuc

SEQ ID NO: 124901 - RNA, 32 nt, Homo Sapiens
ccgcuggagaagcuguucgcccggggcgggcc

SEQ ID NO: 124902 - RNA, 32 nt, Homo Sapiens
gcuguucauuccauuucuuucuuuuuuuaauc

SEQ ID NO: 124903 - RNA, 30 nt, Homo Sapiens
caccugagaagaaacaguuucauguguucc

SEQ ID NO: 124904 - RNA, 32 nt, Homo Sapiens
uuuuuuaaaaauuauacauguagcucaacuug

SEQ ID NO: 124905 - RNA, 32 nt, Homo Sapiens
agagaugauacccaccacacaccugggggccc

SEQ ID NO: 124906 - RNA, 32 nt, Homo Sapiens
ucagagcagacagaagcagggugguggcaccg

SEQ ID NO: 124907 - RNA, 32 nt, Homo Sapiens
uccaucucuggggcccacucucuucugucuuc

SEQ ID NO: 124908 - RNA, 32 nt, Homo Sapiens
aacaggagucagucucuuucuguacaagggag

SEQ ID NO: 124909 - RNA, 32 nt, Homo Sapiens
cccuucgagcccccuccccaauaaagaauuca

SEQ ID NO: 124910 - RNA, 32 nt, Homo Sapiens
uuccacucggcuaucaggccacagcagccccc

SEQ ID NO: 124911 - RNA, 32 nt, Homo Sapiens
uaauccugagaaauguuucaggccuggggagg

SEQ ID NO: 124912 - RNA, 32 nt, Homo Sapiens
uauggaaggcaguuuuacaauaaggaaauguu

SEQ ID NO: 124913 - RNA, 30 nt, Homo Sapiens
aggaaggccaggcgcgguggcucacguuug

SEQ ID NO: 124914 - RNA, 32 nt, Homo Sapiens
caggcggggcuccugggaggcuggggucauuc

SEQ ID NO: 124915 - RNA, 32 nt, Homo Sapiens
gcugacgggcgcccggccggcugcgguccgug

SEQ ID NO: 124916 - RNA, 32 nt, Homo Sapiens
uugaaagcagggcaccaguauaaguuaacugu

SEQ ID NO: 124917 - RNA, 32 nt, Homo Sapiens
cccgggggcgcuugucgcgcgcggcggcugua

SEQ ID NO: 124918 - RNA, 30 nt, Homo Sapiens
caaaccugcucgcagcaccagccgguggac

SEQ ID NO: 124919 - RNA, 32 nt, Homo Sapiens
uaaagauaggcuaucucaacacugcugaguga

SEQ ID NO: 124920 - RNA, 32 nt, Homo Sapiens
uugagauagggucuuuguugcucaggcuggag

SEQ ID NO: 124921 - RNA, 32 nt, Homo Sapiens
cagcggcguguagaagacgaagucaacagugg

SEQ ID NO: 124922 - RNA, 32 nt, Homo Sapiens
gccacauaaaaauaaacacuugaaguacugaa

SEQ ID NO: 124923 - RNA, 32 nt, Homo Sapiens
aaagagauaaaaugcagacauuccuugcugag

SEQ ID NO: 124924 - RNA, 32 nt, Homo Sapiens
uuugugcuuuaaaauuguuaugcugguguuug

SEQ ID NO: 124925 - RNA, 32 nt, Homo Sapiens
gucaaccauucccaccaaguggaauucuuagu

SEQ ID NO: 124926 - RNA, 32 nt, Homo Sapiens
guauccuggccgagggcggggggcagcggggg

SEQ ID NO: 124927 - RNA, 32 nt, Homo Sapiens
cgccacgccccgagccccuccggcaccccaag

SEQ ID NO: 124928 - RNA, 32 nt, Homo Sapiens
gcuucgagggacacaaaggugauucagcccac

SEQ ID NO: 124929 - RNA, 32 nt, Homo Sapiens
aaugaaauuuugucacauucuauggaaaaugg

SEQ ID NO: 124930 - RNA, 32 nt, Homo Sapiens
aaucaaacuaaauguugaucaacuguagacug

SEQ ID NO: 124931 - RNA, 32 nt, Homo Sapiens
gaaugacauuuuauugugaagauggguguggu

SEQ ID NO: 124932 - RNA, 32 nt, Homo Sapiens
ggcccuagcucgucggcuguguauuggggcgc

SEQ ID NO: 124933 - RNA, 32 nt, Homo Sapiens
auacacauuuuucuaggcauuagaaauaguac

SEQ ID NO: 124934 - RNA, 32 nt, Homo Sapiens
cauagugucuucauuagugugcaucuauuaac

SEQ ID NO: 124935 - RNA, 32 nt, Homo Sapiens
gccguucugcaccuacccaguugccuccaggg

SEQ ID NO: 124936 - RNA, 30 nt, Homo Sapiens
gaagagguucggcggcugauggcggaucag

SEQ ID NO: 124937 - RNA, 32 nt, Homo Sapiens
aagacagaacucucaagcaucauuagauuccu

SEQ ID NO: 124938 - RNA, 32 nt, Homo Sapiens
cucacuguucccucugcuccuggagccuuuga

SEQ ID NO: 124939 - RNA, 32 nt, Homo Sapiens
ugaguggcgggcugggcggcggcggccguagc

SEQ ID NO: 124940 - RNA, 32 nt, Homo Sapiens
uuuuaguuauaaauguaaaccaauuacuuuag

SEQ ID NO: 124941 - RNA, 32 nt, Homo Sapiens
gccuguaaucccagcuacucaaggcugaggca

SEQ ID NO: 124942 - RNA, 30 nt, Homo Sapiens
gaaggaggcaggccccgcgcggggaucucg

SEQ ID NO: 124943 - RNA, 29 nt, Homo Sapiens
uauauguaaaguuucuaguacuaguccca

SEQ ID NO: 124944 - RNA, 30 nt, Homo Sapiens
cucucauccaauguccccuaacucuuggag

SEQ ID NO: 124945 - RNA, 32 nt, Homo Sapiens
caaagagacucggagccagugauccuuuuauc

SEQ ID NO: 124946 - RNA, 32 nt, Homo Sapiens
cgccgggacgccugggugccgcagaccaaacg

SEQ ID NO: 124947 - RNA, 32 nt, Homo Sapiens
uccgcucaggcagccgcaucuggggucaauca

SEQ ID NO: 124948 - RNA, 32 nt, Homo Sapiens
ggccgccgcccccggugcgggaugaggagauc

SEQ ID NO: 124949 - RNA, 32 nt, Homo Sapiens
uccccauuuuuccuacuguaaugcagauucuc

SEQ ID NO: 124950 - RNA, 32 nt, Homo Sapiens
cuacaaacuaauauacuagaaaagcauacacu

SEQ ID NO: 124951 - RNA, 32 nt, Homo Sapiens
cauguuuauuaagaaucauugugcuuaauaau

SEQ ID NO: 124952 - RNA, 32 nt, Homo Sapiens
agugaauauuugcauuuccauuaucuaugaau

SEQ ID NO: 124953 - RNA, 32 nt, Homo Sapiens
agaaggugacucaggucaacacaggggccccc

SEQ ID NO: 124954 - RNA, 32 nt, Homo Sapiens
ugcuaacagaagggugugaaucugguuuacuu

SEQ ID NO: 124955 - RNA, 32 nt, Homo Sapiens
uggcucacaccuguaaugcagcucguugggug

SEQ ID NO: 124956 - RNA, 32 nt, Homo Sapiens
guauauaucuuuuaagugauaauuauaaaucu

SEQ ID NO: 124957 - RNA, 32 nt, Homo Sapiens
ucaguuucaaagccaguggcgucgcggccacc

SEQ ID NO: 124958 - RNA, 32 nt, Homo Sapiens
ugcgcggcgucugcaggcgccaccgcugccuc

SEQ ID NO: 124959 - RNA, 32 nt, Homo Sapiens
gagcuguaacacucacggagaaggucugcagg

SEQ ID NO: 124960 - RNA, 32 nt, Homo Sapiens
uauuuucugugagccacguccuccucgagcgg

SEQ ID NO: 124961 - RNA, 32 nt, Homo Sapiens
ugauguuuggggauugaugugcucagccaaau

SEQ ID NO: 124962 - RNA, 32 nt, Homo Sapiens
cgugccuggccuaaguuuuguuaauagagaug

SEQ ID NO: 124963 - RNA, 30 nt, Homo Sapiens
gguuguggagguggccaugacagugguggc

SEQ ID NO: 124964 - RNA, 32 nt, Homo Sapiens
gccuguugccgcgcgagucccgggcccggagc

SEQ ID NO: 124965 - RNA, 32 nt, Homo Sapiens
cugucucguccgcaucuccgcggccuccugcu

SEQ ID NO: 124966 - RNA, 32 nt, Homo Sapiens
gcagccgcucccccggccccucccgcagcagu

SEQ ID NO: 124967 - RNA, 32 nt, Homo Sapiens
ggcucaggugauccuccugccucaggccuucc

SEQ ID NO: 124968 - RNA, 32 nt, Homo Sapiens
gcacgcuuccaccuccuucgaccuccacugcg

SEQ ID NO: 124969 - RNA, 32 nt, Homo Sapiens
ccacccucccugggggacccucgaaggaggcu

SEQ ID NO: 124970 - RNA, 32 nt, Homo Sapiens
cccuccgagcuccccgacuccuccccgcgcuc

SEQ ID NO: 124971 - RNA, 32 nt, Homo Sapiens
acauuuucauuuccacccaugagaaaccuuga

SEQ ID NO: 124972 - RNA, 32 nt, Homo Sapiens
auaagucgagugguaaauuuguugccaaaaau

SEQ ID NO: 124973 - RNA, 32 nt, Homo Sapiens
cccucgcaaggcccgggcggcgccgauccccg

SEQ ID NO: 124974 - RNA, 32 nt, Homo Sapiens
ccugcccccacccucacccccaacaccaagag

SEQ ID NO: 124975 - RNA, 32 nt, Homo Sapiens
cauagcacuccagccuuagccugggcgacaga

SEQ ID NO: 124976 - RNA, 32 nt, Homo Sapiens
agagcuucaaaaucgggauuccuuacugagaa

SEQ ID NO: 124977 - RNA, 31 nt, Homo Sapiens
uccaggcggcacugacagccucaguaacaau

SEQ ID NO: 124978 - RNA, 32 nt, Homo Sapiens
agagugcaguugcaaagcucuucucugaccug

SEQ ID NO: 124979 - RNA, 32 nt, Homo Sapiens
cggggcggcucaguccggcgcuucuuaccuua

SEQ ID NO: 124980 - RNA, 32 nt, Homo Sapiens
ccuugacccacccucgcaggccgagccccgac

SEQ ID NO: 124981 - RNA, 32 nt, Homo Sapiens
gaauuccuuccuccccugucucauuucuaccc

SEQ ID NO: 124982 - RNA, 32 nt, Homo Sapiens
auaaugcauuuuacucccaguauuauguucau

SEQ ID NO: 124983 - RNA, 32 nt, Homo Sapiens
cguggggcaucauauccuguaugggaaaauca

SEQ ID NO: 124984 - RNA, 32 nt, Homo Sapiens
auguacaacacaguuauguguuuguccauguu

SEQ ID NO: 124985 - RNA, 32 nt, Homo Sapiens
cauguguuuacaggaagaaagauuaccuucag

SEQ ID NO: 124986 - RNA, 32 nt, Homo Sapiens
uccugcaggcucagauuugaagagggaagguu

SEQ ID NO: 124987 - RNA, 32 nt, Homo Sapiens
cauguauuccucaaaagaaugucagaguaaau

SEQ ID NO: 124988 - RNA, 31 nt, Homo Sapiens
aggaccauggggacgggaaggcguggggguc

SEQ ID NO: 124989 - RNA, 32 nt, Homo Sapiens
uccuccccggcgcuccuccacagcucgcuggc

SEQ ID NO: 124990 - RNA, 32 nt, Homo Sapiens
uucuacagauggagaagcugaggcucagaggg

SEQ ID NO: 124991 - RNA, 32 nt, Homo Sapiens
aggggagccggggcuuugcccugcugcugucc

SEQ ID NO: 124992 - RNA, 31 nt, Homo Sapiens
uguggaggacacacucucaguuuguuuuuga

SEQ ID NO: 124993 - RNA, 32 nt, Homo Sapiens
aauagcagcgggcugggcacauccucuccucu

SEQ ID NO: 124994 - RNA, 32 nt, Homo Sapiens
caccaucugucauggcggcugggcuguuuggu

SEQ ID NO: 124995 - RNA, 32 nt, Homo Sapiens
cgcccuggagucuguucucacaccugugcgca

SEQ ID NO: 124996 - RNA, 32 nt, Homo Sapiens
agcaccuuggggcuccuccuucugucuuaaga

SEQ ID NO: 124997 - RNA, 32 nt, Homo Sapiens
gcagcucccggcucccucccccuucggaugug

SEQ ID NO: 124998 - RNA, 32 nt, Homo Sapiens
uuguugcaccuauuaacagccauugugacuaa

SEQ ID NO: 124999 - RNA, 32 nt, Homo Sapiens
accacacauaucuaauuuuuguauuuuuuaua

SEQ ID NO: 125000 - RNA, 32 nt, Homo Sapiens
uggugcccuggcccaucuucccuggcguccuc

SEQ ID NO: 125001 - RNA, 32 nt, Homo Sapiens
cuauuggaacaagagaacagguucggggaaau

SEQ ID NO: 125002 - RNA, 32 nt, Homo Sapiens
gagaugcccacccacguggggaggugacaggg

SEQ ID NO: 125003 - RNA, 32 nt, Homo Sapiens
ugaugugaacucuguuguugccuggauuucca

SEQ ID NO: 125004 - RNA, 32 nt, Homo Sapiens
aaccuagucuaauaaacuaaggugaugagaua

SEQ ID NO: 125005 - RNA, 32 nt, Homo Sapiens
cggggcacccacucccaccuccaucugucucc

SEQ ID NO: 125006 - RNA, 32 nt, Homo Sapiens
ggcccugggacuucgcccugaccccgcuccuc

SEQ ID NO: 125007 - RNA, 32 nt, Homo Sapiens
caguaugacaagauaaggcugaagauauucua

SEQ ID NO: 125008 - RNA, 32 nt, Homo Sapiens
uuuuuuaaaaacacaaagcugcugaauguuca

SEQ ID NO: 125009 - RNA, 32 nt, Homo Sapiens
auguccaucacguaguaaguguucaaugcaug

SEQ ID NO: 125010 - RNA, 32 nt, Homo Sapiens
guuucugcggcgauugaacagccgagcuuugc

SEQ ID NO: 125011 - RNA, 32 nt, Homo Sapiens
ccagggauugcaggccccaucuccaggcuaag

SEQ ID NO: 125012 - RNA, 32 nt, Homo Sapiens
gaccuuucauaucauucucaccaacuuguagu

SEQ ID NO: 125013 - RNA, 32 nt, Homo Sapiens
cgaggauggggacagaaagcgcacagaaucuu

SEQ ID NO: 125014 - RNA, 32 nt, Homo Sapiens
gugcagcgccccgcgccuggcuccagguggac

SEQ ID NO: 125015 - RNA, 32 nt, Homo Sapiens
ugcuggcccgcggcggcgaggagcagagggag

SEQ ID NO: 125016 - RNA, 32 nt, Homo Sapiens
ucuuagcuaacuugcuuugacaaccuacugau

SEQ ID NO: 125017 - RNA, 32 nt, Homo Sapiens
uuuccuacagugauacccuuuauuuuuacuuc

SEQ ID NO: 125018 - RNA, 31 nt, Homo Sapiens
caccacucacggacacauuucugccuagaaa

SEQ ID NO: 125019 - RNA, 32 nt, Homo Sapiens
ugcuauagaaaacaauugccuucacuuuuaag

SEQ ID NO: 125020 - RNA, 32 nt, Homo Sapiens
cucagaccuuggauucauucccuggugucuuu

SEQ ID NO: 125021 - RNA, 32 nt, Homo Sapiens
ucuauuaaaaauacaaaaauuagcuggcugug

SEQ ID NO: 125022 - RNA, 32 nt, Homo Sapiens
caucuguaaucccagcacuuugggagaccaag

SEQ ID NO: 125023 - RNA, 32 nt, Homo Sapiens
acgcugcgcggggccggccgcgcagacuuucu

SEQ ID NO: 125024 - RNA, 32 nt, Homo Sapiens
uaucuugccuccucacuuagaauaccaacagu

SEQ ID NO: 125025 - RNA, 32 nt, Homo Sapiens
uguauuucucaauaaaccugcauuaguuggca

SEQ ID NO: 125026 - RNA, 27 nt, Homo Sapiens
uaggucuuggucuucagcccucuuauc

SEQ ID NO: 125027 - RNA, 32 nt, Homo Sapiens
ugacagggauaccauggcaaauaccacucuuu

SEQ ID NO: 125028 - RNA, 32 nt, Homo Sapiens
ucguggucauuugguaggcugaccuuugagug

SEQ ID NO: 125029 - RNA, 32 nt, Homo Sapiens
cgcggagccccggccgcugccucccgggacag

SEQ ID NO: 125030 - RNA, 32 nt, Homo Sapiens
cucuggaaaaagacuccgagaguuauaacuac

SEQ ID NO: 125031 - RNA, 32 nt, Homo Sapiens
gccacugcgccccgccagacgucugcaucuuu

SEQ ID NO: 125032 - RNA, 32 nt, Homo Sapiens
uucagaaaauuuggaaaauacagaaaauauag

SEQ ID NO: 125033 - RNA, 32 nt, Homo Sapiens
gcugcgcccucccccgcggccaggcucuggag

SEQ ID NO: 125034 - RNA, 31 nt, Homo Sapiens
uauaacaagaaauaugagguauauaaaagga

SEQ ID NO: 125035 - RNA, 32 nt, Homo Sapiens
uuuucuugagacggagucucgcucuguaacuc

SEQ ID NO: 125036 - RNA, 32 nt, Homo Sapiens
uuuaagccuuaagguagaaggcacauagaaau

SEQ ID NO: 125037 - RNA, 32 nt, Homo Sapiens
aaaggaagcacagggaacaggugguggcuuug

SEQ ID NO: 125038 - RNA, 32 nt, Homo Sapiens
ucaaaggacuacugcccuuaaaaugaaaaaac

SEQ ID NO: 125039 - RNA, 32 nt, Homo Sapiens
cugggugccggggccccuuuggcuccucaccg

SEQ ID NO: 125040 - RNA, 32 nt, Homo Sapiens
gggcccuaauauugaggccuuaucccugcagc

SEQ ID NO: 125041 - RNA, 32 nt, Homo Sapiens
cccuccccgccccuaggccgccgcccccucuc

SEQ ID NO: 125042 - RNA, 32 nt, Homo Sapiens
gcagggaggccuagcucugucuccuggacuua

SEQ ID NO: 125043 - RNA, 32 nt, Homo Sapiens
aauauuacccaacuuguccaauaaaauguuuu

SEQ ID NO: 125044 - RNA, 32 nt, Homo Sapiens
ugcugguugcugugucuugucuguaaauaaac

SEQ ID NO: 125045 - RNA, 31 nt, Homo Sapiens
ggcgacgaggaccagguuacggccuccucgc

SEQ ID NO: 125046 - RNA, 32 nt, Homo Sapiens
gggggcgguggagaaaccuuggacucuggagc

SEQ ID NO: 125047 - RNA, 32 nt, Homo Sapiens
caauaauguuguaaaugaacuuucucugaguu

SEQ ID NO: 125048 - RNA, 32 nt, Homo Sapiens
caguguuugaacuuaucaauaaccuuccucca

SEQ ID NO: 125049 - RNA, 32 nt, Homo Sapiens
cauaaucuaguuuacagaaaaaucuugugcua

SEQ ID NO: 125050 - RNA, 32 nt, Homo Sapiens
agccagcagaaccagcagcuaacagcccagcu

SEQ ID NO: 125051 - RNA, 32 nt, Homo Sapiens
uuuucgucacacucaggugaccuacaggcucc

SEQ ID NO: 125052 - RNA, 32 nt, Homo Sapiens
gccauaaaauuugguuaaucagguuuaauaaa

SEQ ID NO: 125053 - RNA, 32 nt, Homo Sapiens
ggugcgggugcaggcgggggccccacagggcc

SEQ ID NO: 125054 - RNA, 32 nt, Homo Sapiens
aauaaauaaaaaguugaggccgggcacggugg

SEQ ID NO: 125055 - RNA, 32 nt, Homo Sapiens
cccgccucggaacagcgccccuugcaggccac

SEQ ID NO: 125056 - RNA, 32 nt, Homo Sapiens
cucugccuggugagcgcccgccggcccacaca

SEQ ID NO: 125057 - RNA, 32 nt, Homo Sapiens
ggcugucuccgccccaucgaggaggaggcccg

SEQ ID NO: 125058 - RNA, 32 nt, Homo Sapiens
uccuugggggagagggauuagagugugcuccu

SEQ ID NO: 125059 - RNA, 32 nt, Homo Sapiens
auaugaaggcuuuuuccaaguuugucauauaa

SEQ ID NO: 125060 - RNA, 32 nt, Homo Sapiens
ucuccaguguagcaggagagccagucacuucc

SEQ ID NO: 125061 - RNA, 32 nt, Homo Sapiens
ugcucaugaaccucaucuccagauugguggga

SEQ ID NO: 125062 - RNA, 32 nt, Homo Sapiens
uuguuugcuguaaagaugguuuugcaagaaua

SEQ ID NO: 125063 - RNA, 32 nt, Homo Sapiens
gccccgggucuguacaauacgguuugcuauaa

SEQ ID NO: 125064 - RNA, 32 nt, Homo Sapiens
guggcaaggucuuuaaucggaagcgaaaccua

SEQ ID NO: 125065 - RNA, 32 nt, Homo Sapiens
ggucacuccagacgucagccggcagggaugca

SEQ ID NO: 125066 - RNA, 32 nt, Homo Sapiens
ccagcaacuaguuuuucuacuuucacucuuuc

SEQ ID NO: 125067 - RNA, 32 nt, Homo Sapiens
cugagaugggcccguacccagcccugcugcag

SEQ ID NO: 125068 - RNA, 32 nt, Homo Sapiens
uggcaaaggugcccuuauaaaaaaggaaacug

SEQ ID NO: 125069 - RNA, 32 nt, Homo Sapiens
aguauuuggacaacuaugauuaaugagaggac

SEQ ID NO: 125070 - RNA, 32 nt, Homo Sapiens
gccugcuugcugcucguuccccgggcaugcgu

SEQ ID NO: 125071 - RNA, 32 nt, Homo Sapiens
ccggcagccacugcccaccuccccucuaccca

SEQ ID NO: 125072 - RNA, 32 nt, Homo Sapiens
cccuauggccugcuggcccaccucccuggacc

SEQ ID NO: 125073 - RNA, 32 nt, Homo Sapiens
auaauagguaguuuggauauuuuuguacuuga

SEQ ID NO: 125074 - RNA, 32 nt, Homo Sapiens
accaaaagucuuuuucuggaccaucuaauuug

SEQ ID NO: 125075 - RNA, 32 nt, Homo Sapiens
uaggugucacaauaaacagucuacacagucuc

SEQ ID NO: 125076 - RNA, 32 nt, Homo Sapiens
agguaauuuuauucuccucuuccuuuuacccu

SEQ ID NO: 125077 - RNA, 32 nt, Homo Sapiens
uccacgcccucccaccuuuucuuuagaccuca

SEQ ID NO: 125078 - RNA, 32 nt, Homo Sapiens
gaaucucucugaauccauuacuccaugccccc

SEQ ID NO: 125079 - RNA, 32 nt, Homo Sapiens
ccucuccuccccagccggccccgcccccaccu

SEQ ID NO: 125080 - RNA, 32 nt, Homo Sapiens
acgcaggucguggucaccugccagcgacuguc

SEQ ID NO: 125081 - RNA, 32 nt, Homo Sapiens
ucuggagugagaugagcucggcuggggacgcu

SEQ ID NO: 125082 - RNA, 32 nt, Homo Sapiens
cgccuucagccccgccuucaaccccgccccgu

SEQ ID NO: 125083 - RNA, 32 nt, Homo Sapiens
gauagaccucaauaggcauauguaucuauuaa

SEQ ID NO: 125084 - RNA, 31 nt, Homo Sapiens
auucaagaggugacuugggugcuguuaaaga

SEQ ID NO: 125085 - RNA, 32 nt, Homo Sapiens
cuaugggggccucagaggcaucaugaagcugg

SEQ ID NO: 125086 - RNA, 32 nt, Homo Sapiens
ccuacaaacuguauggcaaaaccaucaucaug

SEQ ID NO: 125087 - RNA, 32 nt, Homo Sapiens
ugcuacaccugagcuagguaucuccuauauaa

SEQ ID NO: 125088 - RNA, 32 nt, Homo Sapiens
agucacgucaccuggugcguggagguggagcc

SEQ ID NO: 125089 - RNA, 32 nt, Homo Sapiens
agggguuggugcccugacuccugugaggggaa

SEQ ID NO: 125090 - RNA, 32 nt, Homo Sapiens
acugguaauaaauguuuuauuuuuuguucauu

SEQ ID NO: 125091 - RNA, 32 nt, Homo Sapiens
ggacacagcgggacgcggccggcggccucaga

SEQ ID NO: 125092 - RNA, 32 nt, Homo Sapiens
cauuuaucuucaggcuuugagaucugcguggg

SEQ ID NO: 125093 - RNA, 32 nt, Homo Sapiens
caagccuuuaaacgugauaaaagaucaaaaac

SEQ ID NO: 125094 - RNA, 32 nt, Homo Sapiens
aaauuacugaagaucucaucaugcauguguca

SEQ ID NO: 125095 - RNA, 30 nt, Homo Sapiens
gucagcuuuaccagugaggaaaccgacacu

SEQ ID NO: 125096 - RNA, 32 nt, Homo Sapiens
agccccccaagcauugaagacauaguguauuu

SEQ ID NO: 125097 - RNA, 32 nt, Homo Sapiens
acagugggcccacaccacacccugccccuuag

SEQ ID NO: 125098 - RNA, 32 nt, Homo Sapiens
uacugcuucuauuugaaauggugcuguguuuu

SEQ ID NO: 125099 - RNA, 32 nt, Homo Sapiens
agggaagguacccggcucuacugcccgucccg

SEQ ID NO: 125100 - RNA, 29 nt, Homo Sapiens
guaccuggauguuucaguugcaggugcug

SEQ ID NO: 125101 - RNA, 32 nt, Homo Sapiens
gucuuuuguuuuauuugcauuuuacagauuug

SEQ ID NO: 125102 - RNA, 32 nt, Homo Sapiens
uaaccgugccguugucgugugauuccauaagc

SEQ ID NO: 125103 - RNA, 32 nt, Homo Sapiens
aaugccugcuccuggaagucuuucuuacccau

SEQ ID NO: 125104 - RNA, 32 nt, Homo Sapiens
gaucuaacaaaguaggcuaagaccuuccacuu

SEQ ID NO: 125105 - RNA, 27 nt, Homo Sapiens
ugaauuaaagucuacacugccuuugug

SEQ ID NO: 125106 - RNA, 32 nt, Homo Sapiens
gugcagcuucgggucucggaguuuggccccua

SEQ ID NO: 125107 - RNA, 32 nt, Homo Sapiens
gguguuuguaaaauaaguaugaauacacagug

SEQ ID NO: 125108 - RNA, 32 nt, Homo Sapiens
aauuuuauuuauuacuuuuuuauauauagaau

SEQ ID NO: 125109 - RNA, 32 nt, Homo Sapiens
gggcugcgucccggcccuuccacaucggucca

SEQ ID NO: 125110 - RNA, 32 nt, Homo Sapiens
cucagccccuccccuccaacucucaucccauu

SEQ ID NO: 125111 - RNA, 32 nt, Homo Sapiens
uggcuuauuacugcauuuuagauaguauuacc

SEQ ID NO: 125112 - RNA, 32 nt, Homo Sapiens
cccugcugcugugcugccccugaugcugccag

SEQ ID NO: 125113 - RNA, 32 nt, Homo Sapiens
ucccacugcagggcuugcuggagaggccucgg

SEQ ID NO: 125114 - RNA, 32 nt, Homo Sapiens
caaauaaagccuuuuuacacaucucaaaaaaa

SEQ ID NO: 125115 - RNA, 27 nt, Homo Sapiens
gcaugucggaagcgggcgaggagcagc

SEQ ID NO: 125116 - RNA, 32 nt, Homo Sapiens
guuucauuaagguuuucuauagauaagaucau

SEQ ID NO: 125117 - RNA, 32 nt, Homo Sapiens
caucuaaauauuaauaauucugaagaagaggc

SEQ ID NO: 125118 - RNA, 32 nt, Homo Sapiens
ccacagcuaaggaaccaacauaaagagaaaug

SEQ ID NO: 125119 - RNA, 32 nt, Homo Sapiens
ugagcagcuucacuuccccugcgccuuuuaug

SEQ ID NO: 125120 - RNA, 32 nt, Homo Sapiens
accacuuucuuacuucucuuuggguugucuuu

SEQ ID NO: 125121 - RNA, 32 nt, Homo Sapiens
ucauuauauaccaaagcaaaacacaugccaaa

SEQ ID NO: 125122 - RNA, 32 nt, Homo Sapiens
cccugaacacuggggcagggaccaugcugggg

SEQ ID NO: 125123 - RNA, 31 nt, Homo Sapiens
uuauagaacauauuuuccuuuagaucaaggc

SEQ ID NO: 125124 - RNA, 32 nt, Homo Sapiens
cucuuccuuuuccugccgucuuucuuguagac

SEQ ID NO: 125125 - RNA, 29 nt, Homo Sapiens
aaaaguuggggacagaugaaggaagaaug

SEQ ID NO: 125126 - RNA, 32 nt, Homo Sapiens
uuuuaguauauucacagaguuguacaaguguu

SEQ ID NO: 125127 - RNA, 32 nt, Homo Sapiens
uucccccgaaguagaugaaacagucucacaua

SEQ ID NO: 125128 - RNA, 32 nt, Homo Sapiens
ccucagggucaaggccuugguuggaccugccc

SEQ ID NO: 125129 - RNA, 32 nt, Homo Sapiens
ccuuccuuuuucuucccuaauaggagguacaa

SEQ ID NO: 125130 - RNA, 32 nt, Homo Sapiens
uguaauacauaauguuuauuguacagaugugu

SEQ ID NO: 125131 - RNA, 32 nt, Homo Sapiens
gggaagaccaaggggacuucguguccccucua

SEQ ID NO: 125132 - RNA, 32 nt, Homo Sapiens
ccagccgccagcugcccaucuucugcuagcug

SEQ ID NO: 125133 - RNA, 32 nt, Homo Sapiens
aaaacuuucuucauaaauacuuuaugacaauu

SEQ ID NO: 125134 - RNA, 32 nt, Homo Sapiens
auuucaauuuucuacauugucuaucugcuuuu

SEQ ID NO: 125135 - RNA, 32 nt, Homo Sapiens
ugccuucgcgguggaaggcccgaggggcgcga

SEQ ID NO: 125136 - RNA, 32 nt, Homo Sapiens
guauuuaccauuuuuccaaauuagcaacuacc

SEQ ID NO: 125137 - RNA, 32 nt, Homo Sapiens
cacaugcucauauguuuauaaacuguguuuug

SEQ ID NO: 125138 - RNA, 32 nt, Homo Sapiens
gacgccaccgccgagcccaugauccuggaaca

SEQ ID NO: 125139 - RNA, 32 nt, Homo Sapiens
ccgcggaggagguggaggaggcggcggcggcg

SEQ ID NO: 125140 - RNA, 32 nt, Homo Sapiens
ggcccggggggaggaugccagcagccugccua

SEQ ID NO: 125141 - RNA, 32 nt, Homo Sapiens
cuacaccugccagugccguaccaccagggacg

SEQ ID NO: 125142 - RNA, 32 nt, Homo Sapiens
ucgagaagcuagcucggcugcccgccugagcc

SEQ ID NO: 125143 - RNA, 32 nt, Homo Sapiens
gaaaaagcacaccagcuauuggcacagcgugg

SEQ ID NO: 125144 - RNA, 32 nt, Homo Sapiens
cccuaguucaaaacaaccacuuucucaggcuu

SEQ ID NO: 125145 - RNA, 32 nt, Homo Sapiens
ccugcguggaaauugaaugagauucuuggaag

SEQ ID NO: 125146 - RNA, 27 nt, Homo Sapiens
ggauggagaagcugcggcuccugggcc

SEQ ID NO: 125147 - RNA, 32 nt, Homo Sapiens
gagugcagcuggagggaucugagcgcaggaag

SEQ ID NO: 125148 - RNA, 32 nt, Homo Sapiens
uuugccugaaugugaucagggcacauaaguga

SEQ ID NO: 125149 - RNA, 32 nt, Homo Sapiens
gauugucuuucugccacagaacagcagcagac

SEQ ID NO: 125150 - RNA, 32 nt, Homo Sapiens
uggguauauuugcugccaagccacuugccaaa

SEQ ID NO: 125151 - RNA, 32 nt, Homo Sapiens
ugugaaucuaauuauuauucuuuaaguguuga

SEQ ID NO: 125152 - RNA, 32 nt, Homo Sapiens
guaaaaauaaacgcaaacaguuguugaugcag

SEQ ID NO: 125153 - RNA, 32 nt, Homo Sapiens
cuccuccuuuauuugaggggggaagagugcug

SEQ ID NO: 125154 - RNA, 31 nt, Homo Sapiens
gggucagguaaaccucuuuccuuuauaaauu

SEQ ID NO: 125155 - RNA, 32 nt, Homo Sapiens
aguccaagaacaaacaggaguucaaaaauaaa

SEQ ID NO: 125156 - RNA, 32 nt, Homo Sapiens
guacccagacugcagucaucaccaggauagca

SEQ ID NO: 125157 - RNA, 32 nt, Homo Sapiens
aggaacauuuuuccuguaguagcuagagugcc

SEQ ID NO: 125158 - RNA, 32 nt, Homo Sapiens
cagagacagcuccaacugaggaccucuccaac

SEQ ID NO: 125159 - RNA, 32 nt, Homo Sapiens
ugacuuguccaaagucugcugcucuuaagugg

SEQ ID NO: 125160 - RNA, 32 nt, Homo Sapiens
ucugguauuucugagguuaacacuugauuuag

SEQ ID NO: 125161 - RNA, 32 nt, Homo Sapiens
acaccggaaagcugcguccgggcuggagcacu

SEQ ID NO: 125162 - RNA, 32 nt, Homo Sapiens
aaugugaaaaaggaauaaaaaauacuguuggg

SEQ ID NO: 125163 - RNA, 32 nt, Homo Sapiens
ggcuuucuuuucauuacuucauuaucugaauc

SEQ ID NO: 125164 - RNA, 32 nt, Homo Sapiens
uccccagagggaggagcaggcaggagagagag

SEQ ID NO: 125165 - RNA, 32 nt, Homo Sapiens
cuggggcuuuuagagccccccguguggcuuac

SEQ ID NO: 125166 - RNA, 32 nt, Homo Sapiens
gaccuccguggcgcggaagacccgagccugcc

SEQ ID NO: 125167 - RNA, 32 nt, Homo Sapiens
acaagaaauauuaauaccacauggggagaacc

SEQ ID NO: 125168 - RNA, 29 nt, Homo Sapiens
gcaauuccaaagcuucuaaccaaaaaaca

SEQ ID NO: 125169 - RNA, 31 nt, Homo Sapiens
cugcugcugccggccgcccagacaccacaga

SEQ ID NO: 125170 - RNA, 32 nt, Homo Sapiens
ccgggcuggggguggggaagggaggccgccac

SEQ ID NO: 125171 - RNA, 32 nt, Homo Sapiens
caugaaaggaacaugcaggauauuuuaaugaa

SEQ ID NO: 125172 - RNA, 32 nt, Homo Sapiens
uugaacaaacuuaaagaaauauuuuuaaagcg

SEQ ID NO: 125173 - RNA, 32 nt, Homo Sapiens
uucuuuuguagaaguuucucgaaggugcuugg

SEQ ID NO: 125174 - RNA, 32 nt, Homo Sapiens
uguucgccgcguggaaugugaguguguuugug

SEQ ID NO: 125175 - RNA, 32 nt, Homo Sapiens
uccauaaaugcaaugauaugcauguuaacaac

SEQ ID NO: 125176 - RNA, 32 nt, Homo Sapiens
agcuaccaauugugccgagaaaagcauuuuag

SEQ ID NO: 125177 - RNA, 32 nt, Homo Sapiens
cugagcgagcggggccugggcggccggcaguc

SEQ ID NO: 125178 - RNA, 32 nt, Homo Sapiens
auuucaacaaagaucaucaaugcuaacaccuc

SEQ ID NO: 125179 - RNA, 32 nt, Homo Sapiens
uuccuguaauauauuuauauacuuuuucauga

SEQ ID NO: 125180 - RNA, 32 nt, Homo Sapiens
ccuugcugcuauuguauggcuggggacugguc

SEQ ID NO: 125181 - RNA, 32 nt, Homo Sapiens
uuacuuuugacaaaugggugguuugugguagu

SEQ ID NO: 125182 - RNA, 32 nt, Homo Sapiens
cugcggggagacgggcgccggccccaaagcga

SEQ ID NO: 125183 - RNA, 32 nt, Homo Sapiens
aaauaggccaggcgcaguggcucacaccugua

SEQ ID NO: 125184 - RNA, 32 nt, Homo Sapiens
agccugggcccuccuuccccagcccagacauu

SEQ ID NO: 125185 - RNA, 32 nt, Homo Sapiens
gucggccggccugcuggcauggcugggcaucc

SEQ ID NO: 125186 - RNA, 32 nt, Homo Sapiens
cucaacagacaugacucagggauggcuuagua

SEQ ID NO: 125187 - RNA, 32 nt, Homo Sapiens
uucuuguauuucuaauaagaugacuuuccaga

SEQ ID NO: 125188 - RNA, 30 nt, Homo Sapiens
ggcgcagagaagcugagggcggucucugau

SEQ ID NO: 125189 - RNA, 30 nt, Homo Sapiens
cauucacuggacugaaucugguugcccgga

SEQ ID NO: 125190 - RNA, 32 nt, Homo Sapiens
cgacugucaugcaaauaauacauuuaaaauag

SEQ ID NO: 125191 - RNA, 32 nt, Homo Sapiens
ccagugggagaugaaggacaaaaguaaaaccc

SEQ ID NO: 125192 - RNA, 32 nt, Homo Sapiens
gagccaacccacccguagacuacgaaugucuc

SEQ ID NO: 125193 - RNA, 32 nt, Homo Sapiens
uaagguggguggcaggagggaacaggugccac

SEQ ID NO: 125194 - RNA, 32 nt, Homo Sapiens
uacgggcaugcgccaccacacccggcuaauuu

SEQ ID NO: 125195 - RNA, 32 nt, Homo Sapiens
caggcucugcuccccuggcccaggcggagggc

SEQ ID NO: 125196 - RNA, 32 nt, Homo Sapiens
guuaccuuccacuuacuguagcaaauaauacc

SEQ ID NO: 125197 - RNA, 32 nt, Homo Sapiens
gccuuccucugccuccugagcgcggacuccuu

SEQ ID NO: 125198 - RNA, 32 nt, Homo Sapiens
ggcauaaaauaagaugacuuauaggguucguu

SEQ ID NO: 125199 - RNA, 32 nt, Homo Sapiens
aaaggcccuggggccggacaguucuuggcaga

SEQ ID NO: 125200 - RNA, 32 nt, Homo Sapiens
aacacaaaacaucuuauuaaaauuguacuuga

SEQ ID NO: 125201 - RNA, 32 nt, Homo Sapiens
agugggugccaucccggcuucggacccuuggg

SEQ ID NO: 125202 - RNA, 32 nt, Homo Sapiens
ucuuuuggcaguauuucuuuacaaauguggca

SEQ ID NO: 125203 - RNA, 32 nt, Homo Sapiens
gagacauuuagcuugccagacaucaguuuuca

SEQ ID NO: 125204 - RNA, 32 nt, Homo Sapiens
uauaguuggacaauuuacuuagcccuuucuaa

SEQ ID NO: 125205 - RNA, 32 nt, Homo Sapiens
agccuacuuuuucacuuuaaaugauuuauugg

SEQ ID NO: 125206 - RNA, 32 nt, Homo Sapiens
cgucuccgccgcgugcgcccuccucgaccagc

SEQ ID NO: 125207 - RNA, 32 nt, Homo Sapiens
uaaaaaucaaggaauuaggggucgggggaggg

SEQ ID NO: 125208 - RNA, 32 nt, Homo Sapiens
cauccuuaaagaaaugaacacuuuuuguuguc

SEQ ID NO: 125209 - RNA, 32 nt, Homo Sapiens
gccuucgaacuaaagggccacuccgcggcugu

SEQ ID NO: 125210 - RNA, 27 nt, Homo Sapiens
gcauuugccuucuucugccaccuaaau

SEQ ID NO: 125211 - RNA, 32 nt, Homo Sapiens
gaaucauuuuuggugaacuguuguguccuuua

SEQ ID NO: 125212 - RNA, 32 nt, Homo Sapiens
gauaacugaaaauuauuuaaaccgcuaaaaga

SEQ ID NO: 125213 - RNA, 32 nt, Homo Sapiens
guaacagugacuuuuccagggaggaagaggca

SEQ ID NO: 125214 - RNA, 31 nt, Homo Sapiens
uccaagaaauaaagaacaauaguuucaucau

SEQ ID NO: 125215 - RNA, 32 nt, Homo Sapiens
gacacagcacugggcugccaggauuccccugg

SEQ ID NO: 125216 - RNA, 32 nt, Homo Sapiens
gaauagcugugacugacucacacucuaaccca

SEQ ID NO: 125217 - RNA, 32 nt, Homo Sapiens
uacagcccauucucaauuauccuucacaauua

SEQ ID NO: 125218 - RNA, 32 nt, Homo Sapiens
uuucauccuuugaaacacaguugugaagugug

SEQ ID NO: 125219 - RNA, 32 nt, Homo Sapiens
cacuggccgccucuccuugccaggccugccaa

SEQ ID NO: 125220 - RNA, 32 nt, Homo Sapiens
auacaaggaggaagccaaaaccaagugaggug

SEQ ID NO: 125221 - RNA, 32 nt, Homo Sapiens
gaguuuuccauguauuugguagauaaaugacu

SEQ ID NO: 125222 - RNA, 32 nt, Homo Sapiens
auuguuuuauuuuuaaacucuuuuugggucca

SEQ ID NO: 125223 - RNA, 32 nt, Homo Sapiens
aggagagcugggggcaggagaaugggguguuc

SEQ ID NO: 125224 - RNA, 32 nt, Homo Sapiens
ggggcuccaggucggcccgcuccggagccggg

SEQ ID NO: 125225 - RNA, 32 nt, Homo Sapiens
gucacauauuaccauguuauucgauucccaga

SEQ ID NO: 125226 - RNA, 30 nt, Homo Sapiens
ucuuuggauaaaauggaugggucaaugccu

SEQ ID NO: 125227 - RNA, 32 nt, Homo Sapiens
ccgaagcucccuccucucccggcuccacccau

SEQ ID NO: 125228 - RNA, 32 nt, Homo Sapiens
uugaggaagaucuggccuaggcuggguccuca

SEQ ID NO: 125229 - RNA, 32 nt, Homo Sapiens
ugugggcgcccuugggacccccgaggacugau

SEQ ID NO: 125230 - RNA, 32 nt, Homo Sapiens
cccaccugcaggguguucacuuuguggcuccu

SEQ ID NO: 125231 - RNA, 29 nt, Homo Sapiens
uucaauaucaagugauaccacagauccag

SEQ ID NO: 125232 - RNA, 32 nt, Homo Sapiens
uggggcgggcgguggcucgugcugggucacgu

SEQ ID NO: 125233 - RNA, 32 nt, Homo Sapiens
aucaggacggcucugcagcugcaaagggcgag

SEQ ID NO: 125234 - RNA, 32 nt, Homo Sapiens
gaggaagcucaucugaggaaagcuggagggaa

SEQ ID NO: 125235 - RNA, 32 nt, Homo Sapiens
caggcuggagagcgguggugcagucagcucac

SEQ ID NO: 125236 - RNA, 32 nt, Homo Sapiens
uuuugcacuuuauuuucuuaaacauauucaua

SEQ ID NO: 125237 - RNA, 32 nt, Homo Sapiens
cugaaggcucagauugaggagcucaagaacga

SEQ ID NO: 125238 - RNA, 32 nt, Homo Sapiens
ggggaauaucuauuuuaacugcuucagacacc

SEQ ID NO: 125239 - RNA, 32 nt, Homo Sapiens
cacaauugaaagauuccuaacaacuggcugcg

SEQ ID NO: 125240 - RNA, 32 nt, Homo Sapiens
cuugucaagaccggguggagguccuggcacuu

SEQ ID NO: 125241 - RNA, 32 nt, Homo Sapiens
acaaaaugcauuuuuucguaucaaaaagucac

SEQ ID NO: 125242 - RNA, 32 nt, Homo Sapiens
auccaucccacccuccucccagaggcccagcc

SEQ ID NO: 125243 - RNA, 32 nt, Homo Sapiens
cggggcgagcgcagcgcaaggcuggcgcgcgc

SEQ ID NO: 125244 - RNA, 32 nt, Homo Sapiens
cuaagugcuucacaugauauuaacucauuaca

SEQ ID NO: 125245 - RNA, 32 nt, Homo Sapiens
gucaugaaaccaggauuauuggugauguguug

SEQ ID NO: 125246 - RNA, 32 nt, Homo Sapiens
uuugcugccugcccuccuccucucacccgaug

SEQ ID NO: 125247 - RNA, 32 nt, Homo Sapiens
gugacaagggaagggagcaccagaugacacau

SEQ ID NO: 125248 - RNA, 32 nt, Homo Sapiens
aaaaggcggaucuguuggcagcagcccuuaua

SEQ ID NO: 125249 - RNA, 32 nt, Homo Sapiens
gcagagggcccugaugacaugugugugaugag

SEQ ID NO: 125250 - RNA, 32 nt, Homo Sapiens
cggaacacacugggggugggggcggggggaag

SEQ ID NO: 125251 - RNA, 32 nt, Homo Sapiens
ugguaauuguuuuggggugcugauaugguuug

SEQ ID NO: 125252 - RNA, 30 nt, Homo Sapiens
ccccgcgcgcccgucccgaguccgcugcuc

SEQ ID NO: 125253 - RNA, 32 nt, Homo Sapiens
cgcaucaagcucugcccuuguuauccugccac

SEQ ID NO: 125254 - RNA, 32 nt, Homo Sapiens
cucagaccauucucucaucuugccuugucaga

SEQ ID NO: 125255 - RNA, 32 nt, Homo Sapiens
guacuuaaaugaaacaucuuauuaaucauuuc

SEQ ID NO: 125256 - RNA, 32 nt, Homo Sapiens
cucaaggaaagauaaagcugggcggaaggagg

SEQ ID NO: 125257 - RNA, 32 nt, Homo Sapiens
guuguugcauaacagaugauuuuuuaaaauau

SEQ ID NO: 125258 - RNA, 32 nt, Homo Sapiens
agacucaaaguacccggcggcaagaggcccau

SEQ ID NO: 125259 - RNA, 32 nt, Homo Sapiens
caggagggcaccggccggggcccacgcccucu

SEQ ID NO: 125260 - RNA, 32 nt, Homo Sapiens
ggaagacauuuucaucucuguauuauuugcac

SEQ ID NO: 125261 - RNA, 32 nt, Homo Sapiens
gaaggcgauuggaugcggcggcggcggcggau

SEQ ID NO: 125262 - RNA, 27 nt, Homo Sapiens
gcaacaguuuucuucagcgcccaggau

SEQ ID NO: 125263 - RNA, 32 nt, Homo Sapiens
ugguucacaagaagauuuuagaugguauucaa

SEQ ID NO: 125264 - RNA, 32 nt, Homo Sapiens
accagccuggacaauauagugaaaccccgucu

SEQ ID NO: 125265 - RNA, 32 nt, Homo Sapiens
ccuugcaauauuuccauugccccccaaggagc

SEQ ID NO: 125266 - RNA, 32 nt, Homo Sapiens
ccccuaguucccucugcucagccaagcuuguu

SEQ ID NO: 125267 - RNA, 32 nt, Homo Sapiens
gaauuugaaaagucgauuaaauuauguauuuu

SEQ ID NO: 125268 - RNA, 32 nt, Homo Sapiens
agauggggaccucggcugccccaagacuggcc

SEQ ID NO: 125269 - RNA, 32 nt, Homo Sapiens
guaucaaaugaaagugaugauacuguaacgaa

SEQ ID NO: 125270 - RNA, 32 nt, Homo Sapiens
gaaguaacucaggaauaaaaaacuaaauacca

SEQ ID NO: 125271 - RNA, 25 nt, Homo Sapiens
ucacgagaauaaagugucaagcaag

SEQ ID NO: 125272 - RNA, 32 nt, Homo Sapiens
cuccaggccacugguuagcucaucucagccuc

SEQ ID NO: 125273 - RNA, 32 nt, Homo Sapiens
ucuguguugcuacugguuuaguucuugggaua

SEQ ID NO: 125274 - RNA, 32 nt, Homo Sapiens
ggacgggcuccgcgcgcuccggcagcgcauuc

SEQ ID NO: 125275 - RNA, 32 nt, Homo Sapiens
caaacaaugcaaacggggcaggggcggggggg

SEQ ID NO: 125276 - RNA, 32 nt, Homo Sapiens
ugcaggugcagggcccugugguccagacuccc

SEQ ID NO: 125277 - RNA, 32 nt, Homo Sapiens
uaguuaaauaaaugaacauuguauggcuuaga

SEQ ID NO: 125278 - RNA, 32 nt, Homo Sapiens
ugaggaauugguucccccagagccuuauugac

SEQ ID NO: 125279 - RNA, 32 nt, Homo Sapiens
ccaggaaggcagagaccccuugggaucccuaa

SEQ ID NO: 125280 - RNA, 32 nt, Homo Sapiens
agcuugagaacuauuacccagcucuaagcaaa

SEQ ID NO: 125281 - RNA, 32 nt, Homo Sapiens
ugcucaucauggccacugucuggagcgagcgc

SEQ ID NO: 125282 - RNA, 32 nt, Homo Sapiens
accccggagagcccgcagcugccgcagccggc

SEQ ID NO: 125283 - RNA, 32 nt, Homo Sapiens
cguuaccaacgcguggguacaagugcuuggag

SEQ ID NO: 125284 - RNA, 32 nt, Homo Sapiens
auucucacuuuguuuuuuccuuccuuuuguug

SEQ ID NO: 125285 - RNA, 32 nt, Homo Sapiens
acacaggggccugcaggcugcccggccagcgg

SEQ ID NO: 125286 - RNA, 32 nt, Homo Sapiens
uuaaaaguuuuaaagguuuagugguaccuucu

SEQ ID NO: 125287 - RNA, 32 nt, Homo Sapiens
aauccggccugucagcagcugcaccccucagc

SEQ ID NO: 125288 - RNA, 32 nt, Homo Sapiens
aguucaagaauauuuuaagaguuacuuaaaua

SEQ ID NO: 125289 - RNA, 29 nt, Homo Sapiens
cuaaagaugaagaagaggacaacaagccc

SEQ ID NO: 125290 - RNA, 32 nt, Homo Sapiens
gcacuagggucccagggugggcucaggguugg

SEQ ID NO: 125291 - RNA, 32 nt, Homo Sapiens
aggacuccaaccaagaggauuucuucaaaucu

SEQ ID NO: 125292 - RNA, 32 nt, Homo Sapiens
agacaguguuugucgugggcguggucugcggg

SEQ ID NO: 125293 - RNA, 32 nt, Homo Sapiens
cuguugccgccuaacuuucucauccucggucu

SEQ ID NO: 125294 - RNA, 32 nt, Homo Sapiens
cucccgccgccuuuccucugagccuuccuacu

SEQ ID NO: 125295 - RNA, 32 nt, Homo Sapiens
cgaguauuuaucggauaguucuacuuguuuua

SEQ ID NO: 125296 - RNA, 32 nt, Homo Sapiens
acagaaucaucuuuaacccaacuuuuuauacg

SEQ ID NO: 125297 - RNA, 32 nt, Homo Sapiens
cacuggcaucuuuuuagcaucauagacacugu

SEQ ID NO: 125298 - RNA, 32 nt, Homo Sapiens
ccagagacgcccagccccaucccuguccucau

SEQ ID NO: 125299 - RNA, 32 nt, Homo Sapiens
ucagccccccaagacuacaggcacaugcgugc

SEQ ID NO: 125300 - RNA, 32 nt, Homo Sapiens
gggucgcggaggaggagggggcggccggcuuc

SEQ ID NO: 125301 - RNA, 32 nt, Homo Sapiens
cugagugucggcaucagcacugagcuagacau

SEQ ID NO: 125302 - RNA, 32 nt, Homo Sapiens
uagguucugcuguugguagcggguccauuacu

SEQ ID NO: 125303 - RNA, 32 nt, Homo Sapiens
ugugaucacagcagacagggucgcugcccuga

SEQ ID NO: 125304 - RNA, 28 nt, Homo Sapiens
ccccaacagaaagaucauuugaaaccag

SEQ ID NO: 125305 - RNA, 32 nt, Homo Sapiens
ugcugucccgcacucccccagcagcugaugaa

SEQ ID NO: 125306 - RNA, 32 nt, Homo Sapiens
ccugucccuucgcucccagacccaggcuagcc

SEQ ID NO: 125307 - RNA, 32 nt, Homo Sapiens
uuaggagauaauuauuuaucuugcuuuucaua

SEQ ID NO: 125308 - RNA, 32 nt, Homo Sapiens
cuccuaucugauaacuuaauucuucuaaauua

SEQ ID NO: 125309 - RNA, 31 nt, Homo Sapiens
gaguuguggggcaucccuccaaggccugacu

SEQ ID NO: 125310 - RNA, 32 nt, Homo Sapiens
gcuccuacucucugucccaccccucacccagc

SEQ ID NO: 125311 - RNA, 32 nt, Homo Sapiens
ccaccccggaagcugaaccugagggagacaac

SEQ ID NO: 125312 - RNA, 32 nt, Homo Sapiens
cuuucgucugcacuaccaauucaaugcccuuc

SEQ ID NO: 125313 - RNA, 32 nt, Homo Sapiens
uuuguagguuuaucugugcugcaccucugacc

SEQ ID NO: 125314 - RNA, 32 nt, Homo Sapiens
gccuucugcuggguccuggaggucuuggaagc

SEQ ID NO: 125315 - RNA, 32 nt, Homo Sapiens
gcagcgggggagaggguaaacuggggcgcgcg

SEQ ID NO: 125316 - RNA, 32 nt, Homo Sapiens
agagguuggccacaacucugugccacauccuc

SEQ ID NO: 125317 - RNA, 32 nt, Homo Sapiens
aaguuuuuuaauaaguuuuuuacaaagaaaag

SEQ ID NO: 125318 - RNA, 32 nt, Homo Sapiens
uuauaaggcugaugucaauuucuguguugcca

SEQ ID NO: 125319 - RNA, 32 nt, Homo Sapiens
auucagccuagucaacaacaaacaaagaaaaa

SEQ ID NO: 125320 - RNA, 32 nt, Homo Sapiens
uaggauacagaauggaagguguaugagagcug

SEQ ID NO: 125321 - RNA, 32 nt, Homo Sapiens
cagcacccgcggcagcacccggggcagccccu

SEQ ID NO: 125322 - RNA, 32 nt, Homo Sapiens
cuccccuggcccagcccgacucccuccuccuu

SEQ ID NO: 125323 - RNA, 32 nt, Homo Sapiens
ggggaguugccuggcggcgccgugccagaagc

SEQ ID NO: 125324 - RNA, 32 nt, Homo Sapiens
cccucgagaacaaauauucuagcagaggagau

SEQ ID NO: 125325 - RNA, 32 nt, Homo Sapiens
acauguuccaggugcugcuuugcuuuaacggc

SEQ ID NO: 125326 - RNA, 32 nt, Homo Sapiens
uguauaaaaaucacaucaggguaaauggggua

SEQ ID NO: 125327 - RNA, 32 nt, Homo Sapiens
cuagaggcucugcggacuucugcgggcgguga

SEQ ID NO: 125328 - RNA, 32 nt, Homo Sapiens
aacuucuccccaccugacccagggcugugggc

SEQ ID NO: 125329 - RNA, 32 nt, Homo Sapiens
gacaucgccaccuggugcucaugaggugucuu

SEQ ID NO: 125330 - RNA, 32 nt, Homo Sapiens
cauaaaaugcuuuuauuuugccauauccuaca

SEQ ID NO: 125331 - RNA, 32 nt, Homo Sapiens
uccagagacauuccagggguccaggguguggg

SEQ ID NO: 125332 - RNA, 32 nt, Homo Sapiens
cacagucccauccuuccaaccuucuggccaga

SEQ ID NO: 125333 - RNA, 32 nt, Homo Sapiens
caaggaagugacuucaguugaacucuguaccu

SEQ ID NO: 125334 - RNA, 32 nt, Homo Sapiens
uccgcgagggccagcgucaccagaccagcugc

SEQ ID NO: 125335 - RNA, 32 nt, Homo Sapiens
cuguuuuauagaaaguuuuuuccaaaguuuuc

SEQ ID NO: 125336 - RNA, 32 nt, Homo Sapiens
uuuauacaccugaaagaagagaaugucaagac

SEQ ID NO: 125337 - RNA, 32 nt, Homo Sapiens
aaacccaugcagacauaacauuuauaccaaug

SEQ ID NO: 125338 - RNA, 32 nt, Homo Sapiens
aacccugcccuaggcauaaaaugcaaggucuc

SEQ ID NO: 125339 - RNA, 32 nt, Homo Sapiens
uuaaguuuuuauuuucuuucacucuguauuaa

SEQ ID NO: 125340 - RNA, 32 nt, Homo Sapiens
auuucauugagaauuaugauguuauaaaaagg

SEQ ID NO: 125341 - RNA, 32 nt, Homo Sapiens
auuacaugauucaagcgagggauuuuaaagua

SEQ ID NO: 125342 - RNA, 32 nt, Homo Sapiens
guugccgugucuguguagaaagaaguagacau

SEQ ID NO: 125343 - RNA, 32 nt, Homo Sapiens
ggcugggugcaguggcucuugccuguaauccc

SEQ ID NO: 125344 - RNA, 32 nt, Homo Sapiens
gauccuuaugcgauuauaucauuauuuacuua

SEQ ID NO: 125345 - RNA, 32 nt, Homo Sapiens
acuuguauuauuagacucucuaguuuuaucuu

SEQ ID NO: 125346 - RNA, 32 nt, Homo Sapiens
ucacuuuggauuuucuaauaucccauuucuga

SEQ ID NO: 125347 - RNA, 32 nt, Homo Sapiens
gcugaagucaucccugcuguaucaggagaauc

SEQ ID NO: 125348 - RNA, 27 nt, Homo Sapiens
ccgccauauuucuucagccuuucuucu

SEQ ID NO: 125349 - RNA, 32 nt, Homo Sapiens
cacuaauguauuaaacuugcuauacauuaaag

SEQ ID NO: 125350 - RNA, 32 nt, Homo Sapiens
ugcugcgaggggcugugcugugccaggggagg

SEQ ID NO: 125351 - RNA, 32 nt, Homo Sapiens
aggggaagccacaggaucggcccgagacccag

SEQ ID NO: 125352 - RNA, 32 nt, Homo Sapiens
uaagaggagugcguggcccaccaggccccccu

SEQ ID NO: 125353 - RNA, 32 nt, Homo Sapiens
uuaagaauccuaaagcacuaagccaaggauga

SEQ ID NO: 125354 - RNA, 32 nt, Homo Sapiens
uagcccuuggauggaggagaugucggagcaaa

SEQ ID NO: 125355 - RNA, 32 nt, Homo Sapiens
aucuccgccucccagguucaagcgauucuccu

SEQ ID NO: 125356 - RNA, 32 nt, Homo Sapiens
agccugcccccagcccggggaacacagccgca

SEQ ID NO: 125357 - RNA, 32 nt, Homo Sapiens
uauguuaaauuaaacuaauauggcagguuaua

SEQ ID NO: 125358 - RNA, 32 nt, Homo Sapiens
gaaggggaagcagagggaaauggggccaugug

SEQ ID NO: 125359 - RNA, 32 nt, Homo Sapiens
cugagaagguaacaaggugacuguuuuuguga

SEQ ID NO: 125360 - RNA, 32 nt, Homo Sapiens
gauugugccacugcacgcacuccagccugggc

SEQ ID NO: 125361 - RNA, 32 nt, Homo Sapiens
uguugcugcuccaugguggggccaagagucac

SEQ ID NO: 125362 - RNA, 32 nt, Homo Sapiens
caggucaagaauuuaaauuuucgcagccucua

SEQ ID NO: 125363 - RNA, 32 nt, Homo Sapiens
gaccaauaaaaauaaacugcuugaacauccuu

SEQ ID NO: 125364 - RNA, 32 nt, Homo Sapiens
aaccuuuaacuaauuauguaucugaaagucac

SEQ ID NO: 125365 - RNA, 32 nt, Homo Sapiens
aucagagcaaaacaugcagagcccuuagcaga

SEQ ID NO: 125366 - RNA, 32 nt, Homo Sapiens
ggaaacauucaaagcagaacuucucaucaucu

SEQ ID NO: 125367 - RNA, 32 nt, Homo Sapiens
cgaggcgggaggaggugaggcuccggcgcaca

SEQ ID NO: 125368 - RNA, 32 nt, Homo Sapiens
ccucuuucauuacuuuuaguaaccauguuccu

SEQ ID NO: 125369 - RNA, 32 nt, Homo Sapiens
cgcccgcggcccggccggcaguugcaguguag

SEQ ID NO: 125370 - RNA, 29 nt, Homo Sapiens
auugaaaguaguaugucuauaagggcaga

SEQ ID NO: 125371 - RNA, 32 nt, Homo Sapiens
agcccagcccagccgggagaccacguggccau

SEQ ID NO: 125372 - RNA, 32 nt, Homo Sapiens
gaacugagcgaugaaauucugguuacaaauug

SEQ ID NO: 125373 - RNA, 32 nt, Homo Sapiens
aaaugugaaaaacguggcagagccuucagacc

SEQ ID NO: 125374 - RNA, 32 nt, Homo Sapiens
ucaugucaaugcacuguacucuguaaaaguuu

SEQ ID NO: 125375 - RNA, 32 nt, Homo Sapiens
uaagaagauucaagaggauauuuauuacuucc

SEQ ID NO: 125376 - RNA, 32 nt, Homo Sapiens
cucuucugcccccagccauauuuggggaggau

SEQ ID NO: 125377 - RNA, 32 nt, Homo Sapiens
cgcaacacccucagccucaugcauuccugcgg

SEQ ID NO: 125378 - RNA, 32 nt, Homo Sapiens
aaagcucgcgucaucacugaucuaagcagugg

SEQ ID NO: 125379 - RNA, 32 nt, Homo Sapiens
uuuccggaguuggauuuuuuuauauuauauac

SEQ ID NO: 125380 - RNA, 32 nt, Homo Sapiens
acuauaucaaacuaaaaacaaacaagaaaaac

SEQ ID NO: 125381 - RNA, 32 nt, Homo Sapiens
aaggcggcgggcugcgcggagcggcguccccu

SEQ ID NO: 125382 - RNA, 32 nt, Homo Sapiens
gauuuagaagcaaagauuucaguagaauuuua

SEQ ID NO: 125383 - RNA, 32 nt, Homo Sapiens
ugccauauauauuguaucaaaauaucauuaau

SEQ ID NO: 125384 - RNA, 32 nt, Homo Sapiens
cauuuuuguuuugucucagggugcaacgucuu

SEQ ID NO: 125385 - RNA, 32 nt, Homo Sapiens
ucaaucccaucccccuuccucccacccugccc

SEQ ID NO: 125386 - RNA, 32 nt, Homo Sapiens
cuccaagcucaucaaaagccaugaucuuauua

SEQ ID NO: 125387 - RNA, 32 nt, Homo Sapiens
ccugaguuucccuccgccgacuagcgcgcggg

SEQ ID NO: 125388 - RNA, 32 nt, Homo Sapiens
gggcuuugcaggccccaccuguccugucccca

SEQ ID NO: 125389 - RNA, 32 nt, Homo Sapiens
cgaggacuucuaccgcugcggcuacugcaaga

SEQ ID NO: 125390 - RNA, 32 nt, Homo Sapiens
gauuuuuuuaaaaaaaaacauaaaaugauuua

SEQ ID NO: 125391 - RNA, 32 nt, Homo Sapiens
auaccuggacauuuuagauguuuaucaaaggu

SEQ ID NO: 125392 - RNA, 32 nt, Homo Sapiens
ccuuuaaaauguuuguacuguaauacuuugcu

SEQ ID NO: 125393 - RNA, 32 nt, Homo Sapiens
caccccucagcccuccucccagccaucuccuc

SEQ ID NO: 125394 - RNA, 32 nt, Homo Sapiens
uauaaaaaacaaugugcaaggguuauauuuua

SEQ ID NO: 125395 - RNA, 32 nt, Homo Sapiens
gucaucaaaacauggacagcaggguguucuca

SEQ ID NO: 125396 - RNA, 31 nt, Homo Sapiens
cuggcccugggggccgcaggacuguccagga

SEQ ID NO: 125397 - RNA, 32 nt, Homo Sapiens
acaacucguugaccacagguggaauucauaag

SEQ ID NO: 125398 - RNA, 32 nt, Homo Sapiens
aauauguguuugucuguuuguuuguuuuuuga

SEQ ID NO: 125399 - RNA, 32 nt, Homo Sapiens
acuauaaaucucuagaauucugugaauuucaa

SEQ ID NO: 125400 - RNA, 32 nt, Homo Sapiens
cacccuguauguccagcuuuugaacacaaggg

SEQ ID NO: 125401 - RNA, 32 nt, Homo Sapiens
cccguggaucccgagagugcagagcucggggc

SEQ ID NO: 125402 - RNA, 32 nt, Homo Sapiens
uucugauauuagauauuaaaaauaugguuuuu

SEQ ID NO: 125403 - RNA, 32 nt, Homo Sapiens
cagcacagccccagcccggagcccagcccccu

SEQ ID NO: 125404 - RNA, 32 nt, Homo Sapiens
ccugggccggcugaauggcagcagccccccuu

SEQ ID NO: 125405 - RNA, 32 nt, Homo Sapiens
gccugaaacuuugaggauaacuuuuuaaaaaa

SEQ ID NO: 125406 - RNA, 32 nt, Homo Sapiens
acaggaggagacagccucccggcccggggagg

SEQ ID NO: 125407 - RNA, 32 nt, Homo Sapiens
cggagcucugggaaguggcugcaccuuggcgg

SEQ ID NO: 125408 - RNA, 32 nt, Homo Sapiens
gguuucacuguguuggccaggcuggucuugaa

SEQ ID NO: 125409 - RNA, 31 nt, Homo Sapiens
ugggcacugccggugggccagggggcgggug

SEQ ID NO: 125410 - RNA, 32 nt, Homo Sapiens
ccccuucccagggccuaccccagggugaggac

SEQ ID NO: 125411 - RNA, 32 nt, Homo Sapiens
ggcagggaggggcacccugggguuguguugac

SEQ ID NO: 125412 - RNA, 32 nt, Homo Sapiens
cuagggugaacaggugcgaagugcgcugggag

SEQ ID NO: 125413 - RNA, 32 nt, Homo Sapiens
gagggaggucggagucccgauuuucuccugcu

SEQ ID NO: 125414 - RNA, 32 nt, Homo Sapiens
uguacauuguuuucccuuucuacauuuugcua

SEQ ID NO: 125415 - RNA, 32 nt, Homo Sapiens
ggaaugcagguguguuuauagcguugugguuc

SEQ ID NO: 125416 - RNA, 32 nt, Homo Sapiens
acgaauuuaugaaugaaagaacccaucuguga

SEQ ID NO: 125417 - RNA, 32 nt, Homo Sapiens
uaugccgaucacuauuugagaaggacaagcug

SEQ ID NO: 125418 - RNA, 32 nt, Homo Sapiens
ucuguccuaccuuuaaucagguccugcucagc

SEQ ID NO: 125419 - RNA, 32 nt, Homo Sapiens
ccaguuaucucacuucccuuuuuaaaucaaug

SEQ ID NO: 125420 - RNA, 32 nt, Homo Sapiens
uuggaaaagcucggaauugaccgaggggagcc

SEQ ID NO: 125421 - RNA, 32 nt, Homo Sapiens
accauuucagcuuuugcuaugugggcagaauu

SEQ ID NO: 125422 - RNA, 29 nt, Homo Sapiens
gucaagaugaagaugugggagaggagcag

SEQ ID NO: 125423 - RNA, 32 nt, Homo Sapiens
gucauuuuaaucaauaucaaugaugaaaauaa

SEQ ID NO: 125424 - RNA, 32 nt, Homo Sapiens
cuauaaaaagaaaaaauaaagaaacugcagcg

SEQ ID NO: 125425 - RNA, 32 nt, Homo Sapiens
uccugccaauacuuugaauuauuuuuuccucu

SEQ ID NO: 125426 - RNA, 32 nt, Homo Sapiens
ggcuacccauucuuggcacccccuuccucagu

SEQ ID NO: 125427 - RNA, 32 nt, Homo Sapiens
ucccugacauuucuaacauauguauuaagcca

SEQ ID NO: 125428 - RNA, 32 nt, Homo Sapiens
cuguauauuuuauauauagauacauauaugaa

SEQ ID NO: 125429 - RNA, 32 nt, Homo Sapiens
ccucgccucuagauugacgugggccagccucc

SEQ ID NO: 125430 - RNA, 32 nt, Homo Sapiens
ccccguggaauggaccucaaggcggcccgccg

SEQ ID NO: 125431 - RNA, 31 nt, Homo Sapiens
ccccuggugccccagagacaggagcacaagu

SEQ ID NO: 125432 - RNA, 29 nt, Homo Sapiens
cccaaugugugccuguaccauaauguauu

SEQ ID NO: 125433 - RNA, 32 nt, Homo Sapiens
acggucuuaggaccucgaucuccuucucccuc

SEQ ID NO: 125434 - RNA, 32 nt, Homo Sapiens
agaugggcaaacugaggcccagaggggcaggg

SEQ ID NO: 125435 - RNA, 32 nt, Homo Sapiens
cugcaaccaaaauucauuaaauuuggcugccu

SEQ ID NO: 125436 - RNA, 32 nt, Homo Sapiens
gugcgggcggggguccgggagaagcggcgggg

SEQ ID NO: 125437 - RNA, 32 nt, Homo Sapiens
ggguccuuaaagaaacaaaguccaaaagucac

SEQ ID NO: 125438 - RNA, 32 nt, Homo Sapiens
gguggcuggggaagaggaacgggcagcuggga

SEQ ID NO: 125439 - RNA, 32 nt, Homo Sapiens
acuagucagcucaguuuuaacuuuauagguuu

SEQ ID NO: 125440 - RNA, 32 nt, Homo Sapiens
ggagccucgcauuccugggaagagggaccugu

SEQ ID NO: 125441 - RNA, 32 nt, Homo Sapiens
ucggucggucuccccccuccccgcccccuucu

SEQ ID NO: 125442 - RNA, 32 nt, Homo Sapiens
uccagccgggacgcacuguguccgccaugguc

SEQ ID NO: 125443 - RNA, 32 nt, Homo Sapiens
agccacugccuggccuggccguagguuuguaa

SEQ ID NO: 125444 - RNA, 32 nt, Homo Sapiens
cccccucugaagaguugacuauuugggaguua

SEQ ID NO: 125445 - RNA, 32 nt, Homo Sapiens
cgcugcgccccggcggcucuagggacccccgg

SEQ ID NO: 125446 - RNA, 32 nt, Homo Sapiens
cgguuguuaugaacaaaugacuuaaugcuuuu

SEQ ID NO: 125447 - RNA, 32 nt, Homo Sapiens
cuagcggccugccugcagggcuggggaccaaa

SEQ ID NO: 125448 - RNA, 32 nt, Homo Sapiens
auguucuggaguugaacaauaguaaugguugc

SEQ ID NO: 125449 - RNA, 30 nt, Homo Sapiens
gucccggcgcccgaccgcccacccaucggc

SEQ ID NO: 125450 - RNA, 32 nt, Homo Sapiens
cuacggccacaccagcaccuccuggcugaagg

SEQ ID NO: 125451 - RNA, 32 nt, Homo Sapiens
acugauaccuuauuuuccuccuccuccuuggc

SEQ ID NO: 125452 - RNA, 32 nt, Homo Sapiens
auacagaaccucugggggaaaaaagagcccuu

SEQ ID NO: 125453 - RNA, 32 nt, Homo Sapiens
aauggggccuuguugugucauguagucagcca

SEQ ID NO: 125454 - RNA, 32 nt, Homo Sapiens
aaugauggacauuuucacuauggcauauaaaa

SEQ ID NO: 125455 - RNA, 32 nt, Homo Sapiens
ugguuuuccaaauaucauuugaccuaagugaa

SEQ ID NO: 125456 - RNA, 32 nt, Homo Sapiens
aguaugaucagggaaaguguaacugaguauac

SEQ ID NO: 125457 - RNA, 30 nt, Homo Sapiens
ccgccauggcccggcugcugcaggcguccu

SEQ ID NO: 125458 - RNA, 32 nt, Homo Sapiens
agucaauggccgggcgcagugagauugcgcca

SEQ ID NO: 125459 - RNA, 32 nt, Homo Sapiens
ugccuagauguuguaggggaucaugagacuau

SEQ ID NO: 125460 - RNA, 32 nt, Homo Sapiens
cuagaaacucuuuaucuucucaucuuacuggc

SEQ ID NO: 125461 - RNA, 32 nt, Homo Sapiens
uuucagacuccggagccucagcccuucacccc

SEQ ID NO: 125462 - RNA, 32 nt, Homo Sapiens
gcuauuacuggaucucuuaagacagcaugugu

SEQ ID NO: 125463 - RNA, 32 nt, Homo Sapiens
ugcuccuuuuuucuagaggaaauguuugucua

SEQ ID NO: 125464 - RNA, 32 nt, Homo Sapiens
guggccccgagacagcuguccuccccugugac

SEQ ID NO: 125465 - RNA, 32 nt, Homo Sapiens
cuaugauacacaagaacuuauguuggaaugaa

SEQ ID NO: 125466 - RNA, 32 nt, Homo Sapiens
agccuaaggagcuguagggucugaggggcagg

SEQ ID NO: 125467 - RNA, 32 nt, Homo Sapiens
uuacaggugugagccaccacacccggccuuau

SEQ ID NO: 125468 - RNA, 32 nt, Homo Sapiens
cugcugcucuguccacauuccauccaccaaag

SEQ ID NO: 125469 - RNA, 32 nt, Homo Sapiens
uccaggcuugagcuagguuuuguuuuucuccu

SEQ ID NO: 125470 - RNA, 32 nt, Homo Sapiens
ucuagugacggagcccgcgcgcggcgccacca

SEQ ID NO: 125471 - RNA, 32 nt, Homo Sapiens
uguccucagcuugggcuucuuccuccuccauc

SEQ ID NO: 125472 - RNA, 32 nt, Homo Sapiens
aggcuccucugcccauucuccuccaucugcac

SEQ ID NO: 125473 - RNA, 32 nt, Homo Sapiens
auagagguggaaacagaaggaagucauuugcu

SEQ ID NO: 125474 - RNA, 32 nt, Homo Sapiens
acuauggaguuaccaauauugccaaguagacu

SEQ ID NO: 125475 - RNA, 32 nt, Homo Sapiens
cggaggcgcguggccggggcgccggcuccaug

SEQ ID NO: 125476 - RNA, 32 nt, Homo Sapiens
ggaggacccggcacuccgaaccccgcgcagcc

SEQ ID NO: 125477 - RNA, 32 nt, Homo Sapiens
cuuucccagggguggggcggcguguccgggcc

SEQ ID NO: 125478 - RNA, 32 nt, Homo Sapiens
cugcagugcgaccccuuggugcuggaggcccu

SEQ ID NO: 125479 - RNA, 32 nt, Homo Sapiens
ccauaaacugugguugcuucuccagcucuguu

SEQ ID NO: 125480 - RNA, 32 nt, Homo Sapiens
uguuuauuacaaugacuauucuccagguuguu

SEQ ID NO: 125481 - RNA, 32 nt, Homo Sapiens
ccugggcaaggaagggcugugcauugaggguu

SEQ ID NO: 125482 - RNA, 32 nt, Homo Sapiens
augacauuacaauccugcauuguuucaagacu

SEQ ID NO: 125483 - RNA, 32 nt, Homo Sapiens
uucuguaaccccuguuugugguacgagauaau

SEQ ID NO: 125484 - RNA, 32 nt, Homo Sapiens
ccugccagggucagcugcagcccccacucugc

SEQ ID NO: 125485 - RNA, 32 nt, Homo Sapiens
caggcaccagugcagugaugauuguacuuauu

SEQ ID NO: 125486 - RNA, 32 nt, Homo Sapiens
aaaaacuuuaugaaacuuggucucaaaaaaaa

SEQ ID NO: 125487 - RNA, 32 nt, Homo Sapiens
ggcgcccccuggagguggccugcacaucccgc

SEQ ID NO: 125488 - RNA, 32 nt, Homo Sapiens
uguuauuucuauuuuuguagaaguaggaagug

SEQ ID NO: 125489 - RNA, 32 nt, Homo Sapiens
uuaguuuuuaugccuguuaagcuuuacugugc

SEQ ID NO: 125490 - RNA, 32 nt, Homo Sapiens
aaaugcuaaaauuuauuauaggaaaauaaauc

SEQ ID NO: 125491 - RNA, 32 nt, Homo Sapiens
gcuccgcagggccugcgcgucuccggcuucca

SEQ ID NO: 125492 - RNA, 32 nt, Homo Sapiens
aaaacuucauggaauuuguagaaaauuaugga

SEQ ID NO: 125493 - RNA, 32 nt, Homo Sapiens
aaggauucacucuggagagaagccauaugaau

SEQ ID NO: 125494 - RNA, 32 nt, Homo Sapiens
ccaccaaggugcccucuccccggggaccuuag

SEQ ID NO: 125495 - RNA, 32 nt, Homo Sapiens
cuguucugcuccaugcagggagggaauuggga

SEQ ID NO: 125496 - RNA, 32 nt, Homo Sapiens
gacccgcccugcggcccucccuuuucuuuucu

SEQ ID NO: 125497 - RNA, 32 nt, Homo Sapiens
ucagacuuagaggugaauaaauugagguccag

SEQ ID NO: 125498 - RNA, 32 nt, Homo Sapiens
cccggaagagagcggcaguucggagagauuuu

SEQ ID NO: 125499 - RNA, 32 nt, Homo Sapiens
uuuuauuccuuccaucuagcagcuggccuaau

SEQ ID NO: 125500 - RNA, 32 nt, Homo Sapiens
cucuuucucccuuuuuuuuuuaaauuuuuauu

SEQ ID NO: 125501 - RNA, 32 nt, Homo Sapiens
augucaaaggucgggacagcugugccgggagg

SEQ ID NO: 125502 - RNA, 32 nt, Homo Sapiens
gggcuuugugcugcaccugagggaguagccgc

SEQ ID NO: 125503 - RNA, 30 nt, Homo Sapiens
gcugcggcgcccgcgcgagucgcgucuaag

SEQ ID NO: 125504 - RNA, 32 nt, Homo Sapiens
gggugggugugaagggaugagaauaauucuuu

SEQ ID NO: 125505 - RNA, 32 nt, Homo Sapiens
aggagaggggcgggacuucuccgggucaaggc

SEQ ID NO: 125506 - RNA, 32 nt, Homo Sapiens
cgagacaaucccaagugucagugggaaggaga

SEQ ID NO: 125507 - RNA, 32 nt, Homo Sapiens
uguucuuguauuucucauuuaacuuuacuguu

SEQ ID NO: 125508 - RNA, 32 nt, Homo Sapiens
agugggcugccagcugggccaccugucuucca

SEQ ID NO: 125509 - RNA, 32 nt, Homo Sapiens
ugucccauuuuucagguuauaauauuuccucu

SEQ ID NO: 125510 - RNA, 32 nt, Homo Sapiens
uugucccggccgcgcucuguguuccauccucc

SEQ ID NO: 125511 - RNA, 32 nt, Homo Sapiens
cagcaacauuuuagggggcgguuguuucuuuc

SEQ ID NO: 125512 - RNA, 32 nt, Homo Sapiens
acaauagacaaagggggugugaugaguguuaa

SEQ ID NO: 125513 - RNA, 30 nt, Homo Sapiens
aaggcaugagugacagacccacagcaaggc

SEQ ID NO: 125514 - RNA, 32 nt, Homo Sapiens
cccccucacucuucuuuuuuaacuguuaaacc

SEQ ID NO: 125515 - RNA, 32 nt, Homo Sapiens
gcugauuucccucuccugacuuugccaagccu

SEQ ID NO: 125516 - RNA, 32 nt, Homo Sapiens
aacacaaguuaaauaugacuaagcagaaagau

SEQ ID NO: 125517 - RNA, 32 nt, Homo Sapiens
gagugaauaugcugaaugaggaccuuuuacug

SEQ ID NO: 125518 - RNA, 32 nt, Homo Sapiens
gguaacauagugagacccccuaucucuacaaa

SEQ ID NO: 125519 - RNA, 32 nt, Homo Sapiens
uuauguucuaauaaaacuuauuuauaaaaaca

SEQ ID NO: 125520 - RNA, 32 nt, Homo Sapiens
agggcccagagcaucucuuugcugcuacuguu

SEQ ID NO: 125521 - RNA, 32 nt, Homo Sapiens
aacugauacuuaaaauaaauggcuguuauuuc

SEQ ID NO: 125522 - RNA, 32 nt, Homo Sapiens
gcugaacacaauggucuucccagucauguaua

SEQ ID NO: 125523 - RNA, 32 nt, Homo Sapiens
ugccuguaauaaauaaauugcgugauuauugg

SEQ ID NO: 125524 - RNA, 32 nt, Homo Sapiens
uuacagauaaggaaacagcugaauuuauguca

SEQ ID NO: 125525 - RNA, 32 nt, Homo Sapiens
ucauucauuuuaaggcuucucugaauugugcu

SEQ ID NO: 125526 - RNA, 32 nt, Homo Sapiens
agcuggcgacucggaaaguaaaugcuucaaaa

SEQ ID NO: 125527 - RNA, 32 nt, Homo Sapiens
uggguacaaaaauauaguuagauagaaugaau

SEQ ID NO: 125528 - RNA, 32 nt, Homo Sapiens
gguagggaguuuuggggugcagaaggguacug

SEQ ID NO: 125529 - RNA, 32 nt, Homo Sapiens
ccagcagaaaucaacagaauaauugauuacuc

SEQ ID NO: 125530 - RNA, 32 nt, Homo Sapiens
uuucuaaacuaaacuagagguauagguggacc

SEQ ID NO: 125531 - RNA, 32 nt, Homo Sapiens
ugauauguuaggcuggggcauucuuuacaccu

SEQ ID NO: 125532 - RNA, 32 nt, Homo Sapiens
gucauacuaucuacucuccucaucucuaacag

SEQ ID NO: 125533 - RNA, 32 nt, Homo Sapiens
auaaagagguaauuuuucuccuccucccaguc

SEQ ID NO: 125534 - RNA, 32 nt, Homo Sapiens
auggcucugucaaugucaggcccgagaacagc

SEQ ID NO: 125535 - RNA, 32 nt, Homo Sapiens
aaacacauuauuuugcagaaauagguguuuuu

SEQ ID NO: 125536 - RNA, 32 nt, Homo Sapiens
gauucucauugccuucggcccuguuccccaag

SEQ ID NO: 125537 - RNA, 32 nt, Homo Sapiens
acaugggggugacaccacagagagaaccugug

SEQ ID NO: 125538 - RNA, 32 nt, Homo Sapiens
gcaguguuuucucuccuuuucugggccuccuc

SEQ ID NO: 125539 - RNA, 32 nt, Homo Sapiens
ggggagggcuuaggugcagaagggcaggcugg

SEQ ID NO: 125540 - RNA, 32 nt, Homo Sapiens
aaauuaauugaguuuuauuuuacaaugacagg

SEQ ID NO: 125541 - RNA, 32 nt, Homo Sapiens
aaccucguuaggugaugucgucuugcaaacau

SEQ ID NO: 125542 - RNA, 32 nt, Homo Sapiens
uguaagcuuuuguaguacauguuuuuacuaau

SEQ ID NO: 125543 - RNA, 32 nt, Homo Sapiens
augggccuccgcccgcgccgccccgaggauga

SEQ ID NO: 125544 - RNA, 32 nt, Homo Sapiens
uauaaaaaagaggucuucauuuagacauguga

SEQ ID NO: 125545 - RNA, 32 nt, Homo Sapiens
ugcuuucuaauuuugcagaucuuuacauuuuu

SEQ ID NO: 125546 - RNA, 32 nt, Homo Sapiens
auggagggcucaggggucuucccugcagaggu

SEQ ID NO: 125547 - RNA, 32 nt, Homo Sapiens
gguggcggcgguggccggaggcggcggugccu

SEQ ID NO: 125548 - RNA, 30 nt, Homo Sapiens
agcacaggcaggccucgccccucccuugcu

SEQ ID NO: 125549 - RNA, 32 nt, Homo Sapiens
ugcaugucccuucccuuccccagcccugccag

SEQ ID NO: 125550 - RNA, 32 nt, Homo Sapiens
ccaggcgcaccucccccggccgccgaccgcuc

SEQ ID NO: 125551 - RNA, 32 nt, Homo Sapiens
augaacucauugaaacaauuuaggggaaugag

SEQ ID NO: 125552 - RNA, 32 nt, Homo Sapiens
uauuugaugagauaaacuuaaugucauuggcc

SEQ ID NO: 125553 - RNA, 32 nt, Homo Sapiens
ugcuuugcaaauuguugaaacuuuugauuuuc

SEQ ID NO: 125554 - RNA, 32 nt, Homo Sapiens
caccaccaaacacaguguaugaaggggggcgg

SEQ ID NO: 125555 - RNA, 30 nt, Homo Sapiens
cccagauagcaaacaggggaaaccacaguc

SEQ ID NO: 125556 - RNA, 31 nt, Homo Sapiens
cgggcggccggcgaaacuccaagggcggacc

SEQ ID NO: 125557 - RNA, 32 nt, Homo Sapiens
augaggucaggagaucgcgaccauccuggcua

SEQ ID NO: 125558 - RNA, 32 nt, Homo Sapiens
cggccgggccuugauuuuuuggcggggaccgu

SEQ ID NO: 125559 - RNA, 32 nt, Homo Sapiens
ugcucaucuucaguaugucagcuuuaagguug

SEQ ID NO: 125560 - RNA, 32 nt, Homo Sapiens
ccaucucuccuccaggccccccggggaggggg

SEQ ID NO: 125561 - RNA, 32 nt, Homo Sapiens
aucguuuugguacuguaucuugaaacuuguga

SEQ ID NO: 125562 - RNA, 32 nt, Homo Sapiens
uggcuuccuggcggcccaggccuugccucccu

SEQ ID NO: 125563 - RNA, 32 nt, Homo Sapiens
ucagcaaaaagcaaaaucauuuuauaugucaa

SEQ ID NO: 125564 - RNA, 32 nt, Homo Sapiens
aauauaacucagaaaacauaagaauauuccuu

SEQ ID NO: 125565 - RNA, 32 nt, Homo Sapiens
ugcuucuucugaguacucugggacauacagcu

SEQ ID NO: 125566 - RNA, 32 nt, Homo Sapiens
uuccauauugugaaccuguguacgcacacaca

SEQ ID NO: 125567 - RNA, 32 nt, Homo Sapiens
gucuguggaaaccuuggccauggcaucgauau

SEQ ID NO: 125568 - RNA, 32 nt, Homo Sapiens
gaccaucccuagggguucugugcauccaucca

SEQ ID NO: 125569 - RNA, 32 nt, Homo Sapiens
auuucaaaagaacauucuuauauuuuaucaag

SEQ ID NO: 125570 - RNA, 32 nt, Homo Sapiens
ugaugaacugguacagaagagcacuuggcacu

SEQ ID NO: 125571 - RNA, 32 nt, Homo Sapiens
cacaucggguugacugucuuuguuuugucauu

SEQ ID NO: 125572 - RNA, 32 nt, Homo Sapiens
caauugucccaauaaugcccuuuauagcuacc

SEQ ID NO: 125573 - RNA, 32 nt, Homo Sapiens
ggaaaaauuaucuauuucuccauuacccacug

SEQ ID NO: 125574 - RNA, 32 nt, Homo Sapiens
acgucacgucacuccccacacggaguaggagc

SEQ ID NO: 125575 - RNA, 32 nt, Homo Sapiens
cccucccggacggggcggcuggccgggcagag

SEQ ID NO: 125576 - RNA, 32 nt, Homo Sapiens
ucacuuuccccaagcagaggagucaggacuug

SEQ ID NO: 125577 - RNA, 29 nt, Homo Sapiens
auggcuucguguuacucagccgugcccug

SEQ ID NO: 125578 - RNA, 32 nt, Homo Sapiens
accucaggguucucucagcugcacuuccaucc

SEQ ID NO: 125579 - RNA, 32 nt, Homo Sapiens
agacccaucugccuaucgaaauaugugcaagu

SEQ ID NO: 125580 - RNA, 32 nt, Homo Sapiens
cccuuccuuucccuccucccauucucccaagg

SEQ ID NO: 125581 - RNA, 32 nt, Homo Sapiens
uuaguauugaucguuucuuuuaaaaaugauuu

SEQ ID NO: 125582 - RNA, 32 nt, Homo Sapiens
uuuggaguucccuggagccuggccagcccuca

SEQ ID NO: 125583 - RNA, 32 nt, Homo Sapiens
guagggggacagcauaaggucuauguaaaacc

SEQ ID NO: 125584 - RNA, 32 nt, Homo Sapiens
uccgcuggagcagcugcagggcacuuggauca

SEQ ID NO: 125585 - RNA, 32 nt, Homo Sapiens
gaacuauuaaaauaaaauauuauauuuaaccc

SEQ ID NO: 125586 - RNA, 32 nt, Homo Sapiens
uccuagaccuucagcagcuagcagaggauguc

SEQ ID NO: 125587 - RNA, 32 nt, Homo Sapiens
ggaaaaaaugaaauaucugguuuuugcugaau

SEQ ID NO: 125588 - RNA, 32 nt, Homo Sapiens
gaucgcucuggcggccucaucaucucaggaug

SEQ ID NO: 125589 - RNA, 32 nt, Homo Sapiens
cauccuggagacuaaagauugcacuuuuuugu

SEQ ID NO: 125590 - RNA, 32 nt, Homo Sapiens
uagguacagaaauuauacuaaaaaagacaaac

SEQ ID NO: 125591 - RNA, 32 nt, Homo Sapiens
ucuuuuaccucaauuuuguuugcaauaaaugc

SEQ ID NO: 125592 - RNA, 32 nt, Homo Sapiens
cccgcccuggccgcgaagguggcacccgcagc

SEQ ID NO: 125593 - RNA, 32 nt, Homo Sapiens
cgagaaagcaacccagcgcgccgcccgcuccu

SEQ ID NO: 125594 - RNA, 32 nt, Homo Sapiens
agagcucaccugugucccagcccucugauggu

SEQ ID NO: 125595 - RNA, 32 nt, Homo Sapiens
gaaauuuauuuuuaauuuacccuguggaagau

SEQ ID NO: 125596 - RNA, 32 nt, Homo Sapiens
ggacaggaaggggcagagugagucacggccca

SEQ ID NO: 125597 - RNA, 32 nt, Homo Sapiens
cccaccacuccagugcauuuccgccuggcucc

SEQ ID NO: 125598 - RNA, 32 nt, Homo Sapiens
aaaguauuuaugugguauuaaaaauucauggu

SEQ ID NO: 125599 - RNA, 32 nt, Homo Sapiens
acaguugaauaaaaucgcuuacaaaacucaca

SEQ ID NO: 125600 - RNA, 32 nt, Homo Sapiens
gccccgcgcgcccgccccgcugcgcuaacucg

SEQ ID NO: 125601 - RNA, 32 nt, Homo Sapiens
ccauagcauuaagcccucgcccggcccggaca

SEQ ID NO: 125602 - RNA, 32 nt, Homo Sapiens
cagaccuacuguggcgggagggaggggcggcu

SEQ ID NO: 125603 - RNA, 32 nt, Homo Sapiens
augagccggcagugggcaggggaccaggcacc

SEQ ID NO: 125604 - RNA, 32 nt, Homo Sapiens
aguggcugcacugcugcccccugccacacagg

SEQ ID NO: 125605 - RNA, 32 nt, Homo Sapiens
ggaggccacgacucaggcgccacagcuggggg

SEQ ID NO: 125606 - RNA, 32 nt, Homo Sapiens
acacacacauauauuuuuuguuuguuuguuug

SEQ ID NO: 125607 - RNA, 32 nt, Homo Sapiens
accuguggcauuaggagaccuacuucaugugg

SEQ ID NO: 125608 - RNA, 32 nt, Homo Sapiens
gcucaacaaaaauucuauaaacguccauaagc

SEQ ID NO: 125609 - RNA, 32 nt, Homo Sapiens
acgggcgguguguacaaagggcagggacuuaa

SEQ ID NO: 125610 - RNA, 32 nt, Homo Sapiens
uucggaacaagacuguggucaaccuguuauuu

SEQ ID NO: 125611 - RNA, 32 nt, Homo Sapiens
uguuaugguccugaauuuuuuaugcuucauuu

SEQ ID NO: 125612 - RNA, 32 nt, Homo Sapiens
gcaggccccccuugugcagagccaggggucug

SEQ ID NO: 125613 - RNA, 32 nt, Homo Sapiens
gagacccaggacugaacucuccaggccuccuc

SEQ ID NO: 125614 - RNA, 32 nt, Homo Sapiens
uuauuacuucuguauauagagguaacaacgcu

SEQ ID NO: 125615 - RNA, 32 nt, Homo Sapiens
cccgaagcccucaggacagggcuggaggagaa

SEQ ID NO: 125616 - RNA, 32 nt, Homo Sapiens
agcaccaguuuaggggaguuaaggaauuauuu

SEQ ID NO: 125617 - RNA, 32 nt, Homo Sapiens
aaugcuacuauuucucugcacacacacgcaca

SEQ ID NO: 125618 - RNA, 32 nt, Homo Sapiens
gagccuaaugaaagggaaagucagcuuucaga

SEQ ID NO: 125619 - RNA, 28 nt, Homo Sapiens
ggugggguggcuaccugggacccuagca

SEQ ID NO: 125620 - RNA, 32 nt, Homo Sapiens
uuguaucuguugcaucuugucaauguuugacu

SEQ ID NO: 125621 - RNA, 32 nt, Homo Sapiens
uccaggagauggacuggcuggugcugggggag

SEQ ID NO: 125622 - RNA, 32 nt, Homo Sapiens
aauaggcaaaagaucugaauagauauuacucc

SEQ ID NO: 125623 - RNA, 32 nt, Homo Sapiens
gcccagcgcgccccuuccguguggccgcaugc

SEQ ID NO: 125624 - RNA, 32 nt, Homo Sapiens
gugggaggugauugaaucaugggggugguuuc

SEQ ID NO: 125625 - RNA, 32 nt, Homo Sapiens
ccccgggagcagcuccuucugcccgacucacu

SEQ ID NO: 125626 - RNA, 32 nt, Homo Sapiens
auaaguuggcauggcagggacaauggugggca

SEQ ID NO: 125627 - RNA, 32 nt, Homo Sapiens
ccgcuacggaggaggaggccacuacgaggagu

SEQ ID NO: 125628 - RNA, 32 nt, Homo Sapiens
cucuucuaaguacacugagcagggcccgcgcu

SEQ ID NO: 125629 - RNA, 32 nt, Homo Sapiens
uggccaguuaaaccucucuucuuuauaaauua

SEQ ID NO: 125630 - RNA, 32 nt, Homo Sapiens
agggcggugcccgggggugcugccccauggag

SEQ ID NO: 125631 - RNA, 32 nt, Homo Sapiens
ggaagggggauggagagcucgaggggacagug

SEQ ID NO: 125632 - RNA, 32 nt, Homo Sapiens
gguaccccgagcugcccucuugugacuccuug

SEQ ID NO: 125633 - RNA, 32 nt, Homo Sapiens
accggccuggccaacguggugaaacaccgucu

SEQ ID NO: 125634 - RNA, 32 nt, Homo Sapiens
cauucagucugcuagaggcagaggaagaaggg

SEQ ID NO: 125635 - RNA, 32 nt, Homo Sapiens
cccgccccgccagccgcccccguuagcgucau

SEQ ID NO: 125636 - RNA, 31 nt, Homo Sapiens
ccccgcugccaaagccugcccugauugccug

SEQ ID NO: 125637 - RNA, 32 nt, Homo Sapiens
gagggcccucgccuccacggaugcaccaugcc

SEQ ID NO: 125638 - RNA, 32 nt, Homo Sapiens
agugcugugcggucuccacacccuuacgguuu

SEQ ID NO: 125639 - RNA, 32 nt, Homo Sapiens
cgcgcacgcgaccgcauccgggcuccuucggc

SEQ ID NO: 125640 - RNA, 32 nt, Homo Sapiens
cacuggccggcgacacugacaccugagcagug

SEQ ID NO: 125641 - RNA, 32 nt, Homo Sapiens
auuguccaccuaauuucuuuuuauauaaugcc

SEQ ID NO: 125642 - RNA, 32 nt, Homo Sapiens
aagagcugccaucccggcuggccgcccggaug

SEQ ID NO: 125643 - RNA, 32 nt, Homo Sapiens
gcaugguggucacuguugcugcugguagagcc

SEQ ID NO: 125644 - RNA, 32 nt, Homo Sapiens
gcccccgccccucccccuacagauccuccgcg

SEQ ID NO: 125645 - RNA, 32 nt, Homo Sapiens
ggguaguuaaauuuugagauuaugcauagaaa

SEQ ID NO: 125646 - RNA, 32 nt, Homo Sapiens
caaaaucagguggucauuuacugcuuagagau

SEQ ID NO: 125647 - RNA, 32 nt, Homo Sapiens
ccacccacaacguguauuuuaaaccauuucuu

SEQ ID NO: 125648 - RNA, 32 nt, Homo Sapiens
ccaugcaacaggcccaguggcuuccccuucag

SEQ ID NO: 125649 - RNA, 32 nt, Homo Sapiens
cucccacgacguggggauuauuacaauucagg

SEQ ID NO: 125650 - RNA, 32 nt, Homo Sapiens
auagggaucucaugcuugcaaacuacacaaug

SEQ ID NO: 125651 - RNA, 32 nt, Homo Sapiens
cugcuuugcauucuucaaaaccauuccugaua

SEQ ID NO: 125652 - RNA, 32 nt, Homo Sapiens
uuguaaaaaugguaaguuaaugcauuugucau

SEQ ID NO: 125653 - RNA, 32 nt, Homo Sapiens
ggauuucuagaaugcugugauuaaaggagcca

SEQ ID NO: 125654 - RNA, 32 nt, Homo Sapiens
guuugucuugcugguuuaaauagaucuuucag

SEQ ID NO: 125655 - RNA, 32 nt, Homo Sapiens
uuugcuaaaaauuuacaaauuuucauuuugca

SEQ ID NO: 125656 - RNA, 32 nt, Homo Sapiens
uuucccccuggcauggauguccugcucagaca

SEQ ID NO: 125657 - RNA, 32 nt, Homo Sapiens
uuguugcagagcaaagaagaugggggagaacu

SEQ ID NO: 125658 - RNA, 32 nt, Homo Sapiens
agugagaauuguaagaaauaaaauaaacagaa

SEQ ID NO: 125659 - RNA, 32 nt, Homo Sapiens
cacagauguguuaaccauuuaagcagaucauc

SEQ ID NO: 125660 - RNA, 32 nt, Homo Sapiens
agccugagacgggaggcaggaaaggggcuaga

SEQ ID NO: 125661 - RNA, 32 nt, Homo Sapiens
cugcaaggcaaggcccuuucuguaugccccug

SEQ ID NO: 125662 - RNA, 32 nt, Homo Sapiens
auucuacaaguagggcccgaggugcgggggcc

SEQ ID NO: 125663 - RNA, 32 nt, Homo Sapiens
uauaacacaacacaaacaguaaucucuccccu

SEQ ID NO: 125664 - RNA, 32 nt, Homo Sapiens
acuggcgcaggcccggcccgcagcccgagcag

SEQ ID NO: 125665 - RNA, 32 nt, Homo Sapiens
aaagcuguaaaaaugaacuuuuaaaacuccca

SEQ ID NO: 125666 - RNA, 32 nt, Homo Sapiens
ccuguuuaucacauuugugaaggugaaauuau

SEQ ID NO: 125667 - RNA, 32 nt, Homo Sapiens
gacugggacguacguggaggcugcuggaccug

SEQ ID NO: 125668 - RNA, 32 nt, Homo Sapiens
cuggauggugccuacuguaggccuggagcucu

SEQ ID NO: 125669 - RNA, 32 nt, Homo Sapiens
cuuuuacgacccuaccccacccccuguuuuca

SEQ ID NO: 125670 - RNA, 32 nt, Homo Sapiens
augaaacagcugggucuuuggccauaagaagu

SEQ ID NO: 125671 - RNA, 32 nt, Homo Sapiens
guuauaauucuguguccccucugcaugcccuu

SEQ ID NO: 125672 - RNA, 32 nt, Homo Sapiens
cuaugaaggguuuaguuuggccugggcuucuc

SEQ ID NO: 125673 - RNA, 32 nt, Homo Sapiens
gacccugccucaaaaacuaaaaauaaaaaaug

SEQ ID NO: 125674 - RNA, 32 nt, Homo Sapiens
caggggaggaucuggaggauccacuacugucu

SEQ ID NO: 125675 - RNA, 32 nt, Homo Sapiens
ucuccugacgccuccgccgcccgggucaugug

SEQ ID NO: 125676 - RNA, 32 nt, Homo Sapiens
guagguuauaugcaaauacugcaccauuuuuu

SEQ ID NO: 125677 - RNA, 32 nt, Homo Sapiens
gagggagaaugggaaccacccccucagucccc

SEQ ID NO: 125678 - RNA, 32 nt, Homo Sapiens
acguaggagcagcuuuucuucuaguuugaugu

SEQ ID NO: 125679 - RNA, 32 nt, Homo Sapiens
caaugggacacuuuagaccauuagacaauuga

SEQ ID NO: 125680 - RNA, 32 nt, Homo Sapiens
ggcacugcaggcccuccccacccaggacucca

SEQ ID NO: 125681 - RNA, 32 nt, Homo Sapiens
agguguucucugugggucugcccgccccaaac

SEQ ID NO: 125682 - RNA, 32 nt, Homo Sapiens
auauguaaaaacaguuuguauaguuggaauau

SEQ ID NO: 125683 - RNA, 32 nt, Homo Sapiens
gaauggcauggacuugcugaucaacagaagga

SEQ ID NO: 125684 - RNA, 32 nt, Homo Sapiens
gcauguaaucuuuuuucuuccuggacauaaag

SEQ ID NO: 125685 - RNA, 32 nt, Homo Sapiens
cagguucaacuaagaucucauaaagaaguaau

SEQ ID NO: 125686 - RNA, 32 nt, Homo Sapiens
augggugucuguggguuauuuaaaagaaauua

SEQ ID NO: 125687 - RNA, 32 nt, Homo Sapiens
ccuuaaagagcuuacauucaugugcuacuuua

SEQ ID NO: 125688 - RNA, 32 nt, Homo Sapiens
aagcauuuaugauauauuacuacuuauaauac

SEQ ID NO: 125689 - RNA, 32 nt, Homo Sapiens
cuugcucaugaccgacaaggguugugugaaga

SEQ ID NO: 125690 - RNA, 32 nt, Homo Sapiens
gugcccaaucccaauuaagugcuuugagguua

SEQ ID NO: 125691 - RNA, 32 nt, Homo Sapiens
uuuguaguuaauuuucauuacaauagaaacau

SEQ ID NO: 125692 - RNA, 32 nt, Homo Sapiens
ugagagcagaaucguaagagcuuugaauuuga

SEQ ID NO: 125693 - RNA, 32 nt, Homo Sapiens
uuccaggagggucuguccccagaugcucugcc

SEQ ID NO: 125694 - RNA, 32 nt, Homo Sapiens
augagccugaacugguugugcagaacaaacaa

SEQ ID NO: 125695 - RNA, 32 nt, Homo Sapiens
cugacggcugaagagggaagacccaaggcugg

SEQ ID NO: 125696 - RNA, 32 nt, Homo Sapiens
aaacacccaagccacaggauaccucagauggc

SEQ ID NO: 125697 - RNA, 32 nt, Homo Sapiens
ccgguuccggugggcucugaacccugaaaggc

SEQ ID NO: 125698 - RNA, 32 nt, Homo Sapiens
ccuaacccgcgcugcgggcagaccuggcugcc

SEQ ID NO: 125699 - RNA, 32 nt, Homo Sapiens
aggcggguuuccacccccaggacccccuuucc

SEQ ID NO: 125700 - RNA, 32 nt, Homo Sapiens
gaggcuauaucauauuuaucuuguggucuacc

SEQ ID NO: 125701 - RNA, 32 nt, Homo Sapiens
uucugcccuauaccaucaauaggggaagagug

SEQ ID NO: 125702 - RNA, 32 nt, Homo Sapiens
ucugauuuuuaaagaaugguuucaaucugguu

SEQ ID NO: 125703 - RNA, 32 nt, Homo Sapiens
cgggcagaucauuugaggucaggaguucgaga

SEQ ID NO: 125704 - RNA, 32 nt, Homo Sapiens
gccacguguguauauauaugacguuguacauu

SEQ ID NO: 125705 - RNA, 32 nt, Homo Sapiens
gcgucagggagucggagcugcccagccuccac

SEQ ID NO: 125706 - RNA, 32 nt, Homo Sapiens
uuuugaauauuuuuucugcuucuguucuguuc

SEQ ID NO: 125707 - RNA, 32 nt, Homo Sapiens
aagaccgaagagccaguaaccaguagcuccaa

SEQ ID NO: 125708 - RNA, 32 nt, Homo Sapiens
gcagccgggaugcacuaggcaaagccagcugg

SEQ ID NO: 125709 - RNA, 32 nt, Homo Sapiens
gcuagaaauccagauuuuauguguguguaauu

SEQ ID NO: 125710 - RNA, 32 nt, Homo Sapiens
ugggugggaaaggguugaugcucaucauuuau

SEQ ID NO: 125711 - RNA, 32 nt, Homo Sapiens
agaccccgagggugccuggccaguccacucca

SEQ ID NO: 125712 - RNA, 31 nt, Homo Sapiens
uccacucaggggagaaagugcugugcuucga

SEQ ID NO: 125713 - RNA, 32 nt, Homo Sapiens
auaugaccuaguuuuauauuucugggaggaaa

SEQ ID NO: 125714 - RNA, 32 nt, Homo Sapiens
cagaagucggcggcucuugggguucuggagca

SEQ ID NO: 125715 - RNA, 32 nt, Homo Sapiens
auauguagauauauuucaauuuaagcaaaaca

SEQ ID NO: 125716 - RNA, 32 nt, Homo Sapiens
aaagaagucacagauagaaacccaaauaaccu

SEQ ID NO: 125717 - RNA, 30 nt, Homo Sapiens
guucugccacuugcacugugcuugcuccua

SEQ ID NO: 125718 - RNA, 32 nt, Homo Sapiens
gugaaaauuccacugcccccagcccuuugcag

SEQ ID NO: 125719 - RNA, 32 nt, Homo Sapiens
auggacuccagaagaagaaacuguuucucuag

SEQ ID NO: 125720 - RNA, 32 nt, Homo Sapiens
aaaaaauuuuuccaaggcgagcuagagagaaa

SEQ ID NO: 125721 - RNA, 32 nt, Homo Sapiens
caccucucucuaguaagacaucugaaacucau

SEQ ID NO: 125722 - RNA, 32 nt, Homo Sapiens
uguauauuuguacagucuuuuagaccuauuca

SEQ ID NO: 125723 - RNA, 32 nt, Homo Sapiens
uguguauccaaauaagagcacauucugagaug

SEQ ID NO: 125724 - RNA, 32 nt, Homo Sapiens
cccuccuggcuguugcgacgcgggcuucugga

SEQ ID NO: 125725 - RNA, 32 nt, Homo Sapiens
acuguugucccuguuuuccuuugggggaauuu

SEQ ID NO: 125726 - RNA, 32 nt, Homo Sapiens
gugggagcugggccccugccagagacaacgug

SEQ ID NO: 125727 - RNA, 32 nt, Homo Sapiens
uguaauuuacuuuacuuguaugaauuuaacau

SEQ ID NO: 125728 - RNA, 32 nt, Homo Sapiens
uuagauuauuuucagauuuuggaauguuugca

SEQ ID NO: 125729 - RNA, 32 nt, Homo Sapiens
aggcgcgcaccaaguacgagucagcaggggcc

SEQ ID NO: 125730 - RNA, 32 nt, Homo Sapiens
ugucugggacgcccacaucccagaggccauuc

SEQ ID NO: 125731 - RNA, 32 nt, Homo Sapiens
cugguugacuauucuucaggcuuauacuguuc

SEQ ID NO: 125732 - RNA, 32 nt, Homo Sapiens
cacuucuguuggcacucaacccauuggacuca

SEQ ID NO: 125733 - RNA, 32 nt, Homo Sapiens
cagcuuuggaacgagaugcuauacuaauaagc

SEQ ID NO: 125734 - RNA, 32 nt, Homo Sapiens
cauauaucuauuacacuugggauugugcuuac

SEQ ID NO: 125735 - RNA, 32 nt, Homo Sapiens
cucagccuagaaaaaaggaggggaagcaggac

SEQ ID NO: 125736 - RNA, 32 nt, Homo Sapiens
acucagggcugcggccgggguccugcggggua

SEQ ID NO: 125737 - RNA, 32 nt, Homo Sapiens
cccaacuacucaggaggaugagguggggggau

SEQ ID NO: 125738 - RNA, 32 nt, Homo Sapiens
uuccuuugagggggauucugugccacagcagg

SEQ ID NO: 125739 - RNA, 32 nt, Homo Sapiens
cuauaguuauucugcugucauuauuaaagaug

SEQ ID NO: 125740 - RNA, 32 nt, Homo Sapiens
ggccaccaguucauggggagccagguccaagu

SEQ ID NO: 125741 - RNA, 32 nt, Homo Sapiens
guauuuaaucccaaaguguuguucugauuauc

SEQ ID NO: 125742 - RNA, 32 nt, Homo Sapiens
aaaagggacuccugggugucuuugugacuguu

SEQ ID NO: 125743 - RNA, 32 nt, Homo Sapiens
aaagcuaugaaccugggugcccgggcaacgcc

SEQ ID NO: 125744 - RNA, 32 nt, Homo Sapiens
ugcagugugugauuucugaggccauaucuuuu

SEQ ID NO: 125745 - RNA, 32 nt, Homo Sapiens
cgacaugaaacauauauauacuguguauaguu

SEQ ID NO: 125746 - RNA, 29 nt, Homo Sapiens
gaccagccugggcaacauggcaaaauccu

SEQ ID NO: 125747 - RNA, 32 nt, Homo Sapiens
guagcucucagucuaaugcuuucacauugcac

SEQ ID NO: 125748 - RNA, 32 nt, Homo Sapiens
ggaacgccuaauaaagcaaaaugugguuguuu

SEQ ID NO: 125749 - RNA, 32 nt, Homo Sapiens
gcugggggagauggccuucacccacgggaugc

SEQ ID NO: 125750 - RNA, 32 nt, Homo Sapiens
caggaggcggcugcgcggggcuggcgcgggca

SEQ ID NO: 125751 - RNA, 29 nt, Homo Sapiens
ugcugcuugggaggcagaggcaggagaau

SEQ ID NO: 125752 - RNA, 32 nt, Homo Sapiens
ccagccccucgcucucccggugaccugcugga

SEQ ID NO: 125753 - RNA, 32 nt, Homo Sapiens
cuggcagugggguuucggcagccucaaguauc

SEQ ID NO: 125754 - RNA, 32 nt, Homo Sapiens
gagagggacccgucgccaugggccgugugauc

SEQ ID NO: 125755 - RNA, 32 nt, Homo Sapiens
gcccgcucaucgccgcgauggggcuccuggac

SEQ ID NO: 125756 - RNA, 32 nt, Homo Sapiens
auauuccagacaccugcccuaauccucagccu

SEQ ID NO: 125757 - RNA, 32 nt, Homo Sapiens
gccacccuucuugcugccccaugaguguggca

SEQ ID NO: 125758 - RNA, 32 nt, Homo Sapiens
gcguuuauuuaguuguuaggauuuuguguuuu

SEQ ID NO: 125759 - RNA, 32 nt, Homo Sapiens
guugcccaauucaacagugccagcauuccaac

SEQ ID NO: 125760 - RNA, 32 nt, Homo Sapiens
aaaguacugagggucuuaaguuugaagugucc

SEQ ID NO: 125761 - RNA, 32 nt, Homo Sapiens
aucacuguuucucagaaaaacaaaacaaaaca

SEQ ID NO: 125762 - RNA, 32 nt, Homo Sapiens
guaaaagaaauguauuaauguauguaggagcu

SEQ ID NO: 125763 - RNA, 32 nt, Homo Sapiens
accucagcuggcaggaggccaagccucuggcc

SEQ ID NO: 125764 - RNA, 32 nt, Homo Sapiens
cccagagcuaaccccugaacacccaggcgggc

SEQ ID NO: 125765 - RNA, 32 nt, Homo Sapiens
aguuaguuucagaacaauuacucaugccuucc

SEQ ID NO: 125766 - RNA, 32 nt, Homo Sapiens
ccucugauuuaaaaguaaccccuuugaaacau

SEQ ID NO: 125767 - RNA, 32 nt, Homo Sapiens
ugucugugaacaggccuagggguuucugaccc

SEQ ID NO: 125768 - RNA, 32 nt, Homo Sapiens
gagugggcggugccagcgugccaggagccaug

SEQ ID NO: 125769 - RNA, 32 nt, Homo Sapiens
gaccacuaucauggagacugcgagcgagcaga

SEQ ID NO: 125770 - RNA, 32 nt, Homo Sapiens
cugagacaaggcaagucccuucugccuaugag

SEQ ID NO: 125771 - RNA, 32 nt, Homo Sapiens
gagcuuagggauucuccccaccccagccccac

SEQ ID NO: 125772 - RNA, 32 nt, Homo Sapiens
caucucugaugaugcaugauguugaccaguuu

SEQ ID NO: 125773 - RNA, 32 nt, Homo Sapiens
uguaugucuucuuuuaagaagugucuguucau

SEQ ID NO: 125774 - RNA, 32 nt, Homo Sapiens
gaccaugguugaccaugguuaacugagacugc

SEQ ID NO: 125775 - RNA, 32 nt, Homo Sapiens
ucccauucuccaucccccacgaccuauaccag

SEQ ID NO: 125776 - RNA, 32 nt, Homo Sapiens
agugcagcggcgggcugaagggcuccucaagu

SEQ ID NO: 125777 - RNA, 32 nt, Homo Sapiens
acuaaauuguauuguccuauuauauuacuuuu

SEQ ID NO: 125778 - RNA, 32 nt, Homo Sapiens
ugcuuaaugaccguuuagccacugccgucggu

SEQ ID NO: 125779 - RNA, 32 nt, Homo Sapiens
gaaaggucaauacugcccucucacccugagau

SEQ ID NO: 125780 - RNA, 32 nt, Homo Sapiens
aaauuuacaucggugguauugcaggaauuuuu

SEQ ID NO: 125781 - RNA, 32 nt, Homo Sapiens
uaagaggcauacaauauauaauaaucacauua

SEQ ID NO: 125782 - RNA, 32 nt, Homo Sapiens
uuacagaaacacaacuaagaauaucaaguauu

SEQ ID NO: 125783 - RNA, 32 nt, Homo Sapiens
uccuggccacugggcuuggaugcuucgggcuu

SEQ ID NO: 125784 - RNA, 32 nt, Homo Sapiens
uaauuuucaugaaaagaaauguugacaccagu

SEQ ID NO: 125785 - RNA, 32 nt, Homo Sapiens
cagcugcuagauaucuuaucagagcucagauu

SEQ ID NO: 125786 - RNA, 32 nt, Homo Sapiens
ccuguggcccuggcauccaaauggcugcuuuu

SEQ ID NO: 125787 - RNA, 32 nt, Homo Sapiens
ggcacugagaaaccauguaugaccacaauaaa

SEQ ID NO: 125788 - RNA, 32 nt, Homo Sapiens
cuccagacguggcuccuucuccuuucucagug

SEQ ID NO: 125789 - RNA, 32 nt, Homo Sapiens
uaauggauauuuuuauuucuagaacucugaca

SEQ ID NO: 125790 - RNA, 32 nt, Homo Sapiens
gggcagaagcaggaggaucauuugagcccaga

SEQ ID NO: 125791 - RNA, 32 nt, Homo Sapiens
cugggccaugucggcgccgccggcccugcaga

SEQ ID NO: 125792 - RNA, 32 nt, Homo Sapiens
acuccauuuaggaugcugucguuuugcuacug

SEQ ID NO: 125793 - RNA, 32 nt, Homo Sapiens
caaucauagaaagguugcaggaaacaagguca

SEQ ID NO: 125794 - RNA, 32 nt, Homo Sapiens
ccuggggcagcaggcccaggccccacccucga

SEQ ID NO: 125795 - RNA, 32 nt, Homo Sapiens
gcuuugcagcggggacuucggcggcggcgccu

SEQ ID NO: 125796 - RNA, 32 nt, Homo Sapiens
ccugcccuuuggugcugggcuggcgucccgca

SEQ ID NO: 125797 - RNA, 32 nt, Homo Sapiens
uuguuuuuuuaccaccuggugaaucagccaua

SEQ ID NO: 125798 - RNA, 32 nt, Homo Sapiens
aagggaaucauggaucaguuuucuuucgcucc

SEQ ID NO: 125799 - RNA, 32 nt, Homo Sapiens
cuuugucaauuugggaauuauuauuauuaauu

SEQ ID NO: 125800 - RNA, 32 nt, Homo Sapiens
uccauuuucagaugaauauuacauagagggug

SEQ ID NO: 125801 - RNA, 32 nt, Homo Sapiens
aaaugauccuuguuaaauucaggguugaaacg

SEQ ID NO: 125802 - RNA, 32 nt, Homo Sapiens
aaacugugcgagcacaacacacacaauccuuu

SEQ ID NO: 125803 - RNA, 32 nt, Homo Sapiens
aaucuaaaccaucauuugaaaggcugcugaau

SEQ ID NO: 125804 - RNA, 32 nt, Homo Sapiens
ccccuuugcgcggcuggcgcggccagccggcc

SEQ ID NO: 125805 - RNA, 32 nt, Homo Sapiens
caaggccaacuucaacccguauggaagaugug

SEQ ID NO: 125806 - RNA, 32 nt, Homo Sapiens
ugguagccggucugggucuccaggaagaguuc

SEQ ID NO: 125807 - RNA, 32 nt, Homo Sapiens
gggcagcgggcgcccgcggguucgucucuggc

SEQ ID NO: 125808 - RNA, 32 nt, Homo Sapiens
gagaugcacucauuuaaaucugcauucaguga

SEQ ID NO: 125809 - RNA, 32 nt, Homo Sapiens
auuuucucauuuccaaagacccagagucucag

SEQ ID NO: 125810 - RNA, 27 nt, Homo Sapiens
cugcaaccccccuucagcccccacccc

SEQ ID NO: 125811 - RNA, 32 nt, Homo Sapiens
ccggggccuccucuccuccucucaggcagcag

SEQ ID NO: 125812 - RNA, 32 nt, Homo Sapiens
accacaauaaaaauccauuuugugaaaggaaa

SEQ ID NO: 125813 - RNA, 32 nt, Homo Sapiens
accaccacagucagcaucgacaggggcacagc

SEQ ID NO: 125814 - RNA, 32 nt, Homo Sapiens
ugaucuaaauguuuaaugcuaaagguauaucg

SEQ ID NO: 125815 - RNA, 32 nt, Homo Sapiens
aauuguucaaaaauaaccuuuuugucuuuuaa

SEQ ID NO: 125816 - RNA, 32 nt, Homo Sapiens
cuguguuggccgggcuggucuccagcuccuaa

SEQ ID NO: 125817 - RNA, 32 nt, Homo Sapiens
cgcugccccucgccgcggcgaugaccucgcug

SEQ ID NO: 125818 - RNA, 32 nt, Homo Sapiens
augaacccaucaagaccacgauccuaccggga

SEQ ID NO: 125819 - RNA, 32 nt, Homo Sapiens
cuaaccaguuaaucaaaccaaccauaguacua

SEQ ID NO: 125820 - RNA, 32 nt, Homo Sapiens
cuccaguguucccuccuugagagcugagcugc

SEQ ID NO: 125821 - RNA, 32 nt, Homo Sapiens
uguauagugucuauuaucacauuaaucucaaa

SEQ ID NO: 125822 - RNA, 32 nt, Homo Sapiens
gugcuuuuauuauauccauuuuacagaugaga

SEQ ID NO: 125823 - RNA, 32 nt, Homo Sapiens
aaaacuuuuauguaaaaaagugcaccuuuagu

SEQ ID NO: 125824 - RNA, 32 nt, Homo Sapiens
ggugaggcaggcacagccccccgcccccaugg

SEQ ID NO: 125825 - RNA, 32 nt, Homo Sapiens
aaaguuucuuagcugacuuuggcuuucacauu

SEQ ID NO: 125826 - RNA, 32 nt, Homo Sapiens
ccggaagcgggagaggaagcgggaaguuugug

SEQ ID NO: 125827 - RNA, 32 nt, Homo Sapiens
uaggagucaucagaucuaggcuucaucauuuu

SEQ ID NO: 125828 - RNA, 32 nt, Homo Sapiens
uacuauguaaauuuaaagaagucauaaacagc

SEQ ID NO: 125829 - RNA, 32 nt, Homo Sapiens
cucagcuaggauguuacaccaucauugucgaa

SEQ ID NO: 125830 - RNA, 32 nt, Homo Sapiens
uuuccuauauguuuauacuuugauuauaaaaa

SEQ ID NO: 125831 - RNA, 32 nt, Homo Sapiens
uagagagagcgcgcucugcucccugccuuugc

SEQ ID NO: 125832 - RNA, 32 nt, Homo Sapiens
cuuagcauuuaaguagcaacauugcgguuuuc

SEQ ID NO: 125833 - RNA, 32 nt, Homo Sapiens
uuuaggggaaucugaaaugccuuaauauuaac

SEQ ID NO: 125834 - RNA, 32 nt, Homo Sapiens
gucagcugggccgcagcuccuccggcucugca

SEQ ID NO: 125835 - RNA, 32 nt, Homo Sapiens
ggcuuucugugugacucgggaguucuuccgug

SEQ ID NO: 125836 - RNA, 32 nt, Homo Sapiens
aggggcgggggaaaggaggcggcagccaggcu

SEQ ID NO: 125837 - RNA, 32 nt, Homo Sapiens
uguuguugagacggagucuuguucugcugccc

SEQ ID NO: 125838 - RNA, 32 nt, Homo Sapiens
gccacugcgcccaguauauauccaccacuuua

SEQ ID NO: 125839 - RNA, 32 nt, Homo Sapiens
cugaucugccagccuugcugccuuuuguugcu

SEQ ID NO: 125840 - RNA, 32 nt, Homo Sapiens
cugggcugaguagauaaaaaacaucaucgcuc

SEQ ID NO: 125841 - RNA, 32 nt, Homo Sapiens
cccucccgcccgcaacuccgccgcccaccaug

SEQ ID NO: 125842 - RNA, 32 nt, Homo Sapiens
aucaggaguauuuugagggagauaugauuaua

SEQ ID NO: 125843 - RNA, 32 nt, Homo Sapiens
aaauuggguuguauccgagugcccuaacuuga

SEQ ID NO: 125844 - RNA, 32 nt, Homo Sapiens
cacguguacagcugcagucuuuguagccagaa

SEQ ID NO: 125845 - RNA, 32 nt, Homo Sapiens
agaaagcccguccacacccuggccaaacgcgu

SEQ ID NO: 125846 - RNA, 32 nt, Homo Sapiens
aacaaauaguguuauccuuuuacaauuaacug

SEQ ID NO: 125847 - RNA, 32 nt, Homo Sapiens
cgugcccuggccccagccccagccaacgggac

SEQ ID NO: 125848 - RNA, 29 nt, Homo Sapiens
agaccauggauauguuguuuaacgguacc

SEQ ID NO: 125849 - RNA, 32 nt, Homo Sapiens
uaguacacaauauauacauauaugaaaucauc

SEQ ID NO: 125850 - RNA, 32 nt, Homo Sapiens
cugugagcacuacucugaagguuuguguuuug

SEQ ID NO: 125851 - RNA, 32 nt, Homo Sapiens
cauaauacuugaaaaauaaaaaugaacaagcu

SEQ ID NO: 125852 - RNA, 32 nt, Homo Sapiens
uaauacaguacugccaccagauuuuuuauuac

SEQ ID NO: 125853 - RNA, 32 nt, Homo Sapiens
gagggacagucaguuuuaggguugccuguauc

SEQ ID NO: 125854 - RNA, 32 nt, Homo Sapiens
cugguuuuuguauaggaaaugucauaaaaaua

SEQ ID NO: 125855 - RNA, 32 nt, Homo Sapiens
ucccuccgccgcgcugcgccauggcgcggcgc

SEQ ID NO: 125856 - RNA, 32 nt, Homo Sapiens
guuccucgccccacagcuuugcacccugccug

SEQ ID NO: 125857 - RNA, 32 nt, Homo Sapiens
gcgacaaaaugaagauauucgugggcaacguc

SEQ ID NO: 125858 - RNA, 32 nt, Homo Sapiens
guaccaacuaccucacaggcauggcacggagg

SEQ ID NO: 125859 - RNA, 32 nt, Homo Sapiens
aggauaauuugguggguaggggaccagugagu

SEQ ID NO: 125860 - RNA, 32 nt, Homo Sapiens
uuccuuggugaaaaaaucuauacuccucucac

SEQ ID NO: 125861 - RNA, 32 nt, Homo Sapiens
gagggccccgguuccccagacuucuccacgcg

SEQ ID NO: 125862 - RNA, 32 nt, Homo Sapiens
ggguaagggcgcauggaauggggcuaaggugg

SEQ ID NO: 125863 - RNA, 32 nt, Homo Sapiens
caggauaauaucuuugaugacuucugaaaguu

SEQ ID NO: 125864 - RNA, 32 nt, Homo Sapiens
guguccuggggugacgucccuugugacaacac

SEQ ID NO: 125865 - RNA, 32 nt, Homo Sapiens
guacguguaaaauuaugaucaaauaaauuugu

SEQ ID NO: 125866 - RNA, 32 nt, Homo Sapiens
uuauuuaaaaauuuaaauuuguuuuuaaaauu

SEQ ID NO: 125867 - RNA, 32 nt, Homo Sapiens
aguguucauuuuuaacauuccuccuccaauug

SEQ ID NO: 125868 - RNA, 32 nt, Homo Sapiens
uucacuggacgaauuaagccugcacucauaug

SEQ ID NO: 125869 - RNA, 32 nt, Homo Sapiens
gccaggccaggccuggggccccggggccugac

SEQ ID NO: 125870 - RNA, 32 nt, Homo Sapiens
acuaucauuuuucacuuacgguauuuguaaau

SEQ ID NO: 125871 - RNA, 32 nt, Homo Sapiens
ggggagcugcggcuguugccgccgggcugcgc

SEQ ID NO: 125872 - RNA, 32 nt, Homo Sapiens
cauacugccuucugacagacuggguuaagcua

SEQ ID NO: 125873 - RNA, 32 nt, Homo Sapiens
guagaugccugaccuccaccguaccuccacau

SEQ ID NO: 125874 - RNA, 32 nt, Homo Sapiens
cacccuugccccagccccugccugguccugcc

SEQ ID NO: 125875 - RNA, 32 nt, Homo Sapiens
uccuugcaaucaguguuaagcauucagaauga

SEQ ID NO: 125876 - RNA, 32 nt, Homo Sapiens
uacguauuagagaaacaaauccaucuuugaau

SEQ ID NO: 125877 - RNA, 32 nt, Homo Sapiens
gcuaugcuaauuuuuguauuuuucauagagac

SEQ ID NO: 125878 - RNA, 32 nt, Homo Sapiens
acagcagccuggaagccucggcaggaccccug

SEQ ID NO: 125879 - RNA, 32 nt, Homo Sapiens
uacaggagucagggcagacggcagauguggcu

SEQ ID NO: 125880 - RNA, 32 nt, Homo Sapiens
ucaucaaacauaaaguuuaaugugauggaggc

SEQ ID NO: 125881 - RNA, 32 nt, Homo Sapiens
uaaagauuuguaucuuuuuuuggauuauuuuu

SEQ ID NO: 125882 - RNA, 32 nt, Homo Sapiens
ugucugaggacacccuggccuacgcgcuggug

SEQ ID NO: 125883 - RNA, 32 nt, Homo Sapiens
gcaggcgaacagagcucucucuggaucagcuu

SEQ ID NO: 125884 - RNA, 32 nt, Homo Sapiens
guuguguucagcccggccccgcugcgccuguc

SEQ ID NO: 125885 - RNA, 32 nt, Homo Sapiens
aaaacaagcucaaaaccaaauuccaggaagau

SEQ ID NO: 125886 - RNA, 32 nt, Homo Sapiens
gacucucguaagucagccagacucccaagcag

SEQ ID NO: 125887 - RNA, 32 nt, Homo Sapiens
uuggaaaacauaugaaauauaaauuaucugaa

SEQ ID NO: 125888 - RNA, 32 nt, Homo Sapiens
uuauacacagaaacagaauaaccacuagggua

SEQ ID NO: 125889 - RNA, 32 nt, Homo Sapiens
uucuucagggacccggcccugcccugccgccc

SEQ ID NO: 125890 - RNA, 32 nt, Homo Sapiens
agccuuccuaguugguuuuucuaggccuggug

SEQ ID NO: 125891 - RNA, 32 nt, Homo Sapiens
cugaugaggauacaaacuggauauuuuauaca

SEQ ID NO: 125892 - RNA, 32 nt, Homo Sapiens
gggucugccaugugcauagaaagcacaguaug

SEQ ID NO: 125893 - RNA, 32 nt, Homo Sapiens
gcugaagcuauuuuaaaacauuauuuugacua

SEQ ID NO: 125894 - RNA, 32 nt, Homo Sapiens
agccaagcccucacuguacagaagagugagag

SEQ ID NO: 125895 - RNA, 32 nt, Homo Sapiens
uuaccucauaucuauucuuuacaguaucacuu

SEQ ID NO: 125896 - RNA, 32 nt, Homo Sapiens
uggcugugucuggccuaggagaccacagugag

SEQ ID NO: 125897 - RNA, 32 nt, Homo Sapiens
acaguaaauauuugcugacuucauuuauucug

SEQ ID NO: 125898 - RNA, 32 nt, Homo Sapiens
ggguucaacaaauguuguuuuacuuccucacu

SEQ ID NO: 125899 - RNA, 32 nt, Homo Sapiens
gcugcucaggguggucauuccugcucacccuc

SEQ ID NO: 125900 - RNA, 32 nt, Homo Sapiens
cuccucccaauccccacagacacacacauuga

SEQ ID NO: 125901 - RNA, 32 nt, Homo Sapiens
aacaggcucccggcagcccccgcggcccggag

SEQ ID NO: 125902 - RNA, 32 nt, Homo Sapiens
gcacagcgagguuuugcucagcccuugucucg

SEQ ID NO: 125903 - RNA, 32 nt, Homo Sapiens
aagcuucuuaccaauuuccccaacuauguugc

SEQ ID NO: 125904 - RNA, 32 nt, Homo Sapiens
cuccacuucuuggccgcaccuuccaugacagc

SEQ ID NO: 125905 - RNA, 32 nt, Homo Sapiens
cagcuguggcgggcgcacgaggcgcugcgaac

SEQ ID NO: 125906 - RNA, 32 nt, Homo Sapiens
ucacuguuuuaacaagagacaagguaauguuc

SEQ ID NO: 125907 - RNA, 32 nt, Homo Sapiens
uugcgcgccgacgccgccgcucgcuugugaaa

SEQ ID NO: 125908 - RNA, 32 nt, Homo Sapiens
aaugagaagauaaggcaucuagaguauaucug

SEQ ID NO: 125909 - RNA, 32 nt, Homo Sapiens
uuuuggcagaggguggggccggugccucugga

SEQ ID NO: 125910 - RNA, 32 nt, Homo Sapiens
cuccguacuuucuccuugcuucacuggccaca

SEQ ID NO: 125911 - RNA, 32 nt, Homo Sapiens
ggcagcugcuccagggaagggugugggaggag

SEQ ID NO: 125912 - RNA, 32 nt, Homo Sapiens
ugcccucccucuggacccccagccaggggcuu

SEQ ID NO: 125913 - RNA, 32 nt, Homo Sapiens
acgcaugucauucacugccuugccacuccauc

SEQ ID NO: 125914 - RNA, 32 nt, Homo Sapiens
ucaccuaaagagauuucuuuuaaaaacuuucu

SEQ ID NO: 125915 - RNA, 32 nt, Homo Sapiens
caggaucagacucucugaaacugcaaauggaa

SEQ ID NO: 125916 - RNA, 32 nt, Homo Sapiens
ucugauacucuuuuuauuauuuucuuguauag

SEQ ID NO: 125917 - RNA, 32 nt, Homo Sapiens
ccuaccaguccccaguuccccagcccugcugu

SEQ ID NO: 125918 - RNA, 32 nt, Homo Sapiens
cuguccgcgcgcccugcaucccggccccgggc

SEQ ID NO: 125919 - RNA, 32 nt, Homo Sapiens
gcucacugcaaccucccugccugauucuccug

SEQ ID NO: 125920 - RNA, 32 nt, Homo Sapiens
cgggaucgcgggcgccggcugagccagcggcu

SEQ ID NO: 125921 - RNA, 32 nt, Homo Sapiens
cugccguuucaccgccuucucuacucaccuuc

SEQ ID NO: 125922 - RNA, 32 nt, Homo Sapiens
ggcacaacagagccgcuccccucuccucgccc

SEQ ID NO: 125923 - RNA, 32 nt, Homo Sapiens
agggaccgauggacgaggggacaggcuggugg

SEQ ID NO: 125924 - RNA, 32 nt, Homo Sapiens
gaaggcgcgggccgagcagagccgggcguugg

SEQ ID NO: 125925 - RNA, 32 nt, Homo Sapiens
guucccaucuccuuucucugguacaauuucuu

SEQ ID NO: 125926 - RNA, 32 nt, Homo Sapiens
uauagauuuuaucugaaaaauuuuaagggcca

SEQ ID NO: 125927 - RNA, 31 nt, Homo Sapiens
uagcacaaggggaccauucagcaaugagugu

SEQ ID NO: 125928 - RNA, 32 nt, Homo Sapiens
gcagagcaccuuugcacaggaugcuggccuuu

SEQ ID NO: 125929 - RNA, 32 nt, Homo Sapiens
cgccccaaacgauuuuauaaucaauggauaaa

SEQ ID NO: 125930 - RNA, 32 nt, Homo Sapiens
aggagggaggauguaaauagccgcacaaaggg

SEQ ID NO: 125931 - RNA, 32 nt, Homo Sapiens
cuaugcuaugaauugcaaagaccuccauaaaa

SEQ ID NO: 125932 - RNA, 32 nt, Homo Sapiens
uuuuccauuuuucuuguuuccugauaauaaau

SEQ ID NO: 125933 - RNA, 32 nt, Homo Sapiens
cucauaucucucuccacccacccaaccgcccc

SEQ ID NO: 125934 - RNA, 32 nt, Homo Sapiens
cucaacgggaggcucagaaacaacagcaacag

SEQ ID NO: 125935 - RNA, 32 nt, Homo Sapiens
ccucugcguuuccagccuugcuccauccaauu

SEQ ID NO: 125936 - RNA, 32 nt, Homo Sapiens
agaggucacugacuuggcaaugccaaggucau

SEQ ID NO: 125937 - RNA, 32 nt, Homo Sapiens
uguacuuuauaaguauugguuuggguguuccu

SEQ ID NO: 125938 - RNA, 32 nt, Homo Sapiens
agggaggcuugcugaggcuucucuaaaggugg

SEQ ID NO: 125939 - RNA, 32 nt, Homo Sapiens
cagcaguucccgugcccucccucccacuggcu

SEQ ID NO: 125940 - RNA, 30 nt, Homo Sapiens
ugagauacaucugguacagaagcuugggag

SEQ ID NO: 125941 - RNA, 32 nt, Homo Sapiens
cacucccuguguuuguacagagcaaagcccaa

SEQ ID NO: 125942 - RNA, 32 nt, Homo Sapiens
uauuuuaaaaggaaggaauuguaagacuaagu

SEQ ID NO: 125943 - RNA, 32 nt, Homo Sapiens
uccucauaacaucagaauggcaagcaggcgaa

SEQ ID NO: 125944 - RNA, 32 nt, Homo Sapiens
aguugugagcagauuucuuuuauguguguggu

SEQ ID NO: 125945 - RNA, 32 nt, Homo Sapiens
uugcgguugcuuagaauaaaacuugcuacuag

SEQ ID NO: 125946 - RNA, 32 nt, Homo Sapiens
cgaacuaaagggaaccugaggccuucaaacag

SEQ ID NO: 125947 - RNA, 32 nt, Homo Sapiens
aauaccuggcuaccugugcagaugaucgcacc

SEQ ID NO: 125948 - RNA, 32 nt, Homo Sapiens
ugcugaggcggcggcuggggcuggggcggcug

SEQ ID NO: 125949 - RNA, 32 nt, Homo Sapiens
uuuguuaaaaggaaaacauagcuauaaauaaa

SEQ ID NO: 125950 - RNA, 32 nt, Homo Sapiens
ggcuguuguuggaaauguccuagguuuuauuu

SEQ ID NO: 125951 - RNA, 32 nt, Homo Sapiens
ccagaguggugcccggcccaccagggacugca

SEQ ID NO: 125952 - RNA, 32 nt, Homo Sapiens
gcuguggcuggccaggcggugcggcugggcgg

SEQ ID NO: 125953 - RNA, 32 nt, Homo Sapiens
augaguuuucuauuagaguuuuuugguuuuaa

SEQ ID NO: 125954 - RNA, 32 nt, Homo Sapiens
uuuuggggaaaggcugauggugaagccuccug

SEQ ID NO: 125955 - RNA, 32 nt, Homo Sapiens
aucauuuuuuaaauugcuggugagucugacac

SEQ ID NO: 125956 - RNA, 32 nt, Homo Sapiens
caguaauuguuccugccuccuccgccaccucc

SEQ ID NO: 125957 - RNA, 32 nt, Homo Sapiens
accugagacuggguaauuuauaaagaaaagau

SEQ ID NO: 125958 - RNA, 32 nt, Homo Sapiens
uauccucuauaaguuauuaaacgaguguaaug

SEQ ID NO: 125959 - RNA, 32 nt, Homo Sapiens
acauuucuggaggcuuaacucauuuaaggagc

SEQ ID NO: 125960 - RNA, 32 nt, Homo Sapiens
cggcucuucccaguccucuggacuaaaauggg

SEQ ID NO: 125961 - RNA, 32 nt, Homo Sapiens
ugagcugccgacggcgggggcuguggccgggu

SEQ ID NO: 125962 - RNA, 32 nt, Homo Sapiens
uuaaaggggcagaaauauauguagccaaguag

SEQ ID NO: 125963 - RNA, 32 nt, Homo Sapiens
acuauguuaaauaacauaugguauuuggcaaa

SEQ ID NO: 125964 - RNA, 32 nt, Homo Sapiens
gagacagagcuacagcgaacgagagagcggcg

SEQ ID NO: 125965 - RNA, 32 nt, Homo Sapiens
ggaggguugugcuacagaugauagaggauuuu

SEQ ID NO: 125966 - RNA, 32 nt, Homo Sapiens
agcauguucccucuccuguuugccacggaucc

SEQ ID NO: 125967 - RNA, 32 nt, Homo Sapiens
ggggagcgugagagaccgcgcagcggcgacag

SEQ ID NO: 125968 - RNA, 32 nt, Homo Sapiens
uuagaucuaaucugugcuaccuuauuaacuca

SEQ ID NO: 125969 - RNA, 32 nt, Homo Sapiens
gucuggcugccaggaagaagauauuccaggaa

SEQ ID NO: 125970 - RNA, 32 nt, Homo Sapiens
cuuucucuguuguaaauaccccucacggagga

SEQ ID NO: 125971 - RNA, 32 nt, Homo Sapiens
uagcaguuguuaagucuuccccgccccuucga

SEQ ID NO: 125972 - RNA, 32 nt, Homo Sapiens
ggguccuguccacagcccuagcugccagcaau

SEQ ID NO: 125973 - RNA, 32 nt, Homo Sapiens
cguaagucgaggagcaucugugauuuguccuc

SEQ ID NO: 125974 - RNA, 31 nt, Homo Sapiens
gaggcugggcacugcuuugggcgcgagacuu

SEQ ID NO: 125975 - RNA, 32 nt, Homo Sapiens
ucauuuucaacaaggaaaacuucuacuugucu

SEQ ID NO: 125976 - RNA, 32 nt, Homo Sapiens
auggcagccugccuaugcuguguguuugcuau

SEQ ID NO: 125977 - RNA, 32 nt, Homo Sapiens
agaagcacaaggaaaugagccaaaaggguguc

SEQ ID NO: 125978 - RNA, 32 nt, Homo Sapiens
ugauaggcuucgauuuccugugacacucugaa

SEQ ID NO: 125979 - RNA, 32 nt, Homo Sapiens
gggcucaucaugaagcgcuugggcuccgugca

SEQ ID NO: 125980 - RNA, 32 nt, Homo Sapiens
ggggcgccgaggggcggcgcgcggacauggag

SEQ ID NO: 125981 - RNA, 32 nt, Homo Sapiens
ucagagccuuacucccaaaguaccugcucacu

SEQ ID NO: 125982 - RNA, 32 nt, Homo Sapiens
cccugcggacgcccccgcuccucggcuccaga

SEQ ID NO: 125983 - RNA, 32 nt, Homo Sapiens
acauauuguauauauauucauauacaaacaug

SEQ ID NO: 125984 - RNA, 32 nt, Homo Sapiens
aauaaauagcuauauccauguacuguaguuuu

SEQ ID NO: 125985 - RNA, 32 nt, Homo Sapiens
gccgggugcuccugggcccugccuggcucccu

SEQ ID NO: 125986 - RNA, 32 nt, Homo Sapiens
cuagagaguuugggguuugguuuguggauuuc

SEQ ID NO: 125987 - RNA, 32 nt, Homo Sapiens
agaaaaauauauauucauaaaaaauauggugc

SEQ ID NO: 125988 - RNA, 32 nt, Homo Sapiens
ugucuccaugcuaggagcugccugcacccugg

SEQ ID NO: 125989 - RNA, 32 nt, Homo Sapiens
auccauugugauuauaucuguaucaggucagc

SEQ ID NO: 125990 - RNA, 32 nt, Homo Sapiens
ggacaggcacugggcaugcagccccacggccu

SEQ ID NO: 125991 - RNA, 32 nt, Homo Sapiens
agccuuugcauucucuauagccucugcagaga

SEQ ID NO: 125992 - RNA, 32 nt, Homo Sapiens
agacuuuaaaauuguuuguauuuauucccuaa

SEQ ID NO: 125993 - RNA, 32 nt, Homo Sapiens
ggcaugaacauguacuguucucuucuugaaca

SEQ ID NO: 125994 - RNA, 32 nt, Homo Sapiens
cagcagccgggcccgaucacccgccgcccggu

SEQ ID NO: 125995 - RNA, 32 nt, Homo Sapiens
gacuugacaguggccuggaaucaacaggagug

SEQ ID NO: 125996 - RNA, 32 nt, Homo Sapiens
cccuggguuuucugccccagccuccuccuucc

SEQ ID NO: 125997 - RNA, 32 nt, Homo Sapiens
uaauuaaagaauuuuuuuuuuaauaucacggu

SEQ ID NO: 125998 - RNA, 32 nt, Homo Sapiens
uccaguccuuuauucccuucugcauacugcaa

SEQ ID NO: 125999 - RNA, 32 nt, Homo Sapiens
cugcuuccuuccuucccugcaguugagacggg

SEQ ID NO: 126000 - RNA, 32 nt, Homo Sapiens
ggagguaucaaggagcauaauuaaacuuguca

SEQ ID NO: 126001 - RNA, 32 nt, Homo Sapiens
caauugaggcgaggccuuugggaguacuuugu

SEQ ID NO: 126002 - RNA, 32 nt, Homo Sapiens
cugacuuuuggauuucauggcauuccaggaag

SEQ ID NO: 126003 - RNA, 32 nt, Homo Sapiens
gaggguguuuuaaagcuagaguggucuuuauc

SEQ ID NO: 126004 - RNA, 32 nt, Homo Sapiens
cucucacacugucuggcagcucugugucugag

SEQ ID NO: 126005 - RNA, 32 nt, Homo Sapiens
uugccaagacaugauuuuuucuuauuguauuu

SEQ ID NO: 126006 - RNA, 32 nt, Homo Sapiens
aauguuugugucucaaugauaauuaaauuagc

SEQ ID NO: 126007 - RNA, 32 nt, Homo Sapiens
gguuucugucucccaguauaaucauauccagc

SEQ ID NO: 126008 - RNA, 32 nt, Homo Sapiens
cccuauggccccacacgggaauguguucaaac

SEQ ID NO: 126009 - RNA, 32 nt, Homo Sapiens
gcauggggccgcgguucuggggcggcccgagc

SEQ ID NO: 126010 - RNA, 30 nt, Homo Sapiens
gucuccggagguggcggggguguuggggac

SEQ ID NO: 126011 - RNA, 32 nt, Homo Sapiens
acaggaaaccagaaacaaaaugagucaguucg

SEQ ID NO: 126012 - RNA, 32 nt, Homo Sapiens
cguggucuagaccagggcugcucuuuccacuu

SEQ ID NO: 126013 - RNA, 32 nt, Homo Sapiens
agugcauuaguuuuaucuuguuuuuuaccgcu

SEQ ID NO: 126014 - RNA, 32 nt, Homo Sapiens
caauuuccauuucaucaguuuguuuuguuuuc

SEQ ID NO: 126015 - RNA, 32 nt, Homo Sapiens
cgccacgcgaucggcgaucugauuggcccgcg

SEQ ID NO: 126016 - RNA, 32 nt, Homo Sapiens
gaugacuuagauuucuaacaagaucaagcuag

SEQ ID NO: 126017 - RNA, 32 nt, Homo Sapiens
cgggaguuagcagcccagccaggccgcuggac

SEQ ID NO: 126018 - RNA, 32 nt, Homo Sapiens
aguagguucagcagaauaaacucuuuacaauu

SEQ ID NO: 126019 - RNA, 32 nt, Homo Sapiens
ggcuggcgccgcugggcagagccggugcgacg

SEQ ID NO: 126020 - RNA, 32 nt, Homo Sapiens
ucaggaaauggcaucgaccagccaccuccacc

SEQ ID NO: 126021 - RNA, 32 nt, Homo Sapiens
uuucugaaaggguaaagggcuuggucuggauu

SEQ ID NO: 126022 - RNA, 32 nt, Homo Sapiens
agggaagagacgauguaaaaauaauaaacaau

SEQ ID NO: 126023 - RNA, 30 nt, Homo Sapiens
gccagaugugggcggcggggcgcugggggc

SEQ ID NO: 126024 - RNA, 32 nt, Homo Sapiens
cuucggcuacaggaaggcaggaggggugaguc

SEQ ID NO: 126025 - RNA, 32 nt, Homo Sapiens
aauuuuagcucuuuucuuugcaagauauauca

SEQ ID NO: 126026 - RNA, 32 nt, Homo Sapiens
cccaugugccuguacccuccccuggucuacau

SEQ ID NO: 126027 - RNA, 32 nt, Homo Sapiens
ugugugaggguggggugggagggggcccagca

SEQ ID NO: 126028 - RNA, 32 nt, Homo Sapiens
uaguuuuccagaagauccacuuuuuacuuguu

SEQ ID NO: 126029 - RNA, 32 nt, Homo Sapiens
acccuggcgucccuccaggccuugccuccugc

SEQ ID NO: 126030 - RNA, 32 nt, Homo Sapiens
uuuccugaaaauaauugaaauaucuuacuuua

SEQ ID NO: 126031 - RNA, 32 nt, Homo Sapiens
guucuguuggagaaacgcuugguuuccggauc

SEQ ID NO: 126032 - RNA, 32 nt, Homo Sapiens
cagccugaagcccccaggaccccggucccugu

SEQ ID NO: 126033 - RNA, 32 nt, Homo Sapiens
ggcuucucugucaucugacuuuccucacucuu

SEQ ID NO: 126034 - RNA, 32 nt, Homo Sapiens
ucauuuuuauuuugauuuugauugaaugugag

SEQ ID NO: 126035 - RNA, 32 nt, Homo Sapiens
aacccgacaacaaccuuaaaguaggagagauu

SEQ ID NO: 126036 - RNA, 32 nt, Homo Sapiens
ucccugccccuucucuccccuguaaccuguuu

SEQ ID NO: 126037 - RNA, 32 nt, Homo Sapiens
cccucucccacuuuucccuuccucuuucccca

SEQ ID NO: 126038 - RNA, 31 nt, Homo Sapiens
acagaaagaaagaaaauauuugcaaaucaug

SEQ ID NO: 126039 - RNA, 32 nt, Homo Sapiens
gcugauuuucuuuuuaauauauuuagccaagu

SEQ ID NO: 126040 - RNA, 32 nt, Homo Sapiens
gcauccaauauaugguacucuuucuccuauag

SEQ ID NO: 126041 - RNA, 32 nt, Homo Sapiens
uuggggagggagaaaaguucuuagcacaaaug

SEQ ID NO: 126042 - RNA, 32 nt, Homo Sapiens
uguaaagacugggaugguuguguggaaaacuu

SEQ ID NO: 126043 - RNA, 30 nt, Homo Sapiens
ccgccacgcgcgcacacgccccucgaugac

SEQ ID NO: 126044 - RNA, 32 nt, Homo Sapiens
cccugagucaucacucuagaagaaucuguaca

SEQ ID NO: 126045 - RNA, 32 nt, Homo Sapiens
cucuauauaugaugggcuaggccucuauauau

SEQ ID NO: 126046 - RNA, 32 nt, Homo Sapiens
ccgcccgcucagcguccgccgccgccauggga

SEQ ID NO: 126047 - RNA, 32 nt, Homo Sapiens
aaugccugaugaucugaggugaaacaguuuca

SEQ ID NO: 126048 - RNA, 32 nt, Homo Sapiens
aggugugaaauauuuagaugaaauuuucucuu

SEQ ID NO: 126049 - RNA, 32 nt, Homo Sapiens
ugcugcugcggaacccaaagaugugcuccugu

SEQ ID NO: 126050 - RNA, 32 nt, Homo Sapiens
gguguucugcccggcucugcuuggucacagac

SEQ ID NO: 126051 - RNA, 32 nt, Homo Sapiens
cccugggaccagcugcccuacuucccagguuu

SEQ ID NO: 126052 - RNA, 31 nt, Homo Sapiens
gcugagaaauaaauguauauaaauauguagc

SEQ ID NO: 126053 - RNA, 32 nt, Homo Sapiens
ccagggcgauggcgcuaagggcggcgcggagc

SEQ ID NO: 126054 - RNA, 32 nt, Homo Sapiens
gaaacacauuuauaccucuguucaauaaaaau

SEQ ID NO: 126055 - RNA, 32 nt, Homo Sapiens
uuguguuaucacucugccuguguauagucaga

SEQ ID NO: 126056 - RNA, 32 nt, Homo Sapiens
caccugggaugacuuucgauuaugcuuuguuu

SEQ ID NO: 126057 - RNA, 32 nt, Homo Sapiens
ccccacaguaaggaugagaccccacuguguac

SEQ ID NO: 126058 - RNA, 32 nt, Homo Sapiens
caaauggaguacuuguauuccuguuccugaag

SEQ ID NO: 126059 - RNA, 32 nt, Homo Sapiens
ggagggcagcgcgcuuggcgcuucuccccucc

SEQ ID NO: 126060 - RNA, 32 nt, Homo Sapiens
uuuuaauggcaaaaaccgcaaucacuuuugcu

SEQ ID NO: 126061 - RNA, 32 nt, Homo Sapiens
guucccgagcgccuucccggugaccccgcagu

SEQ ID NO: 126062 - RNA, 32 nt, Homo Sapiens
auuaccuggugcaaaaugacucaucaauuccc

SEQ ID NO: 126063 - RNA, 32 nt, Homo Sapiens
caaggaaggugguggcucuuguaaguacaggg

SEQ ID NO: 126064 - RNA, 32 nt, Homo Sapiens
aguuuuucacuuuaacauaggccuaucccacu

SEQ ID NO: 126065 - RNA, 32 nt, Homo Sapiens
acagagcucccugccucuggcuucuccaccuu

SEQ ID NO: 126066 - RNA, 32 nt, Homo Sapiens
aauuccauagugggcucuggcuuuucuugaau

SEQ ID NO: 126067 - RNA, 32 nt, Homo Sapiens
cuccccacucuggggggcugcugcuguccagc

SEQ ID NO: 126068 - RNA, 32 nt, Homo Sapiens
ccuccaggucagcugcagcugcaaaaugacua

SEQ ID NO: 126069 - RNA, 32 nt, Homo Sapiens
ugcccaccgcggcuccagcagcuccaggcgcg

SEQ ID NO: 126070 - RNA, 32 nt, Homo Sapiens
cgcugcaaggcggcgaggcccgggccuggcgc

SEQ ID NO: 126071 - RNA, 32 nt, Homo Sapiens
ccugaggagauccagaggaaagagacggucuc

SEQ ID NO: 126072 - RNA, 32 nt, Homo Sapiens
ugucauuuguucuguuuguagaugagagacau

SEQ ID NO: 126073 - RNA, 32 nt, Homo Sapiens
gggguggggggcugaggauaggauggcucggg

SEQ ID NO: 126074 - RNA, 32 nt, Homo Sapiens
gugaauuguacauuucuguguuuuuuggaggu

SEQ ID NO: 126075 - RNA, 32 nt, Homo Sapiens
uccuggcccucccccaaccacguuuuucuuug

SEQ ID NO: 126076 - RNA, 32 nt, Homo Sapiens
gaauaaugugcucagggucaccauagcccauu

SEQ ID NO: 126077 - RNA, 32 nt, Homo Sapiens
ucugggugguggccaggcuauguggacuaggg

SEQ ID NO: 126078 - RNA, 32 nt, Homo Sapiens
ggccguuccgcggagcccggccgaggaggucc

SEQ ID NO: 126079 - RNA, 32 nt, Homo Sapiens
agugccuauucagaguuucagaauuuuaaaau

SEQ ID NO: 126080 - RNA, 32 nt, Homo Sapiens
ggaccaccccacuugcugccagccugucagug

SEQ ID NO: 126081 - RNA, 32 nt, Homo Sapiens
acugcaaagaaaacagaauguugacuguuagu

SEQ ID NO: 126082 - RNA, 32 nt, Homo Sapiens
gacagggcaauuggguauauaaacccauuucu

SEQ ID NO: 126083 - RNA, 32 nt, Homo Sapiens
ccacuagagcagccuccauaccuggaauccug

SEQ ID NO: 126084 - RNA, 32 nt, Homo Sapiens
agccgcuggggucgggggcccgggccuuacug

SEQ ID NO: 126085 - RNA, 32 nt, Homo Sapiens
cugcacauucgccagcagcauccugucauagu

SEQ ID NO: 126086 - RNA, 32 nt, Homo Sapiens
ugugccugcgcccgcgcuacgccccggcccuu

SEQ ID NO: 126087 - RNA, 32 nt, Homo Sapiens
aguggccuaaauccuuuuuaaaugacuuggcu

SEQ ID NO: 126088 - RNA, 32 nt, Homo Sapiens
gccgggccagaggagcucccggcaugucgcaa

SEQ ID NO: 126089 - RNA, 32 nt, Homo Sapiens
cggcaucggcccgagccgcggcccgcucccac

SEQ ID NO: 126090 - RNA, 32 nt, Homo Sapiens
ccugcaaucccgcagcagcagaaauguccauu

SEQ ID NO: 126091 - RNA, 32 nt, Homo Sapiens
gucaauuauuagaucuuauuuauuuucauaug

SEQ ID NO: 126092 - RNA, 32 nt, Homo Sapiens
ugacuuaaauguuuauauccuacuugugcaga

SEQ ID NO: 126093 - RNA, 32 nt, Homo Sapiens
ucacggggguggagggagccggagccugccuu

SEQ ID NO: 126094 - RNA, 30 nt, Homo Sapiens
uggacuggcugugcugcagguucuacucug

SEQ ID NO: 126095 - RNA, 32 nt, Homo Sapiens
gcggugccuagcgcgccgcgucucuccgcagg

SEQ ID NO: 126096 - RNA, 32 nt, Homo Sapiens
uuuccuaauuuucuuucuuuugaagauagauu

SEQ ID NO: 126097 - RNA, 32 nt, Homo Sapiens
uagcuaccaaauaaacauuguuuucuauucug

SEQ ID NO: 126098 - RNA, 32 nt, Homo Sapiens
aaguaucagcacccagaagagaaaaaggaauu

SEQ ID NO: 126099 - RNA, 32 nt, Homo Sapiens
ccacgauuacacaaccaaaucagaaaauaaua

SEQ ID NO: 126100 - RNA, 31 nt, Homo Sapiens
gcgccugagccccagggaagcaggcuaggau

SEQ ID NO: 126101 - RNA, 32 nt, Homo Sapiens
aauguaaucaccguaaacaccuauaugaucug

SEQ ID NO: 126102 - RNA, 32 nt, Homo Sapiens
ggcagcggcaccacccggggcuuccagcgggu

SEQ ID NO: 126103 - RNA, 29 nt, Homo Sapiens
uguucccccuguuucagaggcucagauug

SEQ ID NO: 126104 - RNA, 32 nt, Homo Sapiens
agagcuguguccccgccggcgccccccacccc

SEQ ID NO: 126105 - RNA, 32 nt, Homo Sapiens
cccgagagacgccccgggguucuagaagcucc

SEQ ID NO: 126106 - RNA, 32 nt, Homo Sapiens
ucucaguaaaaauuauaaaaugggggauaauu

SEQ ID NO: 126107 - RNA, 32 nt, Homo Sapiens
augauggcgcuucauggguugcagcuacugaa

SEQ ID NO: 126108 - RNA, 32 nt, Homo Sapiens
aggccacagaacuuaugggagucuuguauauc

SEQ ID NO: 126109 - RNA, 32 nt, Homo Sapiens
auuuuucagaucuuuuagcccagucauauguu

SEQ ID NO: 126110 - RNA, 32 nt, Homo Sapiens
ggaggaaaagcagucaggccacacaacauugu

SEQ ID NO: 126111 - RNA, 32 nt, Homo Sapiens
aagcauguacuauuuucuuaaagcaauaaacu

SEQ ID NO: 126112 - RNA, 32 nt, Homo Sapiens
ccacugaacaacauacauuauucucagcugua

SEQ ID NO: 126113 - RNA, 32 nt, Homo Sapiens
cuagcaucuggccuuuuaaaucaguagucguu

SEQ ID NO: 126114 - RNA, 32 nt, Homo Sapiens
aggaauggguccucgaaucaucgugccucuuu

SEQ ID NO: 126115 - RNA, 32 nt, Homo Sapiens
aaaauacaggauguugucccaucaagggaggg

SEQ ID NO: 126116 - RNA, 32 nt, Homo Sapiens
gcagagcggggcaacuaauuuaaacggcuucu

SEQ ID NO: 126117 - RNA, 32 nt, Homo Sapiens
ccaaggccuuuuauuuugcgcuguguaacugc

SEQ ID NO: 126118 - RNA, 32 nt, Homo Sapiens
ggauaugaucauuuacaggaauuauauaugaa

SEQ ID NO: 126119 - RNA, 32 nt, Homo Sapiens
aaccgcuggaaguucugcugccccucguguag

SEQ ID NO: 126120 - RNA, 32 nt, Homo Sapiens
ucgcugaaaucgauuuucugcuucuuauagua

SEQ ID NO: 126121 - RNA, 32 nt, Homo Sapiens
cuuggucauacaccugaguuauauaaauccuc

SEQ ID NO: 126122 - RNA, 32 nt, Homo Sapiens
ggcuggugaguggcuggggcugucugagccau

SEQ ID NO: 126123 - RNA, 32 nt, Homo Sapiens
ccuacgcaacugcagcuggggcuggggccacc

SEQ ID NO: 126124 - RNA, 32 nt, Homo Sapiens
gugucuguacacguucuucugaaagcuuuaga

SEQ ID NO: 126125 - RNA, 32 nt, Homo Sapiens
gaaacaaacaugacccuaaaucuugacuacag

SEQ ID NO: 126126 - RNA, 32 nt, Homo Sapiens
caccagaccccagggaagccggggcccacucc

SEQ ID NO: 126127 - RNA, 32 nt, Homo Sapiens
uagcagaguacaaauuguugcuaguguaucag

SEQ ID NO: 126128 - RNA, 32 nt, Homo Sapiens
ccacagcgauggagugggugcuggggucagac

SEQ ID NO: 126129 - RNA, 32 nt, Homo Sapiens
caccuacuggaugucggucuccaggagguugu

SEQ ID NO: 126130 - RNA, 32 nt, Homo Sapiens
gagcaaacaucauguagauagcacaaguauuu

SEQ ID NO: 126131 - RNA, 32 nt, Homo Sapiens
ucggagagccuggccucguccgccgccucucg

SEQ ID NO: 126132 - RNA, 32 nt, Homo Sapiens
acaagcaguggaaggaaauugguuguacugac

SEQ ID NO: 126133 - RNA, 32 nt, Homo Sapiens
uuccccaggcauccccaccuccuaccucguuc

SEQ ID NO: 126134 - RNA, 32 nt, Homo Sapiens
caggaaguccugcagaugugcgugccugugug

SEQ ID NO: 126135 - RNA, 32 nt, Homo Sapiens
cuccgccaagcgggacgccgcgccgggcgggu

SEQ ID NO: 126136 - RNA, 32 nt, Homo Sapiens
gaaaaccaaaucucccaaaacguugggauaug

SEQ ID NO: 126137 - RNA, 32 nt, Homo Sapiens
uuaaguguauuuccaauacagaaggguugaaa

SEQ ID NO: 126138 - RNA, 32 nt, Homo Sapiens
ggcagagguuugaggauccccccucugcuacc

SEQ ID NO: 126139 - RNA, 32 nt, Homo Sapiens
cgggucuguauaacagaagagcaggugacggg

SEQ ID NO: 126140 - RNA, 32 nt, Homo Sapiens
agacuggaaaggaaaauggcaggcuaagucag

SEQ ID NO: 126141 - RNA, 32 nt, Homo Sapiens
aauaauaauuuucaaauucuacugaacacuuc

SEQ ID NO: 126142 - RNA, 32 nt, Homo Sapiens
aagacccaacuggcaugaguugggguaauuuc

SEQ ID NO: 126143 - RNA, 32 nt, Homo Sapiens
uaggaccuaugaaaauugucuauuuuuaucua

SEQ ID NO: 126144 - RNA, 32 nt, Homo Sapiens
gcggcuagagcgucgccuccucccggggaacc

SEQ ID NO: 126145 - RNA, 32 nt, Homo Sapiens
gggacugcgagaggaccccggcguccgggcuc

SEQ ID NO: 126146 - RNA, 32 nt, Homo Sapiens
uauuuauauuuucagugaucucauuugaauga

SEQ ID NO: 126147 - RNA, 32 nt, Homo Sapiens
gggucucugugauuuccccaccuauguacuuu

SEQ ID NO: 126148 - RNA, 32 nt, Homo Sapiens
ggugaugggcugucucuacccggagcgugcgg

SEQ ID NO: 126149 - RNA, 32 nt, Homo Sapiens
ucgccgccucugccugcguagccccggccaug

SEQ ID NO: 126150 - RNA, 32 nt, Homo Sapiens
cugauggaauuguuauacuagguuaacauuug

SEQ ID NO: 126151 - RNA, 32 nt, Homo Sapiens
gagcaccugcaggcgcgggcggcggccccacc

SEQ ID NO: 126152 - RNA, 32 nt, Homo Sapiens
ugcaugggcuccugcuuguguguucccuccuc

SEQ ID NO: 126153 - RNA, 31 nt, Homo Sapiens
ggcaugcuguguuaggcuccaagggaauaca

SEQ ID NO: 126154 - RNA, 32 nt, Homo Sapiens
agccccaaggacccggacauggugccagcuuc

SEQ ID NO: 126155 - RNA, 30 nt, Homo Sapiens
guaguagguaggcgcgcgccuguugucuua

SEQ ID NO: 126156 - RNA, 32 nt, Homo Sapiens
acaguuugacauuuaauuuauuagcgcugcuc

SEQ ID NO: 126157 - RNA, 32 nt, Homo Sapiens
augggaagggaaggguggcuguccucaaaucc

SEQ ID NO: 126158 - RNA, 32 nt, Homo Sapiens
acuggcaauauuucccuuuagaacuucaagau

SEQ ID NO: 126159 - RNA, 32 nt, Homo Sapiens
gcccacagaggguggcagccaagcaucucuga

SEQ ID NO: 126160 - RNA, 32 nt, Homo Sapiens
gcuguguguuuucaagagaacaauagagugug

SEQ ID NO: 126161 - RNA, 32 nt, Homo Sapiens
gccuugggccuugcugcugcugcacccaacua

SEQ ID NO: 126162 - RNA, 32 nt, Homo Sapiens
aucccccgccccagaucucaugagaucaauca

SEQ ID NO: 126163 - RNA, 32 nt, Homo Sapiens
agggcaaggggaggggaauggugagauccgag

SEQ ID NO: 126164 - RNA, 32 nt, Homo Sapiens
aaaacagugggaauauaggaaagggaaccaaa

SEQ ID NO: 126165 - RNA, 32 nt, Homo Sapiens
agaggcuguggucagagagggaagcugaggcc

SEQ ID NO: 126166 - RNA, 32 nt, Homo Sapiens
ccuacgugaauuuccggcacccacaggacgca

SEQ ID NO: 126167 - RNA, 32 nt, Homo Sapiens
gagagugggcauggcugcugcaggcauggaaa

SEQ ID NO: 126168 - RNA, 32 nt, Homo Sapiens
uaguucaucccucucuauuccuuggcucccaa

SEQ ID NO: 126169 - RNA, 32 nt, Homo Sapiens
acauaucuuuucuacauagaacugaaggagca

SEQ ID NO: 126170 - RNA, 32 nt, Homo Sapiens
auauaguccuguacaauuccaauuuguuucuu

SEQ ID NO: 126171 - RNA, 32 nt, Homo Sapiens
cucaggauuucugcauugcuaugaaccauggc

SEQ ID NO: 126172 - RNA, 32 nt, Homo Sapiens
auuucgaccuggggaggggggcggcggugaaa

SEQ ID NO: 126173 - RNA, 32 nt, Homo Sapiens
cugaucaccuuggacuccauaguacacugggg

SEQ ID NO: 126174 - RNA, 31 nt, Homo Sapiens
gugcccacacuuggcaaaccauaggcaauau

SEQ ID NO: 126175 - RNA, 32 nt, Homo Sapiens
ggugcgggugggggcgggaggcgcaagguguc

SEQ ID NO: 126176 - RNA, 32 nt, Homo Sapiens
auaaaaucaaggagacugcugaaaaucucuaa

SEQ ID NO: 126177 - RNA, 32 nt, Homo Sapiens
agauucucgccaccccaccccucccucagaaa

SEQ ID NO: 126178 - RNA, 32 nt, Homo Sapiens
agccacuguggccuuguguucugcagguaucc

SEQ ID NO: 126179 - RNA, 32 nt, Homo Sapiens
ggaauuaaauggucauuuauuucaugcaguau

SEQ ID NO: 126180 - RNA, 32 nt, Homo Sapiens
gggugccaggcuguccggagccaggccuaccc

SEQ ID NO: 126181 - RNA, 32 nt, Homo Sapiens
gaauuuuuuuuuuccuuuuuuauaaacagacc

SEQ ID NO: 126182 - RNA, 32 nt, Homo Sapiens
aggcuaucacgccccaggaccugcggagcuac

SEQ ID NO: 126183 - RNA, 32 nt, Homo Sapiens
aaaaguacugaauagauuaauccaaaacacuu

SEQ ID NO: 126184 - RNA, 32 nt, Homo Sapiens
acucuuagcaaccucauuucgacagugguuug

SEQ ID NO: 126185 - RNA, 32 nt, Homo Sapiens
gguagaggucacuucuucccagcccugccuca

SEQ ID NO: 126186 - RNA, 32 nt, Homo Sapiens
agcauggagccugguccccaguauguuacuaa

SEQ ID NO: 126187 - RNA, 32 nt, Homo Sapiens
ugagaagggaguauggcagggcugggaugcgg

SEQ ID NO: 126188 - RNA, 32 nt, Homo Sapiens
cugauucauagccauaccucugauggacaagc

SEQ ID NO: 126189 - RNA, 32 nt, Homo Sapiens
aaagucaaauuaacaucaaaacuguauuaaaa

SEQ ID NO: 126190 - RNA, 32 nt, Homo Sapiens
gaauucgagccucaaaauuugcugcacagaau

SEQ ID NO: 126191 - RNA, 32 nt, Homo Sapiens
gaugagaugacagauagcacgacuacacugag

SEQ ID NO: 126192 - RNA, 32 nt, Homo Sapiens
uuggaagugggaagcuagagagaauugagugu

SEQ ID NO: 126193 - RNA, 32 nt, Homo Sapiens
gccagccuucugccggccccgccgcgauggag

SEQ ID NO: 126194 - RNA, 32 nt, Homo Sapiens
agagcaugaagauaaaccaguacaaucagucg

SEQ ID NO: 126195 - RNA, 32 nt, Homo Sapiens
aguuucucaugaugaugaaaaaguaucaaguc

SEQ ID NO: 126196 - RNA, 32 nt, Homo Sapiens
caggacggguggcuguagccugcgcguuugug

SEQ ID NO: 126197 - RNA, 30 nt, Homo Sapiens
agagcgcccuccccacgccagucgacccca

SEQ ID NO: 126198 - RNA, 31 nt, Homo Sapiens
ggugagugaaacaaucugaggucugguucuu

SEQ ID NO: 126199 - RNA, 28 nt, Homo Sapiens
aaaauggccaccggcggcggcgcggagg

SEQ ID NO: 126200 - RNA, 32 nt, Homo Sapiens
gacacagagucugggaucuauaauucagucau

SEQ ID NO: 126201 - RNA, 32 nt, Homo Sapiens
cucugccccucuucccaauacuuuuugucauu

SEQ ID NO: 126202 - RNA, 32 nt, Homo Sapiens
aaugauuuucccugccacaucuauccuuuuaa

SEQ ID NO: 126203 - RNA, 32 nt, Homo Sapiens
uguguccugacacugcaauuggcaccgaagcc

SEQ ID NO: 126204 - RNA, 32 nt, Homo Sapiens
uauuugacuuucuuguguuguugacaaaaaga

SEQ ID NO: 126205 - RNA, 32 nt, Homo Sapiens
aggcggggcuacuacggggcggugccugcugu

SEQ ID NO: 126206 - RNA, 32 nt, Homo Sapiens
ucacaagaaaaaaggaauaauauucucuaaac

SEQ ID NO: 126207 - RNA, 30 nt, Homo Sapiens
acagcagagaagcuguaggacuguuuguga

SEQ ID NO: 126208 - RNA, 32 nt, Homo Sapiens
ucuaguaaaaauacaaaaauuagcucagcaug

SEQ ID NO: 126209 - RNA, 32 nt, Homo Sapiens
uugaggucaggaguuugagaccugccuggcca

SEQ ID NO: 126210 - RNA, 32 nt, Homo Sapiens
ugagucccuucuccccgccaacaaaaggugau

SEQ ID NO: 126211 - RNA, 32 nt, Homo Sapiens
ggaauaaaaucagucaauucagaaaaguauaa

SEQ ID NO: 126212 - RNA, 32 nt, Homo Sapiens
guucuucaguuauauuuacauguguuguaaau

SEQ ID NO: 126213 - RNA, 32 nt, Homo Sapiens
ccuucuuugcuggccugaccccugaggagcgg

SEQ ID NO: 126214 - RNA, 32 nt, Homo Sapiens
cugcugacccugcagagcuggcugcuggacgc

SEQ ID NO: 126215 - RNA, 32 nt, Homo Sapiens
cugaagccaggcgggggucugcuggaggauuc

SEQ ID NO: 126216 - RNA, 32 nt, Homo Sapiens
ccacccccauccccuucccaauugaaggagcg

SEQ ID NO: 126217 - RNA, 32 nt, Homo Sapiens
uuguguguuuuguugaaauuguucauaaugua

SEQ ID NO: 126218 - RNA, 32 nt, Homo Sapiens
ugccuucuaaaaaccaaaucugcauaguuaaa

SEQ ID NO: 126219 - RNA, 32 nt, Homo Sapiens
caggccgcccgccgggaugcagugggccgugg

SEQ ID NO: 126220 - RNA, 32 nt, Homo Sapiens
acucuucuugcagcuguugagcgcaccuaacc

SEQ ID NO: 126221 - RNA, 32 nt, Homo Sapiens
gcugucuccuucccacauccucagccccacac

SEQ ID NO: 126222 - RNA, 32 nt, Homo Sapiens
cucaucaucuccaugcuugcugucccauguuc

SEQ ID NO: 126223 - RNA, 32 nt, Homo Sapiens
uaugcaagugguuuuuauaaaucagaauaaua

SEQ ID NO: 126224 - RNA, 32 nt, Homo Sapiens
uuucaaaacaacaggaaagagagaagcggagg

SEQ ID NO: 126225 - RNA, 32 nt, Homo Sapiens
uguaaaaaugggaagaggcaacggaagacauu

SEQ ID NO: 126226 - RNA, 32 nt, Homo Sapiens
auauaccauauauaaacauuuuacaugaaaaa

SEQ ID NO: 126227 - RNA, 32 nt, Homo Sapiens
auggaggugcuuuagauuucaacaucagaugg

SEQ ID NO: 126228 - RNA, 32 nt, Homo Sapiens
uacaauuccaacaagguuauuauuuuuuaaau

SEQ ID NO: 126229 - RNA, 32 nt, Homo Sapiens
caccccugauauauuuuuauuuuuauauaucc

SEQ ID NO: 126230 - RNA, 32 nt, Homo Sapiens
ccugggccaaugggccaucuggaccaaaggug

SEQ ID NO: 126231 - RNA, 32 nt, Homo Sapiens
uuaauauuugguauuucuuuuaaaguauuuuu

SEQ ID NO: 126232 - RNA, 32 nt, Homo Sapiens
agccaaucaggcugugaaucugcagcagugau

SEQ ID NO: 126233 - RNA, 32 nt, Homo Sapiens
uaccucagagucugaggauguuaacuuuggaa

SEQ ID NO: 126234 - RNA, 29 nt, Homo Sapiens
ugacuuuggggacagggggugggaagggg

SEQ ID NO: 126235 - RNA, 32 nt, Homo Sapiens
gcccagcuccugaggcucuuuggaccuccagg

SEQ ID NO: 126236 - RNA, 32 nt, Homo Sapiens
aucccuuuuaucuauuagauaaucaagggcac

SEQ ID NO: 126237 - RNA, 32 nt, Homo Sapiens
aagagaagggaagagagaagagucuauuauga

SEQ ID NO: 126238 - RNA, 32 nt, Homo Sapiens
uugucuuucccugcaguaaggcugguuucccc

SEQ ID NO: 126239 - RNA, 32 nt, Homo Sapiens
agcucuuccucuucaauuuccauccuuguuug

SEQ ID NO: 126240 - RNA, 32 nt, Homo Sapiens
uucccuugacuucugagucuaguguggguugg

SEQ ID NO: 126241 - RNA, 29 nt, Homo Sapiens
ucccauuuguguuucagaaaggaguagaa

SEQ ID NO: 126242 - RNA, 32 nt, Homo Sapiens
uauaguuuuuaaaaaaguaauuuccuuaaauc

SEQ ID NO: 126243 - RNA, 32 nt, Homo Sapiens
gcuuuccccucauagccuguaccuguuaucaa

SEQ ID NO: 126244 - RNA, 32 nt, Homo Sapiens
uaggacaccgggcacaguggcucacacauguu

SEQ ID NO: 126245 - RNA, 32 nt, Homo Sapiens
uccauauuuuuggucacuuuugauaaguuugc

SEQ ID NO: 126246 - RNA, 32 nt, Homo Sapiens
uaaacuucgacacugaacaaaguuugucccca

SEQ ID NO: 126247 - RNA, 32 nt, Homo Sapiens
auaucuaaguguuuugaggauuuuaaaacuga

SEQ ID NO: 126248 - RNA, 30 nt, Homo Sapiens
gugagggagguaaugggggagcccugcugc

SEQ ID NO: 126249 - RNA, 31 nt, Homo Sapiens
uagaaguguuacugccuguaacuagcucaaa

SEQ ID NO: 126250 - RNA, 32 nt, Homo Sapiens
gacaaaucauuuaugugugaguuucuuuguaa

SEQ ID NO: 126251 - RNA, 32 nt, Homo Sapiens
uucuuuuaaaagacaagacuucaguauguugu

SEQ ID NO: 126252 - RNA, 32 nt, Homo Sapiens
gguggaagauggauaaauaauucugucacacg

SEQ ID NO: 126253 - RNA, 30 nt, Homo Sapiens
gaagaaaggaagcuugaacuguuuguucuu

SEQ ID NO: 126254 - RNA, 32 nt, Homo Sapiens
gaugaaaaguuccuuuucuuguguuaauguac

SEQ ID NO: 126255 - RNA, 32 nt, Homo Sapiens
cucccugcaaccuccgccucccggguucaugu

SEQ ID NO: 126256 - RNA, 32 nt, Homo Sapiens
acccagacaccgcccacuucccggcccggggc

SEQ ID NO: 126257 - RNA, 32 nt, Homo Sapiens
uacagguggcuggagcagcugcuuugcaaccu

SEQ ID NO: 126258 - RNA, 32 nt, Homo Sapiens
acaaggagauaaauguuguuuucaugcuuggu

SEQ ID NO: 126259 - RNA, 32 nt, Homo Sapiens
ccggagccgggcgggccgcggggucauggcug

SEQ ID NO: 126260 - RNA, 32 nt, Homo Sapiens
uugcccaucuauggagcagcucccauacggca

SEQ ID NO: 126261 - RNA, 32 nt, Homo Sapiens
guaaauacagcuuuugaucuguaaugcuuuua

SEQ ID NO: 126262 - RNA, 32 nt, Homo Sapiens
cucccuuaucuaaagucaacugauuauggacu

SEQ ID NO: 126263 - RNA, 32 nt, Homo Sapiens
ucuucccagaaccagugggcgagggggcgacu

SEQ ID NO: 126264 - RNA, 27 nt, Homo Sapiens
auuaguaucuucuucagccacugcucu

SEQ ID NO: 126265 - RNA, 32 nt, Homo Sapiens
agagagggacaaauuuucaauuugugaaacuc

SEQ ID NO: 126266 - RNA, 32 nt, Homo Sapiens
gagaaacgaauaacuccaaacacgccaccuua

SEQ ID NO: 126267 - RNA, 32 nt, Homo Sapiens
cugaugagaggcagaggcucuucuggucuggg

SEQ ID NO: 126268 - RNA, 32 nt, Homo Sapiens
uaacagugaugucaauacaagguuaugcaaac

SEQ ID NO: 126269 - RNA, 32 nt, Homo Sapiens
uuuuuuuuuuucugguggagggagguggugga

SEQ ID NO: 126270 - RNA, 32 nt, Homo Sapiens
aacaagcagaacuagccacgagcugccuuccu

SEQ ID NO: 126271 - RNA, 30 nt, Homo Sapiens
gccgcccgaggaugcggccguccggcgacg

SEQ ID NO: 126272 - RNA, 32 nt, Homo Sapiens
gaaguggucauagaaucucucuggagaaacaa

SEQ ID NO: 126273 - RNA, 32 nt, Homo Sapiens
agcuaaucucguuuuaaaucugcucaagauaa

SEQ ID NO: 126274 - RNA, 32 nt, Homo Sapiens
uugucuagggaagaggucuuacuggcugcccu

SEQ ID NO: 126275 - RNA, 32 nt, Homo Sapiens
acaagaagaugacuuccaucauacagucuuca

SEQ ID NO: 126276 - RNA, 32 nt, Homo Sapiens
gugcuccagggacccgcacccagugggacuca

SEQ ID NO: 126277 - RNA, 32 nt, Homo Sapiens
uuucucgaaauaauucaucuuucagcuucucu

SEQ ID NO: 126278 - RNA, 32 nt, Homo Sapiens
cuucuuuccuuccuucaacaaauguuuaugag

SEQ ID NO: 126279 - RNA, 32 nt, Homo Sapiens
gaaugaaugcaaaaggugcugagaaauuccac

SEQ ID NO: 126280 - RNA, 32 nt, Homo Sapiens
agaaauguauucugcaccccccggccccgccc

SEQ ID NO: 126281 - RNA, 32 nt, Homo Sapiens
guacaguuugucagagaaaaacaaaguuuuug

SEQ ID NO: 126282 - RNA, 32 nt, Homo Sapiens
uggcgugggcccagcccggcccaggcagcaau

SEQ ID NO: 126283 - RNA, 32 nt, Homo Sapiens
cguuucacuauguuggccaggcuggucucaaa

SEQ ID NO: 126284 - RNA, 32 nt, Homo Sapiens
uguuucaccauguuggccaggcuggucucaaa

SEQ ID NO: 126285 - RNA, 32 nt, Homo Sapiens
caaauuauguucaacaaauaaaaauugcauuu

SEQ ID NO: 126286 - RNA, 32 nt, Homo Sapiens
aauucucuuguucuuuggcaacaauauaguau

SEQ ID NO: 126287 - RNA, 30 nt, Homo Sapiens
ucuugugucuguguggcuagauggccucug

SEQ ID NO: 126288 - RNA, 32 nt, Homo Sapiens
aaaaacugacuaugacucccaaguucucugaa

SEQ ID NO: 126289 - RNA, 32 nt, Homo Sapiens
uugccugcucuuguugugggggugggauuggg

SEQ ID NO: 126290 - RNA, 31 nt, Homo Sapiens
cccugcagcagccucgcgccccgcguuccgg

SEQ ID NO: 126291 - RNA, 32 nt, Homo Sapiens
guacuuucugguggcaaaugaauuuaucauuu

SEQ ID NO: 126292 - RNA, 32 nt, Homo Sapiens
aagaauuguuugaaccugggagguggagguug

SEQ ID NO: 126293 - RNA, 31 nt, Homo Sapiens
ggaggggcaaggucuuucaggaaccagaccc

SEQ ID NO: 126294 - RNA, 32 nt, Homo Sapiens
gucaucucccgacuccucccugagccagccuc

SEQ ID NO: 126295 - RNA, 32 nt, Homo Sapiens
uccuggagugggaguggggaaugccuucuacg

SEQ ID NO: 126296 - RNA, 31 nt, Homo Sapiens
uaggggcgggcacagaaccagccuccugaau

SEQ ID NO: 126297 - RNA, 32 nt, Homo Sapiens
ucggacuuuucucuuuuugagaaaucugaagg

SEQ ID NO: 126298 - RNA, 32 nt, Homo Sapiens
gcggagugcugcggggugcugcuggagugccc

SEQ ID NO: 126299 - RNA, 32 nt, Homo Sapiens
cugcgggaggcggggguuggcgugccugaggg

SEQ ID NO: 126300 - RNA, 32 nt, Homo Sapiens
gcaucaacuugcagaaagaaauauaaugacau

SEQ ID NO: 126301 - RNA, 32 nt, Homo Sapiens
ccggcuucccgcugcagcacgacggugagagg

SEQ ID NO: 126302 - RNA, 32 nt, Homo Sapiens
uuuuucugauauaauuacuuuagcugcacuaa

SEQ ID NO: 126303 - RNA, 32 nt, Homo Sapiens
gcugggggcuuguucugggugccaagcgcauc

SEQ ID NO: 126304 - RNA, 32 nt, Homo Sapiens
gcuaaaauuagaugaacucaacuuugacaacc

SEQ ID NO: 126305 - RNA, 32 nt, Homo Sapiens
gccgccuccuccugggcugggcccgcgguguc

SEQ ID NO: 126306 - RNA, 32 nt, Homo Sapiens
uuccagauuauaaaaugaaugcucuuaaagug

SEQ ID NO: 126307 - RNA, 32 nt, Homo Sapiens
auguguauauaaauaugcauauuuucagacaa

SEQ ID NO: 126308 - RNA, 32 nt, Homo Sapiens
gacagccauagucucuuacagugccucuguug

SEQ ID NO: 126309 - RNA, 32 nt, Homo Sapiens
aguauuaacuguaaaaagauuugugaaguuug

SEQ ID NO: 126310 - RNA, 32 nt, Homo Sapiens
aaaacagaugagaagacuagcagcuagcaagg

SEQ ID NO: 126311 - RNA, 32 nt, Homo Sapiens
guagacgccgacgaggaggggcugggaaaaug

SEQ ID NO: 126312 - RNA, 32 nt, Homo Sapiens
agguuuuuaggauauauaaacaucuauauuau

SEQ ID NO: 126313 - RNA, 32 nt, Homo Sapiens
augugcagcucuuucuccaggugggauguagc

SEQ ID NO: 126314 - RNA, 32 nt, Homo Sapiens
gaauguugcuacuucacaauggcgauguggug

SEQ ID NO: 126315 - RNA, 32 nt, Homo Sapiens
agagagcgccgggauccggacggggagcaacc

SEQ ID NO: 126316 - RNA, 32 nt, Homo Sapiens
guaccugagggaggagagacauaaaucccuuc

SEQ ID NO: 126317 - RNA, 32 nt, Homo Sapiens
cagggccugccacuaagcccgccccgcuggcc

SEQ ID NO: 126318 - RNA, 32 nt, Homo Sapiens
guuuggccaaacuuguuaaaacuguaaugcaa

SEQ ID NO: 126319 - RNA, 32 nt, Homo Sapiens
acucucccgccucuccuuuuuaaaggaaccgc

SEQ ID NO: 126320 - RNA, 32 nt, Homo Sapiens
agcucaggagaaaaaggagcggguuccgagug

SEQ ID NO: 126321 - RNA, 32 nt, Homo Sapiens
uccgccugauccccggccugucgcccgacccc

SEQ ID NO: 126322 - RNA, 32 nt, Homo Sapiens
aaauuagaauccagguagggcuugugugggaa

SEQ ID NO: 126323 - RNA, 32 nt, Homo Sapiens
auuuauguuugauaaacuuaaguucugcugau

SEQ ID NO: 126324 - RNA, 32 nt, Homo Sapiens
uuaaaaaacaaggaacaagaaaacauugcacc

SEQ ID NO: 126325 - RNA, 32 nt, Homo Sapiens
cgagaaaacaacagcgcgugcgcguagcgacc

SEQ ID NO: 126326 - RNA, 32 nt, Homo Sapiens
augguuuguucauuauauuacacuuucaguaa

SEQ ID NO: 126327 - RNA, 26 nt, Homo Sapiens
agaauauaaaaauaaagcacuuauag

SEQ ID NO: 126328 - RNA, 32 nt, Homo Sapiens
uuuaauuuuuaaauacuguuucagaguucuaa

SEQ ID NO: 126329 - RNA, 32 nt, Homo Sapiens
agacuggugggaagugagcagcuggagggaaa

SEQ ID NO: 126330 - RNA, 32 nt, Homo Sapiens
uaucuacaggcacaacugcugaagaaaccaga

SEQ ID NO: 126331 - RNA, 32 nt, Homo Sapiens
gaaggagaugacuucaaucuucuggccugagu

SEQ ID NO: 126332 - RNA, 32 nt, Homo Sapiens
auuuucccuggaagauucugaccugucugauc

SEQ ID NO: 126333 - RNA, 32 nt, Homo Sapiens
gaaagaggacaaaggugccuucuguagacacu

SEQ ID NO: 126334 - RNA, 26 nt, Homo Sapiens
aaugggaaauaaaaagccauuuaucc

SEQ ID NO: 126335 - RNA, 32 nt, Homo Sapiens
ggggcgcaggacuugcaggcgccggggagaag

SEQ ID NO: 126336 - RNA, 32 nt, Homo Sapiens
cgaccgucucugcgggggcugcacggcgccag

SEQ ID NO: 126337 - RNA, 32 nt, Homo Sapiens
augugagggcuauguugacauggcaucaccuc

SEQ ID NO: 126338 - RNA, 32 nt, Homo Sapiens
aaaaagggggccuggggcagggcgcgguggcu

SEQ ID NO: 126339 - RNA, 32 nt, Homo Sapiens
ucagugcggggagcaggcugcugcugcugacu

SEQ ID NO: 126340 - RNA, 32 nt, Homo Sapiens
ccaagugaacaacuguggcagcuccuccuagu

SEQ ID NO: 126341 - RNA, 32 nt, Homo Sapiens
aacacucaacccaaacaaaacuacuucgugag

SEQ ID NO: 126342 - RNA, 32 nt, Homo Sapiens
uuuucccuccaugcuccagguccaugcacagg

SEQ ID NO: 126343 - RNA, 32 nt, Homo Sapiens
gacgccgcgucgggcucucggccgcccagcgg

SEQ ID NO: 126344 - RNA, 32 nt, Homo Sapiens
auaacgauacauuuaauggaaaauuuuuaaau

SEQ ID NO: 126345 - RNA, 31 nt, Homo Sapiens
ccucaagugaugugccugccucggccuccga

SEQ ID NO: 126346 - RNA, 32 nt, Homo Sapiens
gugcagggcagacagagccagaagggccugua

SEQ ID NO: 126347 - RNA, 32 nt, Homo Sapiens
agcuguacugugauuuaguuuuuacaccguua

SEQ ID NO: 126348 - RNA, 32 nt, Homo Sapiens
ggggggcugcgcggcgcgacccuggagagggc

SEQ ID NO: 126349 - RNA, 32 nt, Homo Sapiens
aagucaacuuuaucaucuacuacaucagcacu

SEQ ID NO: 126350 - RNA, 32 nt, Homo Sapiens
guaagaaacagggagcauggugcggggagaga

SEQ ID NO: 126351 - RNA, 32 nt, Homo Sapiens
uuguuuauuucuggaauuuuucauuuaauguu

SEQ ID NO: 126352 - RNA, 32 nt, Homo Sapiens
uagggggauccccuggcccaccuucucuuggc

SEQ ID NO: 126353 - RNA, 32 nt, Homo Sapiens
ccccuggcucccuagugaugggacauauauga

SEQ ID NO: 126354 - RNA, 32 nt, Homo Sapiens
auauuaaauggcaauauggagucaguccugca

SEQ ID NO: 126355 - RNA, 32 nt, Homo Sapiens
aaaaagccuucacugguuuggaugcauuggag

SEQ ID NO: 126356 - RNA, 32 nt, Homo Sapiens
ccuggagugugcucuccuccaguguucagccu

SEQ ID NO: 126357 - RNA, 32 nt, Homo Sapiens
uuuaggcaaacacuggccauggccgugggagu

SEQ ID NO: 126358 - RNA, 28 nt, Homo Sapiens
aaaauacuggcucccaggauggcggugg

SEQ ID NO: 126359 - RNA, 32 nt, Homo Sapiens
ccacagauuuuuccauccugucucucuuacug

SEQ ID NO: 126360 - RNA, 32 nt, Homo Sapiens
agaggcaaggacgugggcguuggucggucuug

SEQ ID NO: 126361 - RNA, 32 nt, Homo Sapiens
cagcaugugaaugggggagugaugaacgggcu

SEQ ID NO: 126362 - RNA, 32 nt, Homo Sapiens
agcuccgccucccggcuucaugccauucucgu

SEQ ID NO: 126363 - RNA, 32 nt, Homo Sapiens
gucccacacucucagcacuuugggaggauagc

SEQ ID NO: 126364 - RNA, 32 nt, Homo Sapiens
aguuguuguaacaguaaucauugucauuguca

SEQ ID NO: 126365 - RNA, 32 nt, Homo Sapiens
cggacgcucuccccggugccgccgccgcugcc

SEQ ID NO: 126366 - RNA, 32 nt, Homo Sapiens
ccuaaugugugacaccucaucauggacacgcu

SEQ ID NO: 126367 - RNA, 32 nt, Homo Sapiens
agccugugaugaugggucuggugacuauuauu

SEQ ID NO: 126368 - RNA, 32 nt, Homo Sapiens
caaagggccuaggcccgccccgagggggcagc

SEQ ID NO: 126369 - RNA, 32 nt, Homo Sapiens
agugaggaggggguugggaggggagaggacgc

SEQ ID NO: 126370 - RNA, 32 nt, Homo Sapiens
cucacucugggcuguaacguggcacugguagg

SEQ ID NO: 126371 - RNA, 32 nt, Homo Sapiens
cucaacuguaauuuaaauuuggcuguucucug

SEQ ID NO: 126372 - RNA, 32 nt, Homo Sapiens
gggcuuaaugaacuggaaucugcauaacucag

SEQ ID NO: 126373 - RNA, 32 nt, Homo Sapiens
gccagcagcuggaugcuguggcuggccagaga

SEQ ID NO: 126374 - RNA, 32 nt, Homo Sapiens
cacccucugcuccuccuucuccuguccuggcc

SEQ ID NO: 126375 - RNA, 32 nt, Homo Sapiens
uacuuccuguccuggcucucccggcccugcuc

SEQ ID NO: 126376 - RNA, 32 nt, Homo Sapiens
gcaauccuuccacuuuggccuuccaaagugcu

SEQ ID NO: 126377 - RNA, 32 nt, Homo Sapiens
auauaguaaguuugaggaaaugucuauugaau

SEQ ID NO: 126378 - RNA, 32 nt, Homo Sapiens
cgggaccacuugcgguaccagaaagcgaacaa

SEQ ID NO: 126379 - RNA, 32 nt, Homo Sapiens
cugaaaguugaauuuuacauaauuuugaugug

SEQ ID NO: 126380 - RNA, 32 nt, Homo Sapiens
auguucacuggggcaucuccagaacuugccug

SEQ ID NO: 126381 - RNA, 29 nt, Homo Sapiens
aggaguauaugugugucuauacacacaca

SEQ ID NO: 126382 - RNA, 32 nt, Homo Sapiens
caaaaguucuccccccuccccccuuccccucc

SEQ ID NO: 126383 - RNA, 32 nt, Homo Sapiens
uucgggguuugggguuggagcggcuggucacg

SEQ ID NO: 126384 - RNA, 32 nt, Homo Sapiens
accaaguauccaaggaugucaacuugacaucc

SEQ ID NO: 126385 - RNA, 32 nt, Homo Sapiens
caugcuguugcugcuuggucucgacaaccaga

SEQ ID NO: 126386 - RNA, 32 nt, Homo Sapiens
uagguauaaaaugcuaugcaacuuuuucuuua

SEQ ID NO: 126387 - RNA, 28 nt, Homo Sapiens
augugaaguuucaaacauuuggaaaaaa

SEQ ID NO: 126388 - RNA, 32 nt, Homo Sapiens
ggggagccagcuuugcuggggcccuaccugca

SEQ ID NO: 126389 - RNA, 32 nt, Homo Sapiens
gaccaccgcgcggggacgacggcggccaugag

SEQ ID NO: 126390 - RNA, 32 nt, Homo Sapiens
uugcccaggcuggucuagaacuucuggucuca

SEQ ID NO: 126391 - RNA, 32 nt, Homo Sapiens
ucauuucaggcacaacgauacuacauucgugu

SEQ ID NO: 126392 - RNA, 32 nt, Homo Sapiens
ccuccaucucagucacacaugucuagccucca

SEQ ID NO: 126393 - RNA, 32 nt, Homo Sapiens
ugacuugggaagcacauagauacaucuuacaa

SEQ ID NO: 126394 - RNA, 32 nt, Homo Sapiens
ggcugagguuguggggggcgccuccuggggug

SEQ ID NO: 126395 - RNA, 32 nt, Homo Sapiens
aaauauccaaauaaacuuuugcagcuuucucc

SEQ ID NO: 126396 - RNA, 32 nt, Homo Sapiens
auaacuggauguguaaaaauuugaauuugagg

SEQ ID NO: 126397 - RNA, 30 nt, Homo Sapiens
ucccaggcgcccgcgccgcgcuucggguga

SEQ ID NO: 126398 - RNA, 31 nt, Homo Sapiens
gcaaaaguucuggcugcaggaguucuuguag

SEQ ID NO: 126399 - RNA, 32 nt, Homo Sapiens
accaccauaaggggugagucagacaggucuga

SEQ ID NO: 126400 - RNA, 32 nt, Homo Sapiens
accuuagcacauuuggggaaaggaggggaaua

SEQ ID NO: 126401 - RNA, 32 nt, Homo Sapiens
ucguucucugggccuucucaccacagagccuc

SEQ ID NO: 126402 - RNA, 32 nt, Homo Sapiens
uuuuauauuuguaaaauaauuggcagagugag

SEQ ID NO: 126403 - RNA, 32 nt, Homo Sapiens
uuaagacguucuuguuacacuccaccaaccuc

SEQ ID NO: 126404 - RNA, 32 nt, Homo Sapiens
cggccuggccucggacgcccccggccgggcua

SEQ ID NO: 126405 - RNA, 32 nt, Homo Sapiens
ccaguacuuugaaauagcacagcuauugauga

SEQ ID NO: 126406 - RNA, 32 nt, Homo Sapiens
cuagcagaacagaaacacuggcccccaauucc

SEQ ID NO: 126407 - RNA, 32 nt, Homo Sapiens
uuguuuacacaccuuugaaaaucuggaaaugg

SEQ ID NO: 126408 - RNA, 32 nt, Homo Sapiens
cuugacuuguggggcaggauucucugcagccc

SEQ ID NO: 126409 - RNA, 32 nt, Homo Sapiens
ccguccuccggcgcgccgcgagccucggagga

SEQ ID NO: 126410 - RNA, 32 nt, Homo Sapiens
uuuuucacacauaaucauaguguuaugaaauu

SEQ ID NO: 126411 - RNA, 29 nt, Homo Sapiens
agauuuauauguauguacguauuucaggu

SEQ ID NO: 126412 - RNA, 32 nt, Homo Sapiens
ucgcugccgcgucgcuuucucgcuccuuggau

SEQ ID NO: 126413 - RNA, 32 nt, Homo Sapiens
cggcuccggcucugcuggccggucuaaagcgg

SEQ ID NO: 126414 - RNA, 32 nt, Homo Sapiens
ucuggcuuguguggcugugcugccugaguaua

SEQ ID NO: 126415 - RNA, 32 nt, Homo Sapiens
ccagggcucccggccccucuucugggccgcag

SEQ ID NO: 126416 - RNA, 32 nt, Homo Sapiens
agagaugaugucagauauuccaauaggcuauc

SEQ ID NO: 126417 - RNA, 32 nt, Homo Sapiens
gugggagagugguaggaccggaugcugggcca

SEQ ID NO: 126418 - RNA, 32 nt, Homo Sapiens
uaaugaaucuguucuuuuuuuccccccaaaua

SEQ ID NO: 126419 - RNA, 32 nt, Homo Sapiens
ugcacaagauagcuggacuucucuaaggaauc

SEQ ID NO: 126420 - RNA, 32 nt, Homo Sapiens
agcucggcagagucacccacccugcccuuccc

SEQ ID NO: 126421 - RNA, 32 nt, Homo Sapiens
cccugggagagcugggacgggcggcggccggg

SEQ ID NO: 126422 - RNA, 32 nt, Homo Sapiens
gauguuguguggcaaugggauuugggcuaccc

SEQ ID NO: 126423 - RNA, 32 nt, Homo Sapiens
cccauugcuuguuuuucucagguuugucaaag

SEQ ID NO: 126424 - RNA, 32 nt, Homo Sapiens
aaauaaaaagacaauuccuuauugucugaaug

SEQ ID NO: 126425 - RNA, 32 nt, Homo Sapiens
gcccccacauaaauaaauuaguggggaggggg

SEQ ID NO: 126426 - RNA, 32 nt, Homo Sapiens
caugcacccgcccagucaccacgucccccgca

SEQ ID NO: 126427 - RNA, 32 nt, Homo Sapiens
cugcuauguacacaugugcacacacacacaac

SEQ ID NO: 126428 - RNA, 32 nt, Homo Sapiens
acacggugggccgcgccgcuggccugcucaug

SEQ ID NO: 126429 - RNA, 32 nt, Homo Sapiens
ugcaaggcgaacgucuuccugucccugcgcgc

SEQ ID NO: 126430 - RNA, 32 nt, Homo Sapiens
cagccucuuuauauuucucuuuuacagcagaa

SEQ ID NO: 126431 - RNA, 32 nt, Homo Sapiens
uuggcuagguugcagguuccaagcugcucucc

SEQ ID NO: 126432 - RNA, 30 nt, Homo Sapiens
cucagaggcaggcgaggucccugauucacu

SEQ ID NO: 126433 - RNA, 28 nt, Homo Sapiens
ugccagggggcaggaccagguacaacug

SEQ ID NO: 126434 - RNA, 32 nt, Homo Sapiens
uggucugaggcgagccgagccgagcgagcgcg

SEQ ID NO: 126435 - RNA, 32 nt, Homo Sapiens
uaguuaacuggaagagauuaccaagagaauaa

SEQ ID NO: 126436 - RNA, 32 nt, Homo Sapiens
cugggagggcccggcggcgacagcggaggcag

SEQ ID NO: 126437 - RNA, 32 nt, Homo Sapiens
cuggcgcgguggccgcgccccagccucgaucg

SEQ ID NO: 126438 - RNA, 32 nt, Homo Sapiens
agccccucaacccuccguuccuccucagccuc

SEQ ID NO: 126439 - RNA, 32 nt, Homo Sapiens
cggucuccucugaguucaccccagcccacccc

SEQ ID NO: 126440 - RNA, 32 nt, Homo Sapiens
cuauugguguuaucuguaaauuccagacacug

SEQ ID NO: 126441 - RNA, 32 nt, Homo Sapiens
aagagggaaauuacguuuaaaggucagcagau

SEQ ID NO: 126442 - RNA, 32 nt, Homo Sapiens
gccucgagggcgccguucgggcggggaggauc

SEQ ID NO: 126443 - RNA, 32 nt, Homo Sapiens
uaggagagggacuaagugcuagagacuauguc

SEQ ID NO: 126444 - RNA, 30 nt, Homo Sapiens
acaaaagugccagaagauguccagccaccg

SEQ ID NO: 126445 - RNA, 32 nt, Homo Sapiens
gugaucacagaaaaauuaaaaauccaagugcu

SEQ ID NO: 126446 - RNA, 32 nt, Homo Sapiens
cuguuguuaugaagauugaauuaggugauucu

SEQ ID NO: 126447 - RNA, 32 nt, Homo Sapiens
uaugcauauuuuucuguaaaucuacaguuuuu

SEQ ID NO: 126448 - RNA, 32 nt, Homo Sapiens
gacugcugccuuugcugcugacuugcagugug

SEQ ID NO: 126449 - RNA, 32 nt, Homo Sapiens
gggagcucagcacccaggccccugcccugcag

SEQ ID NO: 126450 - RNA, 32 nt, Homo Sapiens
gagcccgcggcagguggacgccgccgguccac

SEQ ID NO: 126451 - RNA, 32 nt, Homo Sapiens
cuggagaaaccugugcacggccccacaaggca

SEQ ID NO: 126452 - RNA, 32 nt, Homo Sapiens
cucuggaauuaauuauuuuaacuuggccuagc

SEQ ID NO: 126453 - RNA, 32 nt, Homo Sapiens
aucuggaggaggaggaaaaagauacacgcccu

SEQ ID NO: 126454 - RNA, 32 nt, Homo Sapiens
auacacaggagcuucuaucuugcugaaauauu

SEQ ID NO: 126455 - RNA, 32 nt, Homo Sapiens
ucauuuguaugauaaauucauauguguauaua

SEQ ID NO: 126456 - RNA, 32 nt, Homo Sapiens
uuguauucagcaugcuaaugauguaacuccuc

SEQ ID NO: 126457 - RNA, 32 nt, Homo Sapiens
gaucucugcccccaccgcccaggccccagggg

SEQ ID NO: 126458 - RNA, 30 nt, Homo Sapiens
acaguggguucccuauuucaggagaagaaa

SEQ ID NO: 126459 - RNA, 32 nt, Homo Sapiens
uguguuauuucuggaaacuuuaauguuuuaaa

SEQ ID NO: 126460 - RNA, 32 nt, Homo Sapiens
uuuuaaauuuaaguauguaguguuugaauuuc

SEQ ID NO: 126461 - RNA, 32 nt, Homo Sapiens
ugcccauucuuucuuacuucugacaacuggcu

SEQ ID NO: 126462 - RNA, 30 nt, Homo Sapiens
ccacaguaucaccauacaaguauuuguuua

SEQ ID NO: 126463 - RNA, 32 nt, Homo Sapiens
gaucugcgcccaucccaccuccauccacagag

SEQ ID NO: 126464 - RNA, 32 nt, Homo Sapiens
cacccuggcuggcaggggugcugcuggcugcu

SEQ ID NO: 126465 - RNA, 32 nt, Homo Sapiens
cuguaaaaugucaauagcaaaugaaggaugaa

SEQ ID NO: 126466 - RNA, 32 nt, Homo Sapiens
uuucaaauguuuuucuucuggaucugcuuuuu

SEQ ID NO: 126467 - RNA, 32 nt, Homo Sapiens
cguugacuuuauuugggggaguuuucccgcag

SEQ ID NO: 126468 - RNA, 32 nt, Homo Sapiens
agcgacgcgggaaggggcagggcgcugaccug

SEQ ID NO: 126469 - RNA, 32 nt, Homo Sapiens
gccccgcucgauuuuuccucuucuguuccagc

SEQ ID NO: 126470 - RNA, 32 nt, Homo Sapiens
ccuucgggcaugugacagcagugugguccacu

SEQ ID NO: 126471 - RNA, 32 nt, Homo Sapiens
guagacugcugucaaggaggcuucaucagaag

SEQ ID NO: 126472 - RNA, 32 nt, Homo Sapiens
ugacauguauuuucuuuuuuccuuguuuuguu

SEQ ID NO: 126473 - RNA, 32 nt, Homo Sapiens
cuuauugacaccuguuacccauuaggggugau

SEQ ID NO: 126474 - RNA, 32 nt, Homo Sapiens
auagcauaaaauaaaugugguuuucuaaaaca

SEQ ID NO: 126475 - RNA, 32 nt, Homo Sapiens
cagguguugggcggggggaggguuguggcaag

SEQ ID NO: 126476 - RNA, 32 nt, Homo Sapiens
gugggggguggggguggggccacaaaaggaaa

SEQ ID NO: 126477 - RNA, 32 nt, Homo Sapiens
gggcuccaacuggguacagccugggugcaguu

SEQ ID NO: 126478 - RNA, 32 nt, Homo Sapiens
caaaccccagcgagauccccccugugcugaug

SEQ ID NO: 126479 - RNA, 28 nt, Homo Sapiens
uuaugucaaggcagcauuauaaaccuuc

SEQ ID NO: 126480 - RNA, 32 nt, Homo Sapiens
guuuuguugccuuuuucuuaauugauaacaca

SEQ ID NO: 126481 - RNA, 32 nt, Homo Sapiens
cugguuauuggauuuuuuuucuuuuuuuuuag

SEQ ID NO: 126482 - RNA, 32 nt, Homo Sapiens
agacuugugggaaguggguuggagggaggcca

SEQ ID NO: 126483 - RNA, 32 nt, Homo Sapiens
ugccaaggaaaauacggcuaaaaaagaacuua

SEQ ID NO: 126484 - RNA, 32 nt, Homo Sapiens
gagccagccucaggccagggcgggaaagcagg

SEQ ID NO: 126485 - RNA, 32 nt, Homo Sapiens
gguucccgcuauugucucuacuccaucuuccc

SEQ ID NO: 126486 - RNA, 32 nt, Homo Sapiens
acugggcuaccuguagcacugacuggaguuug

SEQ ID NO: 126487 - RNA, 32 nt, Homo Sapiens
gggauaauuuucucuucuuuaggcaaugauua

SEQ ID NO: 126488 - RNA, 32 nt, Homo Sapiens
gugauaaacaacaacucaaaagcugggcauau

SEQ ID NO: 126489 - RNA, 32 nt, Homo Sapiens
auuucaggguucugaaaagacgcagaacauga

SEQ ID NO: 126490 - RNA, 32 nt, Homo Sapiens
aaaggagcuugucuuuccuucugcugugcugg

SEQ ID NO: 126491 - RNA, 32 nt, Homo Sapiens
auggcagccuacucuccuugaguguaugagua

SEQ ID NO: 126492 - RNA, 31 nt, Homo Sapiens
aaaguuguaaauaaaugugaaacaucuucuc

SEQ ID NO: 126493 - RNA, 32 nt, Homo Sapiens
cguagagucaacauuguagguagguuaaaaua

SEQ ID NO: 126494 - RNA, 32 nt, Homo Sapiens
uggagcguggggugggugggacaauggcuccc

SEQ ID NO: 126495 - RNA, 32 nt, Homo Sapiens
ugcccuuccuuccuccagcuggcuggauauuu

SEQ ID NO: 126496 - RNA, 32 nt, Homo Sapiens
ggcugggagggcugcgcgggcugcgcgucgcc

SEQ ID NO: 126497 - RNA, 32 nt, Homo Sapiens
uugguguggugugcggaggagcuccaggcccg

SEQ ID NO: 126498 - RNA, 32 nt, Homo Sapiens
acugggggaaggaaacuuauuggaaaacuuga

SEQ ID NO: 126499 - RNA, 32 nt, Homo Sapiens
ucagccucugcagcugccucaguuuccccagg

SEQ ID NO: 126500 - RNA, 32 nt, Homo Sapiens
gcaggugugaaugccaggagaggugggaggaa

SEQ ID NO: 126501 - RNA, 32 nt, Homo Sapiens
cacugugcuggcaggagcuucagacacgccaa

SEQ ID NO: 126502 - RNA, 32 nt, Homo Sapiens
acuugcagcuccggccacugccugccccuggc

SEQ ID NO: 126503 - RNA, 32 nt, Homo Sapiens
ugugaggaggaccugaugcccgaggaugacca

SEQ ID NO: 126504 - RNA, 32 nt, Homo Sapiens
agcuccagcuccagcccgggccccaucauggc

SEQ ID NO: 126505 - RNA, 32 nt, Homo Sapiens
gugggacgcgcgcggcugugagccugcgggac

SEQ ID NO: 126506 - RNA, 32 nt, Homo Sapiens
gcaguggcggcggcacugcagcugcguggccg

SEQ ID NO: 126507 - RNA, 32 nt, Homo Sapiens
aaggcagauaaaauguacagauguuucauaua

SEQ ID NO: 126508 - RNA, 32 nt, Homo Sapiens
cugagaguggugguggcaaggacugguccagg

SEQ ID NO: 126509 - RNA, 32 nt, Homo Sapiens
aauuuaucaaggaagaaaugguucagaaaaua

SEQ ID NO: 126510 - RNA, 32 nt, Homo Sapiens
ccuggcucucccucaagagugcagccuuggcu

SEQ ID NO: 126511 - RNA, 32 nt, Homo Sapiens
gacaaagagggccacugugcagacacaaagac

SEQ ID NO: 126512 - RNA, 32 nt, Homo Sapiens
acgcguccgggaaggggugagucugggucugg

SEQ ID NO: 126513 - RNA, 32 nt, Homo Sapiens
cugucaaacgagcccauuuucuccaaagugga

SEQ ID NO: 126514 - RNA, 32 nt, Homo Sapiens
uccugcucaucagaagagccugcucgggacgu

SEQ ID NO: 126515 - RNA, 32 nt, Homo Sapiens
gauuguuuucuuuugaaaaguauucauauaug

SEQ ID NO: 126516 - RNA, 32 nt, Homo Sapiens
gcuuccuggauaauuggaaaucucugagaaga

SEQ ID NO: 126517 - RNA, 32 nt, Homo Sapiens
cacauuaacacuacaggacauaaaaugcagag

SEQ ID NO: 126518 - RNA, 32 nt, Homo Sapiens
uucagguucagcgcccuuggggcuaugaaugg

SEQ ID NO: 126519 - RNA, 32 nt, Homo Sapiens
caugagauaccggcaacaacuuugaaaacuug

SEQ ID NO: 126520 - RNA, 32 nt, Homo Sapiens
ggcauccugcuggccugaggcucaccucucag

SEQ ID NO: 126521 - RNA, 32 nt, Homo Sapiens
ucaccuccuaccccagcccccauccugggcug

SEQ ID NO: 126522 - RNA, 32 nt, Homo Sapiens
ggccuaaggagguugucucaguuuuugucagc

SEQ ID NO: 126523 - RNA, 32 nt, Homo Sapiens
ucucagaggacuggcauugucuggagacggcu

SEQ ID NO: 126524 - RNA, 32 nt, Homo Sapiens
ggccagucccacggcucugugcccggugccau

SEQ ID NO: 126525 - RNA, 32 nt, Homo Sapiens
gcuuuaccuguaaaaugguguauauauguaua

SEQ ID NO: 126526 - RNA, 32 nt, Homo Sapiens
augugcagauacuuuaauucauguagauuuuc

SEQ ID NO: 126527 - RNA, 32 nt, Homo Sapiens
gguguucccuggcaucgucuguguccacacag

SEQ ID NO: 126528 - RNA, 32 nt, Homo Sapiens
aaacagcuuccugagggugcuggggcagccac

SEQ ID NO: 126529 - RNA, 32 nt, Homo Sapiens
ggaaacagaaaaugcacugccuagauggaccc

SEQ ID NO: 126530 - RNA, 32 nt, Homo Sapiens
ugacagacuggguuaugggaacaucaaaccaa

SEQ ID NO: 126531 - RNA, 32 nt, Homo Sapiens
ugauaucuuuggaacaaauaauccacgucagc

SEQ ID NO: 126532 - RNA, 32 nt, Homo Sapiens
gauguguggcauuuacuuaaaccaucacauuu

SEQ ID NO: 126533 - RNA, 32 nt, Homo Sapiens
uucaaggcgggugggauaagauuauauuguau

SEQ ID NO: 126534 - RNA, 32 nt, Homo Sapiens
ugucagugaaaucugggaauggcuggauucgg

SEQ ID NO: 126535 - RNA, 32 nt, Homo Sapiens
caaaggcaaaaauaauacauggaauuguauga

SEQ ID NO: 126536 - RNA, 32 nt, Homo Sapiens
ccuacagagggagaggccagagaagcugcaga

SEQ ID NO: 126537 - RNA, 32 nt, Homo Sapiens
ggaggagagaccgaaauucucaggacacaccc

SEQ ID NO: 126538 - RNA, 32 nt, Homo Sapiens
uugcuggcuguguggcggcuccgcgguucgca

SEQ ID NO: 126539 - RNA, 32 nt, Homo Sapiens
uuuugcuugugcucacauguggcaccauccuu

SEQ ID NO: 126540 - RNA, 32 nt, Homo Sapiens
ucauguauugguuucaguaccaagugacuggu

SEQ ID NO: 126541 - RNA, 32 nt, Homo Sapiens
uccccccucccucuccuccagucgggcugcac

SEQ ID NO: 126542 - RNA, 32 nt, Homo Sapiens
auaugcaauauuuuauuuuuuaugucugauuu

SEQ ID NO: 126543 - RNA, 32 nt, Homo Sapiens
caccacugacagaugauucacagagagagacu

SEQ ID NO: 126544 - RNA, 32 nt, Homo Sapiens
gacuuuacagaaaaauggauagaaaaauucuu

SEQ ID NO: 126545 - RNA, 32 nt, Homo Sapiens
gcgccgcgggcgggucgccuccccuccuguag

SEQ ID NO: 126546 - RNA, 32 nt, Homo Sapiens
cuccuccccucgcuccucgcccugggccucag

SEQ ID NO: 126547 - RNA, 32 nt, Homo Sapiens
aacggacuuaaaugugauacauaaaacuagau

SEQ ID NO: 126548 - RNA, 32 nt, Homo Sapiens
ucuuauuugugauucucuguguucauguugcu

SEQ ID NO: 126549 - RNA, 32 nt, Homo Sapiens
aggaagaaagggagagagggccaggcagucgc

SEQ ID NO: 126550 - RNA, 32 nt, Homo Sapiens
gcaggagcgucauggccguggcgcugucugcg

SEQ ID NO: 126551 - RNA, 32 nt, Homo Sapiens
cccugggguucucccccuuucucuccagccug

SEQ ID NO: 126552 - RNA, 32 nt, Homo Sapiens
uguaccuuuccacgccucuucucugcgaaaug

SEQ ID NO: 126553 - RNA, 32 nt, Homo Sapiens
aagcccacgcagcacagcccuccagcuggggu

SEQ ID NO: 126554 - RNA, 32 nt, Homo Sapiens
agccugaccaacauggacaaaccccgucucua

SEQ ID NO: 126555 - RNA, 32 nt, Homo Sapiens
uucccucuuucuccuucuuaaucuuuuuaaac

SEQ ID NO: 126556 - RNA, 32 nt, Homo Sapiens
acgcccggguuccgaaagucucggggguggcu

SEQ ID NO: 126557 - RNA, 32 nt, Homo Sapiens
gggaacuguguucuuuccucccugcccucuac

SEQ ID NO: 126558 - RNA, 32 nt, Homo Sapiens
gccugcagcccggacucggcacucacagcugc

SEQ ID NO: 126559 - RNA, 32 nt, Homo Sapiens
cgccgggcccugccccgcaucccggccuuaug

SEQ ID NO: 126560 - RNA, 32 nt, Homo Sapiens
uggcaaccgcagggagagccggcggcccagcu

SEQ ID NO: 126561 - RNA, 32 nt, Homo Sapiens
cgauuguuugguuuuuaaaucugagaagccua

SEQ ID NO: 126562 - RNA, 32 nt, Homo Sapiens
gguggguaguaauacuaucauugaaguuaaug

SEQ ID NO: 126563 - RNA, 32 nt, Homo Sapiens
ugcggcugaggcucgggcgcgcucaggcccgg

SEQ ID NO: 126564 - RNA, 32 nt, Homo Sapiens
uugccggugcccagccccuguccccucuguca

SEQ ID NO: 126565 - RNA, 32 nt, Homo Sapiens
cauguguuuaaaaagcacuugcugagauucag

SEQ ID NO: 126566 - RNA, 32 nt, Homo Sapiens
cuggacagcugagugucauaaacucuaaaaua

SEQ ID NO: 126567 - RNA, 31 nt, Homo Sapiens
agcuuucaguggagaaagcgguccucugaaa

SEQ ID NO: 126568 - RNA, 32 nt, Homo Sapiens
ccuccucccccauuuugauguuaagguggaga

SEQ ID NO: 126569 - RNA, 32 nt, Homo Sapiens
uugccucugaagaaacugccuucauuguauau

SEQ ID NO: 126570 - RNA, 32 nt, Homo Sapiens
gaugagcuaugaaaugaagcuauagacuuuau

SEQ ID NO: 126571 - RNA, 32 nt, Homo Sapiens
caaauaggucacugaaugauaagauuugcacc

SEQ ID NO: 126572 - RNA, 32 nt, Homo Sapiens
cgagugaccccucccggcgcccgccccaccuc

SEQ ID NO: 126573 - RNA, 32 nt, Homo Sapiens
caaaauguagacaauuaauauucaggugcuua

SEQ ID NO: 126574 - RNA, 32 nt, Homo Sapiens
aacagcauuuuucucuagcagagaaauuggaa

SEQ ID NO: 126575 - RNA, 32 nt, Homo Sapiens
gcagcaagcaacaugacagaugguggcacgcu

SEQ ID NO: 126576 - RNA, 32 nt, Homo Sapiens
auuuugcuaaaugugaaugaugauccuaggca

SEQ ID NO: 126577 - RNA, 30 nt, Homo Sapiens
augaaagcgcccguuccagcguccucucca

SEQ ID NO: 126578 - RNA, 32 nt, Homo Sapiens
cucgcucgcucgagucgccggcugcuugacuc

SEQ ID NO: 126579 - RNA, 32 nt, Homo Sapiens
uuggaggauacugggcagcugaacugccucac

SEQ ID NO: 126580 - RNA, 32 nt, Homo Sapiens
ccuccaagccccagcccuccuuccuaaguacu

SEQ ID NO: 126581 - RNA, 32 nt, Homo Sapiens
ugaaguguucccuuuuucauaauuacuguacu

SEQ ID NO: 126582 - RNA, 32 nt, Homo Sapiens
aaacguaucuuuccuuuaugugacgcgucucu

SEQ ID NO: 126583 - RNA, 32 nt, Homo Sapiens
ugcuggcagaacugaaauauaaacuguaaggg

SEQ ID NO: 126584 - RNA, 32 nt, Homo Sapiens
gggggucuuggaggcagggcugucccacaggg

SEQ ID NO: 126585 - RNA, 32 nt, Homo Sapiens
ccggcacuucggggguuuugggcgccggagac

SEQ ID NO: 126586 - RNA, 32 nt, Homo Sapiens
gcugccaucccggcuggccgcccggauggcga

SEQ ID NO: 126587 - RNA, 31 nt, Homo Sapiens
uggcauuugugcuauuguucauucucuguga

SEQ ID NO: 126588 - RNA, 32 nt, Homo Sapiens
aaauguaauaauauuaaugcaguauugcaaca

SEQ ID NO: 126589 - RNA, 32 nt, Homo Sapiens
ucuccaucaguucaccuugugucaucucauaa

SEQ ID NO: 126590 - RNA, 32 nt, Homo Sapiens
uuuaaaaagauggaaaauuauaccauacccag

SEQ ID NO: 126591 - RNA, 32 nt, Homo Sapiens
agcugagugaaagcgguuccuuugaaaacuaa

SEQ ID NO: 126592 - RNA, 32 nt, Homo Sapiens
guucuaugaaguaccaauguauuaucuguggu

SEQ ID NO: 126593 - RNA, 32 nt, Homo Sapiens
cugccccggaagauccucagcuggugcaggug

SEQ ID NO: 126594 - RNA, 32 nt, Homo Sapiens
gcuuuuuacaccugauuggaaugcagaaaaaa

SEQ ID NO: 126595 - RNA, 32 nt, Homo Sapiens
aucccuggaccccugcccuccuuuuuucugcu

SEQ ID NO: 126596 - RNA, 32 nt, Homo Sapiens
gcaaauuuccgaaaaccccagacggccucaga

SEQ ID NO: 126597 - RNA, 32 nt, Homo Sapiens
caagacccugccucuuccacuccacccuucuc

SEQ ID NO: 126598 - RNA, 32 nt, Homo Sapiens
acgcccgucacccacaccuugagcacacacca

SEQ ID NO: 126599 - RNA, 32 nt, Homo Sapiens
aaacgcaaacgauuuauuauccagauuauuug

SEQ ID NO: 126600 - RNA, 32 nt, Homo Sapiens
cacacacacacacacacacacacacacucuga

SEQ ID NO: 126601 - RNA, 32 nt, Homo Sapiens
cauucccaugaccucccucugcuuguuuuggg

SEQ ID NO: 126602 - RNA, 32 nt, Homo Sapiens
uccuccguguggacugugccucaggccagggc

SEQ ID NO: 126603 - RNA, 32 nt, Homo Sapiens
acugccgggcgcuguggcucacgccaguaauc

SEQ ID NO: 126604 - RNA, 32 nt, Homo Sapiens
uucucugucccgguuccugggguugcacagac

SEQ ID NO: 126605 - RNA, 32 nt, Homo Sapiens
uaagauuguccguuuauguuuauuuaaauggu

SEQ ID NO: 126606 - RNA, 32 nt, Homo Sapiens
guucugugaggagaggacccaggagugugggg

SEQ ID NO: 126607 - RNA, 32 nt, Homo Sapiens
ccggcccgggauacugcccccggcccagaucc

SEQ ID NO: 126608 - RNA, 32 nt, Homo Sapiens
cauggccccccuccuccaggagaacucgcggc

SEQ ID NO: 126609 - RNA, 32 nt, Homo Sapiens
ucgccgcucucuugcgucccaaccagagcgcu

SEQ ID NO: 126610 - RNA, 32 nt, Homo Sapiens
aauaugagcaaaaacugaucuuaagagcagac

SEQ ID NO: 126611 - RNA, 32 nt, Homo Sapiens
cgcggccgcggcgcgagccgggaccccuggaa

SEQ ID NO: 126612 - RNA, 32 nt, Homo Sapiens
aagauauuugaaauccuaaugaggaaaucaga

SEQ ID NO: 126613 - RNA, 32 nt, Homo Sapiens
aacugcucauuucaugaagcaagaauggagga

SEQ ID NO: 126614 - RNA, 32 nt, Homo Sapiens
cagggcccccagcaccccugugucugcagagu

SEQ ID NO: 126615 - RNA, 32 nt, Homo Sapiens
uuggcauguucuuuucuguuugucuauuaaug

SEQ ID NO: 126616 - RNA, 28 nt, Homo Sapiens
gccaugggccgcggggcccguguccccu

SEQ ID NO: 126617 - RNA, 27 nt, Homo Sapiens
uauaacaauagcaaaauuuuuuaaagc

SEQ ID NO: 126618 - RNA, 32 nt, Homo Sapiens
ggagccccauaggccaucaucauccuuauccc

SEQ ID NO: 126619 - RNA, 32 nt, Homo Sapiens
ccugaugagggucagcugagggggcugagcau

SEQ ID NO: 126620 - RNA, 32 nt, Homo Sapiens
cauggaaucuccuugcuaaccaucaccaccag

SEQ ID NO: 126621 - RNA, 32 nt, Homo Sapiens
gagaaaaaaugaaaccagacuggccgaggagg

SEQ ID NO: 126622 - RNA, 32 nt, Homo Sapiens
uggggugcagcacuuaaacugccucguaaccc

SEQ ID NO: 126623 - RNA, 32 nt, Homo Sapiens
aucagugccgcuucgucacgggccugcgcgug

SEQ ID NO: 126624 - RNA, 32 nt, Homo Sapiens
ucuuagccaagagcuuggcauuuugcugcaug

SEQ ID NO: 126625 - RNA, 32 nt, Homo Sapiens
cccagcauucuagccuuggagaaaugacaaug

SEQ ID NO: 126626 - RNA, 32 nt, Homo Sapiens
aggcaguaagaauuauuuacugaaacaucuag

SEQ ID NO: 126627 - RNA, 31 nt, Homo Sapiens
uguuggcacacucaagcgggaguccaccccu

SEQ ID NO: 126628 - RNA, 32 nt, Homo Sapiens
cgcgcggcucccaccccuccccucucacgggc

SEQ ID NO: 126629 - RNA, 32 nt, Homo Sapiens
uacagcuugagccagugaggcagauugggcug

SEQ ID NO: 126630 - RNA, 32 nt, Homo Sapiens
aaaacuugaaaaauuacaggugagauuucugu

SEQ ID NO: 126631 - RNA, 32 nt, Homo Sapiens
gucagaacaguggaacaagugauuugcauucu

SEQ ID NO: 126632 - RNA, 32 nt, Homo Sapiens
ugacgugaacaguaaaucaugucugcagaaag

SEQ ID NO: 126633 - RNA, 32 nt, Homo Sapiens
uaaaaagacgcuuuccucuccucuucccuccu

SEQ ID NO: 126634 - RNA, 32 nt, Homo Sapiens
uguuuugucugggaagcagggauugcugacau

SEQ ID NO: 126635 - RNA, 32 nt, Homo Sapiens
caggaaaucuauauuauaugcauucaaaaaga

SEQ ID NO: 126636 - RNA, 32 nt, Homo Sapiens
aaguuuacaaauaacgguuuuuauuuugauuu

SEQ ID NO: 126637 - RNA, 32 nt, Homo Sapiens
ccccugacaaaaaaccuggugauguuaagcaa

SEQ ID NO: 126638 - RNA, 32 nt, Homo Sapiens
ggugugucccuccgagugccccccgcuaggga

SEQ ID NO: 126639 - RNA, 32 nt, Homo Sapiens
aaaacaugucugaaagucacauauugugaaaa

SEQ ID NO: 126640 - RNA, 32 nt, Homo Sapiens
gcccucuccccucccugccccugugugagucu

SEQ ID NO: 126641 - RNA, 32 nt, Homo Sapiens
cucauuucauuuuguccaaccaaaaagaaaag

SEQ ID NO: 126642 - RNA, 32 nt, Homo Sapiens
ggcguccagcgugccggggaacccucucugcg

SEQ ID NO: 126643 - RNA, 30 nt, Homo Sapiens
ggcacauuucccccuuucucuuuaaagcca

SEQ ID NO: 126644 - RNA, 32 nt, Homo Sapiens
gucaauguuuguguccaccaccagccagaaga

SEQ ID NO: 126645 - RNA, 32 nt, Homo Sapiens
cuucacaccuuuuugaaaucugcccuacaaaa

SEQ ID NO: 126646 - RNA, 32 nt, Homo Sapiens
uaauggaacaaauggcaaugugaguagguuac

SEQ ID NO: 126647 - RNA, 32 nt, Homo Sapiens
ucacagugaaaagccaugcuagaauuguagug

SEQ ID NO: 126648 - RNA, 32 nt, Homo Sapiens
auagauacugacauuuuuuacauuuccaacaa

SEQ ID NO: 126649 - RNA, 32 nt, Homo Sapiens
aaagcgaggaggaggcgagagcggccgccgcu

SEQ ID NO: 126650 - RNA, 32 nt, Homo Sapiens
ucccagucuggccgggguccccggccccccug

SEQ ID NO: 126651 - RNA, 32 nt, Homo Sapiens
cgcugggccgaccccagagaggcgcuggacag

SEQ ID NO: 126652 - RNA, 32 nt, Homo Sapiens
uuccucacagcacccaggauugugacugacuc

SEQ ID NO: 126653 - RNA, 31 nt, Homo Sapiens
gggggacagcgcagggccauggaggaggcgg

SEQ ID NO: 126654 - RNA, 32 nt, Homo Sapiens
uucuuauuuuucccccacccccgaaaauguuc

SEQ ID NO: 126655 - RNA, 32 nt, Homo Sapiens
acuacuucacgacccagucaggagacccgaac

SEQ ID NO: 126656 - RNA, 32 nt, Homo Sapiens
uggacacugcucuuccuacuuccuccucuccu

SEQ ID NO: 126657 - RNA, 32 nt, Homo Sapiens
cagaaaguccucugcuggcauucugcaucccc

SEQ ID NO: 126658 - RNA, 32 nt, Homo Sapiens
augccugugccacugacguccaggcaugaggu

SEQ ID NO: 126659 - RNA, 32 nt, Homo Sapiens
caggaccaaacacugagcauguuaucuggagg

SEQ ID NO: 126660 - RNA, 32 nt, Homo Sapiens
uauucauuaugaaaauauguacagcuuaagga

SEQ ID NO: 126661 - RNA, 32 nt, Homo Sapiens
aagaaggagugaccgguauccuccccuucccc

SEQ ID NO: 126662 - RNA, 32 nt, Homo Sapiens
uucugcuauccuuagucauaacucugcgguac

SEQ ID NO: 126663 - RNA, 32 nt, Homo Sapiens
augugcucacccaaagugaaaucaucucuggg

SEQ ID NO: 126664 - RNA, 32 nt, Homo Sapiens
gaccagcuagccuggacuuuggcuucuuugcc

SEQ ID NO: 126665 - RNA, 32 nt, Homo Sapiens
cgaggcucgccagcuccacgaagcgucaccgg

SEQ ID NO: 126666 - RNA, 32 nt, Homo Sapiens
acaggagaggagagggcggcggcggcgguggg

SEQ ID NO: 126667 - RNA, 32 nt, Homo Sapiens
aguuuucuuccaugauuuuaaauugugaucga

SEQ ID NO: 126668 - RNA, 32 nt, Homo Sapiens
ucaagaagaaauaccaauaacacacacagaac

SEQ ID NO: 126669 - RNA, 32 nt, Homo Sapiens
cacuugugaugucuucaaaggaaccacugaug

SEQ ID NO: 126670 - RNA, 32 nt, Homo Sapiens
ugaucuagaaaccagcagcuacuggcucaaau

SEQ ID NO: 126671 - RNA, 32 nt, Homo Sapiens
agcaacggaaugccuuggccuggcuguucagu

SEQ ID NO: 126672 - RNA, 32 nt, Homo Sapiens
cacaacgggggccagcugcuuuucggggauga

SEQ ID NO: 126673 - RNA, 32 nt, Homo Sapiens
gcacuaucucaacacauuuuuccuuccgugcc

SEQ ID NO: 126674 - RNA, 32 nt, Homo Sapiens
cugacuuuuuauuuucuacuaugguuccuuua

SEQ ID NO: 126675 - RNA, 32 nt, Homo Sapiens
caccgccggcgacaggggccggagucugcccg

SEQ ID NO: 126676 - RNA, 32 nt, Homo Sapiens
ucacugugggaggucccagcuccagccccccu

SEQ ID NO: 126677 - RNA, 32 nt, Homo Sapiens
gguacggcuaacuuaugguccccauuuuccac

SEQ ID NO: 126678 - RNA, 32 nt, Homo Sapiens
aacagcugggcaugggucauggccauucauga

SEQ ID NO: 126679 - RNA, 32 nt, Homo Sapiens
accuggguccccaccgugaggaccccgugggc

SEQ ID NO: 126680 - RNA, 32 nt, Homo Sapiens
cauugagaaaauguaugcauaagaauggaaug

SEQ ID NO: 126681 - RNA, 32 nt, Homo Sapiens
acugcgggggcugugcgcgcgcgagcgggugu

SEQ ID NO: 126682 - RNA, 32 nt, Homo Sapiens
cugccugcgcgcugcuccugcucugcuaccug

SEQ ID NO: 126683 - RNA, 32 nt, Homo Sapiens
ggacgcacgcacccggcgaagguugcuccacc

SEQ ID NO: 126684 - RNA, 32 nt, Homo Sapiens
ugcugcugagagugaaagaaaggaggaaaguc

SEQ ID NO: 126685 - RNA, 32 nt, Homo Sapiens
gagaccuuugaaaauauuaagggaaaucuauu

SEQ ID NO: 126686 - RNA, 32 nt, Homo Sapiens
cuguuucuugucaucacgcagcccuggaccca

SEQ ID NO: 126687 - RNA, 32 nt, Homo Sapiens
caaugugaauuuucuuuuuauuugggagauug

SEQ ID NO: 126688 - RNA, 30 nt, Homo Sapiens
guuuucagaaguggcaugcagccucagaga

SEQ ID NO: 126689 - RNA, 32 nt, Homo Sapiens
gaguccuguaaauaaagggaauguaaacaugg

SEQ ID NO: 126690 - RNA, 32 nt, Homo Sapiens
ggccucggaggggcuccucgcggugcugcgcg

SEQ ID NO: 126691 - RNA, 32 nt, Homo Sapiens
gcagcaggcuggaauaaacgcugcugguaugu

SEQ ID NO: 126692 - RNA, 32 nt, Homo Sapiens
agcuccuuccguugcgccccagcggcgggucc

SEQ ID NO: 126693 - RNA, 32 nt, Homo Sapiens
gcauccaggccuaggccuccccguccaucccc

SEQ ID NO: 126694 - RNA, 32 nt, Homo Sapiens
gcugcucugaagagcuuccgcgccuucccccu

SEQ ID NO: 126695 - RNA, 32 nt, Homo Sapiens
cacagggcagugagcucugucuucccccaccu

SEQ ID NO: 126696 - RNA, 32 nt, Homo Sapiens
caaacgagaacaaaaaguauucccugcaagca

SEQ ID NO: 126697 - RNA, 32 nt, Homo Sapiens
cuugagaaggugaucgcucugcucucccaacc

SEQ ID NO: 126698 - RNA, 32 nt, Homo Sapiens
uucaccagccagcagcugugcccccgccggug

SEQ ID NO: 126699 - RNA, 32 nt, Homo Sapiens
aacuguucugcucauggaagucuuaaacagaa

SEQ ID NO: 126700 - RNA, 32 nt, Homo Sapiens
acgugugcugacgcguugcuccuccguccugc

SEQ ID NO: 126701 - RNA, 32 nt, Homo Sapiens
guaauauaaacaauauaaauaaaugauccugu

SEQ ID NO: 126702 - RNA, 32 nt, Homo Sapiens
ucccucugguucauagcccgcgggacagagca

SEQ ID NO: 126703 - RNA, 32 nt, Homo Sapiens
cgacagcuccgccgcgcacgcacauggagggg

SEQ ID NO: 126704 - RNA, 32 nt, Homo Sapiens
aguguucccccuccuccucaccacggggcucc

SEQ ID NO: 126705 - RNA, 32 nt, Homo Sapiens
uucugggcauggcagggccaggccucugcugg

SEQ ID NO: 126706 - RNA, 32 nt, Homo Sapiens
gcacaggcuuggagugcaguggugcgaucaua

SEQ ID NO: 126707 - RNA, 26 nt, Homo Sapiens
gaugcccagauugcacgaccacuucu

SEQ ID NO: 126708 - RNA, 32 nt, Homo Sapiens
ccaacggcggagggggcggggaagggagauuc

SEQ ID NO: 126709 - RNA, 32 nt, Homo Sapiens
ccggccccaagccccugugucuccuuguuaca

SEQ ID NO: 126710 - RNA, 32 nt, Homo Sapiens
cuuuuacagcccccgccccccaucccgugguc

SEQ ID NO: 126711 - RNA, 32 nt, Homo Sapiens
ccggggaaggauuuugcaguucuuuggcugaa

SEQ ID NO: 126712 - RNA, 32 nt, Homo Sapiens
cuccgggcgccuccagcuccggcucgggcucc

SEQ ID NO: 126713 - RNA, 32 nt, Homo Sapiens
ggguuucuagauaguuugggaacgggguugau

SEQ ID NO: 126714 - RNA, 32 nt, Homo Sapiens
cccucucaggagauggcgcuggcaccguuuuu

SEQ ID NO: 126715 - RNA, 32 nt, Homo Sapiens
cuggggggacgaagggggaacccggagcaccu

SEQ ID NO: 126716 - RNA, 32 nt, Homo Sapiens
gucauagggaagagaaagaaauggaagcacag

SEQ ID NO: 126717 - RNA, 30 nt, Homo Sapiens
ccgguggugcccgugcccgcaggaacuggg

SEQ ID NO: 126718 - RNA, 32 nt, Homo Sapiens
auuccaagugggaugguuguggcauuaguuua

SEQ ID NO: 126719 - RNA, 32 nt, Homo Sapiens
aggaagguuugagcuaaaaugaacuagagacc

SEQ ID NO: 126720 - RNA, 32 nt, Homo Sapiens
ggccgcgcuccagccucaccaggcuccccggc

SEQ ID NO: 126721 - RNA, 32 nt, Homo Sapiens
ggccgagagaucuggaaucggggucagcgggg

SEQ ID NO: 126722 - RNA, 32 nt, Homo Sapiens
gagaaucuuggguuccugaaaaagaacgcccu

SEQ ID NO: 126723 - RNA, 32 nt, Homo Sapiens
uaccacaauuuaaaaauucuauucuguuuaca

SEQ ID NO: 126724 - RNA, 32 nt, Homo Sapiens
aggcugcagagcccggccccaccucccugcgc

SEQ ID NO: 126725 - RNA, 32 nt, Homo Sapiens
cgcguccgggacccggcccgcgccuucugccc

SEQ ID NO: 126726 - RNA, 32 nt, Homo Sapiens
uucuauuuugugaaaggguagcaagaaacauu

SEQ ID NO: 126727 - RNA, 32 nt, Homo Sapiens
uccaauacagaaaagaauuuuuaauaaaaacu

SEQ ID NO: 126728 - RNA, 32 nt, Homo Sapiens
gguccuggugcugcggccacaccacccugggg

SEQ ID NO: 126729 - RNA, 32 nt, Homo Sapiens
ucccccggccccagcgaccaugccccguaaag

SEQ ID NO: 126730 - RNA, 32 nt, Homo Sapiens
guguccuccgauaugaaguccuggagcacugu

SEQ ID NO: 126731 - RNA, 32 nt, Homo Sapiens
gugauggagauacuaucuccuaucaaccuaug

SEQ ID NO: 126732 - RNA, 32 nt, Homo Sapiens
aaaggcuuccccuacaccccagccuccugcug

SEQ ID NO: 126733 - RNA, 32 nt, Homo Sapiens
gcauucaggaacacuuuuuuuuuuuuuuuuuu

SEQ ID NO: 126734 - RNA, 32 nt, Homo Sapiens
uguuugaaggaaaacugaagaaaagacuuggc

SEQ ID NO: 126735 - RNA, 32 nt, Homo Sapiens
auuuuggccacuuuuuucagauuuuacaucau

SEQ ID NO: 126736 - RNA, 32 nt, Homo Sapiens
auaaaugaauguaccauugacaaugguggcug

SEQ ID NO: 126737 - RNA, 32 nt, Homo Sapiens
aagcucuguccucauugcaugugcuuucucag

SEQ ID NO: 126738 - RNA, 32 nt, Homo Sapiens
cccaaguccccgcuccccgcuccccucggcgg

SEQ ID NO: 126739 - RNA, 32 nt, Homo Sapiens
agaacaaauccuagagucuuugaaauuucuaa

SEQ ID NO: 126740 - RNA, 32 nt, Homo Sapiens
ugcacuucuuuggcugguggguaaugccaggg

SEQ ID NO: 126741 - RNA, 32 nt, Homo Sapiens
agaaaaccaaaaucaaacugagauuucaaguc

SEQ ID NO: 126742 - RNA, 32 nt, Homo Sapiens
uuuauccccgacuuuuaaaauuuuaaagcauu

SEQ ID NO: 126743 - RNA, 32 nt, Homo Sapiens
agggacagcgaccgccugggccaggacaggug

SEQ ID NO: 126744 - RNA, 32 nt, Homo Sapiens
aauuccuguccuccagcccccggcccacgagc

SEQ ID NO: 126745 - RNA, 32 nt, Homo Sapiens
cagagugcgacccguggccccuggacaugcag

SEQ ID NO: 126746 - RNA, 32 nt, Homo Sapiens
agcauaugguaguacgaacauaaaaaugcauu

SEQ ID NO: 126747 - RNA, 32 nt, Homo Sapiens
gcaagaaagcaucauguaaccgaaaugcugaa

SEQ ID NO: 126748 - RNA, 32 nt, Homo Sapiens
ugcugugguacugggugagcggcucaugugug

SEQ ID NO: 126749 - RNA, 32 nt, Homo Sapiens
cgaccacugcucugcgggcggguggucuuagc

SEQ ID NO: 126750 - RNA, 32 nt, Homo Sapiens
gcagugccugccugccuauggaauggagcugg

SEQ ID NO: 126751 - RNA, 32 nt, Homo Sapiens
agccgucucuucugcaugguuuauuuucccuc

SEQ ID NO: 126752 - RNA, 32 nt, Homo Sapiens
auacauauauauauuucuuuaaauuuuugagu

SEQ ID NO: 126753 - RNA, 32 nt, Homo Sapiens
augaaggcauuuguuaauacaagaugcaacgc

SEQ ID NO: 126754 - RNA, 32 nt, Homo Sapiens
cgcagcacuccaguuccgccccaacccgggaa

SEQ ID NO: 126755 - RNA, 32 nt, Homo Sapiens
caccagcuguauauauuuuucuuauuuaugua

SEQ ID NO: 126756 - RNA, 32 nt, Homo Sapiens
gguggucuaggaguauaguuuuaauuauauuu

SEQ ID NO: 126757 - RNA, 32 nt, Homo Sapiens
agauguuaaugcucgagacaaaaauuggcaaa

SEQ ID NO: 126758 - RNA, 32 nt, Homo Sapiens
agguagcgcugggcuucuggggccaggacaag

SEQ ID NO: 126759 - RNA, 32 nt, Homo Sapiens
uaagcagaagaaaaaauuagugagcuugaaga

SEQ ID NO: 126760 - RNA, 32 nt, Homo Sapiens
uuuaaaaauuuacuucuuacuccacccaacac

SEQ ID NO: 126761 - RNA, 32 nt, Homo Sapiens
acuucaaccugcugugccugcccgccucgcgg

SEQ ID NO: 126762 - RNA, 32 nt, Homo Sapiens
ggucagaaauaccauugcacacccccacuccc

SEQ ID NO: 126763 - RNA, 32 nt, Homo Sapiens
gcuuccuugugaacuaacuauauuuuagccau

SEQ ID NO: 126764 - RNA, 32 nt, Homo Sapiens
uuggcucuuaaaaggugggagagcagcccaac

SEQ ID NO: 126765 - RNA, 32 nt, Homo Sapiens
guauuuauauuuguaucugagauaguaaacaa

SEQ ID NO: 126766 - RNA, 32 nt, Homo Sapiens
uucauguuugcacuuugcuuugugaauuuggc

SEQ ID NO: 126767 - RNA, 32 nt, Homo Sapiens
cauggaaaaacuagaaacaaauuuaagaaaac

SEQ ID NO: 126768 - RNA, 32 nt, Homo Sapiens
cuccgggcagccaccaccuccucggucugccc

SEQ ID NO: 126769 - RNA, 30 nt, Homo Sapiens
accgagggagguggagcuucaggaugccug

SEQ ID NO: 126770 - RNA, 32 nt, Homo Sapiens
ggcgggauaacugugggugcugcgggcaacag

SEQ ID NO: 126771 - RNA, 32 nt, Homo Sapiens
uuccuggauguggaugucaucauuucugggaa

SEQ ID NO: 126772 - RNA, 32 nt, Homo Sapiens
ccaugccgagacccaacaggccacagaggacu

SEQ ID NO: 126773 - RNA, 32 nt, Homo Sapiens
ccguugaggaggagacggaggagaccgacguu

SEQ ID NO: 126774 - RNA, 32 nt, Homo Sapiens
ggggagggcgagggcgagaaagggcaggcacu

SEQ ID NO: 126775 - RNA, 32 nt, Homo Sapiens
gcugcgcggggcugaggcggccucgauuuggg

SEQ ID NO: 126776 - RNA, 32 nt, Homo Sapiens
ggccuccacccucccccaacagcagggauggg

SEQ ID NO: 126777 - RNA, 32 nt, Homo Sapiens
gugcaauggcauggucucggcucacugcaacc

SEQ ID NO: 126778 - RNA, 32 nt, Homo Sapiens
uuugcagauauuaaagaggagccugaaacugu

SEQ ID NO: 126779 - RNA, 32 nt, Homo Sapiens
uuuuuuuuuuuuuuuuuuuuuacucuagcuca

SEQ ID NO: 126780 - RNA, 32 nt, Homo Sapiens
uggucucuggaauugcauauccugcuagugau

SEQ ID NO: 126781 - RNA, 32 nt, Homo Sapiens
cuggauagaacugggacaaacacagacccauc

SEQ ID NO: 126782 - RNA, 32 nt, Homo Sapiens
ugcccuccuggaacucccccagccuacaaccu

SEQ ID NO: 126783 - RNA, 32 nt, Homo Sapiens
ucuguauguuuggaauuuuucuuaauaaaaga

SEQ ID NO: 126784 - RNA, 32 nt, Homo Sapiens
gcuccucagcugcaggauggcuccuuguucac

SEQ ID NO: 126785 - RNA, 32 nt, Homo Sapiens
acucagaauuggaacuuuuuacauuugaguuu

SEQ ID NO: 126786 - RNA, 32 nt, Homo Sapiens
cuagcggccacgcucccuccccggagggcggc

SEQ ID NO: 126787 - RNA, 32 nt, Homo Sapiens
ggauaaguggauggagaaccuccggcgagcgg

SEQ ID NO: 126788 - RNA, 32 nt, Homo Sapiens
augaauuuguaaaaauaaccugcuacaaauug

SEQ ID NO: 126789 - RNA, 32 nt, Homo Sapiens
gggacggagcagcuggugucucggcaguagau

SEQ ID NO: 126790 - RNA, 32 nt, Homo Sapiens
cugcucacaucccacccucugcccaacucugg

SEQ ID NO: 126791 - RNA, 30 nt, Homo Sapiens
ucugacacacugggcugccguccgguguca

SEQ ID NO: 126792 - RNA, 32 nt, Homo Sapiens
cauucuaagcaaaaacauaguauuagugauac

SEQ ID NO: 126793 - RNA, 32 nt, Homo Sapiens
cugaggaggaggaggagaagcggaugagaucg

SEQ ID NO: 126794 - RNA, 32 nt, Homo Sapiens
cucaagcaaaaauucaacugcauuaaccgauc

SEQ ID NO: 126795 - RNA, 32 nt, Homo Sapiens
uccacuaaaaauacaaaaaauuaacugggcau

SEQ ID NO: 126796 - RNA, 31 nt, Homo Sapiens
auuuggugaaacauuuguaaggguaggaguu

SEQ ID NO: 126797 - RNA, 32 nt, Homo Sapiens
gcucucuggagauuuaguucucuucuucuagg

SEQ ID NO: 126798 - RNA, 32 nt, Homo Sapiens
agugcaggggagaggggcuuggauaugccaug

SEQ ID NO: 126799 - RNA, 32 nt, Homo Sapiens
aaaccuauucauaaguuuuacaaucaaguaua

SEQ ID NO: 126800 - RNA, 32 nt, Homo Sapiens
gaaggagcgcgcgggcggucuggccccgcccc

SEQ ID NO: 126801 - RNA, 32 nt, Homo Sapiens
ucaucugcaaagccuuuuuuuuuuuugcucuu

SEQ ID NO: 126802 - RNA, 29 nt, Homo Sapiens
ucaaauggacuuggcuucggaaaucacuu

SEQ ID NO: 126803 - RNA, 32 nt, Homo Sapiens
cuuguuaugcagggaguacaguucuuuucauu

SEQ ID NO: 126804 - RNA, 32 nt, Homo Sapiens
ucgggguguugcacaaguuucgaggucaccgg

SEQ ID NO: 126805 - RNA, 32 nt, Homo Sapiens
agggaauguuaaaaccugaggaucaggcauug

SEQ ID NO: 126806 - RNA, 32 nt, Homo Sapiens
gccggcugccagcaugucgcugccuccggaga

SEQ ID NO: 126807 - RNA, 32 nt, Homo Sapiens
cugacaccaccuuugcccuccccgucaccgcg

SEQ ID NO: 126808 - RNA, 32 nt, Homo Sapiens
guggcagaaauauuacuuuaaauuugucuugu

SEQ ID NO: 126809 - RNA, 32 nt, Homo Sapiens
agccucgaaucccaggccccagcccaggcagg

SEQ ID NO: 126810 - RNA, 32 nt, Homo Sapiens
ugcuuugaagguucugauuuucaacugaucaa

SEQ ID NO: 126811 - RNA, 32 nt, Homo Sapiens
gcuagcuggcgcggccucgccucccccucgga

SEQ ID NO: 126812 - RNA, 32 nt, Homo Sapiens
gggaaguuaugaugaagauaacauucacccau

SEQ ID NO: 126813 - RNA, 30 nt, Homo Sapiens
agccagcaagggcggucgggucccgagguc

SEQ ID NO: 126814 - RNA, 32 nt, Homo Sapiens
ucaacaacauauauuauacuugcuacuggaaa

SEQ ID NO: 126815 - RNA, 32 nt, Homo Sapiens
accgcgcagggccacgcagcacaucccguccc

SEQ ID NO: 126816 - RNA, 32 nt, Homo Sapiens
gagcaggggaggggucaguagcagaagcagag

SEQ ID NO: 126817 - RNA, 31 nt, Homo Sapiens
auaugggaauaaaaauuugugcaagucagag

SEQ ID NO: 126818 - RNA, 32 nt, Homo Sapiens
ggaauauauucaggucuagucuucuuauaaua

SEQ ID NO: 126819 - RNA, 32 nt, Homo Sapiens
ugucucuacuaccugaucuccuccuaccacga

SEQ ID NO: 126820 - RNA, 32 nt, Homo Sapiens
ggcuccugggggugagggucugucugagucug

SEQ ID NO: 126821 - RNA, 32 nt, Homo Sapiens
cccauacgacagagcuuuuaacuggugccuuc

SEQ ID NO: 126822 - RNA, 32 nt, Homo Sapiens
cgugagccaccgugcucagccuaaauacuugc

SEQ ID NO: 126823 - RNA, 32 nt, Homo Sapiens
uuaugcaugagcauauuucuuuuaggccgugg

SEQ ID NO: 126824 - RNA, 32 nt, Homo Sapiens
cucgacucgcccgugcugcugccgccgccgaa

SEQ ID NO: 126825 - RNA, 32 nt, Homo Sapiens
ucuacuucaaccagcugcaggcgaugcacacc

SEQ ID NO: 126826 - RNA, 32 nt, Homo Sapiens
gcggcuggagagcgaggaggagcggguggccc

SEQ ID NO: 126827 - RNA, 32 nt, Homo Sapiens
aucuccugacauucucaagccauuccucuaga

SEQ ID NO: 126828 - RNA, 32 nt, Homo Sapiens
cauucuuaucucaaagauuuaaauucccgaau

SEQ ID NO: 126829 - RNA, 32 nt, Homo Sapiens
auguagccccacucuuugagugggauucauuu

SEQ ID NO: 126830 - RNA, 32 nt, Homo Sapiens
uucuauacuauguauauagaagaacauguaua

SEQ ID NO: 126831 - RNA, 32 nt, Homo Sapiens
gggugcguugggcugguggggaggccuaguuu

SEQ ID NO: 126832 - RNA, 32 nt, Homo Sapiens
acugcugggcacagcucugcguugcucccgug

SEQ ID NO: 126833 - RNA, 32 nt, Homo Sapiens
gugauagucauggaugcuuuuauuuuccuugg

SEQ ID NO: 126834 - RNA, 32 nt, Homo Sapiens
uuauguggcuguugguuuuuugagaugacagu

SEQ ID NO: 126835 - RNA, 32 nt, Homo Sapiens
uccuaacauaugacacuucaucuuauauuaag

SEQ ID NO: 126836 - RNA, 32 nt, Homo Sapiens
cuccagcaaccuugugucccagcccugcccuu

SEQ ID NO: 126837 - RNA, 32 nt, Homo Sapiens
agggguuguccacuuuaccuuuauggugaggc

SEQ ID NO: 126838 - RNA, 29 nt, Homo Sapiens
accuacguauguaugcauugguuugcuug

SEQ ID NO: 126839 - RNA, 32 nt, Homo Sapiens
cugcaguccuggaagcgcgagggccucaaagg

SEQ ID NO: 126840 - RNA, 32 nt, Homo Sapiens
gggagaggaccgagcuggaggagcugggugug

SEQ ID NO: 126841 - RNA, 32 nt, Homo Sapiens
acucggucaguuccucgggcgaguuacgggga

SEQ ID NO: 126842 - RNA, 32 nt, Homo Sapiens
uuaaaggaauuucaaaugcaacaaacacuggu

SEQ ID NO: 126843 - RNA, 32 nt, Homo Sapiens
uucucugcuuuguuuuuuuuuaagauauugua

SEQ ID NO: 126844 - RNA, 32 nt, Homo Sapiens
aggcggcuggugccgccacugccacacgaagc

SEQ ID NO: 126845 - RNA, 32 nt, Homo Sapiens
agccgugggagcccggccagggcagggggcuc

SEQ ID NO: 126846 - RNA, 32 nt, Homo Sapiens
ugccugaggguggagagagcuguggcugaggc

SEQ ID NO: 126847 - RNA, 32 nt, Homo Sapiens
ggagccauucaaugaucaaaaauacacuggac

SEQ ID NO: 126848 - RNA, 32 nt, Homo Sapiens
cucuucugguguugcuucuccucccucccauu

SEQ ID NO: 126849 - RNA, 32 nt, Homo Sapiens
cgaggccgcagccgcccggccaguaaggcggc

SEQ ID NO: 126850 - RNA, 32 nt, Homo Sapiens
uggcagaauauggcaguuacaacaucagucaa

SEQ ID NO: 126851 - RNA, 32 nt, Homo Sapiens
uuuuucuuaucacauauauuuaaacuuacaga

SEQ ID NO: 126852 - RNA, 32 nt, Homo Sapiens
acaaggccaauauauaauguugugacaucaua

SEQ ID NO: 126853 - RNA, 32 nt, Homo Sapiens
cguguucugaccacagcucuggugccguuucu

SEQ ID NO: 126854 - RNA, 32 nt, Homo Sapiens
guuauugaugaaauguuaguugauaucauaga

SEQ ID NO: 126855 - RNA, 32 nt, Homo Sapiens
ccaauuauauguucauuuuguauauuuuuugg

SEQ ID NO: 126856 - RNA, 32 nt, Homo Sapiens
auggccccaucucuccuuuuagccucuguguu

SEQ ID NO: 126857 - RNA, 32 nt, Homo Sapiens
gccuacgaaaucaaaccccuccaggauucccg

SEQ ID NO: 126858 - RNA, 32 nt, Homo Sapiens
gcgcuucccgccggccugggccccucggcagu

SEQ ID NO: 126859 - RNA, 32 nt, Homo Sapiens
agguaaauaaaccaaauuauaauuuagagugc

SEQ ID NO: 126860 - RNA, 32 nt, Homo Sapiens
gucauuauaccuaaaaucugcaucauaccugc

SEQ ID NO: 126861 - RNA, 32 nt, Homo Sapiens
uuauuuaaauuaauauacguagauaccagagg

SEQ ID NO: 126862 - RNA, 32 nt, Homo Sapiens
uagugaggcagugagaugcugcugcuguggau

SEQ ID NO: 126863 - RNA, 28 nt, Homo Sapiens
accauggcauccagcccggcccagcguc

SEQ ID NO: 126864 - RNA, 32 nt, Homo Sapiens
gccagaugcaagaauggggaaaagucuggucc

SEQ ID NO: 126865 - RNA, 32 nt, Homo Sapiens
agcuggaguugacccgcccaccugggcuuuuc

SEQ ID NO: 126866 - RNA, 32 nt, Homo Sapiens
aaaauacaaaaauuagucaggugugguggacg

SEQ ID NO: 126867 - RNA, 32 nt, Homo Sapiens
gguguuacuuggauguccuauaaaauacccac

SEQ ID NO: 126868 - RNA, 32 nt, Homo Sapiens
gaaugaacacuuuaacccuuguccugagugcc

SEQ ID NO: 126869 - RNA, 32 nt, Homo Sapiens
agaugggcgggggagcggccggacgcgggcgg

SEQ ID NO: 126870 - RNA, 32 nt, Homo Sapiens
acaggaaacugggaaucucauaggaagagcca

SEQ ID NO: 126871 - RNA, 32 nt, Homo Sapiens
aaacuugcccaggccaaagaagagaacguggg

SEQ ID NO: 126872 - RNA, 32 nt, Homo Sapiens
ggcgccggcugagccagcggcugcugggaggc

SEQ ID NO: 126873 - RNA, 32 nt, Homo Sapiens
uggcuccccagcugcgcugccccgggcgucca

SEQ ID NO: 126874 - RNA, 32 nt, Homo Sapiens
cgucggcaacucccggcccagccuccauacug

SEQ ID NO: 126875 - RNA, 32 nt, Homo Sapiens
gggcagugcccgcagcauccccugacacugcu

SEQ ID NO: 126876 - RNA, 32 nt, Homo Sapiens
auggcgcaaccucgguucacuacaaccuccgc

SEQ ID NO: 126877 - RNA, 32 nt, Homo Sapiens
acagcaggcacgcucagagacacgcaguuaca

SEQ ID NO: 126878 - RNA, 32 nt, Homo Sapiens
cuucauucagcacaacggccucaucaagaucg

SEQ ID NO: 126879 - RNA, 32 nt, Homo Sapiens
cucugccuggccugccugacuucuaaggagcg

SEQ ID NO: 126880 - RNA, 32 nt, Homo Sapiens
augugaaagaagcaaaacuuuuugaagaagca

SEQ ID NO: 126881 - RNA, 32 nt, Homo Sapiens
uaccgccgcccuccccugcggggggccuuucu

SEQ ID NO: 126882 - RNA, 32 nt, Homo Sapiens
cauggaauuaagggggaaagucugcacuggaa

SEQ ID NO: 126883 - RNA, 32 nt, Homo Sapiens
caauagaaggguuguuucuguauuuuaacauu

SEQ ID NO: 126884 - RNA, 32 nt, Homo Sapiens
cauugggaggggcuucugaauuauucuggaua

SEQ ID NO: 126885 - RNA, 32 nt, Homo Sapiens
ucacuucucuuccucccucauggaagaugcaa

SEQ ID NO: 126886 - RNA, 32 nt, Homo Sapiens
auuccgcucuugcuuuccggcaggugauggcg

SEQ ID NO: 126887 - RNA, 31 nt, Homo Sapiens
aguaaaguagaaugaaggauacaaaugauaa

SEQ ID NO: 126888 - RNA, 32 nt, Homo Sapiens
gauucucagacaugucuuucugauguaaaagc

SEQ ID NO: 126889 - RNA, 32 nt, Homo Sapiens
uacucuuccuuccuauguccacagcugacccc

SEQ ID NO: 126890 - RNA, 32 nt, Homo Sapiens
cagccccuuggagcugcagggagcuucagcgg

SEQ ID NO: 126891 - RNA, 32 nt, Homo Sapiens
cugaggaaugcgguucagggcuggggugagag

SEQ ID NO: 126892 - RNA, 32 nt, Homo Sapiens
auacagauaaaacaugacuccuacaaggcccc

SEQ ID NO: 126893 - RNA, 32 nt, Homo Sapiens
gcccgccuuccccgaggcgcccggcuccgagc

SEQ ID NO: 126894 - RNA, 32 nt, Homo Sapiens
uauuuggccucccauucacacagcucaguucu

SEQ ID NO: 126895 - RNA, 30 nt, Homo Sapiens
gcguucugauagaugggggacuguggcuuc

SEQ ID NO: 126896 - RNA, 32 nt, Homo Sapiens
cagugccugccagugucuaccuaauggauaga

SEQ ID NO: 126897 - RNA, 32 nt, Homo Sapiens
gguuggcugauacuuuuuugggggguaaagug

SEQ ID NO: 126898 - RNA, 32 nt, Homo Sapiens
uccucaugcuggcgccgauggcugcuggggac

SEQ ID NO: 126899 - RNA, 32 nt, Homo Sapiens
acgggcucucccucacagccuccagagggaac

SEQ ID NO: 126900 - RNA, 32 nt, Homo Sapiens
cgguaacuguggcuagggaaaccuggagcggu

SEQ ID NO: 126901 - RNA, 32 nt, Homo Sapiens
accacaccugggccuggccggaggaagagaga

SEQ ID NO: 126902 - RNA, 30 nt, Homo Sapiens
cagggaugccagcaccccgucaucucaccc

SEQ ID NO: 126903 - RNA, 32 nt, Homo Sapiens
uguggggaaagcaccuuccacccccagcagga

SEQ ID NO: 126904 - RNA, 32 nt, Homo Sapiens
ggcuccugccugcuccuccuguguuagcucug

SEQ ID NO: 126905 - RNA, 32 nt, Homo Sapiens
ucuggcagccucccauccagggcccccaucuc

SEQ ID NO: 126906 - RNA, 32 nt, Homo Sapiens
guacauuguguaaugaaugaaaagcacauaaa

SEQ ID NO: 126907 - RNA, 32 nt, Homo Sapiens
gagaacucacaugggagagaaacuauauaaau

SEQ ID NO: 126908 - RNA, 32 nt, Homo Sapiens
cguggauacauaucccccucucccuguggaga

SEQ ID NO: 126909 - RNA, 32 nt, Homo Sapiens
agcuaaaugcucaaaauauaaaaacugagcug

SEQ ID NO: 126910 - RNA, 32 nt, Homo Sapiens
gagggucccucaugaacuuugccugugaagac

SEQ ID NO: 126911 - RNA, 32 nt, Homo Sapiens
gaugggaacaaggcuauuugguuuacuauauc

SEQ ID NO: 126912 - RNA, 32 nt, Homo Sapiens
uagugccugugucccuggcaguguccagugug

SEQ ID NO: 126913 - RNA, 32 nt, Homo Sapiens
uucggauugcucugcugguccggccgcuggag

SEQ ID NO: 126914 - RNA, 32 nt, Homo Sapiens
augacuaggaagaaaacaugacuuuaucauuu

SEQ ID NO: 126915 - RNA, 32 nt, Homo Sapiens
cuuaccaaaaauacaucuucauagcuaacuuu

SEQ ID NO: 126916 - RNA, 32 nt, Homo Sapiens
gagcugccccaugucacacgucuaugugcaug

SEQ ID NO: 126917 - RNA, 32 nt, Homo Sapiens
aaaccaccaggaguugacccuuuggccucaag

SEQ ID NO: 126918 - RNA, 32 nt, Homo Sapiens
gcaagaagaaaaggucaaaaccacguguuucc

SEQ ID NO: 126919 - RNA, 32 nt, Homo Sapiens
uugggcgucgacgaggccugguucuggguagg

SEQ ID NO: 126920 - RNA, 32 nt, Homo Sapiens
ggaaaaauauaaaauuguagauccugccuauc

SEQ ID NO: 126921 - RNA, 32 nt, Homo Sapiens
acauaaaagauuuuuucuuaacuuuuuuuuuu

SEQ ID NO: 126922 - RNA, 32 nt, Homo Sapiens
cggccggcguccacgcauugccauggugacug

SEQ ID NO: 126923 - RNA, 32 nt, Homo Sapiens
gggcuugugcuguucuuggucccuuaucuugu

SEQ ID NO: 126924 - RNA, 32 nt, Homo Sapiens
gugacuuauauuccaaagaaauuaaaauguug

SEQ ID NO: 126925 - RNA, 32 nt, Homo Sapiens
cgaugccggcccggcagcuucggcaacgccac

SEQ ID NO: 126926 - RNA, 32 nt, Homo Sapiens
gcgagagcacgcggaggagcgugcgcgggggc

SEQ ID NO: 126927 - RNA, 32 nt, Homo Sapiens
uccucccggccauggggagcugcgcgcggcug

SEQ ID NO: 126928 - RNA, 32 nt, Homo Sapiens
uugguaaaacaacuuuuuaaacucuuauucau

SEQ ID NO: 126929 - RNA, 32 nt, Homo Sapiens
uagguuguuuucuucauuuucuuaauagacua

SEQ ID NO: 126930 - RNA, 32 nt, Homo Sapiens
cugacaacuaugcagaggcauuuuagagacau

SEQ ID NO: 126931 - RNA, 32 nt, Homo Sapiens
ugcagagucuuaggggguuaucuaauguaguc

SEQ ID NO: 126932 - RNA, 32 nt, Homo Sapiens
cccccucauggaauaguccaucuccuagccug

SEQ ID NO: 126933 - RNA, 32 nt, Homo Sapiens
gggguccggagcugcgcgccuacgcgggaccu

SEQ ID NO: 126934 - RNA, 32 nt, Homo Sapiens
auuuuacuucugaacgaaauggagaaacugga

SEQ ID NO: 126935 - RNA, 32 nt, Homo Sapiens
uacaaagacaacacgcuaauaaugcaguuacu

SEQ ID NO: 126936 - RNA, 32 nt, Homo Sapiens
caaagccccccgcaguuuuacuuugucacacc

SEQ ID NO: 126937 - RNA, 32 nt, Homo Sapiens
gccagaacgccugaacgcaggcacauacuucc

SEQ ID NO: 126938 - RNA, 32 nt, Homo Sapiens
cgcccgccgcuagguccaucccggcccagcca

SEQ ID NO: 126939 - RNA, 32 nt, Homo Sapiens
uucauccauguuguaggauauuaaauuaacuu

SEQ ID NO: 126940 - RNA, 31 nt, Homo Sapiens
agcagcacgggaaccgucccccgcgcgcaug

SEQ ID NO: 126941 - RNA, 32 nt, Homo Sapiens
agguuuuuaaacagauuaggguaggugauggu

SEQ ID NO: 126942 - RNA, 32 nt, Homo Sapiens
aaccucagggucaccccagagccuguggggag

SEQ ID NO: 126943 - RNA, 32 nt, Homo Sapiens
cuacuguaauuccagcacuuugggaggccgag

SEQ ID NO: 126944 - RNA, 32 nt, Homo Sapiens
agacucuggcccuggcgccgcccgccucgggc

SEQ ID NO: 126945 - RNA, 32 nt, Homo Sapiens
uggcaugagcugccacuguucaaggcaaacag

SEQ ID NO: 126946 - RNA, 32 nt, Homo Sapiens
acugggccaggugcuuccugccagcaaagaug

SEQ ID NO: 126947 - RNA, 32 nt, Homo Sapiens
ccaauaaaggauuuaaaauauauucauuaaga

SEQ ID NO: 126948 - RNA, 32 nt, Homo Sapiens
gauucuauuucuuggccuucucuucucuggac

SEQ ID NO: 126949 - RNA, 32 nt, Homo Sapiens
cuuuuuucccuuugcuuauaucuagcauuaga

SEQ ID NO: 126950 - RNA, 32 nt, Homo Sapiens
cugugucuuaguccagagggaauaguacccaa

SEQ ID NO: 126951 - RNA, 32 nt, Homo Sapiens
cccggcacccgccucccggcgcugacggucuc

SEQ ID NO: 126952 - RNA, 30 nt, Homo Sapiens
aaguaucugcuaauguaggagagaugacaa

SEQ ID NO: 126953 - RNA, 32 nt, Homo Sapiens
ugaauauuaaaagguuguaaaaauagugcaug

SEQ ID NO: 126954 - RNA, 28 nt, Homo Sapiens
gccauggcccgagguagcgcgcggcugg

SEQ ID NO: 126955 - RNA, 32 nt, Homo Sapiens
ggauucaccauguuggccuggcuggucucaaa

SEQ ID NO: 126956 - RNA, 32 nt, Homo Sapiens
gguuucaccauguuggccaggcuggucucaaa

SEQ ID NO: 126957 - RNA, 32 nt, Homo Sapiens
acaaaacaaaaauuauggucauuaaaaaacua

SEQ ID NO: 126958 - RNA, 32 nt, Homo Sapiens
auccagaagcuacuucucaguguugcauaauc

SEQ ID NO: 126959 - RNA, 32 nt, Homo Sapiens
gaaacggccccauugccuggucuaguagcgga

SEQ ID NO: 126960 - RNA, 32 nt, Homo Sapiens
ugcaaagccugcgccagggaggaggcaggcuc

SEQ ID NO: 126961 - RNA, 32 nt, Homo Sapiens
caaggugggacccggcggggagggugcugcug

SEQ ID NO: 126962 - RNA, 32 nt, Homo Sapiens
auugccccauucucucacuuccccaucuuguc

SEQ ID NO: 126963 - RNA, 32 nt, Homo Sapiens
aguccccugcccaagccccagccugccccagu

SEQ ID NO: 126964 - RNA, 32 nt, Homo Sapiens
gacauugcaacccugcccggcgcagaucugau

SEQ ID NO: 126965 - RNA, 32 nt, Homo Sapiens
gacacuucaugacaugucauuauuuagagcaa

SEQ ID NO: 126966 - RNA, 32 nt, Homo Sapiens
cccuccagagccaggaggccaaggcugugaaa

SEQ ID NO: 126967 - RNA, 32 nt, Homo Sapiens
guugauuuuuguauuuuugauagagacggagu

SEQ ID NO: 126968 - RNA, 32 nt, Homo Sapiens
ccugccggcagaggguccccaccaugcagcug

SEQ ID NO: 126969 - RNA, 32 nt, Homo Sapiens
ugagaugagagaaaggaaaucuaguggaacag

SEQ ID NO: 126970 - RNA, 32 nt, Homo Sapiens
uuauccugaugaugaugaagaugaugaugagg

SEQ ID NO: 126971 - RNA, 32 nt, Homo Sapiens
cuucagggccacaacaggcuguagaaggggau

SEQ ID NO: 126972 - RNA, 32 nt, Homo Sapiens
ugaagacaaaaguuuaaaacuuucuaauacaa

SEQ ID NO: 126973 - RNA, 32 nt, Homo Sapiens
gcccuagucucugcugucuccccuccccaccc

SEQ ID NO: 126974 - RNA, 32 nt, Homo Sapiens
uggauauuuguucuuuuauaugaauuuuggga

SEQ ID NO: 126975 - RNA, 32 nt, Homo Sapiens
gagacgcccugcgccuucgccuucuccgcccc

SEQ ID NO: 126976 - RNA, 32 nt, Homo Sapiens
aauguacuaauaaaaacuggagaaauaggaau

SEQ ID NO: 126977 - RNA, 32 nt, Homo Sapiens
cugagugauaaggaagcaccuagacuccacuc

SEQ ID NO: 126978 - RNA, 32 nt, Homo Sapiens
aucucuucucccuucucccuccaucaucgaca

SEQ ID NO: 126979 - RNA, 32 nt, Homo Sapiens
cuucauaaacauugaacuuuuugauuuuauag

SEQ ID NO: 126980 - RNA, 32 nt, Homo Sapiens
guucaugaugggccccagugaacuccauauca

SEQ ID NO: 126981 - RNA, 32 nt, Homo Sapiens
uauuuauggaauucgguuuucuuaauaaaugu

SEQ ID NO: 126982 - RNA, 32 nt, Homo Sapiens
ggcagcggagagcgcggucccgggucggagcc

SEQ ID NO: 126983 - RNA, 32 nt, Homo Sapiens
uucuuuuaacuguguauauuucuacugaucug

SEQ ID NO: 126984 - RNA, 32 nt, Homo Sapiens
cuuagggaugguaucugaaacaacaaugguca

SEQ ID NO: 126985 - RNA, 32 nt, Homo Sapiens
gagccugaagucuuaaccagguccugccagcu

SEQ ID NO: 126986 - RNA, 32 nt, Homo Sapiens
aggauugacaaauauauuuaugaucuauucag

SEQ ID NO: 126987 - RNA, 32 nt, Homo Sapiens
cgcggggccgggacgcgauggcggcggcagag

SEQ ID NO: 126988 - RNA, 32 nt, Homo Sapiens
aaccuggaggguccccucuuaucccuucaagc

SEQ ID NO: 126989 - RNA, 32 nt, Homo Sapiens
cccuaucccccugccccacccuccucauuaaa

SEQ ID NO: 126990 - RNA, 32 nt, Homo Sapiens
cagagacugagaaaccacaaaguauuguuucu

SEQ ID NO: 126991 - RNA, 32 nt, Homo Sapiens
uguuaauauaaaauguugggagggaauauucc

SEQ ID NO: 126992 - RNA, 32 nt, Homo Sapiens
cuaguuuuuggaaaaaccuuguggauaagugg

SEQ ID NO: 126993 - RNA, 32 nt, Homo Sapiens
ucucccuccaguaguucgguaguuugcuguca

SEQ ID NO: 126994 - RNA, 32 nt, Homo Sapiens
acccccacugccuucuucuccucccccaacac

SEQ ID NO: 126995 - RNA, 32 nt, Homo Sapiens
cugaggcugggcaagggugggaggcguccccc

SEQ ID NO: 126996 - RNA, 32 nt, Homo Sapiens
aucugacuggccuccgcccacgggcucugcag

SEQ ID NO: 126997 - RNA, 32 nt, Homo Sapiens
gugugagguuucaggaaaguauugagauucug

SEQ ID NO: 126998 - RNA, 32 nt, Homo Sapiens
cuggaaggccgcccggcaugggcgguagagac

SEQ ID NO: 126999 - RNA, 32 nt, Homo Sapiens
cgugcccugaccccugcaccagcccuucccug

SEQ ID NO: 127000 - RNA, 32 nt, Homo Sapiens
agccgagaucgcgccauagcacuccagccuua

SEQ ID NO: 127001 - RNA, 32 nt, Homo Sapiens
gugugagcaggcccaccuggcuccagacccgc

SEQ ID NO: 127002 - RNA, 32 nt, Homo Sapiens
uucucaccaaaauaaaagcauuuaugagaauu

SEQ ID NO: 127003 - RNA, 32 nt, Homo Sapiens
agguccaucgggcuggccccagcccaucugcu

SEQ ID NO: 127004 - RNA, 32 nt, Homo Sapiens
cgcuccgaacucccagcuuucggacaucuggc

SEQ ID NO: 127005 - RNA, 32 nt, Homo Sapiens
cuaggagcugucugcuggcuccgggaaaaggg

SEQ ID NO: 127006 - RNA, 32 nt, Homo Sapiens
gcagaagcaaccuuuuucccucuucccagaaa

SEQ ID NO: 127007 - RNA, 32 nt, Homo Sapiens
uaaguaaaaugaaucauuuacucuugaaaugc

SEQ ID NO: 127008 - RNA, 32 nt, Homo Sapiens
accuaaauacuaggucagcuuuggcgacacug

SEQ ID NO: 127009 - RNA, 32 nt, Homo Sapiens
ugggugcaguugcgggacugugaggggucuug

SEQ ID NO: 127010 - RNA, 32 nt, Homo Sapiens
ggaggauuucuggggcaaacacugccggauca

SEQ ID NO: 127011 - RNA, 32 nt, Homo Sapiens
gccacuuugcuguccugagcaccccagacuug

SEQ ID NO: 127012 - RNA, 31 nt, Homo Sapiens
uugcagauguggcaggauguguuccuggggg

SEQ ID NO: 127013 - RNA, 32 nt, Homo Sapiens
ugagugaaaaagaguagaaaugggaagacuug

SEQ ID NO: 127014 - RNA, 32 nt, Homo Sapiens
gccaaguugaccgagcacuuuguacauagggg

SEQ ID NO: 127015 - RNA, 32 nt, Homo Sapiens
acgaacuccgcucucacauucccggccaccuc

SEQ ID NO: 127016 - RNA, 32 nt, Homo Sapiens
uagcaguauaaaauuagaaucaagacagcuga

SEQ ID NO: 127017 - RNA, 32 nt, Homo Sapiens
uguucaccaacccaaaagcacucugagccuug

SEQ ID NO: 127018 - RNA, 32 nt, Homo Sapiens
ccaaggagcgccgcccccugcuccacagcgcc

SEQ ID NO: 127019 - RNA, 32 nt, Homo Sapiens
cuauucagcaucuuuugcaguacucuguagac

SEQ ID NO: 127020 - RNA, 32 nt, Homo Sapiens
uuaauucuuguccuccgaccagcccugccucu

SEQ ID NO: 127021 - RNA, 32 nt, Homo Sapiens
ggaggaaggaggaggccgagccuggggcggag

SEQ ID NO: 127022 - RNA, 32 nt, Homo Sapiens
cuuagagagauuauaaaaaacaaaucuuccga

SEQ ID NO: 127023 - RNA, 32 nt, Homo Sapiens
cagcuccccccgcgcgcccacccacacucacu

SEQ ID NO: 127024 - RNA, 32 nt, Homo Sapiens
ccucggccgggccacucuggcuucucugugcc

SEQ ID NO: 127025 - RNA, 32 nt, Homo Sapiens
caauaaacaugaugaauguggagaugcuugcu

SEQ ID NO: 127026 - RNA, 32 nt, Homo Sapiens
ucaugugucugcuucuauugcauauuguaaaa

SEQ ID NO: 127027 - RNA, 32 nt, Homo Sapiens
cuuccucaccacuaggcuucuggggcuggguc

SEQ ID NO: 127028 - RNA, 32 nt, Homo Sapiens
ugcuccugaugcaguuucugugccauugcugg

SEQ ID NO: 127029 - RNA, 32 nt, Homo Sapiens
caggcagcucugggcaugugucuggucacauc

SEQ ID NO: 127030 - RNA, 32 nt, Homo Sapiens
cucgggccacuaccucuacuaccacuacggcu

SEQ ID NO: 127031 - RNA, 32 nt, Homo Sapiens
cacagcauaaaagauaccaaaauaucauaugg

SEQ ID NO: 127032 - RNA, 32 nt, Homo Sapiens
cccucugaguagcugagugaauccaaagccau

SEQ ID NO: 127033 - RNA, 32 nt, Homo Sapiens
ugagcagagaaucuuacuaggcuuugguuauc

SEQ ID NO: 127034 - RNA, 32 nt, Homo Sapiens
acgccuuccccucagccacacccaggcacuua

SEQ ID NO: 127035 - RNA, 32 nt, Homo Sapiens
uaugcaguguggaaagugagaaaaaccuccau

SEQ ID NO: 127036 - RNA, 32 nt, Homo Sapiens
aucagcuuuccgagaaagaaauaaucauuuau

SEQ ID NO: 127037 - RNA, 32 nt, Homo Sapiens
uccuauuucuaaaaauguucucuucuuuccua

SEQ ID NO: 127038 - RNA, 32 nt, Homo Sapiens
uccuugauugagacccauguuaucuuugggau

SEQ ID NO: 127039 - RNA, 32 nt, Homo Sapiens
gcacuaauuuaaugccgauauacucuagauga

SEQ ID NO: 127040 - RNA, 32 nt, Homo Sapiens
acuuuggcgugucaaggcaagccccagucuca

SEQ ID NO: 127041 - RNA, 32 nt, Homo Sapiens
caauggcuaguacuaugugucaacuugucuag

SEQ ID NO: 127042 - RNA, 32 nt, Homo Sapiens
aaauaaguacaguggaucuuggagugggauuu

SEQ ID NO: 127043 - RNA, 32 nt, Homo Sapiens
accaauuaaaauguauaaauuaguguaaaaaa

SEQ ID NO: 127044 - RNA, 32 nt, Homo Sapiens
ccuaaaacuguuguguuuuucuuaugguuuaa

SEQ ID NO: 127045 - RNA, 32 nt, Homo Sapiens
uacagugccgugcauuuaagucaaugguuguu

SEQ ID NO: 127046 - RNA, 32 nt, Homo Sapiens
gaaaguaaaaauuccaggcagggaugaacagg

SEQ ID NO: 127047 - RNA, 32 nt, Homo Sapiens
ggguccauguccuucccucccccaccccgccu

SEQ ID NO: 127048 - RNA, 32 nt, Homo Sapiens
gaauugguuauggauaaauuauguaaaacuaa

SEQ ID NO: 127049 - RNA, 32 nt, Homo Sapiens
ucuaauauuucuucaugugucuaucuuuuccc

SEQ ID NO: 127050 - RNA, 32 nt, Homo Sapiens
gcuugaacaacaacuuuaggaguaaauaaaag

SEQ ID NO: 127051 - RNA, 32 nt, Homo Sapiens
cggaacuccaaagccagcagggcuugcugcug

SEQ ID NO: 127052 - RNA, 32 nt, Homo Sapiens
acaggcaugauugcuugaaacucauggcuuca

SEQ ID NO: 127053 - RNA, 32 nt, Homo Sapiens
gagcgcgacugugucucuaaaaaacaacgcaa

SEQ ID NO: 127054 - RNA, 32 nt, Homo Sapiens
cuaaagcugcuggcccggggcccacaggaggg

SEQ ID NO: 127055 - RNA, 32 nt, Homo Sapiens
gaaugcagacccugauauuccaaggcacugaa

SEQ ID NO: 127056 - RNA, 32 nt, Homo Sapiens
ccugagggggaagugagaagggcucagagagg

SEQ ID NO: 127057 - RNA, 32 nt, Homo Sapiens
acuagucuaugaaagaagaauaaaauaauaaa

SEQ ID NO: 127058 - RNA, 32 nt, Homo Sapiens
cggagcgagagcgcgcgggcgcggccgacagu

SEQ ID NO: 127059 - RNA, 32 nt, Homo Sapiens
gaagccccaaaauggagagaaaaaagaagaga

SEQ ID NO: 127060 - RNA, 32 nt, Homo Sapiens
agcuucccucggccgccgggggccuccccgcg

SEQ ID NO: 127061 - RNA, 32 nt, Homo Sapiens
uacuucaaaaauuuuauucaguguauuuucag

SEQ ID NO: 127062 - RNA, 32 nt, Homo Sapiens
gaaaugggacauuucugcuagauucuucacuc

SEQ ID NO: 127063 - RNA, 32 nt, Homo Sapiens
gaauccguaucugcagaaugggccacuguagg

SEQ ID NO: 127064 - RNA, 32 nt, Homo Sapiens
ccucugcgucccgccccgggaguggcugcgag

SEQ ID NO: 127065 - RNA, 32 nt, Homo Sapiens
gcacgguuggagaggggagaagaagggaaaac

SEQ ID NO: 127066 - RNA, 31 nt, Homo Sapiens
gcgccacugcguccccugccccggccucagc

SEQ ID NO: 127067 - RNA, 32 nt, Homo Sapiens
gcugaggggugcggugauggggucgcugcgcc

SEQ ID NO: 127068 - RNA, 32 nt, Homo Sapiens
uuuggaugcucccaucuccaccuccagugacu

SEQ ID NO: 127069 - RNA, 32 nt, Homo Sapiens
ugugaggaaaaacacggaaugacaaguguggg

SEQ ID NO: 127070 - RNA, 32 nt, Homo Sapiens
augagaaagauacauuuauauauuauguaaaa

SEQ ID NO: 127071 - RNA, 32 nt, Homo Sapiens
agcuuaaugagaguaaucugcagacaauugau

SEQ ID NO: 127072 - RNA, 32 nt, Homo Sapiens
cagucuuagagcauuauagccauuugcuacuu

SEQ ID NO: 127073 - RNA, 30 nt, Homo Sapiens
gcucuggcgcccgccccuguccgcaccgcu

SEQ ID NO: 127074 - RNA, 32 nt, Homo Sapiens
agugaaauauguaaauauauggacguuuuuca

SEQ ID NO: 127075 - RNA, 32 nt, Homo Sapiens
gugccuuugugggugcagggcuuuuguggaaa

SEQ ID NO: 127076 - RNA, 32 nt, Homo Sapiens
gaaagcacagaaagaaaggcaccaucagacaa

SEQ ID NO: 127077 - RNA, 32 nt, Homo Sapiens
acaacagguucaguacauuggcucaguucuuu

SEQ ID NO: 127078 - RNA, 32 nt, Homo Sapiens
cucuuuccuuucucuaagacaaaccuaaguaa

SEQ ID NO: 127079 - RNA, 32 nt, Homo Sapiens
uuuuuuaaaaauuugguuugagccuuaugccc

SEQ ID NO: 127080 - RNA, 32 nt, Homo Sapiens
uuccuaaguauuuuugguaccucugauguagc

SEQ ID NO: 127081 - RNA, 32 nt, Homo Sapiens
gaagggggcuguggucgcgcgugggaacccgc

SEQ ID NO: 127082 - RNA, 32 nt, Homo Sapiens
accuuuuaucccaaagugcuuuauaaauugag

SEQ ID NO: 127083 - RNA, 32 nt, Homo Sapiens
guacccggccccagugcccuuucgcggccaca

SEQ ID NO: 127084 - RNA, 32 nt, Homo Sapiens
ucccacaccucugcaccuuguuaccugacuuu

SEQ ID NO: 127085 - RNA, 32 nt, Homo Sapiens
guacuugauaauuuuuaccauuauuuuuagga

SEQ ID NO: 127086 - RNA, 32 nt, Homo Sapiens
agggguacgucggugucauccaaacauccaaa

SEQ ID NO: 127087 - RNA, 32 nt, Homo Sapiens
gaugaaaagaggauaauguuuccuuccauaaa

SEQ ID NO: 127088 - RNA, 32 nt, Homo Sapiens
acaaaaaacuaaagagucucauugaacgaaug

SEQ ID NO: 127089 - RNA, 32 nt, Homo Sapiens
cagucaauggcaaagaaaaaguaaaucaaaga

SEQ ID NO: 127090 - RNA, 32 nt, Homo Sapiens
cccuuccaggaccagaggccaaggcugacaau

SEQ ID NO: 127091 - RNA, 32 nt, Homo Sapiens
uauagcuucccaaguucuuuuacagucccugc

SEQ ID NO: 127092 - RNA, 32 nt, Homo Sapiens
guugcucuuguuuuacauggacaggcucagag

SEQ ID NO: 127093 - RNA, 32 nt, Homo Sapiens
cuugguguggcgucccugggccguagcuuccg

SEQ ID NO: 127094 - RNA, 32 nt, Homo Sapiens
uuagaaacuaaauugcaaauauauguguuauu

SEQ ID NO: 127095 - RNA, 32 nt, Homo Sapiens
cagagcgauguucccgcagagccggcacccga

SEQ ID NO: 127096 - RNA, 31 nt, Homo Sapiens
ucucacucaagaaaacucugaguuaaauuca

SEQ ID NO: 127097 - RNA, 32 nt, Homo Sapiens
uccauaugggguacaaaggucuggccuccuca

SEQ ID NO: 127098 - RNA, 32 nt, Homo Sapiens
cauaaacugcaugcagaagagagauuaaaagg

SEQ ID NO: 127099 - RNA, 32 nt, Homo Sapiens
guuuuucuccgugaaucuuaugcugaguaguu

SEQ ID NO: 127100 - RNA, 32 nt, Homo Sapiens
agucgggcugccggccggcucauucccccagg

SEQ ID NO: 127101 - RNA, 32 nt, Homo Sapiens
ugcccuggggcuccucccccagccugggagcg

SEQ ID NO: 127102 - RNA, 32 nt, Homo Sapiens
agccccaccucagcaggucuccaggaucccuc

SEQ ID NO: 127103 - RNA, 32 nt, Homo Sapiens
caaagccaagccggcugcagcugccacauccc

SEQ ID NO: 127104 - RNA, 32 nt, Homo Sapiens
accucaguucucccucggauucugggaacaga

SEQ ID NO: 127105 - RNA, 32 nt, Homo Sapiens
gaagcucaugaauggaaccaaaaaagagcaag

SEQ ID NO: 127106 - RNA, 32 nt, Homo Sapiens
aggacaaagaaugauccaaaaauacuaaggaa

SEQ ID NO: 127107 - RNA, 32 nt, Homo Sapiens
agcgcgccuugcgggggcgggaucccggcgcc

SEQ ID NO: 127108 - RNA, 32 nt, Homo Sapiens
ugcuguggguagucccuccuacuaggaggcuu

SEQ ID NO: 127109 - RNA, 32 nt, Homo Sapiens
uuugcccaagagaaagacuagaaggacuaaaa

SEQ ID NO: 127110 - RNA, 32 nt, Homo Sapiens
aucugaaaacagaagacagucuuaauauaaau

SEQ ID NO: 127111 - RNA, 32 nt, Homo Sapiens
acucugacaaauaaauaugucauccugaauua

SEQ ID NO: 127112 - RNA, 31 nt, Homo Sapiens
aaaucuugggagaaaaaauaauauuaggaaa

SEQ ID NO: 127113 - RNA, 32 nt, Homo Sapiens
uauaauauauuguaaacaaaacacagcucuua

SEQ ID NO: 127114 - RNA, 32 nt, Homo Sapiens
gaggaggcggguacgaaucagcugcgggcgga

SEQ ID NO: 127115 - RNA, 32 nt, Homo Sapiens
uuuguaaaacaaaauugucucaaagugauuau

SEQ ID NO: 127116 - RNA, 32 nt, Homo Sapiens
uuucuuucacgugugaaaugucuuaaaucaga

SEQ ID NO: 127117 - RNA, 31 nt, Homo Sapiens
cuaaauuauugagcuagaagaugcugcaggg

SEQ ID NO: 127118 - RNA, 32 nt, Homo Sapiens
ucuugaagauuaaaaaguuuaauagucauaca

SEQ ID NO: 127119 - RNA, 31 nt, Homo Sapiens
aucucuccacucccagaguccacuccaacuu

SEQ ID NO: 127120 - RNA, 32 nt, Homo Sapiens
aggccucuguuguuagacuaaugggguuuccc

SEQ ID NO: 127121 - RNA, 32 nt, Homo Sapiens
uaacacaaaaauaaaggcuuuacuauuuacuu

SEQ ID NO: 127122 - RNA, 32 nt, Homo Sapiens
uaaagcaguagacagggcuuguuccaucccuc

SEQ ID NO: 127123 - RNA, 32 nt, Homo Sapiens
gccaagaacaagcagcaguccugaacucgagg

SEQ ID NO: 127124 - RNA, 32 nt, Homo Sapiens
uugucgcagcggguuuuccucggcgguuugcg

SEQ ID NO: 127125 - RNA, 32 nt, Homo Sapiens
ggcaggaggugauauuugacaggcugcgcgcg

SEQ ID NO: 127126 - RNA, 32 nt, Homo Sapiens
agcugugcuaggcugagggaauuccacacuga

SEQ ID NO: 127127 - RNA, 32 nt, Homo Sapiens
ugugacccauggauggaaaugauaaaacuuug

SEQ ID NO: 127128 - RNA, 32 nt, Homo Sapiens
guaaaggaccagguuuuuuguuuuccaguccu

SEQ ID NO: 127129 - RNA, 32 nt, Homo Sapiens
gcuacuaauauuugaaacagaccugccauucc

SEQ ID NO: 127130 - RNA, 32 nt, Homo Sapiens
gcagacacaaaacgguggcagguuuggcgagc

SEQ ID NO: 127131 - RNA, 32 nt, Homo Sapiens
ggacguuauuuuuauuuauauauggggccuag

SEQ ID NO: 127132 - RNA, 32 nt, Homo Sapiens
gauggcggcauggcggugcggcggcggcugcg

SEQ ID NO: 127133 - RNA, 32 nt, Homo Sapiens
cggaggcccucccccucccccagcucagacca

SEQ ID NO: 127134 - RNA, 32 nt, Homo Sapiens
uugcccaggcaggaggcuggggugcugugugg

SEQ ID NO: 127135 - RNA, 32 nt, Homo Sapiens
aacaaaaacuaaaauaaggaauagaaaagcug

SEQ ID NO: 127136 - RNA, 32 nt, Homo Sapiens
uaaugaacaccguaagguuagcuagcuuccua

SEQ ID NO: 127137 - RNA, 32 nt, Homo Sapiens
aggugaagaaugccaccaggcugccuggcagu

SEQ ID NO: 127138 - RNA, 32 nt, Homo Sapiens
acuguuaaaauugugcaaaauaaaauaaacau

SEQ ID NO: 127139 - RNA, 32 nt, Homo Sapiens
gugcauaaacaaaaccucaaagggccugggaa

SEQ ID NO: 127140 - RNA, 32 nt, Homo Sapiens
guggaccgcgcgcggggcgcucccugguggcg

SEQ ID NO: 127141 - RNA, 32 nt, Homo Sapiens
gggaagacaccagucucugugcucggguucag

SEQ ID NO: 127142 - RNA, 32 nt, Homo Sapiens
acuucugccuuccugguuuccuugacuuuggc

SEQ ID NO: 127143 - RNA, 32 nt, Homo Sapiens
uauugcaucuucuguauuuaccaucaauucau

SEQ ID NO: 127144 - RNA, 32 nt, Homo Sapiens
uuuaugccuuuuauuucuuaaacaaauguaug

SEQ ID NO: 127145 - RNA, 32 nt, Homo Sapiens
gugaugugauguggaaauacugauguuuccag

SEQ ID NO: 127146 - RNA, 32 nt, Homo Sapiens
gggaguguaacuauggccggccugcggaacga

SEQ ID NO: 127147 - RNA, 32 nt, Homo Sapiens
uguguauguuaaaggaguacuuuaagaagaga

SEQ ID NO: 127148 - RNA, 32 nt, Homo Sapiens
caacccgagugggacucuccaacgcccaagag

SEQ ID NO: 127149 - RNA, 32 nt, Homo Sapiens
caggcccgcucccgagcccguuccgcucccgu

SEQ ID NO: 127150 - RNA, 32 nt, Homo Sapiens
auugauuuuuucccucacgaugaugaacaauu

SEQ ID NO: 127151 - RNA, 32 nt, Homo Sapiens
gggccaguucagagacccacucccaggugugc

SEQ ID NO: 127152 - RNA, 32 nt, Homo Sapiens
cuaccauccucucuguggccacuuccugagcc

SEQ ID NO: 127153 - RNA, 32 nt, Homo Sapiens
accgggcuccacgucuccugucuucuuuaccu

SEQ ID NO: 127154 - RNA, 32 nt, Homo Sapiens
ugaacccagagacacucccauccacccuucuc

SEQ ID NO: 127155 - RNA, 32 nt, Homo Sapiens
uuuuacugacuauucaacauaaauugaaucuu

SEQ ID NO: 127156 - RNA, 32 nt, Homo Sapiens
uuucauucauguugaagugcuuugcaaggcuu

SEQ ID NO: 127157 - RNA, 32 nt, Homo Sapiens
cagaagugaucccuauuuugcacaugagaaau

SEQ ID NO: 127158 - RNA, 32 nt, Homo Sapiens
uuucugcccuccccuccaacucagccaaccca

SEQ ID NO: 127159 - RNA, 32 nt, Homo Sapiens
gacugaccggugcccacguccagggcacgcac

SEQ ID NO: 127160 - RNA, 32 nt, Homo Sapiens
gugauguuuccaaugcugaaugccuguuagca

SEQ ID NO: 127161 - RNA, 32 nt, Homo Sapiens
aggaggccgaggaggacgcggcgccggcugcc

SEQ ID NO: 127162 - RNA, 32 nt, Homo Sapiens
uccucuggcagacaugcugcacgucuguaccc

SEQ ID NO: 127163 - RNA, 32 nt, Homo Sapiens
gaggagacuauggaagacagggagaccauucu

SEQ ID NO: 127164 - RNA, 32 nt, Homo Sapiens
ugacuaccacugcuuuuuccuuggucucacuu

SEQ ID NO: 127165 - RNA, 32 nt, Homo Sapiens
ccaaguaugagucggauacccuggagcaagac

SEQ ID NO: 127166 - RNA, 32 nt, Homo Sapiens
uuccuuuuuuggcuagggaugguuugauaaac

SEQ ID NO: 127167 - RNA, 32 nt, Homo Sapiens
uaacugaauuuugucuagacaccauuucuguu

SEQ ID NO: 127168 - RNA, 32 nt, Homo Sapiens
uccagggaaggggaagcagaguguccacccac

SEQ ID NO: 127169 - RNA, 32 nt, Homo Sapiens
uauuaguccuaccaccuuaguuccucuacagc

SEQ ID NO: 127170 - RNA, 32 nt, Homo Sapiens
uuccugugauaacuuaaaaggcucuuuuaugu

SEQ ID NO: 127171 - RNA, 30 nt, Homo Sapiens
gaaaugccucggaugccgccgacgcggugc

SEQ ID NO: 127172 - RNA, 32 nt, Homo Sapiens
uguugccucaccagcccugggcuccgccccag

SEQ ID NO: 127173 - RNA, 32 nt, Homo Sapiens
ucugucucuucuguucucuccucuuuuaacaa

SEQ ID NO: 127174 - RNA, 32 nt, Homo Sapiens
cccguccccgucuccguucccccguccccauc

SEQ ID NO: 127175 - RNA, 32 nt, Homo Sapiens
gagccuguucccucuccucccaagugaucaga

SEQ ID NO: 127176 - RNA, 32 nt, Homo Sapiens
gccaggcaccucagugcugggcaggggcauca

SEQ ID NO: 127177 - RNA, 32 nt, Homo Sapiens
gcugacuauuugucauugccucauggauuuua

SEQ ID NO: 127178 - RNA, 32 nt, Homo Sapiens
gaauguuuuucccacaccuaggauuccagaac

SEQ ID NO: 127179 - RNA, 32 nt, Homo Sapiens
aggucgaggacggucggacucccgcggcggga

SEQ ID NO: 127180 - RNA, 32 nt, Homo Sapiens
uggcucacaccuguaauccuaacacuuuggga

SEQ ID NO: 127181 - RNA, 32 nt, Homo Sapiens
ugguucacaccuguaaucccaacacuuuggga

SEQ ID NO: 127182 - RNA, 32 nt, Homo Sapiens
cguuguacaucaugaugacugauggucuucaa

SEQ ID NO: 127183 - RNA, 32 nt, Homo Sapiens
auggauacccccuuuacccugugauuauuaug

SEQ ID NO: 127184 - RNA, 32 nt, Homo Sapiens
uguggucuuuaaccuguugucauguuuuuucc

SEQ ID NO: 127185 - RNA, 32 nt, Homo Sapiens
cccugccgcucccgccccgggcuggcgaugcu

SEQ ID NO: 127186 - RNA, 32 nt, Homo Sapiens
uguuguaaaguuagauuuugcauauuguaucu

SEQ ID NO: 127187 - RNA, 32 nt, Homo Sapiens
cccagcagcagcagugcagagcccgccuggag

SEQ ID NO: 127188 - RNA, 32 nt, Homo Sapiens
auuugggcugggcgcaguggcucacgccugua

SEQ ID NO: 127189 - RNA, 32 nt, Homo Sapiens
aaugagccaagugggauuugcauaaagugaau

SEQ ID NO: 127190 - RNA, 31 nt, Homo Sapiens
cuaauuacaaauuggauggaacuguguuuuu

SEQ ID NO: 127191 - RNA, 32 nt, Homo Sapiens
ucuuugauaugccaccagcgaacucucagaaa

SEQ ID NO: 127192 - RNA, 32 nt, Homo Sapiens
cuguccuuacuugugggcuucuccaugcugug

SEQ ID NO: 127193 - RNA, 32 nt, Homo Sapiens
caucuuugcaggaagguucucuccaugugaca

SEQ ID NO: 127194 - RNA, 32 nt, Homo Sapiens
cguucaauuuggguuuuuaacuuuacaggguc

SEQ ID NO: 127195 - RNA, 32 nt, Homo Sapiens
ccccgcgccugccccgcgccucauggagggcg

SEQ ID NO: 127196 - RNA, 32 nt, Homo Sapiens
gcaccagcugugccaggucucauccaggcagc

SEQ ID NO: 127197 - RNA, 32 nt, Homo Sapiens
aauuguaaauguuuaauaucugacugaaauua

SEQ ID NO: 127198 - RNA, 32 nt, Homo Sapiens
ggcugcccaagccccacugaugauggcugaga

SEQ ID NO: 127199 - RNA, 32 nt, Homo Sapiens
acugugcuaggcguggugggcaguauaaagaa

SEQ ID NO: 127200 - RNA, 32 nt, Homo Sapiens
ggauacagaauuagucacucuugucacuuuau

SEQ ID NO: 127201 - RNA, 32 nt, Homo Sapiens
ucuccggagcuggggcaagggccgugggcucu

SEQ ID NO: 127202 - RNA, 32 nt, Homo Sapiens
gaaggacgccgacgggguccucugccgguaca

SEQ ID NO: 127203 - RNA, 32 nt, Homo Sapiens
gggacugccccgaggaggacaagaagggccug

SEQ ID NO: 127204 - RNA, 32 nt, Homo Sapiens
uccaugggcagugaagaaauguaaagugcaau

SEQ ID NO: 127205 - RNA, 30 nt, Homo Sapiens
cacuugccgcccgugcccugcggcccugca

SEQ ID NO: 127206 - RNA, 31 nt, Homo Sapiens
gugaagucgcagggcccgccccgcgucugag

SEQ ID NO: 127207 - RNA, 32 nt, Homo Sapiens
acuuugaaauuccaaguguagauuuuuagaau

SEQ ID NO: 127208 - RNA, 30 nt, Homo Sapiens
accaagcucugccagcaccagucccugaca

SEQ ID NO: 127209 - RNA, 32 nt, Homo Sapiens
uauaccuagaagcagccagcccaggcaugcag

SEQ ID NO: 127210 - RNA, 32 nt, Homo Sapiens
uggggauguagggcagaagagaacagcacuca

SEQ ID NO: 127211 - RNA, 32 nt, Homo Sapiens
cugaccguguggaaccaaacccuuccagcguc

SEQ ID NO: 127212 - RNA, 32 nt, Homo Sapiens
uuaaaacuuuucuauuguuuucuuucccuuuc

SEQ ID NO: 127213 - RNA, 32 nt, Homo Sapiens
cgacucaccgcggaggcgcccggacgcgucaa

SEQ ID NO: 127214 - RNA, 32 nt, Homo Sapiens
agcgcccagggucccucugugcuuuuucgcuu

SEQ ID NO: 127215 - RNA, 32 nt, Homo Sapiens
gcucuggcuagcauuggaaacaacaacaacaa

SEQ ID NO: 127216 - RNA, 32 nt, Homo Sapiens
gacuaaacauucugaggguccuggacguuuua

SEQ ID NO: 127217 - RNA, 30 nt, Homo Sapiens
cucccuguccgggcugcagaccccuacucc

SEQ ID NO: 127218 - RNA, 32 nt, Homo Sapiens
uagcacaagaguugauacauaaggaguacuuu

SEQ ID NO: 127219 - RNA, 32 nt, Homo Sapiens
ugcugggcgugguggcucacaccugugagugg

SEQ ID NO: 127220 - RNA, 32 nt, Homo Sapiens
ccuaggucgugccacugcacuccagccugggc

SEQ ID NO: 127221 - RNA, 32 nt, Homo Sapiens
aggagcaaugugcagccuccucucccccagcu

SEQ ID NO: 127222 - RNA, 32 nt, Homo Sapiens
gcagaccuggauuuuucuuccugaucugcugc

SEQ ID NO: 127223 - RNA, 32 nt, Homo Sapiens
agcccucauagggcagaaugggacucuugcug

SEQ ID NO: 127224 - RNA, 32 nt, Homo Sapiens
guuuuugcuuggggggcgcugggccuagccca

SEQ ID NO: 127225 - RNA, 32 nt, Homo Sapiens
guguuuccagaagagauuaguguauaaaucug

SEQ ID NO: 127226 - RNA, 32 nt, Homo Sapiens
cuucuguuaaaauuauucuuaaugucuguaaa

SEQ ID NO: 127227 - RNA, 30 nt, Homo Sapiens
augucucgugguaggacuguagaaaaggga

SEQ ID NO: 127228 - RNA, 28 nt, Homo Sapiens
gggguggggcggcuccagggcuuuccag

SEQ ID NO: 127229 - RNA, 32 nt, Homo Sapiens
ccuaaaaauaccaugucugugauagggaagaa

SEQ ID NO: 127230 - RNA, 32 nt, Homo Sapiens
ggaggaugcgucgaggucccugucucugucaa

SEQ ID NO: 127231 - RNA, 32 nt, Homo Sapiens
agcaauuugguaguuguagacauuugcaggga

SEQ ID NO: 127232 - RNA, 31 nt, Homo Sapiens
aguccgggaguucagaaccagccuggacaac

SEQ ID NO: 127233 - RNA, 31 nt, Homo Sapiens
auguugugaaacaauucagcuuuugauucag

SEQ ID NO: 127234 - RNA, 32 nt, Homo Sapiens
gauguuuccaccuccuucuccaaccucuaccc

SEQ ID NO: 127235 - RNA, 32 nt, Homo Sapiens
gcgcagcguggccgcgggugggcggaacuggu

SEQ ID NO: 127236 - RNA, 32 nt, Homo Sapiens
guaguucuagaaccugauuuuaacucaggaau

SEQ ID NO: 127237 - RNA, 32 nt, Homo Sapiens
agaggggguuggguuuucaaugugagaacagc

SEQ ID NO: 127238 - RNA, 32 nt, Homo Sapiens
ccagugcucuccaggcuuccucucuuugugau

SEQ ID NO: 127239 - RNA, 32 nt, Homo Sapiens
uaccuuacuuggaaucugaacaccucuucuuu

SEQ ID NO: 127240 - RNA, 32 nt, Homo Sapiens
ucugcuguucauuguuuccuguuaauuguucc

SEQ ID NO: 127241 - RNA, 32 nt, Homo Sapiens
gcccucucuguaacacgagaucaaucuaugcu

SEQ ID NO: 127242 - RNA, 32 nt, Homo Sapiens
cucugcuggauaccccucuuggaccuguagcc

SEQ ID NO: 127243 - RNA, 30 nt, Homo Sapiens
ugaagccauguagccacccaacuuugucau

SEQ ID NO: 127244 - RNA, 32 nt, Homo Sapiens
auuauguuacaaaaacaaaaauccccacugaa

SEQ ID NO: 127245 - RNA, 32 nt, Homo Sapiens
gugugucaccccuguuuauucuugaacagagg

SEQ ID NO: 127246 - RNA, 32 nt, Homo Sapiens
agguggagugagugguuuuucuucauuuuuaa

SEQ ID NO: 127247 - RNA, 32 nt, Homo Sapiens
gcggcucgcucgccucagccccagcgccccuc

SEQ ID NO: 127248 - RNA, 32 nt, Homo Sapiens
augaugaacuuauaaugauuaagggacauuuc

SEQ ID NO: 127249 - RNA, 32 nt, Homo Sapiens
gcggcuucauacugagggccgagccgaggcgg

SEQ ID NO: 127250 - RNA, 32 nt, Homo Sapiens
ccagagucauauauuuucuuaugugggucuua

SEQ ID NO: 127251 - RNA, 32 nt, Homo Sapiens
uaacuucugugccuuuguuuucauguucagcg

SEQ ID NO: 127252 - RNA, 32 nt, Homo Sapiens
ccuggccaggcggcggcuguaguguuagcuuu

SEQ ID NO: 127253 - RNA, 32 nt, Homo Sapiens
cuccuuggaacagguaggggauaauauuucuu

SEQ ID NO: 127254 - RNA, 32 nt, Homo Sapiens
aaagucuccaugaauggaaggaaugugggaga

SEQ ID NO: 127255 - RNA, 32 nt, Homo Sapiens
cgccgcgcaccaacgccgccgccuucgccggg

SEQ ID NO: 127256 - RNA, 32 nt, Homo Sapiens
ucaauuaacuucuccuucccuuccccucagcc

SEQ ID NO: 127257 - RNA, 32 nt, Homo Sapiens
ccugggccuccuuucuaccuccacucagcacc

SEQ ID NO: 127258 - RNA, 32 nt, Homo Sapiens
ggcggcgagcgcggguggggcgggguuaggcg

SEQ ID NO: 127259 - RNA, 32 nt, Homo Sapiens
uuaaagggaagcuggacgagauaauaaagauc

SEQ ID NO: 127260 - RNA, 32 nt, Homo Sapiens
uguguuucaaaauaaacaugucuagaauuuaa

SEQ ID NO: 127261 - RNA, 29 nt, Homo Sapiens
acacacauauguauauacacauaucauuu

SEQ ID NO: 127262 - RNA, 32 nt, Homo Sapiens
aaucucuguauauuugauucuuaacuaaaauu

SEQ ID NO: 127263 - RNA, 32 nt, Homo Sapiens
ggccgagagacuugcaccuuggacaagccaca

SEQ ID NO: 127264 - RNA, 32 nt, Homo Sapiens
acauuuccacccaauuuugucauccgagagag

SEQ ID NO: 127265 - RNA, 32 nt, Homo Sapiens
ccuggaaugggucuuucuugccccaccuggcu

SEQ ID NO: 127266 - RNA, 32 nt, Homo Sapiens
gagagcuguucgcuccucccagauggcuucgg

SEQ ID NO: 127267 - RNA, 32 nt, Homo Sapiens
acuggcggcuuccaggcugggugucugggaca

SEQ ID NO: 127268 - RNA, 32 nt, Homo Sapiens
uagacaugacauucuuuuucucuccuuccuga

SEQ ID NO: 127269 - RNA, 32 nt, Homo Sapiens
aaguaaacugguuuaauucuuaaucuguaguc

SEQ ID NO: 127270 - RNA, 32 nt, Homo Sapiens
accccaucucuauaaaaagaaaaaauaaagaa

SEQ ID NO: 127271 - RNA, 29 nt, Homo Sapiens
ccccggggaggccggaggacgcgcccaua

SEQ ID NO: 127272 - RNA, 32 nt, Homo Sapiens
gugauuauuccauuuuaaguauuagagcucaa

SEQ ID NO: 127273 - RNA, 32 nt, Homo Sapiens
aaaaucuuuucaaaauacauuuuuaagcuaau

SEQ ID NO: 127274 - RNA, 32 nt, Homo Sapiens
uuucuacuugcuuuuccaaacacucacaguau

SEQ ID NO: 127275 - RNA, 32 nt, Homo Sapiens
cagaggggcugacuucgcagugugugccaaag

SEQ ID NO: 127276 - RNA, 32 nt, Homo Sapiens
cgccggagccuggccauaggguagucucggga

SEQ ID NO: 127277 - RNA, 32 nt, Homo Sapiens
gggccuucaauuguaucaguacuuuuuuuuaa

SEQ ID NO: 127278 - RNA, 32 nt, Homo Sapiens
guaaagggccagacgggaaauauuuugggcuu

SEQ ID NO: 127279 - RNA, 32 nt, Homo Sapiens
cuucggucucuucuccccggcugaucccagca

SEQ ID NO: 127280 - RNA, 28 nt, Homo Sapiens
agcccuguugcaggaccagcucugcccc

SEQ ID NO: 127281 - RNA, 32 nt, Homo Sapiens
ggauuuugguaucugcagggguccugggaacc

SEQ ID NO: 127282 - RNA, 32 nt, Homo Sapiens
caugcccgugcaguucaaaccgaaguccgcag

SEQ ID NO: 127283 - RNA, 32 nt, Homo Sapiens
aauuucuaaaauuaaauaucagggccaggugu

SEQ ID NO: 127284 - RNA, 32 nt, Homo Sapiens
accugcccauccccaacccucagcaaaguaga

SEQ ID NO: 127285 - RNA, 30 nt, Homo Sapiens
gggucccagggugcugcaguggcucacaga

SEQ ID NO: 127286 - RNA, 32 nt, Homo Sapiens
ugcccucgggucuguccuccccgucuggaccc

SEQ ID NO: 127287 - RNA, 32 nt, Homo Sapiens
gaugaucucacggaguuguaggcaaggagaug

SEQ ID NO: 127288 - RNA, 32 nt, Homo Sapiens
augaucuugagauuauuuuuagcuuuauaaau

SEQ ID NO: 127289 - RNA, 32 nt, Homo Sapiens
guguuuuccuucccuuuccuccuaauuguggg

SEQ ID NO: 127290 - RNA, 32 nt, Homo Sapiens
cauuuuccuaaagcugguuuuucuugauuacu

SEQ ID NO: 127291 - RNA, 32 nt, Homo Sapiens
cagugaugaugaugaagaaagcaaagaaggcc

SEQ ID NO: 127292 - RNA, 32 nt, Homo Sapiens
cuuagaucagggcggaaccaucuuucacccgg

SEQ ID NO: 127293 - RNA, 32 nt, Homo Sapiens
ccccgaggcuuugcgucugcgcggccggccgc

SEQ ID NO: 127294 - RNA, 32 nt, Homo Sapiens
uuuguaucuggagcuuucauaauuaccuuagu

SEQ ID NO: 127295 - RNA, 32 nt, Homo Sapiens
cauacuuucccacagcacuacgauguguugaa

SEQ ID NO: 127296 - RNA, 32 nt, Homo Sapiens
acauauauguauauauuuauguauauguaagu

SEQ ID NO: 127297 - RNA, 32 nt, Homo Sapiens
cagucaauuucccuuucccaauaaaagccuuu

SEQ ID NO: 127298 - RNA, 32 nt, Homo Sapiens
ugcccuuggcuaucccugaaagagggaggacu

SEQ ID NO: 127299 - RNA, 32 nt, Homo Sapiens
ucaaaugacuuucaucaaaugacuuucaaaau

SEQ ID NO: 127300 - RNA, 32 nt, Homo Sapiens
ucuuaaccuuggagauggcugucuaggauuuc

SEQ ID NO: 127301 - RNA, 32 nt, Homo Sapiens
uggagaagauucgauuccgagaacaggaagag

SEQ ID NO: 127302 - RNA, 32 nt, Homo Sapiens
cuggcagaggggcaacaagccccugcuguggg

SEQ ID NO: 127303 - RNA, 32 nt, Homo Sapiens
cauguuuauuuuuacuucccuggguggacaga

SEQ ID NO: 127304 - RNA, 32 nt, Homo Sapiens
ugugccugucccuggcggccaggccauugccu

SEQ ID NO: 127305 - RNA, 32 nt, Homo Sapiens
gagcgagacaugagccuguagguucaguaggu

SEQ ID NO: 127306 - RNA, 32 nt, Homo Sapiens
ucaggaucucaaagcuggguguuuuagcauua

SEQ ID NO: 127307 - RNA, 32 nt, Homo Sapiens
aauugguguuugggugaucagaagcagguagc

SEQ ID NO: 127308 - RNA, 32 nt, Homo Sapiens
cuaggccguagugcagccucuccggaguccuc

SEQ ID NO: 127309 - RNA, 32 nt, Homo Sapiens
guauguuagacuuuuuacauuguuuaucuaau

SEQ ID NO: 127310 - RNA, 32 nt, Homo Sapiens
augcagaaggcacagaccccguagcgcaugcc

SEQ ID NO: 127311 - RNA, 32 nt, Homo Sapiens
uucugaauggauuuuucuuaagaaaugcgcca

SEQ ID NO: 127312 - RNA, 32 nt, Homo Sapiens
gcuggaacugagcaugagacgcugucaaauac

SEQ ID NO: 127313 - RNA, 32 nt, Homo Sapiens
cauaggccugcgccucaggcuuggagacgggc

SEQ ID NO: 127314 - RNA, 32 nt, Homo Sapiens
agaccucuaguuuuugguggguagggggucuc

SEQ ID NO: 127315 - RNA, 32 nt, Homo Sapiens
gcacugagaaaagaauguaaggaugaauagac

SEQ ID NO: 127316 - RNA, 32 nt, Homo Sapiens
ucacucauuucuagguggucuuuuccuuauuu

SEQ ID NO: 127317 - RNA, 32 nt, Homo Sapiens
uucugccucccuaaugagacaccucuuugcug

SEQ ID NO: 127318 - RNA, 32 nt, Homo Sapiens
agagguugacauuguucagggaugggacaaag

SEQ ID NO: 127319 - RNA, 32 nt, Homo Sapiens
ccugggacauucuccuuucagcccuucugggg

SEQ ID NO: 127320 - RNA, 32 nt, Homo Sapiens
caccuugggauucugugugcugccaucccacc

SEQ ID NO: 127321 - RNA, 32 nt, Homo Sapiens
gugaaaagggauguuagcauucauuagaguau

SEQ ID NO: 127322 - RNA, 32 nt, Homo Sapiens
acgugugcgggaagagcuucgccuggcgcucc

SEQ ID NO: 127323 - RNA, 32 nt, Homo Sapiens
aaccuggaggaagggaggcccaugguggagca

SEQ ID NO: 127324 - RNA, 32 nt, Homo Sapiens
cuuccuuuuuaacuuuauuguuuuagccaucc

SEQ ID NO: 127325 - RNA, 32 nt, Homo Sapiens
cagaaaacccaccgugauauuuaccaacugca

SEQ ID NO: 127326 - RNA, 32 nt, Homo Sapiens
auugagcuuuugcugagaaaacucuuuaguac

SEQ ID NO: 127327 - RNA, 32 nt, Homo Sapiens
agaauuucaacgggaagcugguuugcuucaua

SEQ ID NO: 127328 - RNA, 29 nt, Homo Sapiens
gauuuuuaauaaagagaauuugaaagcug

SEQ ID NO: 127329 - RNA, 32 nt, Homo Sapiens
cagugacggggacacaaauucuguugccuggu

SEQ ID NO: 127330 - RNA, 32 nt, Homo Sapiens
cggcagcaaagccccaggugcucccugucacc

SEQ ID NO: 127331 - RNA, 32 nt, Homo Sapiens
ccuagaguauaaaaugugaauguuuuuguagc

SEQ ID NO: 127332 - RNA, 32 nt, Homo Sapiens
gccuuccagcccuuuccagcuguaucacagac

SEQ ID NO: 127333 - RNA, 32 nt, Homo Sapiens
ugcccccaaauuauauuuauguauguaaguga

SEQ ID NO: 127334 - RNA, 32 nt, Homo Sapiens
ccuaggucagcuugcugcccuaggcuccguca

SEQ ID NO: 127335 - RNA, 32 nt, Homo Sapiens
aggagcagccugugggcaccgcggcgguaguu

SEQ ID NO: 127336 - RNA, 32 nt, Homo Sapiens
uucucgcgcgcucccccucgccgcccacuccc

SEQ ID NO: 127337 - RNA, 32 nt, Homo Sapiens
cagaaccggucccagccugggcuccucugcau

SEQ ID NO: 127338 - RNA, 30 nt, Homo Sapiens
gacccagccgccgugccgcgggccauggac

SEQ ID NO: 127339 - RNA, 32 nt, Homo Sapiens
ggcguucugccagcuggccuggggauucugag

SEQ ID NO: 127340 - RNA, 32 nt, Homo Sapiens
auggucuaacucauuucauacucugugaauau

SEQ ID NO: 127341 - RNA, 32 nt, Homo Sapiens
cacucgccgagcggcggcagcagcgggaggag

SEQ ID NO: 127342 - RNA, 32 nt, Homo Sapiens
cgucugcuucaggaagaaagugccugccauuc

SEQ ID NO: 127343 - RNA, 32 nt, Homo Sapiens
uccccaagaggagcugagagccauguacucua

SEQ ID NO: 127344 - RNA, 32 nt, Homo Sapiens
uaccgcacccucaggucuaaauccgaaaacuu

SEQ ID NO: 127345 - RNA, 32 nt, Homo Sapiens
gccgcguccccucccgcugcggacggguccuu

SEQ ID NO: 127346 - RNA, 32 nt, Homo Sapiens
aggaaauauuccaaagguacucaggauguaaa

SEQ ID NO: 127347 - RNA, 32 nt, Homo Sapiens
ccgggccccgcuguccucccccaccugcugac

SEQ ID NO: 127348 - RNA, 32 nt, Homo Sapiens
ggaaaucguccucaccucccacgcggcuccug

SEQ ID NO: 127349 - RNA, 32 nt, Homo Sapiens
gguagguaacuguauauugaucucuuccuuga

SEQ ID NO: 127350 - RNA, 32 nt, Homo Sapiens
cagaggagccccaccagggagcagcugccccc

SEQ ID NO: 127351 - RNA, 32 nt, Homo Sapiens
aucuuaugguaauucuauuuuuaauauuuugu

SEQ ID NO: 127352 - RNA, 32 nt, Homo Sapiens
acucuuggucugaccucuccaggccaggcucu

SEQ ID NO: 127353 - RNA, 32 nt, Homo Sapiens
auaaucuguuuauuggauggaccuccugcguc

SEQ ID NO: 127354 - RNA, 32 nt, Homo Sapiens
ugcggagucugguccccuccccuccgcuccua

SEQ ID NO: 127355 - RNA, 29 nt, Homo Sapiens
cgggauggcuaccacggccgagcucuucg

SEQ ID NO: 127356 - RNA, 32 nt, Homo Sapiens
gaagcaguggcagaagcaguagaagaccagcc

SEQ ID NO: 127357 - RNA, 32 nt, Homo Sapiens
caggcucugagagcuucuugcuguaugcacua

SEQ ID NO: 127358 - RNA, 32 nt, Homo Sapiens
uaguaaaaggggauuuaaaaauagaaucauag

SEQ ID NO: 127359 - RNA, 32 nt, Homo Sapiens
cccggcaaggacccugagggaugugaggccag

SEQ ID NO: 127360 - RNA, 32 nt, Homo Sapiens
agacuuuuggaaaauuaagaugucuaaaagga

SEQ ID NO: 127361 - RNA, 32 nt, Homo Sapiens
uaaggaacaaggggaacugaccacguguucau

SEQ ID NO: 127362 - RNA, 32 nt, Homo Sapiens
agcugugaugaaauccaggcaacugaguugug

SEQ ID NO: 127363 - RNA, 32 nt, Homo Sapiens
acaugaacccaccugcguggaaugcuguuugu

SEQ ID NO: 127364 - RNA, 32 nt, Homo Sapiens
uucggcagccucuacaggccaagcuccugccu

SEQ ID NO: 127365 - RNA, 32 nt, Homo Sapiens
cacuuacaaaaauauuuuaacagucuugaaau

SEQ ID NO: 127366 - RNA, 32 nt, Homo Sapiens
ugggaugggugagggagcuucucuaaagagga

SEQ ID NO: 127367 - RNA, 32 nt, Homo Sapiens
guaguggcgggggccgccggcgggucgugccc

SEQ ID NO: 127368 - RNA, 32 nt, Homo Sapiens
cagcucauuucaacaaaggagcuccgauguga

SEQ ID NO: 127369 - RNA, 31 nt, Homo Sapiens
cgccgcccacccucugcuagacacagccaag

SEQ ID NO: 127370 - RNA, 32 nt, Homo Sapiens
cuaagcuagugggugucuccaacuccugaucu

SEQ ID NO: 127371 - RNA, 32 nt, Homo Sapiens
ucagaagagaauaaaccaguguuuuuaccuuu

SEQ ID NO: 127372 - RNA, 32 nt, Homo Sapiens
ggaaacagauggaauuaaaucuucugacagau

SEQ ID NO: 127373 - RNA, 32 nt, Homo Sapiens
uggggacgcgcgcggccgagacucuggccugc

SEQ ID NO: 127374 - RNA, 32 nt, Homo Sapiens
aaaacaaaauuuaaaaaagauauaaggcagua

SEQ ID NO: 127375 - RNA, 32 nt, Homo Sapiens
uggccucacagcuuccuugcaaggcugucaca

SEQ ID NO: 127376 - RNA, 32 nt, Homo Sapiens
gacccucccgccucagccccccaagacuacag

SEQ ID NO: 127377 - RNA, 32 nt, Homo Sapiens
uuccuguacuauuguguuuugaguguguuuug

SEQ ID NO: 127378 - RNA, 32 nt, Homo Sapiens
aagacacaaccagaauggccuggggcucaggc

SEQ ID NO: 127379 - RNA, 32 nt, Homo Sapiens
ggaaggggacaaggacuaggguccuggggaac

SEQ ID NO: 127380 - RNA, 32 nt, Homo Sapiens
ucaucccauguucucccauggucauggcuucc

SEQ ID NO: 127381 - RNA, 32 nt, Homo Sapiens
cggcgccugccagggggugacuggcacagagc

SEQ ID NO: 127382 - RNA, 32 nt, Homo Sapiens
ggggcucucuccugggaugggggcagguguuc

SEQ ID NO: 127383 - RNA, 32 nt, Homo Sapiens
ccggcucagaucuuugcaaaucaguacgacag

SEQ ID NO: 127384 - RNA, 32 nt, Homo Sapiens
gugggaggaaaugcuagguuuuugugugugga

SEQ ID NO: 127385 - RNA, 32 nt, Homo Sapiens
uguccucuacauaccacacuuaaaagauggug

SEQ ID NO: 127386 - RNA, 32 nt, Homo Sapiens
auacuguugguuucuguaaauguugcaggguu

SEQ ID NO: 127387 - RNA, 30 nt, Homo Sapiens
cccggagagaagcauguugacuuuuccugg

SEQ ID NO: 127388 - RNA, 32 nt, Homo Sapiens
gguuucaugcaacugcugcucuaggcuggaaa

SEQ ID NO: 127389 - RNA, 32 nt, Homo Sapiens
gaucagucaguguaguuggaaaaauuguaaga

SEQ ID NO: 127390 - RNA, 32 nt, Homo Sapiens
ccagcaccagaaaacuaucaguguuuuuaaag

SEQ ID NO: 127391 - RNA, 32 nt, Homo Sapiens
gaaacgcaaacuaucauuaauuucauacuagu

SEQ ID NO: 127392 - RNA, 32 nt, Homo Sapiens
cucuuggagacggcgacccaggcaucugggga

SEQ ID NO: 127393 - RNA, 32 nt, Homo Sapiens
aaaucuaguuacugccuguaaauggugucauu

SEQ ID NO: 127394 - RNA, 32 nt, Homo Sapiens
uuuuuucauuuucaguuauuuuugaagcuaaa

SEQ ID NO: 127395 - RNA, 32 nt, Homo Sapiens
uauuuagaacagagguuuguuuguuuaaaaau

SEQ ID NO: 127396 - RNA, 32 nt, Homo Sapiens
uguuucacuguuugcuuucuccugucaugguu

SEQ ID NO: 127397 - RNA, 32 nt, Homo Sapiens
cacccagggaccucuaacuccacacauccacc

SEQ ID NO: 127398 - RNA, 32 nt, Homo Sapiens
agagugaagaaccuuucagauaaaauguaagc

SEQ ID NO: 127399 - RNA, 32 nt, Homo Sapiens
aggaggacgagggcgccgacuccuaccccgcc

SEQ ID NO: 127400 - RNA, 32 nt, Homo Sapiens
aaacaagaugauaucugaaaccagagagacuu

SEQ ID NO: 127401 - RNA, 32 nt, Homo Sapiens
uccaucugguucucagaagacccggcuuucuc

SEQ ID NO: 127402 - RNA, 32 nt, Homo Sapiens
uuaccaaaaaauacaaguaaaaucauaauaca

SEQ ID NO: 127403 - RNA, 32 nt, Homo Sapiens
cauguacacuguauaguaucuugcaucuauuu

SEQ ID NO: 127404 - RNA, 32 nt, Homo Sapiens
ccugcaguaaccacaacagcauccucucccug

SEQ ID NO: 127405 - RNA, 32 nt, Homo Sapiens
cucaggcagggcccugcuuuucuaggaauuga

SEQ ID NO: 127406 - RNA, 32 nt, Homo Sapiens
gcaacuaaguguuuaaaauuaugcucuguaac

SEQ ID NO: 127407 - RNA, 32 nt, Homo Sapiens
uuggagcugcacaaaccccggucuggaacugg

SEQ ID NO: 127408 - RNA, 32 nt, Homo Sapiens
cccugagccacgucccucccccugcagggugg

SEQ ID NO: 127409 - RNA, 32 nt, Homo Sapiens
gaggacacaauuuguacuguuguuauauauaa

SEQ ID NO: 127410 - RNA, 32 nt, Homo Sapiens
acaccaggacuuuaaucuuaugcuuaaaaugc

SEQ ID NO: 127411 - RNA, 32 nt, Homo Sapiens
gguucgagcuuguguucccccggaagggugag

SEQ ID NO: 127412 - RNA, 32 nt, Homo Sapiens
augaucuuaagccaggaaacauccuuuuggua

SEQ ID NO: 127413 - RNA, 32 nt, Homo Sapiens
agcagagcagagcugauggagaaggaaggcuc

SEQ ID NO: 127414 - RNA, 32 nt, Homo Sapiens
augggccugugcugucacgagaggaacagcug

SEQ ID NO: 127415 - RNA, 32 nt, Homo Sapiens
auucuauccucaucuguaaaacuuccccgucc

SEQ ID NO: 127416 - RNA, 32 nt, Homo Sapiens
ucaccauggcaaguacauggccugcugcaugu

SEQ ID NO: 127417 - RNA, 32 nt, Homo Sapiens
aguuugauuuacauuuauauuccuuuucuggu

SEQ ID NO: 127418 - RNA, 32 nt, Homo Sapiens
ggcuugggccugcacccuuccacagcuggccu

SEQ ID NO: 127419 - RNA, 32 nt, Homo Sapiens
aacuuucaguugaaaucuuucagauauuuuga

SEQ ID NO: 127420 - RNA, 32 nt, Homo Sapiens
ugaccaucugcacuuuauuuggaaggaagcag

SEQ ID NO: 127421 - RNA, 32 nt, Homo Sapiens
cugauuacauauuagagguuuauuuuuaugau

SEQ ID NO: 127422 - RNA, 32 nt, Homo Sapiens
uguguauuuuguuaaauaacuaacaugcugcu

SEQ ID NO: 127423 - RNA, 32 nt, Homo Sapiens
auucaugaucaccuuaaugcucaugagacuau

SEQ ID NO: 127424 - RNA, 32 nt, Homo Sapiens
cgcgcggcgcgagcgucacgccagacagcggc

SEQ ID NO: 127425 - RNA, 32 nt, Homo Sapiens
uagcuguuaugaaauguaauuguaaaaauaug

SEQ ID NO: 127426 - RNA, 32 nt, Homo Sapiens
gucaccuugagccgggcgagcgcugugggcca

SEQ ID NO: 127427 - RNA, 32 nt, Homo Sapiens
ccgcgccgcgcgcauguccuuccgucagcucu

SEQ ID NO: 127428 - RNA, 32 nt, Homo Sapiens
ugcccgcucagguggcacggcuggccuggacc

SEQ ID NO: 127429 - RNA, 32 nt, Homo Sapiens
ccuacgggaguccggcggcagcagccgguacc

SEQ ID NO: 127430 - RNA, 32 nt, Homo Sapiens
uuuuaacuccagaagcacuuuaugaaauggua

SEQ ID NO: 127431 - RNA, 29 nt, Homo Sapiens
gguggcaggggacagaugugcugcuguuc

SEQ ID NO: 127432 - RNA, 32 nt, Homo Sapiens
ccccagguugagcaauaagaaaccagaaccuu

SEQ ID NO: 127433 - RNA, 32 nt, Homo Sapiens
agggccuacaguaugacuugcaugucacuuuu

SEQ ID NO: 127434 - RNA, 32 nt, Homo Sapiens
gaaucaaaaaaguauuuuuaaauauccaugau

SEQ ID NO: 127435 - RNA, 32 nt, Homo Sapiens
ggacaagaggggcagcagggauggugggcugg

SEQ ID NO: 127436 - RNA, 32 nt, Homo Sapiens
uaaguaagccucagccaaagguuuuaugcauu

SEQ ID NO: 127437 - RNA, 32 nt, Homo Sapiens
auuccugaaacguguggggucugcguuucuaa

SEQ ID NO: 127438 - RNA, 32 nt, Homo Sapiens
uugguuugcaguguuaacauuuuuguuagccu

SEQ ID NO: 127439 - RNA, 32 nt, Homo Sapiens
cucuucuuucccuuuguagccgaucucuaggc

SEQ ID NO: 127440 - RNA, 32 nt, Homo Sapiens
cccgucgugagcagaaaggcccggggaggaug

SEQ ID NO: 127441 - RNA, 32 nt, Homo Sapiens
ccuggugaaguagcuuccugggccucuacuuc

SEQ ID NO: 127442 - RNA, 32 nt, Homo Sapiens
caagauugucuuucuuuuucuuuuucuuuuua

SEQ ID NO: 127443 - RNA, 31 nt, Homo Sapiens
ugguagaggaaaaaacagaucagggcggaac

SEQ ID NO: 127444 - RNA, 32 nt, Homo Sapiens
aaggaacguaaugaaagaaauaauucccauaa

SEQ ID NO: 127445 - RNA, 32 nt, Homo Sapiens
gguggcccggcgggcagcccagcucuguggug

SEQ ID NO: 127446 - RNA, 32 nt, Homo Sapiens
uaauuucuggaaagugacuguugugacccgga

SEQ ID NO: 127447 - RNA, 32 nt, Homo Sapiens
acucugcuuguacaguccuugagcccaguuua

SEQ ID NO: 127448 - RNA, 32 nt, Homo Sapiens
uagguugauucaaugucuuugcuaauaugaau

SEQ ID NO: 127449 - RNA, 32 nt, Homo Sapiens
gcauccuggugccugcauaccucuggcagcug

SEQ ID NO: 127450 - RNA, 32 nt, Homo Sapiens
caugugcgaugcccaacagccuccacucugca

SEQ ID NO: 127451 - RNA, 32 nt, Homo Sapiens
cauaaaguuaguaaggaaacaguguuuacucc

SEQ ID NO: 127452 - RNA, 32 nt, Homo Sapiens
auacuggggcugccgcgaaguaccacauaugg

SEQ ID NO: 127453 - RNA, 31 nt, Homo Sapiens
cuucaggcauaaggaaaacgauacuaauggc

SEQ ID NO: 127454 - RNA, 32 nt, Homo Sapiens
gcuggccgggagagggaggaagaggauggcag

SEQ ID NO: 127455 - RNA, 32 nt, Homo Sapiens
agccucccgccgaggggcccagcccccaaccc

SEQ ID NO: 127456 - RNA, 32 nt, Homo Sapiens
uguuggaaaaaguuacaaaaauaaauguuaaa

SEQ ID NO: 127457 - RNA, 32 nt, Homo Sapiens
uuccccuuuguccugcguuuucuccggguccu

SEQ ID NO: 127458 - RNA, 31 nt, Homo Sapiens
aaaaacagcagcccuauucagaaauugguuu

SEQ ID NO: 127459 - RNA, 32 nt, Homo Sapiens
ugcccguggcccugcugucgggccccaggccg

SEQ ID NO: 127460 - RNA, 32 nt, Homo Sapiens
auuucaaauugcaucaagaaauuaaaaucauc

SEQ ID NO: 127461 - RNA, 32 nt, Homo Sapiens
uggacgaggcggaagucuaagcugcaugaucu

SEQ ID NO: 127462 - RNA, 32 nt, Homo Sapiens
guaggacggaggcgucgcuaggcagcuucgaa

SEQ ID NO: 127463 - RNA, 32 nt, Homo Sapiens
cacuaugcgcgagccggccccgggcugcugag

SEQ ID NO: 127464 - RNA, 32 nt, Homo Sapiens
cuggugggggcauccuugaggaccuccaccug

SEQ ID NO: 127465 - RNA, 32 nt, Homo Sapiens
acacgcaggacacguggcggaagcugcacgag

SEQ ID NO: 127466 - RNA, 32 nt, Homo Sapiens
cugagcaccucccccgccucccugcccccgac

SEQ ID NO: 127467 - RNA, 32 nt, Homo Sapiens
aaaggauacuuugauuaaauaaaaacacucau

SEQ ID NO: 127468 - RNA, 32 nt, Homo Sapiens
augagcagagggaggagaagaaggggugcuca

SEQ ID NO: 127469 - RNA, 32 nt, Homo Sapiens
uagauaggccucuggaauaagguagcagagga

SEQ ID NO: 127470 - RNA, 32 nt, Homo Sapiens
ucuacucaugauguguuaugcauaaaacauuu

SEQ ID NO: 127471 - RNA, 32 nt, Homo Sapiens
aguguuuugagccauggccacguugucauugu

SEQ ID NO: 127472 - RNA, 32 nt, Homo Sapiens
caacagacacucagcccuccccacccuggcuc

SEQ ID NO: 127473 - RNA, 32 nt, Homo Sapiens
gugcgugccauugccagccgggcccgccaggc

SEQ ID NO: 127474 - RNA, 30 nt, Homo Sapiens
gggaaaggugagguuaggggucccgagaga

SEQ ID NO: 127475 - RNA, 27 nt, Homo Sapiens
ugacucaccuucuucugcccccacgcc

SEQ ID NO: 127476 - RNA, 32 nt, Homo Sapiens
cucccaggaccagagccucucccggccccagc

SEQ ID NO: 127477 - RNA, 32 nt, Homo Sapiens
aacuugcccuccccuucuggccuuggugauca

SEQ ID NO: 127478 - RNA, 32 nt, Homo Sapiens
gcccuccucugcccccucccccgcagacagac

SEQ ID NO: 127479 - RNA, 32 nt, Homo Sapiens
uguggacgugcuuugggggaggucuuuaaguc

SEQ ID NO: 127480 - RNA, 32 nt, Homo Sapiens
uguuggcuccucagccacgagcaugguacccu

SEQ ID NO: 127481 - RNA, 29 nt, Homo Sapiens
ggggcugugacuuacuccugccuccaggg

SEQ ID NO: 127482 - RNA, 32 nt, Homo Sapiens
ccccgcgagcugcgcucuccccggccggagcg

SEQ ID NO: 127483 - RNA, 32 nt, Homo Sapiens
uggacuuugaggaagaacccacagcaggagga

SEQ ID NO: 127484 - RNA, 32 nt, Homo Sapiens
gucacaggcuggcuucuguuuuauucagggau

SEQ ID NO: 127485 - RNA, 29 nt, Homo Sapiens
aguggcucguguuucacagugggcggcuu

SEQ ID NO: 127486 - RNA, 32 nt, Homo Sapiens
aaugccuuucccucauuuuauaacuuuaaaaa

SEQ ID NO: 127487 - RNA, 32 nt, Homo Sapiens
uagcagcugcuccucagcaaacuucaucccac

SEQ ID NO: 127488 - RNA, 31 nt, Homo Sapiens
agagugagcuacauccugccccgccuucauu

SEQ ID NO: 127489 - RNA, 32 nt, Homo Sapiens
gagcggcaggccugggauuuccauccagggau

SEQ ID NO: 127490 - RNA, 32 nt, Homo Sapiens
ugcuaauucuuugcaaaaauccaaauauuguu

SEQ ID NO: 127491 - RNA, 32 nt, Homo Sapiens
gaacuuaauauccaacugaucauaguacauau

SEQ ID NO: 127492 - RNA, 32 nt, Homo Sapiens
aagagaauguuuuaacccaagcaaguaucuaa

SEQ ID NO: 127493 - RNA, 30 nt, Homo Sapiens
uauguuuugcagaugggggaaacugaggaa

SEQ ID NO: 127494 - RNA, 32 nt, Homo Sapiens
gaacaagaaaucacuugcucuggggggaaggg

SEQ ID NO: 127495 - RNA, 32 nt, Homo Sapiens
aagaaaggagaauaaacuuguccagaaucagu

SEQ ID NO: 127496 - RNA, 32 nt, Homo Sapiens
ccuauauuagcuugcuugaaguugucucacag

SEQ ID NO: 127497 - RNA, 32 nt, Homo Sapiens
agcacccccuccccgcccauccuucggacagc

SEQ ID NO: 127498 - RNA, 32 nt, Homo Sapiens
ucuacuggauuucaaaaagagacuaauaccca

SEQ ID NO: 127499 - RNA, 32 nt, Homo Sapiens
auauucauauuauacuaacauaaacacauaua

SEQ ID NO: 127500 - RNA, 32 nt, Homo Sapiens
acauuuuguuauugggcaagugauugaaaaua

SEQ ID NO: 127501 - RNA, 32 nt, Homo Sapiens
gaaaggcggggcuccuuccucaaacaucggac

SEQ ID NO: 127502 - RNA, 32 nt, Homo Sapiens
auauuaaaucaucuuaggaaacauuauuuugu

SEQ ID NO: 127503 - RNA, 32 nt, Homo Sapiens
aagauaaaguuccuauugguggcucacugguu

SEQ ID NO: 127504 - RNA, 32 nt, Homo Sapiens
ugggggugcacagaucacauuuagguccuuga

SEQ ID NO: 127505 - RNA, 32 nt, Homo Sapiens
uuuuuuuuuuuuauuuuuuuuaaacuaaagcu

SEQ ID NO: 127506 - RNA, 32 nt, Homo Sapiens
ugucuccaaauguggagcuguuguguauuguc

SEQ ID NO: 127507 - RNA, 32 nt, Homo Sapiens
uuuccuacaauuuuucaaauuuuauaauguau

SEQ ID NO: 127508 - RNA, 32 nt, Homo Sapiens
gccgccucucuguacaguaacgccacuuccac

SEQ ID NO: 127509 - RNA, 32 nt, Homo Sapiens
aguuuacccacccauuaaaugggaacauuacu

SEQ ID NO: 127510 - RNA, 28 nt, Homo Sapiens
aagauggcggacgaggcggcccucgccc

SEQ ID NO: 127511 - RNA, 32 nt, Homo Sapiens
ugaagguacauuuucuguucucuccuagguua

SEQ ID NO: 127512 - RNA, 32 nt, Homo Sapiens
uacuuuaauuauuaguuuuucuccuauuuuaa

SEQ ID NO: 127513 - RNA, 32 nt, Homo Sapiens
ucuccuuggcggugcugucagcgcacagaccc

SEQ ID NO: 127514 - RNA, 30 nt, Homo Sapiens
ggccugcgcgcgccucccgggcggauucca

SEQ ID NO: 127515 - RNA, 32 nt, Homo Sapiens
ccauuuaaacacauuugaaacauacaaaaaua

SEQ ID NO: 127516 - RNA, 32 nt, Homo Sapiens
gucagucuaagugaugcuauuccaagagaagg

SEQ ID NO: 127517 - RNA, 32 nt, Homo Sapiens
auugggaaccugucaagaagugcuuuauccag

SEQ ID NO: 127518 - RNA, 32 nt, Homo Sapiens
acgccuuaaaagacauaggagaauucauacug

SEQ ID NO: 127519 - RNA, 32 nt, Homo Sapiens
ugcaacacaaaacacuaaaaauggaguugaug

SEQ ID NO: 127520 - RNA, 32 nt, Homo Sapiens
agggugggaggacuguguguccguggauuacu

SEQ ID NO: 127521 - RNA, 32 nt, Homo Sapiens
uuacaguccuuccuaaguuacucuucaugaga

SEQ ID NO: 127522 - RNA, 32 nt, Homo Sapiens
gguccuuugggguucaucuuugacauuugcca

SEQ ID NO: 127523 - RNA, 32 nt, Homo Sapiens
ucuggaacagagcugcaagaagucucugggca

SEQ ID NO: 127524 - RNA, 32 nt, Homo Sapiens
cccccucgcuguucgggucaguucuuggccau

SEQ ID NO: 127525 - RNA, 32 nt, Homo Sapiens
gccccagagcugccuccugccuggcacugccg

SEQ ID NO: 127526 - RNA, 30 nt, Homo Sapiens
aacuaccaugcucauucaucuggacgaaau

SEQ ID NO: 127527 - RNA, 32 nt, Homo Sapiens
cgcgcuuccgcgcacgcgcggagaaacccgcg

SEQ ID NO: 127528 - RNA, 32 nt, Homo Sapiens
agccaguaccccaucuucgacucuguagccuu

SEQ ID NO: 127529 - RNA, 32 nt, Homo Sapiens
cccaugagacuaggggccggagcccaccugcc

SEQ ID NO: 127530 - RNA, 32 nt, Homo Sapiens
ucaggguucuacauuuaucuguaaaaugugac

SEQ ID NO: 127531 - RNA, 32 nt, Homo Sapiens
ucccagagugcagccaaugccuuuguguggua

SEQ ID NO: 127532 - RNA, 32 nt, Homo Sapiens
ccgcaccuuucugugagaacggaacucggguu

SEQ ID NO: 127533 - RNA, 32 nt, Homo Sapiens
uuauaaaaggauuuuugaaaguauaaacaaau

SEQ ID NO: 127534 - RNA, 32 nt, Homo Sapiens
ugggcuccagugauccucccccuucagccucc

SEQ ID NO: 127535 - RNA, 32 nt, Homo Sapiens
gucuacuaccucuaaggacauuucauagcagc

SEQ ID NO: 127536 - RNA, 32 nt, Homo Sapiens
aaggacgaggccuccccagcccugcccggugc

SEQ ID NO: 127537 - RNA, 32 nt, Homo Sapiens
cagucagacauguucacuaaugacucaaguga

SEQ ID NO: 127538 - RNA, 32 nt, Homo Sapiens
ccaugccagcccccaacgcagggcgcccggcg

SEQ ID NO: 127539 - RNA, 32 nt, Homo Sapiens
uaaaugugaauucagugacucuagggccaaag

SEQ ID NO: 127540 - RNA, 32 nt, Homo Sapiens
guaacguaugugggaaaacuuuugucuauaag

SEQ ID NO: 127541 - RNA, 32 nt, Homo Sapiens
ccagacucauaggucccggcccagcccccgaa

SEQ ID NO: 127542 - RNA, 32 nt, Homo Sapiens
guucugggcuugucucgggucugaccaggaga

SEQ ID NO: 127543 - RNA, 32 nt, Homo Sapiens
uggaugggcggaagaacaccuucacugccugg

SEQ ID NO: 127544 - RNA, 32 nt, Homo Sapiens
uauucagugguuucuaaauaccauagugauuu

SEQ ID NO: 127545 - RNA, 32 nt, Homo Sapiens
gucguccguuucgggaaaaaguucuugcauau

SEQ ID NO: 127546 - RNA, 32 nt, Homo Sapiens
uccagaucucuccugcccucccuggcagccag

SEQ ID NO: 127547 - RNA, 32 nt, Homo Sapiens
ccagcauguggagagucgcugcggcugcuccu

SEQ ID NO: 127548 - RNA, 32 nt, Homo Sapiens
aggggcccugucacuguccagagucucuuuuu

SEQ ID NO: 127549 - RNA, 32 nt, Homo Sapiens
aacucccaggccccgcccacgccccgccgggg

SEQ ID NO: 127550 - RNA, 32 nt, Homo Sapiens
ucccugccauccucgacaagaugccugccccc

SEQ ID NO: 127551 - RNA, 32 nt, Homo Sapiens
cggggagcggggggucgggggagggccaccga

SEQ ID NO: 127552 - RNA, 32 nt, Homo Sapiens
gugaugcuuccucuccucuccccucccuugcu

SEQ ID NO: 127553 - RNA, 32 nt, Homo Sapiens
aguaggcaucaaagauacgacuucuacuauau

SEQ ID NO: 127554 - RNA, 27 nt, Homo Sapiens
aguauuuguuucuucagcuccacaaag

SEQ ID NO: 127555 - RNA, 32 nt, Homo Sapiens
cgcgcgugcgcgcgcggggcugacugcgggag

SEQ ID NO: 127556 - RNA, 32 nt, Homo Sapiens
ugcagugccaggaaugcugcgcugcugcugcu

SEQ ID NO: 127557 - RNA, 32 nt, Homo Sapiens
cccagcgcgggccuuggagagcgcgugaaggc

SEQ ID NO: 127558 - RNA, 32 nt, Homo Sapiens
aaacaaauuggcuuugucucauugaucagaca

SEQ ID NO: 127559 - RNA, 32 nt, Homo Sapiens
aacacaggcuacuuucuguuuacuccuaacaa

SEQ ID NO: 127560 - RNA, 32 nt, Homo Sapiens
cuggucuugggguauggugcuagcuaugguaa

SEQ ID NO: 127561 - RNA, 32 nt, Homo Sapiens
aaaauacaaaaauuagcuggacgugguggugu

SEQ ID NO: 127562 - RNA, 32 nt, Homo Sapiens
cauagaaacaaauuuugccaauugcuggacca

SEQ ID NO: 127563 - RNA, 32 nt, Homo Sapiens
aucguugagaggaauuuaaaauacuguuacua

SEQ ID NO: 127564 - RNA, 32 nt, Homo Sapiens
accucuggcagagccacauuaccuacccugug

SEQ ID NO: 127565 - RNA, 32 nt, Homo Sapiens
agguggguauggaaacacaugagagaauguga

SEQ ID NO: 127566 - RNA, 32 nt, Homo Sapiens
gucccggucugugucccacgccugcagcugga

SEQ ID NO: 127567 - RNA, 32 nt, Homo Sapiens
accugcugacauuccaaaccacuucuugauag

SEQ ID NO: 127568 - RNA, 32 nt, Homo Sapiens
agagaauggcuuccuguuguuuuguuuauuuu

SEQ ID NO: 127569 - RNA, 32 nt, Homo Sapiens
gaagaaaauagaauaaagauccagucauauau

SEQ ID NO: 127570 - RNA, 32 nt, Homo Sapiens
aaauaacaacgcuucuucggugaaguucuuuu

SEQ ID NO: 127571 - RNA, 32 nt, Homo Sapiens
cugcagccugucaucccugucugugaccauug

SEQ ID NO: 127572 - RNA, 32 nt, Homo Sapiens
aacaaaaauugucccacaucucccgaaccucu

SEQ ID NO: 127573 - RNA, 32 nt, Homo Sapiens
ggguggaggaagagcuuuggggaagaugaggu

SEQ ID NO: 127574 - RNA, 32 nt, Homo Sapiens
guuacugucauucccauuccuuuucguuuaga

SEQ ID NO: 127575 - RNA, 32 nt, Homo Sapiens
cgggaggcgggggcgcccgggcccuggauguc

SEQ ID NO: 127576 - RNA, 32 nt, Homo Sapiens
ucgcaccagcggccuccgcccucccccauuca

SEQ ID NO: 127577 - RNA, 32 nt, Homo Sapiens
aggguuguacuauuguuuaaaaacaggaaaaa

SEQ ID NO: 127578 - RNA, 32 nt, Homo Sapiens
cggcgcgcauggggacuucacugccgacgacc

SEQ ID NO: 127579 - RNA, 32 nt, Homo Sapiens
uccagacugucuucugagacaagcauuucugu

SEQ ID NO: 127580 - RNA, 32 nt, Homo Sapiens
ugcuuccucccuggugugaacucuuucuuugg

SEQ ID NO: 127581 - RNA, 32 nt, Homo Sapiens
agauacuuaaucgagcauauauauuuauauuc

SEQ ID NO: 127582 - RNA, 32 nt, Homo Sapiens
caacgagcaaaucuuuuuggggugugugggaa

SEQ ID NO: 127583 - RNA, 32 nt, Homo Sapiens
uaagaaaggggaggggacagugcaauccgggu

SEQ ID NO: 127584 - RNA, 32 nt, Homo Sapiens
auuagccgaaaacacuuccugugauuucuugc

SEQ ID NO: 127585 - RNA, 32 nt, Homo Sapiens
ugcggugcagagcggaggcggaggcgggcgcg

SEQ ID NO: 127586 - RNA, 32 nt, Homo Sapiens
gaguuguuugccggcucccgggccgccagacg

SEQ ID NO: 127587 - RNA, 32 nt, Homo Sapiens
ccgggcggugcuagcagggaagagggacgcgc

SEQ ID NO: 127588 - RNA, 32 nt, Homo Sapiens
auacuaggcaaauccauggagauggaacauag

SEQ ID NO: 127589 - RNA, 32 nt, Homo Sapiens
auccuguuggugaccgucuauaucccugggga

SEQ ID NO: 127590 - RNA, 32 nt, Homo Sapiens
uuaccaaacaaacaggcagaguucacuauucu

SEQ ID NO: 127591 - RNA, 32 nt, Homo Sapiens
guaacauguguucuguacuuucugggaagauc

SEQ ID NO: 127592 - RNA, 32 nt, Homo Sapiens
cccagcugcuuaaaauggaccccucccaaggg

SEQ ID NO: 127593 - RNA, 32 nt, Homo Sapiens
uaggaugacaacacuuugacuguggaggugcu

SEQ ID NO: 127594 - RNA, 32 nt, Homo Sapiens
caucugcuguuccaccuccccccuccccacuu

SEQ ID NO: 127595 - RNA, 32 nt, Homo Sapiens
ggcgagggcgcgcgucucgcgguccauccagc

SEQ ID NO: 127596 - RNA, 32 nt, Homo Sapiens
cggcucuggugcccauccucccagcaugcucu

SEQ ID NO: 127597 - RNA, 32 nt, Homo Sapiens
uccccacccuccccauggcccacccaucuggg

SEQ ID NO: 127598 - RNA, 32 nt, Homo Sapiens
ccaccgcccggccccaccuggcugucaucggg

SEQ ID NO: 127599 - RNA, 32 nt, Homo Sapiens
uuggcuucccgcagagggcagggcccauccua

SEQ ID NO: 127600 - RNA, 32 nt, Homo Sapiens
gcucauuucaacaaaggagcuccgaugugagg

SEQ ID NO: 127601 - RNA, 32 nt, Homo Sapiens
uuguugucuuuuucuuuuucuuuucuuuuuuu

SEQ ID NO: 127602 - RNA, 32 nt, Homo Sapiens
cugccccauuucccgggguagcccaggacauc

SEQ ID NO: 127603 - RNA, 32 nt, Homo Sapiens
ccacagacgcucuccagguucucaagaguuau

SEQ ID NO: 127604 - RNA, 32 nt, Homo Sapiens
acacuacgcuaagggagggaggcuaaaggcgg

SEQ ID NO: 127605 - RNA, 32 nt, Homo Sapiens
ccaggcgcucgccccaggacguuguccggcgg

SEQ ID NO: 127606 - RNA, 32 nt, Homo Sapiens
gcgccggcgggcugggucuugggaauucuggu

SEQ ID NO: 127607 - RNA, 32 nt, Homo Sapiens
uacucucugguguccccucaccacccucuggu

SEQ ID NO: 127608 - RNA, 32 nt, Homo Sapiens
aauucuccggcggcugcagauugacgggacga

SEQ ID NO: 127609 - RNA, 32 nt, Homo Sapiens
cccuugccccacugccugccagcuguccccaa

SEQ ID NO: 127610 - RNA, 32 nt, Homo Sapiens
auuauugguauuaaagaaauccauucacccca

SEQ ID NO: 127611 - RNA, 32 nt, Homo Sapiens
ugcugcaugcugcaugagacccaggguccugu

SEQ ID NO: 127612 - RNA, 32 nt, Homo Sapiens
gaggcugggccggcgcugccccucaucuuagc

SEQ ID NO: 127613 - RNA, 32 nt, Homo Sapiens
gacuggugccucgccgccuccucucggugcgg

SEQ ID NO: 127614 - RNA, 32 nt, Homo Sapiens
ucuguuaugggcuuuuggggagccagaagcca

SEQ ID NO: 127615 - RNA, 32 nt, Homo Sapiens
cucuggcuucugugcauccacccaggcccccg

SEQ ID NO: 127616 - RNA, 32 nt, Homo Sapiens
uccccugaaacacugacucaggagguuugguu

SEQ ID NO: 127617 - RNA, 32 nt, Homo Sapiens
uuccugcugacacuccacgagcugacccagca

SEQ ID NO: 127618 - RNA, 32 nt, Homo Sapiens
uugagguugcuguuccuagguaguaucuagga

SEQ ID NO: 127619 - RNA, 31 nt, Homo Sapiens
cccucuggguucccaaguugaagccuagacu

SEQ ID NO: 127620 - RNA, 32 nt, Homo Sapiens
ugcuguuugacuaaauacaauucaaagcagug

SEQ ID NO: 127621 - RNA, 32 nt, Homo Sapiens
accaccacaccaagccccuagcuggggcacag

SEQ ID NO: 127622 - RNA, 32 nt, Homo Sapiens
caagaauuuaaauuauuuugagagaggcauuu

SEQ ID NO: 127623 - RNA, 32 nt, Homo Sapiens
uccugccccuuccugguucuuaucucaaggca

SEQ ID NO: 127624 - RNA, 32 nt, Homo Sapiens
ugcagccuucccuccgcccuggaaggccaggu

SEQ ID NO: 127625 - RNA, 32 nt, Homo Sapiens
ugugaguuuaggaaacaaagauggacuucuga

SEQ ID NO: 127626 - RNA, 32 nt, Homo Sapiens
cgugccgggcgggcgggucgucguccgaggcc

SEQ ID NO: 127627 - RNA, 32 nt, Homo Sapiens
aggcuaagccagcagauuguucuguugccggg

SEQ ID NO: 127628 - RNA, 31 nt, Homo Sapiens
ggaaucagcucccucgcuccaguggccuugg

SEQ ID NO: 127629 - RNA, 32 nt, Homo Sapiens
aaguccaguuuauuucugaaucaaaaaaugag

SEQ ID NO: 127630 - RNA, 32 nt, Homo Sapiens
ggaaaauccuuaaauuaugaaacagcuugaua

SEQ ID NO: 127631 - RNA, 32 nt, Homo Sapiens
uuaaaaaaaaauuugagcuaaaacucauuuuu

SEQ ID NO: 127632 - RNA, 32 nt, Homo Sapiens
agauaagaguuuggaguugaugaugcuagaau

SEQ ID NO: 127633 - RNA, 32 nt, Homo Sapiens
gguagccaguauauuaaauauugauagaaaaa

SEQ ID NO: 127634 - RNA, 32 nt, Homo Sapiens
ccugugcggagcaggaguagcaggaccacggg

SEQ ID NO: 127635 - RNA, 30 nt, Homo Sapiens
gcgccgagaaggcgcgcugggcgcccgugg

SEQ ID NO: 127636 - RNA, 32 nt, Homo Sapiens
aacaaaugggucccgggccuccaaaacacggu

SEQ ID NO: 127637 - RNA, 32 nt, Homo Sapiens
ggaggugcuggagagcaagaaaaggagccugu

SEQ ID NO: 127638 - RNA, 32 nt, Homo Sapiens
caagaaccaucugggaugaaugcugaaggaaa

SEQ ID NO: 127639 - RNA, 32 nt, Homo Sapiens
uugaaagaaaauugauaagaaaacuuugaggg

SEQ ID NO: 127640 - RNA, 32 nt, Homo Sapiens
ugagaaacgcucuacuaaugauuuguuuuuau

SEQ ID NO: 127641 - RNA, 32 nt, Homo Sapiens
acugggaggcccggcgcgaggcucugcgucuc

SEQ ID NO: 127642 - RNA, 32 nt, Homo Sapiens
ccagaguugggccacuaucuuuuaaaauugcu

SEQ ID NO: 127643 - RNA, 32 nt, Homo Sapiens
guccuaccuuggcaugauuuaaauacauaugc

SEQ ID NO: 127644 - RNA, 32 nt, Homo Sapiens
guaaaauuacaaucauaucuauucaaaccacc

SEQ ID NO: 127645 - RNA, 32 nt, Homo Sapiens
acuggcuuuacuauuugaaaacugguuugugu

SEQ ID NO: 127646 - RNA, 32 nt, Homo Sapiens
auauuuugguucucauauuaaucuugcuuuua

SEQ ID NO: 127647 - RNA, 32 nt, Homo Sapiens
ugcaggugaagauuuuucuauuagauuaucua

SEQ ID NO: 127648 - RNA, 32 nt, Homo Sapiens
aaaauuauguguuauuuaauucugauacuuuu

SEQ ID NO: 127649 - RNA, 29 nt, Homo Sapiens
cuauaaauuuugugcuauuuucuagcugu

SEQ ID NO: 127650 - RNA, 32 nt, Homo Sapiens
gaccugcacucugggugucuccugcuuacaaa

SEQ ID NO: 127651 - RNA, 32 nt, Homo Sapiens
ugguugguggguggugugcaaagggaaugaag

SEQ ID NO: 127652 - RNA, 28 nt, Homo Sapiens
acuccuugggccccuaggaugacccaac

SEQ ID NO: 127653 - RNA, 32 nt, Homo Sapiens
uuguuacaaccuggauaugaugcccacaugcg

SEQ ID NO: 127654 - RNA, 32 nt, Homo Sapiens
ccuguuucagcauguuauauucuuauaaaaua

SEQ ID NO: 127655 - RNA, 32 nt, Homo Sapiens
ggggaaggcccggcccggcacaacagcagacu

SEQ ID NO: 127656 - RNA, 32 nt, Homo Sapiens
acugcauggcugcuuuccuuuccuuuacucaa

SEQ ID NO: 127657 - RNA, 32 nt, Homo Sapiens
gaauucucugauuuugauuugcugacguguua

SEQ ID NO: 127658 - RNA, 32 nt, Homo Sapiens
uucggaaagggagggaaagcaagccuggcaga

SEQ ID NO: 127659 - RNA, 32 nt, Homo Sapiens
gggaggggccgcccgggcggucagacuggcac

SEQ ID NO: 127660 - RNA, 32 nt, Homo Sapiens
guccuccggccgcgacuccgggccggcccugc

SEQ ID NO: 127661 - RNA, 32 nt, Homo Sapiens
cagggaggauagaggagaaaagggcuugggcc

SEQ ID NO: 127662 - RNA, 28 nt, Homo Sapiens
agcucaguggcuacagaaugggugggga

SEQ ID NO: 127663 - RNA, 32 nt, Homo Sapiens
augagggagugaaaacuuugcauagaauccuc

SEQ ID NO: 127664 - RNA, 31 nt, Homo Sapiens
cggccaccgucgaguuccgucgaguuccguc

SEQ ID NO: 127665 - RNA, 32 nt, Homo Sapiens
uaaacugcucugagacacgcuugaagaguucc

SEQ ID NO: 127666 - RNA, 32 nt, Homo Sapiens
ugucuuacaucccacauccaguuugucagaaa

SEQ ID NO: 127667 - RNA, 32 nt, Homo Sapiens
cagugcuuuguugauuuagaugaugacucaag

SEQ ID NO: 127668 - RNA, 32 nt, Homo Sapiens
gaauguucaaaauaaacaugcuguuuacucug

SEQ ID NO: 127669 - RNA, 32 nt, Homo Sapiens
uauauugacaccuuuuacagaucuuacuguag

SEQ ID NO: 127670 - RNA, 32 nt, Homo Sapiens
gcgcggggcgggugcugcuugcugcaggcucu

SEQ ID NO: 127671 - RNA, 32 nt, Homo Sapiens
gguggcgcucgcuggugacguagugaguguga

SEQ ID NO: 127672 - RNA, 32 nt, Homo Sapiens
cuggcuggcguggcccuuggccgucgucaccu

SEQ ID NO: 127673 - RNA, 32 nt, Homo Sapiens
caaacaucaguucuucaaauaaggacgcaaau

SEQ ID NO: 127674 - RNA, 32 nt, Homo Sapiens
acgugggaaugggaaaccagaagguuucgagc

SEQ ID NO: 127675 - RNA, 32 nt, Homo Sapiens
aguaucuaaacacaacaagaacaaaagcagcc

SEQ ID NO: 127676 - RNA, 32 nt, Homo Sapiens
agaccucaggcagcggcugcagaggggcgagc

SEQ ID NO: 127677 - RNA, 32 nt, Homo Sapiens
uuguguacauucuccuuuguuuuacuucucgg

SEQ ID NO: 127678 - RNA, 32 nt, Homo Sapiens
ccccaucguguuucucauuuccguggacaccc

SEQ ID NO: 127679 - RNA, 32 nt, Homo Sapiens
caacuuuacacccauaucccagcaaaugccac

SEQ ID NO: 127680 - RNA, 32 nt, Homo Sapiens
cgaggccccugcgggcggccagcgccugaggc

SEQ ID NO: 127681 - RNA, 32 nt, Homo Sapiens
auauauuaaaauugauugucaaauacagcauu

SEQ ID NO: 127682 - RNA, 32 nt, Homo Sapiens
ggcugcccacccaagguuugguuggggugaaa

SEQ ID NO: 127683 - RNA, 32 nt, Homo Sapiens
ucucaaugccucccccucccccauucucucca

SEQ ID NO: 127684 - RNA, 32 nt, Homo Sapiens
guuucuauauaugguguacucccuuuaaugac

SEQ ID NO: 127685 - RNA, 32 nt, Homo Sapiens
ccaaacaaaaauaccuggagcagcaguuuagc

SEQ ID NO: 127686 - RNA, 32 nt, Homo Sapiens
agcccaugggaaugcccugaaacuacuguauc

SEQ ID NO: 127687 - RNA, 32 nt, Homo Sapiens
acuuugggguugaacuuacuugaauggauuaa

SEQ ID NO: 127688 - RNA, 32 nt, Homo Sapiens
agguggagaagaguacccaagaaggacaagcu

SEQ ID NO: 127689 - RNA, 32 nt, Homo Sapiens
cauuuuuguggucacuguucucuucuauaucc

SEQ ID NO: 127690 - RNA, 32 nt, Homo Sapiens
cgggaggcgaggggcgccucugcccggcugcc

SEQ ID NO: 127691 - RNA, 32 nt, Homo Sapiens
uauuuaugaaaaucuuuuugugaauguuauaa

SEQ ID NO: 127692 - RNA, 32 nt, Homo Sapiens
ucaucugaaaagcccuccuggaccucaaagaa

SEQ ID NO: 127693 - RNA, 30 nt, Homo Sapiens
auaugugucugugugcgugcgcaucugugu

SEQ ID NO: 127694 - RNA, 32 nt, Homo Sapiens
caaaucuuuagcauugaugaaaauaguuauuu

SEQ ID NO: 127695 - RNA, 32 nt, Homo Sapiens
acaaacgagcggagggaagauaccuagaagcc

SEQ ID NO: 127696 - RNA, 32 nt, Homo Sapiens
caacgauucagaugaagaaaugcacaagaggc

SEQ ID NO: 127697 - RNA, 32 nt, Homo Sapiens
gguuuguuuuuucaagaaaauuuugcagaagc

SEQ ID NO: 127698 - RNA, 32 nt, Homo Sapiens
uaucuugcuuugcaagauucuuccgccgucag

SEQ ID NO: 127699 - RNA, 32 nt, Homo Sapiens
cugcaaaccgguuaaucaagaauuuggucaag

SEQ ID NO: 127700 - RNA, 30 nt, Homo Sapiens
gcgaggggugcgcagcauucggcagagggc

SEQ ID NO: 127701 - RNA, 32 nt, Homo Sapiens
agaccagacuccggcuccgcccggcccgugcc

SEQ ID NO: 127702 - RNA, 32 nt, Homo Sapiens
gcuaaaugauuuucuuuuuuuggagggggggu

SEQ ID NO: 127703 - RNA, 32 nt, Homo Sapiens
cucagccccacccccagguccacaguguccaa

SEQ ID NO: 127704 - RNA, 32 nt, Homo Sapiens
agacauucucggggaaggcuuuccugaugccc

SEQ ID NO: 127705 - RNA, 32 nt, Homo Sapiens
cgaugccucucccagaugucacaauuagaagu

SEQ ID NO: 127706 - RNA, 32 nt, Homo Sapiens
uuccuacaggaguguccauagauggauggagg

SEQ ID NO: 127707 - RNA, 32 nt, Homo Sapiens
ugacugcucccacugauuucuuucucuccauu

SEQ ID NO: 127708 - RNA, 32 nt, Homo Sapiens
caaucccaccccagccuccucagcccccggcc

SEQ ID NO: 127709 - RNA, 32 nt, Homo Sapiens
gucaggguuggcuugugaaaaguuguuaaaca

SEQ ID NO: 127710 - RNA, 32 nt, Homo Sapiens
accggcgggugcauggcgccgaguggccgggg

SEQ ID NO: 127711 - RNA, 32 nt, Homo Sapiens
acgggacgaggguggcgggugaccaagugcag

SEQ ID NO: 127712 - RNA, 32 nt, Homo Sapiens
ggaauuuuuuaaaaucuguaauguuuggacaa

SEQ ID NO: 127713 - RNA, 32 nt, Homo Sapiens
cgcuuuguaaaaauuugcaucuguuuagaaac

SEQ ID NO: 127714 - RNA, 32 nt, Homo Sapiens
uagcuauguuuccaucuucaguuucugaagac

SEQ ID NO: 127715 - RNA, 32 nt, Homo Sapiens
guggaugccguaugcauguugcugggggaagc

SEQ ID NO: 127716 - RNA, 32 nt, Homo Sapiens
accaaacagaccccaguccagcccugaagacg

SEQ ID NO: 127717 - RNA, 32 nt, Homo Sapiens
cauugcacuccagccugggcaacuccgucuaa

SEQ ID NO: 127718 - RNA, 32 nt, Homo Sapiens
aucuucuuuuucucccugauauuuuaaugcuc

SEQ ID NO: 127719 - RNA, 32 nt, Homo Sapiens
ucaccaucugucaucucacuaccaccaugcug

SEQ ID NO: 127720 - RNA, 32 nt, Homo Sapiens
cuuccccggccgcgagcgcgccgcugcuugaa

SEQ ID NO: 127721 - RNA, 32 nt, Homo Sapiens
ggggaucaggaucuuauuuguauuuuuccuga

SEQ ID NO: 127722 - RNA, 32 nt, Homo Sapiens
ccaggcccgagcuucucagccugccguuugcc

SEQ ID NO: 127723 - RNA, 32 nt, Homo Sapiens
cagcugcuguuaaaauguacaaugaacucuag

SEQ ID NO: 127724 - RNA, 32 nt, Homo Sapiens
cuggauugaaagaguauuugggaaauguggca

SEQ ID NO: 127725 - RNA, 32 nt, Homo Sapiens
guggccaaacucccagcucaggcuugauuccu

SEQ ID NO: 127726 - RNA, 32 nt, Homo Sapiens
ccauucuaaccuugagccacagugucacucuu

SEQ ID NO: 127727 - RNA, 32 nt, Homo Sapiens
gacuuaaaauuuccuuuuaagcugcccuguug

SEQ ID NO: 127728 - RNA, 32 nt, Homo Sapiens
guagcagugagcaaaggugugggugugaaagg

SEQ ID NO: 127729 - RNA, 32 nt, Homo Sapiens
gccuggccaacaugaugaaaccccguuucuac

SEQ ID NO: 127730 - RNA, 32 nt, Homo Sapiens
ucacugaggccuccccaguccaaagcuccugc

SEQ ID NO: 127731 - RNA, 32 nt, Homo Sapiens
ucacugcggccuccccaguccacagcuccugc

SEQ ID NO: 127732 - RNA, 32 nt, Homo Sapiens
gaacuauaauuuccugccacauagccccucca

SEQ ID NO: 127733 - RNA, 32 nt, Homo Sapiens
ccagcggggaggaggagcaaggacauguacca

SEQ ID NO: 127734 - RNA, 32 nt, Homo Sapiens
acacuggggggccuuuggcugucacucccugu

SEQ ID NO: 127735 - RNA, 32 nt, Homo Sapiens
uaauuuuuauuaugaaacuuuccuuugucauu

SEQ ID NO: 127736 - RNA, 32 nt, Homo Sapiens
auaggcccacaggccaggugcagacguuuaac

SEQ ID NO: 127737 - RNA, 32 nt, Homo Sapiens
acaaagauuauuuacacuuucaucucuuuuuc

SEQ ID NO: 127738 - RNA, 32 nt, Homo Sapiens
cauauuuuauuaugacauuuccuaauaaaccc

SEQ ID NO: 127739 - RNA, 32 nt, Homo Sapiens
ugccuccccccuccugcgauggggguaccaac

SEQ ID NO: 127740 - RNA, 32 nt, Homo Sapiens
cccugcuccgcgggguccacagcgggcuccac

SEQ ID NO: 127741 - RNA, 32 nt, Homo Sapiens
ccucuccccuccccuuccccucucgcaaacau

SEQ ID NO: 127742 - RNA, 32 nt, Homo Sapiens
gaaccggagcgcggggccgcggucgccccgac

SEQ ID NO: 127743 - RNA, 32 nt, Homo Sapiens
uauuguucuuuuucuuuuuaguguguggagau

SEQ ID NO: 127744 - RNA, 32 nt, Homo Sapiens
caaaccuagccggggggcgcacggucacccaa

SEQ ID NO: 127745 - RNA, 32 nt, Homo Sapiens
uuccuucucuuucuccuucuuggaugucugau

SEQ ID NO: 127746 - RNA, 32 nt, Homo Sapiens
gguuuaaggggagaggaaauauugcugggguc

SEQ ID NO: 127747 - RNA, 32 nt, Homo Sapiens
auuucuaucacauauuugauaguugguguuca

SEQ ID NO: 127748 - RNA, 31 nt, Homo Sapiens
gaagcuuguggagguagcuccacucccggcu

SEQ ID NO: 127749 - RNA, 32 nt, Homo Sapiens
caccuaaugaacuggcugcaggacggcaaucc

SEQ ID NO: 127750 - RNA, 32 nt, Homo Sapiens
gaagcuuuuccacaguccuugugcucugagau

SEQ ID NO: 127751 - RNA, 32 nt, Homo Sapiens
cugggacggaguagccccccggagcccgugcc

SEQ ID NO: 127752 - RNA, 32 nt, Homo Sapiens
caaauggacuuccugcccucacaaggauuacg

SEQ ID NO: 127753 - RNA, 32 nt, Homo Sapiens
gcacugcugcucccuggagcccgggaaggagg

SEQ ID NO: 127754 - RNA, 32 nt, Homo Sapiens
aggagucacuuugggcuuccugucccaacuug

SEQ ID NO: 127755 - RNA, 32 nt, Homo Sapiens
ucuuggauaggggccagugcagugccauccua

SEQ ID NO: 127756 - RNA, 32 nt, Homo Sapiens
uuuaucagugcagaucaucagaauuaaaguuc

SEQ ID NO: 127757 - RNA, 32 nt, Homo Sapiens
aaagauaaugaaaaugacaaucaaacuggauu

SEQ ID NO: 127758 - RNA, 32 nt, Homo Sapiens
caaaugucgucuuuaagaaaaauguucuuaua

SEQ ID NO: 127759 - RNA, 27 nt, Homo Sapiens
agauuguccuucuugggauuaucuugc

SEQ ID NO: 127760 - RNA, 31 nt, Homo Sapiens
gggagguucccugggaaccagguggucgaag

SEQ ID NO: 127761 - RNA, 32 nt, Homo Sapiens
uccccaacacgugcgugcauaugaaaccacau

SEQ ID NO: 127762 - RNA, 32 nt, Homo Sapiens
gagccggccuguuccccagagcccccggagcc

SEQ ID NO: 127763 - RNA, 31 nt, Homo Sapiens
ccuacccagcgcagucaggggcggggcuggg

SEQ ID NO: 127764 - RNA, 32 nt, Homo Sapiens
gguuucgguuggaggacucguuggggaggugg

SEQ ID NO: 127765 - RNA, 32 nt, Homo Sapiens
cacuccacuccagccugggcaacagugugaga

SEQ ID NO: 127766 - RNA, 32 nt, Homo Sapiens
auguaaacauucaaaaugauaauugaaucucu

SEQ ID NO: 127767 - RNA, 32 nt, Homo Sapiens
auuuauccauucaaaauauauauuuuuuucca

SEQ ID NO: 127768 - RNA, 32 nt, Homo Sapiens
ccccauugguuuauuuuauauccauggaccuu

SEQ ID NO: 127769 - RNA, 32 nt, Homo Sapiens
uaauuuuuccugcuguauccagaagaaauaau

SEQ ID NO: 127770 - RNA, 32 nt, Homo Sapiens
gaacgugauguggacgagccugcaugagagcu

SEQ ID NO: 127771 - RNA, 32 nt, Homo Sapiens
acucauaaaguauaaaguaaaaacuuuuaacc

SEQ ID NO: 127772 - RNA, 32 nt, Homo Sapiens
uggaaguccagaacaagaagcuuauagaggaa

SEQ ID NO: 127773 - RNA, 32 nt, Homo Sapiens
gcaauaaaaagcccggugaccuuuaccccagc

SEQ ID NO: 127774 - RNA, 32 nt, Homo Sapiens
aagcagguuacguggaauauaucacuuaacuc

SEQ ID NO: 127775 - RNA, 32 nt, Homo Sapiens
gccuaaaucaguacuacugccagucaccugag

SEQ ID NO: 127776 - RNA, 30 nt, Homo Sapiens
uguagaagaacuuuguacuaacucuucauu

SEQ ID NO: 127777 - RNA, 32 nt, Homo Sapiens
guggaguggcucggcuggcccguguaugggaa

SEQ ID NO: 127778 - RNA, 32 nt, Homo Sapiens
auaucuauuuuucauuuuuuuacuuuguaguu

SEQ ID NO: 127779 - RNA, 32 nt, Homo Sapiens
auguuugccuuauguauauucccuuuauuucc

SEQ ID NO: 127780 - RNA, 32 nt, Homo Sapiens
auaaaguucuauuuuaaugucuguaaauacuu

SEQ ID NO: 127781 - RNA, 32 nt, Homo Sapiens
uguuauaauauucaguagggacccucaacaaa

SEQ ID NO: 127782 - RNA, 32 nt, Homo Sapiens
cauccuacucuaugauuuacuaaccaauuacu

SEQ ID NO: 127783 - RNA, 32 nt, Homo Sapiens
uguuguuguuuucagccugcugcugcugcugc

SEQ ID NO: 127784 - RNA, 32 nt, Homo Sapiens
agcccugugggcucugcggaugcacgcccucc

SEQ ID NO: 127785 - RNA, 32 nt, Homo Sapiens
uuaaaauuugaaaccauaguaauguauguuua

SEQ ID NO: 127786 - RNA, 32 nt, Homo Sapiens
aaaaguaaguauaaaaauagauauuggauucu

SEQ ID NO: 127787 - RNA, 32 nt, Homo Sapiens
uucucugggcugcguggggccggagcagaggu

SEQ ID NO: 127788 - RNA, 30 nt, Homo Sapiens
gcugccuccgccgcgccgccggcccggauu

SEQ ID NO: 127789 - RNA, 30 nt, Homo Sapiens
cgggaucccggcggcggcgggggaaggagg

SEQ ID NO: 127790 - RNA, 32 nt, Homo Sapiens
accuucccaagccuccagagaguucucccucc

SEQ ID NO: 127791 - RNA, 32 nt, Homo Sapiens
ggucucgcucggugcugaccgcccccgggguc

SEQ ID NO: 127792 - RNA, 32 nt, Homo Sapiens
uccacccauuuuccugcauucugucuguccuu

SEQ ID NO: 127793 - RNA, 32 nt, Homo Sapiens
ugggaggagagaagaaagcggggauggugcac

SEQ ID NO: 127794 - RNA, 32 nt, Homo Sapiens
aaauguguagccagacacacacagacauuggu

SEQ ID NO: 127795 - RNA, 32 nt, Homo Sapiens
auagagauaaaagaagaggagggcuucuauca

SEQ ID NO: 127796 - RNA, 32 nt, Homo Sapiens
aaggcagugucuauuuugagaggauggcuuac

SEQ ID NO: 127797 - RNA, 32 nt, Homo Sapiens
ccagauagaguaaaaaauauaaacuuuaaaaa

SEQ ID NO: 127798 - RNA, 32 nt, Homo Sapiens
uccgccccagaggcagaauucgucugggcuuu

SEQ ID NO: 127799 - RNA, 32 nt, Homo Sapiens
gacagaagucacugccuaccucaggguccccu

SEQ ID NO: 127800 - RNA, 32 nt, Homo Sapiens
ugcugucauaaaugugugaacaaccuuuugua

SEQ ID NO: 127801 - RNA, 32 nt, Homo Sapiens
uggaauuguuuaauuugguuuugcagugccag

SEQ ID NO: 127802 - RNA, 32 nt, Homo Sapiens
ucgguuucaaagugauagaaaaguguggcuug

SEQ ID NO: 127803 - RNA, 30 nt, Homo Sapiens
aucuggcuggacugaucugucucacaagaa

SEQ ID NO: 127804 - RNA, 32 nt, Homo Sapiens
ucgccucucgaaggaaguuugcucuuaauuuc

SEQ ID NO: 127805 - RNA, 32 nt, Homo Sapiens
ggcacccagcaacggcggccuccaggccucag

SEQ ID NO: 127806 - RNA, 32 nt, Homo Sapiens
uacugaccagagaacggcggcgacugaauccc

SEQ ID NO: 127807 - RNA, 32 nt, Homo Sapiens
cccacagcuggccccagguugccagcgucgcu

SEQ ID NO: 127808 - RNA, 32 nt, Homo Sapiens
aaaaauccaaaaaauuagccgggcuugguggu

SEQ ID NO: 127809 - RNA, 32 nt, Homo Sapiens
cauuucauaaaccauguuacauuuuuguuaag

SEQ ID NO: 127810 - RNA, 32 nt, Homo Sapiens
ugugagcacuguggcuuuugucagauggagug

SEQ ID NO: 127811 - RNA, 32 nt, Homo Sapiens
ggaaauccaaacaaagacugauaauuccuggu

SEQ ID NO: 127812 - RNA, 32 nt, Homo Sapiens
auggcuuuuuucccuuucuuuacaccauccuc

SEQ ID NO: 127813 - RNA, 32 nt, Homo Sapiens
aggccuuugucaauggccgccauccccacaua

SEQ ID NO: 127814 - RNA, 32 nt, Homo Sapiens
ccaagagaaugggaugauguucccauggaacc

SEQ ID NO: 127815 - RNA, 32 nt, Homo Sapiens
cauuuggaauggguguauuuauccaaugccug

SEQ ID NO: 127816 - RNA, 32 nt, Homo Sapiens
cauuauuucuggauugaaaaucuuauaaaacc

SEQ ID NO: 127817 - RNA, 32 nt, Homo Sapiens
uuuuuaaaaaagacauuuaaagacaaagacau

SEQ ID NO: 127818 - RNA, 28 nt, Homo Sapiens
agguuggcacggccgccugcgugucugu

SEQ ID NO: 127819 - RNA, 32 nt, Homo Sapiens
ucuauguaauuaaauuuuuuaagugaguaaau

SEQ ID NO: 127820 - RNA, 32 nt, Homo Sapiens
ugacaaucaucuccaauggaaagcuuuucagu

SEQ ID NO: 127821 - RNA, 32 nt, Homo Sapiens
gaagggaaagacugugcguugauaccaaacug

SEQ ID NO: 127822 - RNA, 32 nt, Homo Sapiens
cgguggcccagcuguaaaauuccucucuuugu

SEQ ID NO: 127823 - RNA, 32 nt, Homo Sapiens
acgaggucaggagaucaagaccauccuggcua

SEQ ID NO: 127824 - RNA, 32 nt, Homo Sapiens
uucuguugucauggcgauacuucuucccugac

SEQ ID NO: 127825 - RNA, 32 nt, Homo Sapiens
gggcacccaggagcaguguuucccuccccacu

SEQ ID NO: 127826 - RNA, 32 nt, Homo Sapiens
uucacuggagcacaauaaauggcuguaaaauc

SEQ ID NO: 127827 - RNA, 32 nt, Homo Sapiens
acaagacucagagcaagaagucacuuaucacc

SEQ ID NO: 127828 - RNA, 32 nt, Homo Sapiens
guaacuugaguauauuaauauucaaaucauag

SEQ ID NO: 127829 - RNA, 31 nt, Homo Sapiens
agucgggcagggcagaaccaggcuaaagaaa

SEQ ID NO: 127830 - RNA, 32 nt, Homo Sapiens
guuggaaguuuggguuauuccuauaacuguau

SEQ ID NO: 127831 - RNA, 32 nt, Homo Sapiens
ggaggucacgcuaucguccgcggccccagcag

SEQ ID NO: 127832 - RNA, 32 nt, Homo Sapiens
ccgacccccagggcccggugcucaggacagca

SEQ ID NO: 127833 - RNA, 32 nt, Homo Sapiens
caagauggccgcgugcgggauccucggguacc

SEQ ID NO: 127834 - RNA, 32 nt, Homo Sapiens
cacacuguucucugcugguucccgaagcugau

SEQ ID NO: 127835 - RNA, 30 nt, Homo Sapiens
cccuccccacuugcuuccccacuccuugga

SEQ ID NO: 127836 - RNA, 32 nt, Homo Sapiens
aucccuagccaagcaugcauccugucuuggga

SEQ ID NO: 127837 - RNA, 32 nt, Homo Sapiens
uuaaagugcuuugaauuuuaaaacauuaaaca

SEQ ID NO: 127838 - RNA, 31 nt, Homo Sapiens
uggguucugccgguggggcuucaggaguaau

SEQ ID NO: 127839 - RNA, 30 nt, Homo Sapiens
ggggauguucgugcugcagcucggcgucuu

SEQ ID NO: 127840 - RNA, 32 nt, Homo Sapiens
cuauagcggauucuguucugccugcugcucag

SEQ ID NO: 127841 - RNA, 32 nt, Homo Sapiens
cgcccggcauggggcugcuggaccuuugcgag

SEQ ID NO: 127842 - RNA, 31 nt, Homo Sapiens
uggucaacaaagaaacaaagauguuauggug

SEQ ID NO: 127843 - RNA, 32 nt, Homo Sapiens
gaggcggcccgcguccccgccggaccacugcg

SEQ ID NO: 127844 - RNA, 32 nt, Homo Sapiens
aucaccaucaucuucagcaucaucaccaucau

SEQ ID NO: 127845 - RNA, 32 nt, Homo Sapiens
cuucaaacacgcugcugaagggcaacuggagg

SEQ ID NO: 127846 - RNA, 31 nt, Homo Sapiens
ugcuggagggcggugccaugccuaagccugu

SEQ ID NO: 127847 - RNA, 32 nt, Homo Sapiens
uauuuuuggugaucuaaagaaagcauugccuu

SEQ ID NO: 127848 - RNA, 32 nt, Homo Sapiens
ggcuccaucacacaggcauauuuuugaagcau

SEQ ID NO: 127849 - RNA, 32 nt, Homo Sapiens
aguuuugguugcuuuaacaucaucaguauuga

SEQ ID NO: 127850 - RNA, 32 nt, Homo Sapiens
gaaauggaugaugaacaucaaaaacugucaga

SEQ ID NO: 127851 - RNA, 32 nt, Homo Sapiens
cagugaguccuccucuuccucuggcaucaauu

SEQ ID NO: 127852 - RNA, 32 nt, Homo Sapiens
guggaugaguguuccaugagccuaggagcaag

SEQ ID NO: 127853 - RNA, 28 nt, Homo Sapiens
aggauggcagccggaacagcaguuggag

SEQ ID NO: 127854 - RNA, 32 nt, Homo Sapiens
uuaaguaaacacauuuuuaaaaauuguguuaa

SEQ ID NO: 127855 - RNA, 32 nt, Homo Sapiens
ucuggcccuucagcugcagaaugccgaaacac

SEQ ID NO: 127856 - RNA, 32 nt, Homo Sapiens
ugaccucucugacuuacccauccaacugccca

SEQ ID NO: 127857 - RNA, 32 nt, Homo Sapiens
cucuaaauucauguucauuuuauuuuuauuau

SEQ ID NO: 127858 - RNA, 32 nt, Homo Sapiens
ccagguagagagagggccagggcugaguucac

SEQ ID NO: 127859 - RNA, 32 nt, Homo Sapiens
uucaagauguaauuuuacauuucugcauuuua

SEQ ID NO: 127860 - RNA, 32 nt, Homo Sapiens
aaacacagaugacagugcugugugggucucug

SEQ ID NO: 127861 - RNA, 32 nt, Homo Sapiens
agcaauguuacauauuugauugaagucuucaa

SEQ ID NO: 127862 - RNA, 32 nt, Homo Sapiens
uaaaguucuaguuaaaaauaauuuuuccacau

SEQ ID NO: 127863 - RNA, 32 nt, Homo Sapiens
uucguucuuuacucagacucuuucuugguucc

SEQ ID NO: 127864 - RNA, 32 nt, Homo Sapiens
auaguaacgugggaauacuaaaaaauaaccaa

SEQ ID NO: 127865 - RNA, 32 nt, Homo Sapiens
gagggagugacgaggaggagcuccgagcugcg

SEQ ID NO: 127866 - RNA, 32 nt, Homo Sapiens
uuuccaccgaaaugucggagaagucaggccag

SEQ ID NO: 127867 - RNA, 32 nt, Homo Sapiens
gcaucauacuaaacuucaccuacauuaucuca

SEQ ID NO: 127868 - RNA, 32 nt, Homo Sapiens
uggucuaggggcggcaugcuccugcuaggagu

SEQ ID NO: 127869 - RNA, 32 nt, Homo Sapiens
aggcuccaggacauguggacugggggcugugg

SEQ ID NO: 127870 - RNA, 32 nt, Homo Sapiens
gggugaacuauaggcucugugccucucagaca

SEQ ID NO: 127871 - RNA, 32 nt, Homo Sapiens
gugguggaggcgcuguggauggcugcuuuucc

SEQ ID NO: 127872 - RNA, 32 nt, Homo Sapiens
aaaagaaaagcauuguuuuaauuuguuugcau

SEQ ID NO: 127873 - RNA, 32 nt, Homo Sapiens
ugcugcgugggcuucucugugcucccacggua

SEQ ID NO: 127874 - RNA, 32 nt, Homo Sapiens
agugcuucagcaugcaaagguagagcuaccag

SEQ ID NO: 127875 - RNA, 32 nt, Homo Sapiens
gccuucuuaaacauuauaucaauaauugcaua

SEQ ID NO: 127876 - RNA, 32 nt, Homo Sapiens
cuaauggcaaaggaaacaccaggggaucagug

SEQ ID NO: 127877 - RNA, 32 nt, Homo Sapiens
aaacacuggucucacagcaccgugcauucauc

SEQ ID NO: 127878 - RNA, 32 nt, Homo Sapiens
ggagagggauaauugggucaaaaguuacgaac

SEQ ID NO: 127879 - RNA, 32 nt, Homo Sapiens
cguuucuguuuuuuuuaaccaugagguuuaau

SEQ ID NO: 127880 - RNA, 32 nt, Homo Sapiens
ggcuagcgcggcagcggggccacgaugaagaa

SEQ ID NO: 127881 - RNA, 32 nt, Homo Sapiens
agccagaggaaaccacguucccguggggugag

SEQ ID NO: 127882 - RNA, 32 nt, Homo Sapiens
aauaaacugugcauaugaaaugggagaggaga

SEQ ID NO: 127883 - RNA, 32 nt, Homo Sapiens
ugggcauggagcagcccggggagggguccgug

SEQ ID NO: 127884 - RNA, 32 nt, Homo Sapiens
caggagcaacucgcugcccuucgucgagggcu

SEQ ID NO: 127885 - RNA, 32 nt, Homo Sapiens
cccggcggaggagccaggcucccggccuugug

SEQ ID NO: 127886 - RNA, 32 nt, Homo Sapiens
aagaaagauugugaaaagcuggggagaaaaug

SEQ ID NO: 127887 - RNA, 32 nt, Homo Sapiens
aguggaagacagagcacuggcuggagccgaga

SEQ ID NO: 127888 - RNA, 32 nt, Homo Sapiens
ccccaaaacuaaauuauucauggaaagagcca

SEQ ID NO: 127889 - RNA, 32 nt, Homo Sapiens
caucuggaucauauagcugauguguaguuaca

SEQ ID NO: 127890 - RNA, 32 nt, Homo Sapiens
uugucaugggagacuggagugcagauucuuug

SEQ ID NO: 127891 - RNA, 32 nt, Homo Sapiens
cuccgcugacauuugggugaugucuucacaug

SEQ ID NO: 127892 - RNA, 32 nt, Homo Sapiens
aaauaagcaggcgugaccugccaggcacacug

SEQ ID NO: 127893 - RNA, 32 nt, Homo Sapiens
cucagcuuauaggaaucucuccaggucaacag

SEQ ID NO: 127894 - RNA, 32 nt, Homo Sapiens
guaguuuguucauucauccauccaccuguuca

SEQ ID NO: 127895 - RNA, 32 nt, Homo Sapiens
gcgguucuggaaaggcacuugccucugcacuu

SEQ ID NO: 127896 - RNA, 32 nt, Homo Sapiens
augcccaggccccugggcccagcccuggcuug

SEQ ID NO: 127897 - RNA, 30 nt, Homo Sapiens
gcugcuguugauugcauccguccugcauca

SEQ ID NO: 127898 - RNA, 32 nt, Homo Sapiens
gaguggcugugaaccugacuauggaaaagaug

SEQ ID NO: 127899 - RNA, 32 nt, Homo Sapiens
auuuuaacauucaaaauugggauuucccaaug

SEQ ID NO: 127900 - RNA, 32 nt, Homo Sapiens
gccauaugaacauuuguaaucuugccauuagg

SEQ ID NO: 127901 - RNA, 32 nt, Homo Sapiens
gguggggaagcgcggcugggccugcucgcgcg

SEQ ID NO: 127902 - RNA, 32 nt, Homo Sapiens
cuuuguuugaggccugacgugggcaucauuuu

SEQ ID NO: 127903 - RNA, 32 nt, Homo Sapiens
ggauguuucuucaggacuuccucagcugacaa

SEQ ID NO: 127904 - RNA, 32 nt, Homo Sapiens
gaggccacaauggcuucuaucaucucauaaau

SEQ ID NO: 127905 - RNA, 32 nt, Homo Sapiens
gcaaaaaagcaucuauauauggaggagggugg

SEQ ID NO: 127906 - RNA, 32 nt, Homo Sapiens
cuucagugucucugugguuucaccagcuuagc

SEQ ID NO: 127907 - RNA, 32 nt, Homo Sapiens
gugaauucuaucuauuuaauuggauauuggac

SEQ ID NO: 127908 - RNA, 32 nt, Homo Sapiens
cgucacuccgcgggcggaggacgcacgucggg

SEQ ID NO: 127909 - RNA, 32 nt, Homo Sapiens
ccggcggcggggagcagcauggagccggcggc

SEQ ID NO: 127910 - RNA, 32 nt, Homo Sapiens
uauugagcauauaagauauuaguaagauguga

SEQ ID NO: 127911 - RNA, 32 nt, Homo Sapiens
accgccccggauuccccgcgggccuuccuagc

SEQ ID NO: 127912 - RNA, 32 nt, Homo Sapiens
aggagaauauauaucuugugaaaauauggaga

SEQ ID NO: 127913 - RNA, 32 nt, Homo Sapiens
aaaagugaugaaaucuagaaaagauugugugu

SEQ ID NO: 127914 - RNA, 32 nt, Homo Sapiens
ucucuccuuagcuauuugaugcuuuucauaua

SEQ ID NO: 127915 - RNA, 32 nt, Homo Sapiens
uucagggcauuaaauauauguuguguaugaag

SEQ ID NO: 127916 - RNA, 32 nt, Homo Sapiens
cucuguccaucucccuuccccagcaucgugca

SEQ ID NO: 127917 - RNA, 32 nt, Homo Sapiens
uuuuaguaaauaccuuuuuuuuuuuuuuuuuu

SEQ ID NO: 127918 - RNA, 32 nt, Homo Sapiens
ggauguagagagaacaggugggcuguauucac

SEQ ID NO: 127919 - RNA, 32 nt, Homo Sapiens
guugcuuuguuguuaaagggagagaaaaugaa

SEQ ID NO: 127920 - RNA, 32 nt, Homo Sapiens
auuuugaauuuuccuuuuuuuuuuuuuuuuuu

SEQ ID NO: 127921 - RNA, 32 nt, Homo Sapiens
ugacaccaaacacacacuacagagagggaaac

SEQ ID NO: 127922 - RNA, 32 nt, Homo Sapiens
aaccacuuaaauguuauuauccugcuuugguu

SEQ ID NO: 127923 - RNA, 32 nt, Homo Sapiens
ucccagcaccacuucagcuccggagcauuggg

SEQ ID NO: 127924 - RNA, 32 nt, Homo Sapiens
uugaaagcucuuuccagggcugaaaaaguguu

SEQ ID NO: 127925 - RNA, 32 nt, Homo Sapiens
gcuuuugaaggagguagggaaugacaucuucc

SEQ ID NO: 127926 - RNA, 32 nt, Homo Sapiens
agggcaggccgcggccggcgggaaccucuucu

SEQ ID NO: 127927 - RNA, 32 nt, Homo Sapiens
acuaacugcugcuuauggauaauguugcaacu

SEQ ID NO: 127928 - RNA, 32 nt, Homo Sapiens
cugugagcuggguccaggaaugcugugaggaa

SEQ ID NO: 127929 - RNA, 32 nt, Homo Sapiens
auaugaggcaacaugaagaguacaucgcagac

SEQ ID NO: 127930 - RNA, 32 nt, Homo Sapiens
ggccaggccuuccuuugcuggaggaagguaca

SEQ ID NO: 127931 - RNA, 32 nt, Homo Sapiens
uggaaaugauguggagauaaagaaauuucucg

SEQ ID NO: 127932 - RNA, 32 nt, Homo Sapiens
uguuuacccucccaggguucauucuucccaag

SEQ ID NO: 127933 - RNA, 32 nt, Homo Sapiens
auuugaaagaaucuuagcacaaacaggacugu

SEQ ID NO: 127934 - RNA, 32 nt, Homo Sapiens
gcggcgggcggcgggggacgggcggagucaaa

SEQ ID NO: 127935 - RNA, 32 nt, Homo Sapiens
aguugugccuuggugccuuguccgccucagcu

SEQ ID NO: 127936 - RNA, 32 nt, Homo Sapiens
auagcacaaaaauacuaaacuucauaaaaaug

SEQ ID NO: 127937 - RNA, 32 nt, Homo Sapiens
acagggcccccggccacgcucccucuccugua

SEQ ID NO: 127938 - RNA, 32 nt, Homo Sapiens
cacuaaccuuggcauuuucaccagacaugcag

SEQ ID NO: 127939 - RNA, 32 nt, Homo Sapiens
auggugucuauaucaagaucguaucccgcuga

SEQ ID NO: 127940 - RNA, 32 nt, Homo Sapiens
ggacgcuagccggccuggccauggcugaccgc

SEQ ID NO: 127941 - RNA, 32 nt, Homo Sapiens
aacgaaaacaaaucucgaguguguugccaagu

SEQ ID NO: 127942 - RNA, 32 nt, Homo Sapiens
gcaugugugcauuuucacucauuuuggucaag

SEQ ID NO: 127943 - RNA, 32 nt, Homo Sapiens
uggucagucuccuggggucuguguguuaacaa

SEQ ID NO: 127944 - RNA, 32 nt, Homo Sapiens
ccuccggaacuaaacggggugaggucacauuc

SEQ ID NO: 127945 - RNA, 32 nt, Homo Sapiens
aaccuuuaaugauauguagaggcuacuuccau

SEQ ID NO: 127946 - RNA, 32 nt, Homo Sapiens
augcuuugccagcaccccuccccaucagagug

SEQ ID NO: 127947 - RNA, 32 nt, Homo Sapiens
ugauguaaacugagcauaauggcauuuuaggg

SEQ ID NO: 127948 - RNA, 32 nt, Homo Sapiens
uacuuaauauccaaagguggaaacaaaagaau

SEQ ID NO: 127949 - RNA, 32 nt, Homo Sapiens
ggcuacagaacagaaagaaaacaaaaacaaac

SEQ ID NO: 127950 - RNA, 32 nt, Homo Sapiens
ccccggccggaagcaccccaccccucugccug

SEQ ID NO: 127951 - RNA, 32 nt, Homo Sapiens
cucucuggccuggccggcaggcgucuucuuaa

SEQ ID NO: 127952 - RNA, 32 nt, Homo Sapiens
cuucuauuugggaaacaaggaccaaacaacca

SEQ ID NO: 127953 - RNA, 32 nt, Homo Sapiens
auucaaaagcacuuuuuuuuuaaagccacacc

SEQ ID NO: 127954 - RNA, 32 nt, Homo Sapiens
cagccccuccccacccacccucuaauggaccu

SEQ ID NO: 127955 - RNA, 32 nt, Homo Sapiens
ccugggagaagcuucugcuggcagcucgugcc

SEQ ID NO: 127956 - RNA, 31 nt, Homo Sapiens
ggcacgagggcgggugggaagccgugucucg

SEQ ID NO: 127957 - RNA, 32 nt, Homo Sapiens
ucguccauguagaacacaccuuuuccaaagcu

SEQ ID NO: 127958 - RNA, 32 nt, Homo Sapiens
uuccagcaucuggcugcccgggggaggaagga

SEQ ID NO: 127959 - RNA, 32 nt, Homo Sapiens
agaagcuacuuuguuuuuaaaugauguugaau

SEQ ID NO: 127960 - RNA, 32 nt, Homo Sapiens
gcccggaucugugcgacugaaggugggaagag

SEQ ID NO: 127961 - RNA, 32 nt, Homo Sapiens
ggccaaggucaagccuguguugccagugcggg

SEQ ID NO: 127962 - RNA, 32 nt, Homo Sapiens
caauuuuuacuuuuaagucuauacuaaaauga

SEQ ID NO: 127963 - RNA, 32 nt, Homo Sapiens
gaauuuuauuuuuccuuuucucaccagguguc

SEQ ID NO: 127964 - RNA, 32 nt, Homo Sapiens
ccuucccugccccuucucuccccuguaaccug

SEQ ID NO: 127965 - RNA, 32 nt, Homo Sapiens
uuguaguucuccccggccgcgucacugcggug

SEQ ID NO: 127966 - RNA, 32 nt, Homo Sapiens
caccuguaaucccagcacuuugggaggccuag

SEQ ID NO: 127967 - RNA, 30 nt, Homo Sapiens
cacgaggcgcccggccccuggccccagcac

SEQ ID NO: 127968 - RNA, 32 nt, Homo Sapiens
ucccauaaacaaaacuaaagauaaaaaccaug

SEQ ID NO: 127969 - RNA, 32 nt, Homo Sapiens
uucugagacaccugaugaccuguuagaugaug

SEQ ID NO: 127970 - RNA, 32 nt, Homo Sapiens
aagggauuuaaagaguuuuucuuggguguuug

SEQ ID NO: 127971 - RNA, 32 nt, Homo Sapiens
uggcucgaaccucuccuuuuccccgccuuccc

SEQ ID NO: 127972 - RNA, 32 nt, Homo Sapiens
aauggaggagaaagucgcgcuugguuagucuu

SEQ ID NO: 127973 - RNA, 32 nt, Homo Sapiens
ugguagagaacacacucgauuaaaaauguuaa

SEQ ID NO: 127974 - RNA, 32 nt, Homo Sapiens
cuggccguucccuccagccccuugcugguuau

SEQ ID NO: 127975 - RNA, 30 nt, Homo Sapiens
gucagggcucccgugccgccuuuggcgguu

SEQ ID NO: 127976 - RNA, 32 nt, Homo Sapiens
caggggaacaaugcagcugaaaaacaucucau

SEQ ID NO: 127977 - RNA, 32 nt, Homo Sapiens
gaauauaaauguucacaaauuaaugcugucaa

SEQ ID NO: 127978 - RNA, 32 nt, Homo Sapiens
uccacacagaaaccagucauggcccugccuuu

SEQ ID NO: 127979 - RNA, 32 nt, Homo Sapiens
auaauuauauuuguauuucaccaccuaaaugu

SEQ ID NO: 127980 - RNA, 32 nt, Homo Sapiens
ucccaccuggggcgagugcgcgcacggccagg

SEQ ID NO: 127981 - RNA, 32 nt, Homo Sapiens
ccaaacgguucaaucuccaguuuuauucaggg

SEQ ID NO: 127982 - RNA, 32 nt, Homo Sapiens
acuuggauccugaacuguguaaccuggagagg

SEQ ID NO: 127983 - RNA, 32 nt, Homo Sapiens
uuaaccuuacuaauuguugucuacacauaaau

SEQ ID NO: 127984 - RNA, 32 nt, Homo Sapiens
ccaguccuccccagccuucuucagccuucuuc

SEQ ID NO: 127985 - RNA, 32 nt, Homo Sapiens
gucugccucagccccaggaagggcaaggcaag

SEQ ID NO: 127986 - RNA, 32 nt, Homo Sapiens
uucuuugagaauuuaucuccaguguuucuaug

SEQ ID NO: 127987 - RNA, 32 nt, Homo Sapiens
cuggguuugaugcuuugucaacugaaaauacu

SEQ ID NO: 127988 - RNA, 32 nt, Homo Sapiens
guagaugagagaagaaccucaugauugguacc

SEQ ID NO: 127989 - RNA, 32 nt, Homo Sapiens
ugggaggcuaagcccaguucaaggcugcagug

SEQ ID NO: 127990 - RNA, 32 nt, Homo Sapiens
ucuguaguuaguacaggaugaauuuaaaugug

SEQ ID NO: 127991 - RNA, 32 nt, Homo Sapiens
gcccugugggucuggugaaaauccugccaaag

SEQ ID NO: 127992 - RNA, 32 nt, Homo Sapiens
cacucccggcuaggcgcacccacggggaggag

SEQ ID NO: 127993 - RNA, 32 nt, Homo Sapiens
auuuacuuaggauggauuuagcauugagguua

SEQ ID NO: 127994 - RNA, 32 nt, Homo Sapiens
uuuauaaaggauuguguacugacugaauacau

SEQ ID NO: 127995 - RNA, 32 nt, Homo Sapiens
ccucugugccuguucaagagacuugcagggcu

SEQ ID NO: 127996 - RNA, 32 nt, Homo Sapiens
caagagcugucauaugcugggucuguaaauug

SEQ ID NO: 127997 - RNA, 32 nt, Homo Sapiens
auugauuacuauugcugcauacccgggguggg

SEQ ID NO: 127998 - RNA, 32 nt, Homo Sapiens
uaauuaaagguuaaucugugauuguuaugaag

SEQ ID NO: 127999 - RNA, 32 nt, Homo Sapiens
uuccucaucuuuuuuucuuuuuuuugagacag

SEQ ID NO: 128000 - RNA, 32 nt, Homo Sapiens
guagggcuguguuuacagucagggccaccccg

SEQ ID NO: 128001 - RNA, 32 nt, Homo Sapiens
gugucuaagucuuacaacaauucaucauuuua

SEQ ID NO: 128002 - RNA, 32 nt, Homo Sapiens
cugcauaaaaugaacucugaaaacuuuaccau

SEQ ID NO: 128003 - RNA, 32 nt, Homo Sapiens
ggcuucccaagcaggagugucaggggaaccau

SEQ ID NO: 128004 - RNA, 32 nt, Homo Sapiens
cccccucggcccggccccccugcugagcccuc

SEQ ID NO: 128005 - RNA, 32 nt, Homo Sapiens
ucaaaaguuaacuuaucuccaaaguggcugaa

SEQ ID NO: 128006 - RNA, 32 nt, Homo Sapiens
gagggcgcacggcccgcgaccgagcgugcgga

SEQ ID NO: 128007 - RNA, 32 nt, Homo Sapiens
ggaagcccaucccugggaccugcccucccucg

SEQ ID NO: 128008 - RNA, 32 nt, Homo Sapiens
cgggggagggcuuaggugcagaagggcaggcu

SEQ ID NO: 128009 - RNA, 32 nt, Homo Sapiens
uaaacuccccccucccucuccuccagucgggc

SEQ ID NO: 128010 - RNA, 32 nt, Homo Sapiens
agcugacccaaguaggaagccagacgagcugu

SEQ ID NO: 128011 - RNA, 32 nt, Homo Sapiens
uauugcagugauucucaaauuaacuguauugg

SEQ ID NO: 128012 - RNA, 32 nt, Homo Sapiens
cccgcugcagccccggcccuccaccuuccccg

SEQ ID NO: 128013 - RNA, 32 nt, Homo Sapiens
ccagccugcccgccugcucgccggcgcccgga

SEQ ID NO: 128014 - RNA, 32 nt, Homo Sapiens
gagacagaaaacaaaaucuagaugcaacagcg

SEQ ID NO: 128015 - RNA, 32 nt, Homo Sapiens
uuaguuuaauugcuuuuauaugugucugauuu

SEQ ID NO: 128016 - RNA, 27 nt, Homo Sapiens
uccagggcccucuucagcccccucccc

SEQ ID NO: 128017 - RNA, 32 nt, Homo Sapiens
cagcagggccccagcgcaccaugucugcccuc

SEQ ID NO: 128018 - RNA, 32 nt, Homo Sapiens
ggagagaaacaucagucaaaggcaugcaggga

SEQ ID NO: 128019 - RNA, 32 nt, Homo Sapiens
uauaaauucuugauuauguagguagugggggg

SEQ ID NO: 128020 - RNA, 32 nt, Homo Sapiens
ccgccccugccagccgcccuggcccuggucac

SEQ ID NO: 128021 - RNA, 32 nt, Homo Sapiens
agaggaguauguacaauucuucugggaagcca

SEQ ID NO: 128022 - RNA, 32 nt, Homo Sapiens
ugaagugauguuugaaagauuaaugagauaca

SEQ ID NO: 128023 - RNA, 32 nt, Homo Sapiens
gcagcagcgccgggucccgugcggaggugcuc

SEQ ID NO: 128024 - RNA, 32 nt, Homo Sapiens
cugugcucccucccggcccuccaauccuuggc

SEQ ID NO: 128025 - RNA, 32 nt, Homo Sapiens
uuggccaucaggccgcugcugcugccccaagu

SEQ ID NO: 128026 - RNA, 32 nt, Homo Sapiens
ucuuuuauuuaaaagaaaugaaugugacuagu

SEQ ID NO: 128027 - RNA, 32 nt, Homo Sapiens
auaauauucugugauacagccauuccguacau

SEQ ID NO: 128028 - RNA, 32 nt, Homo Sapiens
agcuaagaaacuuacuugauucuuaugaaauc

SEQ ID NO: 128029 - RNA, 32 nt, Homo Sapiens
cucuuuguaaaaauuuuguuauuuuugcuugu

SEQ ID NO: 128030 - RNA, 32 nt, Homo Sapiens
uacaggugcauaccaccacaccuuucuaauuu

SEQ ID NO: 128031 - RNA, 32 nt, Homo Sapiens
ucucggcggcugcggcccgggcggcggcgaug

SEQ ID NO: 128032 - RNA, 32 nt, Homo Sapiens
guguuuuguucuaccugcuuucaagucucuaa

SEQ ID NO: 128033 - RNA, 32 nt, Homo Sapiens
agggggagggcuugguggggagggggacuuac

SEQ ID NO: 128034 - RNA, 32 nt, Homo Sapiens
ccuugcugucauccccucccccaaccuuggcc

SEQ ID NO: 128035 - RNA, 32 nt, Homo Sapiens
uucaccugagcagguuucgagauccaggcaga

SEQ ID NO: 128036 - RNA, 32 nt, Homo Sapiens
gcagccacagcggggagugcgcggcgcgggga

SEQ ID NO: 128037 - RNA, 32 nt, Homo Sapiens
aaacugaaaaagacaaaauaaguaaagcacuu

SEQ ID NO: 128038 - RNA, 32 nt, Homo Sapiens
agaugaaauucuugcuucucgaagauuuucuu

SEQ ID NO: 128039 - RNA, 32 nt, Homo Sapiens
gcaggucugaaaaagcaggugugugcugggac

SEQ ID NO: 128040 - RNA, 29 nt, Homo Sapiens
ggacggcggggacaaggggcggcuggucg

SEQ ID NO: 128041 - RNA, 32 nt, Homo Sapiens
auucuuguuuuaagugccuuuaguuuuaacag

SEQ ID NO: 128042 - RNA, 32 nt, Homo Sapiens
cccggcugccagcccaagccuccgcugguuca

SEQ ID NO: 128043 - RNA, 30 nt, Homo Sapiens
cuucgcgcuccugagccgccggcgcgccgg

SEQ ID NO: 128044 - RNA, 32 nt, Homo Sapiens
gcgcggcgggggcggcggcagacgccugguca

SEQ ID NO: 128045 - RNA, 32 nt, Homo Sapiens
uccucgugggcucacagaccccggccucggag

SEQ ID NO: 128046 - RNA, 32 nt, Homo Sapiens
aguugcugucaucuuucauguauaaacagaaa

SEQ ID NO: 128047 - RNA, 32 nt, Homo Sapiens
gaaccuuccgcccagaccccccugcccagacc

SEQ ID NO: 128048 - RNA, 31 nt, Homo Sapiens
auuaaggaagcccagaacuggaagcuuggag

SEQ ID NO: 128049 - RNA, 32 nt, Homo Sapiens
uccugauuauucugcucugugcuuccucaguu

SEQ ID NO: 128050 - RNA, 32 nt, Homo Sapiens
ucggcauguagaccaagugaugagaagugaau

SEQ ID NO: 128051 - RNA, 32 nt, Homo Sapiens
gauguugcaauaauacaaaccaauguaccugu

SEQ ID NO: 128052 - RNA, 32 nt, Homo Sapiens
aaauacaugaaaugucuggucuguccacccca

SEQ ID NO: 128053 - RNA, 32 nt, Homo Sapiens
acauuuuugaagacuaaaaucuauucaguaga

SEQ ID NO: 128054 - RNA, 32 nt, Homo Sapiens
caucuuuccuuccuaucucccccaguguucua

SEQ ID NO: 128055 - RNA, 32 nt, Homo Sapiens
augcuguguuuuuguaccugacaggggucacu

SEQ ID NO: 128056 - RNA, 32 nt, Homo Sapiens
ggccuacaaaaauguuuuauuuuauaaucaga

SEQ ID NO: 128057 - RNA, 32 nt, Homo Sapiens
gacacagaacuaaaaugucauguuauuaacag

SEQ ID NO: 128058 - RNA, 32 nt, Homo Sapiens
uccggaccgagcucggguguauggggccguag

SEQ ID NO: 128059 - RNA, 32 nt, Homo Sapiens
acaauauucguuuacaauguuagcucaggauc

SEQ ID NO: 128060 - RNA, 32 nt, Homo Sapiens
aaaguggggcuuugaccugacaaacuguuaua

SEQ ID NO: 128061 - RNA, 32 nt, Homo Sapiens
uuauugaucugaaggguaaauguggagggagc

SEQ ID NO: 128062 - RNA, 32 nt, Homo Sapiens
agugccagaaugacucuucugugcauucuucu

SEQ ID NO: 128063 - RNA, 32 nt, Homo Sapiens
gcucagcgccaggugguuuucuuuuuugucau

SEQ ID NO: 128064 - RNA, 32 nt, Homo Sapiens
cauucuaucccaugugaauuuuacagacacug

SEQ ID NO: 128065 - RNA, 32 nt, Homo Sapiens
aagaagcaugccuccuucucccucccacccac

SEQ ID NO: 128066 - RNA, 31 nt, Homo Sapiens
cugcugggaacaugucuaagagccuguuuug

SEQ ID NO: 128067 - RNA, 32 nt, Homo Sapiens
ggaaaagcgaggcaaggcaggcgggucgucaa

SEQ ID NO: 128068 - RNA, 32 nt, Homo Sapiens
ugacgugcaauaaagaagcacauuauuuuagc

SEQ ID NO: 128069 - RNA, 32 nt, Homo Sapiens
ggcuguggguggcacaggaauggggguugcgu

SEQ ID NO: 128070 - RNA, 32 nt, Homo Sapiens
ccugaguccucgucuccuuuccagugcuucug

SEQ ID NO: 128071 - RNA, 32 nt, Homo Sapiens
ucaggcugggaggauagcacaggcuaggggcu

SEQ ID NO: 128072 - RNA, 32 nt, Homo Sapiens
ggaaacuucuaaaauggaauuuggugcauaug

SEQ ID NO: 128073 - RNA, 32 nt, Homo Sapiens
cgauacuguuugucuuucuacuguuucauccc

SEQ ID NO: 128074 - RNA, 32 nt, Homo Sapiens
ugaggaccaaaaugaaaccuuuuucucugaag

SEQ ID NO: 128075 - RNA, 28 nt, Homo Sapiens
guuggagagaugagacauuugacccuua

SEQ ID NO: 128076 - RNA, 32 nt, Homo Sapiens
cuauucuggaagcucauuuccagaagauccuu

SEQ ID NO: 128077 - RNA, 32 nt, Homo Sapiens
uccuuuggggcaacgacgguuucaaaccagga

SEQ ID NO: 128078 - RNA, 32 nt, Homo Sapiens
ugcuaaaggugauucuaguuaaucugggauua

SEQ ID NO: 128079 - RNA, 32 nt, Homo Sapiens
cugucuuucuaugacgcggagcgccacugcca

SEQ ID NO: 128080 - RNA, 32 nt, Homo Sapiens
ccggucuucgccggccccggccccuggcgaga

SEQ ID NO: 128081 - RNA, 32 nt, Homo Sapiens
gugcaguacuuugaaguuuuaauuauuaaccu

SEQ ID NO: 128082 - RNA, 32 nt, Homo Sapiens
agcugacuauaaaucacuuuguuuuuaaacaa

SEQ ID NO: 128083 - RNA, 29 nt, Homo Sapiens
ccuaauuauaucuaguaccauacugaguu

SEQ ID NO: 128084 - RNA, 32 nt, Homo Sapiens
uuauggucuccauuaaaauacauauuacaacu

SEQ ID NO: 128085 - RNA, 32 nt, Homo Sapiens
aagcugcccuauguuuuuuuuauccacucgua

SEQ ID NO: 128086 - RNA, 32 nt, Homo Sapiens
uucaaguccugaguauguguccugcuguuacu

SEQ ID NO: 128087 - RNA, 32 nt, Homo Sapiens
ggcccuggaagacaagggaggagccugugagc

SEQ ID NO: 128088 - RNA, 32 nt, Homo Sapiens
cugcaggagaccagggcauauuucaguccuua

SEQ ID NO: 128089 - RNA, 32 nt, Homo Sapiens
ggcgccgccucccaugagccgcucucgccugg

SEQ ID NO: 128090 - RNA, 32 nt, Homo Sapiens
caggggccacccugguggggccccacggaccc

SEQ ID NO: 128091 - RNA, 32 nt, Homo Sapiens
ccccaggucacaaaucagcagcuccacucacc

SEQ ID NO: 128092 - RNA, 32 nt, Homo Sapiens
gcacuggcggggguugugggggcugucugugu

SEQ ID NO: 128093 - RNA, 32 nt, Homo Sapiens
aaaugccccucccccagcugcugccuucauau

SEQ ID NO: 128094 - RNA, 32 nt, Homo Sapiens
auuuuuauaugauuauaaaagaauucuucaag

SEQ ID NO: 128095 - RNA, 32 nt, Homo Sapiens
ggcuuucuuucccccauucucccugcauccuu

SEQ ID NO: 128096 - RNA, 32 nt, Homo Sapiens
ccacccuucagccccaggcucucugagcuccu

SEQ ID NO: 128097 - RNA, 32 nt, Homo Sapiens
gaugacgcagaugucugcugcagagcugggcu

SEQ ID NO: 128098 - RNA, 32 nt, Homo Sapiens
ccaugagucauuuugucauuuagaguauucug

SEQ ID NO: 128099 - RNA, 32 nt, Homo Sapiens
cagcauguuaccuucacacuguugugcgauga

SEQ ID NO: 128100 - RNA, 32 nt, Homo Sapiens
ccaauggggcucaaagacaaaucccacauguu

SEQ ID NO: 128101 - RNA, 32 nt, Homo Sapiens
cacacaaacuggggcuauagagauucuccaag

SEQ ID NO: 128102 - RNA, 32 nt, Homo Sapiens
uccuguuguucccagagcuggucucccaugag

SEQ ID NO: 128103 - RNA, 32 nt, Homo Sapiens
auguguuaugucauuugaauuaauuuugacua

SEQ ID NO: 128104 - RNA, 32 nt, Homo Sapiens
ugaaguguuagacaucgagaucaaugaaccuu

SEQ ID NO: 128105 - RNA, 32 nt, Homo Sapiens
gaaauguuuaguaaaaagguccagucaguggc

SEQ ID NO: 128106 - RNA, 32 nt, Homo Sapiens
ugugauaaugggcacuuguuuaaaagaauuag

SEQ ID NO: 128107 - RNA, 31 nt, Homo Sapiens
ggccggggggcggugucugcugcgccagguu

SEQ ID NO: 128108 - RNA, 32 nt, Homo Sapiens
acaccccaaauaggaagaagggugcacacaaa

SEQ ID NO: 128109 - RNA, 30 nt, Homo Sapiens
cgcugaagaggaagaguugagucugucugg

SEQ ID NO: 128110 - RNA, 32 nt, Homo Sapiens
cugcaagcuccgccuccucguuucaagugauc

SEQ ID NO: 128111 - RNA, 32 nt, Homo Sapiens
agggcgccucccagcccgucuccccgcuccag

SEQ ID NO: 128112 - RNA, 32 nt, Homo Sapiens
gaggucugaagaagcuugcugcuguuggggaa

SEQ ID NO: 128113 - RNA, 31 nt, Homo Sapiens
agaggcuaugggugaaggauuguagggaguc

SEQ ID NO: 128114 - RNA, 32 nt, Homo Sapiens
uucuaauucuucauuauaguaaaucuaugagc

SEQ ID NO: 128115 - RNA, 32 nt, Homo Sapiens
cccguggcggcgugcgcgggaccugcgcugac

SEQ ID NO: 128116 - RNA, 31 nt, Homo Sapiens
cgacauucacggagccggccggccucccgcc

SEQ ID NO: 128117 - RNA, 32 nt, Homo Sapiens
cgcuaggaaaugacccgagaaccccguuggaa

SEQ ID NO: 128118 - RNA, 32 nt, Homo Sapiens
caucucggcaaccucggcacccgcccggcagc

SEQ ID NO: 128119 - RNA, 32 nt, Homo Sapiens
cagggcaggcuggcugcggggaggggcuuguu

SEQ ID NO: 128120 - RNA, 32 nt, Homo Sapiens
gcugcuccaggugcugccgcccggggcuacgg

SEQ ID NO: 128121 - RNA, 32 nt, Homo Sapiens
ucauuguguuugugacaaacucuuugcaauau

SEQ ID NO: 128122 - RNA, 32 nt, Homo Sapiens
gauaaccccuuccccucuccagcccuacuagg

SEQ ID NO: 128123 - RNA, 32 nt, Homo Sapiens
gaaggccuguuguggagggaaaccacccaucc

SEQ ID NO: 128124 - RNA, 32 nt, Homo Sapiens
ccugcgaaacaucagaaagggauugcaggggc

SEQ ID NO: 128125 - RNA, 32 nt, Homo Sapiens
ccccaucccuagggggcggggaggggacguaa

SEQ ID NO: 128126 - RNA, 32 nt, Homo Sapiens
cuuuugugaugaacauauucaugaaauguaga

SEQ ID NO: 128127 - RNA, 32 nt, Homo Sapiens
cauuauuuuuuaaaaacaaaguuagcuuugua

SEQ ID NO: 128128 - RNA, 32 nt, Homo Sapiens
aguagccaaaaauuagaaacaacugagaaagc

SEQ ID NO: 128129 - RNA, 32 nt, Homo Sapiens
cucuguuuucuguggugcuggaugcaccucug

SEQ ID NO: 128130 - RNA, 31 nt, Homo Sapiens
uguguuuccaacuucgaagugcugaugugga

SEQ ID NO: 128131 - RNA, 32 nt, Homo Sapiens
cauagaaaucagucucucugguuuguuuugua

SEQ ID NO: 128132 - RNA, 32 nt, Homo Sapiens
gccugcgcccacacuauugaaaacacuaauga

SEQ ID NO: 128133 - RNA, 32 nt, Homo Sapiens
agugaacauuuuggauguuuccguguucuccu

SEQ ID NO: 128134 - RNA, 32 nt, Homo Sapiens
uacaacuuucuuuuuucuuuuaaaguauauac

SEQ ID NO: 128135 - RNA, 32 nt, Homo Sapiens
cagcagcugcuacuccaccugcagcugggcua

SEQ ID NO: 128136 - RNA, 32 nt, Homo Sapiens
ugaccaggugggcagggcaggggcuugucuaa

SEQ ID NO: 128137 - RNA, 32 nt, Homo Sapiens
augaauuacaacuuaaauacauguuggaagug

SEQ ID NO: 128138 - RNA, 32 nt, Homo Sapiens
cuggugagggguggaggugagacccacacuua

SEQ ID NO: 128139 - RNA, 32 nt, Homo Sapiens
uuaacaaaugacuccaccuauuuuuccaguag

SEQ ID NO: 128140 - RNA, 32 nt, Homo Sapiens
auuuuaaaaaaguuaaguaucucaauuuuuca

SEQ ID NO: 128141 - RNA, 32 nt, Homo Sapiens
cucgcugugccuuagucaguguguacgugugu

SEQ ID NO: 128142 - RNA, 32 nt, Homo Sapiens
guugacaaaaauuucuuaaagugcaauagauu

SEQ ID NO: 128143 - RNA, 32 nt, Homo Sapiens
aagagaaaaugguguaauuguauuaaacagac

SEQ ID NO: 128144 - RNA, 32 nt, Homo Sapiens
auccugcuaauuuuuguucuuacagaaauaca

SEQ ID NO: 128145 - RNA, 32 nt, Homo Sapiens
cacaauuacugaugggagcaaguugacuacca

SEQ ID NO: 128146 - RNA, 32 nt, Homo Sapiens
uccugaggacaaauagccacugccgcugcgua

SEQ ID NO: 128147 - RNA, 32 nt, Homo Sapiens
caaucgcucuggucgaccccaacacacuagga

SEQ ID NO: 128148 - RNA, 32 nt, Homo Sapiens
cagauuguuucaucauugcaucuauuuuccau

SEQ ID NO: 128149 - RNA, 32 nt, Homo Sapiens
uggacuuccugguguaaaucucuucuugcuuc

SEQ ID NO: 128150 - RNA, 32 nt, Homo Sapiens
gaaaucacccucaaguagcagggacaggugug

SEQ ID NO: 128151 - RNA, 32 nt, Homo Sapiens
ugacaaguuuggaagaagguccagcuauggag

SEQ ID NO: 128152 - RNA, 32 nt, Homo Sapiens
cacuguuguuuccaggagagaaugggagacaa

SEQ ID NO: 128153 - RNA, 32 nt, Homo Sapiens
ccucuccuuccacagaccccacaugcccaaag

SEQ ID NO: 128154 - RNA, 32 nt, Homo Sapiens
gucuuugcccugucgggauggggacccaauuu

SEQ ID NO: 128155 - RNA, 32 nt, Homo Sapiens
aaaaggccgucucagcaaggacagggaggcug

SEQ ID NO: 128156 - RNA, 32 nt, Homo Sapiens
ugaguguugcuguggcugccgagagagccuga

SEQ ID NO: 128157 - RNA, 32 nt, Homo Sapiens
gucauguaaauuaaguucuagagcagcucucu

SEQ ID NO: 128158 - RNA, 32 nt, Homo Sapiens
ccacagaccaagacuggaguaagaccuuuuaa

SEQ ID NO: 128159 - RNA, 32 nt, Homo Sapiens
gcucgcgcgcuggccugggcucuagccgagga

SEQ ID NO: 128160 - RNA, 32 nt, Homo Sapiens
cgggaggccgcgccuggcagguuucugaaaca

SEQ ID NO: 128161 - RNA, 32 nt, Homo Sapiens
aagacuuaggggaaaaguuugccaguuucuac

SEQ ID NO: 128162 - RNA, 32 nt, Homo Sapiens
ccagaugugagcaccgcacccagcggcaaaga

SEQ ID NO: 128163 - RNA, 32 nt, Homo Sapiens
cgcuucuuuucucugucuuagaaaagggaguc

SEQ ID NO: 128164 - RNA, 32 nt, Homo Sapiens
cauuaagcccucgcccggcccggacacaggga

SEQ ID NO: 128165 - RNA, 32 nt, Homo Sapiens
aagguagaaauauuuuuaagcuccucugaugc

SEQ ID NO: 128166 - RNA, 32 nt, Homo Sapiens
cccccaauggugcagcugcagcagucaccacu

SEQ ID NO: 128167 - RNA, 32 nt, Homo Sapiens
cccuacgcugcugccuucuccuccugcuugca

SEQ ID NO: 128168 - RNA, 32 nt, Homo Sapiens
uuuauugcccucaaaaucuuuagaauaguuaa

SEQ ID NO: 128169 - RNA, 32 nt, Homo Sapiens
ccaucccuacagcccucccgcuccaucgacga

SEQ ID NO: 128170 - RNA, 32 nt, Homo Sapiens
cgggaggcuggacagaggcuguagccaacaca

SEQ ID NO: 128171 - RNA, 32 nt, Homo Sapiens
ccaggccccacuucgaccucuaaacacauccc

SEQ ID NO: 128172 - RNA, 32 nt, Homo Sapiens
uuuucuuuugcaagucuaaauguuagaaaacu

SEQ ID NO: 128173 - RNA, 32 nt, Homo Sapiens
uccgcggcuucguccccuccccggcagaccca

SEQ ID NO: 128174 - RNA, 32 nt, Homo Sapiens
aaaaagacagaggcuuuuuuuuuuuuuuuaaa

SEQ ID NO: 128175 - RNA, 32 nt, Homo Sapiens
ccuuacucuuugaugaucguagagaaagacuu

SEQ ID NO: 128176 - RNA, 32 nt, Homo Sapiens
uacccuggggccuggcuuaaaagcaggauuga

SEQ ID NO: 128177 - RNA, 32 nt, Homo Sapiens
cuuagagcgagcagagcagcucugcuaugagu

SEQ ID NO: 128178 - RNA, 32 nt, Homo Sapiens
ucugaagcccaguguucccauccaucaaauga

SEQ ID NO: 128179 - RNA, 32 nt, Homo Sapiens
ccuucuggaaaacagggcugguauuccuaccc

SEQ ID NO: 128180 - RNA, 32 nt, Homo Sapiens
ggggguagcucuucuaguagugcucggcguca

SEQ ID NO: 128181 - RNA, 32 nt, Homo Sapiens
uccuuggacuucuuguguguucugugagcuuc

SEQ ID NO: 128182 - RNA, 32 nt, Homo Sapiens
ccuuucacuccaguucugggugaggcaggagc

SEQ ID NO: 128183 - RNA, 32 nt, Homo Sapiens
accccucggaagcuaguuaccauggaggauca

SEQ ID NO: 128184 - RNA, 32 nt, Homo Sapiens
auagcuggagucccacagauaccaaaugucau

SEQ ID NO: 128185 - RNA, 32 nt, Homo Sapiens
ugccaggcucucgcgggcgcgcucgggguggg

SEQ ID NO: 128186 - RNA, 32 nt, Homo Sapiens
gaucauguuuuggcaguguacucuguccauuc

SEQ ID NO: 128187 - RNA, 32 nt, Homo Sapiens
cugccgcuugugucuggcaugaaaauucacaa

SEQ ID NO: 128188 - RNA, 32 nt, Homo Sapiens
ccccacaccugccugccuccuucacggacucg

SEQ ID NO: 128189 - RNA, 32 nt, Homo Sapiens
uagacugcaucaauccuugugauccuuaacag

SEQ ID NO: 128190 - RNA, 32 nt, Homo Sapiens
agcucugcuaaggacuugaauuuugagggagc

SEQ ID NO: 128191 - RNA, 32 nt, Homo Sapiens
agauuaaggcaacaaacauauuugggugugua

SEQ ID NO: 128192 - RNA, 32 nt, Homo Sapiens
gacacuggauggcaagaaugcugcugauggug

SEQ ID NO: 128193 - RNA, 32 nt, Homo Sapiens
ugagcaguguuugccuucagguggugggguua

SEQ ID NO: 128194 - RNA, 32 nt, Homo Sapiens
ggaaacagcaaaugcagaagcugcugcgcgga

SEQ ID NO: 128195 - RNA, 32 nt, Homo Sapiens
agagcaaaggucguugcugaguugaaagaagg

SEQ ID NO: 128196 - RNA, 30 nt, Homo Sapiens
uagcucuuaugcuguuuuccugcucaaaaa

SEQ ID NO: 128197 - RNA, 32 nt, Homo Sapiens
auuuuauuauauauuuuuuaugguugcaugug

SEQ ID NO: 128198 - RNA, 32 nt, Homo Sapiens
gagggcugcgcgcgcugcguucgcgaggagua

SEQ ID NO: 128199 - RNA, 32 nt, Homo Sapiens
ugaucuuaggcaguaauaaacaauggcauuug

SEQ ID NO: 128200 - RNA, 32 nt, Homo Sapiens
gucgugguggcccugucuugccugcuguccau

SEQ ID NO: 128201 - RNA, 32 nt, Homo Sapiens
aggggcuccacggugggcacccugcacucaau

SEQ ID NO: 128202 - RNA, 32 nt, Homo Sapiens
cuuggggguggggccacaaaucuggcgaaaaa

SEQ ID NO: 128203 - RNA, 32 nt, Homo Sapiens
cuugcagcguccccugcuaugccucaggugaa

SEQ ID NO: 128204 - RNA, 32 nt, Homo Sapiens
ccaaugagauguaaacagaaauguaugcaaug

SEQ ID NO: 128205 - RNA, 32 nt, Homo Sapiens
gaggugccagaagagggaaaagcacauugccc

SEQ ID NO: 128206 - RNA, 32 nt, Homo Sapiens
cuuaauuaaaaauaaaugcccaaaauguagaa

SEQ ID NO: 128207 - RNA, 32 nt, Homo Sapiens
caccccuacucuauucuguaguuuuuugguuu

SEQ ID NO: 128208 - RNA, 32 nt, Homo Sapiens
uaccucaucuucuuacuccccagcuacucucu

SEQ ID NO: 128209 - RNA, 32 nt, Homo Sapiens
cuugccccucugccaauaaccacaaaaugauc

SEQ ID NO: 128210 - RNA, 32 nt, Homo Sapiens
gguuuugcuugaggccugaaaaauguaaaaag

SEQ ID NO: 128211 - RNA, 32 nt, Homo Sapiens
uccacuggccgccuuguguugcuggagacgug

SEQ ID NO: 128212 - RNA, 32 nt, Homo Sapiens
ccccuuuaaaauguauuucuuuagaggcauua

SEQ ID NO: 128213 - RNA, 32 nt, Homo Sapiens
aggauguauguggugaaaacuuaccaccccca

SEQ ID NO: 128214 - RNA, 32 nt, Homo Sapiens
ggaagcugcucuuuaccucaaaagcacaaagc

SEQ ID NO: 128215 - RNA, 32 nt, Homo Sapiens
ugcaccucugccccagccccagcccucagagc

SEQ ID NO: 128216 - RNA, 32 nt, Homo Sapiens
ucagguucuucccuccuucucacugguuuuuc

SEQ ID NO: 128217 - RNA, 32 nt, Homo Sapiens
ugcagaucuaauguacugaaggcaaaccuuuc

SEQ ID NO: 128218 - RNA, 32 nt, Homo Sapiens
ucucccuuucccuucuuggugcuuacacaucu

SEQ ID NO: 128219 - RNA, 31 nt, Homo Sapiens
uggagcggagcuugccugccugccuguggag

SEQ ID NO: 128220 - RNA, 32 nt, Homo Sapiens
uuuccaucucauuucccuuccaucugaaagug

SEQ ID NO: 128221 - RNA, 32 nt, Homo Sapiens
aacucacacacacacacacacacacacacgca

SEQ ID NO: 128222 - RNA, 32 nt, Homo Sapiens
agucggauuucccccguccccuucccccuguu

SEQ ID NO: 128223 - RNA, 32 nt, Homo Sapiens
augaaagcagugcugccaucaguuucacuucu

SEQ ID NO: 128224 - RNA, 32 nt, Homo Sapiens
uuguacaaaguuuuuucuuaaacuguauaauu

SEQ ID NO: 128225 - RNA, 32 nt, Homo Sapiens
aauaaagaggaauguuaccauccccagcugcc

SEQ ID NO: 128226 - RNA, 32 nt, Homo Sapiens
acaguggcccagcugggacugggacguagcaa

SEQ ID NO: 128227 - RNA, 32 nt, Homo Sapiens
gucaaggagcagcaguucugcucuccccauca

SEQ ID NO: 128228 - RNA, 32 nt, Homo Sapiens
gcacagagaagcuggggaggagcuuuguuuug

SEQ ID NO: 128229 - RNA, 32 nt, Homo Sapiens
cuuuugauuaaagaaacuuauuacuguuguca

SEQ ID NO: 128230 - RNA, 32 nt, Homo Sapiens
ggcagcuuuguuugucccacuuuucuuuguuu

SEQ ID NO: 128231 - RNA, 32 nt, Homo Sapiens
cgcugaggcuccagcccuagccagcccugcuc

SEQ ID NO: 128232 - RNA, 32 nt, Homo Sapiens
uuuugaggacuguuucaaaaccacuggacuag

SEQ ID NO: 128233 - RNA, 32 nt, Homo Sapiens
guggaugguaguguuuaauacauuuuauauuu

SEQ ID NO: 128234 - RNA, 30 nt, Homo Sapiens
uccagcgagcaucugccgccgcgccgccgc

SEQ ID NO: 128235 - RNA, 32 nt, Homo Sapiens
gacuucccuggccaucuuaucccauccuugca

SEQ ID NO: 128236 - RNA, 32 nt, Homo Sapiens
ucuccagugacacguggacaaaugcgggcuca

SEQ ID NO: 128237 - RNA, 32 nt, Homo Sapiens
ggcuuugagagaaggccagcuaguucugucau

SEQ ID NO: 128238 - RNA, 32 nt, Homo Sapiens
gggcaugagcuacucgccgucggcucucugcc

SEQ ID NO: 128239 - RNA, 32 nt, Homo Sapiens
ccccagccuggcaccuggacaccuggacacug

SEQ ID NO: 128240 - RNA, 31 nt, Homo Sapiens
uuacuauguguaaauggagugcuguacagau

SEQ ID NO: 128241 - RNA, 32 nt, Homo Sapiens
uugcccucagaaagauucugauacccugccuu

SEQ ID NO: 128242 - RNA, 32 nt, Homo Sapiens
cggcagccgucaccccacaccccagcccauca

SEQ ID NO: 128243 - RNA, 32 nt, Homo Sapiens
cgguucccauucuacuuuuggucuccgcccac

SEQ ID NO: 128244 - RNA, 32 nt, Homo Sapiens
cccccagguucaagcaguucuuccucagccuc

SEQ ID NO: 128245 - RNA, 32 nt, Homo Sapiens
uggcauuucuucaagguuaaauguagaauuaa

SEQ ID NO: 128246 - RNA, 32 nt, Homo Sapiens
agguacugcccccacaccuccugacaccucca

SEQ ID NO: 128247 - RNA, 28 nt, Homo Sapiens
aguagggggcggcucuggggaaguggca

SEQ ID NO: 128248 - RNA, 32 nt, Homo Sapiens
cagaccugauuuccaagccaagacucccaugc

SEQ ID NO: 128249 - RNA, 32 nt, Homo Sapiens
ucccagguuuaagcgauucuucugccucagcc

SEQ ID NO: 128250 - RNA, 32 nt, Homo Sapiens
gaacauaaaagagcccaucuuugucaguuuac

SEQ ID NO: 128251 - RNA, 32 nt, Homo Sapiens
gucaugccagggucccaaaagugugggugccu

SEQ ID NO: 128252 - RNA, 32 nt, Homo Sapiens
gucuucacuuuguucauuucucuucuguuuuc

SEQ ID NO: 128253 - RNA, 32 nt, Homo Sapiens
gaaucuuguaaaaaccaugugggguaaacugg

SEQ ID NO: 128254 - RNA, 32 nt, Homo Sapiens
uggccaucguggugcugugcaagucgcgcaag

SEQ ID NO: 128255 - RNA, 32 nt, Homo Sapiens
caacagcaaaguucuuuacauguaugaaaagg

SEQ ID NO: 128256 - RNA, 32 nt, Homo Sapiens
auuaugaaaaucuauuuuauuuauacacauuc

SEQ ID NO: 128257 - RNA, 32 nt, Homo Sapiens
caaccucaguucuucuuggagaaucuacgacc

SEQ ID NO: 128258 - RNA, 32 nt, Homo Sapiens
gccugagguuacccggcccggcccuuccucgc

SEQ ID NO: 128259 - RNA, 32 nt, Homo Sapiens
auguucccaccccuccuccccagggccaaggc

SEQ ID NO: 128260 - RNA, 31 nt, Homo Sapiens
agcgcacagccccaggacggcgaggacgggg

SEQ ID NO: 128261 - RNA, 32 nt, Homo Sapiens
guuuuuucauauuaucgggaaauauuuuuguc

SEQ ID NO: 128262 - RNA, 32 nt, Homo Sapiens
uuaugcccauucuucuuguguacuugugacuc

SEQ ID NO: 128263 - RNA, 32 nt, Homo Sapiens
gccuuucuauauauauucucguaugucuuauu

SEQ ID NO: 128264 - RNA, 32 nt, Homo Sapiens
aucauacuaaaaugcugagugaguggaggucu

SEQ ID NO: 128265 - RNA, 32 nt, Homo Sapiens
gaccucgggaggagaaacgaaaagccgccucc

SEQ ID NO: 128266 - RNA, 32 nt, Homo Sapiens
gggcccaggucacccugaagccccacaacuuu

SEQ ID NO: 128267 - RNA, 32 nt, Homo Sapiens
ucaaaaugucaaccuguuaacaaaauuacaug

SEQ ID NO: 128268 - RNA, 32 nt, Homo Sapiens
cuggaaaaacuggcaggaauuuccuugucgug

SEQ ID NO: 128269 - RNA, 32 nt, Homo Sapiens
gccagauuggggaagcccuucuccccgggucu

SEQ ID NO: 128270 - RNA, 32 nt, Homo Sapiens
uuagcucuaagauuauuuuagagcaccugcac

SEQ ID NO: 128271 - RNA, 32 nt, Homo Sapiens
uucugaaaacacaaucuucuaaauauuggugg

SEQ ID NO: 128272 - RNA, 32 nt, Homo Sapiens
auaugucaaagucuuugguaaauuuucaaauu

SEQ ID NO: 128273 - RNA, 32 nt, Homo Sapiens
guucugccaguacagcccuacugcaucaucug

SEQ ID NO: 128274 - RNA, 32 nt, Homo Sapiens
ggguggguagugcagugggcggugccgggcac

SEQ ID NO: 128275 - RNA, 32 nt, Homo Sapiens
ugcuuguauaaaugucagauaauuaauuucca

SEQ ID NO: 128276 - RNA, 32 nt, Homo Sapiens
agucgcggggacgacgcgggcucuuccuggau

SEQ ID NO: 128277 - RNA, 32 nt, Homo Sapiens
ugcgugaugcugagguuuggggugcgaaugac

SEQ ID NO: 128278 - RNA, 32 nt, Homo Sapiens
ugggcuugagcgcgugccuucugcgcucgugu

SEQ ID NO: 128279 - RNA, 32 nt, Homo Sapiens
aaaagagcgguuuguguagaaauuggagagaa

SEQ ID NO: 128280 - RNA, 32 nt, Homo Sapiens
gccgggaugcacuguuccugcuguggguccuc

SEQ ID NO: 128281 - RNA, 32 nt, Homo Sapiens
aucgaagaggcagaaagaaacaacaaaacaca

SEQ ID NO: 128282 - RNA, 32 nt, Homo Sapiens
acuccgcgcacgagagcuucacggcggccgag

SEQ ID NO: 128283 - RNA, 30 nt, Homo Sapiens
cucuugucuucacugucagaagcugaacug

SEQ ID NO: 128284 - RNA, 32 nt, Homo Sapiens
acccaccacacacacacacacacacacacaca

SEQ ID NO: 128285 - RNA, 32 nt, Homo Sapiens
aggaguauuauuaauuauuaauaaaugaauuc

SEQ ID NO: 128286 - RNA, 32 nt, Homo Sapiens
cauccaagugaacacauacuauugcccucugu

SEQ ID NO: 128287 - RNA, 32 nt, Homo Sapiens
cauuacaaccacugguccccacuacacauuua

SEQ ID NO: 128288 - RNA, 32 nt, Homo Sapiens
uugguccuggcuuucggcccguaguuguagaa

SEQ ID NO: 128289 - RNA, 32 nt, Homo Sapiens
ccgcccgcccgcccgcgccaugaacgccaagg

SEQ ID NO: 128290 - RNA, 32 nt, Homo Sapiens
caaaugcagaacuuggucuuuucauguuaaaa

SEQ ID NO: 128291 - RNA, 32 nt, Homo Sapiens
aguggccaucgcuuuugggggugucuguguag

SEQ ID NO: 128292 - RNA, 32 nt, Homo Sapiens
acucuacacauccugagcuaagacauacuguc

SEQ ID NO: 128293 - RNA, 32 nt, Homo Sapiens
uagcaaaaacacacccaggaaagccucaucag

SEQ ID NO: 128294 - RNA, 32 nt, Homo Sapiens
ucagcuuuucauuugcagaggacauguucaac

SEQ ID NO: 128295 - RNA, 32 nt, Homo Sapiens
guugaaaaaugguugguguauuuugucaguaa

SEQ ID NO: 128296 - RNA, 32 nt, Homo Sapiens
gaagaccccgucggggagagggcgcgcagccc

SEQ ID NO: 128297 - RNA, 32 nt, Homo Sapiens
gagggagccccggcugcgccgcgcgacucccu

SEQ ID NO: 128298 - RNA, 32 nt, Homo Sapiens
aucuuucaggaacacgaggauucuugcuuucu

SEQ ID NO: 128299 - RNA, 32 nt, Homo Sapiens
ggagaggcaucuggguucggacuggggccgcc

SEQ ID NO: 128300 - RNA, 32 nt, Homo Sapiens
aggccuugcuaaaauaaaagaauuaccuuacc

SEQ ID NO: 128301 - RNA, 32 nt, Homo Sapiens
augguucuuagaacuuguuuuaauuuuugugg

SEQ ID NO: 128302 - RNA, 32 nt, Homo Sapiens
ggacuuuuuuggaaacaagaagucugucccag

SEQ ID NO: 128303 - RNA, 32 nt, Homo Sapiens
ugcggggcuggggcgcgcgccaugggccgccu

SEQ ID NO: 128304 - RNA, 32 nt, Homo Sapiens
gaucugcccuggagacugguaguaaugcagga

SEQ ID NO: 128305 - RNA, 32 nt, Homo Sapiens
augaacuuuuaaaaauaaagggcuuucacugg

SEQ ID NO: 128306 - RNA, 32 nt, Homo Sapiens
acacugaugauaccucacauguugaccggcua

SEQ ID NO: 128307 - RNA, 30 nt, Homo Sapiens
aggcugugcugcgggcagccagugagaagg

SEQ ID NO: 128308 - RNA, 32 nt, Homo Sapiens
guucgcgucaugccgagccucccggccccgcc

SEQ ID NO: 128309 - RNA, 32 nt, Homo Sapiens
gaacuuccucucuccuuccacuuauuuccuca

SEQ ID NO: 128310 - RNA, 32 nt, Homo Sapiens
gcucuuaggacgcagccgccucaugggggucc

SEQ ID NO: 128311 - RNA, 32 nt, Homo Sapiens
gugagaugaugauuagaucaggggugaggcug

SEQ ID NO: 128312 - RNA, 32 nt, Homo Sapiens
uaucuauuuagaaauauguaaaacuggauuuu

SEQ ID NO: 128313 - RNA, 32 nt, Homo Sapiens
cacugcaacuucugccucccgaguucaagcga

SEQ ID NO: 128314 - RNA, 32 nt, Homo Sapiens
gcagccccccgggaugcgguagcggccgcugu

SEQ ID NO: 128315 - RNA, 32 nt, Homo Sapiens
gggcgccgggauggagggcgccaaggggcggg

SEQ ID NO: 128316 - RNA, 32 nt, Homo Sapiens
agcucucaccucagugaccuggacaggggaga

SEQ ID NO: 128317 - RNA, 32 nt, Homo Sapiens
acuuguaggaggagggcucugcaggccgccuc

SEQ ID NO: 128318 - RNA, 32 nt, Homo Sapiens
acccagacacugggagugcugccaccucgugg

SEQ ID NO: 128319 - RNA, 32 nt, Homo Sapiens
agacuucucagccccagaacacagcugugucc

SEQ ID NO: 128320 - RNA, 32 nt, Homo Sapiens
acagguuaaauauauaaacaaacaaacaaaaa

SEQ ID NO: 128321 - RNA, 32 nt, Homo Sapiens
ucucagcacacucuuggugcuugauaaauguu

SEQ ID NO: 128322 - RNA, 32 nt, Homo Sapiens
ccaggcccugcccguggaccggaagcgaagcc

SEQ ID NO: 128323 - RNA, 32 nt, Homo Sapiens
ccccaagcuguguaauauaccuugguauaaca

SEQ ID NO: 128324 - RNA, 32 nt, Homo Sapiens
guaauguauuuuuuuagaaaucuuaaaauugc

SEQ ID NO: 128325 - RNA, 32 nt, Homo Sapiens
agacaaauauccauaguuuuuaucacaauauc

SEQ ID NO: 128326 - RNA, 32 nt, Homo Sapiens
uuguggggagcauuuuuguugauaauuuuacu

SEQ ID NO: 128327 - RNA, 32 nt, Homo Sapiens
acuuaucugagguuggaaauaaagagaaggug

SEQ ID NO: 128328 - RNA, 32 nt, Homo Sapiens
gggaaacgacugucccgcugcugcugggguac

SEQ ID NO: 128329 - RNA, 32 nt, Homo Sapiens
cuacagagggaagagggacuucccuugacugg

SEQ ID NO: 128330 - RNA, 32 nt, Homo Sapiens
aaggagaugugguuucucuauagugcaacaaa

SEQ ID NO: 128331 - RNA, 32 nt, Homo Sapiens
uucugugcaggccagcagggccccaucucuag

SEQ ID NO: 128332 - RNA, 32 nt, Homo Sapiens
ucagccccgggagcucgccgcgcgccggggac

SEQ ID NO: 128333 - RNA, 32 nt, Homo Sapiens
acgacacgugacucguuuuagagcucuguccc

SEQ ID NO: 128334 - RNA, 32 nt, Homo Sapiens
gggguucggggagaggcccugcuugggaacau

SEQ ID NO: 128335 - RNA, 32 nt, Homo Sapiens
uuugagaucagccuaggcaacauggcaaaacc

SEQ ID NO: 128336 - RNA, 32 nt, Homo Sapiens
aagccagguucaacccuugccucaagaaauca

SEQ ID NO: 128337 - RNA, 32 nt, Homo Sapiens
ugugcuccuccccugcucccagcccagagcag

SEQ ID NO: 128338 - RNA, 32 nt, Homo Sapiens
ucuaauuauuguuuuucaaaguuucuuuccuu

SEQ ID NO: 128339 - RNA, 32 nt, Homo Sapiens
uuaaaaaacaaauacugagacaguuacaaagu

SEQ ID NO: 128340 - RNA, 32 nt, Homo Sapiens
uaggcgcagcgggacgcggggcucggaucuga

SEQ ID NO: 128341 - RNA, 32 nt, Homo Sapiens
ggcugcucccgaacugcugaccucagaucauc

SEQ ID NO: 128342 - RNA, 32 nt, Homo Sapiens
uugugaacaagguagaauauaaauacauaaua

SEQ ID NO: 128343 - RNA, 32 nt, Homo Sapiens
cuugguucauugaggugguuaaguauaaaugc

SEQ ID NO: 128344 - RNA, 32 nt, Homo Sapiens
cugaggccaccagcagaucaucuuuaagcuaa

SEQ ID NO: 128345 - RNA, 32 nt, Homo Sapiens
uaauaaaguuggaaaaauacuuuuucaaaaac

SEQ ID NO: 128346 - RNA, 32 nt, Homo Sapiens
acaccucugccccagagcugccuccugccugg

SEQ ID NO: 128347 - RNA, 32 nt, Homo Sapiens
ucugcuauaggucagagaugggcugaacugag

SEQ ID NO: 128348 - RNA, 32 nt, Homo Sapiens
ccuacauccuucccgcgcccccacgguugcgg

SEQ ID NO: 128349 - RNA, 32 nt, Homo Sapiens
uaagcuaaauuuaagaaauuguacuagauuga

SEQ ID NO: 128350 - RNA, 32 nt, Homo Sapiens
caagcugucuuuugugcuuagaucauccauag

SEQ ID NO: 128351 - RNA, 32 nt, Homo Sapiens
acucacuccaugaaugacuggaguguaggggc

SEQ ID NO: 128352 - RNA, 32 nt, Homo Sapiens
acauuuuuaagaaggagggaaucccaccucau

SEQ ID NO: 128353 - RNA, 32 nt, Homo Sapiens
aaaagugaaaagacaagcaacauaauauuagg

SEQ ID NO: 128354 - RNA, 32 nt, Homo Sapiens
gccuucaccccauugggagagagcagggcauc

SEQ ID NO: 128355 - RNA, 32 nt, Homo Sapiens
auaggaaugaacugucugugaauguuuucaag

SEQ ID NO: 128356 - RNA, 30 nt, Homo Sapiens
gggacuaggcuggugggggaagaugcuccu

SEQ ID NO: 128357 - RNA, 32 nt, Homo Sapiens
acauacugaucuuucauaauccauucagaggg

SEQ ID NO: 128358 - RNA, 32 nt, Homo Sapiens
ggguuucugcuauuuuuugcuuucucucccuc

SEQ ID NO: 128359 - RNA, 32 nt, Homo Sapiens
uuuucuuuuuaaagucguguaauacaauauuu

SEQ ID NO: 128360 - RNA, 32 nt, Homo Sapiens
uguugauguuaaugacauccacaaaaugucuu

SEQ ID NO: 128361 - RNA, 32 nt, Homo Sapiens
cugugugugaagagggggaaggugaucucagu

SEQ ID NO: 128362 - RNA, 32 nt, Homo Sapiens
aguccuuggauguagggaaaagaaagagagau

SEQ ID NO: 128363 - RNA, 32 nt, Homo Sapiens
guucccaucccauaaaagaguagugauaguga

SEQ ID NO: 128364 - RNA, 30 nt, Homo Sapiens
ugggcccagcagcaugagggucccgaggcc

SEQ ID NO: 128365 - RNA, 32 nt, Homo Sapiens
aagauagcaaauacuuuuuuuaaauuacaaaa

SEQ ID NO: 128366 - RNA, 32 nt, Homo Sapiens
gcuagaaauaugucugugacuccaccaguuau

SEQ ID NO: 128367 - RNA, 32 nt, Homo Sapiens
gguggcaacuugccucccggugcgggcgucuc

SEQ ID NO: 128368 - RNA, 32 nt, Homo Sapiens
gugagagggcaagggggaaaagaucgacgaag

SEQ ID NO: 128369 - RNA, 32 nt, Homo Sapiens
gugagccaugccuugcccuuuucugaggcuca

SEQ ID NO: 128370 - RNA, 32 nt, Homo Sapiens
auugaugaaaauaauuuacugugacuuuauua

SEQ ID NO: 128371 - RNA, 32 nt, Homo Sapiens
cccccggagcuccugucccauccacaccagcu

SEQ ID NO: 128372 - RNA, 32 nt, Homo Sapiens
uuccgagaugacccaaucugccuuugaaucug

SEQ ID NO: 128373 - RNA, 32 nt, Homo Sapiens
acaucccugccagcucuucugccggcccuggg

SEQ ID NO: 128374 - RNA, 32 nt, Homo Sapiens
aucuagaauacuaugauuagguaguugagcac

SEQ ID NO: 128375 - RNA, 32 nt, Homo Sapiens
aggaaaaguaaccagcauuacugcaccucuug

SEQ ID NO: 128376 - RNA, 32 nt, Homo Sapiens
ugccaucggcccgcuuugcuucguccuggcag

SEQ ID NO: 128377 - RNA, 32 nt, Homo Sapiens
auggugcccugggcuguguccuccccugggga

SEQ ID NO: 128378 - RNA, 32 nt, Homo Sapiens
cuauaugcugcacauuuugccuuuaaagucuu

SEQ ID NO: 128379 - RNA, 32 nt, Homo Sapiens
cugccggcucugccggcacccacagcaacgga

SEQ ID NO: 128380 - RNA, 32 nt, Homo Sapiens
ucauacugaacugaaauugaucuuuucaucug

SEQ ID NO: 128381 - RNA, 32 nt, Homo Sapiens
ccacauuuugcccugcuucucucaggguuaag

SEQ ID NO: 128382 - RNA, 32 nt, Homo Sapiens
cgcauaugccagcagcuucucacuccaguuca

SEQ ID NO: 128383 - RNA, 32 nt, Homo Sapiens
gcuuagccaaauagaauuguucuuugucauuc

SEQ ID NO: 128384 - RNA, 32 nt, Homo Sapiens
uaggcuacugucaguaaaagggucuccuaaag

SEQ ID NO: 128385 - RNA, 32 nt, Homo Sapiens
ggagcagguucagguaaacaaagggcgaggac

SEQ ID NO: 128386 - RNA, 32 nt, Homo Sapiens
acuacacccuccccuucgcgucccagacccuc

SEQ ID NO: 128387 - RNA, 32 nt, Homo Sapiens
gccaccgcaccaagaggccgccucuggggagc

SEQ ID NO: 128388 - RNA, 32 nt, Homo Sapiens
uuacauuuuauuuuuucuuaauccaguucugc

SEQ ID NO: 128389 - RNA, 32 nt, Homo Sapiens
caugucgccauugucugcggcgcgggcggccc

SEQ ID NO: 128390 - RNA, 32 nt, Homo Sapiens
gcgcugucccgcccaaccccgccuuuaaacgc

SEQ ID NO: 128391 - RNA, 32 nt, Homo Sapiens
aaguaagaauggccaacucaacuuucauaauu

SEQ ID NO: 128392 - RNA, 32 nt, Homo Sapiens
accucugcucccuccucccuccccugagagug

SEQ ID NO: 128393 - RNA, 32 nt, Homo Sapiens
acaguauuaauuuuuccaaaacaucaauaugg

SEQ ID NO: 128394 - RNA, 32 nt, Homo Sapiens
aaccgccgcccccggaccugcggagucugggc

SEQ ID NO: 128395 - RNA, 32 nt, Homo Sapiens
ccaaugugaaagauuauuuaaaugcuuuuaaa

SEQ ID NO: 128396 - RNA, 32 nt, Homo Sapiens
cuaagcaaauuaacaguaugucaaauucuguu

SEQ ID NO: 128397 - RNA, 32 nt, Homo Sapiens
aggggcugggugcggcggcucacgcauguaau

SEQ ID NO: 128398 - RNA, 32 nt, Homo Sapiens
ggcugccuggagcagagcuccugaaucacacu

SEQ ID NO: 128399 - RNA, 32 nt, Homo Sapiens
gaaaugugguauucucuuuuuuuucucucccu

SEQ ID NO: 128400 - RNA, 32 nt, Homo Sapiens
uccugcucaaauaacacugggugcuauauuga

SEQ ID NO: 128401 - RNA, 32 nt, Homo Sapiens
uuuucucucccuuuuuuguuugguucaaggca

SEQ ID NO: 128402 - RNA, 32 nt, Homo Sapiens
guguagguuacggucugagacaucaccgccaa

SEQ ID NO: 128403 - RNA, 31 nt, Homo Sapiens
uuaacccucaaugaacuaccaauugaaggca

SEQ ID NO: 128404 - RNA, 32 nt, Homo Sapiens
ugagugagaagcugguuugugaagcaccugcc

SEQ ID NO: 128405 - RNA, 32 nt, Homo Sapiens
ggaaguuuuauccgguccuucacugagugugg

SEQ ID NO: 128406 - RNA, 32 nt, Homo Sapiens
cuucccuccccgcuccgcacccagcagccaac

SEQ ID NO: 128407 - RNA, 32 nt, Homo Sapiens
augcaacuuauccaaaugauaauugauacaau

SEQ ID NO: 128408 - RNA, 32 nt, Homo Sapiens
ugaacaguaacccuaaaaacuugacauuuaug

SEQ ID NO: 128409 - RNA, 32 nt, Homo Sapiens
auggcuuuuuuuuuuuuuuuuaaagacaaagu

SEQ ID NO: 128410 - RNA, 32 nt, Homo Sapiens
uuucuuuuccucuuuuuccccaagaggaagaa

SEQ ID NO: 128411 - RNA, 32 nt, Homo Sapiens
agcagaagaacaaacugaagaacagacccagc

SEQ ID NO: 128412 - RNA, 32 nt, Homo Sapiens
gaaagcccaucccauauucugaaaaaaugcca

SEQ ID NO: 128413 - RNA, 32 nt, Homo Sapiens
aguuacuucuauuuuuuaaaauaauggaguaa

SEQ ID NO: 128414 - RNA, 32 nt, Homo Sapiens
aauccuuuguuccagggcuggagcggcucugg

SEQ ID NO: 128415 - RNA, 32 nt, Homo Sapiens
uacacuuucuucacuucuaccgucccuaugga

SEQ ID NO: 128416 - RNA, 32 nt, Homo Sapiens
gacuuuggccccagucccuuuaagagcugaaa

SEQ ID NO: 128417 - RNA, 32 nt, Homo Sapiens
ccccacaggaugaacgagccgaggcaggacag

SEQ ID NO: 128418 - RNA, 32 nt, Homo Sapiens
gacggcuggaccccaagaggccucgaagcuga

SEQ ID NO: 128419 - RNA, 32 nt, Homo Sapiens
uuuuggauugucggauuuccucccucacauga

SEQ ID NO: 128420 - RNA, 32 nt, Homo Sapiens
cugcuucuugucacuguuucaaaagcgucaac

SEQ ID NO: 128421 - RNA, 32 nt, Homo Sapiens
ccgaagcuggcuggaaagaaggcggcccuuuc

SEQ ID NO: 128422 - RNA, 32 nt, Homo Sapiens
ucauaagcuuucuuggaacgggggaaagaaaa

SEQ ID NO: 128423 - RNA, 32 nt, Homo Sapiens
ccacucaugauuauauaacuuaauuuucauuu

SEQ ID NO: 128424 - RNA, 32 nt, Homo Sapiens
acccaggagagccugugcagccuggggaacgu

SEQ ID NO: 128425 - RNA, 32 nt, Homo Sapiens
cugaaaacccucaguaaugcaaagaaaggccu

SEQ ID NO: 128426 - RNA, 32 nt, Homo Sapiens
ugcugcucccuggcucccacucugaucugcuu

SEQ ID NO: 128427 - RNA, 32 nt, Homo Sapiens
uccaggcucaggugggcggcggcguggaccgg

SEQ ID NO: 128428 - RNA, 32 nt, Homo Sapiens
cuaaggaaugacuuuauuaacuauaauauggu

SEQ ID NO: 128429 - RNA, 32 nt, Homo Sapiens
uauggggaacugcccuugacuccaccuauguu

SEQ ID NO: 128430 - RNA, 32 nt, Homo Sapiens
gcccuggcccuacuccagggccaaugcacccc

SEQ ID NO: 128431 - RNA, 31 nt, Homo Sapiens
gaccgaaugggggucaugacccugcccagug

SEQ ID NO: 128432 - RNA, 32 nt, Homo Sapiens
agggaguggggcggccgguucccucagcagga

SEQ ID NO: 128433 - RNA, 32 nt, Homo Sapiens
aagcaccgacaaucuuugauuacugaaaguau

SEQ ID NO: 128434 - RNA, 32 nt, Homo Sapiens
ccuccuguucccuccaccuacagguuguagau

SEQ ID NO: 128435 - RNA, 32 nt, Homo Sapiens
gauucgagacuacagcugggaguugccaaggg

SEQ ID NO: 128436 - RNA, 32 nt, Homo Sapiens
cacuuuuuaggggaggcuucccugaucugucc

SEQ ID NO: 128437 - RNA, 32 nt, Homo Sapiens
uauuuaacaaagugguacaaacagugaacuac

SEQ ID NO: 128438 - RNA, 32 nt, Homo Sapiens
ccgcgcccggccaguuacauaagauuuuaaaa

SEQ ID NO: 128439 - RNA, 32 nt, Homo Sapiens
gccugaauagccucagaaacaaccucagcgac

SEQ ID NO: 128440 - RNA, 32 nt, Homo Sapiens
ucccuccccgcauccccauuaagggacugggg

SEQ ID NO: 128441 - RNA, 32 nt, Homo Sapiens
caugaaaagagaaagcacuuugaaauuuauua

SEQ ID NO: 128442 - RNA, 32 nt, Homo Sapiens
cuggagggggaggggagaaggugugugacgcc

SEQ ID NO: 128443 - RNA, 32 nt, Homo Sapiens
uaucuacagauagagaguuguuguguacagac

SEQ ID NO: 128444 - RNA, 32 nt, Homo Sapiens
uuugucuuuuuguggccaaauauccuacugug

SEQ ID NO: 128445 - RNA, 32 nt, Homo Sapiens
aaauaauaaaaauuauucuuuaaaguaauguc

SEQ ID NO: 128446 - RNA, 32 nt, Homo Sapiens
ccagcucgucugccugcccccggccccgcgcc

SEQ ID NO: 128447 - RNA, 32 nt, Homo Sapiens
aauaaugcuuauuuauacuaaagaugaguuua

SEQ ID NO: 128448 - RNA, 32 nt, Homo Sapiens
ucaagugauccuccugccucagccuccugagu

SEQ ID NO: 128449 - RNA, 32 nt, Homo Sapiens
gggcuugagagcucagccugccugggagagcc

SEQ ID NO: 128450 - RNA, 29 nt, Homo Sapiens
cauguguaaaguuuucauuuucaggggcc

SEQ ID NO: 128451 - RNA, 32 nt, Homo Sapiens
gaauccugccagccgagcgugggucccagucu

SEQ ID NO: 128452 - RNA, 32 nt, Homo Sapiens
acccgggcagccagcucugucuccagggaggc

SEQ ID NO: 128453 - RNA, 32 nt, Homo Sapiens
uugcaguuggauuuuucuucaucaaccuccuu

SEQ ID NO: 128454 - RNA, 32 nt, Homo Sapiens
cuuuguugccaugagagcugccuaccucuucc

SEQ ID NO: 128455 - RNA, 32 nt, Homo Sapiens
ccuucuuagucacacaggaucccuguagccaa

SEQ ID NO: 128456 - RNA, 32 nt, Homo Sapiens
uaacggguuggaaaaagucugacuguaagcgu

SEQ ID NO: 128457 - RNA, 32 nt, Homo Sapiens
agggcgggaggaagagggacgccgcugagggc

SEQ ID NO: 128458 - RNA, 32 nt, Homo Sapiens
ggccucugacccagccccuccccgggccaggc

SEQ ID NO: 128459 - RNA, 32 nt, Homo Sapiens
ggaugucaccuaccaaaauccaaauccuccag

SEQ ID NO: 128460 - RNA, 30 nt, Homo Sapiens
uuuggcuuuggcggcggcgguggagaagau

SEQ ID NO: 128461 - RNA, 32 nt, Homo Sapiens
cguaaauaaauuggccaagacaacaacaucaa

SEQ ID NO: 128462 - RNA, 32 nt, Homo Sapiens
gagcagcuccacgcgggacugugcacgguggc

SEQ ID NO: 128463 - RNA, 32 nt, Homo Sapiens
ggcuggugaaaagaacagggaaaagaccaaac

SEQ ID NO: 128464 - RNA, 32 nt, Homo Sapiens
cggacccggccgccgccaggacuguguuucca

SEQ ID NO: 128465 - RNA, 32 nt, Homo Sapiens
uauuaacaaaaauucucagcauuaaagaaaac

SEQ ID NO: 128466 - RNA, 32 nt, Homo Sapiens
acucuucgaauuugaagugcuuauguacuaug

SEQ ID NO: 128467 - RNA, 32 nt, Homo Sapiens
guuuauguuaaaccuuaauuuuuuuucuguaa

SEQ ID NO: 128468 - RNA, 32 nt, Homo Sapiens
uucagaugccagcagccuccccggccgaccua

SEQ ID NO: 128469 - RNA, 32 nt, Homo Sapiens
ccucaggcgaucuacccgccucagccuccuga

SEQ ID NO: 128470 - RNA, 32 nt, Homo Sapiens
guguggggcgcaggggcgggugcggagagagc

SEQ ID NO: 128471 - RNA, 32 nt, Homo Sapiens
cagcaaggaccgaauggucuauucuaaaagaa

SEQ ID NO: 128472 - RNA, 32 nt, Homo Sapiens
cagcagaaaaggagaaaagccaaguaugagug

SEQ ID NO: 128473 - RNA, 32 nt, Homo Sapiens
ggccauaccacccugaacgugccuaaucucgu

SEQ ID NO: 128474 - RNA, 32 nt, Homo Sapiens
ucuguuuccccucccaaggcggcggcggcuga

SEQ ID NO: 128475 - RNA, 32 nt, Homo Sapiens
uuaaaccagaaaauguuuuaaauuuauaauuc

SEQ ID NO: 128476 - RNA, 32 nt, Homo Sapiens
ucacucuggccccaccaaggugagguggggac

SEQ ID NO: 128477 - RNA, 32 nt, Homo Sapiens
uauucuucgacacacguggguaaguugaugcc

SEQ ID NO: 128478 - RNA, 32 nt, Homo Sapiens
uggguguugaugaagaaauuguuuauuccaaa

SEQ ID NO: 128479 - RNA, 32 nt, Homo Sapiens
cagagcucacucaguucucacaguagccaaau

SEQ ID NO: 128480 - RNA, 32 nt, Homo Sapiens
auuauuucagaaauguacaacuuuuuaccuag

SEQ ID NO: 128481 - RNA, 32 nt, Homo Sapiens
ucacggcagccgcggcggccgaggggaccggg

SEQ ID NO: 128482 - RNA, 32 nt, Homo Sapiens
ugucagugcagggguggcugcugcuucccuug

SEQ ID NO: 128483 - RNA, 32 nt, Homo Sapiens
cggguggcgcaucaccggcgcggaggcaggag

SEQ ID NO: 128484 - RNA, 32 nt, Homo Sapiens
gcccggccauggcggagccgucguccgcccga

SEQ ID NO: 128485 - RNA, 32 nt, Homo Sapiens
aagcuccuugcugaccuucucugugucuuccu

SEQ ID NO: 128486 - RNA, 32 nt, Homo Sapiens
ucgacucuuugcaacagcacuugcuugcggaa

SEQ ID NO: 128487 - RNA, 32 nt, Homo Sapiens
aauuguguuugaccccaaaugacuuuauaccc

SEQ ID NO: 128488 - RNA, 32 nt, Homo Sapiens
agagaccccccgccaccaccuccaccugccug

SEQ ID NO: 128489 - RNA, 32 nt, Homo Sapiens
gccagccugggcaacauagugagacuucauuu

SEQ ID NO: 128490 - RNA, 32 nt, Homo Sapiens
gccaguuuuccucccccgcccuuguuuuccau

SEQ ID NO: 128491 - RNA, 32 nt, Homo Sapiens
aaagacuauccuguucucccauaaagaggagg

SEQ ID NO: 128492 - RNA, 32 nt, Homo Sapiens
ggcgacagagcaagacccccucucaaaaauaa

SEQ ID NO: 128493 - RNA, 32 nt, Homo Sapiens
cuccgcgggcccggcccgcgucagcagcgacc

SEQ ID NO: 128494 - RNA, 32 nt, Homo Sapiens
agaagacugagaauaagaagaucucuuugaaa

SEQ ID NO: 128495 - RNA, 32 nt, Homo Sapiens
uacauaaugcuuaauuucuaaagauaauauua

SEQ ID NO: 128496 - RNA, 32 nt, Homo Sapiens
cacaauauucuggacugaaauaugaguuggcg

SEQ ID NO: 128497 - RNA, 32 nt, Homo Sapiens
ucuuugugaugcuuugugaugugcgugugagg

SEQ ID NO: 128498 - RNA, 32 nt, Homo Sapiens
uuccugggccuggcccagguggcuguuucccu

SEQ ID NO: 128499 - RNA, 32 nt, Homo Sapiens
ugaagaagaacaaagagccugagaaagcagca

SEQ ID NO: 128500 - RNA, 32 nt, Homo Sapiens
uggccuaaacauuccucaagucuagccucagg

SEQ ID NO: 128501 - RNA, 32 nt, Homo Sapiens
acucguuuguaaucgccgucuguuuuguucug

SEQ ID NO: 128502 - RNA, 32 nt, Homo Sapiens
ucuugauggaaauccuuccuuuccugcucuug

SEQ ID NO: 128503 - RNA, 32 nt, Homo Sapiens
ucacaagugcccacaagaacugccccaugccc

SEQ ID NO: 128504 - RNA, 32 nt, Homo Sapiens
uggauaacucaguuucagauaaaccaucuugg

SEQ ID NO: 128505 - RNA, 30 nt, Homo Sapiens
acgaagucucacaagaccuauaggaaaguu

SEQ ID NO: 128506 - RNA, 32 nt, Homo Sapiens
uaaagaaaaucgcugcagcaaaaacuguuacu

SEQ ID NO: 128507 - RNA, 32 nt, Homo Sapiens
ccuacauuuuggaaacaaaaaggcagcaguga

SEQ ID NO: 128508 - RNA, 32 nt, Homo Sapiens
cgaguccccgggaggcgccgcgcgcuuggaag

SEQ ID NO: 128509 - RNA, 32 nt, Homo Sapiens
agagaacaaaaauuuuucaucauugagaaaau

SEQ ID NO: 128510 - RNA, 32 nt, Homo Sapiens
ucuugugugugauuuuuuuuuaaguugaugug

SEQ ID NO: 128511 - RNA, 32 nt, Homo Sapiens
uugccauccuucccucuuccugccugccagaa

SEQ ID NO: 128512 - RNA, 32 nt, Homo Sapiens
ggcgggagccccgcgcucgccaugucgggcga

SEQ ID NO: 128513 - RNA, 32 nt, Homo Sapiens
gcggcgcgcuccuggcgaggacggagcgagca

SEQ ID NO: 128514 - RNA, 32 nt, Homo Sapiens
aauguauuaaaaauaggaucccaugagaacau

SEQ ID NO: 128515 - RNA, 32 nt, Homo Sapiens
aggggaaaaucgucuguuuccuaaauccuguu

SEQ ID NO: 128516 - RNA, 31 nt, Homo Sapiens
ucccagggcgugggcuugccccgcgcguguc

SEQ ID NO: 128517 - RNA, 32 nt, Homo Sapiens
gccagccucgcuccucgcuccucgcuccucgc

SEQ ID NO: 128518 - RNA, 32 nt, Homo Sapiens
agggacauuaauccaauaaauaaggaaagaag

SEQ ID NO: 128519 - RNA, 32 nt, Homo Sapiens
ugcuugggacuggccugaggguauuuuaaaga

SEQ ID NO: 128520 - RNA, 32 nt, Homo Sapiens
ugcugguagcauauggcuggaaaaggccguuu

SEQ ID NO: 128521 - RNA, 31 nt, Homo Sapiens
ccuaauuagggcauccugccccucgccuuuu

SEQ ID NO: 128522 - RNA, 32 nt, Homo Sapiens
auauauaugaauuuguguaacacacacagaga

SEQ ID NO: 128523 - RNA, 32 nt, Homo Sapiens
gccuuagaggggcccuuuguugccuuuugugg

SEQ ID NO: 128524 - RNA, 32 nt, Homo Sapiens
cgcggaucccugggcguccguacgucggaguc

SEQ ID NO: 128525 - RNA, 32 nt, Homo Sapiens
uuuggcuuugacuauagcacaaaugugggcaa

SEQ ID NO: 128526 - RNA, 32 nt, Homo Sapiens
augcagcaucuaaguaaugaugucguuugaau

SEQ ID NO: 128527 - RNA, 32 nt, Homo Sapiens
cuuaucaaaaauuucuacauuagcuuuaagug

SEQ ID NO: 128528 - RNA, 32 nt, Homo Sapiens
uuuuguuguuguucuuuuuuuggcuaagauuc

SEQ ID NO: 128529 - RNA, 32 nt, Homo Sapiens
cucccgcgcggccagcaccgguacuugcgagc

SEQ ID NO: 128530 - RNA, 32 nt, Homo Sapiens
uauuuuaagaguauuuucugguaaaaagaaaa

SEQ ID NO: 128531 - RNA, 32 nt, Homo Sapiens
guccugcccuccccuccucaguccugcccacc

SEQ ID NO: 128532 - RNA, 32 nt, Homo Sapiens
gggacugacaagaagcucccagaugcugggga

SEQ ID NO: 128533 - RNA, 32 nt, Homo Sapiens
augcuuuggguuaggguuuucuuucacgcuuu

SEQ ID NO: 128534 - RNA, 32 nt, Homo Sapiens
aaagcaaggggaggguguguucccagaugugu

SEQ ID NO: 128535 - RNA, 32 nt, Homo Sapiens
ugccuggcagcgccuggcacggcugaaucuca

SEQ ID NO: 128536 - RNA, 32 nt, Homo Sapiens
aauuguuucuuacagguugaaagucuuuuaag

SEQ ID NO: 128537 - RNA, 32 nt, Homo Sapiens
uauucuaguuguauuguaaauuuuaaaagauu

SEQ ID NO: 128538 - RNA, 31 nt, Homo Sapiens
gcugcccuggugcuuucuccaagggccauca

SEQ ID NO: 128539 - RNA, 32 nt, Homo Sapiens
ugccuguugauuaaaucuaacucuucaacauc

SEQ ID NO: 128540 - RNA, 32 nt, Homo Sapiens
uugugacaagaaucacaaacauuuacuuuaaa

SEQ ID NO: 128541 - RNA, 32 nt, Homo Sapiens
gagcguuucgcucuccuuguaggcugaaguca

SEQ ID NO: 128542 - RNA, 30 nt, Homo Sapiens
gugccaggcaggcuucagggcaccguccuc

SEQ ID NO: 128543 - RNA, 32 nt, Homo Sapiens
ggguguagcuuugugcauccucucccagugga

SEQ ID NO: 128544 - RNA, 32 nt, Homo Sapiens
aaaauguuauuuaccaacuaaguauucauguu

SEQ ID NO: 128545 - RNA, 32 nt, Homo Sapiens
augacagccaagagcagauuugugaaaucggc

SEQ ID NO: 128546 - RNA, 32 nt, Homo Sapiens
gaacuggaacuuggcccgccucguugugagcu

SEQ ID NO: 128547 - RNA, 32 nt, Homo Sapiens
aucuuccucagccaucuuugugaguccuucaa

SEQ ID NO: 128548 - RNA, 32 nt, Homo Sapiens
gggauaagccaccacacccagccuagagaccu

SEQ ID NO: 128549 - RNA, 32 nt, Homo Sapiens
uuuguaacagggucagggaagaacugagcucg

SEQ ID NO: 128550 - RNA, 32 nt, Homo Sapiens
ugggguucgacggcgcggccgcgaggccgcca

SEQ ID NO: 128551 - RNA, 32 nt, Homo Sapiens
ggggagccgcgugacggcgcgcgugggugugg

SEQ ID NO: 128552 - RNA, 32 nt, Homo Sapiens
uccgagaggagcuuggaaagcuguaguauccg

SEQ ID NO: 128553 - RNA, 32 nt, Homo Sapiens
guguauuaucuaaaugucuuuuauaauaugag

SEQ ID NO: 128554 - RNA, 32 nt, Homo Sapiens
ugcgguagaaaacgucagguaucuuuuaaauc

SEQ ID NO: 128555 - RNA, 32 nt, Homo Sapiens
uuuaugugaaauaacuugaauguuguuccuau

SEQ ID NO: 128556 - RNA, 32 nt, Homo Sapiens
cugggggcgggggcaggaggggagcggggugg

SEQ ID NO: 128557 - RNA, 32 nt, Homo Sapiens
ucuaauuuccccacccuacuuuugacucuauc

SEQ ID NO: 128558 - RNA, 32 nt, Homo Sapiens
uauguuguuuuaaaaaaugauuaucuuuuaga

SEQ ID NO: 128559 - RNA, 32 nt, Homo Sapiens
ugugcaugcaagaaucgcuagaacccaggaga

SEQ ID NO: 128560 - RNA, 32 nt, Homo Sapiens
gcaggugaccuaaagaauuaaugaccauucag

SEQ ID NO: 128561 - RNA, 32 nt, Homo Sapiens
aaucugaauccacaugaaaacaauggcaacaa

SEQ ID NO: 128562 - RNA, 32 nt, Homo Sapiens
cucuggcggcuccccgcaggccccacucaugc

SEQ ID NO: 128563 - RNA, 32 nt, Homo Sapiens
uucccacggccacugcagucaccccgucugcg

SEQ ID NO: 128564 - RNA, 32 nt, Homo Sapiens
ggguuggaaggggcgggaagggcgcugucuua

SEQ ID NO: 128565 - RNA, 32 nt, Homo Sapiens
ccaggaggagagaagaauuccagugagcagca

SEQ ID NO: 128566 - RNA, 32 nt, Homo Sapiens
uuaguugccugccuguggcugguaagguaaug

SEQ ID NO: 128567 - RNA, 32 nt, Homo Sapiens
ucuggaaaacaucauuaucccauuccccggga

SEQ ID NO: 128568 - RNA, 32 nt, Homo Sapiens
agcaucuguaguaccugguaacuuguuagaaa

SEQ ID NO: 128569 - RNA, 32 nt, Homo Sapiens
uucagcaauuuaagcaguuuguguugcaguac

SEQ ID NO: 128570 - RNA, 32 nt, Homo Sapiens
cgcagggcuggcggaggcuccgcaucgccucu

SEQ ID NO: 128571 - RNA, 32 nt, Homo Sapiens
uucaauuuguuuaaccacuuugcugcuaagau

SEQ ID NO: 128572 - RNA, 32 nt, Homo Sapiens
aguggcauguaggacgugaaagaauaucucaa

SEQ ID NO: 128573 - RNA, 32 nt, Homo Sapiens
ucugcggcgccgcgacaggaagcggcgggcga

SEQ ID NO: 128574 - RNA, 32 nt, Homo Sapiens
ggggcucauuggcagcacuugcagcuugcugg

SEQ ID NO: 128575 - RNA, 32 nt, Homo Sapiens
cuagaagagcucagcggcggcgcgggccgugc

SEQ ID NO: 128576 - RNA, 32 nt, Homo Sapiens
acgcggugggccgccccuccgauugaaaucac

SEQ ID NO: 128577 - RNA, 32 nt, Homo Sapiens
gugccauaauuucuccuuucacugguguugga

SEQ ID NO: 128578 - RNA, 32 nt, Homo Sapiens
ugcagauaguaauauauaaacacacacaauga

SEQ ID NO: 128579 - RNA, 32 nt, Homo Sapiens
gccucaccaaccuucccauacacagucaugcg

SEQ ID NO: 128580 - RNA, 32 nt, Homo Sapiens
gccgacggccgggccccuccccgacaagccuc

SEQ ID NO: 128581 - RNA, 32 nt, Homo Sapiens
ugccccagcccgcgccagacagcccacggauc

SEQ ID NO: 128582 - RNA, 32 nt, Homo Sapiens
caggggcacuuugggauugaccaagaggaaac

SEQ ID NO: 128583 - RNA, 32 nt, Homo Sapiens
ggcggcugccagcugggccgggacccagggcc

SEQ ID NO: 128584 - RNA, 32 nt, Homo Sapiens
ggucccagccccagcucuaccccacgaguccc

SEQ ID NO: 128585 - RNA, 32 nt, Homo Sapiens
gggcaggggguguggcaggagcucccagcacu

SEQ ID NO: 128586 - RNA, 32 nt, Homo Sapiens
ugcucaggaugggaaaauuaucucaccugggc

SEQ ID NO: 128587 - RNA, 32 nt, Homo Sapiens
aggagaauaugacaugcuuaugcuuaccaaga

SEQ ID NO: 128588 - RNA, 32 nt, Homo Sapiens
cccuagcuggaacucagaagguuauuugguua

SEQ ID NO: 128589 - RNA, 32 nt, Homo Sapiens
agcccgacaccuguaaagggucggugcugagg

SEQ ID NO: 128590 - RNA, 32 nt, Homo Sapiens
ccuggugcccccagcccagcccaagacaccag

SEQ ID NO: 128591 - RNA, 32 nt, Homo Sapiens
gcacauacaccugugggaaaacggaccgcucu

SEQ ID NO: 128592 - RNA, 32 nt, Homo Sapiens
gcugcagcgcugccuccgagaccgagaguggg

SEQ ID NO: 128593 - RNA, 32 nt, Homo Sapiens
agcugccaccgccuccuccaucucccggagcu

SEQ ID NO: 128594 - RNA, 32 nt, Homo Sapiens
ucccuucccuggauuucaucacuagugguuga

SEQ ID NO: 128595 - RNA, 32 nt, Homo Sapiens
ccugaggugcgugccucccgggcccucgccag

SEQ ID NO: 128596 - RNA, 32 nt, Homo Sapiens
auggggggauuuuccagaagcuacaugaugug

SEQ ID NO: 128597 - RNA, 32 nt, Homo Sapiens
cuccaugcugaaaaauguguucuaaugcaaca

SEQ ID NO: 128598 - RNA, 32 nt, Homo Sapiens
cacacauagugcuguuuauauaguuuaggagu

SEQ ID NO: 128599 - RNA, 32 nt, Homo Sapiens
gcugguggcaccuuuaccuguguuuugcucgg

SEQ ID NO: 128600 - RNA, 32 nt, Homo Sapiens
aauaggccuauuuauuaauauuuuacagacca

SEQ ID NO: 128601 - RNA, 32 nt, Homo Sapiens
uacuucugccuggccgaaggccacguggcuuc

SEQ ID NO: 128602 - RNA, 32 nt, Homo Sapiens
cauggagggcuuuguuucacaagcuuuucucc

SEQ ID NO: 128603 - RNA, 32 nt, Homo Sapiens
aaauuuacacugagucccacucuucgcuccag

SEQ ID NO: 128604 - RNA, 32 nt, Homo Sapiens
agcucaggcucuuggugacuguggcagcggga

SEQ ID NO: 128605 - RNA, 32 nt, Homo Sapiens
gcuccugcacccccggcccccgugguucccag

SEQ ID NO: 128606 - RNA, 32 nt, Homo Sapiens
agggguuggggacagggccagguagccuccug

SEQ ID NO: 128607 - RNA, 32 nt, Homo Sapiens
ccugcagccccuggccccccagccuuggggcu

SEQ ID NO: 128608 - RNA, 32 nt, Homo Sapiens
ugugcuuuauacauuccuccccguggaggcca

SEQ ID NO: 128609 - RNA, 32 nt, Homo Sapiens
ggggccucugagccuggugggcuuccuggacu

SEQ ID NO: 128610 - RNA, 32 nt, Homo Sapiens
gaacuagggggcugcuggugggaaaugggagc

SEQ ID NO: 128611 - RNA, 32 nt, Homo Sapiens
uuuugggccccgguugggagcaggcuccuggg

SEQ ID NO: 128612 - RNA, 32 nt, Homo Sapiens
aaacaaaaacaaaaaacuaugugaugccucua

SEQ ID NO: 128613 - RNA, 32 nt, Homo Sapiens
gaggaggcauugccagcucuccaggcuguuug

SEQ ID NO: 128614 - RNA, 31 nt, Homo Sapiens
gccaccaugccagcugggggccgggccggga

SEQ ID NO: 128615 - RNA, 32 nt, Homo Sapiens
cacucauuccuucccacccccaguccuguccu

SEQ ID NO: 128616 - RNA, 32 nt, Homo Sapiens
acucacgugucuguggagaugcugguguaaac

SEQ ID NO: 128617 - RNA, 32 nt, Homo Sapiens
acauagaugcccuuugaaaaccaucuaccugg

SEQ ID NO: 128618 - RNA, 32 nt, Homo Sapiens
caguacccacccaaaaggaaaaucuuacaauu

SEQ ID NO: 128619 - RNA, 32 nt, Homo Sapiens
ccgccucuaggcgccggccccggagcccgguc

SEQ ID NO: 128620 - RNA, 32 nt, Homo Sapiens
gccugcugcuuguuuacccuuuggaaacccug

SEQ ID NO: 128621 - RNA, 32 nt, Homo Sapiens
aaccgaauuaaacaucuuaauuuuauauugua

SEQ ID NO: 128622 - RNA, 32 nt, Homo Sapiens
uugcccugagcuuggagcugccaccuggagga

SEQ ID NO: 128623 - RNA, 32 nt, Homo Sapiens
guaaucugaagucugaacuuugaacaccagca

SEQ ID NO: 128624 - RNA, 32 nt, Homo Sapiens
agauccuggucucacaagcccucgguaauuaa

SEQ ID NO: 128625 - RNA, 32 nt, Homo Sapiens
gccugaguccagcccaaggccuuuuauuuugc

SEQ ID NO: 128626 - RNA, 30 nt, Homo Sapiens
cacaagugcaggaugggggaaacuggaaaa

SEQ ID NO: 128627 - RNA, 32 nt, Homo Sapiens
ugaauagguuuuuuuucuucuguuaguuuuug

SEQ ID NO: 128628 - RNA, 32 nt, Homo Sapiens
uuucuguccaucuaugguccugucccgccauc

SEQ ID NO: 128629 - RNA, 32 nt, Homo Sapiens
gcugcaccugccugccuuugccuaaggcggau

SEQ ID NO: 128630 - RNA, 31 nt, Homo Sapiens
gaaguccucaaugagagugaggugguuugag

SEQ ID NO: 128631 - RNA, 32 nt, Homo Sapiens
ucccaagaauccaauggcucaguccuugguga

SEQ ID NO: 128632 - RNA, 32 nt, Homo Sapiens
caguuccuccaagucuauggcaccucccuccc

SEQ ID NO: 128633 - RNA, 32 nt, Homo Sapiens
ucuuaaagugccaacauaugccugcaggguuu

SEQ ID NO: 128634 - RNA, 32 nt, Homo Sapiens
gugggaauuauuauuuaauacaucauuaaugc

SEQ ID NO: 128635 - RNA, 32 nt, Homo Sapiens
cuguccuggugacuugucccucuucuuagugg

SEQ ID NO: 128636 - RNA, 32 nt, Homo Sapiens
ugccguauuucugagugcuuccaugugaaugc

SEQ ID NO: 128637 - RNA, 32 nt, Homo Sapiens
gagggcauuuccccuugcgccuucucccacag

SEQ ID NO: 128638 - RNA, 32 nt, Homo Sapiens
cuaaaguucuggcuguccauuaaccuccaacu

SEQ ID NO: 128639 - RNA, 32 nt, Homo Sapiens
uuacuuccucaauaaaaaguuuuauuuugggc

SEQ ID NO: 128640 - RNA, 32 nt, Homo Sapiens
gaaaacaauuacuacagauauuucauccaccu

SEQ ID NO: 128641 - RNA, 32 nt, Homo Sapiens
ucuccuguuuuaaauauacugggacuuuaaag

SEQ ID NO: 128642 - RNA, 29 nt, Homo Sapiens
ccuugguuuauccaaucucaaaacaucua

SEQ ID NO: 128643 - RNA, 32 nt, Homo Sapiens
aauccucaaaaauagucacaaauauaacaaag

SEQ ID NO: 128644 - RNA, 32 nt, Homo Sapiens
uccuagccuacccgccgcaguacugaucauuc

SEQ ID NO: 128645 - RNA, 32 nt, Homo Sapiens
uaaauccaaagaaauaauuuaucccuuaaaaa

SEQ ID NO: 128646 - RNA, 32 nt, Homo Sapiens
gcaggagaacacugucuuaauauuucuuuaca

SEQ ID NO: 128647 - RNA, 32 nt, Homo Sapiens
cacuuugugggaaagacagaggugggaggauu

SEQ ID NO: 128648 - RNA, 32 nt, Homo Sapiens
gguggcagcuccgcagccuccuccugcaggaa

SEQ ID NO: 128649 - RNA, 32 nt, Homo Sapiens
ugcagcaggaggagcugcaggccgcccacccu

SEQ ID NO: 128650 - RNA, 32 nt, Homo Sapiens
uuagcccuuuaaaggauguuacauaauaacaa

SEQ ID NO: 128651 - RNA, 32 nt, Homo Sapiens
cuuuuugcaaaaaaccacuggccaaauccgaa

SEQ ID NO: 128652 - RNA, 32 nt, Homo Sapiens
ugacucaauggcuuguugaaucucagcaguuc

SEQ ID NO: 128653 - RNA, 29 nt, Homo Sapiens
caguguguauguaugugcgcauauggaca

SEQ ID NO: 128654 - RNA, 32 nt, Homo Sapiens
guggcuucucgcugcgcagccuccagggcccg

SEQ ID NO: 128655 - RNA, 32 nt, Homo Sapiens
acuguggaagaugaugguugcauguuucuagu

SEQ ID NO: 128656 - RNA, 32 nt, Homo Sapiens
accaugccuggcuaauuuuuuauuuuuuaaau

SEQ ID NO: 128657 - RNA, 32 nt, Homo Sapiens
gcagagaaccccucguuguccuggacaccaca

SEQ ID NO: 128658 - RNA, 32 nt, Homo Sapiens
uguggcacagugaugaugucaaaaauauuaua

SEQ ID NO: 128659 - RNA, 32 nt, Homo Sapiens
cuuuaaacaucuuuaaacauuaacuaagggcu

SEQ ID NO: 128660 - RNA, 32 nt, Homo Sapiens
uaacugagggcuuuaaaccuggaggcucuucc

SEQ ID NO: 128661 - RNA, 32 nt, Homo Sapiens
cgcauuucaucgaucuugagacacggcuuuug

SEQ ID NO: 128662 - RNA, 32 nt, Homo Sapiens
gugcaggggcagaggagauaggggauccuugc

SEQ ID NO: 128663 - RNA, 32 nt, Homo Sapiens
cuguggggguaagggcugccgcgcucuggccu

SEQ ID NO: 128664 - RNA, 32 nt, Homo Sapiens
auuauauucacuuggaaaacauaucgcuuagg

SEQ ID NO: 128665 - RNA, 32 nt, Homo Sapiens
aggagaggcggcaggaggagcaggagaggcug

SEQ ID NO: 128666 - RNA, 27 nt, Homo Sapiens
ccugggccacuccucagcccccaacuc

SEQ ID NO: 128667 - RNA, 32 nt, Homo Sapiens
gggaagcccaagcccguucucccggccaaagu

SEQ ID NO: 128668 - RNA, 32 nt, Homo Sapiens
acaggagggaggaggguucgcaccauccagcu

SEQ ID NO: 128669 - RNA, 31 nt, Homo Sapiens
gaggugcagcgcagccggccccaccgcagcu

SEQ ID NO: 128670 - RNA, 32 nt, Homo Sapiens
cuuuuaaaauuugagggucuggaccaaaagaa

SEQ ID NO: 128671 - RNA, 32 nt, Homo Sapiens
ccgucugcuggcgccccggcccucgcggaggu

SEQ ID NO: 128672 - RNA, 32 nt, Homo Sapiens
gcagucccugaacacuuacuugggguccucau

SEQ ID NO: 128673 - RNA, 32 nt, Homo Sapiens
uaagaaacccucacucucuacagguuugggua

SEQ ID NO: 128674 - RNA, 32 nt, Homo Sapiens
agacaaaauuuaaugcacaacagugaguugga

SEQ ID NO: 128675 - RNA, 32 nt, Homo Sapiens
gauuuugauaaucacagucuuaaaauacuagg

SEQ ID NO: 128676 - RNA, 32 nt, Homo Sapiens
agcaacaaagauugagaagccauguacucaag

SEQ ID NO: 128677 - RNA, 32 nt, Homo Sapiens
caaagugcuaggguuuauauacacuuaucgua

SEQ ID NO: 128678 - RNA, 32 nt, Homo Sapiens
ccuagaaugagaaguauuugcauaagaaugua

SEQ ID NO: 128679 - RNA, 32 nt, Homo Sapiens
uaauaguaaaaugauggcguguauuuccccug

SEQ ID NO: 128680 - RNA, 32 nt, Homo Sapiens
auauucagcuggggggaaauagacugaguuug

SEQ ID NO: 128681 - RNA, 32 nt, Homo Sapiens
cacaaaagguaauugcaaguuaaggcuuuauu

SEQ ID NO: 128682 - RNA, 32 nt, Homo Sapiens
gcccagcgcgcccaccugaggaggcggcgggg

SEQ ID NO: 128683 - RNA, 32 nt, Homo Sapiens
acggauucgccaucgugaguuccaggauuuuc

SEQ ID NO: 128684 - RNA, 32 nt, Homo Sapiens
aaaacaugcagaaagcacagaaaggaaaacca

SEQ ID NO: 128685 - RNA, 32 nt, Homo Sapiens
uuauaacgaauuaggauaaauuuuauguuaug

SEQ ID NO: 128686 - RNA, 32 nt, Homo Sapiens
uauucaaggucuuuggcaagaaucccaggcuu

SEQ ID NO: 128687 - RNA, 32 nt, Homo Sapiens
gccaaauuuuugcugcuuaggucaucucaagg

SEQ ID NO: 128688 - RNA, 32 nt, Homo Sapiens
gugugugaaauacauagaauucccaaauaguu

SEQ ID NO: 128689 - RNA, 32 nt, Homo Sapiens
ccaacagauccuguuauuuccucugcaggaua

SEQ ID NO: 128690 - RNA, 32 nt, Homo Sapiens
ucacccacaaaaccuaaaauauuugacuggau

SEQ ID NO: 128691 - RNA, 32 nt, Homo Sapiens
cugaagggacacagcucuucucuccuucucuc

SEQ ID NO: 128692 - RNA, 32 nt, Homo Sapiens
auaucuguauaauggaauauuaagcaauauua

SEQ ID NO: 128693 - RNA, 32 nt, Homo Sapiens
acaagauguaggcuccagcuccccucagaccu

SEQ ID NO: 128694 - RNA, 32 nt, Homo Sapiens
gggguacuggucucuaauaaacaucagcugcu

SEQ ID NO: 128695 - RNA, 32 nt, Homo Sapiens
uucuuuaugcuucaggguagagggauucccuu

SEQ ID NO: 128696 - RNA, 32 nt, Homo Sapiens
cccaucaauaaauuauuauauauuuucuacuu

SEQ ID NO: 128697 - RNA, 32 nt, Homo Sapiens
cuucucuauuuuuuccugauuguggcugagag

SEQ ID NO: 128698 - RNA, 32 nt, Homo Sapiens
uucaaaauauuuacagaaaaaagugucaguga

SEQ ID NO: 128699 - RNA, 31 nt, Homo Sapiens
aacugcacaaauuguagagcauuuguguuug

SEQ ID NO: 128700 - RNA, 32 nt, Homo Sapiens
cgcacugugagcuggcuguggugucugggugu

SEQ ID NO: 128701 - RNA, 29 nt, Homo Sapiens
cagaaucagggacagauggcgcccgguga

SEQ ID NO: 128702 - RNA, 32 nt, Homo Sapiens
ucuggguauggucuuuccugaggccaaauccu

SEQ ID NO: 128703 - RNA, 32 nt, Homo Sapiens
auugauggacauuuggguugguuccaagucuu

SEQ ID NO: 128704 - RNA, 32 nt, Homo Sapiens
cugcacaggaccagcccagugagaagcugccu

SEQ ID NO: 128705 - RNA, 32 nt, Homo Sapiens
aauucagauaaaauuugcuaauguucugcuau

SEQ ID NO: 128706 - RNA, 32 nt, Homo Sapiens
ugaacccacuggcaucaccugaugccacuaau

SEQ ID NO: 128707 - RNA, 32 nt, Homo Sapiens
auaaaacugguuaugacuugauccaaguguuu

SEQ ID NO: 128708 - RNA, 32 nt, Homo Sapiens
guuguagaaggagccuuguugguggagagugg

SEQ ID NO: 128709 - RNA, 32 nt, Homo Sapiens
uuguuuucuugaauuucuuuuaucauuguuuu

SEQ ID NO: 128710 - RNA, 32 nt, Homo Sapiens
aauuuuaauauaaagaaauguggccaugcuuu

SEQ ID NO: 128711 - RNA, 32 nt, Homo Sapiens
gaugaacgugugauugcugagagacgaaguca

SEQ ID NO: 128712 - RNA, 32 nt, Homo Sapiens
uggccugcugggugcuggucuacuucuguguc

SEQ ID NO: 128713 - RNA, 32 nt, Homo Sapiens
agcaggucuccuuuuucuugugcugcuuggac

SEQ ID NO: 128714 - RNA, 32 nt, Homo Sapiens
agccuagccaaguugacacauaaaauuaacca

SEQ ID NO: 128715 - RNA, 32 nt, Homo Sapiens
uuaagugugaaugcaagugauuaaugaauaca

SEQ ID NO: 128716 - RNA, 32 nt, Homo Sapiens
uaaguaaggcaugucacuguguccuucaguaa

SEQ ID NO: 128717 - RNA, 32 nt, Homo Sapiens
caaacuccgggcgggagcgcuuucggugggcc

SEQ ID NO: 128718 - RNA, 32 nt, Homo Sapiens
ucauaaugaaaguuuuauagguauuaaaaaug

SEQ ID NO: 128719 - RNA, 32 nt, Homo Sapiens
accccgcccaaccguggccugguccggccccu

SEQ ID NO: 128720 - RNA, 32 nt, Homo Sapiens
cgggggcgaaagggcuccuugcgggcuccggg

SEQ ID NO: 128721 - RNA, 32 nt, Homo Sapiens
ccaucugugauuugcaacaggucuuccacugg

SEQ ID NO: 128722 - RNA, 31 nt, Homo Sapiens
uacacguguaacaagaaaguggucuguggau

SEQ ID NO: 128723 - RNA, 32 nt, Homo Sapiens
ugaauccucagggcaccccggcaggauggacg

SEQ ID NO: 128724 - RNA, 32 nt, Homo Sapiens
uuaaaacuauggcuguuaaauaagcuuuuucc

SEQ ID NO: 128725 - RNA, 31 nt, Homo Sapiens
caggggcggggcgccgcaggaggccgggacu

SEQ ID NO: 128726 - RNA, 32 nt, Homo Sapiens
auuugcacagaccgucgucuucccuccagucu

SEQ ID NO: 128727 - RNA, 32 nt, Homo Sapiens
acucucaaauauaggcuucugguaacuuugga

SEQ ID NO: 128728 - RNA, 32 nt, Homo Sapiens
ugaacgaaaugaaugauuacgcagggcagcau

SEQ ID NO: 128729 - RNA, 32 nt, Homo Sapiens
cuggccucacugaguggacaagagcugauggg

SEQ ID NO: 128730 - RNA, 32 nt, Homo Sapiens
cuugaccuuguacaguauaguaaaaauacccu

SEQ ID NO: 128731 - RNA, 32 nt, Homo Sapiens
caaauccugcuucuguuuuauguuucagugua

SEQ ID NO: 128732 - RNA, 32 nt, Homo Sapiens
accaaaagugaggucuucuacccaggggagac

SEQ ID NO: 128733 - RNA, 32 nt, Homo Sapiens
aggggcacugcuugcuuggcccgguccccucc

SEQ ID NO: 128734 - RNA, 32 nt, Homo Sapiens
cugcagcuuauagaagcagggaauuuaaugga

SEQ ID NO: 128735 - RNA, 32 nt, Homo Sapiens
ucgcuggccccugggaacacggugcccugacc

SEQ ID NO: 128736 - RNA, 32 nt, Homo Sapiens
uccuaucauucagaucuuccuuccucccaagu

SEQ ID NO: 128737 - RNA, 32 nt, Homo Sapiens
uccccguccauuauuccuugcacuauaacaac

SEQ ID NO: 128738 - RNA, 32 nt, Homo Sapiens
caacucccugaaccucaguuuccucaucugca

SEQ ID NO: 128739 - RNA, 32 nt, Homo Sapiens
uaugcucuauagagaauauaucuuuuauauau

SEQ ID NO: 128740 - RNA, 32 nt, Homo Sapiens
gugggugggggaggaagaguaaacacagugcu

SEQ ID NO: 128741 - RNA, 32 nt, Homo Sapiens
acaggaggagcagcugcagggggcagcgucgu

SEQ ID NO: 128742 - RNA, 32 nt, Homo Sapiens
uuaauguuuauuauuuacaucacuuugugaau

SEQ ID NO: 128743 - RNA, 32 nt, Homo Sapiens
uuuauacauguuucuuuuuauuuuaaaaagcu

SEQ ID NO: 128744 - RNA, 32 nt, Homo Sapiens
gguuucccauaccccaggaugugagccucuuu

SEQ ID NO: 128745 - RNA, 32 nt, Homo Sapiens
agagagauccugauaccucuguggggacugug

SEQ ID NO: 128746 - RNA, 32 nt, Homo Sapiens
agagcauaucccacaagaggccccacagggag

SEQ ID NO: 128747 - RNA, 30 nt, Homo Sapiens
aauaaccugggaguggaucauugaaauuga

SEQ ID NO: 128748 - RNA, 32 nt, Homo Sapiens
cuguaaggcccauuuugaaccguaggaacuga

SEQ ID NO: 128749 - RNA, 32 nt, Homo Sapiens
uuaugucccaugagauguuuaagcaaaaggga

SEQ ID NO: 128750 - RNA, 32 nt, Homo Sapiens
gucacaccuaccaucaaggucuacacaucuua

SEQ ID NO: 128751 - RNA, 32 nt, Homo Sapiens
ugcagccucgggccacagcggcagccuuguuu

SEQ ID NO: 128752 - RNA, 32 nt, Homo Sapiens
uuucaaggggagaggaguagugacaagucgug

SEQ ID NO: 128753 - RNA, 32 nt, Homo Sapiens
cugcgagucucagaccaaaaucaauagccggu

SEQ ID NO: 128754 - RNA, 32 nt, Homo Sapiens
gcagagcucaggugggaaugcuugcuccccac

SEQ ID NO: 128755 - RNA, 32 nt, Homo Sapiens
acaggccagguggugggcauucucucuccaag

SEQ ID NO: 128756 - RNA, 32 nt, Homo Sapiens
aaaucagaaauaggaagauuaaaaccacagaa

SEQ ID NO: 128757 - RNA, 32 nt, Homo Sapiens
uaucacugaacccaaguguuuauuuaaauguc

SEQ ID NO: 128758 - RNA, 28 nt, Homo Sapiens
auugguaugacuugcaggaugauguaca

SEQ ID NO: 128759 - RNA, 32 nt, Homo Sapiens
caacugagaaggaaaaaggagcccagcaagaa

SEQ ID NO: 128760 - RNA, 32 nt, Homo Sapiens
gauguggaaaccgaggcguaggaaggaagccc

SEQ ID NO: 128761 - RNA, 32 nt, Homo Sapiens
cucuucgauguaauaaagucagcuauuagaua

SEQ ID NO: 128762 - RNA, 32 nt, Homo Sapiens
cuuuuccuaacaugcaccuugcucccaauggu

SEQ ID NO: 128763 - RNA, 32 nt, Homo Sapiens
gguagcaaaagcuagaguauugcuguggcgau

SEQ ID NO: 128764 - RNA, 32 nt, Homo Sapiens
ucauuauuugugucuucaguguuggcuuguuu

SEQ ID NO: 128765 - RNA, 32 nt, Homo Sapiens
gcuuaaagcaaauugcaaaacuggcuugauuu

SEQ ID NO: 128766 - RNA, 32 nt, Homo Sapiens
uucugcaaaaauagccccaaacugcaauucca

SEQ ID NO: 128767 - RNA, 32 nt, Homo Sapiens
gcccagauaccauuuuaacuggcccagcucau

SEQ ID NO: 128768 - RNA, 32 nt, Homo Sapiens
guuugucauuguucuucaguucuuuggguaau

SEQ ID NO: 128769 - RNA, 32 nt, Homo Sapiens
gcuuccagcuccuaaaacaccuggacauuccc

SEQ ID NO: 128770 - RNA, 32 nt, Homo Sapiens
cacauauuaacuaccuuagcaagaugaaaagc

SEQ ID NO: 128771 - RNA, 31 nt, Homo Sapiens
cugcgagcgccugccccaugcgccgccgccu

SEQ ID NO: 128772 - RNA, 32 nt, Homo Sapiens
gacgagagaggcuggggugguggcggccccug

SEQ ID NO: 128773 - RNA, 32 nt, Homo Sapiens
guuugaaauuuuacaaaaaugcuuacaaucca

SEQ ID NO: 128774 - RNA, 32 nt, Homo Sapiens
guggggcggcucuggcggcugcggggcgcagg

SEQ ID NO: 128775 - RNA, 32 nt, Homo Sapiens
ucucaguaguggggagcauguugggugugagg

SEQ ID NO: 128776 - RNA, 32 nt, Homo Sapiens
gucccuacuacagucgucaguacucuguggcu

SEQ ID NO: 128777 - RNA, 32 nt, Homo Sapiens
ugggccugccucggacgccgccggugucgcgg

SEQ ID NO: 128778 - RNA, 32 nt, Homo Sapiens
ggaauuaugagguagagguggaggcggagccg

SEQ ID NO: 128779 - RNA, 32 nt, Homo Sapiens
ccgcccguccugggcccggccaggccccgcuu

SEQ ID NO: 128780 - RNA, 32 nt, Homo Sapiens
gaaaauacucaaucuuuuaaauuuugcacuua

SEQ ID NO: 128781 - RNA, 32 nt, Homo Sapiens
agccccgauucacaucucuccuccauuuuucc

SEQ ID NO: 128782 - RNA, 32 nt, Homo Sapiens
auauagaauucuuuuuuuuuuaaagaaggaau

SEQ ID NO: 128783 - RNA, 27 nt, Homo Sapiens
cgccgcccuuccuucagccuccgaagg

SEQ ID NO: 128784 - RNA, 32 nt, Homo Sapiens
aucguaggucaggccaccugcuuuugucaaag

SEQ ID NO: 128785 - RNA, 32 nt, Homo Sapiens
auauagcuuguauauuuguccuuucccuuuga

SEQ ID NO: 128786 - RNA, 32 nt, Homo Sapiens
ccucccuuucccacaaaagaaaacagaaagga

SEQ ID NO: 128787 - RNA, 32 nt, Homo Sapiens
cccaaccgcggcggccgagauccacugagggc

SEQ ID NO: 128788 - RNA, 32 nt, Homo Sapiens
cuacuuugaagaaguggucaauggguuguugc

SEQ ID NO: 128789 - RNA, 32 nt, Homo Sapiens
caagugccuccuacugucaucuccauucagcc

SEQ ID NO: 128790 - RNA, 32 nt, Homo Sapiens
guugcucuucuuaucaucucagaauguuugcu

SEQ ID NO: 128791 - RNA, 32 nt, Homo Sapiens
ugaccuuauuuaaauuuuuuuauguugaaauc

SEQ ID NO: 128792 - RNA, 32 nt, Homo Sapiens
aacucaacuucccacaccaccaugucucucac

SEQ ID NO: 128793 - RNA, 32 nt, Homo Sapiens
aguuuuguauaaaaauguaaggaagcguuguu

SEQ ID NO: 128794 - RNA, 32 nt, Homo Sapiens
gacaagucgggcaccaugugccugcaggaugg

SEQ ID NO: 128795 - RNA, 32 nt, Homo Sapiens
cgcuaggauugugaaaauccacacugggagug

SEQ ID NO: 128796 - RNA, 32 nt, Homo Sapiens
auacuccugguuugauuugauuagcauauuaa

SEQ ID NO: 128797 - RNA, 32 nt, Homo Sapiens
gccucaccccucuggagggccggaggcaggag

SEQ ID NO: 128798 - RNA, 32 nt, Homo Sapiens
aacagccagcaucuuugcuuaaaaacccaagg

SEQ ID NO: 128799 - RNA, 32 nt, Homo Sapiens
uugaccuccuggguguccccagcccuccagcc

SEQ ID NO: 128800 - RNA, 32 nt, Homo Sapiens
guaucauuaauuagggcugcugugauauuguc

SEQ ID NO: 128801 - RNA, 32 nt, Homo Sapiens
ggugguccgggcggccucacaucggcggcgcc

SEQ ID NO: 128802 - RNA, 32 nt, Homo Sapiens
gugccugagguccuaaaacgauugcagagccu

SEQ ID NO: 128803 - RNA, 32 nt, Homo Sapiens
ucagugucucugugguuucaccagcuuagcuu

SEQ ID NO: 128804 - RNA, 32 nt, Homo Sapiens
uccaccaccacagcacaccggugcuggccaca

SEQ ID NO: 128805 - RNA, 32 nt, Homo Sapiens
cacacacaaacacacacacacacacacacucu

SEQ ID NO: 128806 - RNA, 27 nt, Homo Sapiens
cucacugcagucuucagccuccccagu

SEQ ID NO: 128807 - RNA, 28 nt, Homo Sapiens
aagugcagagauuaacauuucacaaaug

SEQ ID NO: 128808 - RNA, 32 nt, Homo Sapiens
ucgagguccucacaguugccagcccugcagcc

SEQ ID NO: 128809 - RNA, 32 nt, Homo Sapiens
uucauaaggaaguaauauauagauaagguagg

SEQ ID NO: 128810 - RNA, 32 nt, Homo Sapiens
aaaugaagcaaaaguuuagcauccucucaugu

SEQ ID NO: 128811 - RNA, 32 nt, Homo Sapiens
agugucugcccuggugcuguaccugccuuguu

SEQ ID NO: 128812 - RNA, 32 nt, Homo Sapiens
aggaaaucuggccgccgccgccgcgagcgcuc

SEQ ID NO: 128813 - RNA, 32 nt, Homo Sapiens
cuaaguauuuuugguaccucugauguagcagc

SEQ ID NO: 128814 - RNA, 32 nt, Homo Sapiens
auuuuccauaaagguaacaaagggcagcucag

SEQ ID NO: 128815 - RNA, 32 nt, Homo Sapiens
caucagagcugcccggccccccucuacuggcc

SEQ ID NO: 128816 - RNA, 32 nt, Homo Sapiens
aguguguaccauuuuuucuguuuggaguaaga

SEQ ID NO: 128817 - RNA, 32 nt, Homo Sapiens
ggagcucccagggcccaaggaggagaaugcug

SEQ ID NO: 128818 - RNA, 32 nt, Homo Sapiens
gugcgaugcagcuggcgcuaggauccuccuca

SEQ ID NO: 128819 - RNA, 32 nt, Homo Sapiens
ucccugcggagugcgcugcgccgcccagcccu

SEQ ID NO: 128820 - RNA, 32 nt, Homo Sapiens
ggggggugggagaggggaccuuaaaaugugua

SEQ ID NO: 128821 - RNA, 32 nt, Homo Sapiens
ccuccuccgccgccggacacgcagccgcagcc

SEQ ID NO: 128822 - RNA, 32 nt, Homo Sapiens
ccuuggcauuguuauaggucuuuuucuuggcu

SEQ ID NO: 128823 - RNA, 32 nt, Homo Sapiens
uuucuaauaaauuuauauauuuguaaagaaaa

SEQ ID NO: 128824 - RNA, 32 nt, Homo Sapiens
ucuucuucgucuucuuuuuuuucuaaacgaaa

SEQ ID NO: 128825 - RNA, 32 nt, Homo Sapiens
uguccuguuucauuaaggaagaaauuggggcu

SEQ ID NO: 128826 - RNA, 32 nt, Homo Sapiens
gucuccucccaccagacacuugccuuauuucu

SEQ ID NO: 128827 - RNA, 32 nt, Homo Sapiens
uaggaaaucuugaugcuuucuucuuucucuuu

SEQ ID NO: 128828 - RNA, 32 nt, Homo Sapiens
ggaccggcucugcgggcgccgccaggcccaga

SEQ ID NO: 128829 - RNA, 32 nt, Homo Sapiens
cucaguuuccccuguucuuaaguguugaauac

SEQ ID NO: 128830 - RNA, 32 nt, Homo Sapiens
aauuagccaggcaugauggugcaugccuuuua

SEQ ID NO: 128831 - RNA, 32 nt, Homo Sapiens
acauugagguaacauccuuuucucugacaguc

SEQ ID NO: 128832 - RNA, 32 nt, Homo Sapiens
aggcccuuugcacugcaucacccuggugccca

SEQ ID NO: 128833 - RNA, 32 nt, Homo Sapiens
ccucgcucucauccagcccgcgaggagugcgg

SEQ ID NO: 128834 - RNA, 32 nt, Homo Sapiens
guauauagaaugucuguauguauuuuacuuau

SEQ ID NO: 128835 - RNA, 32 nt, Homo Sapiens
ggauccugcauguuaauggguuuaauggagag

SEQ ID NO: 128836 - RNA, 32 nt, Homo Sapiens
ugaaggacacaagcuguagucuuuucgcuggg

SEQ ID NO: 128837 - RNA, 32 nt, Homo Sapiens
ccuggcuccccuccccuccggagcucgcgggg

SEQ ID NO: 128838 - RNA, 32 nt, Homo Sapiens
accgugcucccucgggaccugcucuggauucc

SEQ ID NO: 128839 - RNA, 32 nt, Homo Sapiens
uuuccucauuuucuauuaugaggccugaggaa

SEQ ID NO: 128840 - RNA, 32 nt, Homo Sapiens
ugucaagaucauagcugacuuuaaaaacaguu

SEQ ID NO: 128841 - RNA, 31 nt, Homo Sapiens
uuuauugucaggagaaagaacacucugaaag

SEQ ID NO: 128842 - RNA, 32 nt, Homo Sapiens
ggggcuggagggcaggggaggggaugauguca

SEQ ID NO: 128843 - RNA, 32 nt, Homo Sapiens
aaauaacuaauguguuugauaauuaguuuagu

SEQ ID NO: 128844 - RNA, 32 nt, Homo Sapiens
cuacccacggccccggccccgcaccgggacac

SEQ ID NO: 128845 - RNA, 32 nt, Homo Sapiens
cccggagcugaggggacggucuucggcuccuc

SEQ ID NO: 128846 - RNA, 32 nt, Homo Sapiens
uaacuauguacaauauuuuaagcauuacucuu

SEQ ID NO: 128847 - RNA, 32 nt, Homo Sapiens
aaagcauauuaaaauaucugcuccuuaauuuu

SEQ ID NO: 128848 - RNA, 32 nt, Homo Sapiens
ccuauuucacuccagcagcagccagggccugc

SEQ ID NO: 128849 - RNA, 32 nt, Homo Sapiens
cgcccaguccgagcccccggcgcgccugaagu

SEQ ID NO: 128850 - RNA, 32 nt, Homo Sapiens
uugaucagugacacaccucuccccucaaccuu

SEQ ID NO: 128851 - RNA, 32 nt, Homo Sapiens
cggguggcgggggugaguggggccagcggggc

SEQ ID NO: 128852 - RNA, 32 nt, Homo Sapiens
auaaacugcuccaaaccaacauggaguaaaga

SEQ ID NO: 128853 - RNA, 32 nt, Homo Sapiens
ggguguuguuuacuucuucaguuuuuaaaaua

SEQ ID NO: 128854 - RNA, 32 nt, Homo Sapiens
accacuuguccaauaaaguacaucccagacgc

SEQ ID NO: 128855 - RNA, 32 nt, Homo Sapiens
agccggcaacgcuugcuauuuauuuuacaaac

SEQ ID NO: 128856 - RNA, 32 nt, Homo Sapiens
acuuuauuuucaucauaugauuucaauucucu

SEQ ID NO: 128857 - RNA, 32 nt, Homo Sapiens
ggcacgaggggagggggcaguugggcggggau

SEQ ID NO: 128858 - RNA, 32 nt, Homo Sapiens
uaacccaaguuugcuugucuguuuccuaauuc

SEQ ID NO: 128859 - RNA, 32 nt, Homo Sapiens
auggaaaacaauucaauuuuaauuuucugcuc

SEQ ID NO: 128860 - RNA, 32 nt, Homo Sapiens
gccacccugugcuaucugaaaugaccucaaua

SEQ ID NO: 128861 - RNA, 32 nt, Homo Sapiens
uaaaaccucuggaagcagcaucaggacagcag

SEQ ID NO: 128862 - RNA, 32 nt, Homo Sapiens
cagggcggguccagcccuugcuugggaggacu

SEQ ID NO: 128863 - RNA, 32 nt, Homo Sapiens
ggccugcgucuuccucagugcucagcuggagg

SEQ ID NO: 128864 - RNA, 32 nt, Homo Sapiens
ccuccggguuugcgguggaggacgcugaggcc

SEQ ID NO: 128865 - RNA, 32 nt, Homo Sapiens
uggagggcacuaggccagcaggucagaguagg

SEQ ID NO: 128866 - RNA, 32 nt, Homo Sapiens
agucucugaguuucucucuccuccugccaucc

SEQ ID NO: 128867 - RNA, 32 nt, Homo Sapiens
acacgcuggcggggagagacgcagcagagcuc

SEQ ID NO: 128868 - RNA, 32 nt, Homo Sapiens
caggagcccaacccuggcaucgaguuugaguu

SEQ ID NO: 128869 - RNA, 32 nt, Homo Sapiens
gaacuggauuucuggaggaaaaucacucguuu

SEQ ID NO: 128870 - RNA, 32 nt, Homo Sapiens
agcuugagaugacugcgcuuccugcacgcguu

SEQ ID NO: 128871 - RNA, 32 nt, Homo Sapiens
caccagaaauauuauuuuuuuaauacacagaa

SEQ ID NO: 128872 - RNA, 32 nt, Homo Sapiens
gcaccugcuccccaagcuccagcagcuggacg

SEQ ID NO: 128873 - RNA, 32 nt, Homo Sapiens
acugugauggcacaacugcauuucagcccggg

SEQ ID NO: 128874 - RNA, 32 nt, Homo Sapiens
uuacauuuacacugugauacaaucaguugcau

SEQ ID NO: 128875 - RNA, 32 nt, Homo Sapiens
ugguuugauauugauuuuauaaucucuguaaa

SEQ ID NO: 128876 - RNA, 32 nt, Homo Sapiens
auuccuaugaugaaauuuuaaauuaaugggca

SEQ ID NO: 128877 - RNA, 32 nt, Homo Sapiens
acauaagauaauuuauacuggagcaaaaccuu

SEQ ID NO: 128878 - RNA, 32 nt, Homo Sapiens
uaacuuuguaaauaaccauaacuaugaauagg

SEQ ID NO: 128879 - RNA, 32 nt, Homo Sapiens
agccaaugacaaacagagcauauugaaaugaa

SEQ ID NO: 128880 - RNA, 32 nt, Homo Sapiens
gcugaaaaugacugaauauaaacuugugguag

SEQ ID NO: 128881 - RNA, 32 nt, Homo Sapiens
gcaaagggcccguguuucuguugcgggaagcu

SEQ ID NO: 128882 - RNA, 32 nt, Homo Sapiens
aagcaucugcaaucccaguccugagcuggacu

SEQ ID NO: 128883 - RNA, 32 nt, Homo Sapiens
uaugaaugugacucauuguuugucuucccauc

SEQ ID NO: 128884 - RNA, 32 nt, Homo Sapiens
cgaacuuccagaaaauuaacauuugaacuuag

SEQ ID NO: 128885 - RNA, 32 nt, Homo Sapiens
cgaaggacccauccccaucucaucucaugcuu

SEQ ID NO: 128886 - RNA, 32 nt, Homo Sapiens
cagaccuuacucaggggauguuuaccuggugc

SEQ ID NO: 128887 - RNA, 32 nt, Homo Sapiens
aaaggggggucuuuuuggaggccgccaucuga

SEQ ID NO: 128888 - RNA, 27 nt, Homo Sapiens
uaucccucucuccucagccccuggcaa

SEQ ID NO: 128889 - RNA, 31 nt, Homo Sapiens
ucagagugucccuuuccagugcuguggcauu

SEQ ID NO: 128890 - RNA, 32 nt, Homo Sapiens
agaagaucaggggacaugguuguucacauuug

SEQ ID NO: 128891 - RNA, 32 nt, Homo Sapiens
ggccacacaaccccaaaccaaggucacucccc

SEQ ID NO: 128892 - RNA, 32 nt, Homo Sapiens
uauucugauaauuggcacuggaucacaaaaug

SEQ ID NO: 128893 - RNA, 32 nt, Homo Sapiens
gugagcagaauucaacguguaccgcugccgug

SEQ ID NO: 128894 - RNA, 32 nt, Homo Sapiens
cacauauacacacagccugagggcccucccca

SEQ ID NO: 128895 - RNA, 32 nt, Homo Sapiens
cugccuggcagucuugaacuccugcuauuauc

SEQ ID NO: 128896 - RNA, 28 nt, Homo Sapiens
ucuaggaggcggccgcucgagagccaug

SEQ ID NO: 128897 - RNA, 32 nt, Homo Sapiens
aacuaaucaaaaucuuauaugaauauuuugaa

SEQ ID NO: 128898 - RNA, 32 nt, Homo Sapiens
aggucagcuauuuccaggugaagugcuuaugg

SEQ ID NO: 128899 - RNA, 32 nt, Homo Sapiens
uguuauacaucaauuuaaaaaacaaguaaaua

SEQ ID NO: 128900 - RNA, 32 nt, Homo Sapiens
ugacugauaaaacucaaauagcaguccccagu

SEQ ID NO: 128901 - RNA, 32 nt, Homo Sapiens
auuuggcuguuucucucuuguucucagacaau

SEQ ID NO: 128902 - RNA, 32 nt, Homo Sapiens
caagggccccaguguuaaugucuuagauuuuc

SEQ ID NO: 128903 - RNA, 32 nt, Homo Sapiens
augaagacgcauuguuagaaauccauuuggcu

SEQ ID NO: 128904 - RNA, 32 nt, Homo Sapiens
aggcgcgcaaugaacaacuccaggcgcgccgc

SEQ ID NO: 128905 - RNA, 32 nt, Homo Sapiens
ucuagagaacuaagcaugaugcauauuauagg

SEQ ID NO: 128906 - RNA, 32 nt, Homo Sapiens
uuuccuuccaucuccuucucuccacccgcugg

SEQ ID NO: 128907 - RNA, 32 nt, Homo Sapiens
uuucuuacuggacagcagcaucuuugguucaa

SEQ ID NO: 128908 - RNA, 32 nt, Homo Sapiens
ucguuguagucuuuuugcccaaggcuguugug

SEQ ID NO: 128909 - RNA, 32 nt, Homo Sapiens
uuugucagauaaugcuuuuuuauguguuuuua

SEQ ID NO: 128910 - RNA, 32 nt, Homo Sapiens
aaacauuugaguuuuguugaaaagauggaguu

SEQ ID NO: 128911 - RNA, 32 nt, Homo Sapiens
guucuuaaauguuuauacuguauuucaaagaa

SEQ ID NO: 128912 - RNA, 32 nt, Homo Sapiens
gggaauuagcuaaaugaugcaauaaaccuguu

SEQ ID NO: 128913 - RNA, 32 nt, Homo Sapiens
acccaugucaugccagaggagccauaccugca

SEQ ID NO: 128914 - RNA, 32 nt, Homo Sapiens
agaagucacucaaaaguaacuccaucagcauu

SEQ ID NO: 128915 - RNA, 32 nt, Homo Sapiens
uuggcucucuccucacuaacacccgagaagcc

SEQ ID NO: 128916 - RNA, 32 nt, Homo Sapiens
cuucggcugcacccagccccagccccaucccc

SEQ ID NO: 128917 - RNA, 32 nt, Homo Sapiens
ugguagcugaacucaagaugauguggggcuaa

SEQ ID NO: 128918 - RNA, 32 nt, Homo Sapiens
cagggcgacugucauuagcuuccuggacggga

SEQ ID NO: 128919 - RNA, 32 nt, Homo Sapiens
auucuggggaauuuauauuugaauugaggcuu

SEQ ID NO: 128920 - RNA, 32 nt, Homo Sapiens
cacaagaggagcacaggcagggguguuggugu

SEQ ID NO: 128921 - RNA, 32 nt, Homo Sapiens
uucauuucccccugaaaggugagaaagugacu

SEQ ID NO: 128922 - RNA, 32 nt, Homo Sapiens
auugaacaauacaaauaacaaacaagaaagac

SEQ ID NO: 128923 - RNA, 32 nt, Homo Sapiens
aguuacuagagucuaccccaucgccagucguc

SEQ ID NO: 128924 - RNA, 32 nt, Homo Sapiens
ucuuguccugggucuuugucuugaagauccua

SEQ ID NO: 128925 - RNA, 32 nt, Homo Sapiens
acaacuggaaugugggggcguucagggcccug

SEQ ID NO: 128926 - RNA, 32 nt, Homo Sapiens
gccgccggccagcagagcgaggugcugccggc

SEQ ID NO: 128927 - RNA, 32 nt, Homo Sapiens
acacguauacacaacauuacugaaagaacccu

SEQ ID NO: 128928 - RNA, 32 nt, Homo Sapiens
ucggggagacuggcagagugauggcugcaggc

SEQ ID NO: 128929 - RNA, 32 nt, Homo Sapiens
agauucacugguguggcaaguugucucucaga

SEQ ID NO: 128930 - RNA, 32 nt, Homo Sapiens
aauucgcagcggggcacugacuuuacacucgu

SEQ ID NO: 128931 - RNA, 32 nt, Homo Sapiens
ccccugcugauaagagcagccauuaccugcca

SEQ ID NO: 128932 - RNA, 32 nt, Homo Sapiens
cgcacgccacccgcccgccgccugccagagcu

SEQ ID NO: 128933 - RNA, 32 nt, Homo Sapiens
ggucggguggccaucuuguggcggcggcgcgg

SEQ ID NO: 128934 - RNA, 32 nt, Homo Sapiens
agaauaugauccccucuuccgaguugcccaca

SEQ ID NO: 128935 - RNA, 32 nt, Homo Sapiens
uuucucccaucccgguugcaaucucacucaga

SEQ ID NO: 128936 - RNA, 32 nt, Homo Sapiens
gauucaugugcaugucguauagauaaggaauc

SEQ ID NO: 128937 - RNA, 32 nt, Homo Sapiens
auuguucacuuuauucuguagagcagccugcc

SEQ ID NO: 128938 - RNA, 32 nt, Homo Sapiens
ugcggggacuuccaggcacuccccgagaguua

SEQ ID NO: 128939 - RNA, 32 nt, Homo Sapiens
cccagccccuccuugcacuacuccacgcuguc

SEQ ID NO: 128940 - RNA, 30 nt, Homo Sapiens
cucaguguuggcucugcagaagcucugggg

SEQ ID NO: 128941 - RNA, 32 nt, Homo Sapiens
cugcgagggcgccuggagcggcuggagcagug

SEQ ID NO: 128942 - RNA, 32 nt, Homo Sapiens
aguguguucugccugcccguuacaguggagcg

SEQ ID NO: 128943 - RNA, 32 nt, Homo Sapiens
ucugugaucagcuacaguggcucugcacccuc

SEQ ID NO: 128944 - RNA, 32 nt, Homo Sapiens
uuagguaaaaacagaagugacagguuguagga

SEQ ID NO: 128945 - RNA, 32 nt, Homo Sapiens
agccgccuaguccucuucuccuucucuuugau

SEQ ID NO: 128946 - RNA, 30 nt, Homo Sapiens
ugacguggccagcagcaccaucuggucaac

SEQ ID NO: 128947 - RNA, 32 nt, Homo Sapiens
gugguggacaccuuuaaucccaguuacucagg

SEQ ID NO: 128948 - RNA, 32 nt, Homo Sapiens
gggcccaggaggaucugggcugguuugucugg

SEQ ID NO: 128949 - RNA, 32 nt, Homo Sapiens
gaugaaaugaacucuguauuucugcaaauucc

SEQ ID NO: 128950 - RNA, 32 nt, Homo Sapiens
uuuauguuuuguuuuucuuuucuaaaaugaag

SEQ ID NO: 128951 - RNA, 32 nt, Homo Sapiens
ccgggggaccuggggacucgggugcugggagu

SEQ ID NO: 128952 - RNA, 31 nt, Homo Sapiens
gagaccguaaggguuuuuaguuugaucuacu

SEQ ID NO: 128953 - RNA, 32 nt, Homo Sapiens
gcucggcgucccgcucccuccgcggcucaugg

SEQ ID NO: 128954 - RNA, 32 nt, Homo Sapiens
gcucagcuguggagccagcagcuccgacucau

SEQ ID NO: 128955 - RNA, 32 nt, Homo Sapiens
ugugcauuuuuguuucuagaucuuauacagaa

SEQ ID NO: 128956 - RNA, 32 nt, Homo Sapiens
gcucaugaccuggaaauaaaauuuaggaccaa

SEQ ID NO: 128957 - RNA, 32 nt, Homo Sapiens
uugaaaugugcauagauaugcaugucuauaua

SEQ ID NO: 128958 - RNA, 32 nt, Homo Sapiens
acauaguaauuauuauuuuuuauuuuuagaau

SEQ ID NO: 128959 - RNA, 32 nt, Homo Sapiens
gucacugcaccaagcucugcuggaggagugac

SEQ ID NO: 128960 - RNA, 32 nt, Homo Sapiens
acauuuagcauuaacugucuugucaagcgaaa

SEQ ID NO: 128961 - RNA, 32 nt, Homo Sapiens
aagcacaucccgcagcccggcgcggacuccga

SEQ ID NO: 128962 - RNA, 32 nt, Homo Sapiens
gggaggcugcgcuccuucagacuugcugcaga

SEQ ID NO: 128963 - RNA, 32 nt, Homo Sapiens
gauuuauauuugaauuugauauuugaauauuu

SEQ ID NO: 128964 - RNA, 32 nt, Homo Sapiens
ggucccaggcuggucucaaacuccugagcuca

SEQ ID NO: 128965 - RNA, 32 nt, Homo Sapiens
gcugccacaucccacacucccacugccuggcu

SEQ ID NO: 128966 - RNA, 32 nt, Homo Sapiens
cuuuggccugugagaugcuuugaaaauuuuua

SEQ ID NO: 128967 - RNA, 32 nt, Homo Sapiens
uucagggacccggcccugcccugccgcccgcu

SEQ ID NO: 128968 - RNA, 32 nt, Homo Sapiens
uacaaaguuauuuauuuauagaaauuuuggua

SEQ ID NO: 128969 - RNA, 32 nt, Homo Sapiens
acugagaugaaacuuuuagacuucagcacguc

SEQ ID NO: 128970 - RNA, 32 nt, Homo Sapiens
ucagaaguugguuaaggguuugggggaccagc

SEQ ID NO: 128971 - RNA, 32 nt, Homo Sapiens
agugaguucgggcuuguguaaaacacaugaga

SEQ ID NO: 128972 - RNA, 32 nt, Homo Sapiens
ggucaagggucucggggucccgcgguuucggg

SEQ ID NO: 128973 - RNA, 32 nt, Homo Sapiens
auauccucuugcguuuucccugugggaaugcc

SEQ ID NO: 128974 - RNA, 32 nt, Homo Sapiens
uucucuuccuucugccucccccgugcccccag

SEQ ID NO: 128975 - RNA, 32 nt, Homo Sapiens
cgagcggcgccugaacacacggcggcugccga

SEQ ID NO: 128976 - RNA, 32 nt, Homo Sapiens
ucucuucugcaccauuuucuacaccagaccug

SEQ ID NO: 128977 - RNA, 32 nt, Homo Sapiens
gaaagcggcuggcuguggcccgcgccaguagu

SEQ ID NO: 128978 - RNA, 32 nt, Homo Sapiens
cuccccuuucccuccccagcccggccccugga

SEQ ID NO: 128979 - RNA, 32 nt, Homo Sapiens
gaguuacugugcucucuuccaaggcuguagga

SEQ ID NO: 128980 - RNA, 32 nt, Homo Sapiens
ccucaucggcccggcgcugauuccucgugucc

SEQ ID NO: 128981 - RNA, 29 nt, Homo Sapiens
uccuuguagaguauguaccauccaaaggc

SEQ ID NO: 128982 - RNA, 32 nt, Homo Sapiens
ccggucacacugggcgaccacgggggccugcu

SEQ ID NO: 128983 - RNA, 32 nt, Homo Sapiens
caaaacuagauagaaaaauauaaaauaaucuu

SEQ ID NO: 128984 - RNA, 32 nt, Homo Sapiens
gacagagagcuacuuauucucugcuuugagau

SEQ ID NO: 128985 - RNA, 32 nt, Homo Sapiens
ucagaauaucauauaauguuuauuuuuugagg

SEQ ID NO: 128986 - RNA, 30 nt, Homo Sapiens
gaaaggcugccugugggggaauucggacug

SEQ ID NO: 128987 - RNA, 32 nt, Homo Sapiens
uucuuuuguaccauucucuacuccguguguga

SEQ ID NO: 128988 - RNA, 32 nt, Homo Sapiens
ccgcugcugucaugguugguucgcuaaacugc

SEQ ID NO: 128989 - RNA, 32 nt, Homo Sapiens
guguugcaggguggagaaguggggagaagugu

SEQ ID NO: 128990 - RNA, 32 nt, Homo Sapiens
cagcuccgacagaagcaggaguccgaguuaaa

SEQ ID NO: 128991 - RNA, 32 nt, Homo Sapiens
gagcuggagggggucccuggcugcugagggga

SEQ ID NO: 128992 - RNA, 32 nt, Homo Sapiens
agaagaacucguagagcagcugucagggaggc

SEQ ID NO: 128993 - RNA, 32 nt, Homo Sapiens
uaggacccaagcagagaagcucucgggcuagg

SEQ ID NO: 128994 - RNA, 32 nt, Homo Sapiens
gaugcccccgguucccaaccuuucacgccggc

SEQ ID NO: 128995 - RNA, 32 nt, Homo Sapiens
gcuggagagaaaccuuauaaaugucaugauug

SEQ ID NO: 128996 - RNA, 32 nt, Homo Sapiens
uuccgcggucccccgcccgcccggggcccaac

SEQ ID NO: 128997 - RNA, 32 nt, Homo Sapiens
uuaccuccggugcccuucccgcugcaggacuu

SEQ ID NO: 128998 - RNA, 32 nt, Homo Sapiens
ccugcccugccgcugcagaaauccagaagcau

SEQ ID NO: 128999 - RNA, 32 nt, Homo Sapiens
uucccaucaaggaaauaaaucagccugauuuu

SEQ ID NO: 129000 - RNA, 32 nt, Homo Sapiens
cucugguccuucccugucaguguugcucccau

SEQ ID NO: 129001 - RNA, 32 nt, Homo Sapiens
aauuucuuaugucaaggcagcauuauaaaccu

SEQ ID NO: 129002 - RNA, 32 nt, Homo Sapiens
ggcagccccucgcccaccagcgccuccccuca

SEQ ID NO: 129003 - RNA, 32 nt, Homo Sapiens
ccaguuuagguuuaagaaauuacugcaaguua

SEQ ID NO: 129004 - RNA, 32 nt, Homo Sapiens
guauuugaagaaagucagcauguuuagucaac

SEQ ID NO: 129005 - RNA, 32 nt, Homo Sapiens
agucaauccaaaucagcccguuaaggagaaag

SEQ ID NO: 129006 - RNA, 32 nt, Homo Sapiens
ccaggagucggcggaccgcggcgcgggcgaac

SEQ ID NO: 129007 - RNA, 31 nt, Homo Sapiens
gcaggagcugguggcccuccaagggcagcau

SEQ ID NO: 129008 - RNA, 32 nt, Homo Sapiens
uguuuguuuuuaaagauggggucuuguuauau

SEQ ID NO: 129009 - RNA, 32 nt, Homo Sapiens
augucccuccagggggaccccacagccuggca

SEQ ID NO: 129010 - RNA, 32 nt, Homo Sapiens
cccaggguucaaaggacacacccuagaugagc

SEQ ID NO: 129011 - RNA, 32 nt, Homo Sapiens
gucugggaaaagggcugucaggggagcgagga

SEQ ID NO: 129012 - RNA, 32 nt, Homo Sapiens
uccagggaagccucauucuacugcuuggggcu

SEQ ID NO: 129013 - RNA, 32 nt, Homo Sapiens
uuugccuuuuauuccuuuaaaauuucgccugg

SEQ ID NO: 129014 - RNA, 32 nt, Homo Sapiens
aacgugccguucuaacccacuccagcugccuu

SEQ ID NO: 129015 - RNA, 32 nt, Homo Sapiens
gagguuuuauuuccaaguuuucuaggaaccca

SEQ ID NO: 129016 - RNA, 32 nt, Homo Sapiens
ucggggcccaaccugcccaaccccagcacucc

SEQ ID NO: 129017 - RNA, 32 nt, Homo Sapiens
uguggcuggcugcuucccuuccuuccaucccc

SEQ ID NO: 129018 - RNA, 32 nt, Homo Sapiens
uuucugcaggauuaaaaauuacugacauguug

SEQ ID NO: 129019 - RNA, 32 nt, Homo Sapiens
cucccucccgcucccacccccaccuuguugac

SEQ ID NO: 129020 - RNA, 32 nt, Homo Sapiens
ucagguagagaaaaaaggacagugauuugaau

SEQ ID NO: 129021 - RNA, 32 nt, Homo Sapiens
gugaacacaacucuuugguuaauaguaaaugc

SEQ ID NO: 129022 - RNA, 32 nt, Homo Sapiens
gggaucgcgguuucccucuccucucccuuguc

SEQ ID NO: 129023 - RNA, 32 nt, Homo Sapiens
cauucagcccucucuaggacgcagcagccucu

SEQ ID NO: 129024 - RNA, 32 nt, Homo Sapiens
gcaggccugcgugccgggagaggacucugccu

SEQ ID NO: 129025 - RNA, 32 nt, Homo Sapiens
aaaaucaauuuuguaauuuguuuagaagccag

SEQ ID NO: 129026 - RNA, 32 nt, Homo Sapiens
aaacaauuugaaaguacacaauuagaggagac

SEQ ID NO: 129027 - RNA, 32 nt, Homo Sapiens
acccggcacccaugcucuggcucuugucucuc

SEQ ID NO: 129028 - RNA, 27 nt, Homo Sapiens
agauguggcucuucuuucacgcuuuau

SEQ ID NO: 129029 - RNA, 32 nt, Homo Sapiens
ugauuaaaucauaaauauuuucaguaugaaaa

SEQ ID NO: 129030 - RNA, 32 nt, Homo Sapiens
gacgacugucaaagaguaucuggccauggcgg

SEQ ID NO: 129031 - RNA, 27 nt, Homo Sapiens
guuuuccuuguuuucagccccccgacu

SEQ ID NO: 129032 - RNA, 28 nt, Homo Sapiens
accaaauaggaaggacauuugagcagag

SEQ ID NO: 129033 - RNA, 32 nt, Homo Sapiens
gucaaaaucuucauuauucuuugccucuuucc

SEQ ID NO: 129034 - RNA, 32 nt, Homo Sapiens
ccagugggccccugguacccaagcccccuccc

SEQ ID NO: 129035 - RNA, 32 nt, Homo Sapiens
gccagcaacaaugagggugauuuuaaaagacc

SEQ ID NO: 129036 - RNA, 32 nt, Homo Sapiens
ugaggagguguuaugaggaagggggaggccuc

SEQ ID NO: 129037 - RNA, 28 nt, Homo Sapiens
ccaguagggcggccgggcagaggugccc

SEQ ID NO: 129038 - RNA, 32 nt, Homo Sapiens
agcccucugcccucugguggccucugggccug

SEQ ID NO: 129039 - RNA, 32 nt, Homo Sapiens
aaugugacuaaaucaugacuguuauuuuuauu

SEQ ID NO: 129040 - RNA, 32 nt, Homo Sapiens
uuuaaaaauaucuuuuucuccucucagcucau

SEQ ID NO: 129041 - RNA, 32 nt, Homo Sapiens
gaaggaccugcucccuuuccccggccagcuca

SEQ ID NO: 129042 - RNA, 32 nt, Homo Sapiens
aguagagagacacccggcacccaguccgaagc

SEQ ID NO: 129043 - RNA, 32 nt, Homo Sapiens
ggggugaggguggggagguggggcagggcaug

SEQ ID NO: 129044 - RNA, 32 nt, Homo Sapiens
ccucuagauuagucuccaccgccguccaggac

SEQ ID NO: 129045 - RNA, 32 nt, Homo Sapiens
aauacugacuugucaguaucuccagcucugau

SEQ ID NO: 129046 - RNA, 32 nt, Homo Sapiens
acagagcugagagccuguguggagcggauggg

SEQ ID NO: 129047 - RNA, 32 nt, Homo Sapiens
auuccuuuuuauuuguuugcaauauuuucaga

SEQ ID NO: 129048 - RNA, 32 nt, Homo Sapiens
ccaugguauguaguggagcaucaggguaggcu

SEQ ID NO: 129049 - RNA, 32 nt, Homo Sapiens
caagaaauguguuggaucugccaucauguuac

SEQ ID NO: 129050 - RNA, 30 nt, Homo Sapiens
uccguguucuugccugcccaucuucuccgc

SEQ ID NO: 129051 - RNA, 32 nt, Homo Sapiens
aauuagcugggugugguggcgggcgugugucg

SEQ ID NO: 129052 - RNA, 32 nt, Homo Sapiens
aacccaaguauuuuaaaacacugugcacauua

SEQ ID NO: 129053 - RNA, 32 nt, Homo Sapiens
acucaagaucauauaacauuccagguacucag

SEQ ID NO: 129054 - RNA, 32 nt, Homo Sapiens
gcaggauggaguggaaagcugcugcugauggc

SEQ ID NO: 129055 - RNA, 32 nt, Homo Sapiens
aucaagaaagauaacuucaaaauacacuuucu

SEQ ID NO: 129056 - RNA, 32 nt, Homo Sapiens
gccuguuggguguugggaugggauaucagagg

SEQ ID NO: 129057 - RNA, 32 nt, Homo Sapiens
ccaucagggguggucauuuccaaucagacacc

SEQ ID NO: 129058 - RNA, 32 nt, Homo Sapiens
cacaaggggucauauuggcuuuaguuccucaa

SEQ ID NO: 129059 - RNA, 32 nt, Homo Sapiens
gugacccccaggacagaauggugcuggacuca

SEQ ID NO: 129060 - RNA, 32 nt, Homo Sapiens
accccgcggcgcgcuccggucgacgccgggga

SEQ ID NO: 129061 - RNA, 32 nt, Homo Sapiens
gugaggcaggacuuacaugccggcuucuccuu

SEQ ID NO: 129062 - RNA, 32 nt, Homo Sapiens
ggagagguggucaagauccccucccgcgugca

SEQ ID NO: 129063 - RNA, 32 nt, Homo Sapiens
caagcaaugcaaaauggagauuaauuaaaauc

SEQ ID NO: 129064 - RNA, 32 nt, Homo Sapiens
agaacauaagauguauuucugacuaaaacaaa

SEQ ID NO: 129065 - RNA, 28 nt, Homo Sapiens
ccgggaguuacaggugccgacgugaugu

SEQ ID NO: 129066 - RNA, 32 nt, Homo Sapiens
gagacucgaggcgacccggcccuccguggggg

SEQ ID NO: 129067 - RNA, 32 nt, Homo Sapiens
acauagaggaugguaugggaagaaauuuggcu

SEQ ID NO: 129068 - RNA, 32 nt, Homo Sapiens
gccagcagcccuacccggggcucaacacacag

SEQ ID NO: 129069 - RNA, 32 nt, Homo Sapiens
ugugcacgguugaguucuggagucugacccau

SEQ ID NO: 129070 - RNA, 32 nt, Homo Sapiens
uuaguccaugauccuauaugcaaucaaguuca

SEQ ID NO: 129071 - RNA, 32 nt, Homo Sapiens
gucuucucauucuccuuuacucagguggggau

SEQ ID NO: 129072 - RNA, 32 nt, Homo Sapiens
aguuuaaaaaguaaauauauauucuaucguau

SEQ ID NO: 129073 - RNA, 32 nt, Homo Sapiens
gacuuguuuucuuuuucuuuauuuuuaauccu

SEQ ID NO: 129074 - RNA, 32 nt, Homo Sapiens
cccgccagaccaagccuugcccucaggacggc

SEQ ID NO: 129075 - RNA, 29 nt, Homo Sapiens
caagauggggaauggaacugaggaagauu

SEQ ID NO: 129076 - RNA, 32 nt, Homo Sapiens
gaggggaccugcugggaaugggguggguggua

SEQ ID NO: 129077 - RNA, 32 nt, Homo Sapiens
guggcugguccucauucaaagggacggucagu

SEQ ID NO: 129078 - RNA, 32 nt, Homo Sapiens
guuucuucaaccaaaaaagaaagaaauugcaa

SEQ ID NO: 129079 - RNA, 32 nt, Homo Sapiens
uucucaugaaaacuuugugacucucuuuuagc

SEQ ID NO: 129080 - RNA, 32 nt, Homo Sapiens
uccauaaucuguaggcuuuaauuuuagaaauu

SEQ ID NO: 129081 - RNA, 32 nt, Homo Sapiens
cugcucugugucuguguugugaagcuugagac

SEQ ID NO: 129082 - RNA, 32 nt, Homo Sapiens
aaauugagugguuaaaaaagauaccuuauccu

SEQ ID NO: 129083 - RNA, 32 nt, Homo Sapiens
uaagagcuaaaguuaaauaggauauuaacaac

SEQ ID NO: 129084 - RNA, 32 nt, Homo Sapiens
augcuguuggugccugauagggauuagucuuu

SEQ ID NO: 129085 - RNA, 32 nt, Homo Sapiens
uuguguuuguuuacacauccaugcacugccug

SEQ ID NO: 129086 - RNA, 32 nt, Homo Sapiens
guuaacaccaaaacugaauucuuaugcagaau

SEQ ID NO: 129087 - RNA, 32 nt, Homo Sapiens
gucacugccugcgcagcuccggccgccuggcu

SEQ ID NO: 129088 - RNA, 32 nt, Homo Sapiens
cagaagagccccaagggacacaccuucccugg

SEQ ID NO: 129089 - RNA, 32 nt, Homo Sapiens
aaauaucugugcagggaugacucucaaauaug

SEQ ID NO: 129090 - RNA, 32 nt, Homo Sapiens
aaauuguuguucagaaauaccacacuauuaau

SEQ ID NO: 129091 - RNA, 32 nt, Homo Sapiens
aucagagagcacaaagauuaaaaguuacuuua

SEQ ID NO: 129092 - RNA, 31 nt, Homo Sapiens
uuacgcucgaggguuuuuaccgguuccuuuu

SEQ ID NO: 129093 - RNA, 32 nt, Homo Sapiens
aagggggagcggggcgcccagggccacuggaa

SEQ ID NO: 129094 - RNA, 32 nt, Homo Sapiens
aggcaauuuuuagaaagcaucuguucuguguu

SEQ ID NO: 129095 - RNA, 32 nt, Homo Sapiens
aucucaccucucccaggcccaaggcugcgggc

SEQ ID NO: 129096 - RNA, 32 nt, Homo Sapiens
ggaagcugaauuauuaguaacaacaauaauaa

SEQ ID NO: 129097 - RNA, 32 nt, Homo Sapiens
agguugauggcggcggcggagcuccgagagac

SEQ ID NO: 129098 - RNA, 32 nt, Homo Sapiens
uggugcuaacuacuaaagauuuuggcagaauc

SEQ ID NO: 129099 - RNA, 32 nt, Homo Sapiens
aggagguggaggaggcggcggcggcggcggaa

SEQ ID NO: 129100 - RNA, 32 nt, Homo Sapiens
ccccaccgacuucuccuccccuacccuugccg

SEQ ID NO: 129101 - RNA, 32 nt, Homo Sapiens
cuggaaaguauuuacuaugggauucauuuaug

SEQ ID NO: 129102 - RNA, 32 nt, Homo Sapiens
guggcaaguccucaauccugugucccagaggu

SEQ ID NO: 129103 - RNA, 32 nt, Homo Sapiens
guguguuuucccuugccuuguuuccugccuua

SEQ ID NO: 129104 - RNA, 32 nt, Homo Sapiens
cagccuauauuaugaaaagagaccuggaagug

SEQ ID NO: 129105 - RNA, 32 nt, Homo Sapiens
gcguccccgcccggcgccacgccgccuccucu

SEQ ID NO: 129106 - RNA, 32 nt, Homo Sapiens
cugguagugaccuuguucuugauucagccuga

SEQ ID NO: 129107 - RNA, 32 nt, Homo Sapiens
aaacgagucaauccccucauucaggaaaacug

SEQ ID NO: 129108 - RNA, 32 nt, Homo Sapiens
aaggaagcucucccacccccagccucggcggc

SEQ ID NO: 129109 - RNA, 32 nt, Homo Sapiens
accuaauuuuaaucuuuggucucuaaaaagua

SEQ ID NO: 129110 - RNA, 32 nt, Homo Sapiens
cucccaugcuuuuguucauucaguuaccuccu

SEQ ID NO: 129111 - RNA, 32 nt, Homo Sapiens
aggaauggaguaagagcacuuuucugcaggga

SEQ ID NO: 129112 - RNA, 32 nt, Homo Sapiens
ggcugggcucuggccugaucacugggcucagg

SEQ ID NO: 129113 - RNA, 32 nt, Homo Sapiens
accaggugggcaaagcagaaaccugcggggag

SEQ ID NO: 129114 - RNA, 32 nt, Homo Sapiens
cugcaagguucaaguugcuuagacauuguuuu

SEQ ID NO: 129115 - RNA, 32 nt, Homo Sapiens
cgccuccaggccucggccccaccuaccuccca

SEQ ID NO: 129116 - RNA, 32 nt, Homo Sapiens
gcagagaagcugcaggagcugcugcggcgucg

SEQ ID NO: 129117 - RNA, 31 nt, Homo Sapiens
gcgggugagccccaggcuggcagcuagcaag

SEQ ID NO: 129118 - RNA, 32 nt, Homo Sapiens
auauuuuuucuaaaauccaacuucugaccgcc

SEQ ID NO: 129119 - RNA, 32 nt, Homo Sapiens
agauagaccuguacauguauuuuaagcaggaa

SEQ ID NO: 129120 - RNA, 32 nt, Homo Sapiens
uugagaccgaggaccgaaaucccggcuccagg

SEQ ID NO: 129121 - RNA, 32 nt, Homo Sapiens
cccugggugcugagcaugcaucugaaguucaa

SEQ ID NO: 129122 - RNA, 32 nt, Homo Sapiens
uuacucacauucacuguccgagauucuauacu

SEQ ID NO: 129123 - RNA, 32 nt, Homo Sapiens
ugaaauuuuuauuuucauggcuuuaauccaug

SEQ ID NO: 129124 - RNA, 32 nt, Homo Sapiens
acuuaaucacauacagaagagcaacaacaaac

SEQ ID NO: 129125 - RNA, 32 nt, Homo Sapiens
accucaggacugggcucucuggccugcugggg

SEQ ID NO: 129126 - RNA, 32 nt, Homo Sapiens
caaaagguccugccgccuccgcaucugacugu

SEQ ID NO: 129127 - RNA, 32 nt, Homo Sapiens
uuuguuuuucccuuuuuucuccauaauuuuaa

SEQ ID NO: 129128 - RNA, 32 nt, Homo Sapiens
ucccagcagacacccuguguccuccuucagcu

SEQ ID NO: 129129 - RNA, 32 nt, Homo Sapiens
ggaucugaggccugagccauccuccuuucuac

SEQ ID NO: 129130 - RNA, 32 nt, Homo Sapiens
aagcuguaguaauucuaaggaaucaugaaccu

SEQ ID NO: 129131 - RNA, 32 nt, Homo Sapiens
accucgcccccucccuuucccgcuggagaaau

SEQ ID NO: 129132 - RNA, 32 nt, Homo Sapiens
accuuucuuggauuuuuguaccagagaugugc

SEQ ID NO: 129133 - RNA, 32 nt, Homo Sapiens
gagaacuuaaucgcacuguuucuaauucuuuu

SEQ ID NO: 129134 - RNA, 32 nt, Homo Sapiens
ugccccaugcuuccugcguccugguaggaggu

SEQ ID NO: 129135 - RNA, 32 nt, Homo Sapiens
cgcacugacgacacaugaugcuuggaugacag

SEQ ID NO: 129136 - RNA, 32 nt, Homo Sapiens
uacugccucucgcuccucaaccccuccccucc

SEQ ID NO: 129137 - RNA, 32 nt, Homo Sapiens
ggccucucagaauuggggugaagggcacgggu

SEQ ID NO: 129138 - RNA, 32 nt, Homo Sapiens
auacuauaaaaauuaugucaccauucaaaaaa

SEQ ID NO: 129139 - RNA, 32 nt, Homo Sapiens
cacagcacccgcuaggaagcucugcugaaccu

SEQ ID NO: 129140 - RNA, 32 nt, Homo Sapiens
aaagggaggggaggagaccucagauccucuuc

SEQ ID NO: 129141 - RNA, 32 nt, Homo Sapiens
acuuaaaacacuuuuuuggaagaagauuuaaa

SEQ ID NO: 129142 - RNA, 32 nt, Homo Sapiens
agaucuccuccuccuucaugcagccaggauug

SEQ ID NO: 129143 - RNA, 32 nt, Homo Sapiens
ccucgugucccacucccggcgcacgcccuccc

SEQ ID NO: 129144 - RNA, 32 nt, Homo Sapiens
cgcuagacuucacugcacguuuucucaaguau

SEQ ID NO: 129145 - RNA, 32 nt, Homo Sapiens
agugaagaaaauuuaucaccuaaaauacaccc

SEQ ID NO: 129146 - RNA, 32 nt, Homo Sapiens
ucaacuccaucaaauauuaaauugauguuuau

SEQ ID NO: 129147 - RNA, 32 nt, Homo Sapiens
gacacugugaagucagcguuaaccaugugcau

SEQ ID NO: 129148 - RNA, 32 nt, Homo Sapiens
cuguggccauugcaggaagugugccugucagg

SEQ ID NO: 129149 - RNA, 32 nt, Homo Sapiens
ucauaacccacagauagaucaaccuaagaauc

SEQ ID NO: 129150 - RNA, 31 nt, Homo Sapiens
uguugccaagccaaugcaugcugagcugaag

SEQ ID NO: 129151 - RNA, 32 nt, Homo Sapiens
uugccagcacaauaaacuguaucauggacuac

SEQ ID NO: 129152 - RNA, 32 nt, Homo Sapiens
uacagaaauucugaauuuugguaaaucacacu

SEQ ID NO: 129153 - RNA, 32 nt, Homo Sapiens
cacacucauuucuuagggacugagaggggagu

SEQ ID NO: 129154 - RNA, 32 nt, Homo Sapiens
uuacagugcaggguaaagugcagaccuuaaaa

SEQ ID NO: 129155 - RNA, 27 nt, Homo Sapiens
uggucucccuucuucuagaaccccuuc

SEQ ID NO: 129156 - RNA, 32 nt, Homo Sapiens
cgugaguucucagcggagcgcuucucggcacu

SEQ ID NO: 129157 - RNA, 32 nt, Homo Sapiens
cccccaugauucaauuaccuuccaccaguccc

SEQ ID NO: 129158 - RNA, 32 nt, Homo Sapiens
cuuccugcuuugcaccaucugguggucgcacc

SEQ ID NO: 129159 - RNA, 32 nt, Homo Sapiens
gccgagggccgaggagcgcccggguccgggca

SEQ ID NO: 129160 - RNA, 32 nt, Homo Sapiens
aauggaauaauacuaaucuuguuaaaagcaau

SEQ ID NO: 129161 - RNA, 32 nt, Homo Sapiens
acauaauuauuucuaacacuagcuuauuucca

SEQ ID NO: 129162 - RNA, 32 nt, Homo Sapiens
cuuccucguuuuaacucagcugaaacaccagg

SEQ ID NO: 129163 - RNA, 32 nt, Homo Sapiens
guucgugucauucgugacuuuuuuguaaagaa

SEQ ID NO: 129164 - RNA, 32 nt, Homo Sapiens
guacauauuucuggcauauauuaguuauuuga

SEQ ID NO: 129165 - RNA, 32 nt, Homo Sapiens
caguuguucagccgucuuucugcugguguugu

SEQ ID NO: 129166 - RNA, 32 nt, Homo Sapiens
aauaacugggaagguuuuuucuuaaaauaaca

SEQ ID NO: 129167 - RNA, 32 nt, Homo Sapiens
gggaccucugagacguuucuccaggacaagga

SEQ ID NO: 129168 - RNA, 32 nt, Homo Sapiens
gccauagucaccguaguccuggcgacuguuac

SEQ ID NO: 129169 - RNA, 27 nt, Homo Sapiens
ccaggucucgucuucagcgcucugugu

SEQ ID NO: 129170 - RNA, 32 nt, Homo Sapiens
aucaacucuaaagaugaagaggaguuccagau

SEQ ID NO: 129171 - RNA, 32 nt, Homo Sapiens
acccacccccuucgccagcagcucugugguuc

SEQ ID NO: 129172 - RNA, 32 nt, Homo Sapiens
cagcuagcaaaagaaguaacaagagugauucu

SEQ ID NO: 129173 - RNA, 32 nt, Homo Sapiens
cuuuacucuauuuuagaaaaucaaaugacugu

SEQ ID NO: 129174 - RNA, 32 nt, Homo Sapiens
cagugccugccagaagcugugucucucauugg

SEQ ID NO: 129175 - RNA, 32 nt, Homo Sapiens
gaagcaugggccgugccagcugugcccuagug

SEQ ID NO: 129176 - RNA, 32 nt, Homo Sapiens
aacaugugggaauucugggagauacaauucaa

SEQ ID NO: 129177 - RNA, 32 nt, Homo Sapiens
gaggcagaaaaaauggacggggcagcuucaca

SEQ ID NO: 129178 - RNA, 32 nt, Homo Sapiens
ugaccagugauuuacaaauauuucauauucca

SEQ ID NO: 129179 - RNA, 32 nt, Homo Sapiens
agagaaaaucaucaauaaauauuuauuacauu

SEQ ID NO: 129180 - RNA, 32 nt, Homo Sapiens
gagguuccaaagaugcuaaauucuucagugau

SEQ ID NO: 129181 - RNA, 32 nt, Homo Sapiens
ggcaguaguuaaaaucaaauuguacacuucuc

SEQ ID NO: 129182 - RNA, 32 nt, Homo Sapiens
caagagacaccguggcgucucaugugaacuuu

SEQ ID NO: 129183 - RNA, 31 nt, Homo Sapiens
uuuuacacaaagaaacuuaaugcuguauuaa

SEQ ID NO: 129184 - RNA, 32 nt, Homo Sapiens
aacagaccuggagggagguaauuuaaggaggg

SEQ ID NO: 129185 - RNA, 32 nt, Homo Sapiens
ccgcuucugcuuuggggccaaacucuucuguc

SEQ ID NO: 129186 - RNA, 32 nt, Homo Sapiens
ucgucccugcccuccccggccccggggugcac

SEQ ID NO: 129187 - RNA, 32 nt, Homo Sapiens
uucccaugcauucucuuuccccgggaaaguug

SEQ ID NO: 129188 - RNA, 32 nt, Homo Sapiens
gguuaguugggagaggucagauggcacaacag

SEQ ID NO: 129189 - RNA, 32 nt, Homo Sapiens
aauagauccucagggcccaaaagcagacucuu

SEQ ID NO: 129190 - RNA, 32 nt, Homo Sapiens
caagcucagguggacaggcaguuuuauucugu

SEQ ID NO: 129191 - RNA, 32 nt, Homo Sapiens
cuccauaccaauccucuuucucacagagaacc

SEQ ID NO: 129192 - RNA, 32 nt, Homo Sapiens
agcauaaaucucuucuguaacuuuuauaaacc

SEQ ID NO: 129193 - RNA, 32 nt, Homo Sapiens
accauugugggaagagaagaaaaguuccucag

SEQ ID NO: 129194 - RNA, 32 nt, Homo Sapiens
gcacgcagggaccccugcugcugcuccugcuc

SEQ ID NO: 129195 - RNA, 32 nt, Homo Sapiens
cugccguucccucucugagcacaagcugggca

SEQ ID NO: 129196 - RNA, 32 nt, Homo Sapiens
acaccuaagcccaaauauaaaaacagacucuu

SEQ ID NO: 129197 - RNA, 32 nt, Homo Sapiens
uguuauucaauaaaacaaaaauuucuagguau

SEQ ID NO: 129198 - RNA, 32 nt, Homo Sapiens
gauguuaacaaggaccuuugggaguuguccgg

SEQ ID NO: 129199 - RNA, 32 nt, Homo Sapiens
agcacaguuuaucacauagaaacuccauuaau

SEQ ID NO: 129200 - RNA, 32 nt, Homo Sapiens
guuugcucacuucuuuggcuuuuguuuugugu

SEQ ID NO: 129201 - RNA, 32 nt, Homo Sapiens
gaagcuuccuucccacuucagucuuccugccu

SEQ ID NO: 129202 - RNA, 32 nt, Homo Sapiens
uuccugcaccucaggaugggcgagggugggca

SEQ ID NO: 129203 - RNA, 32 nt, Homo Sapiens
gcugcggccugggcaccgcgggccaugugugu

SEQ ID NO: 129204 - RNA, 28 nt, Homo Sapiens
gugcagaaagauuuuaauguggggggug

SEQ ID NO: 129205 - RNA, 32 nt, Homo Sapiens
uccuagggaacaaaaauuccaaugaggaauug

SEQ ID NO: 129206 - RNA, 32 nt, Homo Sapiens
ggaguccuugcuuugcugcugcugagcugccg

SEQ ID NO: 129207 - RNA, 32 nt, Homo Sapiens
ucacacaggguauuccucucccuucucugaug

SEQ ID NO: 129208 - RNA, 32 nt, Homo Sapiens
uguuggccugcugcugugcugcugaacaguau

SEQ ID NO: 129209 - RNA, 31 nt, Homo Sapiens
ccuacauuggcaucaaguucuguaucaaucc

SEQ ID NO: 129210 - RNA, 32 nt, Homo Sapiens
gaagccgggccccgcgucccagcccugcccag

SEQ ID NO: 129211 - RNA, 32 nt, Homo Sapiens
uuuuguuguuguuguuuuuucuuaaguuauau

SEQ ID NO: 129212 - RNA, 32 nt, Homo Sapiens
gcuuaacaaaugcucuucuccuuuuucugucu

SEQ ID NO: 129213 - RNA, 32 nt, Homo Sapiens
ccuccuugugucugaugcacagauguggcccu

SEQ ID NO: 129214 - RNA, 32 nt, Homo Sapiens
ccuggauaaaaauuauucacugugugauuugu

SEQ ID NO: 129215 - RNA, 32 nt, Homo Sapiens
gcggugggccccagccccacagaccagcccag

SEQ ID NO: 129216 - RNA, 32 nt, Homo Sapiens
ccugcccuggaaucucuuucucagaauguacc

SEQ ID NO: 129217 - RNA, 32 nt, Homo Sapiens
aaauauuagacuaucucugcauggauguuuga

SEQ ID NO: 129218 - RNA, 32 nt, Homo Sapiens
gacugggcauggugacucaugccuguuauccc

SEQ ID NO: 129219 - RNA, 32 nt, Homo Sapiens
cagaagcugauuaugaagaugauucuaaaauu

SEQ ID NO: 129220 - RNA, 32 nt, Homo Sapiens
aaaccaaggauccaugaggggcagaagggagg

SEQ ID NO: 129221 - RNA, 32 nt, Homo Sapiens
caugacugaugcagacuacuagguuuccauuu

SEQ ID NO: 129222 - RNA, 32 nt, Homo Sapiens
cgcggcccucuuccuuguugccugcaggaaaa

SEQ ID NO: 129223 - RNA, 32 nt, Homo Sapiens
gguguuugcucuugccucuccuccauccccua

SEQ ID NO: 129224 - RNA, 32 nt, Homo Sapiens
auaaucauacugaaggcagcucugaacaucua

SEQ ID NO: 129225 - RNA, 32 nt, Homo Sapiens
aguccagccugggcaguauagcaagacccucu

SEQ ID NO: 129226 - RNA, 32 nt, Homo Sapiens
uauuuuagagaauggggguggggaggcaagaa

SEQ ID NO: 129227 - RNA, 32 nt, Homo Sapiens
cuuggcugagugaguucuucacugaaacucaa

SEQ ID NO: 129228 - RNA, 32 nt, Homo Sapiens
acuucuggacauuuuugauacaacaucuuaau

SEQ ID NO: 129229 - RNA, 32 nt, Homo Sapiens
ugccaauuagacaaacagcaucaauuuucaaa

SEQ ID NO: 129230 - RNA, 32 nt, Homo Sapiens
cuucuagaaaaaaaaaagcauaaaaacaaaac

SEQ ID NO: 129231 - RNA, 32 nt, Homo Sapiens
gagcaccgggcggccgggccugcguggugccg

SEQ ID NO: 129232 - RNA, 30 nt, Homo Sapiens
ccugagggagguggcugcauauggagaaag

SEQ ID NO: 129233 - RNA, 32 nt, Homo Sapiens
gagaaagaacuaaggcuuaaguuaucuguagu

SEQ ID NO: 129234 - RNA, 32 nt, Homo Sapiens
acauuaccaaaauuaauuaaguaaacuuuaua

SEQ ID NO: 129235 - RNA, 32 nt, Homo Sapiens
gaaggaaguuaaagguugucuuuggucauuau

SEQ ID NO: 129236 - RNA, 32 nt, Homo Sapiens
cuggcagaagcuuccuccgagacugggcauuu

SEQ ID NO: 129237 - RNA, 32 nt, Homo Sapiens
uggucuggcuggccuuccuggaccgcaguggc

SEQ ID NO: 129238 - RNA, 32 nt, Homo Sapiens
uguucuauaaaccauauuuuuucaugaugugg

SEQ ID NO: 129239 - RNA, 32 nt, Homo Sapiens
aauguguguauguguguuucuguccguaacug

SEQ ID NO: 129240 - RNA, 32 nt, Homo Sapiens
uccaaaguguaggggagcugccugcuaacgau

SEQ ID NO: 129241 - RNA, 32 nt, Homo Sapiens
cagggauucuaaaaguaaucucuuaucuauga

SEQ ID NO: 129242 - RNA, 32 nt, Homo Sapiens
cuucuggaucuauuggauaucuauguaaaaaa

SEQ ID NO: 129243 - RNA, 31 nt, Homo Sapiens
uguacuccucggagaaaaugccugccacaua

SEQ ID NO: 129244 - RNA, 32 nt, Homo Sapiens
cucucuacauaccagcagcauaccaaaugcgu

SEQ ID NO: 129245 - RNA, 32 nt, Homo Sapiens
cauauguacuaaaaaccccucacuuaaaaaug

SEQ ID NO: 129246 - RNA, 32 nt, Homo Sapiens
uuaacuaugaguuggaauuugcugcuuuugau

SEQ ID NO: 129247 - RNA, 32 nt, Homo Sapiens
caauacaaaaauaccuacugcugagagggcug

SEQ ID NO: 129248 - RNA, 32 nt, Homo Sapiens
caugcuuauauauucuacaucuguaaagugcu

SEQ ID NO: 129249 - RNA, 32 nt, Homo Sapiens
gcugugauuuggaguauccaggugauacagaa

SEQ ID NO: 129250 - RNA, 32 nt, Homo Sapiens
uuguguuugagcccccgaaucaaauagcuuug

SEQ ID NO: 129251 - RNA, 32 nt, Homo Sapiens
gaauucuaaaauugguuuauuuuaguuguauu

SEQ ID NO: 129252 - RNA, 32 nt, Homo Sapiens
gaggucuccgagucgcggcucuguuggucuga

SEQ ID NO: 129253 - RNA, 32 nt, Homo Sapiens
uccaggcgcgcccgcugguucuugagcgccag

SEQ ID NO: 129254 - RNA, 32 nt, Homo Sapiens
uggagaagcauaagcuaauuaagggcgaugau

SEQ ID NO: 129255 - RNA, 32 nt, Homo Sapiens
aacccagcgacucucgugugccugcagaaugg

SEQ ID NO: 129256 - RNA, 32 nt, Homo Sapiens
agagaaacagagcggcccuaaucugggagggu

SEQ ID NO: 129257 - RNA, 32 nt, Homo Sapiens
ggcugucaaucaugcuggccggcguggccccg

SEQ ID NO: 129258 - RNA, 32 nt, Homo Sapiens
uugcauaaaaacaaggaugcgugaaagccuua

SEQ ID NO: 129259 - RNA, 32 nt, Homo Sapiens
ccuuuacgcccauuuuccuacccacagcagca

SEQ ID NO: 129260 - RNA, 32 nt, Homo Sapiens
aucaugggggauuuuucauucuuaggcuuuca

SEQ ID NO: 129261 - RNA, 31 nt, Homo Sapiens
ucugagguuccaacucagucauucuuugucc

SEQ ID NO: 129262 - RNA, 32 nt, Homo Sapiens
uggcucucggcggucuucccaggccccgcuuu

SEQ ID NO: 129263 - RNA, 32 nt, Homo Sapiens
cuaaguguuccuggaacauaaaaauuguuugg

SEQ ID NO: 129264 - RNA, 32 nt, Homo Sapiens
ccuuacaagcugcugguggauuuuaaaaaauu

SEQ ID NO: 129265 - RNA, 32 nt, Homo Sapiens
cuaacacccccucccuccccuaagaagaugga

SEQ ID NO: 129266 - RNA, 32 nt, Homo Sapiens
uuacaggcuuacugugauuuaagcaaauguga

SEQ ID NO: 129267 - RNA, 32 nt, Homo Sapiens
ugagaaaucuaggugcagaaucaauauuguua

SEQ ID NO: 129268 - RNA, 32 nt, Homo Sapiens
uuuagauuuuguaaggaugcggugcuggggag

SEQ ID NO: 129269 - RNA, 32 nt, Homo Sapiens
ggcagugacuuccagggauaaaaggaggcaga

SEQ ID NO: 129270 - RNA, 32 nt, Homo Sapiens
accaucuccugccucccuuaggcaggcaccuc

SEQ ID NO: 129271 - RNA, 32 nt, Homo Sapiens
guaauugucagacgugggauagauaacugaga

SEQ ID NO: 129272 - RNA, 32 nt, Homo Sapiens
gaaaaaggauagggaaaaagcuuauuaaagaa

SEQ ID NO: 129273 - RNA, 32 nt, Homo Sapiens
ggcucuggagcugugaguggugccaaaagacu

SEQ ID NO: 129274 - RNA, 32 nt, Homo Sapiens
aaaugugguggaagaaagaaaaccgugucuuu

SEQ ID NO: 129275 - RNA, 32 nt, Homo Sapiens
uuguugggucuuuuuucuugagcuuauaaugu

SEQ ID NO: 129276 - RNA, 32 nt, Homo Sapiens
ccuguccagggccagcuccugccucccggugc

SEQ ID NO: 129277 - RNA, 32 nt, Homo Sapiens
gcuccccaggacuucagagauguugcacgccc

SEQ ID NO: 129278 - RNA, 32 nt, Homo Sapiens
guagcuucccauucauguucucuucucccagc

SEQ ID NO: 129279 - RNA, 32 nt, Homo Sapiens
aagcaggaaaauuuuagaugagaguuuaccau

SEQ ID NO: 129280 - RNA, 28 nt, Homo Sapiens
gacauggccucggcgguguuugagggca

SEQ ID NO: 129281 - RNA, 32 nt, Homo Sapiens
gagccggagagcgucgggccuuccggaagggu

SEQ ID NO: 129282 - RNA, 32 nt, Homo Sapiens
gggcacugcgugccgccugcacgugggcuguc

SEQ ID NO: 129283 - RNA, 32 nt, Homo Sapiens
auaaacacagaaaagguauaguaaaagauggu

SEQ ID NO: 129284 - RNA, 32 nt, Homo Sapiens
augucaccaauauaugauuuaaaccgagcacu

SEQ ID NO: 129285 - RNA, 32 nt, Homo Sapiens
uaauaaauauaaaauaucauuauuugugucca

SEQ ID NO: 129286 - RNA, 32 nt, Homo Sapiens
ugguagcgaaccucagaggcccaaccccugac

SEQ ID NO: 129287 - RNA, 32 nt, Homo Sapiens
agccacuggcauagcccuccugagcacccgcu

SEQ ID NO: 129288 - RNA, 29 nt, Homo Sapiens
gcacuaaauauccaauauuuaaaggaaca

SEQ ID NO: 129289 - RNA, 32 nt, Homo Sapiens
ugggacacaaccucagaauggcagccauggcc

SEQ ID NO: 129290 - RNA, 32 nt, Homo Sapiens
gcagccagccgccgagcagagccgagccgagu

SEQ ID NO: 129291 - RNA, 32 nt, Homo Sapiens
gacugaauuucagauagcauuuuuaugauucc

SEQ ID NO: 129292 - RNA, 32 nt, Homo Sapiens
aagccuuugguuccucaguuuccaaauggauu

SEQ ID NO: 129293 - RNA, 32 nt, Homo Sapiens
guuccucuguaucuugagacgcugcauuuccc

SEQ ID NO: 129294 - RNA, 32 nt, Homo Sapiens
aucaccugcaacucuuuuuuuaucaaggacau

SEQ ID NO: 129295 - RNA, 32 nt, Homo Sapiens
gcaaacugaugcugaggaugauugaggugggu

SEQ ID NO: 129296 - RNA, 32 nt, Homo Sapiens
aauuggauguuuauuguuuuuaucuaaaguaa

SEQ ID NO: 129297 - RNA, 32 nt, Homo Sapiens
cccaccccuccuagcacccccacaucccccau

SEQ ID NO: 129298 - RNA, 32 nt, Homo Sapiens
gcccggccuccaacuggugggaacuggauuuu

SEQ ID NO: 129299 - RNA, 32 nt, Homo Sapiens
ccagguucaggucacuucggacaccugccaug

SEQ ID NO: 129300 - RNA, 32 nt, Homo Sapiens
auuuuccucccaaauuaaucccagacccccua

SEQ ID NO: 129301 - RNA, 32 nt, Homo Sapiens
ccugccucccugugcaguccagcccugccuug

SEQ ID NO: 129302 - RNA, 32 nt, Homo Sapiens
ggacgucuggucuucuggcuuccccgguucuu

SEQ ID NO: 129303 - RNA, 32 nt, Homo Sapiens
uuccuauaauuucuccugggaaaccugccuuu

SEQ ID NO: 129304 - RNA, 32 nt, Homo Sapiens
aaaacuagaaaguucuguuauuaccuucuuau

SEQ ID NO: 129305 - RNA, 32 nt, Homo Sapiens
gcguugaagccggagaccgcggcggccucagc

SEQ ID NO: 129306 - RNA, 32 nt, Homo Sapiens
cacuugaucccucucuggccugggucacauuu

SEQ ID NO: 129307 - RNA, 32 nt, Homo Sapiens
gcucaaaagagauaagaaaaguugauggagcc

SEQ ID NO: 129308 - RNA, 32 nt, Homo Sapiens
auuuuguuauuuauuuguuuggcucauucuuu

SEQ ID NO: 129309 - RNA, 32 nt, Homo Sapiens
uugcuccccccuccccacacggaacccugcga

SEQ ID NO: 129310 - RNA, 32 nt, Homo Sapiens
cuucucgguggccucugagccauggugucgag

SEQ ID NO: 129311 - RNA, 32 nt, Homo Sapiens
ugggaagugaagacuggaagcuaauuugcaua

SEQ ID NO: 129312 - RNA, 32 nt, Homo Sapiens
ugacucuagaaaaaucagaaucaaguuguggg

SEQ ID NO: 129313 - RNA, 32 nt, Homo Sapiens
ccggagggacugaacgcucaccacccugaccc

SEQ ID NO: 129314 - RNA, 32 nt, Homo Sapiens
gaguggcucuguguggaccagucccucacugg

SEQ ID NO: 129315 - RNA, 32 nt, Homo Sapiens
ugcccucuuuguagaagaacuaauuuauaccu

SEQ ID NO: 129316 - RNA, 32 nt, Homo Sapiens
agccccauuugggcacgaggccaggcagaucc

SEQ ID NO: 129317 - RNA, 32 nt, Homo Sapiens
cuuguguuuuaucuuaaccaccagaccauucc

SEQ ID NO: 129318 - RNA, 32 nt, Homo Sapiens
uugauagauugugauuaagcuuagcuacuauu

SEQ ID NO: 129319 - RNA, 32 nt, Homo Sapiens
cauagaaacaauuuuauuuccaaucaucuucu

SEQ ID NO: 129320 - RNA, 32 nt, Homo Sapiens
aaaugcgcaaaugguacuggagguggaaaacu

SEQ ID NO: 129321 - RNA, 32 nt, Homo Sapiens
ugaccucugaagagcugaguacucaggccacu

SEQ ID NO: 129322 - RNA, 32 nt, Homo Sapiens
guagggguggcgccugcggggagggcugcggg

SEQ ID NO: 129323 - RNA, 32 nt, Homo Sapiens
cugcagccaaccuuuacccaguuccugacugc

SEQ ID NO: 129324 - RNA, 32 nt, Homo Sapiens
gaaagaugacauucccuggguagaucugacaa

SEQ ID NO: 129325 - RNA, 32 nt, Homo Sapiens
aguggccggugagggcccaggcuggucagcgu

SEQ ID NO: 129326 - RNA, 32 nt, Homo Sapiens
uggaagauaguuuuuaagacauuugaaacuuu

SEQ ID NO: 129327 - RNA, 32 nt, Homo Sapiens
ccuuucugccccagcuuccaccugcuccccau

SEQ ID NO: 129328 - RNA, 32 nt, Homo Sapiens
gcugcuguacaagggaguccccuuucaggugu

SEQ ID NO: 129329 - RNA, 32 nt, Homo Sapiens
ugggaucagcccggcgccgacggguggcuccg

SEQ ID NO: 129330 - RNA, 32 nt, Homo Sapiens
gacaucacuuccuuuuguuuucuuucggagcu

SEQ ID NO: 129331 - RNA, 32 nt, Homo Sapiens
ggcugcugcgguucucuugcaguuucuggugg

SEQ ID NO: 129332 - RNA, 31 nt, Homo Sapiens
gauccccuagcuguccauccaagggggauga

SEQ ID NO: 129333 - RNA, 32 nt, Homo Sapiens
gcauguggcuccugggcuacccacagccaggg

SEQ ID NO: 129334 - RNA, 32 nt, Homo Sapiens
aggugcagugacucacaucuguaauccaagca

SEQ ID NO: 129335 - RNA, 32 nt, Homo Sapiens
ugugagcaccaaucaauauuucucugguuguu

SEQ ID NO: 129336 - RNA, 32 nt, Homo Sapiens
gggaaacguuugggaaagggauauuugagagc

SEQ ID NO: 129337 - RNA, 32 nt, Homo Sapiens
uagagaagcaaguaaaaaggcuaaauggaagg

SEQ ID NO: 129338 - RNA, 32 nt, Homo Sapiens
uaauuacauuuuauguauugaggaugccaaga

SEQ ID NO: 129339 - RNA, 32 nt, Homo Sapiens
uuuggggcccgcgccgcgcgccggcggcacca

SEQ ID NO: 129340 - RNA, 32 nt, Homo Sapiens
caccucaaacucccuccaagucccauguauau

SEQ ID NO: 129341 - RNA, 32 nt, Homo Sapiens
cuucagaccgcagcacagcaucaucugcaccg

SEQ ID NO: 129342 - RNA, 32 nt, Homo Sapiens
cccagacuugggggcaggcgccagggacggac

SEQ ID NO: 129343 - RNA, 32 nt, Homo Sapiens
ugaugagcuaugaaaugaagcuauagacuuua

SEQ ID NO: 129344 - RNA, 32 nt, Homo Sapiens
ggucucacuauguugcacaggcuggucuugaa

SEQ ID NO: 129345 - RNA, 32 nt, Homo Sapiens
ugcucuauuauuaacaaaacuaaguuuuaaaa

SEQ ID NO: 129346 - RNA, 32 nt, Homo Sapiens
uagagcaauauuugguuauugcacuucauuuu

SEQ ID NO: 129347 - RNA, 32 nt, Homo Sapiens
cugauauggaauggaacugcagcaaaugcaaa

SEQ ID NO: 129348 - RNA, 32 nt, Homo Sapiens
ggcacuaaauccuuuccugacaauggcagagu

SEQ ID NO: 129349 - RNA, 32 nt, Homo Sapiens
gggagcucaggcggcgccgcuccagcccgggg

SEQ ID NO: 129350 - RNA, 32 nt, Homo Sapiens
ccaucgggguuacauuuccaaggucugcugcc

SEQ ID NO: 129351 - RNA, 32 nt, Homo Sapiens
gcuucagaucauaaguucuuccacacaucucc

SEQ ID NO: 129352 - RNA, 32 nt, Homo Sapiens
uucugcaggacacauuuacugcaucuuauuuc

SEQ ID NO: 129353 - RNA, 32 nt, Homo Sapiens
uccuggaaccccagcccacucccccaucccuc

SEQ ID NO: 129354 - RNA, 32 nt, Homo Sapiens
ugaagacagacaccaguucccuacaagcaugg

SEQ ID NO: 129355 - RNA, 32 nt, Homo Sapiens
aggauggaguuugggggaggagcccagggcac

SEQ ID NO: 129356 - RNA, 32 nt, Homo Sapiens
gcgagcgcaggcggcagagaggccucaacgcc

SEQ ID NO: 129357 - RNA, 32 nt, Homo Sapiens
cggcucugcugggcuccuggaugcuccaaggc

SEQ ID NO: 129358 - RNA, 32 nt, Homo Sapiens
cauuuuaaguguuuaaaagcaaauacugacuu

SEQ ID NO: 129359 - RNA, 32 nt, Homo Sapiens
uucacagcaaaucacuaguuaagcagauuuuu

SEQ ID NO: 129360 - RNA, 32 nt, Homo Sapiens
uggacuuagaagaaucaucaacaaagaguuug

SEQ ID NO: 129361 - RNA, 32 nt, Homo Sapiens
caaggacuaauauauaccccuaccauacaaaa

SEQ ID NO: 129362 - RNA, 32 nt, Homo Sapiens
gccuucugugugacguauccacagaaaagaga

SEQ ID NO: 129363 - RNA, 32 nt, Homo Sapiens
aaaucugaacugagaaaggagcucugaauuua

SEQ ID NO: 129364 - RNA, 32 nt, Homo Sapiens
ugauuuccucacucagacagcuggcuuugugg

SEQ ID NO: 129365 - RNA, 32 nt, Homo Sapiens
gccagcagcuugcaggccccagcccuguucca

SEQ ID NO: 129366 - RNA, 32 nt, Homo Sapiens
cauccucaaacacuugagaucccaguggcugu

SEQ ID NO: 129367 - RNA, 32 nt, Homo Sapiens
agguaagcagggucaauauuuuaugauuuaug

SEQ ID NO: 129368 - RNA, 32 nt, Homo Sapiens
ccugaaguguuaccuccuuucaugucuauuua

SEQ ID NO: 129369 - RNA, 32 nt, Homo Sapiens
auucauaauuccaggaucugugaagagcacau

SEQ ID NO: 129370 - RNA, 27 nt, Homo Sapiens
ccauggcgcuccccggagcccgggcuc

SEQ ID NO: 129371 - RNA, 32 nt, Homo Sapiens
gggucagcggggaugaagucuccaucaaugac

SEQ ID NO: 129372 - RNA, 32 nt, Homo Sapiens
aauacuugaauauucaaauuuaaaagacacug

SEQ ID NO: 129373 - RNA, 32 nt, Homo Sapiens
ucacaauguuaaugugccaagauauuguuccu

SEQ ID NO: 129374 - RNA, 25 nt, Homo Sapiens
augcccaggaggaagcaggagcagc

SEQ ID NO: 129375 - RNA, 32 nt, Homo Sapiens
ccucagcucaggugcagacccacuuugugugc

SEQ ID NO: 129376 - RNA, 32 nt, Homo Sapiens
uuuucagaucauaguuaucuuuuccaauaacu

SEQ ID NO: 129377 - RNA, 32 nt, Homo Sapiens
auacaauaaaauuuauauaauaauauaaauau

SEQ ID NO: 129378 - RNA, 32 nt, Homo Sapiens
cucccuccugcgcuccucucuagaaccugggc

SEQ ID NO: 129379 - RNA, 32 nt, Homo Sapiens
aaaguggucuccagcccuugcuccacucaugc

SEQ ID NO: 129380 - RNA, 32 nt, Homo Sapiens
aagauucaaaauugacauugcuuuacugucaa

SEQ ID NO: 129381 - RNA, 32 nt, Homo Sapiens
aguucaccuuucccuuuuccuugaguugugcu

SEQ ID NO: 129382 - RNA, 32 nt, Homo Sapiens
uuccucggcaaccaccugcgggauucccaggg

SEQ ID NO: 129383 - RNA, 32 nt, Homo Sapiens
uguugcccaggcuggucuccaacaccugggcu

SEQ ID NO: 129384 - RNA, 32 nt, Homo Sapiens
aggugggaacgggacugcuugcugccucuccu

SEQ ID NO: 129385 - RNA, 32 nt, Homo Sapiens
guuuguaucccuccccuccuugggguggcuuc

SEQ ID NO: 129386 - RNA, 32 nt, Homo Sapiens
agcuggaauagguccucugggaugccagcucu

SEQ ID NO: 129387 - RNA, 31 nt, Homo Sapiens
agagcgcagcgcacggccacagacagcccug

SEQ ID NO: 129388 - RNA, 32 nt, Homo Sapiens
uguggacgagacauggugcauguuguugcugg

SEQ ID NO: 129389 - RNA, 32 nt, Homo Sapiens
accugugugcgcgccccgcucugccacguucc

SEQ ID NO: 129390 - RNA, 32 nt, Homo Sapiens
agagacauggcgauaauucaugcugaagagga

SEQ ID NO: 129391 - RNA, 32 nt, Homo Sapiens
cuguuccugaguauaacaccaagaugcugcug

SEQ ID NO: 129392 - RNA, 32 nt, Homo Sapiens
gugcaggauuugaauucugugcuucuguaaca

SEQ ID NO: 129393 - RNA, 32 nt, Homo Sapiens
auccucaaaugcaaguaaacuaccuucuaaug

SEQ ID NO: 129394 - RNA, 28 nt, Homo Sapiens
gaagugaaagauucaucuuguaauaguu

SEQ ID NO: 129395 - RNA, 32 nt, Homo Sapiens
ucucucuguuaagggagagaagucacuuuagc

SEQ ID NO: 129396 - RNA, 32 nt, Homo Sapiens
ugcugcugcuccuggggcugcugcguccgcug

SEQ ID NO: 129397 - RNA, 32 nt, Homo Sapiens
acaggaaaaaaguuauuguaaauauuuuauuu

SEQ ID NO: 129398 - RNA, 30 nt, Homo Sapiens
aaauggcaucauaaagacaagagugaaaau

SEQ ID NO: 129399 - RNA, 32 nt, Homo Sapiens
ugacauaugaaaaaauguguuuuuuaguucag

SEQ ID NO: 129400 - RNA, 32 nt, Homo Sapiens
caaccauucuuaacaagugcuggcugugagca

SEQ ID NO: 129401 - RNA, 32 nt, Homo Sapiens
ucuuuagucacccaguugcacacugggcauuu

SEQ ID NO: 129402 - RNA, 32 nt, Homo Sapiens
acucccacuuccagaagcuaggagggagggau

SEQ ID NO: 129403 - RNA, 32 nt, Homo Sapiens
acgcgggagcugggcggcgcgcggacuggggc

SEQ ID NO: 129404 - RNA, 32 nt, Homo Sapiens
gaugagccauuaaaauagaaugauccuuuaug

SEQ ID NO: 129405 - RNA, 32 nt, Homo Sapiens
caugaagaauaaauacauggcgggaaacacac

SEQ ID NO: 129406 - RNA, 32 nt, Homo Sapiens
accggggugauguuagaucuggaacccccaag

SEQ ID NO: 129407 - RNA, 32 nt, Homo Sapiens
auguuguguuuguuauuuuaaacuuuaauguu

SEQ ID NO: 129408 - RNA, 32 nt, Homo Sapiens
aagggcgaagagaggggcguggggaggcugga

SEQ ID NO: 129409 - RNA, 27 nt, Homo Sapiens
gugguuuccuucuuuguguuccuaagu

SEQ ID NO: 129410 - RNA, 31 nt, Homo Sapiens
ucagcucuagagguuugcuccgauuuauauc

SEQ ID NO: 129411 - RNA, 32 nt, Homo Sapiens
uacaggugugcacuaccacaccuggcuauuuu

SEQ ID NO: 129412 - RNA, 32 nt, Homo Sapiens
ucacccugaggccccaggggagaggacccgug

SEQ ID NO: 129413 - RNA, 32 nt, Homo Sapiens
ggugauuuuuauuuucucugucugaagaacca

SEQ ID NO: 129414 - RNA, 32 nt, Homo Sapiens
ccaugcugugcuugccgcucugaaacagacag

SEQ ID NO: 129415 - RNA, 32 nt, Homo Sapiens
aaaggcagggacccgguguccaggcuacagag

SEQ ID NO: 129416 - RNA, 32 nt, Homo Sapiens
ucaccaugccccagccccagccuggcccgcug

SEQ ID NO: 129417 - RNA, 32 nt, Homo Sapiens
uggaugucuuuuucuuuuuauggcucugguuc

SEQ ID NO: 129418 - RNA, 32 nt, Homo Sapiens
gccccggcugccaucuccuccuccugggccgc

SEQ ID NO: 129419 - RNA, 32 nt, Homo Sapiens
uaagauucuaacuuaguuucauuucugaggag

SEQ ID NO: 129420 - RNA, 32 nt, Homo Sapiens
uuacuugauaaggauuuuuaagauacucuaua

SEQ ID NO: 129421 - RNA, 32 nt, Homo Sapiens
ucuaauaccaaaaccugacaggcacaaugaaa

SEQ ID NO: 129422 - RNA, 32 nt, Homo Sapiens
uugccgucccgucauggggcagggaauccaua

SEQ ID NO: 129423 - RNA, 32 nt, Homo Sapiens
agcgggggguggcagggccuggugugugccga

SEQ ID NO: 129424 - RNA, 32 nt, Homo Sapiens
aacaguggagacaguaaugcaaugcaggaagu

SEQ ID NO: 129425 - RNA, 32 nt, Homo Sapiens
ggccugccccggcgcccucccucagcccgggu

SEQ ID NO: 129426 - RNA, 32 nt, Homo Sapiens
cccuccacucaccucuagcucccuuucggcuu

SEQ ID NO: 129427 - RNA, 32 nt, Homo Sapiens
gaugcgggucugaccugagcccucccgugaca

SEQ ID NO: 129428 - RNA, 32 nt, Homo Sapiens
caauuuucacugggaacaaaaaguauaaucac

SEQ ID NO: 129429 - RNA, 32 nt, Homo Sapiens
ugucugcaccgcgccagccccagaccacggac

SEQ ID NO: 129430 - RNA, 32 nt, Homo Sapiens
ucagcaaugucuucgaccacguggugagccgc

SEQ ID NO: 129431 - RNA, 32 nt, Homo Sapiens
gccagauaaaaauaaaacaagugaauuugcaa

SEQ ID NO: 129432 - RNA, 32 nt, Homo Sapiens
ggacuugcggauaacugaugcuacugagccga

SEQ ID NO: 129433 - RNA, 32 nt, Homo Sapiens
cccgcagccugcggcgcagagaggcugggcuu

SEQ ID NO: 129434 - RNA, 32 nt, Homo Sapiens
ccucagcacucccacaccucccuuccagcagg

SEQ ID NO: 129435 - RNA, 32 nt, Homo Sapiens
gaucaaaacuaaaacuguuugcauuuuaaaag

SEQ ID NO: 129436 - RNA, 32 nt, Homo Sapiens
augaucuuauaucuagaaaaauguagagacuc

SEQ ID NO: 129437 - RNA, 32 nt, Homo Sapiens
gagggagcagugcaccugccagcguggccgag

SEQ ID NO: 129438 - RNA, 32 nt, Homo Sapiens
aaguggugcuaaugggaagagaauucugguuu

SEQ ID NO: 129439 - RNA, 32 nt, Homo Sapiens
ggucucaaacuccugaccucaaguaauccacc

SEQ ID NO: 129440 - RNA, 32 nt, Homo Sapiens
ucccuccccccuccccuuucugauuugcugaa

SEQ ID NO: 129441 - RNA, 32 nt, Homo Sapiens
cgcacgaugcccucggccaccagccacagcgg

SEQ ID NO: 129442 - RNA, 32 nt, Homo Sapiens
cuuacuucacugaagacauaugcugagguuuu

SEQ ID NO: 129443 - RNA, 32 nt, Homo Sapiens
ucacaauuaaucacaaguguacaggauuagac

SEQ ID NO: 129444 - RNA, 32 nt, Homo Sapiens
cagaaacaucuuggccagacacagcauuaaua

SEQ ID NO: 129445 - RNA, 29 nt, Homo Sapiens
aacugcaucugugucugaaagcugggaca

SEQ ID NO: 129446 - RNA, 32 nt, Homo Sapiens
auugucacagacaaagauuuuuguuccaauac

SEQ ID NO: 129447 - RNA, 32 nt, Homo Sapiens
ugucuccgccccaucgaggaggaggcccguca

SEQ ID NO: 129448 - RNA, 31 nt, Homo Sapiens
caugacucguugagaaaguugaggaauuucc

SEQ ID NO: 129449 - RNA, 32 nt, Homo Sapiens
caugguggcugcccagucuucuggccagugug

SEQ ID NO: 129450 - RNA, 32 nt, Homo Sapiens
uguaagauauuuuuaaagccacugcuuauucu

SEQ ID NO: 129451 - RNA, 32 nt, Homo Sapiens
ccaugggaggggcugggacuggagcuggagca

SEQ ID NO: 129452 - RNA, 32 nt, Homo Sapiens
gcugagccccacuccugagaccgcgaggugcc

SEQ ID NO: 129453 - RNA, 32 nt, Homo Sapiens
cauuuaaguggaaaaccaaguuaucauugucu

SEQ ID NO: 129454 - RNA, 32 nt, Homo Sapiens
uuuagcuuugugggugguauuuucaugcaaau

SEQ ID NO: 129455 - RNA, 32 nt, Homo Sapiens
ggaaaguuuguugcuuuuuuuuuuuuuuuaaa

SEQ ID NO: 129456 - RNA, 31 nt, Homo Sapiens
aacaggcaauagaaauauguauaucagauuu

SEQ ID NO: 129457 - RNA, 32 nt, Homo Sapiens
cacugcacuccagccugggugacagagcaaga

SEQ ID NO: 129458 - RNA, 32 nt, Homo Sapiens
gccagugccccucccugcucugggagcauugc

SEQ ID NO: 129459 - RNA, 32 nt, Homo Sapiens
aucccucucccaggcucuggccccuuggcagc

SEQ ID NO: 129460 - RNA, 28 nt, Homo Sapiens
guaacaugggccuucaggaugaccccuu

SEQ ID NO: 129461 - RNA, 32 nt, Homo Sapiens
cuuccaccccagaaauguguugguguaacauu

SEQ ID NO: 129462 - RNA, 32 nt, Homo Sapiens
ucacccugacuaaagauugucuuaaguagcag

SEQ ID NO: 129463 - RNA, 32 nt, Homo Sapiens
ucccucacagugcgcaguggcucccacuucag

SEQ ID NO: 129464 - RNA, 32 nt, Homo Sapiens
cuucagauuguagcuuugaagaugaacaauac

SEQ ID NO: 129465 - RNA, 32 nt, Homo Sapiens
guggggccaucccgaccccaccccaaccugcc

SEQ ID NO: 129466 - RNA, 32 nt, Homo Sapiens
ugguggcuuaggaucuucggaucggccacccu

SEQ ID NO: 129467 - RNA, 32 nt, Homo Sapiens
uuagacuauugcauauuaaucuguauauuuau

SEQ ID NO: 129468 - RNA, 32 nt, Homo Sapiens
auccuuuuucuuuucucaaguucuagggggca

SEQ ID NO: 129469 - RNA, 32 nt, Homo Sapiens
ugaacuagugauugucagacugguauggaggu

SEQ ID NO: 129470 - RNA, 32 nt, Homo Sapiens
auguuuuuucacuucaaauucuauccucuuug

SEQ ID NO: 129471 - RNA, 32 nt, Homo Sapiens
acaggcagagacccuuugccccugccuuucuc

SEQ ID NO: 129472 - RNA, 32 nt, Homo Sapiens
ccccaucuuccuggccucuuuggcagcuccac

SEQ ID NO: 129473 - RNA, 32 nt, Homo Sapiens
cugugggccggggccuggagggcugcucugug

SEQ ID NO: 129474 - RNA, 32 nt, Homo Sapiens
ccaucuucccaccucccugugcccagaggguu

SEQ ID NO: 129475 - RNA, 32 nt, Homo Sapiens
acaccuguagucaaaguuggugucacaagaua

SEQ ID NO: 129476 - RNA, 32 nt, Homo Sapiens
augcucacaauuuucugcaaguugccuccacu

SEQ ID NO: 129477 - RNA, 29 nt, Homo Sapiens
cugagguccugugagugaagugaccucau

SEQ ID NO: 129478 - RNA, 32 nt, Homo Sapiens
aaggcuggguucuccaagcugcacaccagagg

SEQ ID NO: 129479 - RNA, 32 nt, Homo Sapiens
aagggacggagaacggggcggaggcggaguca

SEQ ID NO: 129480 - RNA, 32 nt, Homo Sapiens
caugaggauauuaaaaauacauugugaagaau

SEQ ID NO: 129481 - RNA, 32 nt, Homo Sapiens
cacugaaaaaggaaagaugcugccagguguag

SEQ ID NO: 129482 - RNA, 32 nt, Homo Sapiens
gauuccagacccaggaggagcucaacgcagcu

SEQ ID NO: 129483 - RNA, 32 nt, Homo Sapiens
cuugcaaauuaguguagauaucaugauauuuc

SEQ ID NO: 129484 - RNA, 32 nt, Homo Sapiens
cggaggccgcguggacccgaaagccgcuggga

SEQ ID NO: 129485 - RNA, 32 nt, Homo Sapiens
caaagcucacagcagcugccuacgccagguuu

SEQ ID NO: 129486 - RNA, 32 nt, Homo Sapiens
aggguugcuuaccugcccugcuggggcagggu

SEQ ID NO: 129487 - RNA, 32 nt, Homo Sapiens
ucaaaaacccacccugaaugaauaaaaggagc

SEQ ID NO: 129488 - RNA, 32 nt, Homo Sapiens
aucauguuaaccucugcuuuuaucucagaugu

SEQ ID NO: 129489 - RNA, 32 nt, Homo Sapiens
uccugcacuccaagggaccccuccaggggacc

SEQ ID NO: 129490 - RNA, 32 nt, Homo Sapiens
cauauaauauuuuucuucagaucuuugaaaaa

SEQ ID NO: 129491 - RNA, 32 nt, Homo Sapiens
ucguggcgcugguggcuccagcuguuaguuuc

SEQ ID NO: 129492 - RNA, 32 nt, Homo Sapiens
uugcugaggacggaagccaaggagacaggaac

SEQ ID NO: 129493 - RNA, 32 nt, Homo Sapiens
uacaugguccucaggcauggacaggcuggcau

SEQ ID NO: 129494 - RNA, 32 nt, Homo Sapiens
aaggaagaccggagucccacucagucauagca

SEQ ID NO: 129495 - RNA, 32 nt, Homo Sapiens
aaagauauaauguacauauuaaguauacuagc

SEQ ID NO: 129496 - RNA, 32 nt, Homo Sapiens
ugcugauuacuaccuuuuaaaauauuuuagau

SEQ ID NO: 129497 - RNA, 32 nt, Homo Sapiens
uuuccuccccugccggcccccuccgcccccac

SEQ ID NO: 129498 - RNA, 32 nt, Homo Sapiens
augcggaaacguaugaaacagaugaagaauga

SEQ ID NO: 129499 - RNA, 32 nt, Homo Sapiens
gccggugccccugcgccgcgcggacuccugcc

SEQ ID NO: 129500 - RNA, 32 nt, Homo Sapiens
ugccuuccuggccagcugugcuuguuaucuuc

SEQ ID NO: 129501 - RNA, 32 nt, Homo Sapiens
cuguguggcagagcgucguuuccgggcccuca

SEQ ID NO: 129502 - RNA, 32 nt, Homo Sapiens
uguacacaauaaauuuguuagacugaguacuu

SEQ ID NO: 129503 - RNA, 32 nt, Homo Sapiens
ggauuugguauuuuagucauguucuuucaugc

SEQ ID NO: 129504 - RNA, 32 nt, Homo Sapiens
ucugagggaaauguuuuguaaacauuuauuuu

SEQ ID NO: 129505 - RNA, 32 nt, Homo Sapiens
ccacgcguccgcccacgcguccgguccuguuc

SEQ ID NO: 129506 - RNA, 32 nt, Homo Sapiens
cggguggaacauuugagggcaugaguucgaga

SEQ ID NO: 129507 - RNA, 32 nt, Homo Sapiens
acguuuuaaaaauuauuucaaauggaacugaa

SEQ ID NO: 129508 - RNA, 32 nt, Homo Sapiens
uaaauuacugucauaauucaguuuaagcuaug

SEQ ID NO: 129509 - RNA, 32 nt, Homo Sapiens
uagacccuuucaugccagcaguggucauauug

SEQ ID NO: 129510 - RNA, 32 nt, Homo Sapiens
gggaaucgggcgggaccggugcuaagaacucu

SEQ ID NO: 129511 - RNA, 32 nt, Homo Sapiens
caggcacuauacauggugcugugcaaaauagu

SEQ ID NO: 129512 - RNA, 32 nt, Homo Sapiens
ggagaaugagcaaauaccuuguguuacagcug

SEQ ID NO: 129513 - RNA, 32 nt, Homo Sapiens
gcucuaaguauuuuacacacaucaaaucauuu

SEQ ID NO: 129514 - RNA, 32 nt, Homo Sapiens
uuuauaaugcccugcaacucuaaaccauccuu

SEQ ID NO: 129515 - RNA, 32 nt, Homo Sapiens
aagccuugcucuuuuccaucaugccucuaauc

SEQ ID NO: 129516 - RNA, 32 nt, Homo Sapiens
acccccagcuuccccccuccccgggagccagg

SEQ ID NO: 129517 - RNA, 32 nt, Homo Sapiens
acuccccugcugucgcgcggcggcggcggugg

SEQ ID NO: 129518 - RNA, 32 nt, Homo Sapiens
ugucacggugcaagucucccccugcaccccuc

SEQ ID NO: 129519 - RNA, 32 nt, Homo Sapiens
ucagaccgucuuccuccaaccccucuauguag

SEQ ID NO: 129520 - RNA, 32 nt, Homo Sapiens
ugcaguuuucuuuuaauaaguaaagugagacu

SEQ ID NO: 129521 - RNA, 32 nt, Homo Sapiens
ggagguuggcccccagcuccugcuucaggcug

SEQ ID NO: 129522 - RNA, 32 nt, Homo Sapiens
uuccuuuaugaguacacaugcacucugguuug

SEQ ID NO: 129523 - RNA, 32 nt, Homo Sapiens
uuuucacaugucugcuuauuuauuuuauauuu

SEQ ID NO: 129524 - RNA, 32 nt, Homo Sapiens
aaaaccaacuaaaaagugauucuugcacauga

SEQ ID NO: 129525 - RNA, 32 nt, Homo Sapiens
gcaauuacugucaaaagaaauuucagaaaaca

SEQ ID NO: 129526 - RNA, 32 nt, Homo Sapiens
uaucugagauugucaagcauuuagacaguuaa

SEQ ID NO: 129527 - RNA, 32 nt, Homo Sapiens
uucuaaguuugaaaucaguucaaaguuuauuu

SEQ ID NO: 129528 - RNA, 32 nt, Homo Sapiens
uucacauucuacuacuucugcgcuagagaacg

SEQ ID NO: 129529 - RNA, 32 nt, Homo Sapiens
gaagagguaacaaaaaaugcuaaauauuuuau

SEQ ID NO: 129530 - RNA, 32 nt, Homo Sapiens
cccauugcaggaguauuaauagcaacccacau

SEQ ID NO: 129531 - RNA, 32 nt, Homo Sapiens
acuccugcuccugaaucuucugaugggcccca

SEQ ID NO: 129532 - RNA, 32 nt, Homo Sapiens
uugucaguggagggagcagcuccccacucagc

SEQ ID NO: 129533 - RNA, 32 nt, Homo Sapiens
uuuauaaaaaucagauuuuucaguggucucuc

SEQ ID NO: 129534 - RNA, 32 nt, Homo Sapiens
gcauuuugauaaaauuaauuuuguuguuuccu

SEQ ID NO: 129535 - RNA, 32 nt, Homo Sapiens
gggugacgggaacgcgguagccugcuuggugg

SEQ ID NO: 129536 - RNA, 32 nt, Homo Sapiens
augcugggggaagaggggggacauuuuugagu

SEQ ID NO: 129537 - RNA, 32 nt, Homo Sapiens
ugaaauaaaaauuuaaaaaauuuuaaaaaaaa

SEQ ID NO: 129538 - RNA, 32 nt, Homo Sapiens
guccccaggcccugggucggccgcggagccga

SEQ ID NO: 129539 - RNA, 32 nt, Homo Sapiens
ugaguuaggggcgaggccccagcucugcugcu

SEQ ID NO: 129540 - RNA, 32 nt, Homo Sapiens
gggaacuuuuugcuguacaaaucuguuuaaaa

SEQ ID NO: 129541 - RNA, 32 nt, Homo Sapiens
ucuuucaaccaccuuuuaggcugcauauggau

SEQ ID NO: 129542 - RNA, 32 nt, Homo Sapiens
agguggggacggagcagcuggugucucggcag

SEQ ID NO: 129543 - RNA, 32 nt, Homo Sapiens
accguuuggaaauaaaucacauagagccuuug

SEQ ID NO: 129544 - RNA, 32 nt, Homo Sapiens
ucccacacuaucucuuguuuuguuuuguuuug

SEQ ID NO: 129545 - RNA, 32 nt, Homo Sapiens
agcucgcgccgccgucgccgccgccgcucagc

SEQ ID NO: 129546 - RNA, 32 nt, Homo Sapiens
agagccccgcccccgcuuucccgccugccggg

SEQ ID NO: 129547 - RNA, 32 nt, Homo Sapiens
uccacuucgggcgggggagcgccggaccgaau

SEQ ID NO: 129548 - RNA, 32 nt, Homo Sapiens
uuuugguagcaggaggcccacuccuuugacuu

SEQ ID NO: 129549 - RNA, 32 nt, Homo Sapiens
cuucagacaauaggcaggagccaggcagaguc

SEQ ID NO: 129550 - RNA, 32 nt, Homo Sapiens
gucccggcuggggaaggagggcggcgagcgcg

SEQ ID NO: 129551 - RNA, 32 nt, Homo Sapiens
gggguucaauugaaaaggaacaugacaaacuu

SEQ ID NO: 129552 - RNA, 32 nt, Homo Sapiens
ucagcaucagauaauucacaccagagagaaac

SEQ ID NO: 129553 - RNA, 32 nt, Homo Sapiens
gggcagccacggcccccuccccccacauugcc

SEQ ID NO: 129554 - RNA, 32 nt, Homo Sapiens
uuuccgucuggcucacagggggagggugaggc

SEQ ID NO: 129555 - RNA, 32 nt, Homo Sapiens
uguauuggguggcagggacacuuuucaagagu

SEQ ID NO: 129556 - RNA, 32 nt, Homo Sapiens
uuguggaccacuuugguuuucuuuuuugcgug

SEQ ID NO: 129557 - RNA, 32 nt, Homo Sapiens
ucuggggcagggugggggagaggggcagggac

SEQ ID NO: 129558 - RNA, 32 nt, Homo Sapiens
gccagcccaaguucgcucucugcacaccucga

SEQ ID NO: 129559 - RNA, 32 nt, Homo Sapiens
agcuguggcugacaguggcucuggccaggguu

SEQ ID NO: 129560 - RNA, 31 nt, Homo Sapiens
agguuuaugggaaacauucaagguuuuauug

SEQ ID NO: 129561 - RNA, 32 nt, Homo Sapiens
uguaaaaagggaauaacuguaugcagguuuga

SEQ ID NO: 129562 - RNA, 32 nt, Homo Sapiens
gccgcgccggcucugggcacucagcaucguuu

SEQ ID NO: 129563 - RNA, 32 nt, Homo Sapiens
uaagacuggucccaguucgguucucucccaca

SEQ ID NO: 129564 - RNA, 32 nt, Homo Sapiens
aaggaacugguuauguauguguguacaguuuu

SEQ ID NO: 129565 - RNA, 32 nt, Homo Sapiens
uuuuaauuagcagauagcauauuauacauacu

SEQ ID NO: 129566 - RNA, 32 nt, Homo Sapiens
gaaggaaaauuugagucuccagaaggaaagua

SEQ ID NO: 129567 - RNA, 32 nt, Homo Sapiens
uuacaguuugcuuuuuuguguguuugcugugc

SEQ ID NO: 129568 - RNA, 32 nt, Homo Sapiens
ccuuuuacagauuuuuuuuuuauucccuaaga

SEQ ID NO: 129569 - RNA, 32 nt, Homo Sapiens
gcuagugugggggcuccggcgggggcuguggc

SEQ ID NO: 129570 - RNA, 32 nt, Homo Sapiens
cggcuggugcacaacgcucugcucuacagaag

SEQ ID NO: 129571 - RNA, 32 nt, Homo Sapiens
cacauguuauggcagauugaaaaggaucucau

SEQ ID NO: 129572 - RNA, 32 nt, Homo Sapiens
uccagauucuuuguagccuuugaaagauuuuu

SEQ ID NO: 129573 - RNA, 32 nt, Homo Sapiens
guuauagcucaaaacagcgggacuggaugccu

SEQ ID NO: 129574 - RNA, 32 nt, Homo Sapiens
gugauaccauuucuuaaccuggaggauacaug

SEQ ID NO: 129575 - RNA, 32 nt, Homo Sapiens
aauaaaugaaaagccacuucuggagggaauga

SEQ ID NO: 129576 - RNA, 26 nt, Homo Sapiens
cauggaauuugccauggauggaauca

SEQ ID NO: 129577 - RNA, 32 nt, Homo Sapiens
ggcauuccauggugcuggccgugugcugcuuc

SEQ ID NO: 129578 - RNA, 32 nt, Homo Sapiens
aucccuaucauguggaugcacacacacccucu

SEQ ID NO: 129579 - RNA, 32 nt, Homo Sapiens
agcugaacggagcccgcauccugcuguggcgg

SEQ ID NO: 129580 - RNA, 32 nt, Homo Sapiens
ucaguguguucgcccgcguccccuccgcgcuc

SEQ ID NO: 129581 - RNA, 31 nt, Homo Sapiens
ucgcgcagggcgguguccugcccaacauuca

SEQ ID NO: 129582 - RNA, 32 nt, Homo Sapiens
gcggcccugcgggucuccagccagaggaagga

SEQ ID NO: 129583 - RNA, 32 nt, Homo Sapiens
ucagcgcugcggucucacuccuccccucauuu

SEQ ID NO: 129584 - RNA, 32 nt, Homo Sapiens
cacaugaagcaagaaugaccaauauucugaua

SEQ ID NO: 129585 - RNA, 32 nt, Homo Sapiens
acauaggggguuaggagaagggguuucuugau

SEQ ID NO: 129586 - RNA, 32 nt, Homo Sapiens
uuuguguucauuuagauuucagacagcaauca

SEQ ID NO: 129587 - RNA, 32 nt, Homo Sapiens
gggccagcugcuuuucggggaugacggguacc

SEQ ID NO: 129588 - RNA, 32 nt, Homo Sapiens
ugggcgcagccgugucgcuccuggacaguugc

SEQ ID NO: 129589 - RNA, 29 nt, Homo Sapiens
gaccagccugggcaacauggcaaaacccu

SEQ ID NO: 129590 - RNA, 32 nt, Homo Sapiens
gaaugcccagggacuccuggggcugcuggccc

SEQ ID NO: 129591 - RNA, 32 nt, Homo Sapiens
gcucucguggaguuuacagagaauaaugaaug

SEQ ID NO: 129592 - RNA, 32 nt, Homo Sapiens
gagucuuuuaugaacaaaugcucauugcacua

SEQ ID NO: 129593 - RNA, 32 nt, Homo Sapiens
agcgcgacgcggcggcagcagccccggugcgg

SEQ ID NO: 129594 - RNA, 32 nt, Homo Sapiens
gaauuccgagcuuuuuauuccuaagaggagaa

SEQ ID NO: 129595 - RNA, 32 nt, Homo Sapiens
uccgccuccuuggagaacacagcccuccagug

SEQ ID NO: 129596 - RNA, 32 nt, Homo Sapiens
uuuuaacagaugaguucuugacaaguuuugug

SEQ ID NO: 129597 - RNA, 32 nt, Homo Sapiens
aaaaauuauuuuuucuuccccucaacaaugaa

SEQ ID NO: 129598 - RNA, 32 nt, Homo Sapiens
gcagaaucuggaugaauggcacagaauugaaa

SEQ ID NO: 129599 - RNA, 32 nt, Homo Sapiens
guggcgccauugcugggaggcguaaccagaga

SEQ ID NO: 129600 - RNA, 32 nt, Homo Sapiens
gaaaugaauggggguaggaugccaagaagccu

SEQ ID NO: 129601 - RNA, 32 nt, Homo Sapiens
caaaaagguuccaagagguacuuuucuuuuua

SEQ ID NO: 129602 - RNA, 32 nt, Homo Sapiens
auguaaaacuaaagaauggauugaaaggauau

SEQ ID NO: 129603 - RNA, 32 nt, Homo Sapiens
ugaaagaaagacuccguaaucuuaaacagaug

SEQ ID NO: 129604 - RNA, 32 nt, Homo Sapiens
gcuauauacagauauuuuauuaucauuuuaca

SEQ ID NO: 129605 - RNA, 32 nt, Homo Sapiens
gcuuccacucagggcuucuccucugcuaggcu

SEQ ID NO: 129606 - RNA, 32 nt, Homo Sapiens
aauaguucccuaaggcagcuuuauggaaacua

SEQ ID NO: 129607 - RNA, 32 nt, Homo Sapiens
aauccuguuuauauguuauaguuucuugccac

SEQ ID NO: 129608 - RNA, 32 nt, Homo Sapiens
gaccugucccugcuccuccaaagcccacgucg

SEQ ID NO: 129609 - RNA, 32 nt, Homo Sapiens
ggccugggucagagcggugcugcccgugccgc

SEQ ID NO: 129610 - RNA, 32 nt, Homo Sapiens
cacaggguaccuccguccugcugaguggaaga

SEQ ID NO: 129611 - RNA, 32 nt, Homo Sapiens
ucaggaccaccaagccagcugcuuuggacccg

SEQ ID NO: 129612 - RNA, 32 nt, Homo Sapiens
cuuugauuuuauucuuuuuuuuuuuuucugug

SEQ ID NO: 129613 - RNA, 32 nt, Homo Sapiens
ucccuccucccuccccugagagugaggaccuc

SEQ ID NO: 129614 - RNA, 32 nt, Homo Sapiens
cgccuguaaucccagcacuuuucagaggccaa

SEQ ID NO: 129615 - RNA, 32 nt, Homo Sapiens
gcacaguaaacuaauaguuugagauuuaaaac

SEQ ID NO: 129616 - RNA, 32 nt, Homo Sapiens
gcugagcuccagcuuaaaccgcuuuuaauggc

SEQ ID NO: 129617 - RNA, 32 nt, Homo Sapiens
cuuucuguacuauuuuaaauaaguguguaucu

SEQ ID NO: 129618 - RNA, 32 nt, Homo Sapiens
cuacaaacuuuaaaaaacuaugucuaauuuau

SEQ ID NO: 129619 - RNA, 32 nt, Homo Sapiens
gaggccgggugcggagccgccgguggcccagc

SEQ ID NO: 129620 - RNA, 32 nt, Homo Sapiens
auguuccagaaagauuacuuuuuuccucuuau

SEQ ID NO: 129621 - RNA, 32 nt, Homo Sapiens
aagcauguauaaaugagcuuaagugugcugug

SEQ ID NO: 129622 - RNA, 28 nt, Homo Sapiens
cggagggggcggcgcugccgggcugaga

SEQ ID NO: 129623 - RNA, 32 nt, Homo Sapiens
cucagagaugcugcguggauguuuccuuaacc

SEQ ID NO: 129624 - RNA, 32 nt, Homo Sapiens
ucuuuaaacuagggaucuaaucugaaaauuca

SEQ ID NO: 129625 - RNA, 30 nt, Homo Sapiens
gugcggcgcgcgcagcagaucgcgcagcuc

SEQ ID NO: 129626 - RNA, 32 nt, Homo Sapiens
agaagaacccacagcugggccauuaccagccc

SEQ ID NO: 129627 - RNA, 32 nt, Homo Sapiens
auuacgaucccccaaguguccuggacccuggc

SEQ ID NO: 129628 - RNA, 32 nt, Homo Sapiens
uuuugaugauggauggaaggacacauacuacu

SEQ ID NO: 129629 - RNA, 32 nt, Homo Sapiens
cgugggcgcgcggcugugggaccgcccugggc

SEQ ID NO: 129630 - RNA, 32 nt, Homo Sapiens
cuccagaucacccaccucaucaggaagggggc

SEQ ID NO: 129631 - RNA, 32 nt, Homo Sapiens
aguggcccaagcaaggccucacacgcagccac

SEQ ID NO: 129632 - RNA, 32 nt, Homo Sapiens
aggcaaauauuucagcugggcuauaccccucu

SEQ ID NO: 129633 - RNA, 32 nt, Homo Sapiens
ggguuuccgggaggcgcguggggcuugaggcc

SEQ ID NO: 129634 - RNA, 32 nt, Homo Sapiens
gaguaagaaaauaaagcauggacaucaugaaa

SEQ ID NO: 129635 - RNA, 32 nt, Homo Sapiens
uccaagagacuugaauaauaauaauucaacaa

SEQ ID NO: 129636 - RNA, 28 nt, Homo Sapiens
guuguauuucuaaagauguguuuccuag

SEQ ID NO: 129637 - RNA, 32 nt, Homo Sapiens
cucugcaaaauaauucaggccacugucuccuu

SEQ ID NO: 129638 - RNA, 32 nt, Homo Sapiens
acacaccccuccccugccaucccuccccggac

SEQ ID NO: 129639 - RNA, 32 nt, Homo Sapiens
uaaaugaaucacccuuauuaaaacaggaggag

SEQ ID NO: 129640 - RNA, 32 nt, Homo Sapiens
cccaguuccuucccgggccccacacgcugcuc

SEQ ID NO: 129641 - RNA, 32 nt, Homo Sapiens
ccugugcccccggccgggcucucaugcgugga

SEQ ID NO: 129642 - RNA, 32 nt, Homo Sapiens
auucaugacuuaaauucuuaauucucaguuga

SEQ ID NO: 129643 - RNA, 32 nt, Homo Sapiens
ggccccuaaacacaagaguaguaauguuggca

SEQ ID NO: 129644 - RNA, 32 nt, Homo Sapiens
gcuacuuuuuaaaauuuagauguuagauugaa

SEQ ID NO: 129645 - RNA, 32 nt, Homo Sapiens
cuaccaucauccgguuuagucauccaacaaga

SEQ ID NO: 129646 - RNA, 32 nt, Homo Sapiens
agagucucccuuugucacccaggccggagugc

SEQ ID NO: 129647 - RNA, 32 nt, Homo Sapiens
uucuuaggggaacaaacugaagaaggguggag

SEQ ID NO: 129648 - RNA, 32 nt, Homo Sapiens
gucuauuucuuauuuauguuguaaggaacugu

SEQ ID NO: 129649 - RNA, 32 nt, Homo Sapiens
cugcaggaugggccgcgccgccguggcccgcu

SEQ ID NO: 129650 - RNA, 32 nt, Homo Sapiens
cgccuucugggcucccagccugccgggucgca

SEQ ID NO: 129651 - RNA, 32 nt, Homo Sapiens
gggacagcugggugugggcuggucaccucucu

SEQ ID NO: 129652 - RNA, 32 nt, Homo Sapiens
accuguuuuuauuugcucaauaacucuacuca

SEQ ID NO: 129653 - RNA, 32 nt, Homo Sapiens
gcuccggccucucggcggccgcuccaggugca

SEQ ID NO: 129654 - RNA, 32 nt, Homo Sapiens
agucuccccccucccaucuugaggucguucuc

SEQ ID NO: 129655 - RNA, 32 nt, Homo Sapiens
uugugugugggaaguggaagcagcaugaagug

SEQ ID NO: 129656 - RNA, 32 nt, Homo Sapiens
uuugaaguggaugcccgucuugccagaaaugc

SEQ ID NO: 129657 - RNA, 32 nt, Homo Sapiens
ucccaucgcacgugcuuucugcucuucuggga

SEQ ID NO: 129658 - RNA, 32 nt, Homo Sapiens
ccuuaaagaugaauucccagccugaggugaca

SEQ ID NO: 129659 - RNA, 32 nt, Homo Sapiens
acuacagugcccucgcaucucaucccagaaga

SEQ ID NO: 129660 - RNA, 32 nt, Homo Sapiens
aaccccucuuuggcugccccagcgagagccgg

SEQ ID NO: 129661 - RNA, 32 nt, Homo Sapiens
gggggacuaggugaagcggcgccgggccgggg

SEQ ID NO: 129662 - RNA, 32 nt, Homo Sapiens
caucaugcuuugagguuuggggugcucaggcu

SEQ ID NO: 129663 - RNA, 32 nt, Homo Sapiens
augcaaauggaacggcuucucaucuuucugcc

SEQ ID NO: 129664 - RNA, 32 nt, Homo Sapiens
acuaauaacuggaguaagcuacaggaucuaaa

SEQ ID NO: 129665 - RNA, 32 nt, Homo Sapiens
aaauagcuaaaagcaaaugaaguaaagggcau

SEQ ID NO: 129666 - RNA, 32 nt, Homo Sapiens
gccuuaauauauauuuguuuuagucaugaacu

SEQ ID NO: 129667 - RNA, 32 nt, Homo Sapiens
ugcggcccagauucuucaggauucuccgugaa

SEQ ID NO: 129668 - RNA, 32 nt, Homo Sapiens
uauucuccacagagugauacaugcuaaggugg

SEQ ID NO: 129669 - RNA, 32 nt, Homo Sapiens
uggaggcgacucuggaggacauccgggcagcg

SEQ ID NO: 129670 - RNA, 32 nt, Homo Sapiens
uugcauuucuaaaauuauaauugaaaacaaaa

SEQ ID NO: 129671 - RNA, 32 nt, Homo Sapiens
ugacucaaaaagacaaaaaguaacuugggcca

SEQ ID NO: 129672 - RNA, 32 nt, Homo Sapiens
uuuauuugaauaacaaggaaaacaguaacuaa

SEQ ID NO: 129673 - RNA, 32 nt, Homo Sapiens
cggguuuuuaaaaguagugucuggaguuugua

SEQ ID NO: 129674 - RNA, 32 nt, Homo Sapiens
gcugacaaagaugaccugcugcuguugaguga

SEQ ID NO: 129675 - RNA, 32 nt, Homo Sapiens
uuacuuuugugccucucagccguugauuguaa

SEQ ID NO: 129676 - RNA, 32 nt, Homo Sapiens
gcuacugaaggagccucaccccugccucaccc

SEQ ID NO: 129677 - RNA, 32 nt, Homo Sapiens
gcugcugcugccuccagcugcccaccacaggc

SEQ ID NO: 129678 - RNA, 32 nt, Homo Sapiens
ugccgggcgguaggcagcagcaggcugaaggg

SEQ ID NO: 129679 - RNA, 32 nt, Homo Sapiens
acccagaaguuaacauucagcugguauuugag

SEQ ID NO: 129680 - RNA, 32 nt, Homo Sapiens
aguuuuuccaaaaauaugaaaacuuguccuau

SEQ ID NO: 129681 - RNA, 32 nt, Homo Sapiens
uaaucuauuuuuguuucuuuucauuugaauau

SEQ ID NO: 129682 - RNA, 32 nt, Homo Sapiens
cuuuuuccuuuuucacuaucugcaucuucaaa

SEQ ID NO: 129683 - RNA, 32 nt, Homo Sapiens
uuguuuccaguuagcaauaucauaccuauuaa

SEQ ID NO: 129684 - RNA, 30 nt, Homo Sapiens
ucccaguccgucagggagacacuuccugga

SEQ ID NO: 129685 - RNA, 32 nt, Homo Sapiens
ggaggacagcggggccuggcgcuggcgccgag

SEQ ID NO: 129686 - RNA, 32 nt, Homo Sapiens
gucugcucccaccuccuucugugucccagacc

SEQ ID NO: 129687 - RNA, 32 nt, Homo Sapiens
ucaacauccuaaaaauguguuucuacaagacu

SEQ ID NO: 129688 - RNA, 32 nt, Homo Sapiens
ugcccggcaccggcgccgcgugggccaaaccu

SEQ ID NO: 129689 - RNA, 32 nt, Homo Sapiens
gcggggaggaggagcaaggacauguaccaugc

SEQ ID NO: 129690 - RNA, 32 nt, Homo Sapiens
uuuguuuuuuaaaugacugaagugcuauaaau

SEQ ID NO: 129691 - RNA, 32 nt, Homo Sapiens
gaauagagacguuugucuugucugucuucaac

SEQ ID NO: 129692 - RNA, 32 nt, Homo Sapiens
gccggccgccgggcacuuccuguggaggccgc

SEQ ID NO: 129693 - RNA, 32 nt, Homo Sapiens
caauaaguauuuuuauuauaacucagcccaua

SEQ ID NO: 129694 - RNA, 32 nt, Homo Sapiens
agugagugugugccuggcaggaaagcagggaa

SEQ ID NO: 129695 - RNA, 32 nt, Homo Sapiens
aacuuuugauuuccucuucucucccuucaagc

SEQ ID NO: 129696 - RNA, 32 nt, Homo Sapiens
ggaggcgcccucagacagcaguggcaucaacu

SEQ ID NO: 129697 - RNA, 32 nt, Homo Sapiens
auauauauauauauuuuaauucagaguuacau

SEQ ID NO: 129698 - RNA, 32 nt, Homo Sapiens
caugacauacgguuaaguaacuuuacaauuau

SEQ ID NO: 129699 - RNA, 32 nt, Homo Sapiens
ggacuaucaguucccucuaaauguauauguug

SEQ ID NO: 129700 - RNA, 32 nt, Homo Sapiens
uggggaggggaugggcuggagcuccgggcagu

SEQ ID NO: 129701 - RNA, 32 nt, Homo Sapiens
uuaauugugcugucguucaugaaacagagcug

SEQ ID NO: 129702 - RNA, 32 nt, Homo Sapiens
aaagccauccgaaauuccaguuuuaaaauaca

SEQ ID NO: 129703 - RNA, 32 nt, Homo Sapiens
aaaucugaaaauacucauauuuuauacauuaa

SEQ ID NO: 129704 - RNA, 32 nt, Homo Sapiens
uccacgggacgcgggcggaucuucuccggcca

SEQ ID NO: 129705 - RNA, 32 nt, Homo Sapiens
uuuuuaaaaauauauauuucagauuuucagug

SEQ ID NO: 129706 - RNA, 32 nt, Homo Sapiens
aacacuguugucaugggggcucugccaagacc

SEQ ID NO: 129707 - RNA, 31 nt, Homo Sapiens
gaggccaugaacgccacggggaccccggugg

SEQ ID NO: 129708 - RNA, 32 nt, Homo Sapiens
cuuggagcucguguggggucuccgguccaggg

SEQ ID NO: 129709 - RNA, 30 nt, Homo Sapiens
cugcgggcgaggcgcgcggucugguacucg

SEQ ID NO: 129710 - RNA, 32 nt, Homo Sapiens
ggcuacccaaggaaaaaaauaauuagcuuuau

SEQ ID NO: 129711 - RNA, 32 nt, Homo Sapiens
gggcagggcuggcuacggcaagagggaaccaa

SEQ ID NO: 129712 - RNA, 32 nt, Homo Sapiens
ucaccccuugugcucacccauagugauggcca

SEQ ID NO: 129713 - RNA, 32 nt, Homo Sapiens
agacgggcacaccaggcggccuccgggggaac

SEQ ID NO: 129714 - RNA, 32 nt, Homo Sapiens
uggauuaaacaaguauaaaauaaaauacauuu

SEQ ID NO: 129715 - RNA, 31 nt, Homo Sapiens
gccccaggcauugcucugccccgggcauugc

SEQ ID NO: 129716 - RNA, 32 nt, Homo Sapiens
gucaccagaccuccaaauauggcugccaccac

SEQ ID NO: 129717 - RNA, 32 nt, Homo Sapiens
gcggcggggauccccgagcggcucggaguggu

SEQ ID NO: 129718 - RNA, 32 nt, Homo Sapiens
ucaucgggaagaagggcgagacuguaaagcga

SEQ ID NO: 129719 - RNA, 32 nt, Homo Sapiens
cggaucgugcgcacgcucugcaaggugcgugg

SEQ ID NO: 129720 - RNA, 32 nt, Homo Sapiens
uggcgaggaugaugacaucuucaaccggaucu

SEQ ID NO: 129721 - RNA, 32 nt, Homo Sapiens
agguggaggagcagagucuucucuaaacuccc

SEQ ID NO: 129722 - RNA, 32 nt, Homo Sapiens
aauuagccgggcguggugucgggcgccuguag

SEQ ID NO: 129723 - RNA, 32 nt, Homo Sapiens
cuggcuuaaguacccaaagaaaagaaugcagc

SEQ ID NO: 129724 - RNA, 32 nt, Homo Sapiens
aggggguuaggcugaaaaguguucaauuagca

SEQ ID NO: 129725 - RNA, 32 nt, Homo Sapiens
aaccugaggagccaccugagccagcuuuauau

SEQ ID NO: 129726 - RNA, 32 nt, Homo Sapiens
ccugccugggcccaccugcugcugcugcuguu

SEQ ID NO: 129727 - RNA, 32 nt, Homo Sapiens
acaauuuggacaagacagcaaaugcuauuguc

SEQ ID NO: 129728 - RNA, 32 nt, Homo Sapiens
caccaggagagcagccacaaaggucaagaaag

SEQ ID NO: 129729 - RNA, 32 nt, Homo Sapiens
guaauuuuucccuucuucuacuugauuucugu

SEQ ID NO: 129730 - RNA, 29 nt, Homo Sapiens
uuuuccaucauuucaaaccacaaacaaaa

SEQ ID NO: 129731 - RNA, 32 nt, Homo Sapiens
uggagcuggugccuugcagcuucccuuuuguu

SEQ ID NO: 129732 - RNA, 32 nt, Homo Sapiens
guauuuuacaucguguuuuucuuacuauuuuu

SEQ ID NO: 129733 - RNA, 32 nt, Homo Sapiens
ucaccccuagcaccaccugagaccagcagggu

SEQ ID NO: 129734 - RNA, 32 nt, Homo Sapiens
uuuaucuagaaaugcauaggaauaugcuggug

SEQ ID NO: 129735 - RNA, 32 nt, Homo Sapiens
aggccuugccuggccugaugaugguggguggg

SEQ ID NO: 129736 - RNA, 32 nt, Homo Sapiens
auaagcaucuuucacagaauucguuucuuuaa

SEQ ID NO: 129737 - RNA, 32 nt, Homo Sapiens
ucaucucuaaaauuauaaaaauagaaaaaauu

SEQ ID NO: 129738 - RNA, 32 nt, Homo Sapiens
cucguggacaaaggaaaugcaagacgauggca

SEQ ID NO: 129739 - RNA, 32 nt, Homo Sapiens
ccucgggcgggggcaggagacggagcugagcg

SEQ ID NO: 129740 - RNA, 32 nt, Homo Sapiens
acuagauuguauucauuacuagauaaaaugua

SEQ ID NO: 129741 - RNA, 32 nt, Homo Sapiens
cccgcccgcccuccucugcccccucccccgca

SEQ ID NO: 129742 - RNA, 32 nt, Homo Sapiens
ugaguuggauuggaaaggaauauuuuaagugc

SEQ ID NO: 129743 - RNA, 32 nt, Homo Sapiens
caaugaaguauguuuuuugaaucaucaauucu

SEQ ID NO: 129744 - RNA, 32 nt, Homo Sapiens
caguuccccuauguggaaguggggcgggcuuc

SEQ ID NO: 129745 - RNA, 32 nt, Homo Sapiens
ugggcagcucuuuuaaguguaggugugaaggu

SEQ ID NO: 129746 - RNA, 32 nt, Homo Sapiens
cugaaauaugcaacagaagaaauauaucucua

SEQ ID NO: 129747 - RNA, 32 nt, Homo Sapiens
uccaggacggccucugugcugcuggggucacg

SEQ ID NO: 129748 - RNA, 32 nt, Homo Sapiens
aaugcucugauccagagcucaguggaugauuc

SEQ ID NO: 129749 - RNA, 32 nt, Homo Sapiens
agguuccccccgccuuucccuuugaaagcuag

SEQ ID NO: 129750 - RNA, 32 nt, Homo Sapiens
auuggcauaggaaauagugaccaagaaaugca

SEQ ID NO: 129751 - RNA, 32 nt, Homo Sapiens
gcagagagaauguauucacaggaggccauaaa

SEQ ID NO: 129752 - RNA, 32 nt, Homo Sapiens
gguuuguugugucuauuucagauuaguaauuu

SEQ ID NO: 129753 - RNA, 32 nt, Homo Sapiens
guuuacagaaaagaaagcaguaaaugcauuga

SEQ ID NO: 129754 - RNA, 32 nt, Homo Sapiens
cuucuuauuuuuccuuuuuaaaaaucgaugaa

SEQ ID NO: 129755 - RNA, 32 nt, Homo Sapiens
auuacauucacccaucuuucuguuugucauuc

SEQ ID NO: 129756 - RNA, 31 nt, Homo Sapiens
gcucaaggguugaucucaggaguccaggacc

SEQ ID NO: 129757 - RNA, 32 nt, Homo Sapiens
aagaaaucucaaaagugucacaaaacauuugu

SEQ ID NO: 129758 - RNA, 32 nt, Homo Sapiens
guauuucugggucuuucugacaucagcagaga

SEQ ID NO: 129759 - RNA, 32 nt, Homo Sapiens
ugaaauggauuucuucagcucuucuuaggaau

SEQ ID NO: 129760 - RNA, 32 nt, Homo Sapiens
aguagcugggacuacaggccccugcccagcua

SEQ ID NO: 129761 - RNA, 32 nt, Homo Sapiens
agcucacaccaauugguuuggcacaggcacag

SEQ ID NO: 129762 - RNA, 32 nt, Homo Sapiens
acccacaccccuguauucuccuccgaaccccu

SEQ ID NO: 129763 - RNA, 32 nt, Homo Sapiens
cuguggccugguuuugcuuugaaaccaagaaa

SEQ ID NO: 129764 - RNA, 32 nt, Homo Sapiens
ggcaaguaaacgagaacucuuauauuggcuuu

SEQ ID NO: 129765 - RNA, 32 nt, Homo Sapiens
cccucugaauauuuguguuuggcugcccaggc

SEQ ID NO: 129766 - RNA, 32 nt, Homo Sapiens
gguuucaccauauuggugaggcuggucucgaa

SEQ ID NO: 129767 - RNA, 32 nt, Homo Sapiens
ccugcucgaugcccggcccugggcaucggaug

SEQ ID NO: 129768 - RNA, 30 nt, Homo Sapiens
agcaggggcaggcgcagaggucccagcccc

SEQ ID NO: 129769 - RNA, 32 nt, Homo Sapiens
augaaggacuucccagaacuaccuagugcuaa

SEQ ID NO: 129770 - RNA, 32 nt, Homo Sapiens
gcccacgaaggggacaugcgcagccggcccag

SEQ ID NO: 129771 - RNA, 32 nt, Homo Sapiens
ccgugauuaacucauagcuacauaucauugca

SEQ ID NO: 129772 - RNA, 32 nt, Homo Sapiens
uucuagcagccgugcuauuacauuguacaaag

SEQ ID NO: 129773 - RNA, 32 nt, Homo Sapiens
gagcuugccugccuggccacagacaguguauc

SEQ ID NO: 129774 - RNA, 32 nt, Homo Sapiens
aagaaugcaggcagaagcugcuggauaaaaua

SEQ ID NO: 129775 - RNA, 32 nt, Homo Sapiens
cugccacaggcccagggcugcgugcacacugg

SEQ ID NO: 129776 - RNA, 32 nt, Homo Sapiens
gaaaguagccaaaaaauacauaucaugucuug

SEQ ID NO: 129777 - RNA, 32 nt, Homo Sapiens
ccucaucaaggguaagaaauggccuagucacc

SEQ ID NO: 129778 - RNA, 32 nt, Homo Sapiens
uguagugcauaaaauauuaaaauuuuaacaau

SEQ ID NO: 129779 - RNA, 32 nt, Homo Sapiens
auuauuuaauaaacuuuauucagaauugcgug

SEQ ID NO: 129780 - RNA, 32 nt, Homo Sapiens
aguuucaccauguuggccaggcuggucuccaa

SEQ ID NO: 129781 - RNA, 32 nt, Homo Sapiens
aaccguuuuauguguuuuuucuucugcccagg

SEQ ID NO: 129782 - RNA, 32 nt, Homo Sapiens
cugagccugucugaggggccagcccuuagugc

SEQ ID NO: 129783 - RNA, 32 nt, Homo Sapiens
aucuccugacuucaugauccacucgccucagc

SEQ ID NO: 129784 - RNA, 32 nt, Homo Sapiens
agguccccuggccugucuccacucuugcauua

SEQ ID NO: 129785 - RNA, 32 nt, Homo Sapiens
ggggucggaguguaggaaaauuuuaugucagu

SEQ ID NO: 129786 - RNA, 32 nt, Homo Sapiens
acauaagagaaaaaccaauuaguguauuggca

SEQ ID NO: 129787 - RNA, 32 nt, Homo Sapiens
gauauuacauucaccuuugauuguuuuuuaaa

SEQ ID NO: 129788 - RNA, 32 nt, Homo Sapiens
uuuauuuauagcaaacuaaguugaaaauuuua

SEQ ID NO: 129789 - RNA, 32 nt, Homo Sapiens
uuuguaccacuuuuagaagauaccagaugccu

SEQ ID NO: 129790 - RNA, 32 nt, Homo Sapiens
cugaugaacuuggaagacaaguaagcaaugga

SEQ ID NO: 129791 - RNA, 32 nt, Homo Sapiens
cuaacuuuacugugaaauccuaccacauucca

SEQ ID NO: 129792 - RNA, 32 nt, Homo Sapiens
uagucaggaaagggggcuuggggcuugccaca

SEQ ID NO: 129793 - RNA, 32 nt, Homo Sapiens
cauuuuuguuuaaucaaauacuugcuuaugaa

SEQ ID NO: 129794 - RNA, 32 nt, Homo Sapiens
gagccaugucugaccaggacguuuggaagauc

SEQ ID NO: 129795 - RNA, 32 nt, Homo Sapiens
gaggccauccccaccuggcccugccagggccc

SEQ ID NO: 129796 - RNA, 32 nt, Homo Sapiens
cuugggauauguuuuuuuuucuuuuaauuuug

SEQ ID NO: 129797 - RNA, 32 nt, Homo Sapiens
ucccguccuuugcauggcacccaagaaggaga

SEQ ID NO: 129798 - RNA, 32 nt, Homo Sapiens
uucuuuugaugaugaaguauugcuaauauuac

SEQ ID NO: 129799 - RNA, 32 nt, Homo Sapiens
uuucuuuucccugcaagcuacauccuacugcu

SEQ ID NO: 129800 - RNA, 32 nt, Homo Sapiens
cugggccagagaggcauuggugcgagggauug

SEQ ID NO: 129801 - RNA, 30 nt, Homo Sapiens
caggccggcaggcgggugcgcggagggcug

SEQ ID NO: 129802 - RNA, 32 nt, Homo Sapiens
cagacccuuaucuggaggaggaagagaagcag

SEQ ID NO: 129803 - RNA, 32 nt, Homo Sapiens
uucucaaacugggguccccaguggaauggccu

SEQ ID NO: 129804 - RNA, 32 nt, Homo Sapiens
augauacagaucuauuuuaauacacuuaccac

SEQ ID NO: 129805 - RNA, 32 nt, Homo Sapiens
gauuuuauugcuccuggcuacuccaugaucau

SEQ ID NO: 129806 - RNA, 32 nt, Homo Sapiens
gcucguagaguagaagacucggugccggcagu

SEQ ID NO: 129807 - RNA, 32 nt, Homo Sapiens
uccuucaaacucccaaccaaagugagaaaagc

SEQ ID NO: 129808 - RNA, 32 nt, Homo Sapiens
gaaccugugagaaaauauauggauauuauuuu

SEQ ID NO: 129809 - RNA, 32 nt, Homo Sapiens
cgaucucaggcagcaccccuccccuugcaggu

SEQ ID NO: 129810 - RNA, 32 nt, Homo Sapiens
uuucagccuugauggcugucggcaguuuucug

SEQ ID NO: 129811 - RNA, 32 nt, Homo Sapiens
cuuacccuuuuggaaucuccuccauuauuacc

SEQ ID NO: 129812 - RNA, 32 nt, Homo Sapiens
gccugcccgcggcuggggaaccaagggccugg

SEQ ID NO: 129813 - RNA, 31 nt, Homo Sapiens
ggagcgcuuggggauccuccaaggcgaccau

SEQ ID NO: 129814 - RNA, 32 nt, Homo Sapiens
acauuuuguuuagaaguucaguuuuuucuuau

SEQ ID NO: 129815 - RNA, 32 nt, Homo Sapiens
gugggcguuccucggcguccugaacccaaagg

SEQ ID NO: 129816 - RNA, 32 nt, Homo Sapiens
caccacugucuccucccgcauuggcccagcuu

SEQ ID NO: 129817 - RNA, 32 nt, Homo Sapiens
cgguccuggugcccuggaugcccaggaaucug

SEQ ID NO: 129818 - RNA, 32 nt, Homo Sapiens
auuuaaauuaggaaacaaagcuuagcaggaga

SEQ ID NO: 129819 - RNA, 30 nt, Homo Sapiens
gcugggcuggacuggccauuuuucuggggg

SEQ ID NO: 129820 - RNA, 32 nt, Homo Sapiens
gcacugaagaauuuaaugacuuguuuuacugc

SEQ ID NO: 129821 - RNA, 32 nt, Homo Sapiens
acggucgcccgcagcgcuugccugccagccuu

SEQ ID NO: 129822 - RNA, 32 nt, Homo Sapiens
auccucacugcccuccccagucucucuuaaag

SEQ ID NO: 129823 - RNA, 32 nt, Homo Sapiens
ugaccaccaagauguaaugaugauucuauucc

SEQ ID NO: 129824 - RNA, 32 nt, Homo Sapiens
caaacacacgcccuccucucccacuuccucuu

SEQ ID NO: 129825 - RNA, 32 nt, Homo Sapiens
aacgaggacuggaugucggcacuguguccccg

SEQ ID NO: 129826 - RNA, 32 nt, Homo Sapiens
aaaacuucaacaugcauaugauauauaguuac

SEQ ID NO: 129827 - RNA, 32 nt, Homo Sapiens
ggucaguacuaacauagcauuucguuaccucu

SEQ ID NO: 129828 - RNA, 32 nt, Homo Sapiens
caugaaaauuuuaaaaauacauaucgcugacu

SEQ ID NO: 129829 - RNA, 32 nt, Homo Sapiens
ggccuccucugcggagccccccggccugugug

SEQ ID NO: 129830 - RNA, 32 nt, Homo Sapiens
aaugugugugcagcucagccuucagagcgugc

SEQ ID NO: 129831 - RNA, 32 nt, Homo Sapiens
gguugcuugagcucaggaguuugagaccagcc

SEQ ID NO: 129832 - RNA, 32 nt, Homo Sapiens
uguacagaaaucuauuuuauaauaauuuauuu

SEQ ID NO: 129833 - RNA, 32 nt, Homo Sapiens
caccaucauccuuacugauaaaacagcaucug

SEQ ID NO: 129834 - RNA, 32 nt, Homo Sapiens
ucaaaacccacuggcuccugugcggugucaca

SEQ ID NO: 129835 - RNA, 27 nt, Homo Sapiens
aaccaaaauaaauauuucugcauuucg

SEQ ID NO: 129836 - RNA, 32 nt, Homo Sapiens
caaaggcucccucgcccugugagggcgagcgg

SEQ ID NO: 129837 - RNA, 32 nt, Homo Sapiens
auguuuuauugucauauuguuauuuucucuca

SEQ ID NO: 129838 - RNA, 32 nt, Homo Sapiens
cuagcuguacaguuaucagggauuuuuauucg

SEQ ID NO: 129839 - RNA, 32 nt, Homo Sapiens
uguuggauggggcucuccaagcaagagguggc

SEQ ID NO: 129840 - RNA, 30 nt, Homo Sapiens
auuagggauaaaacauauaggugcacaaga

SEQ ID NO: 129841 - RNA, 32 nt, Homo Sapiens
acacaagcacacaugcacagagcuucuugaca

SEQ ID NO: 129842 - RNA, 32 nt, Homo Sapiens
cccuccccggugaugccuggaauagccaccuc

SEQ ID NO: 129843 - RNA, 32 nt, Homo Sapiens
agcccuggauuuccugcugccauccucaccca

SEQ ID NO: 129844 - RNA, 32 nt, Homo Sapiens
uauggcgagcacugcgcaugcgggaaacccac

SEQ ID NO: 129845 - RNA, 32 nt, Homo Sapiens
aguagggaggaggcaaggagggggagaaccau

SEQ ID NO: 129846 - RNA, 32 nt, Homo Sapiens
agcggaaguggaagaaaguucuaguggcuuga

SEQ ID NO: 129847 - RNA, 32 nt, Homo Sapiens
acaauguaaaagacagagguuuagaacaaagu

SEQ ID NO: 129848 - RNA, 32 nt, Homo Sapiens
cugagaaaugaacacgaauccaucccaaccga

SEQ ID NO: 129849 - RNA, 32 nt, Homo Sapiens
uggaagagcagcggcccgagccggggccaugg

SEQ ID NO: 129850 - RNA, 32 nt, Homo Sapiens
cacugaggcagcucgaugugggccugcaggcu

SEQ ID NO: 129851 - RNA, 32 nt, Homo Sapiens
caaaggaagaacucagaaaugucuuguuuauu

SEQ ID NO: 129852 - RNA, 32 nt, Homo Sapiens
gugcugccaguuucccaaaacguaaucaagcc

SEQ ID NO: 129853 - RNA, 32 nt, Homo Sapiens
uuggaaaacauuuuuguaaaauguacaauaag

SEQ ID NO: 129854 - RNA, 32 nt, Homo Sapiens
acaggguccuggaugagaugcgcugucagugu

SEQ ID NO: 129855 - RNA, 32 nt, Homo Sapiens
ggagaagagguggccuggaguaccccgagauc

SEQ ID NO: 129856 - RNA, 32 nt, Homo Sapiens
cgucccugcccuccccggccccggggugcacc

SEQ ID NO: 129857 - RNA, 32 nt, Homo Sapiens
gugacagauguguuugcaaggcugggauggcu

SEQ ID NO: 129858 - RNA, 32 nt, Homo Sapiens
agggauuuuuauucguagucuaauuuugucaa

SEQ ID NO: 129859 - RNA, 32 nt, Homo Sapiens
gaggacgugucugguuauuauauaggugcaca

SEQ ID NO: 129860 - RNA, 32 nt, Homo Sapiens
cagaccaggccauugggccuaagugguaaaug

SEQ ID NO: 129861 - RNA, 32 nt, Homo Sapiens
gaugaagggaagaggguuguuuugguuucgga

SEQ ID NO: 129862 - RNA, 32 nt, Homo Sapiens
ucuccccuuuuggagucuccuguaucuguuau

SEQ ID NO: 129863 - RNA, 32 nt, Homo Sapiens
gccagaccaaccccagcccagcucucugcagc

SEQ ID NO: 129864 - RNA, 32 nt, Homo Sapiens
agugggcauccugucaucaucuccacuguccc

SEQ ID NO: 129865 - RNA, 32 nt, Homo Sapiens
acaagucggaaucugagaagugaggcuccaga

SEQ ID NO: 129866 - RNA, 32 nt, Homo Sapiens
gagaccccgugcaguacauucagacaccccgc

SEQ ID NO: 129867 - RNA, 32 nt, Homo Sapiens
aaggaaaagcaucucagcuguuguggaaaagg

SEQ ID NO: 129868 - RNA, 32 nt, Homo Sapiens
ugaagccaagcuguugucauuuucauucggug

SEQ ID NO: 129869 - RNA, 32 nt, Homo Sapiens
cuauuuuucugccuaugugugcuacuuucagu

SEQ ID NO: 129870 - RNA, 32 nt, Homo Sapiens
uauagcuaagaaugcgaaauucaccaacacgu

SEQ ID NO: 129871 - RNA, 32 nt, Homo Sapiens
gaacugcggugacaccgaggguuggggacucg

SEQ ID NO: 129872 - RNA, 32 nt, Homo Sapiens
ucccuagugucuggguccccgcccuccagccg

SEQ ID NO: 129873 - RNA, 32 nt, Homo Sapiens
acccuugaaaauaaacagucucuuuuuuacaa

SEQ ID NO: 129874 - RNA, 32 nt, Homo Sapiens
gcagccagacugccuuccgggucacugccaug

SEQ ID NO: 129875 - RNA, 32 nt, Homo Sapiens
gugaccuggaagcaagcccacccuccccaggg

SEQ ID NO: 129876 - RNA, 32 nt, Homo Sapiens
cuucucauuuuuccuuuguugauucaauuccu

SEQ ID NO: 129877 - RNA, 32 nt, Homo Sapiens
cucugggcaggcauccugguguccugagaggc

SEQ ID NO: 129878 - RNA, 32 nt, Homo Sapiens
cccagagcacaccaauggacaccaucaccucu

SEQ ID NO: 129879 - RNA, 32 nt, Homo Sapiens
uuaagccuccccuuccagucuuucuggacagc

SEQ ID NO: 129880 - RNA, 32 nt, Homo Sapiens
aaaguugggcuauacauaaauuauuaagaaau

SEQ ID NO: 129881 - RNA, 32 nt, Homo Sapiens
cuuggugccguggugauggcugcaguccaguu

SEQ ID NO: 129882 - RNA, 32 nt, Homo Sapiens
uggcugaugggcgcuccugguguugauagaga

SEQ ID NO: 129883 - RNA, 32 nt, Homo Sapiens
gacuuuucauuuccugaaaguuuaaaaauaca

SEQ ID NO: 129884 - RNA, 32 nt, Homo Sapiens
accaaccugggcaacauagugagaccuccauc

SEQ ID NO: 129885 - RNA, 32 nt, Homo Sapiens
ccccgcgggaugcccggcucaccgccgccgga

SEQ ID NO: 129886 - RNA, 32 nt, Homo Sapiens
cccugccuuuuguguuuuuguaaacuccuuga

SEQ ID NO: 129887 - RNA, 32 nt, Homo Sapiens
cucagaacuuuccuauccuggcacucucguua

SEQ ID NO: 129888 - RNA, 32 nt, Homo Sapiens
cgagauccgcgcucgccgccgcccgcccaggc

SEQ ID NO: 129889 - RNA, 32 nt, Homo Sapiens
guguuccuugggacugguuuugcugugguugg

SEQ ID NO: 129890 - RNA, 32 nt, Homo Sapiens
uacccaccacugugucggauuuuucuuaaaua

SEQ ID NO: 129891 - RNA, 32 nt, Homo Sapiens
gagcagggcgggcgaguuccgcgcucccuccc

SEQ ID NO: 129892 - RNA, 32 nt, Homo Sapiens
uucuguagcuuuuugaccuaagaucucagcaa

SEQ ID NO: 129893 - RNA, 32 nt, Homo Sapiens
ucucccaguuuagugauaacagguaugcacaa

SEQ ID NO: 129894 - RNA, 32 nt, Homo Sapiens
uuauucauucugugaucauuuauuuuaagcac

SEQ ID NO: 129895 - RNA, 28 nt, Homo Sapiens
gccgggacgcggccgccgagcguagguu

SEQ ID NO: 129896 - RNA, 32 nt, Homo Sapiens
uauauuucuuugauuuuuguuaauuuagaggu

SEQ ID NO: 129897 - RNA, 32 nt, Homo Sapiens
cucgggcaacggccgccgccgccacagccaca

SEQ ID NO: 129898 - RNA, 32 nt, Homo Sapiens
uguccuaccuuuaaucagguccugcucagcag

SEQ ID NO: 129899 - RNA, 32 nt, Homo Sapiens
gcacuguucuuugauuguuuauccaguccaac

SEQ ID NO: 129900 - RNA, 32 nt, Homo Sapiens
cagccugagccaugcgccccaacggcggcggc

SEQ ID NO: 129901 - RNA, 32 nt, Homo Sapiens
ccgcacgucucaacgcgggaaaacaguuccau

SEQ ID NO: 129902 - RNA, 32 nt, Homo Sapiens
uuuuuugccccaugauuuuucuuuggucagua

SEQ ID NO: 129903 - RNA, 32 nt, Homo Sapiens
uuauucugcuuaaauuugacguguuuuuugac

SEQ ID NO: 129904 - RNA, 32 nt, Homo Sapiens
accgccccccgcuccuucucgccgccucgagu

SEQ ID NO: 129905 - RNA, 32 nt, Homo Sapiens
ugaaguuggcggggacgguuccugucaucuuc

SEQ ID NO: 129906 - RNA, 32 nt, Homo Sapiens
uggucuccaaaaaauuaaugaugguuauuucu

SEQ ID NO: 129907 - RNA, 32 nt, Homo Sapiens
uauacaaaagguguuuuaauucuugcugucag

SEQ ID NO: 129908 - RNA, 32 nt, Homo Sapiens
ugauucuaauuuccccaacuguauuguaauca

SEQ ID NO: 129909 - RNA, 32 nt, Homo Sapiens
cucggggugggguggggccgaguggcugcccu

SEQ ID NO: 129910 - RNA, 32 nt, Homo Sapiens
aaauagcaaguuucaaauuuuacuugagcugu

SEQ ID NO: 129911 - RNA, 32 nt, Homo Sapiens
uuuuaaauguauuauuagugaccauuaaacau

SEQ ID NO: 129912 - RNA, 32 nt, Homo Sapiens
gcuuuggggcugcggcacugccacacauccuu

SEQ ID NO: 129913 - RNA, 32 nt, Homo Sapiens
uuggccuuaaagcuagccagcucggccgugcc

SEQ ID NO: 129914 - RNA, 32 nt, Homo Sapiens
caucccacucccuguuucgggccucgucugcu

SEQ ID NO: 129915 - RNA, 32 nt, Homo Sapiens
cauguaacugguuuuuguuagauuucugcaac

SEQ ID NO: 129916 - RNA, 32 nt, Homo Sapiens
gaaguguugaauugaaauccacagagcauuuu

SEQ ID NO: 129917 - RNA, 32 nt, Homo Sapiens
aauauaaaauaguuguccauauuuucacaggu

SEQ ID NO: 129918 - RNA, 32 nt, Homo Sapiens
cuucuuugucauuugagaaaggaugcaggagg

SEQ ID NO: 129919 - RNA, 32 nt, Homo Sapiens
ucugucuuuccggccuggaccccacccuccac

SEQ ID NO: 129920 - RNA, 32 nt, Homo Sapiens
cucgagcggcggcgccauggcccgagguagcg

SEQ ID NO: 129921 - RNA, 32 nt, Homo Sapiens
uucgaagacgcaccugcccagcccagcccagg

SEQ ID NO: 129922 - RNA, 32 nt, Homo Sapiens
guaugucucuuuaaguuuugauuaauguuucu

SEQ ID NO: 129923 - RNA, 31 nt, Homo Sapiens
ggcggcggcccccagaaccagcuggcagcaa

SEQ ID NO: 129924 - RNA, 32 nt, Homo Sapiens
ugggccuuuuaucucggugcugccgggggagg

SEQ ID NO: 129925 - RNA, 32 nt, Homo Sapiens
guggaaauauuuugaaaugcccuuuuucuuga

SEQ ID NO: 129926 - RNA, 32 nt, Homo Sapiens
auguaucucuggagugagaucuauguacaaag

SEQ ID NO: 129927 - RNA, 32 nt, Homo Sapiens
ggugcuggagaugccaagugagugugugcauu

SEQ ID NO: 129928 - RNA, 32 nt, Homo Sapiens
uagggguguauuguuucccacauauuaaguca

SEQ ID NO: 129929 - RNA, 32 nt, Homo Sapiens
guaggaauauuuuucguguucucuuuuaucug

SEQ ID NO: 129930 - RNA, 32 nt, Homo Sapiens
gggggcagugccuugcucccccugcucacucu

SEQ ID NO: 129931 - RNA, 32 nt, Homo Sapiens
agguggcucgggccaggcugcacucaaaaccc

SEQ ID NO: 129932 - RNA, 32 nt, Homo Sapiens
ugccuucucaaugagcaaaaccauuuucuaag

SEQ ID NO: 129933 - RNA, 32 nt, Homo Sapiens
ugggacgcgcgcccgggcggccggacgaagcg

SEQ ID NO: 129934 - RNA, 32 nt, Homo Sapiens
guccuuuuggaaagaauaguugcaguguuuau

SEQ ID NO: 129935 - RNA, 32 nt, Homo Sapiens
ccauucugcgucagccucccaaguagcuggga

SEQ ID NO: 129936 - RNA, 32 nt, Homo Sapiens
uuccuuugacaagcuucuauguauuuuuaaua

SEQ ID NO: 129937 - RNA, 32 nt, Homo Sapiens
auauauugcuauguaauuuuccaauuuuaaaa

SEQ ID NO: 129938 - RNA, 28 nt, Homo Sapiens
caagaaguuacagaacacagagugcuca

SEQ ID NO: 129939 - RNA, 32 nt, Homo Sapiens
uugguaucuguucuuuaauuuauuuuugcaug

SEQ ID NO: 129940 - RNA, 32 nt, Homo Sapiens
gagagggagaagcaccguacuuucaagcgcuc

SEQ ID NO: 129941 - RNA, 32 nt, Homo Sapiens
aaauaccauuugaauuuguauuucauaaagug

SEQ ID NO: 129942 - RNA, 32 nt, Homo Sapiens
aucacuggcaacacugcaugagguuguugguu

SEQ ID NO: 129943 - RNA, 32 nt, Homo Sapiens
gagcucaaggaccugggcgucaccguguucau

SEQ ID NO: 129944 - RNA, 32 nt, Homo Sapiens
cacugagugggguggggagcccaggccuggcc

SEQ ID NO: 129945 - RNA, 32 nt, Homo Sapiens
gcacagugaucagagagaggcugggguguguc

SEQ ID NO: 129946 - RNA, 32 nt, Homo Sapiens
ccauuucauggcuuauuuccuguggccauaga

SEQ ID NO: 129947 - RNA, 32 nt, Homo Sapiens
auuucuaccucuuuccuggcaauugaaaugga

SEQ ID NO: 129948 - RNA, 32 nt, Homo Sapiens
acaaaccugaugaaacagaugaaacagaugaa

SEQ ID NO: 129949 - RNA, 32 nt, Homo Sapiens
ugcuuauuucuuuuucuagaauguaagugaua

SEQ ID NO: 129950 - RNA, 32 nt, Homo Sapiens
agcuccaaccccuuauacagcuccucuggugg

SEQ ID NO: 129951 - RNA, 32 nt, Homo Sapiens
acaauuuuuuaaaaauaaaacuucauggagua

SEQ ID NO: 129952 - RNA, 32 nt, Homo Sapiens
ggaauccugcugcugcugcugcugcuaaaaac

SEQ ID NO: 129953 - RNA, 32 nt, Homo Sapiens
cugccuauaacucacaguugauaagaaagugg

SEQ ID NO: 129954 - RNA, 32 nt, Homo Sapiens
cuguuagggucucaguauggaaggauuuguag

SEQ ID NO: 129955 - RNA, 32 nt, Homo Sapiens
caccugcccagaggcccucccuguggacaccc

SEQ ID NO: 129956 - RNA, 32 nt, Homo Sapiens
gucccuccgucccagggggcugugcuggcaca

SEQ ID NO: 129957 - RNA, 30 nt, Homo Sapiens
ccuccagagaagcuucgcgaguggcuagag

SEQ ID NO: 129958 - RNA, 32 nt, Homo Sapiens
cagacugucguucugagcacucccaccgcugu

SEQ ID NO: 129959 - RNA, 32 nt, Homo Sapiens
aguccggaauuuuuuauuaauaaucggugcug

SEQ ID NO: 129960 - RNA, 27 nt, Homo Sapiens
cuauacccauucuucagugccuagcug

SEQ ID NO: 129961 - RNA, 32 nt, Homo Sapiens
auaaucacaaauauagagaauuccuauuuaaa

SEQ ID NO: 129962 - RNA, 32 nt, Homo Sapiens
gagcuugcagugagccgagauggagccacugc

SEQ ID NO: 129963 - RNA, 32 nt, Homo Sapiens
acuuuuucuaaagagaaguuugauauuuugua

SEQ ID NO: 129964 - RNA, 32 nt, Homo Sapiens
ucucauguucuuccuuuguauaaaguuugcau

SEQ ID NO: 129965 - RNA, 32 nt, Homo Sapiens
ugcuaaaguuguguauauguguguguauauau

SEQ ID NO: 129966 - RNA, 32 nt, Homo Sapiens
acuagcagagugcaggaucuguucugaaaggc

SEQ ID NO: 129967 - RNA, 32 nt, Homo Sapiens
ccgcuuagacaaugccccggagccgccagacc

SEQ ID NO: 129968 - RNA, 32 nt, Homo Sapiens
ugugccucaaggaaaaaaaaaauuaauguuua

SEQ ID NO: 129969 - RNA, 28 nt, Homo Sapiens
ucugcaguugucuguauguguuuuaacu

SEQ ID NO: 129970 - RNA, 32 nt, Homo Sapiens
ugcauuuuguaccaguggaacuuuuuauacug

SEQ ID NO: 129971 - RNA, 32 nt, Homo Sapiens
acaggagcacagaucagagaagcuagagagcu

SEQ ID NO: 129972 - RNA, 32 nt, Homo Sapiens
aucucugaugggagccucuuuagaucuuucgu

SEQ ID NO: 129973 - RNA, 32 nt, Homo Sapiens
cuuuucuuccccuuccucucucccaccagggg

SEQ ID NO: 129974 - RNA, 32 nt, Homo Sapiens
cguucaucuuaccuaaaaaauugaagacaaua

SEQ ID NO: 129975 - RNA, 32 nt, Homo Sapiens
ucuguuggaucuuucaaauuucuauuuuggac

SEQ ID NO: 129976 - RNA, 32 nt, Homo Sapiens
aggcgcggggccgcgccgcgaggccugauccc

SEQ ID NO: 129977 - RNA, 32 nt, Homo Sapiens
aggugccaggggagggaagggcugggaugcug

SEQ ID NO: 129978 - RNA, 32 nt, Homo Sapiens
uaaccauggucaacuguacuuuaaaguuauua

SEQ ID NO: 129979 - RNA, 32 nt, Homo Sapiens
aauuaggacuuagcuuccuucuuuggcaaaug

SEQ ID NO: 129980 - RNA, 32 nt, Homo Sapiens
agacuuaaaaauuuaaacauuggauuaggcag

SEQ ID NO: 129981 - RNA, 30 nt, Homo Sapiens
aaaugucugccugcugcagcccacugcauc

SEQ ID NO: 129982 - RNA, 32 nt, Homo Sapiens
uugaguguguuuuggaaccuucauagaacaca

SEQ ID NO: 129983 - RNA, 32 nt, Homo Sapiens
acaucgcugaguuuguuuucuuguucgggaga

SEQ ID NO: 129984 - RNA, 30 nt, Homo Sapiens
ggaagucaaccacuacaaccguguguguau

SEQ ID NO: 129985 - RNA, 32 nt, Homo Sapiens
ugucuauaggacuuaauuuagcaguccauuuu

SEQ ID NO: 129986 - RNA, 32 nt, Homo Sapiens
cuuucucccccuccuaugacacauuccugggu

SEQ ID NO: 129987 - RNA, 32 nt, Homo Sapiens
ggcuggaaaggguuauuuuaucugugggggag

SEQ ID NO: 129988 - RNA, 32 nt, Homo Sapiens
gggguaguuuggucccuggguccugagccuca

SEQ ID NO: 129989 - RNA, 32 nt, Homo Sapiens
uuuuauucaaagcacaaggacgguuauaacuc

SEQ ID NO: 129990 - RNA, 32 nt, Homo Sapiens
agcuccagggcgggcugcagcucccauccccu

SEQ ID NO: 129991 - RNA, 32 nt, Homo Sapiens
cuuaauaaaaauuuuauagugugaacagugca

SEQ ID NO: 129992 - RNA, 32 nt, Homo Sapiens
acuggguggacgugacauccaccugcacgaca

SEQ ID NO: 129993 - RNA, 32 nt, Homo Sapiens
uauauauuuuuggcugggggagugugaguuuu

SEQ ID NO: 129994 - RNA, 32 nt, Homo Sapiens
auaguuuuaagaggaagaaaacagaaacgugg

SEQ ID NO: 129995 - RNA, 32 nt, Homo Sapiens
ccgcagccagcgccaugcaaaacuacaaguac

SEQ ID NO: 129996 - RNA, 32 nt, Homo Sapiens
guucccagcuccagcucuaaccucgccuacac

SEQ ID NO: 129997 - RNA, 32 nt, Homo Sapiens
gaggggcuguccugggggagggcuggggggca

SEQ ID NO: 129998 - RNA, 32 nt, Homo Sapiens
ugcugacggugaucugaguacauuuuccagcu

SEQ ID NO: 129999 - RNA, 32 nt, Homo Sapiens
aggaccuggauagagauguuucccugaccauu

SEQ ID NO: 130000 - RNA, 32 nt, Homo Sapiens
cacucuggauuccacacugcacuguuaauaac

SEQ ID NO: 130001 - RNA, 32 nt, Homo Sapiens
ucuuuuuaaaauguaaauauuuggaugaaguu

SEQ ID NO: 130002 - RNA, 28 nt, Homo Sapiens
ugggugggauggggacauuugaacaugu

SEQ ID NO: 130003 - RNA, 32 nt, Homo Sapiens
ccugcccuuggggcccggggccaugcaguacc

SEQ ID NO: 130004 - RNA, 32 nt, Homo Sapiens
uagauauauuauuugcagcaagaaguucauuc

SEQ ID NO: 130005 - RNA, 32 nt, Homo Sapiens
ggagcagauaaaauuaucaaaaguuucaugaa

SEQ ID NO: 130006 - RNA, 32 nt, Homo Sapiens
ugucaaauagauccugaauccaacagacaaau

SEQ ID NO: 130007 - RNA, 32 nt, Homo Sapiens
gagaagcaggcuugucagacuccaccccuguu

SEQ ID NO: 130008 - RNA, 32 nt, Homo Sapiens
aaaagucgggagcgccacacaaaccuggcuau

SEQ ID NO: 130009 - RNA, 32 nt, Homo Sapiens
ugcauuuucagagcuuaagaaaaggaagaagc

SEQ ID NO: 130010 - RNA, 32 nt, Homo Sapiens
acugguggaggaagaaggucguguaagagcca

SEQ ID NO: 130011 - RNA, 32 nt, Homo Sapiens
uaucugaugaauuggaaaggagcaaaccagaa

SEQ ID NO: 130012 - RNA, 32 nt, Homo Sapiens
ugagcgcuaugaagcgcguggggcaggagcca

SEQ ID NO: 130013 - RNA, 32 nt, Homo Sapiens
gagggcugaaugguuuucugcuauagcagccg

SEQ ID NO: 130014 - RNA, 32 nt, Homo Sapiens
uuccacaggagguauuucuuuuuuauguuggu

SEQ ID NO: 130015 - RNA, 32 nt, Homo Sapiens
ccccaccucaaucccggcauccagccuucagu

SEQ ID NO: 130016 - RNA, 32 nt, Homo Sapiens
ucagcccuugaacaucuccuccaaagagacua

SEQ ID NO: 130017 - RNA, 32 nt, Homo Sapiens
ucacuaugauauaaauaacuagguuuuaaaac

SEQ ID NO: 130018 - RNA, 32 nt, Homo Sapiens
gacccucaggcccgggcccaccgcccccagcc

SEQ ID NO: 130019 - RNA, 32 nt, Homo Sapiens
aauuagucuuuuucuuuuuuugguaaauuuuu

SEQ ID NO: 130020 - RNA, 32 nt, Homo Sapiens
gggcugcguggcacagcuagugggccuccccc

SEQ ID NO: 130021 - RNA, 32 nt, Homo Sapiens
gcgcgagggaaguggcgggcggggacuaaggc

SEQ ID NO: 130022 - RNA, 32 nt, Homo Sapiens
cgcguaaggggcccggccggcggaaggaggug

SEQ ID NO: 130023 - RNA, 32 nt, Homo Sapiens
cacagccuacaccaaauccagcccuugauuuc

SEQ ID NO: 130024 - RNA, 32 nt, Homo Sapiens
cccgugcgccgagagcccccaagcccgucucc

SEQ ID NO: 130025 - RNA, 32 nt, Homo Sapiens
ugagaucaaaguuaagauuauauccuguuugu

SEQ ID NO: 130026 - RNA, 32 nt, Homo Sapiens
ccaccacaauuaacagcuauaucacccuccag

SEQ ID NO: 130027 - RNA, 32 nt, Homo Sapiens
agcuuguucuucuugguuugcuuucaaccugc

SEQ ID NO: 130028 - RNA, 32 nt, Homo Sapiens
uggguuuuucuuuucaacuacauaguaaggcu

SEQ ID NO: 130029 - RNA, 32 nt, Homo Sapiens
aagugccugccagacggcacggucugggugcg

SEQ ID NO: 130030 - RNA, 32 nt, Homo Sapiens
gucaguaaaaauuuaggcauauauauuuguac

SEQ ID NO: 130031 - RNA, 32 nt, Homo Sapiens
gacuacacauuuccaagaggagagaaaaagug

SEQ ID NO: 130032 - RNA, 32 nt, Homo Sapiens
ggcaugcguggccugucgccaccuggacagcg

SEQ ID NO: 130033 - RNA, 32 nt, Homo Sapiens
gaguuauugguguguguuuuagccucacguga

SEQ ID NO: 130034 - RNA, 32 nt, Homo Sapiens
auaauuugacauugcucaauauguaagcaugu

SEQ ID NO: 130035 - RNA, 32 nt, Homo Sapiens
uaauggcugacacccccauucccucucuucuu

SEQ ID NO: 130036 - RNA, 32 nt, Homo Sapiens
ucauaugaaacaaaaauuaaaauacguauuac

SEQ ID NO: 130037 - RNA, 32 nt, Homo Sapiens
cuuagugcuuaaaauauuaaucuuuugauuau

SEQ ID NO: 130038 - RNA, 32 nt, Homo Sapiens
gaugccacaugcugcuguuuccugcuugcccg

SEQ ID NO: 130039 - RNA, 30 nt, Homo Sapiens
gcugcucgcgcgcagucggaggcggagaag

SEQ ID NO: 130040 - RNA, 32 nt, Homo Sapiens
uaaaagcacagcacuuaauccuuuacauuguc

SEQ ID NO: 130041 - RNA, 32 nt, Homo Sapiens
aagaagagaaaagugguuuaucauugugugcu

SEQ ID NO: 130042 - RNA, 32 nt, Homo Sapiens
auucuuuguuuuaaacugaaccauagguacag

SEQ ID NO: 130043 - RNA, 32 nt, Homo Sapiens
aaauccuguggccuugcuggugguagucugca

SEQ ID NO: 130044 - RNA, 32 nt, Homo Sapiens
uccucguuuucaggcgccgccggcggcgcugu

SEQ ID NO: 130045 - RNA, 32 nt, Homo Sapiens
acuuuugagauugaauguaaaauauuuuaaau

SEQ ID NO: 130046 - RNA, 32 nt, Homo Sapiens
aaaccugcuuugcauagaaaucacuuuugccc

SEQ ID NO: 130047 - RNA, 32 nt, Homo Sapiens
uugggggcggcacuugggguuucugggaauga

SEQ ID NO: 130048 - RNA, 32 nt, Homo Sapiens
agaauuuuucuuuucaucuuacaaauuccaga

SEQ ID NO: 130049 - RNA, 32 nt, Homo Sapiens
uggguugcagauugcuuggggugaaaaugucu

SEQ ID NO: 130050 - RNA, 32 nt, Homo Sapiens
gguagcagccacacuuccuucagaaggaacug

SEQ ID NO: 130051 - RNA, 32 nt, Homo Sapiens
auuauucuaaaauaaauauauaugauaugguu

SEQ ID NO: 130052 - RNA, 32 nt, Homo Sapiens
cuucccagugcuugcgaccagccucauucuau

SEQ ID NO: 130053 - RNA, 32 nt, Homo Sapiens
ucuaaaauucuauucaguuguaugauuuguuu

SEQ ID NO: 130054 - RNA, 32 nt, Homo Sapiens
uccagaaaauguuaauugaugaaagguuacga

SEQ ID NO: 130055 - RNA, 32 nt, Homo Sapiens
uauaauauaaauuuauaauuugauuuuuuauu

SEQ ID NO: 130056 - RNA, 32 nt, Homo Sapiens
uuguuaucuuauucuuuuuaucuuuaguagac

SEQ ID NO: 130057 - RNA, 32 nt, Homo Sapiens
uuuaucugaaagauuaaaacaaaauauauuau

SEQ ID NO: 130058 - RNA, 32 nt, Homo Sapiens
uuuugaaaaaaguacauauuuauuuucuuuug

SEQ ID NO: 130059 - RNA, 32 nt, Homo Sapiens
gaggugucauugugugcugagugcucagguug

SEQ ID NO: 130060 - RNA, 32 nt, Homo Sapiens
gcuucauauucuuuuuaaaaugacuugaaauu

SEQ ID NO: 130061 - RNA, 32 nt, Homo Sapiens
ccauagaaaaguuauugggagaaggaaggacu

SEQ ID NO: 130062 - RNA, 32 nt, Homo Sapiens
acccuguugccugcuccugggcagugguuuug

SEQ ID NO: 130063 - RNA, 32 nt, Homo Sapiens
caucuauaaaaugucaugaaagaaaauaaagg

SEQ ID NO: 130064 - RNA, 32 nt, Homo Sapiens
cauucugcuucugauuuccccucccccagggc

SEQ ID NO: 130065 - RNA, 32 nt, Homo Sapiens
auuuguauauucaaauuucuauuuuauaggcc

SEQ ID NO: 130066 - RNA, 32 nt, Homo Sapiens
cuggggacuggagggaccaggaugcugguugg

SEQ ID NO: 130067 - RNA, 32 nt, Homo Sapiens
gcaggggagggagggacaauuuuauaaugaac

SEQ ID NO: 130068 - RNA, 32 nt, Homo Sapiens
agaaaggucccgaggcccgagucaccauuucc

SEQ ID NO: 130069 - RNA, 32 nt, Homo Sapiens
uaacaucugugcuacacucaaggagaaauacu

SEQ ID NO: 130070 - RNA, 32 nt, Homo Sapiens
cagacuccuguagacccagccucuaucuccug

SEQ ID NO: 130071 - RNA, 32 nt, Homo Sapiens
gccauugccugccuuauaggcauguagagacu

SEQ ID NO: 130072 - RNA, 32 nt, Homo Sapiens
caaacucuucacuccacuggcuguaacacauu

SEQ ID NO: 130073 - RNA, 32 nt, Homo Sapiens
uguaaaauugucagcagccucauggggaggaa

SEQ ID NO: 130074 - RNA, 32 nt, Homo Sapiens
gcugggccauuggcugucagugcugguccugg

SEQ ID NO: 130075 - RNA, 32 nt, Homo Sapiens
ccuggccccccuccaggcaugcuggccuccca

SEQ ID NO: 130076 - RNA, 32 nt, Homo Sapiens
gagauugagcgucugcagaaagaaauugagcg

SEQ ID NO: 130077 - RNA, 32 nt, Homo Sapiens
caaaguccuaaaacgcgcggccguggguucgg

SEQ ID NO: 130078 - RNA, 32 nt, Homo Sapiens
cgaguggcaggccagcucacacucugcugcac

SEQ ID NO: 130079 - RNA, 32 nt, Homo Sapiens
ccccggccgcccagagaugaccgcgaccgaag

SEQ ID NO: 130080 - RNA, 32 nt, Homo Sapiens
auccuguccuucucuuuccccauuccuugaua

SEQ ID NO: 130081 - RNA, 32 nt, Homo Sapiens
aguuugcccagcugcuuucuucugguuguaca

SEQ ID NO: 130082 - RNA, 32 nt, Homo Sapiens
aaucaaccaaacaaagaaaaaauuccacaaug

SEQ ID NO: 130083 - RNA, 32 nt, Homo Sapiens
uuauuuaguaauuuauacaaauauacaagaca

SEQ ID NO: 130084 - RNA, 32 nt, Homo Sapiens
auucuugcaauaacuaaaacuuguucauuauu

SEQ ID NO: 130085 - RNA, 32 nt, Homo Sapiens
acaucuucaucaccagcaaacgccaggacuug

SEQ ID NO: 130086 - RNA, 32 nt, Homo Sapiens
auccucaugggauucuauuaaaagcugcauga

SEQ ID NO: 130087 - RNA, 30 nt, Homo Sapiens
caagggccugggcgcgcggggccaauggga

SEQ ID NO: 130088 - RNA, 32 nt, Homo Sapiens
ggaggcuuaguuuguccaguccuuccaugccc

SEQ ID NO: 130089 - RNA, 32 nt, Homo Sapiens
caugccaaugauaggugcaaagaauauuggca

SEQ ID NO: 130090 - RNA, 32 nt, Homo Sapiens
cauccuugcugaccaugaugaucaggaugugg

SEQ ID NO: 130091 - RNA, 32 nt, Homo Sapiens
cccgcucuaugaugcuugcgcgcgucccccgc

SEQ ID NO: 130092 - RNA, 28 nt, Homo Sapiens
ccauaguuuuaaggaccaaggugugccc

SEQ ID NO: 130093 - RNA, 32 nt, Homo Sapiens
gccaggccauagcguguaugcaugugcacuuc

SEQ ID NO: 130094 - RNA, 32 nt, Homo Sapiens
ucggaauauggaagaaucauguagccaaggcc

SEQ ID NO: 130095 - RNA, 32 nt, Homo Sapiens
agggaagcaaggaaauuaacauuauugaaaua

SEQ ID NO: 130096 - RNA, 32 nt, Homo Sapiens
ggacuccggaaaagccguccgcgcuccgcucu

SEQ ID NO: 130097 - RNA, 32 nt, Homo Sapiens
uauggagaauccuuugucuuccacucacuguc

SEQ ID NO: 130098 - RNA, 32 nt, Homo Sapiens
ucgaacaaguggagaugauaagagacucagaa

SEQ ID NO: 130099 - RNA, 32 nt, Homo Sapiens
ggcggggcuucccucccgggccgcaugcgggg

SEQ ID NO: 130100 - RNA, 32 nt, Homo Sapiens
cucacugcaaccuccgccucccggguucacgc

SEQ ID NO: 130101 - RNA, 32 nt, Homo Sapiens
aagccuugaagaaguaugugagagggccacau

SEQ ID NO: 130102 - RNA, 32 nt, Homo Sapiens
gcgauuguggccccggccgcgguggccggcgc

SEQ ID NO: 130103 - RNA, 32 nt, Homo Sapiens
caggugcccggggccuggccccaggccugaau

SEQ ID NO: 130104 - RNA, 32 nt, Homo Sapiens
gcagguggccucugcuggucucuggcucuacg

SEQ ID NO: 130105 - RNA, 32 nt, Homo Sapiens
ugcgaacggaacagaguuuucucaaccuuugc

SEQ ID NO: 130106 - RNA, 31 nt, Homo Sapiens
ccgggcgagcgcagccaacaugucggauacc

SEQ ID NO: 130107 - RNA, 32 nt, Homo Sapiens
auuccagggcaacucuagcaucagagcaaaag

SEQ ID NO: 130108 - RNA, 32 nt, Homo Sapiens
acaccucggagcucaggugaggucuucuucag

SEQ ID NO: 130109 - RNA, 32 nt, Homo Sapiens
cuggcaacugaauagguuggccaguggcgcgg

SEQ ID NO: 130110 - RNA, 32 nt, Homo Sapiens
accaagcguuacaaaaucaguucuuuccuugg

SEQ ID NO: 130111 - RNA, 32 nt, Homo Sapiens
acagugaggaaaaacucccauaucauauaaaa

SEQ ID NO: 130112 - RNA, 32 nt, Homo Sapiens
uagcuagggcuuugucuuuucaucuuugugca

SEQ ID NO: 130113 - RNA, 32 nt, Homo Sapiens
cagaaugcccuucuuccccugcccuaggaaag

SEQ ID NO: 130114 - RNA, 32 nt, Homo Sapiens
aucaaaggacaaagugcccaagucuuuccuac

SEQ ID NO: 130115 - RNA, 32 nt, Homo Sapiens
aaagaaaagggagggcucugcggguggcggcg

SEQ ID NO: 130116 - RNA, 29 nt, Homo Sapiens
aggcugggggcugggaggacgccagcgug

SEQ ID NO: 130117 - RNA, 32 nt, Homo Sapiens
uaaaaaauucuaugcuauauuguugaucaagu

SEQ ID NO: 130118 - RNA, 32 nt, Homo Sapiens
auuagccgggcaugguggcgggccccuguagu

SEQ ID NO: 130119 - RNA, 32 nt, Homo Sapiens
ccucggcgugacucugauagugccuguggaug

SEQ ID NO: 130120 - RNA, 32 nt, Homo Sapiens
uauaggcuauuuccgucauuauagaaagcucu

SEQ ID NO: 130121 - RNA, 32 nt, Homo Sapiens
uacuguggcuucuccaccuggaaauuucccuc

SEQ ID NO: 130122 - RNA, 32 nt, Homo Sapiens
aaggacugaucauuugaaauaguuuucagucu

SEQ ID NO: 130123 - RNA, 32 nt, Homo Sapiens
aaguggaauaaaugugauacaacauauacuca

SEQ ID NO: 130124 - RNA, 32 nt, Homo Sapiens
aaggagcuggaacacacucuccaggccgucaa

SEQ ID NO: 130125 - RNA, 32 nt, Homo Sapiens
uagcccagaaaauuuaaggaaauauauuauuu

SEQ ID NO: 130126 - RNA, 32 nt, Homo Sapiens
cagugacucugcucccugaccacacaucggaa

SEQ ID NO: 130127 - RNA, 32 nt, Homo Sapiens
uucaaaaggaagguggguuuugaaagaagaac

SEQ ID NO: 130128 - RNA, 32 nt, Homo Sapiens
uuccaaauauauuaaagauguuaauucagcua

SEQ ID NO: 130129 - RNA, 32 nt, Homo Sapiens
ccgcggcgggauuuucccgggcggcgagagcg

SEQ ID NO: 130130 - RNA, 32 nt, Homo Sapiens
guggugggcggggguguuggccacuaagcaau

SEQ ID NO: 130131 - RNA, 32 nt, Homo Sapiens
uuacuaccguucuguacuggcuuacucuaaug

SEQ ID NO: 130132 - RNA, 32 nt, Homo Sapiens
gaaaagucuucauggcaagaaacuaugaguuc

SEQ ID NO: 130133 - RNA, 32 nt, Homo Sapiens
cucccguccgggcgccagcugguggggcgagc

SEQ ID NO: 130134 - RNA, 32 nt, Homo Sapiens
gucgcucugcuggccuggccggcaaccccagu

SEQ ID NO: 130135 - RNA, 32 nt, Homo Sapiens
auugucacuuugcauuguaccccaggaaucuu

SEQ ID NO: 130136 - RNA, 32 nt, Homo Sapiens
ucugcugugucuacuaugcuguuuccuuguuc

SEQ ID NO: 130137 - RNA, 32 nt, Homo Sapiens
caggcuccagcauguggagauccugugugugg

SEQ ID NO: 130138 - RNA, 32 nt, Homo Sapiens
agaauuggaagcuuuuagcauucuucagaaau

SEQ ID NO: 130139 - RNA, 32 nt, Homo Sapiens
uaaggcuguaggauauuuuugggaaauaaauc

SEQ ID NO: 130140 - RNA, 32 nt, Homo Sapiens
cacagcccacugaacaaggucucagggguauu

SEQ ID NO: 130141 - RNA, 32 nt, Homo Sapiens
gaccccugcauaaaugugggaucucucuguuu

SEQ ID NO: 130142 - RNA, 32 nt, Homo Sapiens
ccacagccgcccagcccugcuccucucgaauu

SEQ ID NO: 130143 - RNA, 32 nt, Homo Sapiens
cccaauaugcuuuauacugcuagacagggauu

SEQ ID NO: 130144 - RNA, 32 nt, Homo Sapiens
ugucggguucccucccucccacugccagucug

SEQ ID NO: 130145 - RNA, 32 nt, Homo Sapiens
agcugguaguccaucagcacaaugaaggagac

SEQ ID NO: 130146 - RNA, 32 nt, Homo Sapiens
gugggucagcccagcccuccagugccuccuuc

SEQ ID NO: 130147 - RNA, 32 nt, Homo Sapiens
uuugcacauaucugauuauauugaaagcaguu

SEQ ID NO: 130148 - RNA, 32 nt, Homo Sapiens
cugggaggagagcagcugcgggcgcgccaggg

SEQ ID NO: 130149 - RNA, 32 nt, Homo Sapiens
gugucuauaauggcugaaaccacuacauccau

SEQ ID NO: 130150 - RNA, 32 nt, Homo Sapiens
ugcccuagggaagaagcaagaaacuucggggc

SEQ ID NO: 130151 - RNA, 32 nt, Homo Sapiens
cguguccaggggccgacccggcccguagugug

SEQ ID NO: 130152 - RNA, 32 nt, Homo Sapiens
ccaggagcuggguaggaccagacuggucucua

SEQ ID NO: 130153 - RNA, 32 nt, Homo Sapiens
gugccuuagaggucguuaggccugccaaacgg

SEQ ID NO: 130154 - RNA, 32 nt, Homo Sapiens
uguguccuuaaauuguacccuauauuaaauua

SEQ ID NO: 130155 - RNA, 32 nt, Homo Sapiens
gaagaagcagaguggaauuagauagcauugaa

SEQ ID NO: 130156 - RNA, 32 nt, Homo Sapiens
aaacucuacaguguuugugggauguccccaaa

SEQ ID NO: 130157 - RNA, 32 nt, Homo Sapiens
cacagauagaagaaaaguuugaaaccaugaga

SEQ ID NO: 130158 - RNA, 27 nt, Homo Sapiens
aauaaaccucaucguuguuaucaccag

SEQ ID NO: 130159 - RNA, 32 nt, Homo Sapiens
agaugaggcagcugaggccuggggaugugaac

SEQ ID NO: 130160 - RNA, 32 nt, Homo Sapiens
auaguccugagauaaaagauucaguuuuacga

SEQ ID NO: 130161 - RNA, 32 nt, Homo Sapiens
ggaugccagggagaggcuccagauguucggag

SEQ ID NO: 130162 - RNA, 32 nt, Homo Sapiens
gccacuguacuauuauggcauauuuuaucuuu

SEQ ID NO: 130163 - RNA, 32 nt, Homo Sapiens
cagcgggaccugagggcggccaggaggggugg

SEQ ID NO: 130164 - RNA, 32 nt, Homo Sapiens
gguccucacaagccucuucugaagauggaagg

SEQ ID NO: 130165 - RNA, 32 nt, Homo Sapiens
cuaagauguauuauucugcuguggaucccacu

SEQ ID NO: 130166 - RNA, 32 nt, Homo Sapiens
ucuaucccuucggccgccgccggcaugagcca

SEQ ID NO: 130167 - RNA, 32 nt, Homo Sapiens
cugccaucccucggggcccaggcccucacccg

SEQ ID NO: 130168 - RNA, 32 nt, Homo Sapiens
gauuuguuuauaacaaauauuuuuaacuaguu

SEQ ID NO: 130169 - RNA, 32 nt, Homo Sapiens
aaaaccucaucucuacuaaaaauagaaaaauu

SEQ ID NO: 130170 - RNA, 32 nt, Homo Sapiens
uaguauuuuuuuucuuuuuuaaaauuacugua

SEQ ID NO: 130171 - RNA, 32 nt, Homo Sapiens
aaaaucuauuuuucuuuaaaucuuggaaaaau

SEQ ID NO: 130172 - RNA, 32 nt, Homo Sapiens
gggcgcuguggcucuagaugaccuagaguucu

SEQ ID NO: 130173 - RNA, 32 nt, Homo Sapiens
ccauuguauuauaauuaucuguuuaacaauuu

SEQ ID NO: 130174 - RNA, 29 nt, Homo Sapiens
cucccuguuuauaugcguacagccuggua

SEQ ID NO: 130175 - RNA, 32 nt, Homo Sapiens
guuguuguuuugcuguuuaucuugucacauua

SEQ ID NO: 130176 - RNA, 32 nt, Homo Sapiens
agaguuaagauaguuuaucaacucaaagauag

SEQ ID NO: 130177 - RNA, 32 nt, Homo Sapiens
ggcguggaugaggggcaggcgaggcagggccg

SEQ ID NO: 130178 - RNA, 29 nt, Homo Sapiens
ggauuucuacaguguucuauaaaagccaa

SEQ ID NO: 130179 - RNA, 32 nt, Homo Sapiens
gcucauccauucuccaccgugucucauucauc

SEQ ID NO: 130180 - RNA, 32 nt, Homo Sapiens
aagaacugaugcacuauauagaacgaauuugg

SEQ ID NO: 130181 - RNA, 32 nt, Homo Sapiens
uucuggcauguggcuaucaaguuagauugcug

SEQ ID NO: 130182 - RNA, 32 nt, Homo Sapiens
aaaaauuuucauuuauuuuguaccucauucac

SEQ ID NO: 130183 - RNA, 32 nt, Homo Sapiens
gccuccaggagcacgcagauggugcaggccaa

SEQ ID NO: 130184 - RNA, 32 nt, Homo Sapiens
gggcccuaguacuacuguguccuaagucugaa

SEQ ID NO: 130185 - RNA, 32 nt, Homo Sapiens
agagccagucacuucccuccccaggccccaaa

SEQ ID NO: 130186 - RNA, 32 nt, Homo Sapiens
cugccugccggggguuccugcagcaccccccu

SEQ ID NO: 130187 - RNA, 32 nt, Homo Sapiens
ccuagaaaaacaacucuacaaaaauuuugcag

SEQ ID NO: 130188 - RNA, 32 nt, Homo Sapiens
uaaucccuuagcaucagcuccucccucagugg

SEQ ID NO: 130189 - RNA, 32 nt, Homo Sapiens
ccgaaauuccaaggcccagacuugcggggggu

SEQ ID NO: 130190 - RNA, 32 nt, Homo Sapiens
gugagaagggucgggccaagauggcggugcag

SEQ ID NO: 130191 - RNA, 32 nt, Homo Sapiens
gccaguuuauguggucuguguucguuuguuuu

SEQ ID NO: 130192 - RNA, 32 nt, Homo Sapiens
gggcaggaauacuguuaucuaugugacggggc

SEQ ID NO: 130193 - RNA, 32 nt, Homo Sapiens
auuuauuccugcccuaauggggcucacauucu

SEQ ID NO: 130194 - RNA, 32 nt, Homo Sapiens
guguuagcuacuccaggcaguacuacauccuc

SEQ ID NO: 130195 - RNA, 32 nt, Homo Sapiens
aaucauagcuggggguuggggguggugggggu

SEQ ID NO: 130196 - RNA, 32 nt, Homo Sapiens
cugcguucucugccaaagacucgugggggcca

SEQ ID NO: 130197 - RNA, 32 nt, Homo Sapiens
aacacgugccuucuccacgguaucuccuggcc

SEQ ID NO: 130198 - RNA, 32 nt, Homo Sapiens
ccuuuugccucccaccaugauucugaggccuc

SEQ ID NO: 130199 - RNA, 32 nt, Homo Sapiens
ggacggcuccggacgcugcugccgugggccug

SEQ ID NO: 130200 - RNA, 32 nt, Homo Sapiens
cagagaaaugcgcugacaaaucuuaaaggugg

SEQ ID NO: 130201 - RNA, 32 nt, Homo Sapiens
cccagaccccgcagcucugugcccggcaagaa

SEQ ID NO: 130202 - RNA, 32 nt, Homo Sapiens
gcacgugaaggcggccggcgccaucuccgcgg

SEQ ID NO: 130203 - RNA, 32 nt, Homo Sapiens
acuaaaguauaaucaaaguaaauucaguuauu

SEQ ID NO: 130204 - RNA, 32 nt, Homo Sapiens
uuugcagcucggcugaaggccuugagcuuccu

SEQ ID NO: 130205 - RNA, 32 nt, Homo Sapiens
aaaaugaaaaaauaaauaaauguaaagccaua

SEQ ID NO: 130206 - RNA, 32 nt, Homo Sapiens
cacaagccaaaauaucucuauauggauacuaa

SEQ ID NO: 130207 - RNA, 32 nt, Homo Sapiens
cucacacacuugguuuuguucuauccuacauu

SEQ ID NO: 130208 - RNA, 32 nt, Homo Sapiens
uguacacuugucuauuuucucuuucuuuaaau

SEQ ID NO: 130209 - RNA, 31 nt, Homo Sapiens
cugggugccucgaguaccggaagcugcugac

SEQ ID NO: 130210 - RNA, 32 nt, Homo Sapiens
gccucucugauccuuccaucacagaaggaucu

SEQ ID NO: 130211 - RNA, 32 nt, Homo Sapiens
gggggaggggagaaggugugugacgccaccug

SEQ ID NO: 130212 - RNA, 32 nt, Homo Sapiens
ggggguggggguacgccgcacagcuccagucg

SEQ ID NO: 130213 - RNA, 32 nt, Homo Sapiens
uggugacucccgggguccccagccccgccccc

SEQ ID NO: 130214 - RNA, 28 nt, Homo Sapiens
aaaaugaccgaagaaacacacccagacg

SEQ ID NO: 130215 - RNA, 29 nt, Homo Sapiens
ccuuuuuggaguuuauauucuggugggug

SEQ ID NO: 130216 - RNA, 32 nt, Homo Sapiens
uggagagaaggaccacagcaucaggagacggg

SEQ ID NO: 130217 - RNA, 32 nt, Homo Sapiens
ugagcuugguagaggaguccccugccucuaug

SEQ ID NO: 130218 - RNA, 32 nt, Homo Sapiens
uuuuucaucauaacauaaauuauuuucaagug

SEQ ID NO: 130219 - RNA, 32 nt, Homo Sapiens
acuccgacccggcgcaacauggccgcagccuc

SEQ ID NO: 130220 - RNA, 32 nt, Homo Sapiens
uuugcagggcuuuccuuucaagucuuucaagu

SEQ ID NO: 130221 - RNA, 32 nt, Homo Sapiens
ugagccccucaacaagagccugcgccgcuccc

SEQ ID NO: 130222 - RNA, 32 nt, Homo Sapiens
ggacaggugcagccuggcaugggggagcgugg

SEQ ID NO: 130223 - RNA, 32 nt, Homo Sapiens
cauaugcacgugcaauuugcacggcagcauuu

SEQ ID NO: 130224 - RNA, 32 nt, Homo Sapiens
gcgcggugccccuuccucuccucaggcuccuc

SEQ ID NO: 130225 - RNA, 32 nt, Homo Sapiens
gucccuucccugacucgcuccuccuccaaccu

SEQ ID NO: 130226 - RNA, 32 nt, Homo Sapiens
gacaggagugagccaccacaccuggccacucg

SEQ ID NO: 130227 - RNA, 32 nt, Homo Sapiens
cccuccgcgaaaauaguuuguuuaaugugaac

SEQ ID NO: 130228 - RNA, 32 nt, Homo Sapiens
agucucuucuauuucuuucuuuuuauuuacau

SEQ ID NO: 130229 - RNA, 28 nt, Homo Sapiens
aauaaaauugauucauuuuaaaaaaaaa

SEQ ID NO: 130230 - RNA, 32 nt, Homo Sapiens
gcauuuuccuucauuucuuuaacaaggagagc

SEQ ID NO: 130231 - RNA, 32 nt, Homo Sapiens
agaaugaauauuaaagucugagaaauuuacaa

SEQ ID NO: 130232 - RNA, 32 nt, Homo Sapiens
uggacuuggcaguuucuugcucccagcacccg

SEQ ID NO: 130233 - RNA, 32 nt, Homo Sapiens
cuagauuuugaaaaauuaccuguauaauggag

SEQ ID NO: 130234 - RNA, 32 nt, Homo Sapiens
ugcugggaauccagggaguauggccuggcaua

SEQ ID NO: 130235 - RNA, 32 nt, Homo Sapiens
guucuuuagggcaaaaucauguuucuguguac

SEQ ID NO: 130236 - RNA, 32 nt, Homo Sapiens
gaggucccugguuuuucauggcaacuugauca

SEQ ID NO: 130237 - RNA, 32 nt, Homo Sapiens
ccccuguugcugcccguguccacacaggaaug

SEQ ID NO: 130238 - RNA, 32 nt, Homo Sapiens
uacacuucaguuuucuugaugaucucccuuuc

SEQ ID NO: 130239 - RNA, 32 nt, Homo Sapiens
caaagguagugggggccgguguggggcagagu

SEQ ID NO: 130240 - RNA, 32 nt, Homo Sapiens
guuuugaauugugucuuaaucucuccauauuc

SEQ ID NO: 130241 - RNA, 32 nt, Homo Sapiens
ucgagcgauccucccgccucagccucucgaga

SEQ ID NO: 130242 - RNA, 32 nt, Homo Sapiens
aaguuguagcagcuugcauguuucucuaagau

SEQ ID NO: 130243 - RNA, 32 nt, Homo Sapiens
cagaguuagggagaggcacguacaggccaggc

SEQ ID NO: 130244 - RNA, 32 nt, Homo Sapiens
cugaacagagaugcacucuccagugcucccca

SEQ ID NO: 130245 - RNA, 32 nt, Homo Sapiens
ugccggguccuucccgggccuggcgugucgga

SEQ ID NO: 130246 - RNA, 30 nt, Homo Sapiens
cuguucugccguaugggggaggggaacgcu

SEQ ID NO: 130247 - RNA, 32 nt, Homo Sapiens
agcaccagaaacaaaaucuggcucagaccaaa

SEQ ID NO: 130248 - RNA, 32 nt, Homo Sapiens
gucaggcaguugcugaguggcugguccauguc

SEQ ID NO: 130249 - RNA, 32 nt, Homo Sapiens
aaaagcuuuuugauuucccaaaggagggacau

SEQ ID NO: 130250 - RNA, 32 nt, Homo Sapiens
gucugccccccuccucagcugauggccacauc

SEQ ID NO: 130251 - RNA, 32 nt, Homo Sapiens
gggagccacuucagccuuuccccuccccucca

SEQ ID NO: 130252 - RNA, 32 nt, Homo Sapiens
ugcgacugcacuccagccugggugacugagca

SEQ ID NO: 130253 - RNA, 32 nt, Homo Sapiens
uggugagcugugcugccagccaucgcagagga

SEQ ID NO: 130254 - RNA, 32 nt, Homo Sapiens
gugugcuguggcggcggcggcagcggcagcgg

SEQ ID NO: 130255 - RNA, 32 nt, Homo Sapiens
caccccaggaccacgcugcgcuuccagcuugc

SEQ ID NO: 130256 - RNA, 32 nt, Homo Sapiens
acugagucugcaguaucuccaagguaugccug

SEQ ID NO: 130257 - RNA, 32 nt, Homo Sapiens
agaauuaaggcacagaauuguguguaaggucc

SEQ ID NO: 130258 - RNA, 32 nt, Homo Sapiens
ccuguaucuguggucagcaauagcuaugacau

SEQ ID NO: 130259 - RNA, 32 nt, Homo Sapiens
cgcgccuccgccucgguggcuccgggacacgc

SEQ ID NO: 130260 - RNA, 32 nt, Homo Sapiens
ccaaaucccacuuuugugauaugugaagcuac

SEQ ID NO: 130261 - RNA, 32 nt, Homo Sapiens
gaugaacuuuugaugaaagauugccaacagcu

SEQ ID NO: 130262 - RNA, 32 nt, Homo Sapiens
cagccugcgcuucgccggggcccucaucugcu

SEQ ID NO: 130263 - RNA, 32 nt, Homo Sapiens
auuucccugugguucuccguccuucccuggcg

SEQ ID NO: 130264 - RNA, 32 nt, Homo Sapiens
cccaguccaccagccugguauguuucucuguu

SEQ ID NO: 130265 - RNA, 32 nt, Homo Sapiens
aaaucggccccacagcacgucugcaccagcgg

SEQ ID NO: 130266 - RNA, 32 nt, Homo Sapiens
gggauggaaugggagggugggaucuagaugac

SEQ ID NO: 130267 - RNA, 32 nt, Homo Sapiens
uuacccuuuaccaguucuauaauuugguuaaa

SEQ ID NO: 130268 - RNA, 32 nt, Homo Sapiens
guuuuuuguauauaaauauguaaauacaugcu

SEQ ID NO: 130269 - RNA, 32 nt, Homo Sapiens
uccucucugcaccuccuggcaaguuucuucua

SEQ ID NO: 130270 - RNA, 32 nt, Homo Sapiens
uuucgcuccuugacaacccuggcggggguucg

SEQ ID NO: 130271 - RNA, 29 nt, Homo Sapiens
aaagcaugugaauaaacuuugcucgugcc

SEQ ID NO: 130272 - RNA, 32 nt, Homo Sapiens
ccucucaccuuuugcagucuccaguguccauu

SEQ ID NO: 130273 - RNA, 32 nt, Homo Sapiens
cggcugggagcgcgucgggcccgggcggaaag

SEQ ID NO: 130274 - RNA, 32 nt, Homo Sapiens
gaucucacuguguuggccaggcuggucucaaa

SEQ ID NO: 130275 - RNA, 32 nt, Homo Sapiens
aggcuggcccuccuguuagucuuuucucuuac

SEQ ID NO: 130276 - RNA, 32 nt, Homo Sapiens
cuggcauuucugcucucuaugcuugagaccgg

SEQ ID NO: 130277 - RNA, 32 nt, Homo Sapiens
aagcaggugcggacggcaccaggccgcccaag

SEQ ID NO: 130278 - RNA, 32 nt, Homo Sapiens
cuaaauaauuaccuuaaauggcagugcauauu

SEQ ID NO: 130279 - RNA, 32 nt, Homo Sapiens
agacuugauuguaaaaauugacaacuuuagau

SEQ ID NO: 130280 - RNA, 32 nt, Homo Sapiens
aguggguggcaggugugaggggaugcuguguu

SEQ ID NO: 130281 - RNA, 32 nt, Homo Sapiens
uauuccuuagacagaucauuucuuuaagaugg

SEQ ID NO: 130282 - RNA, 30 nt, Homo Sapiens
aacggucguuccccgccgccggccccgccc

SEQ ID NO: 130283 - RNA, 32 nt, Homo Sapiens
aagccuacguuuucacacuucuaguaagccuc

SEQ ID NO: 130284 - RNA, 30 nt, Homo Sapiens
gccuccagcaggcgcgcggccagcagcgug

SEQ ID NO: 130285 - RNA, 32 nt, Homo Sapiens
gcaaagaacaauuuuuuauuaucaaaaagguu

SEQ ID NO: 130286 - RNA, 32 nt, Homo Sapiens
uguuucuagaaaaaaaucauugccauaagaaa

SEQ ID NO: 130287 - RNA, 32 nt, Homo Sapiens
cgaaguguccaucauucuguguagaagcuuaa

SEQ ID NO: 130288 - RNA, 32 nt, Homo Sapiens
uuuuauguucaaaugaauauuaauuguuucuu

SEQ ID NO: 130289 - RNA, 32 nt, Homo Sapiens
ccaaggaagcccagcacagaccaucucaucuc

SEQ ID NO: 130290 - RNA, 32 nt, Homo Sapiens
uuccacaucauuuuagaauuuauuuucgaagg

SEQ ID NO: 130291 - RNA, 32 nt, Homo Sapiens
ugcccugagaacaggaaagggcccggaagggc

SEQ ID NO: 130292 - RNA, 32 nt, Homo Sapiens
ccugcucgaugcucacagggcccccagcgaga

SEQ ID NO: 130293 - RNA, 32 nt, Homo Sapiens
aaaauaacuuugagauuggacaagaagauguu

SEQ ID NO: 130294 - RNA, 32 nt, Homo Sapiens
acuugugcuuccagggacccaggcaggaugau

SEQ ID NO: 130295 - RNA, 32 nt, Homo Sapiens
uuucaaaugcaaaugcagaagacuuaccuuag

SEQ ID NO: 130296 - RNA, 32 nt, Homo Sapiens
ccagccggaaaguguagaagucacaccccaau

SEQ ID NO: 130297 - RNA, 32 nt, Homo Sapiens
gcccggcccuccccgcggcgcagcacggaguc

SEQ ID NO: 130298 - RNA, 32 nt, Homo Sapiens
cuacuuugauaaaaacauugccauacugcuuu

SEQ ID NO: 130299 - RNA, 32 nt, Homo Sapiens
ugcggcguggugggugucauagauaaccucua

SEQ ID NO: 130300 - RNA, 32 nt, Homo Sapiens
ugggaccccuggaguucugcuucugucuggaa

SEQ ID NO: 130301 - RNA, 32 nt, Homo Sapiens
ggagcuggcucggcugccggcugcggucaggg

SEQ ID NO: 130302 - RNA, 32 nt, Homo Sapiens
gcggggagggcacaacagcugcuaccugaaca

SEQ ID NO: 130303 - RNA, 32 nt, Homo Sapiens
ucaguacuuggucacagcuggcaccagugcag

SEQ ID NO: 130304 - RNA, 32 nt, Homo Sapiens
ggggucgccucccaggugucccagcaagcccg

SEQ ID NO: 130305 - RNA, 32 nt, Homo Sapiens
cucugaaguucccccauuuccuucaguaccag

SEQ ID NO: 130306 - RNA, 32 nt, Homo Sapiens
uugccagaauguuuaaaauuuguucagaaaag

SEQ ID NO: 130307 - RNA, 32 nt, Homo Sapiens
aauuccaaaguuuacuugaucuaguaguuuuu

SEQ ID NO: 130308 - RNA, 32 nt, Homo Sapiens
acagaggugccugagggugguuggggagguga

SEQ ID NO: 130309 - RNA, 32 nt, Homo Sapiens
guacaguacuauuagaaguuaaguauguuguu

SEQ ID NO: 130310 - RNA, 32 nt, Homo Sapiens
ggagcccauuguccccccuccuccucagcuca

SEQ ID NO: 130311 - RNA, 32 nt, Homo Sapiens
gugccucccccuccugcgauggggguccccag

SEQ ID NO: 130312 - RNA, 32 nt, Homo Sapiens
gccugggcccucccucucuccuauuaaacaaa

SEQ ID NO: 130313 - RNA, 32 nt, Homo Sapiens
cagggggagcaaacccugccccugcccgccuc

SEQ ID NO: 130314 - RNA, 32 nt, Homo Sapiens
cugccaagugcggcugccccugccagaggcuc

SEQ ID NO: 130315 - RNA, 32 nt, Homo Sapiens
aaaggguggggagagggaagaugggccccacc

SEQ ID NO: 130316 - RNA, 32 nt, Homo Sapiens
auucaucuguguguaaauuauuucauauaggg

SEQ ID NO: 130317 - RNA, 32 nt, Homo Sapiens
acccacccgcggcugugacaaccgcccggggc

SEQ ID NO: 130318 - RNA, 32 nt, Homo Sapiens
cagugucucagccuugauaaagggcaguggau

SEQ ID NO: 130319 - RNA, 32 nt, Homo Sapiens
aagugucuuauguuuauuuuaauugcuguugu

SEQ ID NO: 130320 - RNA, 32 nt, Homo Sapiens
aaagacaacaauuuaaugucacuaauuuucaa

SEQ ID NO: 130321 - RNA, 32 nt, Homo Sapiens
aauuagagcccauugggaacgaugccaccacc

SEQ ID NO: 130322 - RNA, 32 nt, Homo Sapiens
gcaggaaaaguaccucagcacucacacugcca

SEQ ID NO: 130323 - RNA, 32 nt, Homo Sapiens
ucuuuaggauauauuuacauuuucacucaucu

SEQ ID NO: 130324 - RNA, 32 nt, Homo Sapiens
ccuguguuggaagagauggugaugggccuggg

SEQ ID NO: 130325 - RNA, 32 nt, Homo Sapiens
gaugugguucccagaaaauauaaucaaaauuc

SEQ ID NO: 130326 - RNA, 32 nt, Homo Sapiens
ucuucagacuuaaagcacugauaggacuuaaa

SEQ ID NO: 130327 - RNA, 32 nt, Homo Sapiens
gggaaaauacuaguaguuuuauauuuggauga

SEQ ID NO: 130328 - RNA, 32 nt, Homo Sapiens
uccccugcaacucaggacccaagcccagcuca

SEQ ID NO: 130329 - RNA, 27 nt, Homo Sapiens
auuaguuccuucuucugcuauccccaa

SEQ ID NO: 130330 - RNA, 32 nt, Homo Sapiens
uggaauuauuccaggacuugugguggaguuau

SEQ ID NO: 130331 - RNA, 32 nt, Homo Sapiens
ggugcuaaccccgucugcuccucccucccgca

SEQ ID NO: 130332 - RNA, 32 nt, Homo Sapiens
uccuaauauuggugauuugcuuucucucuuuc

SEQ ID NO: 130333 - RNA, 32 nt, Homo Sapiens
cuuccacaaguauuuacccagcauuuuaaaca

SEQ ID NO: 130334 - RNA, 31 nt, Homo Sapiens
cacugcagccucugccugcucugccgccgag

SEQ ID NO: 130335 - RNA, 32 nt, Homo Sapiens
gaagucaaaucuucuuuuuucucaccuucaag

SEQ ID NO: 130336 - RNA, 32 nt, Homo Sapiens
acaaugaggaugaagaccuuuauggugaucca

SEQ ID NO: 130337 - RNA, 32 nt, Homo Sapiens
gaaucagugcuccagcagccuccacagccuuu

SEQ ID NO: 130338 - RNA, 32 nt, Homo Sapiens
uuggggcuaugaaaagaaguuuuaacgagaga

SEQ ID NO: 130339 - RNA, 32 nt, Homo Sapiens
uuuuguuaacuuauuauuguguuuccuuguau

SEQ ID NO: 130340 - RNA, 32 nt, Homo Sapiens
ggggcagccucugugggacaagagugauacag

SEQ ID NO: 130341 - RNA, 32 nt, Homo Sapiens
gaacccugccaccucagugacaucucagggca

SEQ ID NO: 130342 - RNA, 32 nt, Homo Sapiens
cuggggccaccccucuccugcucugggugucc

SEQ ID NO: 130343 - RNA, 32 nt, Homo Sapiens
ugaucaagggagaggccaggcgcagcucacug

SEQ ID NO: 130344 - RNA, 32 nt, Homo Sapiens
auguaugaacccugcucugaaaacacucuuua

SEQ ID NO: 130345 - RNA, 32 nt, Homo Sapiens
cauuagaagaacucgaauuugaugaccaguuu

SEQ ID NO: 130346 - RNA, 32 nt, Homo Sapiens
gcccacuugcuagacuagcaagagagcgaagu

SEQ ID NO: 130347 - RNA, 29 nt, Homo Sapiens
ugauaaacagugauguuuuaaaaaagcug

SEQ ID NO: 130348 - RNA, 32 nt, Homo Sapiens
caaagucuagaauguguguauucacaauggug

SEQ ID NO: 130349 - RNA, 32 nt, Homo Sapiens
caaauccagaaagugaacugcagugcuguaau

SEQ ID NO: 130350 - RNA, 32 nt, Homo Sapiens
ugugguuucugccuaugggaggagguuugcuc

SEQ ID NO: 130351 - RNA, 32 nt, Homo Sapiens
cgaauaccaggauacaacgguuugagguucuc

SEQ ID NO: 130352 - RNA, 32 nt, Homo Sapiens
agguggugcuucagaugagacuugaaggagca

SEQ ID NO: 130353 - RNA, 32 nt, Homo Sapiens
acaagcauuucccccagggaaguuucugggug

SEQ ID NO: 130354 - RNA, 32 nt, Homo Sapiens
cccaccgacccuucaggugcugcucguggugg

SEQ ID NO: 130355 - RNA, 32 nt, Homo Sapiens
gaccuuggcgccaccaccuggcccuggugguu

SEQ ID NO: 130356 - RNA, 32 nt, Homo Sapiens
ggagcagaccucugugggcacugugaggcgga

SEQ ID NO: 130357 - RNA, 32 nt, Homo Sapiens
cuaucaaauucuaguuucaaguaucucacugu

SEQ ID NO: 130358 - RNA, 32 nt, Homo Sapiens
cauguuuguuuuuauggcauuucuaucuauug

SEQ ID NO: 130359 - RNA, 32 nt, Homo Sapiens
cuugacuuuuauauuucuuuaaaaaauuccuu

SEQ ID NO: 130360 - RNA, 32 nt, Homo Sapiens
agucaugugguuugcagcaacauggauggagc

SEQ ID NO: 130361 - RNA, 32 nt, Homo Sapiens
cugcccaccguucucugcccuagugauagaaa

SEQ ID NO: 130362 - RNA, 32 nt, Homo Sapiens
ugugucggauuuuucuuaaauaaauggaagcg

SEQ ID NO: 130363 - RNA, 27 nt, Homo Sapiens
gauccacuuuaauucuuggguguuuuu

SEQ ID NO: 130364 - RNA, 32 nt, Homo Sapiens
cagccagcauugggggaaaugauccaaauggc

SEQ ID NO: 130365 - RNA, 32 nt, Homo Sapiens
caaaggugauaugguuuuauuuccuguuaugu

SEQ ID NO: 130366 - RNA, 32 nt, Homo Sapiens
agaaaggcuccuuaucuguacuccauccugua

SEQ ID NO: 130367 - RNA, 32 nt, Homo Sapiens
cagacacacacacgcacacacacacacaauuc

SEQ ID NO: 130368 - RNA, 32 nt, Homo Sapiens
ccucuggggggcccgugagcgugugucuucau

SEQ ID NO: 130369 - RNA, 32 nt, Homo Sapiens
gugugagauaaaauugcuugucuuucacugga

SEQ ID NO: 130370 - RNA, 32 nt, Homo Sapiens
auugggauaaaugugaagaaggcuuuuaagau

SEQ ID NO: 130371 - RNA, 32 nt, Homo Sapiens
ucugcaguagccaaacaucaauaagacaaaca

SEQ ID NO: 130372 - RNA, 31 nt, Homo Sapiens
augggggcaguccugugcacggccuccauga

SEQ ID NO: 130373 - RNA, 32 nt, Homo Sapiens
cguguuaggaaauuauuuauuaauuuacaaga

SEQ ID NO: 130374 - RNA, 32 nt, Homo Sapiens
gaaguuuugucaaaugucuucaucuauuggaa

SEQ ID NO: 130375 - RNA, 32 nt, Homo Sapiens
ccaauuugccagcagcagagaccaacacugag

SEQ ID NO: 130376 - RNA, 32 nt, Homo Sapiens
gcugcccuuguaauagacgucacggccaagcu

SEQ ID NO: 130377 - RNA, 32 nt, Homo Sapiens
acccuucucuguuaaccuugugccugucuccu

SEQ ID NO: 130378 - RNA, 32 nt, Homo Sapiens
gccaacccuguguguuauguugcugucgcucc

SEQ ID NO: 130379 - RNA, 32 nt, Homo Sapiens
uguccucagggugccccucuuccagaccaacu

SEQ ID NO: 130380 - RNA, 32 nt, Homo Sapiens
cuuuggccaucaggccgcugcugcugccccaa

SEQ ID NO: 130381 - RNA, 32 nt, Homo Sapiens
cuuuaccuccccgucuuggaaacaaguuuuag

SEQ ID NO: 130382 - RNA, 32 nt, Homo Sapiens
ccaugccuguucuccuuccuugcuauggaauu

SEQ ID NO: 130383 - RNA, 32 nt, Homo Sapiens
ccacaguuggggcuacuuccugugcugaagga

SEQ ID NO: 130384 - RNA, 32 nt, Homo Sapiens
uucagcagguuaauggauaaacuguggaacau

SEQ ID NO: 130385 - RNA, 32 nt, Homo Sapiens
uagauaaacuaaauguugugguuugaauauua

SEQ ID NO: 130386 - RNA, 32 nt, Homo Sapiens
ccugggcguggcacuuccuuccuuccugggcc

SEQ ID NO: 130387 - RNA, 30 nt, Homo Sapiens
gugagggcgcccggcaggccgcccugcagg

SEQ ID NO: 130388 - RNA, 32 nt, Homo Sapiens
uaagaaaaaaaauuauauauaaauauauauau

SEQ ID NO: 130389 - RNA, 31 nt, Homo Sapiens
gguugccaggggagccaaccaugugauuaga

SEQ ID NO: 130390 - RNA, 32 nt, Homo Sapiens
aauggaucaaggagagggaagcguuuugaugg

SEQ ID NO: 130391 - RNA, 32 nt, Homo Sapiens
uauaaauguaaaaaugaaggaauuacauuuua

SEQ ID NO: 130392 - RNA, 32 nt, Homo Sapiens
gccuauucaguuccuuuguuuggcaggauucu

SEQ ID NO: 130393 - RNA, 32 nt, Homo Sapiens
ugggcgcgugagcacaucacggcgcccgugac

SEQ ID NO: 130394 - RNA, 32 nt, Homo Sapiens
cauuacagccaagauggugcugucccagagac

SEQ ID NO: 130395 - RNA, 28 nt, Homo Sapiens
gcggguggggagaccccgaggugcuacc

SEQ ID NO: 130396 - RNA, 32 nt, Homo Sapiens
agaauaucaaggaggccacuuacaauucuaag

SEQ ID NO: 130397 - RNA, 32 nt, Homo Sapiens
acaaaggagaaaggaccacauugcuuacuuga

SEQ ID NO: 130398 - RNA, 32 nt, Homo Sapiens
ucggaaccgagacgaugcgugcgcuccgcgac

SEQ ID NO: 130399 - RNA, 32 nt, Homo Sapiens
ggcaacauuuauauuucuuauucagaacccuu

SEQ ID NO: 130400 - RNA, 32 nt, Homo Sapiens
guggucgguccggcagcagcccggcccccgga

SEQ ID NO: 130401 - RNA, 32 nt, Homo Sapiens
ccgccuggacgcccagcccuucagagcagccc

SEQ ID NO: 130402 - RNA, 32 nt, Homo Sapiens
guucguaaaugaaacuauguauauuaugcaga

SEQ ID NO: 130403 - RNA, 32 nt, Homo Sapiens
gaccugagcaaaucaccaaaugugcuaguuau

SEQ ID NO: 130404 - RNA, 32 nt, Homo Sapiens
uuguaagaacuaaagaagaucuguaauuuuua

SEQ ID NO: 130405 - RNA, 32 nt, Homo Sapiens
uguuuuagugacuuuuugauaauguacaguuu

SEQ ID NO: 130406 - RNA, 32 nt, Homo Sapiens
uuuuucccuaacauuuaaaucuguguuuugcu

SEQ ID NO: 130407 - RNA, 32 nt, Homo Sapiens
aggcucaugcccagcucccccaucggacagcc

SEQ ID NO: 130408 - RNA, 32 nt, Homo Sapiens
gugaaucuaagcauagaaaaggcacagcaaaa

SEQ ID NO: 130409 - RNA, 32 nt, Homo Sapiens
cucucaaauaccaugauguaucaugggcuuuc

SEQ ID NO: 130410 - RNA, 32 nt, Homo Sapiens
gguaauaaaacuacacaugcaagaugucagau

SEQ ID NO: 130411 - RNA, 32 nt, Homo Sapiens
gcacuacacgcuugggaacaaggaaaacaucc

SEQ ID NO: 130412 - RNA, 32 nt, Homo Sapiens
ggccgcuagcccccggccccgagccaccacuc

SEQ ID NO: 130413 - RNA, 32 nt, Homo Sapiens
gcggagcgcggcgggcggccccuuggagcugc

SEQ ID NO: 130414 - RNA, 32 nt, Homo Sapiens
cgccgcgcucugcggcuggcucuaggcgaugc

SEQ ID NO: 130415 - RNA, 32 nt, Homo Sapiens
gcaggaucccuucuccaccuccaaaggcccua

SEQ ID NO: 130416 - RNA, 32 nt, Homo Sapiens
cuuagcuucccucucccucauucccggacccu

SEQ ID NO: 130417 - RNA, 32 nt, Homo Sapiens
aagauuugacugccucgcuggauuuuggacuu

SEQ ID NO: 130418 - RNA, 31 nt, Homo Sapiens
gcaaaaccccagccccaucagaauugcuucu

SEQ ID NO: 130419 - RNA, 32 nt, Homo Sapiens
ugcugggcugggggcgcaccacgugcucacag

SEQ ID NO: 130420 - RNA, 32 nt, Homo Sapiens
ucuauccuggugccuuacgaauaaaaaacugg

SEQ ID NO: 130421 - RNA, 32 nt, Homo Sapiens
aauguuuuucuuugcagucuguuuaacguuac

SEQ ID NO: 130422 - RNA, 32 nt, Homo Sapiens
caagaguucuuugccuuucucaucuaauuuuu

SEQ ID NO: 130423 - RNA, 32 nt, Homo Sapiens
ucagaacuguauuuuuauguuauauuguauag

SEQ ID NO: 130424 - RNA, 32 nt, Homo Sapiens
uuccagagcugggcgcugcagcugcacugccg

SEQ ID NO: 130425 - RNA, 32 nt, Homo Sapiens
accaaacgcccagccgcacggacgcuggggcg

SEQ ID NO: 130426 - RNA, 32 nt, Homo Sapiens
ggcuggucuugaacuccugaccucaagugaug

SEQ ID NO: 130427 - RNA, 32 nt, Homo Sapiens
uagguuuuuuuuucuuuuuuuaaguaaaggug

SEQ ID NO: 130428 - RNA, 31 nt, Homo Sapiens
gggagcauuaugggaaagucccugccuucca

SEQ ID NO: 130429 - RNA, 32 nt, Homo Sapiens
gccacugcuuugggggcgccggcuagaaaaag

SEQ ID NO: 130430 - RNA, 32 nt, Homo Sapiens
ucguucucaguuccacugguuuaaaccacagc

SEQ ID NO: 130431 - RNA, 32 nt, Homo Sapiens
ccccccggcccagcucacacacacucaguuuc

SEQ ID NO: 130432 - RNA, 32 nt, Homo Sapiens
aacuggugacuugguccaucagucacgaaguu

SEQ ID NO: 130433 - RNA, 32 nt, Homo Sapiens
aaaagagucuuagagauuuuguaauaucauuc

SEQ ID NO: 130434 - RNA, 32 nt, Homo Sapiens
gccagccuggggagguaagacugcaucacucc

SEQ ID NO: 130435 - RNA, 32 nt, Homo Sapiens
auauaaaaagggauuaaucugcuaaaauguaa

SEQ ID NO: 130436 - RNA, 32 nt, Homo Sapiens
ggcuaccugcccagccccucccccaacaagau

SEQ ID NO: 130437 - RNA, 27 nt, Homo Sapiens
aaaagucucuucuucagacuggguagg

SEQ ID NO: 130438 - RNA, 30 nt, Homo Sapiens
gccuaagagaagcaggagucugugacagcc

SEQ ID NO: 130439 - RNA, 32 nt, Homo Sapiens
uucaagaggaagauggaaggggcuguuuagaa

SEQ ID NO: 130440 - RNA, 32 nt, Homo Sapiens
aggcgcgcgccggggccgugcugaugggcaug

SEQ ID NO: 130441 - RNA, 32 nt, Homo Sapiens
gaaagugcuuggauuaggagagucuugugggc

SEQ ID NO: 130442 - RNA, 30 nt, Homo Sapiens
ucggauuguaaauaaauauaccauuguccu

SEQ ID NO: 130443 - RNA, 32 nt, Homo Sapiens
uaugcggugauuuuaaugauaggugucauaua

SEQ ID NO: 130444 - RNA, 32 nt, Homo Sapiens
uuucugauuaugcacauaauagauaugccuuc

SEQ ID NO: 130445 - RNA, 32 nt, Homo Sapiens
gaucuuugacuucuaaucuccagaauagugag

SEQ ID NO: 130446 - RNA, 32 nt, Homo Sapiens
ucaccauagaacugaauguauuuaguuagggc

SEQ ID NO: 130447 - RNA, 32 nt, Homo Sapiens
agcgaggccagcccuggcuucuccucuguucc

SEQ ID NO: 130448 - RNA, 32 nt, Homo Sapiens
guugaggucugcgucgggcuuggcuuuucaca

SEQ ID NO: 130449 - RNA, 32 nt, Homo Sapiens
ucacgguugcuguugcagacccaggagucucu

SEQ ID NO: 130450 - RNA, 32 nt, Homo Sapiens
cuaagcccuaaggagcuccucagcuugaaaug

SEQ ID NO: 130451 - RNA, 32 nt, Homo Sapiens
agaauuccacacuaacgugauaacaugguuuu

SEQ ID NO: 130452 - RNA, 30 nt, Homo Sapiens
auuuuuuuuuuccuuggggaaacuggcagg

SEQ ID NO: 130453 - RNA, 32 nt, Homo Sapiens
uaccuuuuaagugccaagaacucaagugcaag

SEQ ID NO: 130454 - RNA, 32 nt, Homo Sapiens
caguuaccaaaauuauuuuaccuuuuaacucc

SEQ ID NO: 130455 - RNA, 29 nt, Homo Sapiens
cucccugugacuuuccaaacugacaagca

SEQ ID NO: 130456 - RNA, 32 nt, Homo Sapiens
gcuuaagugaaaaugauacauguuagaagaca

SEQ ID NO: 130457 - RNA, 32 nt, Homo Sapiens
uugggaagccgguguuggcagaugcuguggcu

SEQ ID NO: 130458 - RNA, 32 nt, Homo Sapiens
gagccgcccuguccgcgccgcgccucggcagc

SEQ ID NO: 130459 - RNA, 32 nt, Homo Sapiens
cccaggguccccauccuguaccaagcagacug

SEQ ID NO: 130460 - RNA, 32 nt, Homo Sapiens
acagccuuccacguucaagaaucuucauucau

SEQ ID NO: 130461 - RNA, 32 nt, Homo Sapiens
uaaaacaucccauuuuucacauuauguaugau

SEQ ID NO: 130462 - RNA, 32 nt, Homo Sapiens
uguggaugcagcuugcauggggccuagggagu

SEQ ID NO: 130463 - RNA, 25 nt, Homo Sapiens
auggcgggaggaggcgggaguagcg

SEQ ID NO: 130464 - RNA, 32 nt, Homo Sapiens
aaaauacacacacacacacacacacacacaca

SEQ ID NO: 130465 - RNA, 32 nt, Homo Sapiens
acagaagaacuguaauauuauuuuaaaaugcg

SEQ ID NO: 130466 - RNA, 32 nt, Homo Sapiens
uuuucaagucuuuuccauccacaguugguuga

SEQ ID NO: 130467 - RNA, 32 nt, Homo Sapiens
cuuaaaacagaccaaaccccgccccgccccca

SEQ ID NO: 130468 - RNA, 32 nt, Homo Sapiens
ccagucgcucccagcccacccccgccuggaca

SEQ ID NO: 130469 - RNA, 32 nt, Homo Sapiens
agccucuuuccucuucucaugcuugagcuucc

SEQ ID NO: 130470 - RNA, 32 nt, Homo Sapiens
gugcugacuucugugguuuagcaagagguuua

SEQ ID NO: 130471 - RNA, 32 nt, Homo Sapiens
gccugccauuugccucuccccggagacagccg

SEQ ID NO: 130472 - RNA, 32 nt, Homo Sapiens
cuuuguucauugauguuggguggaugaaucug

SEQ ID NO: 130473 - RNA, 32 nt, Homo Sapiens
aaagguugacucaaguuuuuacaaaauacuau

SEQ ID NO: 130474 - RNA, 32 nt, Homo Sapiens
auuugguuaauuuuuuaggaaaguauaccuuu

SEQ ID NO: 130475 - RNA, 32 nt, Homo Sapiens
ggaauuuugacucgugucuguaucauacaagu

SEQ ID NO: 130476 - RNA, 32 nt, Homo Sapiens
uccaaaguuucguggcuauuaaguucuaguau

SEQ ID NO: 130477 - RNA, 32 nt, Homo Sapiens
aucuccaggaccagcacucuucucccagcccu

SEQ ID NO: 130478 - RNA, 29 nt, Homo Sapiens
gccuagccaugggagaggacgcugcacag

SEQ ID NO: 130479 - RNA, 32 nt, Homo Sapiens
gccccgccgccgccgccauguacgacgcagag

SEQ ID NO: 130480 - RNA, 32 nt, Homo Sapiens
cauaguuuaucuuuaaaaacaacuuuaaaggu

SEQ ID NO: 130481 - RNA, 32 nt, Homo Sapiens
ccuagaggaagauaaggaaaauaaguauuuuc

SEQ ID NO: 130482 - RNA, 32 nt, Homo Sapiens
uuucaauaacgaaguugggcaauauaaccaau

SEQ ID NO: 130483 - RNA, 32 nt, Homo Sapiens
caggaguaguggggggagguuuugcuauuucc

SEQ ID NO: 130484 - RNA, 32 nt, Homo Sapiens
gcuaaaaggaagauccuaaggaucugggaaaa

SEQ ID NO: 130485 - RNA, 29 nt, Homo Sapiens
ggcgauggcggcggcggcgggagcugcag

SEQ ID NO: 130486 - RNA, 32 nt, Homo Sapiens
aauauuugccagacauugugccaggcaguugu

SEQ ID NO: 130487 - RNA, 32 nt, Homo Sapiens
auuagagagguuggaaacauugguaaacucug

SEQ ID NO: 130488 - RNA, 32 nt, Homo Sapiens
ugguugagggucauacagaaagucagugggcc

SEQ ID NO: 130489 - RNA, 32 nt, Homo Sapiens
uauaauagacccacagaguccaaacuauuguu

SEQ ID NO: 130490 - RNA, 32 nt, Homo Sapiens
ugucuugacauagucuuaaaagaguauugcug

SEQ ID NO: 130491 - RNA, 32 nt, Homo Sapiens
caagaaagacuggccccuccccugcccucucc

SEQ ID NO: 130492 - RNA, 32 nt, Homo Sapiens
uccauucugccaccuuuuuuuuuuuuuuuuua

SEQ ID NO: 130493 - RNA, 32 nt, Homo Sapiens
uucccauuucccuuucuuagauugcaccagug

SEQ ID NO: 130494 - RNA, 32 nt, Homo Sapiens
ccaagaacccaccaauuccggacacaaaugca

SEQ ID NO: 130495 - RNA, 32 nt, Homo Sapiens
uaaagugucugcaaguggaaauccagagaaag

SEQ ID NO: 130496 - RNA, 32 nt, Homo Sapiens
aaucgaggcgaccgcgacaguggugggggacg

SEQ ID NO: 130497 - RNA, 32 nt, Homo Sapiens
uccagucugauccauggggcugaaggguaaau

SEQ ID NO: 130498 - RNA, 32 nt, Homo Sapiens
ugcucucauauauauuuuaaaaacacuacuuu

SEQ ID NO: 130499 - RNA, 32 nt, Homo Sapiens
uauauaucaacauuauuuuauugugcaauuaa

SEQ ID NO: 130500 - RNA, 32 nt, Homo Sapiens
aucaaagguggaagagugggugucgcaguuaa

SEQ ID NO: 130501 - RNA, 32 nt, Homo Sapiens
gcaauccauacucauucaguaacacaggcuca

SEQ ID NO: 130502 - RNA, 32 nt, Homo Sapiens
ccgcgaaaacaucugccucccaggagggugcc

SEQ ID NO: 130503 - RNA, 32 nt, Homo Sapiens
cccucgcccucccucccgacucaacccggccg

SEQ ID NO: 130504 - RNA, 32 nt, Homo Sapiens
cucuauguuauguuuaauuuuauuuugaaagc

SEQ ID NO: 130505 - RNA, 32 nt, Homo Sapiens
acuuuagaguccaugaaauaugguaaaaaaua

SEQ ID NO: 130506 - RNA, 32 nt, Homo Sapiens
ugauccggccccaaugcccacagugccgaggg

SEQ ID NO: 130507 - RNA, 32 nt, Homo Sapiens
gggacgcugaauggggaacagcagcuaaggcu

SEQ ID NO: 130508 - RNA, 32 nt, Homo Sapiens
ggccugggagucucuugagcuccacgacuuca

SEQ ID NO: 130509 - RNA, 32 nt, Homo Sapiens
auguccuuucccgggagacaagucgggaaagc

SEQ ID NO: 130510 - RNA, 32 nt, Homo Sapiens
ggaugcacugucagcaucaggucccagagggc

SEQ ID NO: 130511 - RNA, 32 nt, Homo Sapiens
ucguguacagaaaagauuauauaaaauuuaaa

SEQ ID NO: 130512 - RNA, 32 nt, Homo Sapiens
ugcaacagucguuuugaaaccaaaaagauaaa

SEQ ID NO: 130513 - RNA, 32 nt, Homo Sapiens
cuugagcuguuauaagagauaguucuuuuaau

SEQ ID NO: 130514 - RNA, 30 nt, Homo Sapiens
ggucccguuggucaccuccguccggaacac

SEQ ID NO: 130515 - RNA, 32 nt, Homo Sapiens
cuaauccacaaccuguuaccacuuccugaauc

SEQ ID NO: 130516 - RNA, 32 nt, Homo Sapiens
cucaaaaauaccacuucucaguaugaacacaa

SEQ ID NO: 130517 - RNA, 32 nt, Homo Sapiens
uaguuaaguauuuacagauguuaaauggagua

SEQ ID NO: 130518 - RNA, 32 nt, Homo Sapiens
auaaaaauuacauaagggacuuuuugccugca

SEQ ID NO: 130519 - RNA, 32 nt, Homo Sapiens
gacugaagacuagccccuuuucugggaaauua

SEQ ID NO: 130520 - RNA, 32 nt, Homo Sapiens
ccuuccccaaucaccuuuccuguuccagaaaa

SEQ ID NO: 130521 - RNA, 32 nt, Homo Sapiens
auuuuuuuaaggaaacaaagaaagcuuuuaaa

SEQ ID NO: 130522 - RNA, 32 nt, Homo Sapiens
uuuguuuuguuuuucuugaugguuucccucuc

SEQ ID NO: 130523 - RNA, 32 nt, Homo Sapiens
cgcgguugcuucucaacguccgggccgcaucu

SEQ ID NO: 130524 - RNA, 32 nt, Homo Sapiens
augacuugauucaacguuugguucugaacuua

SEQ ID NO: 130525 - RNA, 32 nt, Homo Sapiens
gauagggacaaggaugauaacauuuccuggga

SEQ ID NO: 130526 - RNA, 32 nt, Homo Sapiens
uuugcucuuaggauggucuuugggauucaaga

SEQ ID NO: 130527 - RNA, 32 nt, Homo Sapiens
caguccccaccuuguuacugcuacuacacuuu

SEQ ID NO: 130528 - RNA, 32 nt, Homo Sapiens
gaagaaaaaaaaaaacaaaacaacuuggauua

SEQ ID NO: 130529 - RNA, 32 nt, Homo Sapiens
gccgcagaaggggaauguguccuccugcucug

SEQ ID NO: 130530 - RNA, 32 nt, Homo Sapiens
cccuggcuccuggccugugaguggugccacag

SEQ ID NO: 130531 - RNA, 32 nt, Homo Sapiens
aucucccauguccccaucuccuggacaccugg

SEQ ID NO: 130532 - RNA, 32 nt, Homo Sapiens
ugggacgacaccagcucuauugccaccgauga

SEQ ID NO: 130533 - RNA, 32 nt, Homo Sapiens
agccccgccuggcaccuuugccugagucccuu

SEQ ID NO: 130534 - RNA, 32 nt, Homo Sapiens
aaggaaaaauaaaagaaaaacuugcuaauuuu

SEQ ID NO: 130535 - RNA, 32 nt, Homo Sapiens
guuuugaauaaggaugguauagaaaacaacgc

SEQ ID NO: 130536 - RNA, 32 nt, Homo Sapiens
gugcuccccccgcuacccuccgagccgcgccc

SEQ ID NO: 130537 - RNA, 32 nt, Homo Sapiens
aaaacuagaaaauaaaugcugcugagccuauc

SEQ ID NO: 130538 - RNA, 32 nt, Homo Sapiens
gaaguuguguggaagccaaggcugggucugac

SEQ ID NO: 130539 - RNA, 32 nt, Homo Sapiens
ccacacauggcuaauuuuuuuauuuuuuagag

SEQ ID NO: 130540 - RNA, 32 nt, Homo Sapiens
gaagccaugaauuauuuuauuuuacuucaacu

SEQ ID NO: 130541 - RNA, 32 nt, Homo Sapiens
gaaggacacagguugccagagccccuggcaca

SEQ ID NO: 130542 - RNA, 32 nt, Homo Sapiens
uauacuacugguuuuauauuuuuuuuucuuug

SEQ ID NO: 130543 - RNA, 32 nt, Homo Sapiens
uggguccguaggagggacaguaccucacaaca

SEQ ID NO: 130544 - RNA, 32 nt, Homo Sapiens
uuuugaaaaaucagcaguucugaugccuugac

SEQ ID NO: 130545 - RNA, 32 nt, Homo Sapiens
gccaggucgucuacaaggaagccaacugugga

SEQ ID NO: 130546 - RNA, 32 nt, Homo Sapiens
uacuucucguggcugguuaccaaaaaguccua

SEQ ID NO: 130547 - RNA, 32 nt, Homo Sapiens
gccccgcggagcuggcuuggacacccaacuuu

SEQ ID NO: 130548 - RNA, 32 nt, Homo Sapiens
ggaccuacuccucccccuccuccaugcugucc

SEQ ID NO: 130549 - RNA, 32 nt, Homo Sapiens
uuugaccuuucuguucaaggaucacacaagag

SEQ ID NO: 130550 - RNA, 32 nt, Homo Sapiens
gaggaucugccgggugcugaggucucucaaac

SEQ ID NO: 130551 - RNA, 32 nt, Homo Sapiens
cuucauaaaaguauaacacuagguugaaaccu

SEQ ID NO: 130552 - RNA, 32 nt, Homo Sapiens
cgcugcgccugcggcgggguguggggagcgca

SEQ ID NO: 130553 - RNA, 32 nt, Homo Sapiens
uggcugcugagcgcaucggugcuugagucccu

SEQ ID NO: 130554 - RNA, 32 nt, Homo Sapiens
cagccgccuugaugacagcauccgcguccucc

SEQ ID NO: 130555 - RNA, 32 nt, Homo Sapiens
cgcuugagaugggaaagcggcgccacagaccc

SEQ ID NO: 130556 - RNA, 32 nt, Homo Sapiens
caccuuggucauaaguccuuugugaccuugau

SEQ ID NO: 130557 - RNA, 32 nt, Homo Sapiens
cagcccaggccgaggcucuacugggcccagcc

SEQ ID NO: 130558 - RNA, 32 nt, Homo Sapiens
aguauuuuucccuuuuuaaccauuccaaucgg

SEQ ID NO: 130559 - RNA, 32 nt, Homo Sapiens
ucauuaauauauuaaaaagauguauguguuag

SEQ ID NO: 130560 - RNA, 32 nt, Homo Sapiens
gggacgcggcccgggcuacgucggggccgucc

SEQ ID NO: 130561 - RNA, 32 nt, Homo Sapiens
aguuguauuauuagacucucuaguuuuaucuu

SEQ ID NO: 130562 - RNA, 32 nt, Homo Sapiens
gaucuaugucuguugguggcaaugugagggug

SEQ ID NO: 130563 - RNA, 32 nt, Homo Sapiens
ggcucgccuggcaccaccacacggccacagcc

SEQ ID NO: 130564 - RNA, 32 nt, Homo Sapiens
ucuuauccaucugcaggugaaucuucaauaaa

SEQ ID NO: 130565 - RNA, 32 nt, Homo Sapiens
auaaagucaaccaaaaaagcaaagucauggaa

SEQ ID NO: 130566 - RNA, 32 nt, Homo Sapiens
uauuccugccugccuggcaagcccaagagcca

SEQ ID NO: 130567 - RNA, 32 nt, Homo Sapiens
cucaucauucuuggcaggaaucugcaaaugga

SEQ ID NO: 130568 - RNA, 32 nt, Homo Sapiens
ugguggacgcagagcacuuaguuacccuggac

SEQ ID NO: 130569 - RNA, 32 nt, Homo Sapiens
cuuauucccuagucuguguggcaaauuaaaca

SEQ ID NO: 130570 - RNA, 32 nt, Homo Sapiens
auaggcuggggacacaggauccuggccugaga

SEQ ID NO: 130571 - RNA, 32 nt, Homo Sapiens
cugguacuguacgauccaaaacauuguaccca

SEQ ID NO: 130572 - RNA, 32 nt, Homo Sapiens
aauaugggaaaaacauaacauggcgucccaua

SEQ ID NO: 130573 - RNA, 32 nt, Homo Sapiens
augugcucauuucccuguuccagggaaggcgu

SEQ ID NO: 130574 - RNA, 32 nt, Homo Sapiens
cuaucauacuagaugcuaaucacccucuguca

SEQ ID NO: 130575 - RNA, 32 nt, Homo Sapiens
ggccagggaaagggauacagucccccgggccc

SEQ ID NO: 130576 - RNA, 32 nt, Homo Sapiens
ucaugggcugcccuggcccauaccaggcaggg

SEQ ID NO: 130577 - RNA, 32 nt, Homo Sapiens
cgaagcucgcggggggcgacagcgacggcggg

SEQ ID NO: 130578 - RNA, 26 nt, Homo Sapiens
cauggacgccuucacccgcuucacca

SEQ ID NO: 130579 - RNA, 32 nt, Homo Sapiens
aacuuccaaaaugauauauaucuuauauguau

SEQ ID NO: 130580 - RNA, 32 nt, Homo Sapiens
cgugagccaauauaaaaugugacaugaggccg

SEQ ID NO: 130581 - RNA, 32 nt, Homo Sapiens
gaccucuuaauuguuuuaaaucuuugagguau

SEQ ID NO: 130582 - RNA, 32 nt, Homo Sapiens
gggcaagggauguaggcuggggccugacugua

SEQ ID NO: 130583 - RNA, 32 nt, Homo Sapiens
guggccccgccugcucuuuccucccccaccag

SEQ ID NO: 130584 - RNA, 32 nt, Homo Sapiens
gugaccccgccugcucuuuccucccccgccag

SEQ ID NO: 130585 - RNA, 32 nt, Homo Sapiens
cacagaccauucacauggucuuucucuccaga

SEQ ID NO: 130586 - RNA, 32 nt, Homo Sapiens
ccccggcucccuccugagcugcgccgugccag

SEQ ID NO: 130587 - RNA, 30 nt, Homo Sapiens
cuucccucuagguggggggaaagggugagu

SEQ ID NO: 130588 - RNA, 32 nt, Homo Sapiens
gcaguguccuccugggguucccacgugcaaaa

SEQ ID NO: 130589 - RNA, 32 nt, Homo Sapiens
auuaagaugugaaaauaaugcauaaagacagg

SEQ ID NO: 130590 - RNA, 32 nt, Homo Sapiens
caaauagccgucugcgauuuuggcggcccucc

SEQ ID NO: 130591 - RNA, 32 nt, Homo Sapiens
aaaagggaaauggagaauaaaaguucagaaaa

SEQ ID NO: 130592 - RNA, 32 nt, Homo Sapiens
cagauguugcuguuuccucaaguugcaggucu

SEQ ID NO: 130593 - RNA, 32 nt, Homo Sapiens
uggguggagagccgcggcccugaccacgacca

SEQ ID NO: 130594 - RNA, 32 nt, Homo Sapiens
uagcuggcugggcuggggaggggguagugaca

SEQ ID NO: 130595 - RNA, 32 nt, Homo Sapiens
uucguggccgggggcugcuacccccuccccug

SEQ ID NO: 130596 - RNA, 32 nt, Homo Sapiens
agcuucuaccauuguuaggagcauucauaacu

SEQ ID NO: 130597 - RNA, 32 nt, Homo Sapiens
gggugccaaacaccagaaggggagauaauagu

SEQ ID NO: 130598 - RNA, 32 nt, Homo Sapiens
cgucaggagagaagccgcgucugugggacgaa

SEQ ID NO: 130599 - RNA, 32 nt, Homo Sapiens
aguuucaccauauugcccaggcuggucuuaaa

SEQ ID NO: 130600 - RNA, 32 nt, Homo Sapiens
cgggggccuuggcgaauggcuuucuugcuggc

SEQ ID NO: 130601 - RNA, 32 nt, Homo Sapiens
caugcuuaucccauuaucaacccugaaaguuu

SEQ ID NO: 130602 - RNA, 32 nt, Homo Sapiens
aggaugaugaugagugggaagacugucuauau

SEQ ID NO: 130603 - RNA, 32 nt, Homo Sapiens
gucuugcugcugauauuuuuucuaauauauau

SEQ ID NO: 130604 - RNA, 32 nt, Homo Sapiens
ggcccguccaugcuccucucccgugugagugc

SEQ ID NO: 130605 - RNA, 32 nt, Homo Sapiens
gccauacaaaaacaggcaguggggccaguugu

SEQ ID NO: 130606 - RNA, 32 nt, Homo Sapiens
gauuucaucaucuuggccaggcuggucuugaa

SEQ ID NO: 130607 - RNA, 32 nt, Homo Sapiens
gaaaaugucugucuuucuguccaaauaucuac

SEQ ID NO: 130608 - RNA, 32 nt, Homo Sapiens
gcagcugcagguggaggacgcgcaggagcgcg

SEQ ID NO: 130609 - RNA, 32 nt, Homo Sapiens
auacagguuuggagauuaggacauuaacauuu

SEQ ID NO: 130610 - RNA, 32 nt, Homo Sapiens
aagcuccggagccccagccccaaggcuuugac

SEQ ID NO: 130611 - RNA, 32 nt, Homo Sapiens
cugacuagaaauaccgucaaaaccagcacuua

SEQ ID NO: 130612 - RNA, 32 nt, Homo Sapiens
uuucuauaacagauauuauucagucuuauuuc

SEQ ID NO: 130613 - RNA, 32 nt, Homo Sapiens
ucccguaggagggugggucagaggauacagaa

SEQ ID NO: 130614 - RNA, 32 nt, Homo Sapiens
gaaaaauauauauugauguguuugucaccucc

SEQ ID NO: 130615 - RNA, 32 nt, Homo Sapiens
aaucuagaccaaagaaugguauuuucacuuuu

SEQ ID NO: 130616 - RNA, 32 nt, Homo Sapiens
uuaucaacugcagauguuauugaaagaaaaua

SEQ ID NO: 130617 - RNA, 32 nt, Homo Sapiens
ucccucacagaaagaaacgaaagaaagcaaag

SEQ ID NO: 130618 - RNA, 32 nt, Homo Sapiens
ugaggugggauguggaggucagagcaucucac

SEQ ID NO: 130619 - RNA, 32 nt, Homo Sapiens
cugcuguuuucccugccuggaacuuucccacc

SEQ ID NO: 130620 - RNA, 32 nt, Homo Sapiens
uaucuauuguauauuuuuuucuuaauguuuaa

SEQ ID NO: 130621 - RNA, 32 nt, Homo Sapiens
uccuaaucaagcacgucuuauguacuagcgcu

SEQ ID NO: 130622 - RNA, 32 nt, Homo Sapiens
auuauuuagucuuuaaauuuuuuagguuaauu

SEQ ID NO: 130623 - RNA, 32 nt, Homo Sapiens
cacaacacaccagccgcugcaggucccuaugg

SEQ ID NO: 130624 - RNA, 32 nt, Homo Sapiens
cugagaaccucacugaugugguagagaaacug

SEQ ID NO: 130625 - RNA, 32 nt, Homo Sapiens
cccuuuaggugguguggucuuuauuuuggcua

SEQ ID NO: 130626 - RNA, 31 nt, Homo Sapiens
auauugaaauaaaugcauaucauucuaauuu

SEQ ID NO: 130627 - RNA, 32 nt, Homo Sapiens
ggggguggaggguggcgaggugcggagacugc

SEQ ID NO: 130628 - RNA, 32 nt, Homo Sapiens
uuuuuauguguucaaacuauuuugguaaauuu

SEQ ID NO: 130629 - RNA, 32 nt, Homo Sapiens
ggcagcccuuggagguagggaugauuaccucc

SEQ ID NO: 130630 - RNA, 32 nt, Homo Sapiens
accaucccggacucgcccacuccuggauucga

SEQ ID NO: 130631 - RNA, 32 nt, Homo Sapiens
gggcaguugcggguugucauaacgguccccgc

SEQ ID NO: 130632 - RNA, 32 nt, Homo Sapiens
cuucccucgaccucguccuccuccccgcuccg

SEQ ID NO: 130633 - RNA, 32 nt, Homo Sapiens
ucuucagcacagagaccccccacuguguccag

SEQ ID NO: 130634 - RNA, 32 nt, Homo Sapiens
ugacaaacacgcuggguucgcugcuggucucc

SEQ ID NO: 130635 - RNA, 32 nt, Homo Sapiens
gcguugggcucagugggcucgaaacaaagggc

SEQ ID NO: 130636 - RNA, 32 nt, Homo Sapiens
accccugccuccccgaagccucccuggggccc

SEQ ID NO: 130637 - RNA, 32 nt, Homo Sapiens
guucugccucgcuucccggcgcggucgcagcc

SEQ ID NO: 130638 - RNA, 32 nt, Homo Sapiens
gaauugcagacacccaucaccacgcccagcua

SEQ ID NO: 130639 - RNA, 32 nt, Homo Sapiens
auggaaaaacagugccuggagagacaggucuu

SEQ ID NO: 130640 - RNA, 32 nt, Homo Sapiens
aagaaucucaacuuguuuuaucagaacucaaa

SEQ ID NO: 130641 - RNA, 32 nt, Homo Sapiens
aucaucuguauauaaaauuauuuuuaucauga

SEQ ID NO: 130642 - RNA, 32 nt, Homo Sapiens
uguagagcacucaagaaaguucugaaacugcu

SEQ ID NO: 130643 - RNA, 32 nt, Homo Sapiens
agcagaaucgccaucccaggugugcaaccacg

SEQ ID NO: 130644 - RNA, 32 nt, Homo Sapiens
uuuaugcuaccuaccccuguacaaguuaugcg

SEQ ID NO: 130645 - RNA, 32 nt, Homo Sapiens
ugcccucucccucucugcccccaccuccacaa

SEQ ID NO: 130646 - RNA, 32 nt, Homo Sapiens
ccuuucccccuacacaaacgguaacauacugc

SEQ ID NO: 130647 - RNA, 32 nt, Homo Sapiens
aucaggaauaauauuucuuugaaagcugaaau

SEQ ID NO: 130648 - RNA, 32 nt, Homo Sapiens
ccaacugagucucccccucguccugcuuccca

SEQ ID NO: 130649 - RNA, 32 nt, Homo Sapiens
ggauuugggaagcuccuugcacuuggaacagg

SEQ ID NO: 130650 - RNA, 32 nt, Homo Sapiens
ccacugaagaacucagacucagagugcuugga

SEQ ID NO: 130651 - RNA, 32 nt, Homo Sapiens
uaugugcucugagcuucccugaaccaggaucu

SEQ ID NO: 130652 - RNA, 32 nt, Homo Sapiens
gaauguggcauuagcuuuuuuauuuuaacccu

SEQ ID NO: 130653 - RNA, 32 nt, Homo Sapiens
cacgaauggcagcguccuccccgacccccagu

SEQ ID NO: 130654 - RNA, 32 nt, Homo Sapiens
ugacuggaggauuuuuuccccuuggaagacac

SEQ ID NO: 130655 - RNA, 32 nt, Homo Sapiens
acugcccccuucccuggcccagucucaaaaaa

SEQ ID NO: 130656 - RNA, 32 nt, Homo Sapiens
cugaccaucgggccgggggcgguggcucacgc

SEQ ID NO: 130657 - RNA, 32 nt, Homo Sapiens
caccuacuauguguuugauacuguauacaaaa

SEQ ID NO: 130658 - RNA, 32 nt, Homo Sapiens
cagggaggcagcuaccucgggaggaaggucuc

SEQ ID NO: 130659 - RNA, 32 nt, Homo Sapiens
agauagaaagagaaaagaauuaguuuucuucc

SEQ ID NO: 130660 - RNA, 32 nt, Homo Sapiens
ccggcccaagccagcgcaccccgcugacuccc

SEQ ID NO: 130661 - RNA, 32 nt, Homo Sapiens
gcugggugggcaccacggcugggaucaccacc

SEQ ID NO: 130662 - RNA, 32 nt, Homo Sapiens
gugacacuccaguugcagaccaucgcacacca

SEQ ID NO: 130663 - RNA, 32 nt, Homo Sapiens
caggggcaccucuggaggcaggagaggccccc

SEQ ID NO: 130664 - RNA, 32 nt, Homo Sapiens
auaugugaaggaugugaugacaguagcauuuu

SEQ ID NO: 130665 - RNA, 32 nt, Homo Sapiens
uccacaucccaagacgacagccaggcguuccu

SEQ ID NO: 130666 - RNA, 32 nt, Homo Sapiens
aacauaguggguauaaucauggaucgcuugua

SEQ ID NO: 130667 - RNA, 32 nt, Homo Sapiens
gccuacauuucccagcaccagcucuccagcac

SEQ ID NO: 130668 - RNA, 32 nt, Homo Sapiens
ugcgggugcaggagguacggcggcaaugugag

SEQ ID NO: 130669 - RNA, 32 nt, Homo Sapiens
uuugaguggguauuuggcacaaugaggauaaa

SEQ ID NO: 130670 - RNA, 32 nt, Homo Sapiens
auguuacuauaaggacuuuuaacauugguuua

SEQ ID NO: 130671 - RNA, 28 nt, Homo Sapiens
accaugcuccagcucagugauuuucuaa

SEQ ID NO: 130672 - RNA, 32 nt, Homo Sapiens
uccaguuuugcucuguuuugccugaaguuuua

SEQ ID NO: 130673 - RNA, 32 nt, Homo Sapiens
uugagguugaaaugaugggaaccaacauucuu

SEQ ID NO: 130674 - RNA, 32 nt, Homo Sapiens
uggggacagguuucucucuuucccucucuuuu

SEQ ID NO: 130675 - RNA, 32 nt, Homo Sapiens
ggcgggggcugcgccagcaugaggcgggguua

SEQ ID NO: 130676 - RNA, 32 nt, Homo Sapiens
cuccugugcagggcagcugaugggauaaggug

SEQ ID NO: 130677 - RNA, 32 nt, Homo Sapiens
cuguguggguguggagauggccaaugagaauc

SEQ ID NO: 130678 - RNA, 32 nt, Homo Sapiens
gcccuuggggguccuccuccagggacagcaac

SEQ ID NO: 130679 - RNA, 32 nt, Homo Sapiens
aaagguggaaagaggagaacguagcaaucugg

SEQ ID NO: 130680 - RNA, 32 nt, Homo Sapiens
uuguggaugagcugcaggugcagugcuccagc

SEQ ID NO: 130681 - RNA, 32 nt, Homo Sapiens
aaagccacagcacguacacccacuccagggau

SEQ ID NO: 130682 - RNA, 32 nt, Homo Sapiens
cucugcccuggccacauccuuccccugaucuc

SEQ ID NO: 130683 - RNA, 32 nt, Homo Sapiens
cuggauaagaagauuacaacuauuaagugucg

SEQ ID NO: 130684 - RNA, 32 nt, Homo Sapiens
guggaaugauuaaugauguuuugcagcaguuu

SEQ ID NO: 130685 - RNA, 32 nt, Homo Sapiens
caggagaagaggcgguggcggcggcggcugcg

SEQ ID NO: 130686 - RNA, 32 nt, Homo Sapiens
uggugcagcuccgagacgcuccugggcugcgc

SEQ ID NO: 130687 - RNA, 32 nt, Homo Sapiens
uguuauguuaaugguagccaucuuugcaggaa

SEQ ID NO: 130688 - RNA, 32 nt, Homo Sapiens
cccuaggcccgggucccggauccccgcgcacc

SEQ ID NO: 130689 - RNA, 32 nt, Homo Sapiens
uaugaucacagcaugucacuguacacucauuu

SEQ ID NO: 130690 - RNA, 27 nt, Homo Sapiens
cuccuucuuuuccagccccgguaccgg

SEQ ID NO: 130691 - RNA, 32 nt, Homo Sapiens
gcagcuacaaaacaucuuggcauauuuaagag

SEQ ID NO: 130692 - RNA, 32 nt, Homo Sapiens
gaugcccuugaugauccucuauuuaaaggaga

SEQ ID NO: 130693 - RNA, 32 nt, Homo Sapiens
cuugagcacacucugugcuccucuuccaguua

SEQ ID NO: 130694 - RNA, 32 nt, Homo Sapiens
ugcauaaagaucauccuugaucuuauaucuga

SEQ ID NO: 130695 - RNA, 32 nt, Homo Sapiens
agucucuuuccacuggcacuucccugcuuugc

SEQ ID NO: 130696 - RNA, 32 nt, Homo Sapiens
acuccuuuggcgggaagggcuacuuggaaagg

SEQ ID NO: 130697 - RNA, 32 nt, Homo Sapiens
cuucucuuaguucucuccgccucccccucaac

SEQ ID NO: 130698 - RNA, 32 nt, Homo Sapiens
acaguuauuuuugccuaaauggaguauaccuu

SEQ ID NO: 130699 - RNA, 32 nt, Homo Sapiens
ucagaguugcugucuucucugagacacacaaa

SEQ ID NO: 130700 - RNA, 32 nt, Homo Sapiens
uccuaucucagaaaacaaaaacaacaaaagaa

SEQ ID NO: 130701 - RNA, 29 nt, Homo Sapiens
auuuaauaugcagcauaccauagguguau

SEQ ID NO: 130702 - RNA, 32 nt, Homo Sapiens
ucgagauagaaagaagagaauugaaaagccga

SEQ ID NO: 130703 - RNA, 32 nt, Homo Sapiens
ccuacuuguggcgaucugaguacucuacucuu

SEQ ID NO: 130704 - RNA, 32 nt, Homo Sapiens
agccaggauuuucacacccccuccucaagcug

SEQ ID NO: 130705 - RNA, 32 nt, Homo Sapiens
aaugucuaggcaugugcuggucucuguguguu

SEQ ID NO: 130706 - RNA, 32 nt, Homo Sapiens
uuaauugauucuguuuucauggauagauucaa

SEQ ID NO: 130707 - RNA, 32 nt, Homo Sapiens
gcacugauggauucauuuuuaauuugcauuac

SEQ ID NO: 130708 - RNA, 32 nt, Homo Sapiens
gcagaggcgagggagguugcggguaggaaggg

SEQ ID NO: 130709 - RNA, 32 nt, Homo Sapiens
aagauguuaacagauuauuuuugcugucuucu

SEQ ID NO: 130710 - RNA, 32 nt, Homo Sapiens
uuuuccucaacaugcagguuucccuucuuaua

SEQ ID NO: 130711 - RNA, 32 nt, Homo Sapiens
ggauuuaaaaaacaaccuuuagcccuuuauca

SEQ ID NO: 130712 - RNA, 32 nt, Homo Sapiens
auauuacacugggauuauggagaauauuauga

SEQ ID NO: 130713 - RNA, 32 nt, Homo Sapiens
cccacccucccugcaacaacagcccucuagcc

SEQ ID NO: 130714 - RNA, 32 nt, Homo Sapiens
uucuaucagagauaaaauuuguuaugaauuug

SEQ ID NO: 130715 - RNA, 32 nt, Homo Sapiens
gagauccagacccaggcccaccucucaccccc

SEQ ID NO: 130716 - RNA, 32 nt, Homo Sapiens
ccuaugguccuagaauccuuaagagaagcacc

SEQ ID NO: 130717 - RNA, 32 nt, Homo Sapiens
acccccucccccacccaccucucuggcuucca

SEQ ID NO: 130718 - RNA, 32 nt, Homo Sapiens
augggucgcucccgccggacaggcgcgcaccg

SEQ ID NO: 130719 - RNA, 32 nt, Homo Sapiens
uuucugcacagggagugagauuauuaaaguaa

SEQ ID NO: 130720 - RNA, 32 nt, Homo Sapiens
cucaucucaacucccaguucccagcccucuaa

SEQ ID NO: 130721 - RNA, 32 nt, Homo Sapiens
uugagcacuucgccagaaucuacagucaaaaa

SEQ ID NO: 130722 - RNA, 32 nt, Homo Sapiens
ucccugugggguggcagaacuggucuccuuua

SEQ ID NO: 130723 - RNA, 32 nt, Homo Sapiens
guagugacaaagugaaaggaaauuuaggaggc

SEQ ID NO: 130724 - RNA, 32 nt, Homo Sapiens
aauguaaaaggucuuuuuaaaaaucaugaaaa

SEQ ID NO: 130725 - RNA, 32 nt, Homo Sapiens
agggcagcugaagagaaacauaaagaauucuu

SEQ ID NO: 130726 - RNA, 32 nt, Homo Sapiens
ccaacacagucucaccuagaaaacagauggaa

SEQ ID NO: 130727 - RNA, 32 nt, Homo Sapiens
ggcucgucucgaacuccugaccucaagugauc

SEQ ID NO: 130728 - RNA, 32 nt, Homo Sapiens
cccucccgcccggaaagcugcccagccaccag

SEQ ID NO: 130729 - RNA, 32 nt, Homo Sapiens
guugcagugucugcuggagacauugaggcagg

SEQ ID NO: 130730 - RNA, 32 nt, Homo Sapiens
ucaacuuugucaacuugugccuuacgaaggau

SEQ ID NO: 130731 - RNA, 32 nt, Homo Sapiens
ucccuccgugcagccgaugauggcccuauggu

SEQ ID NO: 130732 - RNA, 32 nt, Homo Sapiens
cacccagggggcucugaauguauuuuguaccg

SEQ ID NO: 130733 - RNA, 32 nt, Homo Sapiens
agcuccugcugcgcucugcguagagcagccug

SEQ ID NO: 130734 - RNA, 32 nt, Homo Sapiens
cuaguugcugucugguguuugcuggugaaaac

SEQ ID NO: 130735 - RNA, 32 nt, Homo Sapiens
ugcuuuguuuuuuaauuauauucaucuuuuca

SEQ ID NO: 130736 - RNA, 32 nt, Homo Sapiens
gggcaggacuuccaggaggaccccaacccggc

SEQ ID NO: 130737 - RNA, 32 nt, Homo Sapiens
uuuagauaauaucaugaacugauaaaugcagu

SEQ ID NO: 130738 - RNA, 32 nt, Homo Sapiens
auguagaagaaccucuaacaagguuaaugugc

SEQ ID NO: 130739 - RNA, 32 nt, Homo Sapiens
guuaguuacucaguuauguugagaagaaucug

SEQ ID NO: 130740 - RNA, 32 nt, Homo Sapiens
auccacccagacaauaaaccauccucuuccaa

SEQ ID NO: 130741 - RNA, 32 nt, Homo Sapiens
gcccgccgacccucagcauccuccucagaaag

SEQ ID NO: 130742 - RNA, 32 nt, Homo Sapiens
cuacuucguuuuugauuguguuggugucaugu

SEQ ID NO: 130743 - RNA, 32 nt, Homo Sapiens
gcagccccaggggcuuccccccugcccaugga

SEQ ID NO: 130744 - RNA, 32 nt, Homo Sapiens
cugucagggccgagccgagcggaucgcugggc

SEQ ID NO: 130745 - RNA, 32 nt, Homo Sapiens
gaagccaucacagccaagaggugggguuccau

SEQ ID NO: 130746 - RNA, 31 nt, Homo Sapiens
aguuggggcauaucgaagugguuuaauuaaa

SEQ ID NO: 130747 - RNA, 32 nt, Homo Sapiens
guaaaaguagagggcaauauuuuugcuuuuug

SEQ ID NO: 130748 - RNA, 32 nt, Homo Sapiens
aacaauuuuagaugauucagcuuuuguuccau

SEQ ID NO: 130749 - RNA, 28 nt, Homo Sapiens
ugcaaauaauguuaacauuugaauuuuu

SEQ ID NO: 130750 - RNA, 32 nt, Homo Sapiens
uucuaccucaugccacuguuuaaaaguaaaac

SEQ ID NO: 130751 - RNA, 31 nt, Homo Sapiens
cggccaucagggugaaaguccuggcucccua

SEQ ID NO: 130752 - RNA, 31 nt, Homo Sapiens
acaaacccagaccccaccugaauugggcuuu

SEQ ID NO: 130753 - RNA, 32 nt, Homo Sapiens
cuguauagcaucuauuuauuuagaugauuuau

SEQ ID NO: 130754 - RNA, 32 nt, Homo Sapiens
uauuuuguaaauugcugcaugaccaaaauagc

SEQ ID NO: 130755 - RNA, 32 nt, Homo Sapiens
guauuugguguguaggggaggggggagaacua

SEQ ID NO: 130756 - RNA, 32 nt, Homo Sapiens
cugguggcccuccuccccaucucaguuugcaa

SEQ ID NO: 130757 - RNA, 32 nt, Homo Sapiens
gucucccgcccggcgcccccaguguuuucuga

SEQ ID NO: 130758 - RNA, 32 nt, Homo Sapiens
ucaggagaagacggaagcuggaguuggacaug

SEQ ID NO: 130759 - RNA, 32 nt, Homo Sapiens
gauuauuccugccugccuccaugggaucuguc

SEQ ID NO: 130760 - RNA, 32 nt, Homo Sapiens
caucauugcauaauucuugaugguaauaaauu

SEQ ID NO: 130761 - RNA, 32 nt, Homo Sapiens
cccuuguccaccugcccaguggcaccgccaug

SEQ ID NO: 130762 - RNA, 32 nt, Homo Sapiens
ggugcagcacaccaacauggcauauguauaca

SEQ ID NO: 130763 - RNA, 32 nt, Homo Sapiens
augauugcuguuuuccucucacucuccuguuu

SEQ ID NO: 130764 - RNA, 32 nt, Homo Sapiens
ugaaacuauauuuugucauaucaaauaaagag

SEQ ID NO: 130765 - RNA, 32 nt, Homo Sapiens
uuucauugauuucaaaaguuuauuuucugugc

SEQ ID NO: 130766 - RNA, 32 nt, Homo Sapiens
aaggaauguggauagcuuuggaacucuaguuu

SEQ ID NO: 130767 - RNA, 32 nt, Homo Sapiens
ggaugguggcugccugugcuuuugcucauggc

SEQ ID NO: 130768 - RNA, 32 nt, Homo Sapiens
cagggcccaagcagaagcacaggcccaguccu

SEQ ID NO: 130769 - RNA, 32 nt, Homo Sapiens
aagcaauuuuuaaagaaaauaugucuccucug

SEQ ID NO: 130770 - RNA, 32 nt, Homo Sapiens
uucuauacuagauuauuaguauuauuagcuaa

SEQ ID NO: 130771 - RNA, 32 nt, Homo Sapiens
ggcuggucucgaacuccugaccucaaguaauu

SEQ ID NO: 130772 - RNA, 32 nt, Homo Sapiens
aauacauguuuguauaucuacauuuacgaaaa

SEQ ID NO: 130773 - RNA, 32 nt, Homo Sapiens
auucugcaacugaguaugaaaucacagaccag

SEQ ID NO: 130774 - RNA, 32 nt, Homo Sapiens
caguguuuacuuucaauuccuaggauauguga

SEQ ID NO: 130775 - RNA, 32 nt, Homo Sapiens
gggagguugagguggguggaucaugaggucag

SEQ ID NO: 130776 - RNA, 32 nt, Homo Sapiens
cugggggagacggcaccgcgugcccacggggg

SEQ ID NO: 130777 - RNA, 32 nt, Homo Sapiens
ucaaauguuucauuuuuaggugauaucccaag

SEQ ID NO: 130778 - RNA, 32 nt, Homo Sapiens
uggccauccacucagcugauguuuccugggaa

SEQ ID NO: 130779 - RNA, 32 nt, Homo Sapiens
uaaaauuuaauuucuuuuuuccucugaguucu

SEQ ID NO: 130780 - RNA, 32 nt, Homo Sapiens
uggacaaggugauauggggagagauggaagag

SEQ ID NO: 130781 - RNA, 32 nt, Homo Sapiens
gaaugcaacuaucugcuuuucuuaugcugacc

SEQ ID NO: 130782 - RNA, 32 nt, Homo Sapiens
aguggauuuuuccagcagugaagggacauucu

SEQ ID NO: 130783 - RNA, 32 nt, Homo Sapiens
ugccuguaaucccagcacuuugggaggucgag

SEQ ID NO: 130784 - RNA, 32 nt, Homo Sapiens
auacuaauuuuuccaaucaguauggauuguau

SEQ ID NO: 130785 - RNA, 32 nt, Homo Sapiens
ugcuuguaaucccagcacuuugggaggccgag

SEQ ID NO: 130786 - RNA, 32 nt, Homo Sapiens
gacuauguauguuuaaauuaacuuuuuauuga

SEQ ID NO: 130787 - RNA, 32 nt, Homo Sapiens
aaggcuggacuaaauggcugcagaacucccuu

SEQ ID NO: 130788 - RNA, 32 nt, Homo Sapiens
uccuggcucauggcccuuccccggcccagcgc

SEQ ID NO: 130789 - RNA, 32 nt, Homo Sapiens
ggaacauuucuuuuacauuuuaaauaaaacuu

SEQ ID NO: 130790 - RNA, 32 nt, Homo Sapiens
cggggcgcgaggcucugggacucaucugcagg

SEQ ID NO: 130791 - RNA, 32 nt, Homo Sapiens
aaccauaggacuguggcaaacaaaaccaauuc

SEQ ID NO: 130792 - RNA, 32 nt, Homo Sapiens
uaggccucacuggcaggggggcugcccacagc

SEQ ID NO: 130793 - RNA, 32 nt, Homo Sapiens
ccgcucguguggaagucgucgacgccgccgcu

SEQ ID NO: 130794 - RNA, 32 nt, Homo Sapiens
uuaccaaaaaaguuugccaaccuuauuuguag

SEQ ID NO: 130795 - RNA, 32 nt, Homo Sapiens
auguuuugaggaguuaacuuuuuucugugcag

SEQ ID NO: 130796 - RNA, 32 nt, Homo Sapiens
ucugcccaccuuggaugggaacuguggaccaa

SEQ ID NO: 130797 - RNA, 32 nt, Homo Sapiens
gaagguaacgcgccgcgcccggggcugcgcgg

SEQ ID NO: 130798 - RNA, 32 nt, Homo Sapiens
cugaaguagugcagggucagcccgcaaguugc

SEQ ID NO: 130799 - RNA, 32 nt, Homo Sapiens
cuauaaccuucuucuuuuuuccccuacuguuu

SEQ ID NO: 130800 - RNA, 32 nt, Homo Sapiens
ccuccauacucccgucacuccuccccacugcc

SEQ ID NO: 130801 - RNA, 32 nt, Homo Sapiens
cgagggaagaggccggagggagaucgcggagg

SEQ ID NO: 130802 - RNA, 32 nt, Homo Sapiens
ugcuucacuuucugccaugauuuuaaguuucc

SEQ ID NO: 130803 - RNA, 32 nt, Homo Sapiens
agugcucagguauguaguaaguacuguagucc

SEQ ID NO: 130804 - RNA, 32 nt, Homo Sapiens
cggcagucggcuucuucagucgcucccuggag

SEQ ID NO: 130805 - RNA, 32 nt, Homo Sapiens
ugggguggaaggggcaggauucugcagcugcu

SEQ ID NO: 130806 - RNA, 32 nt, Homo Sapiens
cagagucccacagaccgcuccuccucacccuc

SEQ ID NO: 130807 - RNA, 32 nt, Homo Sapiens
uugcacucucccacacccuuuucuuuucgucc

SEQ ID NO: 130808 - RNA, 32 nt, Homo Sapiens
gcggacagaucaccugccccccucggguuccc

SEQ ID NO: 130809 - RNA, 32 nt, Homo Sapiens
ggggcucagaccacaugccccaucccaugcug

SEQ ID NO: 130810 - RNA, 32 nt, Homo Sapiens
uucgaccuggccuggcggcugcgcaugaacuu

SEQ ID NO: 130811 - RNA, 32 nt, Homo Sapiens
guaccuacagguaagucuacauccucucugac

SEQ ID NO: 130812 - RNA, 32 nt, Homo Sapiens
cggccgcccacccacccaggcuggagccaugg

SEQ ID NO: 130813 - RNA, 28 nt, Homo Sapiens
aggcggcggcggccgggccuaggagcga

SEQ ID NO: 130814 - RNA, 32 nt, Homo Sapiens
auacaaauguaaaacuuacacauggaaagaac

SEQ ID NO: 130815 - RNA, 32 nt, Homo Sapiens
uuuggcugggaugcgugugcuguggugaauau

SEQ ID NO: 130816 - RNA, 32 nt, Homo Sapiens
aagguagugucagaagacagaguuacagcaga

SEQ ID NO: 130817 - RNA, 32 nt, Homo Sapiens
uggguauuugauucuuuuuuuguuuuguguuu

SEQ ID NO: 130818 - RNA, 32 nt, Homo Sapiens
ucccacaucaucugucuucucuaaguuaggga

SEQ ID NO: 130819 - RNA, 32 nt, Homo Sapiens
gcucaggacaaggcccugaggaggcccaaucc

SEQ ID NO: 130820 - RNA, 32 nt, Homo Sapiens
guuuugcugcaauaaacugcauuugaaauucu

SEQ ID NO: 130821 - RNA, 32 nt, Homo Sapiens
cuaaggaaacaaaaacagaaaacgaaacaaug

SEQ ID NO: 130822 - RNA, 32 nt, Homo Sapiens
aaucggaacuagaagcauuugcuggagucuga

SEQ ID NO: 130823 - RNA, 32 nt, Homo Sapiens
cugcgugguggcugucggggggcgcgcgggga

SEQ ID NO: 130824 - RNA, 31 nt, Homo Sapiens
aaccugaauaaauaacagguauucuaaagcc

SEQ ID NO: 130825 - RNA, 32 nt, Homo Sapiens
uugaaaagcacuuuaauuagauaauguauuuu

SEQ ID NO: 130826 - RNA, 32 nt, Homo Sapiens
cgagauauuugacuuuuaaaaaucucaauaaa

SEQ ID NO: 130827 - RNA, 32 nt, Homo Sapiens
ugccaccuuuucuucuuucucagagaacucaa

SEQ ID NO: 130828 - RNA, 32 nt, Homo Sapiens
accugcacaccccagcccugcacggggcccuc

SEQ ID NO: 130829 - RNA, 32 nt, Homo Sapiens
accuucaugaacacucuuucuggauucccuac

SEQ ID NO: 130830 - RNA, 32 nt, Homo Sapiens
gccuggugcugcucccaucugccgccccccuu

SEQ ID NO: 130831 - RNA, 32 nt, Homo Sapiens
ucaggggauguagcuuuuuuaaaagauuuggg

SEQ ID NO: 130832 - RNA, 32 nt, Homo Sapiens
cuggggccgggcgcggcuuggcgggagggucu

SEQ ID NO: 130833 - RNA, 32 nt, Homo Sapiens
ugauuuaaacuguguuucacuuacaaguuuua

SEQ ID NO: 130834 - RNA, 32 nt, Homo Sapiens
gaugcccgaggguccugagccagccacgcugc

SEQ ID NO: 130835 - RNA, 32 nt, Homo Sapiens
ccaccccucgggucuugugcuucagcaguccu

SEQ ID NO: 130836 - RNA, 32 nt, Homo Sapiens
uagcggcagccucagcuccaccaccucccuca

SEQ ID NO: 130837 - RNA, 32 nt, Homo Sapiens
aaccgagaggcccugcgccugggucucugguc

SEQ ID NO: 130838 - RNA, 32 nt, Homo Sapiens
uuuuuuucuuucucuuuuuuuuucuuaaaaug

SEQ ID NO: 130839 - RNA, 32 nt, Homo Sapiens
acagacuuagcaggcaccugcagacguaacuu

SEQ ID NO: 130840 - RNA, 32 nt, Homo Sapiens
uacagagaacuaacacuauuuuaugcaaauau

SEQ ID NO: 130841 - RNA, 32 nt, Homo Sapiens
acgaagcucagugaggaaggcaugucaaaagc

SEQ ID NO: 130842 - RNA, 32 nt, Homo Sapiens
guauuagaauaaaagucacagcaucaaaaagc

SEQ ID NO: 130843 - RNA, 32 nt, Homo Sapiens
cagaauuucuucauaccuuuuccacauccaga

SEQ ID NO: 130844 - RNA, 32 nt, Homo Sapiens
cuccuguaauuccagcacuuugggaggccaag

SEQ ID NO: 130845 - RNA, 32 nt, Homo Sapiens
cccauuuuagagguggggaaacaaaggcccgg

SEQ ID NO: 130846 - RNA, 32 nt, Homo Sapiens
agauuagcaaaauuauuaauuuaaaaccccaa

SEQ ID NO: 130847 - RNA, 32 nt, Homo Sapiens
auuucgauaaccucacugaaaaacauuuaggc

SEQ ID NO: 130848 - RNA, 32 nt, Homo Sapiens
ggaggccuuggggaggcccaguguucccaggg

SEQ ID NO: 130849 - RNA, 32 nt, Homo Sapiens
gaaagcugacuucaacuauauaaaaucauuaa

SEQ ID NO: 130850 - RNA, 32 nt, Homo Sapiens
cccgccgcuccuugaggccgggguuggggagg

SEQ ID NO: 130851 - RNA, 32 nt, Homo Sapiens
ggcggguccugggagaggcgcgagccaggccu

SEQ ID NO: 130852 - RNA, 32 nt, Homo Sapiens
uauaaaauuuaaauauaauauugauagcuguc

SEQ ID NO: 130853 - RNA, 31 nt, Homo Sapiens
guaaacugaaucuuggaggugcuguuugcug

SEQ ID NO: 130854 - RNA, 32 nt, Homo Sapiens
aaugggucacaaaucuugcagcccuuaauuug

SEQ ID NO: 130855 - RNA, 32 nt, Homo Sapiens
uaaaacauuucugaauugcaguugaaugguug

SEQ ID NO: 130856 - RNA, 32 nt, Homo Sapiens
aguguaaacgggaauauuucaucuggaaacug

SEQ ID NO: 130857 - RNA, 32 nt, Homo Sapiens
gccaaauugacugucacgcggcagcuucaggg

SEQ ID NO: 130858 - RNA, 32 nt, Homo Sapiens
uucaucuacuuuauuuugauguuuccuuaaug

SEQ ID NO: 130859 - RNA, 32 nt, Homo Sapiens
caguggcugucaucuagucccugcgucugauc

SEQ ID NO: 130860 - RNA, 32 nt, Homo Sapiens
uagguaaagggucgggggaggggggagccuug

SEQ ID NO: 130861 - RNA, 32 nt, Homo Sapiens
cucgccugguccggcccggcccugggcaacag

SEQ ID NO: 130862 - RNA, 32 nt, Homo Sapiens
gccgggcggugcgcugggagcugcuggugcug

SEQ ID NO: 130863 - RNA, 32 nt, Homo Sapiens
acccugacccccgccccuccccagcccugcag

SEQ ID NO: 130864 - RNA, 32 nt, Homo Sapiens
ucgccaucuucuucuuuuuuuggcugcucagu

SEQ ID NO: 130865 - RNA, 32 nt, Homo Sapiens
uuaagagugcaauauuauauuuuuauguaaaa

SEQ ID NO: 130866 - RNA, 32 nt, Homo Sapiens
cgcccccaccugggcaccgggacccccucacc

SEQ ID NO: 130867 - RNA, 32 nt, Homo Sapiens
uacagagccccugggcuugucccggccucugg

SEQ ID NO: 130868 - RNA, 32 nt, Homo Sapiens
agguggggcggcccgggccccuggacucuaga

SEQ ID NO: 130869 - RNA, 32 nt, Homo Sapiens
gcgggcgugcccgugugguguggacggugagg

SEQ ID NO: 130870 - RNA, 32 nt, Homo Sapiens
uagugguacugcauagucccacuauaagucaa

SEQ ID NO: 130871 - RNA, 32 nt, Homo Sapiens
ugauuguuaaggguuucuuuuaaaaaguaggu

SEQ ID NO: 130872 - RNA, 32 nt, Homo Sapiens
ucaauuuuaauuaauugacauaaaaaugcuac

SEQ ID NO: 130873 - RNA, 32 nt, Homo Sapiens
cgcgccgccccgaggaugaguggugauguccu

SEQ ID NO: 130874 - RNA, 32 nt, Homo Sapiens
ugaacuuguaacuauuguuuuguuuuggauuu

SEQ ID NO: 130875 - RNA, 32 nt, Homo Sapiens
gggaauuggggaugggagggaggcaauaaaga

SEQ ID NO: 130876 - RNA, 32 nt, Homo Sapiens
caugccuggcacaacaucaagccugugauugu

SEQ ID NO: 130877 - RNA, 32 nt, Homo Sapiens
ccagcccagcccugcccagcccugcccggagg

SEQ ID NO: 130878 - RNA, 32 nt, Homo Sapiens
cucacgacuaagcucucacgauuaaggcacgc

SEQ ID NO: 130879 - RNA, 32 nt, Homo Sapiens
caggcauuccuccugcaauaauguuguaucuu

SEQ ID NO: 130880 - RNA, 32 nt, Homo Sapiens
agccagaccgcgccuggaccuucuuguucuga

SEQ ID NO: 130881 - RNA, 32 nt, Homo Sapiens
aguaguggggccaccuuguugagcuggcaugc

SEQ ID NO: 130882 - RNA, 32 nt, Homo Sapiens
ucugguugacauuuuacguguggccaucaccc

SEQ ID NO: 130883 - RNA, 32 nt, Homo Sapiens
ccccaucuccacuuccucccccucgaguguac

SEQ ID NO: 130884 - RNA, 32 nt, Homo Sapiens
cgugaccgccgugguagcugcuccacacgcag

SEQ ID NO: 130885 - RNA, 32 nt, Homo Sapiens
gcaccccagcucuuugucuccucccaguacga

SEQ ID NO: 130886 - RNA, 32 nt, Homo Sapiens
uuaugacaaccucagauggcaggaauuaucau

SEQ ID NO: 130887 - RNA, 32 nt, Homo Sapiens
augaagaaaaggaaauaaaaaacuguaaaguc

SEQ ID NO: 130888 - RNA, 32 nt, Homo Sapiens
cggaggcggccgcgcguggaugcggcgggagc

SEQ ID NO: 130889 - RNA, 32 nt, Homo Sapiens
caccugccacuaccuuggguguccuuacagcu

SEQ ID NO: 130890 - RNA, 32 nt, Homo Sapiens
gaaaagccuuauuugacuuaugcuugugauac

SEQ ID NO: 130891 - RNA, 32 nt, Homo Sapiens
ggaaugcaccacggcagcucuccgccaauuuc

SEQ ID NO: 130892 - RNA, 32 nt, Homo Sapiens
uacuugauauuuuuauuuguuucaguucagau

SEQ ID NO: 130893 - RNA, 31 nt, Homo Sapiens
uggugaauaagaugaaauguauaucagaaaa

SEQ ID NO: 130894 - RNA, 32 nt, Homo Sapiens
uccgaggugcuugauugagcgacgcggagaag

SEQ ID NO: 130895 - RNA, 32 nt, Homo Sapiens
uuugucuuuucaugcagauuaguuagaauuca

SEQ ID NO: 130896 - RNA, 32 nt, Homo Sapiens
gggagggagccugguccugcaccugcccucug

SEQ ID NO: 130897 - RNA, 32 nt, Homo Sapiens
uaggaaucaugugccaagcagagguugggagg

SEQ ID NO: 130898 - RNA, 32 nt, Homo Sapiens
uuuaaagaaauccaaauuuuuaaaagaaggga

SEQ ID NO: 130899 - RNA, 32 nt, Homo Sapiens
accuacuguagccucagcaucuugcuaggagg

SEQ ID NO: 130900 - RNA, 32 nt, Homo Sapiens
cacucaugucauuauuauacuucuuauguuug

SEQ ID NO: 130901 - RNA, 32 nt, Homo Sapiens
acauaggugcauguaaccuguuugggcauugg

SEQ ID NO: 130902 - RNA, 32 nt, Homo Sapiens
cacaccuagcuccuuacaaccauuuauuuuaa

SEQ ID NO: 130903 - RNA, 32 nt, Homo Sapiens
gugagaugcucccagaugcauuuguccagugc

SEQ ID NO: 130904 - RNA, 32 nt, Homo Sapiens
guggucagcccgccucggccucccagagugcu

SEQ ID NO: 130905 - RNA, 32 nt, Homo Sapiens
cuguagccugaagaagacaagauuucuggaca

SEQ ID NO: 130906 - RNA, 32 nt, Homo Sapiens
guuuauguuaccauuaaguuccucuaaaaagu

SEQ ID NO: 130907 - RNA, 32 nt, Homo Sapiens
uccaaaaucaacaucuauauuccuccuuguuc

SEQ ID NO: 130908 - RNA, 32 nt, Homo Sapiens
agguucacagaaaaauugagcagaguacauag

SEQ ID NO: 130909 - RNA, 32 nt, Homo Sapiens
ucaccgagaagcugauguagagagagacacag

SEQ ID NO: 130910 - RNA, 32 nt, Homo Sapiens
cuuagggcaucucauccagggauucucaaacc

SEQ ID NO: 130911 - RNA, 32 nt, Homo Sapiens
guaauauuugggcaggccauuaauucucauua

SEQ ID NO: 130912 - RNA, 32 nt, Homo Sapiens
aaaaaagcaacacuuuuuuuuauguuauaugu

SEQ ID NO: 130913 - RNA, 32 nt, Homo Sapiens
aguccuucagccucuggggggucugggggccu

SEQ ID NO: 130914 - RNA, 32 nt, Homo Sapiens
auuuagccauagauggagaaacaaagcucagg

SEQ ID NO: 130915 - RNA, 32 nt, Homo Sapiens
uacacaaagagauaaaguuuagcuucuuuuua

SEQ ID NO: 130916 - RNA, 32 nt, Homo Sapiens
auuccaggaaauggugcauucuuaaagcccca

SEQ ID NO: 130917 - RNA, 32 nt, Homo Sapiens
caaggucucaccuucaucuacugugaagugau

SEQ ID NO: 130918 - RNA, 32 nt, Homo Sapiens
uucaaguccauaugccuggaguccccccuccu

SEQ ID NO: 130919 - RNA, 32 nt, Homo Sapiens
uguuuuuugggguuuucugcuuuaagauauau

SEQ ID NO: 130920 - RNA, 32 nt, Homo Sapiens
gggucugccaugcucuggaggagcaagggggc

SEQ ID NO: 130921 - RNA, 32 nt, Homo Sapiens
aucuacuaguuuuguuugauaauaauaaaauu

SEQ ID NO: 130922 - RNA, 32 nt, Homo Sapiens
gucacgaaggauuaagguaaagaugagaaaua

SEQ ID NO: 130923 - RNA, 32 nt, Homo Sapiens
uggggcgggugagaagcaggaaggaggcugau

SEQ ID NO: 130924 - RNA, 32 nt, Homo Sapiens
uccauuccucgcccugcccccagaggccagga

SEQ ID NO: 130925 - RNA, 32 nt, Homo Sapiens
guccugagacucuggcugggaagugcuuccag

SEQ ID NO: 130926 - RNA, 32 nt, Homo Sapiens
agagacgugauccucguaaaucuuuacgggag

SEQ ID NO: 130927 - RNA, 32 nt, Homo Sapiens
caggcaaggugcauccccucagcccuccuggc

SEQ ID NO: 130928 - RNA, 32 nt, Homo Sapiens
ucugcagagucgagaccccuggugcucucugc

SEQ ID NO: 130929 - RNA, 32 nt, Homo Sapiens
guguuuuuuguuacuacuaauccaccaacucu

SEQ ID NO: 130930 - RNA, 32 nt, Homo Sapiens
uggcaggauugaucccaccuccaagucuccgg

SEQ ID NO: 130931 - RNA, 32 nt, Homo Sapiens
ugggccucaguuuccccuccccuucaugaaau

SEQ ID NO: 130932 - RNA, 32 nt, Homo Sapiens
acaucgccugcagccgagcgggcccguuccgc

SEQ ID NO: 130933 - RNA, 32 nt, Homo Sapiens
gacgcuggaugcccuccuaccgccagacaccu

SEQ ID NO: 130934 - RNA, 32 nt, Homo Sapiens
ccgggcaccucaggcucuggccuccauccucc

SEQ ID NO: 130935 - RNA, 32 nt, Homo Sapiens
ggcugccaggauccccaccucucugcaauggg

SEQ ID NO: 130936 - RNA, 32 nt, Homo Sapiens
ccucgcaccacgcccccgcgggcccgcacuuu

SEQ ID NO: 130937 - RNA, 32 nt, Homo Sapiens
ucuccaaacugggaaaguuaccauguagagcu

SEQ ID NO: 130938 - RNA, 32 nt, Homo Sapiens
uagucccaagagaauagcguuuuaaaaaagaa

SEQ ID NO: 130939 - RNA, 30 nt, Homo Sapiens
uucgggagcgcgcaggcagucgcgcgcaca

SEQ ID NO: 130940 - RNA, 32 nt, Homo Sapiens
ccccgaggcaucugcagacagaacuggaugga

SEQ ID NO: 130941 - RNA, 32 nt, Homo Sapiens
caagcugagggacuggggaggggaggggaggg

SEQ ID NO: 130942 - RNA, 32 nt, Homo Sapiens
guggagccugacgcacucugagcguuacgccc

SEQ ID NO: 130943 - RNA, 32 nt, Homo Sapiens
caaaggucagggugggcgggggccugggaaua

SEQ ID NO: 130944 - RNA, 32 nt, Homo Sapiens
aauaccucaaaagaaguugucuaaggacuggg

SEQ ID NO: 130945 - RNA, 32 nt, Homo Sapiens
uccucccucccgcucccacccccaccuuguug

SEQ ID NO: 130946 - RNA, 32 nt, Homo Sapiens
auauaucuacuguaacuggugaaacaggaaua

SEQ ID NO: 130947 - RNA, 32 nt, Homo Sapiens
gacaaagaagaaagucaaaauauuuuacccca

SEQ ID NO: 130948 - RNA, 32 nt, Homo Sapiens
aacuugaauauuaagaaugacuaggaauggua

SEQ ID NO: 130949 - RNA, 32 nt, Homo Sapiens
gacgguuggguguccauggugcccugggcugu

SEQ ID NO: 130950 - RNA, 32 nt, Homo Sapiens
gcaguuccucugauauccucacagcaagcaca

SEQ ID NO: 130951 - RNA, 32 nt, Homo Sapiens
uugcaacccccucccagcaguggcugggcacu

SEQ ID NO: 130952 - RNA, 32 nt, Homo Sapiens
cugacucugaugccaguauggacuggagauga

SEQ ID NO: 130953 - RNA, 32 nt, Homo Sapiens
ccacuuaaaccagauguguugcagcuuuccug

SEQ ID NO: 130954 - RNA, 32 nt, Homo Sapiens
ugcagccccuccccaccagcuccauuccuuag

SEQ ID NO: 130955 - RNA, 32 nt, Homo Sapiens
uaaaccuuuccauuuuacguuuuagaaaauuu

SEQ ID NO: 130956 - RNA, 32 nt, Homo Sapiens
aaaauauucuaacauuugauaauuuugaaaug

SEQ ID NO: 130957 - RNA, 32 nt, Homo Sapiens
auccuguaugugguaggaugcugucuguuuga

SEQ ID NO: 130958 - RNA, 32 nt, Homo Sapiens
uaaauuauuauuaaaagcacauuuuauuucca

SEQ ID NO: 130959 - RNA, 32 nt, Homo Sapiens
cucccauaaacaugugagcauguucugagugu

SEQ ID NO: 130960 - RNA, 32 nt, Homo Sapiens
aguuaccaggccggugugggcugugucguagc

SEQ ID NO: 130961 - RNA, 32 nt, Homo Sapiens
uuuauuuuccccaaccucccccaggugcagug

SEQ ID NO: 130962 - RNA, 32 nt, Homo Sapiens
cagggggcccccugggguggccccggcuccac

SEQ ID NO: 130963 - RNA, 32 nt, Homo Sapiens
aaaucuuuuccacagcagaaaggacguaauau

SEQ ID NO: 130964 - RNA, 32 nt, Homo Sapiens
cggagauagcaguguggaaacacgcgaggagu

SEQ ID NO: 130965 - RNA, 32 nt, Homo Sapiens
cuguaccgggggugggguggggagccaggccc

SEQ ID NO: 130966 - RNA, 32 nt, Homo Sapiens
ccagccccacccagagcuggcauaggaaguac

SEQ ID NO: 130967 - RNA, 32 nt, Homo Sapiens
gccccuguuccacagccacuauuugcauugcu

SEQ ID NO: 130968 - RNA, 25 nt, Homo Sapiens
auggcgugcggcuuucgccgcgcua

SEQ ID NO: 130969 - RNA, 32 nt, Homo Sapiens
uguagucccagcuacacgggaggcugaggcag

SEQ ID NO: 130970 - RNA, 32 nt, Homo Sapiens
aaaauguuacguuauuauuauuauuacuacua

SEQ ID NO: 130971 - RNA, 32 nt, Homo Sapiens
ugcacguacacacacacacacacacacacaca

SEQ ID NO: 130972 - RNA, 32 nt, Homo Sapiens
uaauuccuauuucaauauguguuuccuugaag

SEQ ID NO: 130973 - RNA, 32 nt, Homo Sapiens
caguaaauccacagccaacaaacauagaaacg

SEQ ID NO: 130974 - RNA, 32 nt, Homo Sapiens
ggagaaaguuaaaacuagcuuuagaguaagga

SEQ ID NO: 130975 - RNA, 32 nt, Homo Sapiens
uauagaaugaacugccagcagcccaaggaacu

SEQ ID NO: 130976 - RNA, 32 nt, Homo Sapiens
ugaaugaaaaauuugcuuugaccagauacuga

SEQ ID NO: 130977 - RNA, 32 nt, Homo Sapiens
gaagccagcuguuggaggccuacgagugaagu

SEQ ID NO: 130978 - RNA, 32 nt, Homo Sapiens
cuguguuggggucauggaugagcggcucucuu

SEQ ID NO: 130979 - RNA, 32 nt, Homo Sapiens
uggggacuucgggggcggcucugggaagcgga

SEQ ID NO: 130980 - RNA, 32 nt, Homo Sapiens
cgccgccgccucggggaccuuugcggggaggc

SEQ ID NO: 130981 - RNA, 31 nt, Homo Sapiens
uaguuuacaaagaaaugggaaauuguugguu

SEQ ID NO: 130982 - RNA, 32 nt, Homo Sapiens
cagguuuaaaucuggcuuauuaacucaagcca

SEQ ID NO: 130983 - RNA, 32 nt, Homo Sapiens
uaauauagcucuuucuuuuauuaacuguucuc

SEQ ID NO: 130984 - RNA, 32 nt, Homo Sapiens
cgcuuugcugaauaaaagcaaaaaacaaaaca

SEQ ID NO: 130985 - RNA, 32 nt, Homo Sapiens
accacucauucagugugugaccucaggcaggu

SEQ ID NO: 130986 - RNA, 32 nt, Homo Sapiens
gguucugcuuuuaaguuuuucucuuuuucaga

SEQ ID NO: 130987 - RNA, 32 nt, Homo Sapiens
uuuagaguguggaauuauagucuuuccuugcu

SEQ ID NO: 130988 - RNA, 30 nt, Homo Sapiens
ggcuccucggcuggcggcggggacguguuc

SEQ ID NO: 130989 - RNA, 32 nt, Homo Sapiens
auggcugauucugggugguccuggacauggcc

SEQ ID NO: 130990 - RNA, 32 nt, Homo Sapiens
auggaaagggaucaaaacuuuuucaauugcga

SEQ ID NO: 130991 - RNA, 32 nt, Homo Sapiens
acacaaagaacacucuauauaacuguguuaag

SEQ ID NO: 130992 - RNA, 32 nt, Homo Sapiens
auacucaugaaaaauauaaacaacaaaaccuu

SEQ ID NO: 130993 - RNA, 32 nt, Homo Sapiens
uaggcaucuuugcaugaagaaagcagaaguuu

SEQ ID NO: 130994 - RNA, 32 nt, Homo Sapiens
gugccagccagcagguccuaugcccaaacacu

SEQ ID NO: 130995 - RNA, 32 nt, Homo Sapiens
ucugagcccuggcuacuaauaaaauuugagag

SEQ ID NO: 130996 - RNA, 32 nt, Homo Sapiens
cuccagccaguguagggagcucugcggugaug

SEQ ID NO: 130997 - RNA, 32 nt, Homo Sapiens
guugauuccuuccacuucccccaaguaggcag

SEQ ID NO: 130998 - RNA, 32 nt, Homo Sapiens
cagccgcgcggcgggggcucccuccuugcagc

SEQ ID NO: 130999 - RNA, 32 nt, Homo Sapiens
ugagcccagcaguucaagacuagccuggacaa

SEQ ID NO: 131000 - RNA, 32 nt, Homo Sapiens
gauaauugagagaguucucacaagaucugguu

SEQ ID NO: 131001 - RNA, 28 nt, Homo Sapiens
agcugcuguggcuccaggaugauggaga

SEQ ID NO: 131002 - RNA, 32 nt, Homo Sapiens
ucccauggaggcauccaaggcuuucugugcca

SEQ ID NO: 131003 - RNA, 32 nt, Homo Sapiens
ccccagcccucccuccuggcgggucuccucca

SEQ ID NO: 131004 - RNA, 32 nt, Homo Sapiens
aaacugggcucagcaugcuuguccucaaaaug

SEQ ID NO: 131005 - RNA, 32 nt, Homo Sapiens
uacggugaauaauucacgcucacgucguucuu

SEQ ID NO: 131006 - RNA, 32 nt, Homo Sapiens
cagccugcccggcuccucccgccgccggcucc

SEQ ID NO: 131007 - RNA, 32 nt, Homo Sapiens
gaaaacagauuggugauuucucagaaagauaa

SEQ ID NO: 131008 - RNA, 32 nt, Homo Sapiens
caagaauagggagagagaggauggguaccaug

SEQ ID NO: 131009 - RNA, 32 nt, Homo Sapiens
gcugcgcagccuggcgcggcgugcguccguaa

SEQ ID NO: 131010 - RNA, 32 nt, Homo Sapiens
uugcgaaaccaucugacaaacagaaggagaag

SEQ ID NO: 131011 - RNA, 32 nt, Homo Sapiens
cccaagaagauaaaaaauauuguuaagugugc

SEQ ID NO: 131012 - RNA, 32 nt, Homo Sapiens
guccaggagaaucaggcagucuguggccuccu

SEQ ID NO: 131013 - RNA, 32 nt, Homo Sapiens
cccugucuuggcacaacucuggauagauugca

SEQ ID NO: 131014 - RNA, 32 nt, Homo Sapiens
cuauuauuacacaaauuuaaugguuagcaacg

SEQ ID NO: 131015 - RNA, 32 nt, Homo Sapiens
ugugugagugcguguguggauaugagugugug

SEQ ID NO: 131016 - RNA, 32 nt, Homo Sapiens
ccaugccuuucuguauaguacacaugauauuu

SEQ ID NO: 131017 - RNA, 32 nt, Homo Sapiens
cucuaauaaucugaguagaaaugcguaauuuc

SEQ ID NO: 131018 - RNA, 32 nt, Homo Sapiens
caucgcucguguguucuauccaaacauguauu

SEQ ID NO: 131019 - RNA, 32 nt, Homo Sapiens
gaaugcagaagugguccaugaugccagauguu

SEQ ID NO: 131020 - RNA, 32 nt, Homo Sapiens
uuauacauacccacagguguuaaaaaguaauc

SEQ ID NO: 131021 - RNA, 32 nt, Homo Sapiens
gagcuucaaggggcgcucgggcgggucggaag

SEQ ID NO: 131022 - RNA, 32 nt, Homo Sapiens
uugguaccaaaaugauuucuuugguaauugug

SEQ ID NO: 131023 - RNA, 32 nt, Homo Sapiens
aaagggagccccacugcugcuaccuggggaau

SEQ ID NO: 131024 - RNA, 32 nt, Homo Sapiens
ugcaguggcugggaacccaccgggaugcuggc

SEQ ID NO: 131025 - RNA, 32 nt, Homo Sapiens
acuagcuugucaacuuuucccaccacacccca

SEQ ID NO: 131026 - RNA, 32 nt, Homo Sapiens
guugccguccacuguggcggguuucuuccugg

SEQ ID NO: 131027 - RNA, 32 nt, Homo Sapiens
gccucccgcucgccgcugcguugggaccgcgc

SEQ ID NO: 131028 - RNA, 32 nt, Homo Sapiens
ccacuuuuuucuuuuuuuuuuauugugucagg

SEQ ID NO: 131029 - RNA, 30 nt, Homo Sapiens
uuggagggaggugguguguucacgugagcc

SEQ ID NO: 131030 - RNA, 32 nt, Homo Sapiens
cggaccacggcgcggcggccaguuccuuuaua

SEQ ID NO: 131031 - RNA, 32 nt, Homo Sapiens
ucuguggaugucacguauuuugaaaugauaga

SEQ ID NO: 131032 - RNA, 32 nt, Homo Sapiens
guuuugggaaagauuaagucacauguuuauaa

SEQ ID NO: 131033 - RNA, 32 nt, Homo Sapiens
uggcuggcaauggccuugcugaccucgagccg

SEQ ID NO: 131034 - RNA, 32 nt, Homo Sapiens
aauacaauuuauauuucuucuuuuuaaauugu

SEQ ID NO: 131035 - RNA, 31 nt, Homo Sapiens
ucgcgguggguggcuucgacggccugaggcg

SEQ ID NO: 131036 - RNA, 32 nt, Homo Sapiens
aagaguuuggcauugcaggagcucccagagag

SEQ ID NO: 131037 - RNA, 32 nt, Homo Sapiens
uugaauugucuccugacuacuguccaguaagg

SEQ ID NO: 131038 - RNA, 32 nt, Homo Sapiens
cagaccugugucuggaggagggaugugguggg

SEQ ID NO: 131039 - RNA, 32 nt, Homo Sapiens
aguuuguuuuaacuuccaaggugguuuuacuu

SEQ ID NO: 131040 - RNA, 32 nt, Homo Sapiens
guggucgagccgcgcgcagggugcgcucguuu

SEQ ID NO: 131041 - RNA, 32 nt, Homo Sapiens
gcagcgagauaccccaccucccucaaccucau

SEQ ID NO: 131042 - RNA, 32 nt, Homo Sapiens
cuggggaggcggacgaugaggagugauggggc

SEQ ID NO: 131043 - RNA, 32 nt, Homo Sapiens
gaagcuguucgcccggggcgggcccuugcgga

SEQ ID NO: 131044 - RNA, 32 nt, Homo Sapiens
cgaggcaccgacaggaagcuguccccgcuccu

SEQ ID NO: 131045 - RNA, 29 nt, Homo Sapiens
uuuuguuggggacagagcacauuaagucu

SEQ ID NO: 131046 - RNA, 32 nt, Homo Sapiens
aggagguagugacuggcauacauggcucaguu

SEQ ID NO: 131047 - RNA, 32 nt, Homo Sapiens
gcucaggccccggcauugccaucagcagccuc

SEQ ID NO: 131048 - RNA, 32 nt, Homo Sapiens
cuaacauucaccaauauguuuccuacugggag

SEQ ID NO: 131049 - RNA, 32 nt, Homo Sapiens
uugacuauccugccagaggagcuccaagcccg

SEQ ID NO: 131050 - RNA, 32 nt, Homo Sapiens
guuccagccccaccccacccucaaccacuucc

SEQ ID NO: 131051 - RNA, 32 nt, Homo Sapiens
cagagcagagaauggaaaagccagggaggugg

SEQ ID NO: 131052 - RNA, 32 nt, Homo Sapiens
uccagaggcagggcuaugcucacauucauggc

SEQ ID NO: 131053 - RNA, 32 nt, Homo Sapiens
gggacgccgcuuuccgggaucccggccaaacg

SEQ ID NO: 131054 - RNA, 32 nt, Homo Sapiens
ugucccucccggccccggggccaccucacguu

SEQ ID NO: 131055 - RNA, 32 nt, Homo Sapiens
gcacuggcacaccagaagugccaugcucagaa

SEQ ID NO: 131056 - RNA, 32 nt, Homo Sapiens
auugcuccaaaauaaaugaauuuacacaaaaa

SEQ ID NO: 131057 - RNA, 32 nt, Homo Sapiens
cagcccccuugcuucucuccagcccuguccag

SEQ ID NO: 131058 - RNA, 32 nt, Homo Sapiens
cggugcagcggcgaggccggccgcgaagaugc

SEQ ID NO: 131059 - RNA, 32 nt, Homo Sapiens
aggaauuuccccaagagucccuucuucaaugc

SEQ ID NO: 131060 - RNA, 32 nt, Homo Sapiens
cacacauaagauacauacuugugugcagaaag

SEQ ID NO: 131061 - RNA, 32 nt, Homo Sapiens
ugccuggccagggacaugaauuuguacaaaga

SEQ ID NO: 131062 - RNA, 32 nt, Homo Sapiens
guguguggcuccuggaugggcucguggggcgg

SEQ ID NO: 131063 - RNA, 32 nt, Homo Sapiens
cugagcuggggagagguggcagagggcaguau

SEQ ID NO: 131064 - RNA, 32 nt, Homo Sapiens
caauaggggaauaaaauuaccuauuuuuguua

SEQ ID NO: 131065 - RNA, 32 nt, Homo Sapiens
ggauggcagcccggcggcagggcccggcgagg

SEQ ID NO: 131066 - RNA, 32 nt, Homo Sapiens
cuuacauaaacguuaauaaaucuuaggguaca

SEQ ID NO: 131067 - RNA, 32 nt, Homo Sapiens
ugaguaaugaauuagccugaccacaggugguc

SEQ ID NO: 131068 - RNA, 32 nt, Homo Sapiens
auguauuuaaaguuuacuuaaggucaggaaau

SEQ ID NO: 131069 - RNA, 32 nt, Homo Sapiens
aauggcuguugagcaggaguugguaaauaaac

SEQ ID NO: 131070 - RNA, 32 nt, Homo Sapiens
gcugccaaguguuccugagagguguuuaggca

SEQ ID NO: 131071 - RNA, 32 nt, Homo Sapiens
uuaaagaacuucauuaucuuccuuguauuuua

SEQ ID NO: 131072 - RNA, 32 nt, Homo Sapiens
cggagcuuggggugcagauccugaugggugcc

SEQ ID NO: 131073 - RNA, 32 nt, Homo Sapiens
gaacagaguacccucuucaagccccggucaug

SEQ ID NO: 131074 - RNA, 32 nt, Homo Sapiens
ucaagcaagugcuacaaugcaacaguaugcac

SEQ ID NO: 131075 - RNA, 32 nt, Homo Sapiens
gaucacugaggaacaggacaagggcagggaag

SEQ ID NO: 131076 - RNA, 32 nt, Homo Sapiens
cucugaagaugaauuuugauuggacuggguuu

SEQ ID NO: 131077 - RNA, 32 nt, Homo Sapiens
ccgcggugccgggccgggagggaagagggagg

SEQ ID NO: 131078 - RNA, 32 nt, Homo Sapiens
ccaaaccccccucccugcacccagcccucaac

SEQ ID NO: 131079 - RNA, 32 nt, Homo Sapiens
ucuucuggaauugcaucuuaugcgccuuuccc

SEQ ID NO: 131080 - RNA, 32 nt, Homo Sapiens
ggccugcagagccccaggcagucggcucagcg

SEQ ID NO: 131081 - RNA, 32 nt, Homo Sapiens
aaaccguagugggguggaggcugcuggaggug

SEQ ID NO: 131082 - RNA, 32 nt, Homo Sapiens
uaucccugguucacaagaagauuuuagauggu

SEQ ID NO: 131083 - RNA, 32 nt, Homo Sapiens
ucacauuucagagcgaaccagacggggacagu

SEQ ID NO: 131084 - RNA, 32 nt, Homo Sapiens
uucgaugccaggagauucaaaaaggaagcucu

SEQ ID NO: 131085 - RNA, 32 nt, Homo Sapiens
aaugcuuuaaacagcuucauguuuuagaauuu

SEQ ID NO: 131086 - RNA, 32 nt, Homo Sapiens
uguuguaggaugcauaauaaaauacaugaaug

SEQ ID NO: 131087 - RNA, 32 nt, Homo Sapiens
ggaguuuuaagugauacagaucuuuuugccaa

SEQ ID NO: 131088 - RNA, 32 nt, Homo Sapiens
uuuguaaagcuguaaaguuaaaagagaugaaa

SEQ ID NO: 131089 - RNA, 32 nt, Homo Sapiens
gcggaggggagcggagcccggagcgucgugga

SEQ ID NO: 131090 - RNA, 30 nt, Homo Sapiens
ggccgaggcaggccuucggggccccuuucg

SEQ ID NO: 131091 - RNA, 32 nt, Homo Sapiens
aggaaagugucuaugauauauagugaaaagug

SEQ ID NO: 131092 - RNA, 32 nt, Homo Sapiens
aaauauuuuaugcaguacauuauauuauucug

SEQ ID NO: 131093 - RNA, 32 nt, Homo Sapiens
gggaugccccaucccccuccccaucaccuuug

SEQ ID NO: 131094 - RNA, 32 nt, Homo Sapiens
cgcugccgggggacgucgggcugggccuggcc

SEQ ID NO: 131095 - RNA, 32 nt, Homo Sapiens
uccaaugagggggcuccccagggcugacccug

SEQ ID NO: 131096 - RNA, 32 nt, Homo Sapiens
cguuugggucacauuuccucucugggggcgga

SEQ ID NO: 131097 - RNA, 32 nt, Homo Sapiens
cacagugcacuacgcccuccucagcgccuccu

SEQ ID NO: 131098 - RNA, 32 nt, Homo Sapiens
aaucugcugacacaucaaggccacuuuucuua

SEQ ID NO: 131099 - RNA, 32 nt, Homo Sapiens
gccccguucccucccccuucuccugugggaca

SEQ ID NO: 131100 - RNA, 32 nt, Homo Sapiens
cuguggccaccucagauagucaucucagucca

SEQ ID NO: 131101 - RNA, 32 nt, Homo Sapiens
auuccaugaaaaccaccauauaucauaauuca

SEQ ID NO: 131102 - RNA, 32 nt, Homo Sapiens
auuuuccaaggauuauaauaugcugaguaaac

SEQ ID NO: 131103 - RNA, 32 nt, Homo Sapiens
caacuaguccugacugcuuaccucuggaugug

SEQ ID NO: 131104 - RNA, 32 nt, Homo Sapiens
acaggcugcccggccgcugcugcuagccaggc

SEQ ID NO: 131105 - RNA, 32 nt, Homo Sapiens
gagcuccgaggguagcuagguucuagguuuga

SEQ ID NO: 131106 - RNA, 32 nt, Homo Sapiens
cuugaagaaguggcugccccuugcuggaccug

SEQ ID NO: 131107 - RNA, 32 nt, Homo Sapiens
uucagccccagcacauggcuccuccuuaacug

SEQ ID NO: 131108 - RNA, 30 nt, Homo Sapiens
cccuggaagccgcgcucgggucccgccgca

SEQ ID NO: 131109 - RNA, 32 nt, Homo Sapiens
gacaacaggcugguugcuuggcguggaauccu

SEQ ID NO: 131110 - RNA, 32 nt, Homo Sapiens
gcugugcuuuauuugugaaacuuuaaugagga

SEQ ID NO: 131111 - RNA, 32 nt, Homo Sapiens
gcgcggggccgcgccgcgaggccugaucccug

SEQ ID NO: 131112 - RNA, 31 nt, Homo Sapiens
cggggugcaaggugauggcugcaggaaagca

SEQ ID NO: 131113 - RNA, 32 nt, Homo Sapiens
ugagaagauccugucacaauucuuagaucugg

SEQ ID NO: 131114 - RNA, 32 nt, Homo Sapiens
ugucagcaagcacugucgacuucuuccucugg

SEQ ID NO: 131115 - RNA, 32 nt, Homo Sapiens
auggugggugugccgggcuggcugggaacaag

SEQ ID NO: 131116 - RNA, 32 nt, Homo Sapiens
uccaggguuuccagcuccuccuccuucacccc

SEQ ID NO: 131117 - RNA, 32 nt, Homo Sapiens
acagaagaacaggauucuuaaucauucaacuu

SEQ ID NO: 131118 - RNA, 28 nt, Homo Sapiens
ccagggagcugcugcaggaugauuuuga

SEQ ID NO: 131119 - RNA, 32 nt, Homo Sapiens
gcacuacuugguuuuucuuccauuccaaguuu

SEQ ID NO: 131120 - RNA, 32 nt, Homo Sapiens
uuuaucccugucacuaauuuuaccuaauuucu

SEQ ID NO: 131121 - RNA, 32 nt, Homo Sapiens
uccagccuucuuccugccacugccuacaauug

SEQ ID NO: 131122 - RNA, 32 nt, Homo Sapiens
aagucuuuuacuaccucuggguuagccaaaca

SEQ ID NO: 131123 - RNA, 32 nt, Homo Sapiens
guugcagagguucuuuuuaaaaacuuuguuug

SEQ ID NO: 131124 - RNA, 32 nt, Homo Sapiens
ccccaguguacaaaaccaguuuucugcaacau

SEQ ID NO: 131125 - RNA, 32 nt, Homo Sapiens
gugggagugaaacaaaaaugagugguucaugg

SEQ ID NO: 131126 - RNA, 32 nt, Homo Sapiens
ggccuggacuaccuccacggccaccacgugcu

SEQ ID NO: 131127 - RNA, 32 nt, Homo Sapiens
ggacagacugauucugaguccugggugccgua

SEQ ID NO: 131128 - RNA, 32 nt, Homo Sapiens
gagacagcagaggucugaccgccccgcugagg

SEQ ID NO: 131129 - RNA, 32 nt, Homo Sapiens
uuugaccguggcggcagccucgcgccugcccg

SEQ ID NO: 131130 - RNA, 32 nt, Homo Sapiens
uuauuuucaauacauagcaguaucuaaagacg

SEQ ID NO: 131131 - RNA, 32 nt, Homo Sapiens
cgugcgcggcugcgcuuuccuguccccaagcc

SEQ ID NO: 131132 - RNA, 32 nt, Homo Sapiens
gaucuuuguuuauguuuauuagaagaggguaa

SEQ ID NO: 131133 - RNA, 32 nt, Homo Sapiens
uccuggcaaguuugaggcaagcaaggaaggca

SEQ ID NO: 131134 - RNA, 32 nt, Homo Sapiens
gcccgcuggcgccggacacgcugcgccucauc

SEQ ID NO: 131135 - RNA, 32 nt, Homo Sapiens
agcuccacccucaccaggaugaaggcgugcaa

SEQ ID NO: 131136 - RNA, 32 nt, Homo Sapiens
gccccggagauguaacgcccccugcccacccc

SEQ ID NO: 131137 - RNA, 32 nt, Homo Sapiens
uuucaguuuuuuuuuucuuuugaaaugucccu

SEQ ID NO: 131138 - RNA, 32 nt, Homo Sapiens
guuuccuggaauugugugcugcggcugugaug

SEQ ID NO: 131139 - RNA, 32 nt, Homo Sapiens
aggugagacccugugcucccccugcccugggu

SEQ ID NO: 131140 - RNA, 32 nt, Homo Sapiens
gcgcggccgcggugcucuaccggcgugucgcu

SEQ ID NO: 131141 - RNA, 32 nt, Homo Sapiens
cuccuugccacccuuccagccuuccaggcuuu

SEQ ID NO: 131142 - RNA, 32 nt, Homo Sapiens
guuuccuuuucuccucucucugcaucugcgcu

SEQ ID NO: 131143 - RNA, 32 nt, Homo Sapiens
gaaauucaccccacaagaggccuauucucacc

SEQ ID NO: 131144 - RNA, 32 nt, Homo Sapiens
acaguacucccagcaggcccaggccagccagg

SEQ ID NO: 131145 - RNA, 32 nt, Homo Sapiens
uuagucuauacccaccaccucccuucauaacc

SEQ ID NO: 131146 - RNA, 32 nt, Homo Sapiens
uuguuucuaacaaaccuugaucuguauauacu

SEQ ID NO: 131147 - RNA, 32 nt, Homo Sapiens
cggacgcuugcuagccaccccggagcacugcu

SEQ ID NO: 131148 - RNA, 32 nt, Homo Sapiens
caucuacccaucuauuuggaaagcacuggaau

SEQ ID NO: 131149 - RNA, 32 nt, Homo Sapiens
cacacauagugcuguuuauauaguuuaggggu

SEQ ID NO: 131150 - RNA, 31 nt, Homo Sapiens
auguccaucaaugauagacuggauuaagaaa

SEQ ID NO: 131151 - RNA, 32 nt, Homo Sapiens
aaauguuaaguaccaugaaugaugcuguuagg

SEQ ID NO: 131152 - RNA, 32 nt, Homo Sapiens
cccucagccaucucagggugaggagcugccag

SEQ ID NO: 131153 - RNA, 32 nt, Homo Sapiens
cguugauguuuccuugauuauuuugaaugagg

SEQ ID NO: 131154 - RNA, 32 nt, Homo Sapiens
aguucuucccaaugaucugaggucauggaacu

SEQ ID NO: 131155 - RNA, 32 nt, Homo Sapiens
gcgaacagguggggcgggcgaggggcccaagg

SEQ ID NO: 131156 - RNA, 32 nt, Homo Sapiens
ccuaugaagcucugagaauuuuuuguacgauc

SEQ ID NO: 131157 - RNA, 32 nt, Homo Sapiens
uuaauuuccgguaaacaaaacccacgcgaaug

SEQ ID NO: 131158 - RNA, 32 nt, Homo Sapiens
cgccggcccgcggcugcccagcagcaugaggu

SEQ ID NO: 131159 - RNA, 32 nt, Homo Sapiens
uguguaaacaauuuuauauaaucaaucauuuc

SEQ ID NO: 131160 - RNA, 32 nt, Homo Sapiens
uuaaagcuuuuguaguauguuuuuaugaguua

SEQ ID NO: 131161 - RNA, 32 nt, Homo Sapiens
cauugucaaauuaagauauguauuuguaaguu

SEQ ID NO: 131162 - RNA, 32 nt, Homo Sapiens
ggguugcacuucagcuucaucuccuuggcagg

SEQ ID NO: 131163 - RNA, 31 nt, Homo Sapiens
uugcuugaauuuaauuaauagauaagucaua

SEQ ID NO: 131164 - RNA, 27 nt, Homo Sapiens
gcaugagccaagggguccgccgggcag

SEQ ID NO: 131165 - RNA, 32 nt, Homo Sapiens
uagagguugggguuuaugaaccccaacucugg

SEQ ID NO: 131166 - RNA, 32 nt, Homo Sapiens
acgcgcggcccgggcguccggagcuguagcag

SEQ ID NO: 131167 - RNA, 32 nt, Homo Sapiens
ccaccucagccuccccgagugcugggauuaaa

SEQ ID NO: 131168 - RNA, 32 nt, Homo Sapiens
cgcuuuuauuuuaguuuuuagagagacgaggu

SEQ ID NO: 131169 - RNA, 32 nt, Homo Sapiens
gcucuucuuccuuucuuccccccguguaugua

SEQ ID NO: 131170 - RNA, 32 nt, Homo Sapiens
gcccacccaguccucugcccaagcccuuccuc

SEQ ID NO: 131171 - RNA, 32 nt, Homo Sapiens
cgagacgauuggugggggcgcggcggcggcgg

SEQ ID NO: 131172 - RNA, 32 nt, Homo Sapiens
gccccagacgagccaaagcccaccuucuccuc

SEQ ID NO: 131173 - RNA, 32 nt, Homo Sapiens
aucuggcauaaaauaaauuugaaauaaaauau

SEQ ID NO: 131174 - RNA, 32 nt, Homo Sapiens
agaugaggaaacugaggccucaagcguggagg

SEQ ID NO: 131175 - RNA, 32 nt, Homo Sapiens
cggccucacgcaaugcgacacuuccgccugca

SEQ ID NO: 131176 - RNA, 32 nt, Homo Sapiens
ggcugcucucugaggagcugccccaccagcca

SEQ ID NO: 131177 - RNA, 32 nt, Homo Sapiens
cugauuuuguugaagaaaauauuugcaauaaa

SEQ ID NO: 131178 - RNA, 32 nt, Homo Sapiens
agaucucaguguggcucucucuggagacaaaa

SEQ ID NO: 131179 - RNA, 32 nt, Homo Sapiens
ccaggacgccuggcuccggaccccgcuggccc

SEQ ID NO: 131180 - RNA, 32 nt, Homo Sapiens
gaauaauccuacuucauguuuuguuucggcac

SEQ ID NO: 131181 - RNA, 32 nt, Homo Sapiens
agagucccaagagcuucucugggauuuucuug

SEQ ID NO: 131182 - RNA, 32 nt, Homo Sapiens
caccaauggauggauuucaacuuuacuuacug

SEQ ID NO: 131183 - RNA, 32 nt, Homo Sapiens
ggaucgguguccucgggaugagauuuggcguu

SEQ ID NO: 131184 - RNA, 32 nt, Homo Sapiens
ucagagucgucgaaaacguugcguguuauaga

SEQ ID NO: 131185 - RNA, 32 nt, Homo Sapiens
cgcaggacugcacaacucugccaggggugagg

SEQ ID NO: 131186 - RNA, 31 nt, Homo Sapiens
cccgcagucccggggcucccaagggccugug

SEQ ID NO: 131187 - RNA, 32 nt, Homo Sapiens
uuuuuagcucguaugacuuguuuucauucauu

SEQ ID NO: 131188 - RNA, 32 nt, Homo Sapiens
cucguuugcccagggagggcuuggcuccacca

SEQ ID NO: 131189 - RNA, 32 nt, Homo Sapiens
aaaaaggaaaucaacuuacacuuccuggcucu

SEQ ID NO: 131190 - RNA, 32 nt, Homo Sapiens
ggcuguggggucucuagccugauauuccauug

SEQ ID NO: 131191 - RNA, 32 nt, Homo Sapiens
guucauuuuuaaaauuccuucacacuguaauu

SEQ ID NO: 131192 - RNA, 32 nt, Homo Sapiens
augacuuaacauggacucuuauaggguauuaa

SEQ ID NO: 131193 - RNA, 32 nt, Homo Sapiens
auuguugguaagucagugcaguugcauaagca

SEQ ID NO: 131194 - RNA, 32 nt, Homo Sapiens
auaugugcagcuguguuuaccuaacccagccc

SEQ ID NO: 131195 - RNA, 32 nt, Homo Sapiens
cacagucaccgccgcuuaccugcgccuccucg

SEQ ID NO: 131196 - RNA, 32 nt, Homo Sapiens
cguaauucuuuuggccaacagcagcuauuuug

SEQ ID NO: 131197 - RNA, 32 nt, Homo Sapiens
ucgcugcgcuggcagcgauucgcugucucuug

SEQ ID NO: 131198 - RNA, 32 nt, Homo Sapiens
aagucaccagccacaaaccaaucuuugaguuu

SEQ ID NO: 131199 - RNA, 32 nt, Homo Sapiens
uugaccaaaagacaguacaaaaacacuggcac

SEQ ID NO: 131200 - RNA, 32 nt, Homo Sapiens
uauugaucauguauugauuaaucuuuauuuuu

SEQ ID NO: 131201 - RNA, 32 nt, Homo Sapiens
gucagcauuaaucuuucuuuuaaaacuuguuu

SEQ ID NO: 131202 - RNA, 32 nt, Homo Sapiens
acauuaaaacagagaccuuaguccgguguggu

SEQ ID NO: 131203 - RNA, 32 nt, Homo Sapiens
ggacccaggccaggcccggcccggcgaguggu

SEQ ID NO: 131204 - RNA, 32 nt, Homo Sapiens
gugggcacguucucucgggguggcucacagcu

SEQ ID NO: 131205 - RNA, 32 nt, Homo Sapiens
aaagguguugucacuguauaaaacagaaagca

SEQ ID NO: 131206 - RNA, 32 nt, Homo Sapiens
agccucggcugccagggcucccuuuugacuua

SEQ ID NO: 131207 - RNA, 32 nt, Homo Sapiens
ugccucugaggguggagaaggaggcgggugau

SEQ ID NO: 131208 - RNA, 32 nt, Homo Sapiens
uguugcuucugcccuccccuguggaaaggucu

SEQ ID NO: 131209 - RNA, 32 nt, Homo Sapiens
auuucagaauaaaauguacuguauacuuuucc

SEQ ID NO: 131210 - RNA, 32 nt, Homo Sapiens
ucugcuuuguauugaauuuauuacuguacauu

SEQ ID NO: 131211 - RNA, 32 nt, Homo Sapiens
agggaggccugcuuuucacaccucaguuuauu

SEQ ID NO: 131212 - RNA, 32 nt, Homo Sapiens
uagaccauuucccauccguuuuguauuuucuc

SEQ ID NO: 131213 - RNA, 32 nt, Homo Sapiens
ucugcagaacuaauggcugugacuucagagaa

SEQ ID NO: 131214 - RNA, 32 nt, Homo Sapiens
agugaaucaaugccauuuguaacucaacuggu

SEQ ID NO: 131215 - RNA, 32 nt, Homo Sapiens
auucucuuuguaaguuggugacuugcaucugu

SEQ ID NO: 131216 - RNA, 32 nt, Homo Sapiens
ugaggcccaccugccauccccccgcacgggag

SEQ ID NO: 131217 - RNA, 32 nt, Homo Sapiens
cagcuccucaugccauuuccuguccagauugc

SEQ ID NO: 131218 - RNA, 32 nt, Homo Sapiens
cuccgcgagcagggcucuggcgcccgccccug

SEQ ID NO: 131219 - RNA, 32 nt, Homo Sapiens
gaggagcuccgagccgcccacccaagguggcu

SEQ ID NO: 131220 - RNA, 32 nt, Homo Sapiens
ggcucccaggacaggugaacagggagggaccu

SEQ ID NO: 131221 - RNA, 32 nt, Homo Sapiens
uaacaagaugacuacuagaaaacuaaaagccu

SEQ ID NO: 131222 - RNA, 32 nt, Homo Sapiens
ggcacucggaggugccgguguggauggguggg

SEQ ID NO: 131223 - RNA, 32 nt, Homo Sapiens
cuacuuauccgccuucacuagcaaggacgagg

SEQ ID NO: 131224 - RNA, 32 nt, Homo Sapiens
uuggaccggcucccaaccaaaaccacaccaua

SEQ ID NO: 131225 - RNA, 32 nt, Homo Sapiens
gauuccucagaaugagagacagggguuuuaug

SEQ ID NO: 131226 - RNA, 32 nt, Homo Sapiens
ucucucaggaggagugggagugccugcagccu

SEQ ID NO: 131227 - RNA, 32 nt, Homo Sapiens
uucugcacuuaaaggcuucuccuccuggaggg

SEQ ID NO: 131228 - RNA, 32 nt, Homo Sapiens
aggaugaagagcuucccugcuuccaacacuug

SEQ ID NO: 131229 - RNA, 32 nt, Homo Sapiens
auuaucuuuacuaugugcuaggauaucauauu

SEQ ID NO: 131230 - RNA, 32 nt, Homo Sapiens
uugccucaugguggccuuccccggccauguuc

SEQ ID NO: 131231 - RNA, 32 nt, Homo Sapiens
caucugggaauagcagcgguaucccuccaccc

SEQ ID NO: 131232 - RNA, 32 nt, Homo Sapiens
guaaucaaaaacagugauaaaaagaagaccag

SEQ ID NO: 131233 - RNA, 32 nt, Homo Sapiens
guuuucuguaaauucauauuuagccauaguau

SEQ ID NO: 131234 - RNA, 32 nt, Homo Sapiens
ccaggaaagagauuauuuauuuaugacuuagg

SEQ ID NO: 131235 - RNA, 32 nt, Homo Sapiens
ggaccccuccgcgagccugcccggccccaagc

SEQ ID NO: 131236 - RNA, 32 nt, Homo Sapiens
uuauaccacccauuuuauuuauuggcuuugcu

SEQ ID NO: 131237 - RNA, 32 nt, Homo Sapiens
uccucaccguuugaccuugggcaaauuacuua

SEQ ID NO: 131238 - RNA, 32 nt, Homo Sapiens
aaggccgcuuugcaggggauugggaguggaug

SEQ ID NO: 131239 - RNA, 28 nt, Homo Sapiens
ucgacagcaacggaauucgagcuccguc

SEQ ID NO: 131240 - RNA, 32 nt, Homo Sapiens
uuucccuuucccugggguccaaaccacaugug

SEQ ID NO: 131241 - RNA, 32 nt, Homo Sapiens
ccuggccugggaagagcacagcugcagauccc

SEQ ID NO: 131242 - RNA, 32 nt, Homo Sapiens
cccucugccccucuccacucuuggcauggaua

SEQ ID NO: 131243 - RNA, 32 nt, Homo Sapiens
auuucuaauuuucggcugcuaugaauaaagcu

SEQ ID NO: 131244 - RNA, 32 nt, Homo Sapiens
guuaauaaaaauuugagcuuaaaaaaaaaaaa

SEQ ID NO: 131245 - RNA, 32 nt, Homo Sapiens
acugugagucauggucagccugucugacaucc

SEQ ID NO: 131246 - RNA, 32 nt, Homo Sapiens
gacucagugagagacuccaggagauguuagaa

SEQ ID NO: 131247 - RNA, 32 nt, Homo Sapiens
ucgccugcccuccaagccccagcugccuuccu

SEQ ID NO: 131248 - RNA, 30 nt, Homo Sapiens
aggcugcugcccgugccuugggugcuggag

SEQ ID NO: 131249 - RNA, 30 nt, Homo Sapiens
auaucuuguuuaauggggcagauaugcauu

SEQ ID NO: 131250 - RNA, 32 nt, Homo Sapiens
uagugccacgccaagaucauuuagacgaugcu

SEQ ID NO: 131251 - RNA, 32 nt, Homo Sapiens
uaauccaauaaagacuccaugagacaggcaaa

SEQ ID NO: 131252 - RNA, 32 nt, Homo Sapiens
ugugggaaauaccaccaaggagccucaucgug

SEQ ID NO: 131253 - RNA, 32 nt, Homo Sapiens
agcggcggcuccagcuccugcggcuccuccuc

SEQ ID NO: 131254 - RNA, 32 nt, Homo Sapiens
aggagagagucuuugucaucuuuuaagaggcg

SEQ ID NO: 131255 - RNA, 32 nt, Homo Sapiens
ggcuggggcccccgaggcgcuuccgccccgua

SEQ ID NO: 131256 - RNA, 32 nt, Homo Sapiens
gacucccguaguccccaccucucucagcuucc

SEQ ID NO: 131257 - RNA, 32 nt, Homo Sapiens
uaauuguguuuguuuuaaggaaugaaacuugg

SEQ ID NO: 131258 - RNA, 32 nt, Homo Sapiens
aauccugaagugguugucagugcuugugggau

SEQ ID NO: 131259 - RNA, 32 nt, Homo Sapiens
acaguagaugaaggaaaugauacugaaugagu

SEQ ID NO: 131260 - RNA, 32 nt, Homo Sapiens
cguucuggcccggcucacuucuggagcuguga

SEQ ID NO: 131261 - RNA, 32 nt, Homo Sapiens
gccuugcgccgcgggagcggacggcggcggag

SEQ ID NO: 131262 - RNA, 32 nt, Homo Sapiens
cagggcccaggcuccuucucaggucucagucu

SEQ ID NO: 131263 - RNA, 32 nt, Homo Sapiens
agucuggcgaacuucagcaguucucguuccag

SEQ ID NO: 131264 - RNA, 32 nt, Homo Sapiens
ggaagcuuagcggucaccauggagcugcuggg

SEQ ID NO: 131265 - RNA, 32 nt, Homo Sapiens
gcucgccugcccccacgccgcccgccacccag

SEQ ID NO: 131266 - RNA, 32 nt, Homo Sapiens
uauagaaauauuaauacacuuggcugggcaug

SEQ ID NO: 131267 - RNA, 32 nt, Homo Sapiens
cccggccgacccuccccuccccaccuccccca

SEQ ID NO: 131268 - RNA, 32 nt, Homo Sapiens
ggagggcucuugaaccacuucuggcugcacca

SEQ ID NO: 131269 - RNA, 30 nt, Homo Sapiens
cugccccuggacuguguccagcugguuugg

SEQ ID NO: 131270 - RNA, 32 nt, Homo Sapiens
aaccugugccagcagcagcugcccgccacagg

SEQ ID NO: 131271 - RNA, 32 nt, Homo Sapiens
augccugucaauccccaccccaccacaaggca

SEQ ID NO: 131272 - RNA, 32 nt, Homo Sapiens
aaggaguacuauuguuugguuggguuuuuguu

SEQ ID NO: 131273 - RNA, 32 nt, Homo Sapiens
auaccacacacaguucuggccugcagugaauu

SEQ ID NO: 131274 - RNA, 32 nt, Homo Sapiens
guccggguuucccagacaggaccgucccagga

SEQ ID NO: 131275 - RNA, 32 nt, Homo Sapiens
gcugcacccuuucuuuggacagauggcaggag

SEQ ID NO: 131276 - RNA, 32 nt, Homo Sapiens
gccuuaacauuucaaaggcuuauaguaaaaua

SEQ ID NO: 131277 - RNA, 32 nt, Homo Sapiens
gggggucagguggacgcugccuccggggcugg

SEQ ID NO: 131278 - RNA, 32 nt, Homo Sapiens
guccccucuuuuuuggccccaguauucauggc

SEQ ID NO: 131279 - RNA, 32 nt, Homo Sapiens
gaaauuccauauaaguuuuuaucugcaaguua

SEQ ID NO: 131280 - RNA, 32 nt, Homo Sapiens
uuauaggaauagauccacaguuccucuccaga

SEQ ID NO: 131281 - RNA, 32 nt, Homo Sapiens
gcggaggagacgguuucaggccuccggugcgg

SEQ ID NO: 131282 - RNA, 32 nt, Homo Sapiens
gccuccuccucgcgcggccccagcggcugccc

SEQ ID NO: 131283 - RNA, 31 nt, Homo Sapiens
ccuuugguuaauaaauaaaugaguuucugcu

SEQ ID NO: 131284 - RNA, 32 nt, Homo Sapiens
caugcuccuuacccugccccagcuggggaaau

SEQ ID NO: 131285 - RNA, 32 nt, Homo Sapiens
uuuuaugcagauguauuuauaaagauauaagu

SEQ ID NO: 131286 - RNA, 32 nt, Homo Sapiens
agauguaggccuggcccacgccgccgcccccg

SEQ ID NO: 131287 - RNA, 32 nt, Homo Sapiens
gaggucacuucccuagccucagaugggugagu

SEQ ID NO: 131288 - RNA, 32 nt, Homo Sapiens
ccccggcggcgccacgcuuggcuggucagcgc

SEQ ID NO: 131289 - RNA, 32 nt, Homo Sapiens
agugcaggcuccagcccuccacccccacccga

SEQ ID NO: 131290 - RNA, 30 nt, Homo Sapiens
uuuggggguuuuguuuugcaaaauaaaaua

SEQ ID NO: 131291 - RNA, 32 nt, Homo Sapiens
aauucagauaaaaugugccuauguucugcugu

SEQ ID NO: 131292 - RNA, 32 nt, Homo Sapiens
gcgccagggagaaggaggagcggacgcaucgu

SEQ ID NO: 131293 - RNA, 32 nt, Homo Sapiens
agaugcaggaggacccggagaaggccccgaca

SEQ ID NO: 131294 - RNA, 32 nt, Homo Sapiens
ccgcgccaccagcuaagccgggacucccuccu

SEQ ID NO: 131295 - RNA, 32 nt, Homo Sapiens
aaaccggccucgcaggauccgcgcuuaaaauc

SEQ ID NO: 131296 - RNA, 32 nt, Homo Sapiens
ggaagagaagacuggcagaauauuuuuuaagu

SEQ ID NO: 131297 - RNA, 32 nt, Homo Sapiens
uaaaaacuccugggcuuaaggccuaaggaagc

SEQ ID NO: 131298 - RNA, 32 nt, Homo Sapiens
aaaaacuucuuaaagcacucuguaauauaaug

SEQ ID NO: 131299 - RNA, 32 nt, Homo Sapiens
ucauggaggaagaugcucagcugggggagugg

SEQ ID NO: 131300 - RNA, 32 nt, Homo Sapiens
cuggauauuucuguauuccuguaaguauucug

SEQ ID NO: 131301 - RNA, 32 nt, Homo Sapiens
guagagggcaagaggagagagcgccuccaguc

SEQ ID NO: 131302 - RNA, 32 nt, Homo Sapiens
agcauaauauaaaauuaguuagauuuugcaag

SEQ ID NO: 131303 - RNA, 32 nt, Homo Sapiens
gaguguugcucuugcugcccaggcuagagugc

SEQ ID NO: 131304 - RNA, 32 nt, Homo Sapiens
aacucucuucaaugaaugguguuggggaaagu

SEQ ID NO: 131305 - RNA, 32 nt, Homo Sapiens
uucaguccucgcguccggccgccccgcgcuca

SEQ ID NO: 131306 - RNA, 32 nt, Homo Sapiens
gaguuucgcucuuguugcccaggcuagagugc

SEQ ID NO: 131307 - RNA, 32 nt, Homo Sapiens
cccggcgcgagaccgaagcuggcggcuggucg

SEQ ID NO: 131308 - RNA, 32 nt, Homo Sapiens
agggauagcauuaacaucucccaagacaagug

SEQ ID NO: 131309 - RNA, 32 nt, Homo Sapiens
gccccccaggacugggcaguugcaggaggccc

SEQ ID NO: 131310 - RNA, 32 nt, Homo Sapiens
agcggacccgcggacgguggcguuaagggaac

SEQ ID NO: 131311 - RNA, 32 nt, Homo Sapiens
ucagagagauagggucucucuauguugcccua

SEQ ID NO: 131312 - RNA, 32 nt, Homo Sapiens
ugcaccuggagcuucgggggccacagcugugg

SEQ ID NO: 131313 - RNA, 32 nt, Homo Sapiens
caugggaaggcaucgucugcaagccaggaagc

SEQ ID NO: 131314 - RNA, 32 nt, Homo Sapiens
caggaggcagggaugcugggggucgugguuca

SEQ ID NO: 131315 - RNA, 32 nt, Homo Sapiens
aagacggcauuuggcucaugagcaagguggca

SEQ ID NO: 131316 - RNA, 32 nt, Homo Sapiens
augaggugggucuggaucuuuucucagagcgu

SEQ ID NO: 131317 - RNA, 32 nt, Homo Sapiens
acagucagacucagccaaagcaaauucagcuu

SEQ ID NO: 131318 - RNA, 32 nt, Homo Sapiens
agacacaaaaauaaaugaagaagcuggacaug

SEQ ID NO: 131319 - RNA, 32 nt, Homo Sapiens
caggaccucacagaaacaagggcuggguugag

SEQ ID NO: 131320 - RNA, 32 nt, Homo Sapiens
cucacagccuucuugagauacaagguuggcau

SEQ ID NO: 131321 - RNA, 32 nt, Homo Sapiens
uuccaaucuuuucuguaccuccacucagcaca

SEQ ID NO: 131322 - RNA, 32 nt, Homo Sapiens
gcgccccgccggggcagcgguggugagagccc

SEQ ID NO: 131323 - RNA, 32 nt, Homo Sapiens
cuccaagccauaucacacggcgucccucgaug

SEQ ID NO: 131324 - RNA, 32 nt, Homo Sapiens
acucuuuaaggauuauuuuauuaguguuguuu

SEQ ID NO: 131325 - RNA, 32 nt, Homo Sapiens
augauaggccccaaagcacuccacagguccag

SEQ ID NO: 131326 - RNA, 32 nt, Homo Sapiens
cuagggcucacuuuuccuccuuaccucuugac

SEQ ID NO: 131327 - RNA, 32 nt, Homo Sapiens
cagcaaaaguggucggcugcagugccaggacc

SEQ ID NO: 131328 - RNA, 32 nt, Homo Sapiens
uugcugaaggauuuuugacugucaggggaaga

SEQ ID NO: 131329 - RNA, 32 nt, Homo Sapiens
aaggagauggcuuauucaaccauagccccucc

SEQ ID NO: 131330 - RNA, 32 nt, Homo Sapiens
gcagcgagucagagggggcaucugaacgcaga

SEQ ID NO: 131331 - RNA, 32 nt, Homo Sapiens
aaugaauuauuccuuucagucuuuauuuuuca

SEQ ID NO: 131332 - RNA, 32 nt, Homo Sapiens
acgaggggcagacagaggcgccagugcccuca

SEQ ID NO: 131333 - RNA, 32 nt, Homo Sapiens
gaugaauuuccacuuccaaagucuuucauagg

SEQ ID NO: 131334 - RNA, 32 nt, Homo Sapiens
uuuaaaacauuuuuaaugaacuaaguugaaua

SEQ ID NO: 131335 - RNA, 32 nt, Homo Sapiens
ucaccauggugggauucuuucagaaugagacu

SEQ ID NO: 131336 - RNA, 32 nt, Homo Sapiens
cuccgcgccgcuguuggugcugccgcugccuc

SEQ ID NO: 131337 - RNA, 29 nt, Homo Sapiens
ucuggucacuaugagugaaacaucuuuca

SEQ ID NO: 131338 - RNA, 32 nt, Homo Sapiens
acugcccaccgccucuucuccaucugagaauc

SEQ ID NO: 131339 - RNA, 32 nt, Homo Sapiens
gcaggcaccuuuaucuucauuauuuucauacc

SEQ ID NO: 131340 - RNA, 32 nt, Homo Sapiens
cgcaacccaagcagaugacaggcacaggccac

SEQ ID NO: 131341 - RNA, 32 nt, Homo Sapiens
caggugaggucuuagcagaugaaagcggcugg

SEQ ID NO: 131342 - RNA, 30 nt, Homo Sapiens
cuacagagaagaaugucagaugcagcagaa

SEQ ID NO: 131343 - RNA, 32 nt, Homo Sapiens
ccggcagccguccgcgcgcccgggcgcagguu

SEQ ID NO: 131344 - RNA, 32 nt, Homo Sapiens
ugaguuggugaacacgguccucguucaccccg

SEQ ID NO: 131345 - RNA, 32 nt, Homo Sapiens
guuuaaaagagacaacgcuuuguuacaagguu

SEQ ID NO: 131346 - RNA, 32 nt, Homo Sapiens
aguaggagggagaggaaggggugccaccguca

SEQ ID NO: 131347 - RNA, 32 nt, Homo Sapiens
uuaugugacucuuuuuacauuuccuaaagguu

SEQ ID NO: 131348 - RNA, 32 nt, Homo Sapiens
gcagcauacuuauuuuuuguuuauuuauugug

SEQ ID NO: 131349 - RNA, 32 nt, Homo Sapiens
uuagucccgucuuccucaccgccccagcaggg

SEQ ID NO: 131350 - RNA, 32 nt, Homo Sapiens
uucuauuuaaacauuuggauuaagcauauuac

SEQ ID NO: 131351 - RNA, 32 nt, Homo Sapiens
uucccugcacuggccacagccauguugugauu

SEQ ID NO: 131352 - RNA, 32 nt, Homo Sapiens
ccgcuggaggacgcagcguccagggccagcga

SEQ ID NO: 131353 - RNA, 32 nt, Homo Sapiens
aaauuuuccaguucuuuuuucagcuucuuuau

SEQ ID NO: 131354 - RNA, 32 nt, Homo Sapiens
ggcccccacgcccgcucuggccucucagguca

SEQ ID NO: 131355 - RNA, 32 nt, Homo Sapiens
gugauggcuuucaggacuuguuuuuuauccug

SEQ ID NO: 131356 - RNA, 32 nt, Homo Sapiens
uugcaaauauaaaauagcuguaguuuuaaucu

SEQ ID NO: 131357 - RNA, 32 nt, Homo Sapiens
gcgauccuuccauguguagagugcuuagaaac

SEQ ID NO: 131358 - RNA, 32 nt, Homo Sapiens
ccgugcccgcggugucccgggaggaaggggcg

SEQ ID NO: 131359 - RNA, 32 nt, Homo Sapiens
cauuauaggaucuuguaauagaaacaucaguc

SEQ ID NO: 131360 - RNA, 32 nt, Homo Sapiens
cagcuucucugaugcuugaacucucaccuuug

SEQ ID NO: 131361 - RNA, 32 nt, Homo Sapiens
uauuguuguuuuuucuuaaugugucaaaauug

SEQ ID NO: 131362 - RNA, 32 nt, Homo Sapiens
uguuuuguuuuaaucccaaaugucugaauguu

SEQ ID NO: 131363 - RNA, 32 nt, Homo Sapiens
guuagccaggauggucucgaucuccuaaccug

SEQ ID NO: 131364 - RNA, 32 nt, Homo Sapiens
gagcugccgcccgcgcucucgcaccuuccaca

SEQ ID NO: 131365 - RNA, 32 nt, Homo Sapiens
acuggauggaacccauuuuauaaacagucuua

SEQ ID NO: 131366 - RNA, 32 nt, Homo Sapiens
gacugcuuggggugggggacgaucaggaggaa

SEQ ID NO: 131367 - RNA, 32 nt, Homo Sapiens
uuaagguugcuuaagaucaaacugcuaagaag

SEQ ID NO: 131368 - RNA, 32 nt, Homo Sapiens
gacuggaacuagacauaaugaaacaucagagc

SEQ ID NO: 131369 - RNA, 32 nt, Homo Sapiens
ccaggcucucugucagcauuacaggaucccca

SEQ ID NO: 131370 - RNA, 32 nt, Homo Sapiens
ugguuccuagcaccccuuauccccucagaauc

SEQ ID NO: 131371 - RNA, 32 nt, Homo Sapiens
uagacccuauauuccuucucauagcuuuaacc

SEQ ID NO: 131372 - RNA, 31 nt, Homo Sapiens
ugagacuccaugagaaagucccuuucugagg

SEQ ID NO: 131373 - RNA, 32 nt, Homo Sapiens
ccuuuuaaugaaaucguacugaaaucuguauc

SEQ ID NO: 131374 - RNA, 32 nt, Homo Sapiens
uucuuuuguaaguugcccagucucagguaugu

SEQ ID NO: 131375 - RNA, 32 nt, Homo Sapiens
aggauggccgccccgcugcccccagcgcuccc

SEQ ID NO: 131376 - RNA, 32 nt, Homo Sapiens
aaucgaacguugagcagggcgguggguggugu

SEQ ID NO: 131377 - RNA, 31 nt, Homo Sapiens
acgacagcgccggucguguuuacggcggcgc

SEQ ID NO: 131378 - RNA, 32 nt, Homo Sapiens
ggcuugaguuaugaaauacuuuuacauuuaag

SEQ ID NO: 131379 - RNA, 32 nt, Homo Sapiens
ggggaaaaaaugcaucuagaaaaacauaguuu

SEQ ID NO: 131380 - RNA, 32 nt, Homo Sapiens
caagaggagaggcuacuggagcugcaggagag

SEQ ID NO: 131381 - RNA, 32 nt, Homo Sapiens
auugggaaugacuuaaugucaauuuguuuguu

SEQ ID NO: 131382 - RNA, 32 nt, Homo Sapiens
ggugacaucaaccagcaggaugagcgcuggca

SEQ ID NO: 131383 - RNA, 32 nt, Homo Sapiens
cgacgcaccgaggagcucucuguccgcggucc

SEQ ID NO: 131384 - RNA, 32 nt, Homo Sapiens
auuggggcuccaauugauaaggggacauggcc

SEQ ID NO: 131385 - RNA, 32 nt, Homo Sapiens
agaaauuaaugauccuaaggaaauaugugugg

SEQ ID NO: 131386 - RNA, 32 nt, Homo Sapiens
cgccgccuccccgccucaggcuccuccuccuc

SEQ ID NO: 131387 - RNA, 32 nt, Homo Sapiens
aacauaggaggugugugcagacuuuauuaaug

SEQ ID NO: 131388 - RNA, 30 nt, Homo Sapiens
gacccugagccgccgccgccggccauggag

SEQ ID NO: 131389 - RNA, 32 nt, Homo Sapiens
gcuuuugugccucccccacuuuccaucaccuc

SEQ ID NO: 131390 - RNA, 32 nt, Homo Sapiens
cagcaaccuguacggccuggacaggauggugg

SEQ ID NO: 131391 - RNA, 32 nt, Homo Sapiens
cuucuucacaggggcugcuggcgagcucuuuc

SEQ ID NO: 131392 - RNA, 32 nt, Homo Sapiens
augugagaagaagcaaucagaagauuggcagg

SEQ ID NO: 131393 - RNA, 32 nt, Homo Sapiens
ugccuguaaucccagcacuuugguaggcugag

SEQ ID NO: 131394 - RNA, 32 nt, Homo Sapiens
ccagagauggcaggugugugggacagacugga

SEQ ID NO: 131395 - RNA, 32 nt, Homo Sapiens
aaggucaaaaauuuacaucagguaucugaaug

SEQ ID NO: 131396 - RNA, 31 nt, Homo Sapiens
aaaagaaaaaagaaaaaacauauuguccugg

SEQ ID NO: 131397 - RNA, 32 nt, Homo Sapiens
cacgcgcggcccgggcguccggagcuguagca

SEQ ID NO: 131398 - RNA, 32 nt, Homo Sapiens
ggaauaacugguuuuccuuuugaaucuuaaga

SEQ ID NO: 131399 - RNA, 32 nt, Homo Sapiens
cugccagccaaggggauuuauucuaagagaag

SEQ ID NO: 131400 - RNA, 32 nt, Homo Sapiens
gcugaacccggccgugggaucccggauaggag

SEQ ID NO: 131401 - RNA, 32 nt, Homo Sapiens
cuaggggagauaaguaggagcaggauuucaag

SEQ ID NO: 131402 - RNA, 32 nt, Homo Sapiens
accuggagaagcugguaggguaagggagaggg

SEQ ID NO: 131403 - RNA, 32 nt, Homo Sapiens
uguccgcgccggcucccaccccggcccgaccc

SEQ ID NO: 131404 - RNA, 32 nt, Homo Sapiens
uugacaugaccaaaaauauccaaauauuuaag

SEQ ID NO: 131405 - RNA, 32 nt, Homo Sapiens
ucacugcgucuggacaagccucauggggacug

SEQ ID NO: 131406 - RNA, 31 nt, Homo Sapiens
guguggccccacugccucaccuccccuguau

SEQ ID NO: 131407 - RNA, 32 nt, Homo Sapiens
ccacugcgcccggcccgagaaaauacaguuuu

SEQ ID NO: 131408 - RNA, 32 nt, Homo Sapiens
gccaaccacaguggcuaaugucuauguuuuug

SEQ ID NO: 131409 - RNA, 32 nt, Homo Sapiens
uccgggaucuucagcacccgcggccgccaucg

SEQ ID NO: 131410 - RNA, 32 nt, Homo Sapiens
gucuuguucauuuaaguucuaguucauuuaaa

SEQ ID NO: 131411 - RNA, 32 nt, Homo Sapiens
cugggccggaccccuccuccuuggggagcguu

SEQ ID NO: 131412 - RNA, 32 nt, Homo Sapiens
cgaauuuucacauuuauauuuaaacuucaauu

SEQ ID NO: 131413 - RNA, 31 nt, Homo Sapiens
aagaaauagugcucccuucagaauggaagaa

SEQ ID NO: 131414 - RNA, 32 nt, Homo Sapiens
cccuuggccaggacaugcugcugcuacugcua

SEQ ID NO: 131415 - RNA, 32 nt, Homo Sapiens
uggcuuaucuucugcauguccugccuuugccc

SEQ ID NO: 131416 - RNA, 32 nt, Homo Sapiens
acaaucaguuauacaguuauaaaauuaaaagu

SEQ ID NO: 131417 - RNA, 28 nt, Homo Sapiens
uauaacuugucuaaauaaguuugcaauu

SEQ ID NO: 131418 - RNA, 32 nt, Homo Sapiens
guuccuggagaagcgcugucccggggccgugg

SEQ ID NO: 131419 - RNA, 32 nt, Homo Sapiens
cccgccccauccccgccacuuuccccggagcu

SEQ ID NO: 131420 - RNA, 32 nt, Homo Sapiens
uugagggaaauacaguuugguaccuuguuuau

SEQ ID NO: 131421 - RNA, 32 nt, Homo Sapiens
uuuuguugacuucuaacuuccaaauacuauau

SEQ ID NO: 131422 - RNA, 30 nt, Homo Sapiens
ugugccugccuccugccgccgccaccauga

SEQ ID NO: 131423 - RNA, 32 nt, Homo Sapiens
gggaaggggcauguugggcaguccucgacgug

SEQ ID NO: 131424 - RNA, 29 nt, Homo Sapiens
cuucuuggggugcuccuccaguuuaauuc

SEQ ID NO: 131425 - RNA, 32 nt, Homo Sapiens
agacuaauacagaggaugauugaaagaaacac

SEQ ID NO: 131426 - RNA, 32 nt, Homo Sapiens
ucucauugugguuuuugauuugcauuucccug

SEQ ID NO: 131427 - RNA, 30 nt, Homo Sapiens
auccaguguugugcugcugaauguuuaaca

SEQ ID NO: 131428 - RNA, 32 nt, Homo Sapiens
agcggagccgcgguccggacggcagcgcgugc

SEQ ID NO: 131429 - RNA, 32 nt, Homo Sapiens
uuaaaaaaggaaaagccaagaacuacuuugcu

SEQ ID NO: 131430 - RNA, 32 nt, Homo Sapiens
ggaagaaagaauguuacugccuuaauaaaaaa

SEQ ID NO: 131431 - RNA, 32 nt, Homo Sapiens
cagauuaaaucgucugcaaaaucuaugaagaa

SEQ ID NO: 131432 - RNA, 32 nt, Homo Sapiens
agcuucaaugaagaccagcaaaaggaaaagga

SEQ ID NO: 131433 - RNA, 32 nt, Homo Sapiens
uucuuacguggaaaaugagguggcaauaguau

SEQ ID NO: 131434 - RNA, 32 nt, Homo Sapiens
gacaugggccucuggagaaugcaagucuuugc

SEQ ID NO: 131435 - RNA, 32 nt, Homo Sapiens
ccccaccagagccccagcuccugucugugggg

SEQ ID NO: 131436 - RNA, 32 nt, Homo Sapiens
auaaggguaaauuuaucuuaguguuuuuaaac

SEQ ID NO: 131437 - RNA, 32 nt, Homo Sapiens
cccggccugccaggucucugggccuucagcgc

SEQ ID NO: 131438 - RNA, 32 nt, Homo Sapiens
guagggugggaggccuggcccgggccuccccc

SEQ ID NO: 131439 - RNA, 32 nt, Homo Sapiens
cagccuugauaaagggcaguggauugccuguu

SEQ ID NO: 131440 - RNA, 32 nt, Homo Sapiens
uggggaggauuaaaagugaugauggucugggg

SEQ ID NO: 131441 - RNA, 32 nt, Homo Sapiens
uaauguguauaaauauguaugcaaguauguau

SEQ ID NO: 131442 - RNA, 32 nt, Homo Sapiens
aaauaaauccagaccaagaaccacugaagaaa

SEQ ID NO: 131443 - RNA, 32 nt, Homo Sapiens
cuuuugugcagggccgucucucgcagcgcccg

SEQ ID NO: 131444 - RNA, 31 nt, Homo Sapiens
ucgccauagcgcagcggccgaugguacagcc

SEQ ID NO: 131445 - RNA, 32 nt, Homo Sapiens
ucacagaggaagaaccgaggugggggcuuggu

SEQ ID NO: 131446 - RNA, 32 nt, Homo Sapiens
gaguagccaaggaaacaggaugcccgcuaaag

SEQ ID NO: 131447 - RNA, 32 nt, Homo Sapiens
gccauuccuugucccacccccacccgaucaua

SEQ ID NO: 131448 - RNA, 32 nt, Homo Sapiens
acacuugacugauauuugauaauugaaugcag

SEQ ID NO: 131449 - RNA, 32 nt, Homo Sapiens
uucuagcuucugagcugaaauuugugucauua

SEQ ID NO: 131450 - RNA, 32 nt, Homo Sapiens
ugccccugaggguggggcuggcucuuacucag

SEQ ID NO: 131451 - RNA, 32 nt, Homo Sapiens
gucuuuguucuucuaccacccaccaguugaau

SEQ ID NO: 131452 - RNA, 32 nt, Homo Sapiens
uugauaaaacaauuuuguagaguguaauauuu

SEQ ID NO: 131453 - RNA, 32 nt, Homo Sapiens
uaauguuacuguccaaguucuuucucaagaaa

SEQ ID NO: 131454 - RNA, 32 nt, Homo Sapiens
ugcaucugcuaccuccuccccccuccucugaa

SEQ ID NO: 131455 - RNA, 32 nt, Homo Sapiens
uaugacagauauauuuaagccuuauaaaccaa

SEQ ID NO: 131456 - RNA, 32 nt, Homo Sapiens
ggauguagcugcugcuuguccuguucaaguug

SEQ ID NO: 131457 - RNA, 32 nt, Homo Sapiens
ggcacccaccucuggagaaacucggggccacc

SEQ ID NO: 131458 - RNA, 32 nt, Homo Sapiens
guuggagaacagaguuggccugcaucuggaac

SEQ ID NO: 131459 - RNA, 32 nt, Homo Sapiens
uccaacagcuucugccucccuccucaucacuu

SEQ ID NO: 131460 - RNA, 32 nt, Homo Sapiens
aaugcccaagaagacgccgacgcccauccagc

SEQ ID NO: 131461 - RNA, 32 nt, Homo Sapiens
augucuaaggaaaauguuuucuuaaugagaug

SEQ ID NO: 131462 - RNA, 32 nt, Homo Sapiens
cucugcccauucuccuccaucugcacacgucu

SEQ ID NO: 131463 - RNA, 32 nt, Homo Sapiens
ucucaggacccccggaggaucccauauugggu

SEQ ID NO: 131464 - RNA, 32 nt, Homo Sapiens
cccgccucgcucuacgccuccucccuggcugc

SEQ ID NO: 131465 - RNA, 32 nt, Homo Sapiens
ggcgcggcccaacgccggggccuggagcauug

SEQ ID NO: 131466 - RNA, 32 nt, Homo Sapiens
cgugcuggagggcauccuggauggaauugaag

SEQ ID NO: 131467 - RNA, 32 nt, Homo Sapiens
aaagcucccaccugguggcucauuuuucauag

SEQ ID NO: 131468 - RNA, 32 nt, Homo Sapiens
aauccugggugucucugagacccaucuccugc

SEQ ID NO: 131469 - RNA, 32 nt, Homo Sapiens
ggggccccuggcccggccccacccagccgaca

SEQ ID NO: 131470 - RNA, 32 nt, Homo Sapiens
accgcccggggcuguggcuggcagcuuggugg

SEQ ID NO: 131471 - RNA, 32 nt, Homo Sapiens
ucaaaacuuauuggaauguugagagugugguu

SEQ ID NO: 131472 - RNA, 32 nt, Homo Sapiens
ggucagcguggccucccaugcuucauucugcc

SEQ ID NO: 131473 - RNA, 32 nt, Homo Sapiens
cggagcuggaggugcugucccgucuggcggcg

SEQ ID NO: 131474 - RNA, 32 nt, Homo Sapiens
ucccaaggccgggccgcaccaccgcugggggg

SEQ ID NO: 131475 - RNA, 32 nt, Homo Sapiens
agggggcuagggauaugcucuggggcuuucau

SEQ ID NO: 131476 - RNA, 32 nt, Homo Sapiens
acacacuccacgagagcagccccuccacucug

SEQ ID NO: 131477 - RNA, 32 nt, Homo Sapiens
ugcucaugucauuuuucucauggucacauuua

SEQ ID NO: 131478 - RNA, 32 nt, Homo Sapiens
cuugcugggugugcuuuucagaaaguugguaa

SEQ ID NO: 131479 - RNA, 30 nt, Homo Sapiens
gagaaggaguccauggugucgcugugugcc

SEQ ID NO: 131480 - RNA, 32 nt, Homo Sapiens
ugcccaccgggcggggucgcugguuggccggg

SEQ ID NO: 131481 - RNA, 32 nt, Homo Sapiens
aucaucucguccugcccuuuuguucugcugaa

SEQ ID NO: 131482 - RNA, 32 nt, Homo Sapiens
uucagucauuuucuuuuaccucguugucagug

SEQ ID NO: 131483 - RNA, 32 nt, Homo Sapiens
cuccugaagcaggcuauaucaaaugacuaguc

SEQ ID NO: 131484 - RNA, 32 nt, Homo Sapiens
uuguuauuaaauuuuuaauuauugcuguucuu

SEQ ID NO: 131485 - RNA, 32 nt, Homo Sapiens
cuggcuaggacagccaguauuuauugaauaga

SEQ ID NO: 131486 - RNA, 32 nt, Homo Sapiens
ugccuaggggaagaggagaagaggguaagggg

SEQ ID NO: 131487 - RNA, 32 nt, Homo Sapiens
cagaaccccuuacugguuuguuuaccugacug

SEQ ID NO: 131488 - RNA, 32 nt, Homo Sapiens
uuagggaggaggaggcgagaagauggcggacg

SEQ ID NO: 131489 - RNA, 32 nt, Homo Sapiens
guggaagacagagguggcaggacaaggaagag

SEQ ID NO: 131490 - RNA, 32 nt, Homo Sapiens
ucuuuuccauguuaccgaaacuguagccaguu

SEQ ID NO: 131491 - RNA, 32 nt, Homo Sapiens
uacuucuuaauguuuauuaaaagauguauuuu

SEQ ID NO: 131492 - RNA, 32 nt, Homo Sapiens
agggagaucauguuuucuuaaucaugcuggaa

SEQ ID NO: 131493 - RNA, 32 nt, Homo Sapiens
uaaaaaauauauugcuuuguuaaguauuaaag

SEQ ID NO: 131494 - RNA, 32 nt, Homo Sapiens
ggaggcggccgcggagcccccggagauggagg

SEQ ID NO: 131495 - RNA, 32 nt, Homo Sapiens
guucuuuuuucauaggaaauuccuucauaaaa

SEQ ID NO: 131496 - RNA, 32 nt, Homo Sapiens
agagaaaagguuuggguccacugaacaucaug

SEQ ID NO: 131497 - RNA, 32 nt, Homo Sapiens
gugcggggaggggaaggacgccuccaagcccg

SEQ ID NO: 131498 - RNA, 32 nt, Homo Sapiens
ggucuccaguccagcgccgacggccagcggcu

SEQ ID NO: 131499 - RNA, 32 nt, Homo Sapiens
aaccgggcuucuuuguaggguauguguacugc

SEQ ID NO: 131500 - RNA, 32 nt, Homo Sapiens
uguggucuauccuggagaauguucugugagcu

SEQ ID NO: 131501 - RNA, 32 nt, Homo Sapiens
uguagauccccucucugagaccuggcuguacu

SEQ ID NO: 131502 - RNA, 27 nt, Homo Sapiens
gaauggcaccaaaaggcauauuggggu

SEQ ID NO: 131503 - RNA, 32 nt, Homo Sapiens
acuccuggacaaguugcuggcuccugagacca

SEQ ID NO: 131504 - RNA, 32 nt, Homo Sapiens
auaauaccagauaauaaggaaaacacucauaa

SEQ ID NO: 131505 - RNA, 32 nt, Homo Sapiens
auaaugaaaacgguauuaauucuuggaugauu

SEQ ID NO: 131506 - RNA, 32 nt, Homo Sapiens
agcuuaaauaucgaauaauagcuccucaaccu

SEQ ID NO: 131507 - RNA, 32 nt, Homo Sapiens
gaaaccccuaaaacgcuaauauugauuuuccu

SEQ ID NO: 131508 - RNA, 32 nt, Homo Sapiens
ccauaauagaaagcugaagaacacuagaagua

SEQ ID NO: 131509 - RNA, 31 nt, Homo Sapiens
guuuggugauaacgucucagagcaugccuaa

SEQ ID NO: 131510 - RNA, 27 nt, Homo Sapiens
aggaaguccuucuugaagucuaaucuc

SEQ ID NO: 131511 - RNA, 32 nt, Homo Sapiens
agaagacuguaccauguccuagcugaggcagg

SEQ ID NO: 131512 - RNA, 32 nt, Homo Sapiens
caaaagcaggggccagggagggggcgacuugc

SEQ ID NO: 131513 - RNA, 32 nt, Homo Sapiens
accugccugggcaacauagugagaccccaucu

SEQ ID NO: 131514 - RNA, 32 nt, Homo Sapiens
uuuaaccuuuugcuccuaucccauuuuuaaag

SEQ ID NO: 131515 - RNA, 32 nt, Homo Sapiens
ccucuguugccaacacgagaucaaucagccuu

SEQ ID NO: 131516 - RNA, 32 nt, Homo Sapiens
uaagugcccaaccugacaacagagaagaugau

SEQ ID NO: 131517 - RNA, 32 nt, Homo Sapiens
uaguuuuguuuuacuaaucuaaggguacuagc

SEQ ID NO: 131518 - RNA, 32 nt, Homo Sapiens
gccgcguaagugccgccugcccugcguggguc

SEQ ID NO: 131519 - RNA, 32 nt, Homo Sapiens
uucacaguuugauaggcauauuuugaagucau

SEQ ID NO: 131520 - RNA, 32 nt, Homo Sapiens
aggaccugagacacugaugaauggugcuauuu

SEQ ID NO: 131521 - RNA, 32 nt, Homo Sapiens
uaagucuuuaaucccucuggacuggaugguuc

SEQ ID NO: 131522 - RNA, 32 nt, Homo Sapiens
auguccuuaacucggcaucuccaggacgagcu

SEQ ID NO: 131523 - RNA, 32 nt, Homo Sapiens
uaucagagauaaaauuuguuaugaauuugcuu

SEQ ID NO: 131524 - RNA, 32 nt, Homo Sapiens
auucuuaugucaagcugaaauucucuaauuuu

SEQ ID NO: 131525 - RNA, 32 nt, Homo Sapiens
guuugcuguggcggcuaggcccgcgugcgcug

SEQ ID NO: 131526 - RNA, 32 nt, Homo Sapiens
cugcaauguauuuucuugcuuauauuaaaguu

SEQ ID NO: 131527 - RNA, 32 nt, Homo Sapiens
cugggucuguccuccaagagaacccugagaau

SEQ ID NO: 131528 - RNA, 32 nt, Homo Sapiens
agcugggcauucaggaccuugaggacacguga

SEQ ID NO: 131529 - RNA, 32 nt, Homo Sapiens
aauuacuugauuaauuaauacuauuugaguua

SEQ ID NO: 131530 - RNA, 32 nt, Homo Sapiens
cacagccaccucaggaaacucaggggaauugg

SEQ ID NO: 131531 - RNA, 32 nt, Homo Sapiens
uggaagugaggcccggccccggacagggucug

SEQ ID NO: 131532 - RNA, 32 nt, Homo Sapiens
gcacgguggcagggaggcggcguugcgguggc

SEQ ID NO: 131533 - RNA, 32 nt, Homo Sapiens
acccacccacccacccagccucgcagcgccau

SEQ ID NO: 131534 - RNA, 32 nt, Homo Sapiens
ggacuccagugcccuccucucccaagagacaa

SEQ ID NO: 131535 - RNA, 32 nt, Homo Sapiens
gauacucuuucuuugcagaauaccuuagaacc

SEQ ID NO: 131536 - RNA, 32 nt, Homo Sapiens
acaggaaguuauccauaugucugcuaguuaga

SEQ ID NO: 131537 - RNA, 32 nt, Homo Sapiens
agaucuaugugauaguauauugguauuuuauc

SEQ ID NO: 131538 - RNA, 32 nt, Homo Sapiens
ugcaagaguggaagaagaaacaccaguuagaa

SEQ ID NO: 131539 - RNA, 32 nt, Homo Sapiens
cugguuuccaugaugcccauccagucaaucuc

SEQ ID NO: 131540 - RNA, 32 nt, Homo Sapiens
agccagcagacucuucuguugccgggcaacgc

SEQ ID NO: 131541 - RNA, 32 nt, Homo Sapiens
acgucuugguaguuuguuccuuuuauugcuga

SEQ ID NO: 131542 - RNA, 32 nt, Homo Sapiens
uuugauggcuacguuuuggagagagcaaucuu

SEQ ID NO: 131543 - RNA, 31 nt, Homo Sapiens
agcugggacgcuccgaacucgaggcaggagu

SEQ ID NO: 131544 - RNA, 32 nt, Homo Sapiens
acacauugauauuauaucauggcauuuuauuc

SEQ ID NO: 131545 - RNA, 32 nt, Homo Sapiens
acucuggcuuuccgugccacucuucuuccuuu

SEQ ID NO: 131546 - RNA, 32 nt, Homo Sapiens
ccgacugcagcccuagcgcccggggcuccacg

SEQ ID NO: 131547 - RNA, 32 nt, Homo Sapiens
gggcuugccucacuggccacccucccaacccc

SEQ ID NO: 131548 - RNA, 32 nt, Homo Sapiens
guuuguaaaucccagcacuuugggaaggccga

SEQ ID NO: 131549 - RNA, 32 nt, Homo Sapiens
auucagccaaccccagcguccccccugaggcg

SEQ ID NO: 131550 - RNA, 32 nt, Homo Sapiens
aauacagacaaagcauaaucaauauaaucuga

SEQ ID NO: 131551 - RNA, 32 nt, Homo Sapiens
ccucaucgcccuugugucagugcuugcucaaa

SEQ ID NO: 131552 - RNA, 32 nt, Homo Sapiens
guugacagcgccgcgccgcgcccagcggccgc

SEQ ID NO: 131553 - RNA, 32 nt, Homo Sapiens
gccuggagaagcugggcaggacaaguaggaca

SEQ ID NO: 131554 - RNA, 31 nt, Homo Sapiens
ugcaagaaauaaagaggauaugauagaaggu

SEQ ID NO: 131555 - RNA, 32 nt, Homo Sapiens
guuuuugaugcucgaugaugcugggaauucag

SEQ ID NO: 131556 - RNA, 32 nt, Homo Sapiens
ccaucucaauaaauaaauaaauaaguaaaugc

SEQ ID NO: 131557 - RNA, 32 nt, Homo Sapiens
ugaaguguguauuuaaauuucaugccuuaaua

SEQ ID NO: 131558 - RNA, 32 nt, Homo Sapiens
gucacaaaagaugaagagaauauuuuccagaa

SEQ ID NO: 131559 - RNA, 32 nt, Homo Sapiens
ucuggaugcuaaaucuuaguccagccaaacag

SEQ ID NO: 131560 - RNA, 32 nt, Homo Sapiens
ggugacccacugaaccaagaacuuacuggaag

SEQ ID NO: 131561 - RNA, 32 nt, Homo Sapiens
gaaguaucgcacucagacaccaccacuuccua

SEQ ID NO: 131562 - RNA, 32 nt, Homo Sapiens
gaugcuuggggucuugggauagauagaaggug

SEQ ID NO: 131563 - RNA, 32 nt, Homo Sapiens
aggccccacuguggccggggccccugccaccc

SEQ ID NO: 131564 - RNA, 32 nt, Homo Sapiens
ucaacuguugcaggauuccaggauauuuaaca

SEQ ID NO: 131565 - RNA, 32 nt, Homo Sapiens
ccauccaccucuugggguaccugccucucucu

SEQ ID NO: 131566 - RNA, 32 nt, Homo Sapiens
ggaagcagggaaugaugagggcugguccuagg

SEQ ID NO: 131567 - RNA, 32 nt, Homo Sapiens
gucuaaccgagacucaucaaagccuucuguca

SEQ ID NO: 131568 - RNA, 32 nt, Homo Sapiens
gggcccaagcugacggcgugcacgggagccug

SEQ ID NO: 131569 - RNA, 32 nt, Homo Sapiens
cuagagcugaccucacuacuccccugcucaca

SEQ ID NO: 131570 - RNA, 32 nt, Homo Sapiens
agcuuuauuuauguucauguccuguaaauuuu

SEQ ID NO: 131571 - RNA, 32 nt, Homo Sapiens
gccugccagcucccucgccgcgcguccguccu

SEQ ID NO: 131572 - RNA, 32 nt, Homo Sapiens
ugggguguugcuggagcagaugagauaaaauc

SEQ ID NO: 131573 - RNA, 30 nt, Homo Sapiens
uugaaggagaagcuggagcuggcugggagu

SEQ ID NO: 131574 - RNA, 32 nt, Homo Sapiens
ggcagccuggauauccucuccuaccggcaccc

SEQ ID NO: 131575 - RNA, 32 nt, Homo Sapiens
uuuuucaguucuuuuuaucaucuagaauauaa

SEQ ID NO: 131576 - RNA, 32 nt, Homo Sapiens
aucuacaguccuuuuuacauccucuugaauac

SEQ ID NO: 131577 - RNA, 32 nt, Homo Sapiens
aaaaggguauguaaaaguuguauuuuuugcac

SEQ ID NO: 131578 - RNA, 32 nt, Homo Sapiens
agccagcaccuggccuggcugaggccauugca

SEQ ID NO: 131579 - RNA, 32 nt, Homo Sapiens
ucugugcaguggaguuguuaaguucuagaaac

SEQ ID NO: 131580 - RNA, 32 nt, Homo Sapiens
cacuguauaugaugaaaggcuucuauuuggag

SEQ ID NO: 131581 - RNA, 32 nt, Homo Sapiens
cacacccccauuccuccuggcuccuuaucccc

SEQ ID NO: 131582 - RNA, 32 nt, Homo Sapiens
ccauugccgucucagacaccagaggcucccac

SEQ ID NO: 131583 - RNA, 32 nt, Homo Sapiens
cgcagcucgguugaggccgccgccgccuucuc

SEQ ID NO: 131584 - RNA, 32 nt, Homo Sapiens
gcgcgccuccuccgccgccgcggacuccggca

SEQ ID NO: 131585 - RNA, 32 nt, Homo Sapiens
acugauuugcugucaaaugguggaaaaguuca

SEQ ID NO: 131586 - RNA, 32 nt, Homo Sapiens
aacuuaauauauuuuggauuaauauuugguau

SEQ ID NO: 131587 - RNA, 32 nt, Homo Sapiens
caagaaaaaaacaaaaucuugucagaagcacu

SEQ ID NO: 131588 - RNA, 32 nt, Homo Sapiens
agccagccauccugggaccccaggcgugcagg

SEQ ID NO: 131589 - RNA, 32 nt, Homo Sapiens
uuugggcagcuuuugaggaacagcaggguaau

SEQ ID NO: 131590 - RNA, 32 nt, Homo Sapiens
agaccuccuggaugccagguauuggggucaca

SEQ ID NO: 131591 - RNA, 32 nt, Homo Sapiens
cugggacccuccccagccuggagaguucauca

SEQ ID NO: 131592 - RNA, 32 nt, Homo Sapiens
uaagcacuuaggaccauuugagcuuguggguc

SEQ ID NO: 131593 - RNA, 32 nt, Homo Sapiens
gcacgggcgaggaccgccggccuccgccccac

SEQ ID NO: 131594 - RNA, 32 nt, Homo Sapiens
ucagcgccaaacuuuuugcuaguucagagauu

SEQ ID NO: 131595 - RNA, 32 nt, Homo Sapiens
agcugucuuauguuucuuguucuuaaauuaua

SEQ ID NO: 131596 - RNA, 32 nt, Homo Sapiens
caaugcuguacuuuucuucaguccuccucucc

SEQ ID NO: 131597 - RNA, 32 nt, Homo Sapiens
uuggcugccugccuccuucuguaagugcuuuu

SEQ ID NO: 131598 - RNA, 32 nt, Homo Sapiens
agccaaaagcgaccucuucucuaguccggugu

SEQ ID NO: 131599 - RNA, 32 nt, Homo Sapiens
ugcugccgccgcggcccaucaggccgcccucc

SEQ ID NO: 131600 - RNA, 32 nt, Homo Sapiens
ggugcccaaacaccacccuuaaucacaaguuu

SEQ ID NO: 131601 - RNA, 32 nt, Homo Sapiens
gaaucagaugagacaacagacuuggaaguguu

SEQ ID NO: 131602 - RNA, 32 nt, Homo Sapiens
aacugaacaggaacagaagagauuacacuaca

SEQ ID NO: 131603 - RNA, 32 nt, Homo Sapiens
ccuguugcaauaacuuugcugaaauauuaaca

SEQ ID NO: 131604 - RNA, 32 nt, Homo Sapiens
gcagggccucgugccccggcgcuccaggccgc

SEQ ID NO: 131605 - RNA, 32 nt, Homo Sapiens
gguuuauuuuaaaauuuauaaacaagucacuu

SEQ ID NO: 131606 - RNA, 32 nt, Homo Sapiens
gggaaaguuuucuugccuuucccacagccucc

SEQ ID NO: 131607 - RNA, 32 nt, Homo Sapiens
gcccgcccgccagccugccggguacggccuuu

SEQ ID NO: 131608 - RNA, 30 nt, Homo Sapiens
ugcuucccaaggaaaaaaaaaaaaaaaaaa

SEQ ID NO: 131609 - RNA, 32 nt, Homo Sapiens
cauuugccccuggcuaucaucauccuacauaa

SEQ ID NO: 131610 - RNA, 32 nt, Homo Sapiens
gcugaucuaccagcuguuuuaagggacugguc

SEQ ID NO: 131611 - RNA, 32 nt, Homo Sapiens
ggaaauggaggguggggccgggugaaaaugcc

SEQ ID NO: 131612 - RNA, 32 nt, Homo Sapiens
uuuuugaaccagucuguaagauuuuuguuagc

SEQ ID NO: 131613 - RNA, 32 nt, Homo Sapiens
caagcaucuagguaaauacaugugcauaaggc

SEQ ID NO: 131614 - RNA, 32 nt, Homo Sapiens
uucauccugccugaccggcagaucuuccucua

SEQ ID NO: 131615 - RNA, 32 nt, Homo Sapiens
uucauccugggugcugcagauacugcagugaa

SEQ ID NO: 131616 - RNA, 32 nt, Homo Sapiens
cagaaguuacuguaucucuugugacccuaaug

SEQ ID NO: 131617 - RNA, 32 nt, Homo Sapiens
uuugguccuuccaccacccccaccaaguaaac

SEQ ID NO: 131618 - RNA, 32 nt, Homo Sapiens
gucaccucuauuuaguuguuaccuguuucucu

SEQ ID NO: 131619 - RNA, 32 nt, Homo Sapiens
augaugauuuguuccaguucucccagggcaga

SEQ ID NO: 131620 - RNA, 32 nt, Homo Sapiens
ucagucucugaaagaugagaucgacgugcuga

SEQ ID NO: 131621 - RNA, 32 nt, Homo Sapiens
uguaauacucagauagguauaagauuuuucac

SEQ ID NO: 131622 - RNA, 32 nt, Homo Sapiens
cacugcacuccagccuggcgacagagugagac

SEQ ID NO: 131623 - RNA, 32 nt, Homo Sapiens
uuuaaaauaaauaaauguguugguucauuugg

SEQ ID NO: 131624 - RNA, 32 nt, Homo Sapiens
aucgccugucuccguagcaaugccaugaagca

SEQ ID NO: 131625 - RNA, 32 nt, Homo Sapiens
acuugggucaguuucaguugauaccuccucac

SEQ ID NO: 131626 - RNA, 32 nt, Homo Sapiens
cccacugcagccauacugugaccuccagccag

SEQ ID NO: 131627 - RNA, 32 nt, Homo Sapiens
aaaaggaauuaauucagugaaggaugauuuug

SEQ ID NO: 131628 - RNA, 32 nt, Homo Sapiens
ugcgcgucauggugcuggccugguauauggac

SEQ ID NO: 131629 - RNA, 32 nt, Homo Sapiens
cccagcacugcaccccaggcagccacuccuag

SEQ ID NO: 131630 - RNA, 32 nt, Homo Sapiens
cagugagucaguuccuuggagagggcagggac

SEQ ID NO: 131631 - RNA, 32 nt, Homo Sapiens
ggugaacagcuccuggcugcugccgagagggu

SEQ ID NO: 131632 - RNA, 30 nt, Homo Sapiens
gccucauggcacugccaccugggccuuugg

SEQ ID NO: 131633 - RNA, 32 nt, Homo Sapiens
gggaaaucggggacccccggcgcgccgacggg

SEQ ID NO: 131634 - RNA, 32 nt, Homo Sapiens
gguuuuguuguuuuauuuuuuauuguuuucau

SEQ ID NO: 131635 - RNA, 32 nt, Homo Sapiens
agaggggagcuugagggacaaugccacuauag

SEQ ID NO: 131636 - RNA, 32 nt, Homo Sapiens
guguagcaagaacaacucuuauuucacaaacu

SEQ ID NO: 131637 - RNA, 32 nt, Homo Sapiens
cgugcuccuccagcugccccaguggggcccac

SEQ ID NO: 131638 - RNA, 32 nt, Homo Sapiens
ggcuccugggcggccugcgcagaugggccaca

SEQ ID NO: 131639 - RNA, 32 nt, Homo Sapiens
aaaaagaagaggaaacaaagcccccuuuuaga

SEQ ID NO: 131640 - RNA, 32 nt, Homo Sapiens
aagacagcucuuuguucuguauugcucuaauu

SEQ ID NO: 131641 - RNA, 32 nt, Homo Sapiens
uuuuuucugaagauguggggaacgaaauugga

SEQ ID NO: 131642 - RNA, 32 nt, Homo Sapiens
acugugauuuuuuuuucuuuuuucuuuuuuuu

SEQ ID NO: 131643 - RNA, 32 nt, Homo Sapiens
ccuucuucauuuccccggggaccagagaccca

SEQ ID NO: 131644 - RNA, 32 nt, Homo Sapiens
gaccucgaccaagccgcgaccgccagcaagcu

SEQ ID NO: 131645 - RNA, 32 nt, Homo Sapiens
aggugggcgcacaaaugcugccagcgccacuc

SEQ ID NO: 131646 - RNA, 32 nt, Homo Sapiens
ugacccuggcccgacgcggaggcugccccucu

SEQ ID NO: 131647 - RNA, 32 nt, Homo Sapiens
cuuuaccucuuuuuaccaaaauguuaaggcug

SEQ ID NO: 131648 - RNA, 32 nt, Homo Sapiens
gccaggcccccucccccacgcacuuuuggggg

SEQ ID NO: 131649 - RNA, 32 nt, Homo Sapiens
gucccagcuacuugggaggcugagagaggaga

SEQ ID NO: 131650 - RNA, 32 nt, Homo Sapiens
cuccuugcaaacaaaaugauaguugacacuuu

SEQ ID NO: 131651 - RNA, 32 nt, Homo Sapiens
ugccccugacaguggggauaugcaaggggcuc

SEQ ID NO: 131652 - RNA, 32 nt, Homo Sapiens
uccagccauuuuacugcagcagucugugaacu

SEQ ID NO: 131653 - RNA, 32 nt, Homo Sapiens
aaaauaucaauauuuucugcaauccaaugcac

SEQ ID NO: 131654 - RNA, 32 nt, Homo Sapiens
cucgaucuuugguauaucuuuggaucuuauuu

SEQ ID NO: 131655 - RNA, 32 nt, Homo Sapiens
ggaaaccaugaacaaacucacacuggaaagcg

SEQ ID NO: 131656 - RNA, 32 nt, Homo Sapiens
gauuguuauuuuuuguuugcaauggggaauuu

SEQ ID NO: 131657 - RNA, 32 nt, Homo Sapiens
uuguauguaaaacuuuaacugauuucugucau

SEQ ID NO: 131658 - RNA, 32 nt, Homo Sapiens
ucuaaggucuagcagucacuucacuagugggc

SEQ ID NO: 131659 - RNA, 32 nt, Homo Sapiens
gaagaauacgguaagcuucccacacauuagca

SEQ ID NO: 131660 - RNA, 32 nt, Homo Sapiens
accgguggggacggggcggggcgcagccuugc

SEQ ID NO: 131661 - RNA, 32 nt, Homo Sapiens
caaguugugaaugaaaugucugcagaucggcc

SEQ ID NO: 131662 - RNA, 32 nt, Homo Sapiens
gugacacagaacucaagggacaggaaggagau

SEQ ID NO: 131663 - RNA, 32 nt, Homo Sapiens
gcggcggcgugaagucacugcugcucuggguu

SEQ ID NO: 131664 - RNA, 32 nt, Homo Sapiens
cgauccucuguccccgccgccggccccgcugc

SEQ ID NO: 131665 - RNA, 32 nt, Homo Sapiens
gcacugaguccuccagcauguccauuaagcgg

SEQ ID NO: 131666 - RNA, 32 nt, Homo Sapiens
ucuugggcguuugauuaccaugcuggaauaag

SEQ ID NO: 131667 - RNA, 32 nt, Homo Sapiens
gcccaccacagcacagcaaagccgcuauagcc

SEQ ID NO: 131668 - RNA, 32 nt, Homo Sapiens
auuucuucauugauuuaaaucaguaugaauau

SEQ ID NO: 131669 - RNA, 32 nt, Homo Sapiens
gcgccagugaggaggaagggaaggcgguucag

SEQ ID NO: 131670 - RNA, 32 nt, Homo Sapiens
gucccacaucaauaacaaaaccacuaagcugc

SEQ ID NO: 131671 - RNA, 32 nt, Homo Sapiens
gugaacucguucuccauucucuagcaucccuc

SEQ ID NO: 131672 - RNA, 32 nt, Homo Sapiens
gcuccaucccuggcuuccccagccugcggccg

SEQ ID NO: 131673 - RNA, 32 nt, Homo Sapiens
ucucacgcaccucccagagcuggcgccacuga

SEQ ID NO: 131674 - RNA, 32 nt, Homo Sapiens
auuuaauuuuauuuuauugcaacuguacuuag

SEQ ID NO: 131675 - RNA, 32 nt, Homo Sapiens
aagagaaaacaaaagcaugugaauaaacuuug

SEQ ID NO: 131676 - RNA, 32 nt, Homo Sapiens
ccuuuccagacaccccuccccgcacugugaag

SEQ ID NO: 131677 - RNA, 32 nt, Homo Sapiens
uguuccgggcauacugcugugcucugugcuuu

SEQ ID NO: 131678 - RNA, 32 nt, Homo Sapiens
ggggaguuuguaucaugaauguuuccagguuu

SEQ ID NO: 131679 - RNA, 32 nt, Homo Sapiens
uccgcuggccccagccgcggggccaccgccag

SEQ ID NO: 131680 - RNA, 32 nt, Homo Sapiens
agacaaacauuucuggaaauggcuuuuaucca

SEQ ID NO: 131681 - RNA, 32 nt, Homo Sapiens
aaggaccaugcagcuggagaucaaaguagccc

SEQ ID NO: 131682 - RNA, 32 nt, Homo Sapiens
ugaguccagugagauuaagugauuuuugcagg

SEQ ID NO: 131683 - RNA, 32 nt, Homo Sapiens
caaagcccuugacuggcgagucaaaaacucag

SEQ ID NO: 131684 - RNA, 32 nt, Homo Sapiens
uaauuuaauuuuucuccugacaucaguucaua

SEQ ID NO: 131685 - RNA, 32 nt, Homo Sapiens
ccccccacaacacagauccacuguggaccccc

SEQ ID NO: 131686 - RNA, 30 nt, Homo Sapiens
gggagcucgucgccgccgccggcggcuagc

SEQ ID NO: 131687 - RNA, 32 nt, Homo Sapiens
ucaucaccacaggaagcgggggcuugcaagga

SEQ ID NO: 131688 - RNA, 32 nt, Homo Sapiens
ucaagaccauucuuuccaaccucuggguucuu

SEQ ID NO: 131689 - RNA, 32 nt, Homo Sapiens
ccuagguuucugccuccucguuuuuguucaag

SEQ ID NO: 131690 - RNA, 32 nt, Homo Sapiens
ugcaccucagggcuuuggauccaggucuggga

SEQ ID NO: 131691 - RNA, 32 nt, Homo Sapiens
ccuguauauuccauguauaaguguaaauauaa

SEQ ID NO: 131692 - RNA, 32 nt, Homo Sapiens
ugccucuugacaaagcacaauuucccgccuuu

SEQ ID NO: 131693 - RNA, 32 nt, Homo Sapiens
uacuuggcuugcuuugcuaugugugugaaguu

SEQ ID NO: 131694 - RNA, 32 nt, Homo Sapiens
gcauaggccuguaaucguagcgcuuugagagg

SEQ ID NO: 131695 - RNA, 32 nt, Homo Sapiens
gucacugccacccuuccacacacacacacaca

SEQ ID NO: 131696 - RNA, 32 nt, Homo Sapiens
ugugccuugaagaguagagacaauggcuaaac

SEQ ID NO: 131697 - RNA, 32 nt, Homo Sapiens
auaucuguauaaauaacgggauuuucauggcg

SEQ ID NO: 131698 - RNA, 32 nt, Homo Sapiens
ccucucgucaagcucauccucccgggaacguc

SEQ ID NO: 131699 - RNA, 32 nt, Homo Sapiens
cccagcuauucaggaagcugaggugggaggau

SEQ ID NO: 131700 - RNA, 32 nt, Homo Sapiens
uguaauuuucuuuaauuccaaacuagggcuuu

SEQ ID NO: 131701 - RNA, 32 nt, Homo Sapiens
auuggugcaacacaacaacauggcacauguau

SEQ ID NO: 131702 - RNA, 32 nt, Homo Sapiens
caguuccccugcacaagcucucuucucugcca

SEQ ID NO: 131703 - RNA, 32 nt, Homo Sapiens
ccaaccacaacacagaacgauguugaccuguu

SEQ ID NO: 131704 - RNA, 32 nt, Homo Sapiens
ccuggacagccggaccucgcccggccccggcu

SEQ ID NO: 131705 - RNA, 32 nt, Homo Sapiens
ccggaggcugugaccugcgcgcggcggcccga

SEQ ID NO: 131706 - RNA, 32 nt, Homo Sapiens
uagaagcaaaaauacuuuaacugcuguaaacc

SEQ ID NO: 131707 - RNA, 32 nt, Homo Sapiens
gggcugggcacuccuccccuccccucacuucu

SEQ ID NO: 131708 - RNA, 32 nt, Homo Sapiens
cauuuaucuucuuuuccuuccaugccaaaggu

SEQ ID NO: 131709 - RNA, 32 nt, Homo Sapiens
ccggccucucccaauaggucuuuauuccucaa

SEQ ID NO: 131710 - RNA, 32 nt, Homo Sapiens
ugagcgggaggugaaggcagagguggaggaca

SEQ ID NO: 131711 - RNA, 32 nt, Homo Sapiens
guaaauaguuuuuuuuuuuuuacaguuccaaa

SEQ ID NO: 131712 - RNA, 32 nt, Homo Sapiens
uuucauacuuuuuuuuuuuuuaaguuaacacc

SEQ ID NO: 131713 - RNA, 32 nt, Homo Sapiens
acagcuuuucaggaagcuuagaucugaauuua

SEQ ID NO: 131714 - RNA, 32 nt, Homo Sapiens
agggcggugccgcgccugcgccuuacgcgggc

SEQ ID NO: 131715 - RNA, 32 nt, Homo Sapiens
gggagugguuuaccauucuccucccccaccuu

SEQ ID NO: 131716 - RNA, 30 nt, Homo Sapiens
gcugcaggcaggcggcuccuccucacccac

SEQ ID NO: 131717 - RNA, 32 nt, Homo Sapiens
gagugguuuucaucagcaauccauuaggaaau

SEQ ID NO: 131718 - RNA, 32 nt, Homo Sapiens
uguggaauaagccccagcccagccaaaccaaa

SEQ ID NO: 131719 - RNA, 32 nt, Homo Sapiens
uggcucucggcggccuucccaggccccgcuuu

SEQ ID NO: 131720 - RNA, 32 nt, Homo Sapiens
agucuacaaccacuguggucuucccuuccuuc

SEQ ID NO: 131721 - RNA, 32 nt, Homo Sapiens
cgccuccgccgccgcggccgggacuagguccg

SEQ ID NO: 131722 - RNA, 32 nt, Homo Sapiens
gauacauuaaauuuauuauuaauaauaauaag

SEQ ID NO: 131723 - RNA, 32 nt, Homo Sapiens
gcugcaaaaaauauccaacagcacuacacaua

SEQ ID NO: 131724 - RNA, 32 nt, Homo Sapiens
gucucuggaccaggccaggucguggugcacac

SEQ ID NO: 131725 - RNA, 32 nt, Homo Sapiens
agcuccaggaucuggagccucuaucugguuag

SEQ ID NO: 131726 - RNA, 32 nt, Homo Sapiens
uggaagcaggugaagggcaacuauaguuuaaa

SEQ ID NO: 131727 - RNA, 32 nt, Homo Sapiens
ccugccgccauccaguucccaccccgcggaga

SEQ ID NO: 131728 - RNA, 32 nt, Homo Sapiens
ccccuagcugaaaagaggcuauuggaagaaac

SEQ ID NO: 131729 - RNA, 26 nt, Homo Sapiens
uauguacaagaggaauggucugaugg

SEQ ID NO: 131730 - RNA, 32 nt, Homo Sapiens
gaagguguuucuuuuacuccugagcccagaca

SEQ ID NO: 131731 - RNA, 32 nt, Homo Sapiens
uaucgcagauuuuuauguuuugaaagacagag

SEQ ID NO: 131732 - RNA, 32 nt, Homo Sapiens
cgagccuagccuccccgcgcccugggcagugu

SEQ ID NO: 131733 - RNA, 32 nt, Homo Sapiens
cgcccccgugcaggcugccagcccgccaagcu

SEQ ID NO: 131734 - RNA, 32 nt, Homo Sapiens
uuucuuaaauauauuuuauguaauauuuuauu

SEQ ID NO: 131735 - RNA, 32 nt, Homo Sapiens
augaggaaaaauuuuuaauauagucuuaucua

SEQ ID NO: 131736 - RNA, 32 nt, Homo Sapiens
cucaccccucagauugugccucugccagccuc

SEQ ID NO: 131737 - RNA, 32 nt, Homo Sapiens
aggggcuaguuguaagaaauuguacauaagau

SEQ ID NO: 131738 - RNA, 32 nt, Homo Sapiens
uucuuuugguaaucucuuucucuugcuuuuuc

SEQ ID NO: 131739 - RNA, 32 nt, Homo Sapiens
cuuacauguguacuuuuuuguuuacuugugaa

SEQ ID NO: 131740 - RNA, 32 nt, Homo Sapiens
uggcugauuuuuguaguuuuaguggagauggg

SEQ ID NO: 131741 - RNA, 32 nt, Homo Sapiens
gaucugcucccucucgcucucucacuccacua

SEQ ID NO: 131742 - RNA, 32 nt, Homo Sapiens
gccaguaauaaggaugcuaacaauuaauuuua

SEQ ID NO: 131743 - RNA, 32 nt, Homo Sapiens
aaacaaaucuguuuaaauuacuguugccuuuc

SEQ ID NO: 131744 - RNA, 32 nt, Homo Sapiens
ccaucagcagcaugcaggguaaacgcaaagca

SEQ ID NO: 131745 - RNA, 32 nt, Homo Sapiens
aacauuauugcauagaagaucccugaccauuu

SEQ ID NO: 131746 - RNA, 32 nt, Homo Sapiens
acucccagcagugugugguuucaucaggaaau

SEQ ID NO: 131747 - RNA, 32 nt, Homo Sapiens
cacugucgcacuccagccuggaugauagagca

SEQ ID NO: 131748 - RNA, 32 nt, Homo Sapiens
gguucggccggggcgcggcugcaccggggccu

SEQ ID NO: 131749 - RNA, 32 nt, Homo Sapiens
ggugugagccaccgugcccggccaaguaaaau

SEQ ID NO: 131750 - RNA, 32 nt, Homo Sapiens
ccaaagaagcaucuuacuccugaaccuuagac

SEQ ID NO: 131751 - RNA, 32 nt, Homo Sapiens
aacaggucaaggaauaaggcucgcuaucggac

SEQ ID NO: 131752 - RNA, 32 nt, Homo Sapiens
auugugccucaaaguuguaguaccucacaaua

SEQ ID NO: 131753 - RNA, 32 nt, Homo Sapiens
uuuuuagaaaucaaguaucuuucuaagugucc

SEQ ID NO: 131754 - RNA, 32 nt, Homo Sapiens
cgccccgccugggagccgcgggcaggcgagac

SEQ ID NO: 131755 - RNA, 32 nt, Homo Sapiens
cagcugcuuuucugcaaagucuguggagcagu

SEQ ID NO: 131756 - RNA, 32 nt, Homo Sapiens
aaaaugucaaaaagauuugcaaugccauuccu

SEQ ID NO: 131757 - RNA, 32 nt, Homo Sapiens
aauggggaaaauacccuuuaaauuaugacgga

SEQ ID NO: 131758 - RNA, 32 nt, Homo Sapiens
cguuuuuuucuuucuuccgcugcuuccccauu

SEQ ID NO: 131759 - RNA, 32 nt, Homo Sapiens
cagaccuacugcuugaaguaaacauugcaagg

SEQ ID NO: 131760 - RNA, 32 nt, Homo Sapiens
cucugauuuuuagaguuuccaguuuuucuguu

SEQ ID NO: 131761 - RNA, 32 nt, Homo Sapiens
ugcauuaucaggaagaucaaggcagcuggugg

SEQ ID NO: 131762 - RNA, 32 nt, Homo Sapiens
cggacucuuggacuuuuggaugccuggccuua

SEQ ID NO: 131763 - RNA, 29 nt, Homo Sapiens
ugaauaaaauuuggacuaaagaagagaaa

SEQ ID NO: 131764 - RNA, 32 nt, Homo Sapiens
aguauauucuaacgcgguggcucccaagccac

SEQ ID NO: 131765 - RNA, 32 nt, Homo Sapiens
uuguuuguuuuuuauauguagcuuuaagaaau

SEQ ID NO: 131766 - RNA, 29 nt, Homo Sapiens
acacacauauguacaugcacauagaugag

SEQ ID NO: 131767 - RNA, 32 nt, Homo Sapiens
uaaaugggagucauauaugacuuuguucagau

SEQ ID NO: 131768 - RNA, 32 nt, Homo Sapiens
guuguacuuccgugggcccuccuuccagaaca

SEQ ID NO: 131769 - RNA, 32 nt, Homo Sapiens
ccgagugagcgcgggcgccgaggaucucaucu

SEQ ID NO: 131770 - RNA, 32 nt, Homo Sapiens
uuaaauaccuaaaaugguauaagauuuaucaa

SEQ ID NO: 131771 - RNA, 32 nt, Homo Sapiens
gcucacuuccccagccacgcuggcccucaggg

SEQ ID NO: 131772 - RNA, 32 nt, Homo Sapiens
agaggcgguggcggcgggucggggcgaggguc

SEQ ID NO: 131773 - RNA, 32 nt, Homo Sapiens
ucucuacaaaaauacauaaaaaugaauuuuaa

SEQ ID NO: 131774 - RNA, 32 nt, Homo Sapiens
cacauuaauuagcuugauuaauuuagauuaga

SEQ ID NO: 131775 - RNA, 32 nt, Homo Sapiens
uuugugggcagagcaaaagacaucaaauaagc

SEQ ID NO: 131776 - RNA, 31 nt, Homo Sapiens
ccaccucccagcugccugccuuggccucccg

SEQ ID NO: 131777 - RNA, 32 nt, Homo Sapiens
gccgagaggguggaggccgagaagggugggcg

SEQ ID NO: 131778 - RNA, 32 nt, Homo Sapiens
gaauguuaacccacagaauccaaggagcaugg

SEQ ID NO: 131779 - RNA, 32 nt, Homo Sapiens
aaagggagggacuguagguuguccagcauaag

SEQ ID NO: 131780 - RNA, 32 nt, Homo Sapiens
uuuguuguugguuuuuuuuuuuuuuuuggcaa

SEQ ID NO: 131781 - RNA, 32 nt, Homo Sapiens
gaaaaggaagauugaauuagcguguuuuuugu

SEQ ID NO: 131782 - RNA, 32 nt, Homo Sapiens
uuucuuguaaauuauuuccuacucgccacucu

SEQ ID NO: 131783 - RNA, 32 nt, Homo Sapiens
gagcaagauuguggcaguuuuugcacaacuuu

SEQ ID NO: 131784 - RNA, 32 nt, Homo Sapiens
ggcguugggcagcccgugggcggucgaacugc

SEQ ID NO: 131785 - RNA, 32 nt, Homo Sapiens
cuggaggggaggaggaggagcaggccgagcgc

SEQ ID NO: 131786 - RNA, 32 nt, Homo Sapiens
ugaaugcauccaugaauuuguuuacuuuugcg

SEQ ID NO: 131787 - RNA, 32 nt, Homo Sapiens
uaauuuucuucaucucuugcuaaucucuauaa

SEQ ID NO: 131788 - RNA, 32 nt, Homo Sapiens
ccaggugagagccgugggguccccuccuuccc

SEQ ID NO: 131789 - RNA, 32 nt, Homo Sapiens
cucuguaacaucugaggugaccaagaggcaga

SEQ ID NO: 131790 - RNA, 32 nt, Homo Sapiens
aauaccguuuagaaacaaaacccuaacuucug

SEQ ID NO: 131791 - RNA, 32 nt, Homo Sapiens
cccuggcccccacgcccucccucuccagugca

SEQ ID NO: 131792 - RNA, 32 nt, Homo Sapiens
auggucagacuuguagauaaccccaaagaugu

SEQ ID NO: 131793 - RNA, 32 nt, Homo Sapiens
aaaaccauauauauuuuaacuucaauuuucuu

SEQ ID NO: 131794 - RNA, 32 nt, Homo Sapiens
cggacuccgcgcgaccccggcccucucccugc

SEQ ID NO: 131795 - RNA, 32 nt, Homo Sapiens
ggauggaucagaccugugaacuacccagaaga

SEQ ID NO: 131796 - RNA, 32 nt, Homo Sapiens
aaccuggcgugaaugcuuuucuccggagaaac

SEQ ID NO: 131797 - RNA, 32 nt, Homo Sapiens
gcauccauucaauggaauauuauucagccauu

SEQ ID NO: 131798 - RNA, 32 nt, Homo Sapiens
acucugagccaagggagggaagggccacccug

SEQ ID NO: 131799 - RNA, 32 nt, Homo Sapiens
gaccgaaaagagaaaggaauuuuaaaagccau

SEQ ID NO: 131800 - RNA, 32 nt, Homo Sapiens
ggggaagggccagucugggcugccggguucua

SEQ ID NO: 131801 - RNA, 32 nt, Homo Sapiens
aagggagacagaggcggcggcggcucagggga

SEQ ID NO: 131802 - RNA, 32 nt, Homo Sapiens
ugguaugcgagcgaaugugcgaggggagggag

SEQ ID NO: 131803 - RNA, 32 nt, Homo Sapiens
uucggcugccauggcgccugcugcugagcagc

SEQ ID NO: 131804 - RNA, 32 nt, Homo Sapiens
uccccgcucccucccucucucaaggucuccuc

SEQ ID NO: 131805 - RNA, 32 nt, Homo Sapiens
accucugccucccaggcucgauccucccaugu

SEQ ID NO: 131806 - RNA, 32 nt, Homo Sapiens
ucuguuuuuuauucaguauuuuccuuuauguu

SEQ ID NO: 131807 - RNA, 32 nt, Homo Sapiens
uuucuguggucccagaccagcccucuucuccc

SEQ ID NO: 131808 - RNA, 32 nt, Homo Sapiens
agaaauuauauuuauuagaauaaaaugugcaa

SEQ ID NO: 131809 - RNA, 32 nt, Homo Sapiens
caaauuccaauugagaagcauucuuuaaaaua

SEQ ID NO: 131810 - RNA, 32 nt, Homo Sapiens
uuuaacuuuauaauuaccuuguccuuucuggu

SEQ ID NO: 131811 - RNA, 32 nt, Homo Sapiens
cuccugaguuuccaugcuccuuucugucaggu

SEQ ID NO: 131812 - RNA, 32 nt, Homo Sapiens
acuuguauaucgaacugauuacucaagagcug

SEQ ID NO: 131813 - RNA, 32 nt, Homo Sapiens
gguugucucccucucccuccacagucuccuug

SEQ ID NO: 131814 - RNA, 32 nt, Homo Sapiens
uugcauguguuuucuuuuucuaaaucaugaua

SEQ ID NO: 131815 - RNA, 32 nt, Homo Sapiens
uauuucaggggugagagucagagagcacugca

SEQ ID NO: 131816 - RNA, 32 nt, Homo Sapiens
acccggguccacgagcugcccacguccucucc

SEQ ID NO: 131817 - RNA, 32 nt, Homo Sapiens
gugcacgacaccuuuaaaaugccuagauuucc

SEQ ID NO: 131818 - RNA, 32 nt, Homo Sapiens
gggucggaagugagcaggcugaggccaccaug

SEQ ID NO: 131819 - RNA, 32 nt, Homo Sapiens
uaguaccucccucuuaaggucagggcuggagc

SEQ ID NO: 131820 - RNA, 32 nt, Homo Sapiens
acuuguguuguuucuuuuuuaaaucaacuuuu

SEQ ID NO: 131821 - RNA, 32 nt, Homo Sapiens
gcucacugcaaccuccaccuccccggguucaa

SEQ ID NO: 131822 - RNA, 32 nt, Homo Sapiens
uugggaacacugggaucauuuucaucaugccg

SEQ ID NO: 131823 - RNA, 32 nt, Homo Sapiens
aggaggcagcugcgguggcagcugcugaguuc

SEQ ID NO: 131824 - RNA, 32 nt, Homo Sapiens
agauaggugauauacaugauacauucucaaga

SEQ ID NO: 131825 - RNA, 32 nt, Homo Sapiens
gcucccagcucugccuccugcccgccugcucu

SEQ ID NO: 131826 - RNA, 32 nt, Homo Sapiens
auccgccacugcgcagggcggcugggcagcua

SEQ ID NO: 131827 - RNA, 32 nt, Homo Sapiens
uaugcccgggagaggggggugcagggccccag

SEQ ID NO: 131828 - RNA, 32 nt, Homo Sapiens
acgguaccagagccaaaccagcuuuuaaaaug

SEQ ID NO: 131829 - RNA, 32 nt, Homo Sapiens
aaaccaaauuccuaaagugaagaccugcuggg

SEQ ID NO: 131830 - RNA, 32 nt, Homo Sapiens
gagucagggaggagggcccguuggguagcugg

SEQ ID NO: 131831 - RNA, 32 nt, Homo Sapiens
cuaggucaguagucccuggaaguuuuggugau

SEQ ID NO: 131832 - RNA, 32 nt, Homo Sapiens
uaucuaugugugugcauguguuuaaugauuau

SEQ ID NO: 131833 - RNA, 32 nt, Homo Sapiens
augugauucccucuccccaaaugggccuacca

SEQ ID NO: 131834 - RNA, 32 nt, Homo Sapiens
auugucauuaaaugagagaugucuaguccuca

SEQ ID NO: 131835 - RNA, 32 nt, Homo Sapiens
uaccaccugccaguuuccccagccucagcccc

SEQ ID NO: 131836 - RNA, 32 nt, Homo Sapiens
caguggccugggagcaggauucguggucaggc

SEQ ID NO: 131837 - RNA, 32 nt, Homo Sapiens
aucaggagcaagaaacaaaccuuaauggcuuu

SEQ ID NO: 131838 - RNA, 32 nt, Homo Sapiens
ccagcugaaggcugcgcagggggugcgggcca

SEQ ID NO: 131839 - RNA, 32 nt, Homo Sapiens
acgaggugagcggggcgggccgagcgccggcg

SEQ ID NO: 131840 - RNA, 32 nt, Homo Sapiens
auuuaaaaauaaaaacaaaacaacucaaaaag

SEQ ID NO: 131841 - RNA, 32 nt, Homo Sapiens
cucuuuuagagcaucuauaucugcaaccugua

SEQ ID NO: 131842 - RNA, 32 nt, Homo Sapiens
uaccuauuccaagugaagaauuccaaggguag

SEQ ID NO: 131843 - RNA, 32 nt, Homo Sapiens
auuucaggccaagguucaauuacuucagcgca

SEQ ID NO: 131844 - RNA, 32 nt, Homo Sapiens
uauguuugucaauaaacuuaugacgugaaaaa

SEQ ID NO: 131845 - RNA, 31 nt, Homo Sapiens
caggagaaucgcuugaaccaggcagucggaa

SEQ ID NO: 131846 - RNA, 32 nt, Homo Sapiens
uggggcaggaguauaugagcauccucucucac

SEQ ID NO: 131847 - RNA, 32 nt, Homo Sapiens
uaggagcagucccgcugcacaaugguaggcau

SEQ ID NO: 131848 - RNA, 32 nt, Homo Sapiens
agaaggagaucaaauuacauuuauguuccuau

SEQ ID NO: 131849 - RNA, 32 nt, Homo Sapiens
cggagagagacgcagaaggacagagacgugga

SEQ ID NO: 131850 - RNA, 32 nt, Homo Sapiens
cagcugcccagcuggguccgcugcuccccugg

SEQ ID NO: 131851 - RNA, 32 nt, Homo Sapiens
ccccacagcucuuuccagcgucucggaccugu

SEQ ID NO: 131852 - RNA, 32 nt, Homo Sapiens
aaaaaggaaggggagauugucucaggcuggcu

SEQ ID NO: 131853 - RNA, 32 nt, Homo Sapiens
gugaaguucuuagggaggagguccugugcagc

SEQ ID NO: 131854 - RNA, 32 nt, Homo Sapiens
aauccuuggcuaugggccacuccacaaaaaag

SEQ ID NO: 131855 - RNA, 32 nt, Homo Sapiens
gccgccugcgcgcgccuggccgaggccucgcu

SEQ ID NO: 131856 - RNA, 32 nt, Homo Sapiens
ggcucacaucccucucauuccaucccucuugg

SEQ ID NO: 131857 - RNA, 32 nt, Homo Sapiens
gccuuugagcuggccugagggcacuuucgcuu

SEQ ID NO: 131858 - RNA, 32 nt, Homo Sapiens
gguagguuuuuaauuuguacauccucuuauuu

SEQ ID NO: 131859 - RNA, 32 nt, Homo Sapiens
uuucuuggauagaggacagagaagaugacucg

SEQ ID NO: 131860 - RNA, 32 nt, Homo Sapiens
ucagggagccccacagccccaagcucgcugag

SEQ ID NO: 131861 - RNA, 32 nt, Homo Sapiens
gagcaugggagaggugggagggguucuugcaa

SEQ ID NO: 131862 - RNA, 32 nt, Homo Sapiens
aaggccacaaggggaccccggccuaggaggca

SEQ ID NO: 131863 - RNA, 32 nt, Homo Sapiens
ugugguaccggcugcuggcggcggccggcagu

SEQ ID NO: 131864 - RNA, 32 nt, Homo Sapiens
ucagcuaugcgucauuggguuuuaucaacaua

SEQ ID NO: 131865 - RNA, 32 nt, Homo Sapiens
uuucuacugcaaacagaaaugggaggguggac

SEQ ID NO: 131866 - RNA, 32 nt, Homo Sapiens
augugaugcaugcucacgugucuccgcagccg

SEQ ID NO: 131867 - RNA, 32 nt, Homo Sapiens
ucagcucacacgcugucugugacuaaagaggg

SEQ ID NO: 131868 - RNA, 32 nt, Homo Sapiens
gguucuguggaggagaggcgggguaaugggga

SEQ ID NO: 131869 - RNA, 32 nt, Homo Sapiens
augcaaaguauuuugggguauauuauccuaag

SEQ ID NO: 131870 - RNA, 32 nt, Homo Sapiens
uuacuuguauaaauacacuuccugcuuaaacu

SEQ ID NO: 131871 - RNA, 32 nt, Homo Sapiens
cuuuucuaguuuuuaagcaguuuccaccuugc

SEQ ID NO: 131872 - RNA, 32 nt, Homo Sapiens
aaagacuaacugucuacaucuccauauguugu

SEQ ID NO: 131873 - RNA, 32 nt, Homo Sapiens
cgcgagcccuccccgacccaccgcgguccgcg

SEQ ID NO: 131874 - RNA, 32 nt, Homo Sapiens
uuggcugcuuccuuuucuuaacucuuucagua

SEQ ID NO: 131875 - RNA, 32 nt, Homo Sapiens
cuuaauuuguuuauacuguaaaguauauguua

SEQ ID NO: 131876 - RNA, 32 nt, Homo Sapiens
gauaugcaauuaccauuugcauucuuucuguu

SEQ ID NO: 131877 - RNA, 32 nt, Homo Sapiens
guccuuggggugguucugcuuauucuucaagu

SEQ ID NO: 131878 - RNA, 32 nt, Homo Sapiens
uuauugagugccuacuguguguugggugccau

SEQ ID NO: 131879 - RNA, 32 nt, Homo Sapiens
uauaugauagagaaaaugucauaaauggauaa

SEQ ID NO: 131880 - RNA, 30 nt, Homo Sapiens
ggcuccuugcuguugccgccgccgcagcug

SEQ ID NO: 131881 - RNA, 32 nt, Homo Sapiens
cuccagaaauaauucaggaguuuugucaagcg

SEQ ID NO: 131882 - RNA, 32 nt, Homo Sapiens
ucccuguggcggcggcuuguuguuguggaggc

SEQ ID NO: 131883 - RNA, 32 nt, Homo Sapiens
ugggcccggugucggggaggggugcuuucuuu

SEQ ID NO: 131884 - RNA, 32 nt, Homo Sapiens
aaaaauugaagagagauauaucugaaaacugg

SEQ ID NO: 131885 - RNA, 32 nt, Homo Sapiens
caaguccuucccuuucauuuuuuccagucuuc

SEQ ID NO: 131886 - RNA, 32 nt, Homo Sapiens
cuacguccccuuucucaucgucggcuccaucu

SEQ ID NO: 131887 - RNA, 32 nt, Homo Sapiens
cuccuagccaggccuuguccucgcucaaggcu

SEQ ID NO: 131888 - RNA, 32 nt, Homo Sapiens
ccaaaauaucuuaaauaaauggugaaaaugaa

SEQ ID NO: 131889 - RNA, 32 nt, Homo Sapiens
uggugacacacgcuguagcugucuccccggcu

SEQ ID NO: 131890 - RNA, 32 nt, Homo Sapiens
cuggcuccgucauggccucugcccugaggcca

SEQ ID NO: 131891 - RNA, 32 nt, Homo Sapiens
guguuuuaaaauuuugauuucauuuucguucc

SEQ ID NO: 131892 - RNA, 32 nt, Homo Sapiens
uuaauuuaauauggucaauuuaaaagaaagca

SEQ ID NO: 131893 - RNA, 32 nt, Homo Sapiens
auuacauaugcaugcauagggguacauuuaca

SEQ ID NO: 131894 - RNA, 32 nt, Homo Sapiens
caagagaaacagagaaagaccauucccccugc

SEQ ID NO: 131895 - RNA, 32 nt, Homo Sapiens
gugaauuuacuuugucagaacaaaauauuuac

SEQ ID NO: 131896 - RNA, 32 nt, Homo Sapiens
cuaucugauacaucuguaaauguggcaaguua

SEQ ID NO: 131897 - RNA, 32 nt, Homo Sapiens
cggaccgcggcagcugcugacccgccaucgcc

SEQ ID NO: 131898 - RNA, 32 nt, Homo Sapiens
cgacgggcguggcgggggaggggacgcugagg

SEQ ID NO: 131899 - RNA, 32 nt, Homo Sapiens
ucuagggccgugcaggacgugccuuguuaacc

SEQ ID NO: 131900 - RNA, 32 nt, Homo Sapiens
gcugucugcccgaggauuugccugaaggcugc

SEQ ID NO: 131901 - RNA, 32 nt, Homo Sapiens
cugaccgcaccaaguuaaaugcucccuugcaa

SEQ ID NO: 131902 - RNA, 32 nt, Homo Sapiens
ccagcugaaugaaugcacuuagcugauaaacc

SEQ ID NO: 131903 - RNA, 32 nt, Homo Sapiens
uguaauuuuuaaaauguauuuuugguacugau

SEQ ID NO: 131904 - RNA, 32 nt, Homo Sapiens
cccauaaaacaguauuuuuuagaaguuguguu

SEQ ID NO: 131905 - RNA, 32 nt, Homo Sapiens
ucgaugacuuggggcucccugcucucccgagg

SEQ ID NO: 131906 - RNA, 32 nt, Homo Sapiens
uucuuuggccuguguaucagucugaaugaaau

SEQ ID NO: 131907 - RNA, 32 nt, Homo Sapiens
uacaauguaaauauuucuuacacagaaaguca

SEQ ID NO: 131908 - RNA, 32 nt, Homo Sapiens
cuccacacguugccuccaggaucaucgccguc

SEQ ID NO: 131909 - RNA, 32 nt, Homo Sapiens
auauuuuuuuucugcuuagacuuacuuauucu

SEQ ID NO: 131910 - RNA, 32 nt, Homo Sapiens
uccuuuuaagaauuauuuuaccaguuaugugu

SEQ ID NO: 131911 - RNA, 32 nt, Homo Sapiens
gccuacuggaguguguaaggaacuugugcaca

SEQ ID NO: 131912 - RNA, 32 nt, Homo Sapiens
uaacucaguaagcagauuaaacaaagguagag

SEQ ID NO: 131913 - RNA, 32 nt, Homo Sapiens
ugcacagcacgcuguugaguguugguugcuag

SEQ ID NO: 131914 - RNA, 32 nt, Homo Sapiens
gauagaacguuacuuugugucgugaugaaaac

SEQ ID NO: 131915 - RNA, 32 nt, Homo Sapiens
cuuggugacagaugcagacaguguggcuucag

SEQ ID NO: 131916 - RNA, 32 nt, Homo Sapiens
caccaagugucuagagucaugugagccucgug

SEQ ID NO: 131917 - RNA, 32 nt, Homo Sapiens
cucaucauaaacccaaaaguuuucuagagaac

SEQ ID NO: 131918 - RNA, 32 nt, Homo Sapiens
cuuuuuugcccccagguuccccagagggcaac

SEQ ID NO: 131919 - RNA, 30 nt, Homo Sapiens
caucuugucugugcaacaacagaccaucca

SEQ ID NO: 131920 - RNA, 32 nt, Homo Sapiens
uaaugcugcuccccgggaccaauaucuuggca

SEQ ID NO: 131921 - RNA, 32 nt, Homo Sapiens
uugccuagcuggcagggacagcugcgugugau

SEQ ID NO: 131922 - RNA, 32 nt, Homo Sapiens
cuccaguccgggaaacaagaacgaaacuccca

SEQ ID NO: 131923 - RNA, 32 nt, Homo Sapiens
aaaaguuuuucguauuuuuuuauggcagauga

SEQ ID NO: 131924 - RNA, 32 nt, Homo Sapiens
uucuuuucugguggugguagugguuguaucug

SEQ ID NO: 131925 - RNA, 32 nt, Homo Sapiens
gugcccgacgccgccucccaagccugcaaccc

SEQ ID NO: 131926 - RNA, 32 nt, Homo Sapiens
ucagauucuauaaucauaccccuaacauccag

SEQ ID NO: 131927 - RNA, 32 nt, Homo Sapiens
cuuaccuauguagacugagguacguguuucuu

SEQ ID NO: 131928 - RNA, 32 nt, Homo Sapiens
uaaaaaauuguaaagaaauguauaccaccaau

SEQ ID NO: 131929 - RNA, 32 nt, Homo Sapiens
guaaaccccccuccuuggagccgcagaucccg

SEQ ID NO: 131930 - RNA, 32 nt, Homo Sapiens
aucacaggccccagagacaucuccaacccuca

SEQ ID NO: 131931 - RNA, 32 nt, Homo Sapiens
agcauuuuacuuuguuaauaucuaguuuaguu

SEQ ID NO: 131932 - RNA, 32 nt, Homo Sapiens
uuuuacucaaaggaguccccccugcccaguaa

SEQ ID NO: 131933 - RNA, 30 nt, Homo Sapiens
uuuaucccucuggugggggaaucucacacu

SEQ ID NO: 131934 - RNA, 32 nt, Homo Sapiens
ccuugcccaucccaccacccggccuuucccug

SEQ ID NO: 131935 - RNA, 32 nt, Homo Sapiens
uggaaaaauaaucaauuaauucuauguuaauu

SEQ ID NO: 131936 - RNA, 29 nt, Homo Sapiens
cagcagggugucugggcauugguggcucc

SEQ ID NO: 131937 - RNA, 30 nt, Homo Sapiens
ccaaaggccguucaguucuccugggcucca

SEQ ID NO: 131938 - RNA, 32 nt, Homo Sapiens
gacacugauucuuuggaaauaaagaguggaag

SEQ ID NO: 131939 - RNA, 32 nt, Homo Sapiens
gccaaccucugcuccuuccccauccucaaggg

SEQ ID NO: 131940 - RNA, 32 nt, Homo Sapiens
gguuuucuauuauguuccauugcucuauuugu

SEQ ID NO: 131941 - RNA, 32 nt, Homo Sapiens
gggcacggagagccccucgagcgcagcaggcc

SEQ ID NO: 131942 - RNA, 32 nt, Homo Sapiens
uaacagaugagacagaauauaaacaggaaguc

SEQ ID NO: 131943 - RNA, 32 nt, Homo Sapiens
gaucaggccuccccgcaacccggcgucccucu

SEQ ID NO: 131944 - RNA, 32 nt, Homo Sapiens
caaaacaaauaaaaauauaccuuuuucagguu

SEQ ID NO: 131945 - RNA, 32 nt, Homo Sapiens
gcagugccaugugggccaugcccgccgggaag

SEQ ID NO: 131946 - RNA, 32 nt, Homo Sapiens
gcaggcugcccggcuggccgccuguaccguga

SEQ ID NO: 131947 - RNA, 32 nt, Homo Sapiens
aaacucccgcuuauaaaaccaucagaucucau

SEQ ID NO: 131948 - RNA, 32 nt, Homo Sapiens
uugguuuaauauugaauauacuguuuaccuca

SEQ ID NO: 131949 - RNA, 32 nt, Homo Sapiens
aauuaaaaugguuuuucuuguuugccguauuu

SEQ ID NO: 131950 - RNA, 32 nt, Homo Sapiens
guaagacucacagaacaaaagcaaggaauugc

SEQ ID NO: 131951 - RNA, 32 nt, Homo Sapiens
cacaaccccgacgccacaccacguaucauucc

SEQ ID NO: 131952 - RNA, 32 nt, Homo Sapiens
cagcgcggcggggacgcggggaccgcccggau

SEQ ID NO: 131953 - RNA, 32 nt, Homo Sapiens
ccgggcucagaaugggaggacuccagaagaug

SEQ ID NO: 131954 - RNA, 32 nt, Homo Sapiens
uaggcagacgcgucaccgcgggcuuugaggac

SEQ ID NO: 131955 - RNA, 32 nt, Homo Sapiens
ccagucuucccggcuggaaggagcgggcgccu

SEQ ID NO: 131956 - RNA, 32 nt, Homo Sapiens
ucacccccauucuccacugcuuuucaucuuau

SEQ ID NO: 131957 - RNA, 32 nt, Homo Sapiens
guauaaauuaggcucagaaaccacugcauucu

SEQ ID NO: 131958 - RNA, 32 nt, Homo Sapiens
acuggggccaaaaugcccuuuauaauaugaua

SEQ ID NO: 131959 - RNA, 32 nt, Homo Sapiens
aaagcaaugguuguggggucuugaauggacag

SEQ ID NO: 131960 - RNA, 32 nt, Homo Sapiens
aguuuuucaaacuggcaaaauuaauuaauuga

SEQ ID NO: 131961 - RNA, 32 nt, Homo Sapiens
auugggcuuaggaugccaacagcgcugcugag

SEQ ID NO: 131962 - RNA, 32 nt, Homo Sapiens
aggaaaugacagagacacacgcccuugcccac

SEQ ID NO: 131963 - RNA, 32 nt, Homo Sapiens
uacugucucuucugguuauaaagcagacaugu

SEQ ID NO: 131964 - RNA, 32 nt, Homo Sapiens
uacucucugaugucccaauacucucugguguc

SEQ ID NO: 131965 - RNA, 32 nt, Homo Sapiens
gcaucgugguggccagguggugugggagggcc

SEQ ID NO: 131966 - RNA, 32 nt, Homo Sapiens
auaagggaaaaauaaauauaagaccuaugagu

SEQ ID NO: 131967 - RNA, 32 nt, Homo Sapiens
cuaguggccugagggcggggcgggcgcggggc

SEQ ID NO: 131968 - RNA, 32 nt, Homo Sapiens
gugagccucgagaggagacgcgggcggcuaga

SEQ ID NO: 131969 - RNA, 32 nt, Homo Sapiens
gguaagaaaauacuuuuuuauauuuguuacuu

SEQ ID NO: 131970 - RNA, 32 nt, Homo Sapiens
uacugggaaucugcguucuaaaacaggucuug

SEQ ID NO: 131971 - RNA, 32 nt, Homo Sapiens
ucgccgguuaacaugagagaucauggccgccu

SEQ ID NO: 131972 - RNA, 32 nt, Homo Sapiens
cugaaauacuaaaacacuuaucuuacagcaag

SEQ ID NO: 131973 - RNA, 32 nt, Homo Sapiens
uccccagcauuuacuguaacucugccaucuuc

SEQ ID NO: 131974 - RNA, 32 nt, Homo Sapiens
gccccugaggaagcgaggaggcgucggcgucg

SEQ ID NO: 131975 - RNA, 32 nt, Homo Sapiens
cccugggugacagcgccgcggggccagucccg

SEQ ID NO: 131976 - RNA, 32 nt, Homo Sapiens
ucccaccgcccaguccccggcggcgaugagac

SEQ ID NO: 131977 - RNA, 30 nt, Homo Sapiens
cauagacagaagcuuagucuguuuucagug

SEQ ID NO: 131978 - RNA, 32 nt, Homo Sapiens
accugacuaccuugucaugauccuccuucuuu

SEQ ID NO: 131979 - RNA, 32 nt, Homo Sapiens
cucucagugccucaccucccccugccucccag

SEQ ID NO: 131980 - RNA, 32 nt, Homo Sapiens
aggcuggagggagagggaagcaagaccaagau

SEQ ID NO: 131981 - RNA, 32 nt, Homo Sapiens
aagcgacuuccccagggugcccggcccgcaca

SEQ ID NO: 131982 - RNA, 32 nt, Homo Sapiens
ugucacugaucguauuucuacuuguuaaauaa

SEQ ID NO: 131983 - RNA, 32 nt, Homo Sapiens
ucucccuggaaagggagggaggcuucaacguc

SEQ ID NO: 131984 - RNA, 32 nt, Homo Sapiens
uugaaagacauucaagauuacgaaguuuagau

SEQ ID NO: 131985 - RNA, 32 nt, Homo Sapiens
cgugguggucacuccuggaugugcuguccuau

SEQ ID NO: 131986 - RNA, 32 nt, Homo Sapiens
cccauuucauacacccucgaggaugagaccca

SEQ ID NO: 131987 - RNA, 32 nt, Homo Sapiens
cguguccccggggccucaccgccccccgugcu

SEQ ID NO: 131988 - RNA, 32 nt, Homo Sapiens
gucaaaauacauuugaugcuuaccacacauuu

SEQ ID NO: 131989 - RNA, 32 nt, Homo Sapiens
uuuuauaaaaauuuuuuuuacaaucuaauaau

SEQ ID NO: 131990 - RNA, 32 nt, Homo Sapiens
cugaagggcuccuugagcguggccagagugga

SEQ ID NO: 131991 - RNA, 32 nt, Homo Sapiens
gagucuguggagaucaaagugaagcgggagua

SEQ ID NO: 131992 - RNA, 32 nt, Homo Sapiens
cuacagagccaggcaugguccuggauagugug

SEQ ID NO: 131993 - RNA, 32 nt, Homo Sapiens
uacacuugaggguaaauuaaaucugguaaacu

SEQ ID NO: 131994 - RNA, 32 nt, Homo Sapiens
cuuggugcuccccgacggggcccggcaaguuc

SEQ ID NO: 131995 - RNA, 32 nt, Homo Sapiens
acgcuggcgcgguggccgcgccccagccucga

SEQ ID NO: 131996 - RNA, 32 nt, Homo Sapiens
agagaugccgaugucagcacagcccuaagcag

SEQ ID NO: 131997 - RNA, 27 nt, Homo Sapiens
caauccucccacuucagccucccaagc

SEQ ID NO: 131998 - RNA, 32 nt, Homo Sapiens
ugcuuugauauucuaauugacauggaacaagu

SEQ ID NO: 131999 - RNA, 32 nt, Homo Sapiens
guugccaaacuuuccauucagaguauuuggug

SEQ ID NO: 132000 - RNA, 32 nt, Homo Sapiens
guagcagacagaugugaagcaguggugaaggc

SEQ ID NO: 132001 - RNA, 32 nt, Homo Sapiens
cccuccacuuccuccuccuguuuggcuucugu

SEQ ID NO: 132002 - RNA, 32 nt, Homo Sapiens
uccuuccccgccggccgcgcuccggagccucc

SEQ ID NO: 132003 - RNA, 31 nt, Homo Sapiens
ccgacuauggcggcgcugcggcuccuggcgu

SEQ ID NO: 132004 - RNA, 31 nt, Homo Sapiens
agauaccauuugacucuugaugagaguugua

SEQ ID NO: 132005 - RNA, 32 nt, Homo Sapiens
cccaccccauuccuggacuccucccaccucuc

SEQ ID NO: 132006 - RNA, 32 nt, Homo Sapiens
guggugauguugaucuuaaauaaaccagagau

SEQ ID NO: 132007 - RNA, 29 nt, Homo Sapiens
ccggagucggagacugaguuuagcuuuac

SEQ ID NO: 132008 - RNA, 32 nt, Homo Sapiens
gagaaggucugugagccccauccaacacccac

SEQ ID NO: 132009 - RNA, 32 nt, Homo Sapiens
uaaaacugaggguaaauauaugcuaaauauuu

SEQ ID NO: 132010 - RNA, 32 nt, Homo Sapiens
uggucguuuuugaugcucgaugaugcugggaa

SEQ ID NO: 132011 - RNA, 32 nt, Homo Sapiens
gcugugccugacgacuccugugucccucuaug

SEQ ID NO: 132012 - RNA, 32 nt, Homo Sapiens
ugaaucaucagucuagacugacugcugcuaua

SEQ ID NO: 132013 - RNA, 32 nt, Homo Sapiens
cuuuauugugauguaauuauagaucauaauuc

SEQ ID NO: 132014 - RNA, 32 nt, Homo Sapiens
cugcaggcgcggugguuccccagcagaaccac

SEQ ID NO: 132015 - RNA, 32 nt, Homo Sapiens
cacuuuauauguguaaauaauaaaauauucaa

SEQ ID NO: 132016 - RNA, 32 nt, Homo Sapiens
ggggaggcgucccagagucucacucugccgcc

SEQ ID NO: 132017 - RNA, 32 nt, Homo Sapiens
acaaaaaugcuuuuaucuugcuauagaauaaa

SEQ ID NO: 132018 - RNA, 32 nt, Homo Sapiens
acaaguuggagucacucuuaugcuguacccag

SEQ ID NO: 132019 - RNA, 32 nt, Homo Sapiens
gaugugauaaaacauuuugugguuucucugag

SEQ ID NO: 132020 - RNA, 32 nt, Homo Sapiens
acgaucaggaggaagugagcagucgccugccu

SEQ ID NO: 132021 - RNA, 32 nt, Homo Sapiens
cacacuguaggacucacacacgacuccaacag

SEQ ID NO: 132022 - RNA, 32 nt, Homo Sapiens
uauuccuuuaaaauggugggcuuaccaucauu

SEQ ID NO: 132023 - RNA, 32 nt, Homo Sapiens
cagggaaggcagacuucugugcuuucuuuccu

SEQ ID NO: 132024 - RNA, 32 nt, Homo Sapiens
ccccgccccccgcacuccuucauagcagcagu

SEQ ID NO: 132025 - RNA, 32 nt, Homo Sapiens
uccccuaaacucccccgacccagcacagacuu

SEQ ID NO: 132026 - RNA, 32 nt, Homo Sapiens
caggcccagcucuuccucucagcgccucugca

SEQ ID NO: 132027 - RNA, 32 nt, Homo Sapiens
uuguugcuuaggaugaggagacucuguaauuu

SEQ ID NO: 132028 - RNA, 32 nt, Homo Sapiens
gacugugcuccuuauagagaauuugaucugcu

SEQ ID NO: 132029 - RNA, 32 nt, Homo Sapiens
agccccaccaaagagaaguaacaaagaaccuu

SEQ ID NO: 132030 - RNA, 32 nt, Homo Sapiens
aucagccggcgccgcgccgccggguguuacuu

SEQ ID NO: 132031 - RNA, 32 nt, Homo Sapiens
aucacuguaaaaauaaaaacaaaucacuccca

SEQ ID NO: 132032 - RNA, 31 nt, Homo Sapiens
ggcaggccaggcugccugcccccguuucccc

SEQ ID NO: 132033 - RNA, 32 nt, Homo Sapiens
uuugcaaaauuuuuuuaccuuuagcuacauuc

SEQ ID NO: 132034 - RNA, 32 nt, Homo Sapiens
aagccccaaacacaggugcacugaguaaagaa

SEQ ID NO: 132035 - RNA, 30 nt, Homo Sapiens
gcuccgggagcuggacucgcagcgaccgcg

SEQ ID NO: 132036 - RNA, 32 nt, Homo Sapiens
uauggucaaauuaacauguguacucaguugaa

SEQ ID NO: 132037 - RNA, 32 nt, Homo Sapiens
agcuggcgccuccuuggucucuaggauccagg

SEQ ID NO: 132038 - RNA, 32 nt, Homo Sapiens
uguccaaaaugaacucagcgcuucaaaaggac

SEQ ID NO: 132039 - RNA, 32 nt, Homo Sapiens
ucaucaugguuuucuuuuuuuauuguuuuuuu

SEQ ID NO: 132040 - RNA, 32 nt, Homo Sapiens
aaugacagugucaaaaaggaaaaggaauauau

SEQ ID NO: 132041 - RNA, 32 nt, Homo Sapiens
ugauccggcaaccuauaauauugcaacauuga

SEQ ID NO: 132042 - RNA, 32 nt, Homo Sapiens
ucugucuagaaaaagaguuaagggaaaucuaa

SEQ ID NO: 132043 - RNA, 32 nt, Homo Sapiens
ucccgcggcucuggagccgcccggcccggaca

SEQ ID NO: 132044 - RNA, 32 nt, Homo Sapiens
cggggguguggucgucaugcuguccgugcuug

SEQ ID NO: 132045 - RNA, 32 nt, Homo Sapiens
aggggccgccgggcuggccauggagcugcugu

SEQ ID NO: 132046 - RNA, 32 nt, Homo Sapiens
agccggccccuucacucccccaucuugcuuuu

SEQ ID NO: 132047 - RNA, 32 nt, Homo Sapiens
cccaugcuuuugggugggucccaggcccauag

SEQ ID NO: 132048 - RNA, 32 nt, Homo Sapiens
cuagucuuuccacguuccucugccugcuugua

SEQ ID NO: 132049 - RNA, 32 nt, Homo Sapiens
auguguaauuuaauuccaaauaguucccccca

SEQ ID NO: 132050 - RNA, 32 nt, Homo Sapiens
ucaccugacaacacuguugcauuggcaguuaa

SEQ ID NO: 132051 - RNA, 32 nt, Homo Sapiens
aaugaacccaagucacauuggaacacagagcu

SEQ ID NO: 132052 - RNA, 32 nt, Homo Sapiens
auuuuaaaaaauaucaaccuacaugcacuuua

SEQ ID NO: 132053 - RNA, 32 nt, Homo Sapiens
ugaccgagcacucggcgggcgcggcgggacug

SEQ ID NO: 132054 - RNA, 32 nt, Homo Sapiens
ggguaaacccucacaucagagugacauccagg

SEQ ID NO: 132055 - RNA, 32 nt, Homo Sapiens
guugauguuuggggauugaugugcucagccaa

SEQ ID NO: 132056 - RNA, 32 nt, Homo Sapiens
guaauuacuggugucauuuuguuuuaugacag

SEQ ID NO: 132057 - RNA, 32 nt, Homo Sapiens
cuaaguuauagaauguauaauuuuguacuaca

SEQ ID NO: 132058 - RNA, 32 nt, Homo Sapiens
uguguauggaccgcacuccgcggcaccuuccc

SEQ ID NO: 132059 - RNA, 32 nt, Homo Sapiens
guuuuugugaucauugacauuuagacaccaaa

SEQ ID NO: 132060 - RNA, 32 nt, Homo Sapiens
cgagcguuggcuuaguuuuguuuucccgcaca

SEQ ID NO: 132061 - RNA, 32 nt, Homo Sapiens
agguggccuggaggugggcaaagggaaguaac

SEQ ID NO: 132062 - RNA, 32 nt, Homo Sapiens
ugucggggagggcauugugaaguguggggugg

SEQ ID NO: 132063 - RNA, 32 nt, Homo Sapiens
agggacuucccucccccucuuuuccauuucuc

SEQ ID NO: 132064 - RNA, 32 nt, Homo Sapiens
ugguuucugccuaaaauuggcacauguaagua

SEQ ID NO: 132065 - RNA, 32 nt, Homo Sapiens
aauguauacaauguaguacaaacaaucucugu

SEQ ID NO: 132066 - RNA, 32 nt, Homo Sapiens
ggcaguccucacagcccucgcucgcucucggc

SEQ ID NO: 132067 - RNA, 32 nt, Homo Sapiens
gaguuauuccuccauauucaccugcuucaacu

SEQ ID NO: 132068 - RNA, 32 nt, Homo Sapiens
gggacucaagagaggaaccuggggcccgcucc

SEQ ID NO: 132069 - RNA, 32 nt, Homo Sapiens
aaggagaguuacucgacaguccauagucaacu

SEQ ID NO: 132070 - RNA, 30 nt, Homo Sapiens
uauauauggggcgaugcacagguaggagcu

SEQ ID NO: 132071 - RNA, 32 nt, Homo Sapiens
gcauacuguauauaauucuguguauuugauaa

SEQ ID NO: 132072 - RNA, 32 nt, Homo Sapiens
gacaugaaggggguuggggucugugugaguag

SEQ ID NO: 132073 - RNA, 32 nt, Homo Sapiens
cuaucagcuaugaagcuaaauuuuaaagucaa

SEQ ID NO: 132074 - RNA, 32 nt, Homo Sapiens
uuacuuuugacaaaaaauagauuuucuucuca

SEQ ID NO: 132075 - RNA, 32 nt, Homo Sapiens
uguggccuucucugucuugcugccggccuuga

SEQ ID NO: 132076 - RNA, 32 nt, Homo Sapiens
ggagccgcacacggccccggcgcgccugguag

SEQ ID NO: 132077 - RNA, 32 nt, Homo Sapiens
ccccgccccgucccauaccggccugcgccugc

SEQ ID NO: 132078 - RNA, 27 nt, Homo Sapiens
aaaauaaaaguaccuauugaacaugug

SEQ ID NO: 132079 - RNA, 32 nt, Homo Sapiens
ucaccuccaucuaugcaucucaucucuggauu

SEQ ID NO: 132080 - RNA, 32 nt, Homo Sapiens
gcgccgcuccgaccccgccgggaugcagagag

SEQ ID NO: 132081 - RNA, 32 nt, Homo Sapiens
guagcccugucccuucccugccugcagcccag

SEQ ID NO: 132082 - RNA, 32 nt, Homo Sapiens
gggccccugguggccugggggccagacccgug

SEQ ID NO: 132083 - RNA, 32 nt, Homo Sapiens
uuccucuccagcucagccgcguagguuuggac

SEQ ID NO: 132084 - RNA, 32 nt, Homo Sapiens
uagccguuccgcgcgcucgcgccggagcagcg

SEQ ID NO: 132085 - RNA, 32 nt, Homo Sapiens
ugcggccguggcggggaugcugcgaggggguc

SEQ ID NO: 132086 - RNA, 32 nt, Homo Sapiens
uggggcugcuccugggccgcggggucgggggc

SEQ ID NO: 132087 - RNA, 32 nt, Homo Sapiens
guagugucugcccugagcugccagugcugggu

SEQ ID NO: 132088 - RNA, 32 nt, Homo Sapiens
aaaaugcauccuaaccauuccauccuguuggu

SEQ ID NO: 132089 - RNA, 32 nt, Homo Sapiens
ggccgcaggacaccaugaagcaacugccaguc

SEQ ID NO: 132090 - RNA, 32 nt, Homo Sapiens
cagcagcagugaguccagugaccuccagcugg

SEQ ID NO: 132091 - RNA, 32 nt, Homo Sapiens
cuuuuuuauuauuuauacuacuauauauaaua

SEQ ID NO: 132092 - RNA, 32 nt, Homo Sapiens
cuugcaguagaaaauuugaguauaacuuuuga

SEQ ID NO: 132093 - RNA, 32 nt, Homo Sapiens
aguucuugguacuggcucugaggugcaugcag

SEQ ID NO: 132094 - RNA, 32 nt, Homo Sapiens
ugaaucagcaaauguggugccugauuauagaa

SEQ ID NO: 132095 - RNA, 32 nt, Homo Sapiens
acagcgugcgcgcgcguggccugaggcgcgcg

SEQ ID NO: 132096 - RNA, 32 nt, Homo Sapiens
cccagcccgcccagccccagguggguaguggg

SEQ ID NO: 132097 - RNA, 32 nt, Homo Sapiens
aggcuuuaaaauaaguuuuuaucguuauuuac

SEQ ID NO: 132098 - RNA, 31 nt, Homo Sapiens
aaauaucauuugaccuaagugaauguugaua

SEQ ID NO: 132099 - RNA, 32 nt, Homo Sapiens
gaagaagcccgcuaugcccccaucgcgagccc

SEQ ID NO: 132100 - RNA, 32 nt, Homo Sapiens
ugagggccuggagaccucggcuccuccugcuc

SEQ ID NO: 132101 - RNA, 32 nt, Homo Sapiens
gugucuucuguuggucauaguuuuacaucuga

SEQ ID NO: 132102 - RNA, 32 nt, Homo Sapiens
gaggcccgccgcggcugcgccauccgcggcca

SEQ ID NO: 132103 - RNA, 32 nt, Homo Sapiens
auaaagcagguagacuacuuuuuugcaucuug

SEQ ID NO: 132104 - RNA, 32 nt, Homo Sapiens
ccaccgcccucccuccccagcuccgccucugu

SEQ ID NO: 132105 - RNA, 32 nt, Homo Sapiens
cuuaagcccuccccacccccauccuauuccua

SEQ ID NO: 132106 - RNA, 32 nt, Homo Sapiens
uaacccaguuucccuuuccccuccuccaggca

SEQ ID NO: 132107 - RNA, 32 nt, Homo Sapiens
aggggagaaccggccguccgcgccgcagcaca

SEQ ID NO: 132108 - RNA, 32 nt, Homo Sapiens
uuguaaugaaaauggagagaaugaagagcgcu

SEQ ID NO: 132109 - RNA, 32 nt, Homo Sapiens
uuucauguaaaaauaaauuaacuuuucuguaa

SEQ ID NO: 132110 - RNA, 32 nt, Homo Sapiens
accauguuugaaaagcauaguugauaaaggaa

SEQ ID NO: 132111 - RNA, 32 nt, Homo Sapiens
aggguuagugauacagaugcuagcuuuuucac

SEQ ID NO: 132112 - RNA, 32 nt, Homo Sapiens
uauuagcuuuuaaugugugauuuuaagagaga

SEQ ID NO: 132113 - RNA, 32 nt, Homo Sapiens
uauuuucaccuccgaccuuuccuuccaggcgg

SEQ ID NO: 132114 - RNA, 32 nt, Homo Sapiens
caacuuaagaaaccauuauuuacuuggaugau

SEQ ID NO: 132115 - RNA, 32 nt, Homo Sapiens
cccuccccaagcagggagccugggaugggcag

SEQ ID NO: 132116 - RNA, 32 nt, Homo Sapiens
aggucauuguguuugcaauugauccuuggaga

SEQ ID NO: 132117 - RNA, 32 nt, Homo Sapiens
uucugcauuuuucagagaauagaaaugccuac

SEQ ID NO: 132118 - RNA, 32 nt, Homo Sapiens
aauuagccgggcguggcggcacgcgccuguag

SEQ ID NO: 132119 - RNA, 32 nt, Homo Sapiens
acagcccugggcucggcugccggcgccaccga

SEQ ID NO: 132120 - RNA, 32 nt, Homo Sapiens
aaaauuuacuuuuauacuauuguuauguaggg

SEQ ID NO: 132121 - RNA, 32 nt, Homo Sapiens
uggacgcaaagauaggugaucuucagcuuugc

SEQ ID NO: 132122 - RNA, 32 nt, Homo Sapiens
ugggcaccagcuuuucuggacagccuggcuuc

SEQ ID NO: 132123 - RNA, 32 nt, Homo Sapiens
aguugaagucugaguucuuaugggccaugacc

SEQ ID NO: 132124 - RNA, 32 nt, Homo Sapiens
ugcaggaaugguaugacuguguuuccuacugc

SEQ ID NO: 132125 - RNA, 32 nt, Homo Sapiens
uuuucaguucucauccucuccaucccaaucca

SEQ ID NO: 132126 - RNA, 31 nt, Homo Sapiens
gcgccccaagccaguucaucucggaguccag

SEQ ID NO: 132127 - RNA, 32 nt, Homo Sapiens
uuccgauugcauuuauuaagcaucuuucugcu

SEQ ID NO: 132128 - RNA, 32 nt, Homo Sapiens
acuguggagucucagggcugcuaucugggcca

SEQ ID NO: 132129 - RNA, 32 nt, Homo Sapiens
agguuguucaggugcugcucugucugggccag

SEQ ID NO: 132130 - RNA, 32 nt, Homo Sapiens
uuugacugaacccccaccuugaccuuggucuc

SEQ ID NO: 132131 - RNA, 32 nt, Homo Sapiens
uugagauaauuucacucuuguugcccaggcug

SEQ ID NO: 132132 - RNA, 32 nt, Homo Sapiens
ucugucucucucuguccucgucucucugcaag

SEQ ID NO: 132133 - RNA, 32 nt, Homo Sapiens
aaguggacacugggucugaggcuuuugaggac

SEQ ID NO: 132134 - RNA, 32 nt, Homo Sapiens
ucugcuggucgcggcgggaguggcguggcgca

SEQ ID NO: 132135 - RNA, 32 nt, Homo Sapiens
cuauuuacugaaugcaacauuacugcacacca

SEQ ID NO: 132136 - RNA, 32 nt, Homo Sapiens
guugguaucuuucaucaaauccagaugcaaag

SEQ ID NO: 132137 - RNA, 32 nt, Homo Sapiens
ggcaagaaauaaaauuuccuuuuguggaaaaa

SEQ ID NO: 132138 - RNA, 32 nt, Homo Sapiens
cccugugacagauccuggucuucuuucugggu

SEQ ID NO: 132139 - RNA, 32 nt, Homo Sapiens
agacuggugcuguucauucauauugggaagaa

SEQ ID NO: 132140 - RNA, 32 nt, Homo Sapiens
agccccuuccucgcccucuguacauaccauag

SEQ ID NO: 132141 - RNA, 32 nt, Homo Sapiens
acagucuuguauuuuuaccagauacuguauua

SEQ ID NO: 132142 - RNA, 32 nt, Homo Sapiens
uguguguuaggagaacucggcuuuugaaaugu

SEQ ID NO: 132143 - RNA, 32 nt, Homo Sapiens
gcuuuggcucuggcgcgggcuccagcuccuuc

SEQ ID NO: 132144 - RNA, 32 nt, Homo Sapiens
ugcuuuaucuuuuaggauuauuccuaaaugca

SEQ ID NO: 132145 - RNA, 32 nt, Homo Sapiens
gcagguccccgcuccccuccccgugcguccgc

SEQ ID NO: 132146 - RNA, 32 nt, Homo Sapiens
uugacauuccaucagauuucguccaaaagcuc

SEQ ID NO: 132147 - RNA, 32 nt, Homo Sapiens
ggaugcagagacaaggaccugcucuuaggccc

SEQ ID NO: 132148 - RNA, 32 nt, Homo Sapiens
gcaaggugggacccggcggggagggugcugcu

SEQ ID NO: 132149 - RNA, 32 nt, Homo Sapiens
aagguccccacuuucuugcugacuguaaacua

SEQ ID NO: 132150 - RNA, 32 nt, Homo Sapiens
gaccauugaaugaucagcauguugacaucauu

SEQ ID NO: 132151 - RNA, 32 nt, Homo Sapiens
aggcuggggaugggcugcugugugaauguuga

SEQ ID NO: 132152 - RNA, 32 nt, Homo Sapiens
cccugggaaucuaaacugggaauggccgagga

SEQ ID NO: 132153 - RNA, 32 nt, Homo Sapiens
gcaacaaauuuauaaauugauuauuugaaacu

SEQ ID NO: 132154 - RNA, 32 nt, Homo Sapiens
ugcuguguuugugagaagaguaggaucacaca

SEQ ID NO: 132155 - RNA, 32 nt, Homo Sapiens
cccgaauuauuuucuuaggauaugcguauaga

SEQ ID NO: 132156 - RNA, 32 nt, Homo Sapiens
uguuuuuggcuuuuucugaaauagcugagagg

SEQ ID NO: 132157 - RNA, 32 nt, Homo Sapiens
auaagcaugcacuucauacuagcaaucacagc

SEQ ID NO: 132158 - RNA, 32 nt, Homo Sapiens
aaaauucaugauuucuuccugaagccuacaga

SEQ ID NO: 132159 - RNA, 32 nt, Homo Sapiens
cucagauggaaaugaggaauaucuuauuagaa

SEQ ID NO: 132160 - RNA, 32 nt, Homo Sapiens
uuguuuuguuuuauagcccgguagaggaguua

SEQ ID NO: 132161 - RNA, 32 nt, Homo Sapiens
agugucucuugguuuucauugaggauagagua

SEQ ID NO: 132162 - RNA, 32 nt, Homo Sapiens
cacgccugggccccgcgccgggggaagcgccu

SEQ ID NO: 132163 - RNA, 32 nt, Homo Sapiens
uccugcaggcugccuccggauaguccccgaga

SEQ ID NO: 132164 - RNA, 32 nt, Homo Sapiens
cugugauuaaggugcugagaccuccugccggg

SEQ ID NO: 132165 - RNA, 32 nt, Homo Sapiens
ucugacguccaccuccuaccccauaggaguua

SEQ ID NO: 132166 - RNA, 32 nt, Homo Sapiens
ucaaaccagccuuccugcucuuucucaugcuu

SEQ ID NO: 132167 - RNA, 32 nt, Homo Sapiens
cgaggggccggcggcucuggcugcccggcggu

SEQ ID NO: 132168 - RNA, 32 nt, Homo Sapiens
gaagugaggagcuucucugcccggccgcccau

SEQ ID NO: 132169 - RNA, 32 nt, Homo Sapiens
uuuuuuuuuuuuuuuuuuuuuaagauaaaauu

SEQ ID NO: 132170 - RNA, 32 nt, Homo Sapiens
uuuuggagauaaaagcuuuaagaaacuuuuug

SEQ ID NO: 132171 - RNA, 32 nt, Homo Sapiens
aaggauaaaacacuuaaguuguugcugaguac

SEQ ID NO: 132172 - RNA, 27 nt, Homo Sapiens
cagcuggccagcuucagccaccuuggg

SEQ ID NO: 132173 - RNA, 32 nt, Homo Sapiens
agucgggcaugguggcgggcgccuguaguccc

SEQ ID NO: 132174 - RNA, 32 nt, Homo Sapiens
guaaacucugucaucauuacccuuuaucacau

SEQ ID NO: 132175 - RNA, 32 nt, Homo Sapiens
ccucugcugucucucccuguucagcuguuggc

SEQ ID NO: 132176 - RNA, 32 nt, Homo Sapiens
uuaauucuaacuuuuuaucuuuauuguugaau

SEQ ID NO: 132177 - RNA, 31 nt, Homo Sapiens
agaaaccaagccauuaaugagauguuauuac

SEQ ID NO: 132178 - RNA, 32 nt, Homo Sapiens
auacagagugauuggcaaauauuuucaagauu

SEQ ID NO: 132179 - RNA, 32 nt, Homo Sapiens
gccugguagcgacgaggacgcgccugcgcaga

SEQ ID NO: 132180 - RNA, 32 nt, Homo Sapiens
gaccaaggggaagaggugcaguggggagacca

SEQ ID NO: 132181 - RNA, 32 nt, Homo Sapiens
uacuggaccugccugcucuugugucaccauaa

SEQ ID NO: 132182 - RNA, 32 nt, Homo Sapiens
gccgaguguccuugcgcguggauccgagcgac

SEQ ID NO: 132183 - RNA, 32 nt, Homo Sapiens
agacauaauuggcagaucuuugccaucucucu

SEQ ID NO: 132184 - RNA, 32 nt, Homo Sapiens
guccggguugggggcggguuugauggggcacu

SEQ ID NO: 132185 - RNA, 32 nt, Homo Sapiens
acgcugaaggauuuugcaucugaucgcucggc

SEQ ID NO: 132186 - RNA, 32 nt, Homo Sapiens
uugaggacuacacaccaauugaagaaacugcc

SEQ ID NO: 132187 - RNA, 32 nt, Homo Sapiens
cggauuuuucuuuuuuggauuuuggaauacuc

SEQ ID NO: 132188 - RNA, 29 nt, Homo Sapiens
gcuucucauaauuacugaaagcugcaaua

SEQ ID NO: 132189 - RNA, 32 nt, Homo Sapiens
cacagagaggguggcgaccagcuguucuccau

SEQ ID NO: 132190 - RNA, 32 nt, Homo Sapiens
ggacacaccguccgucuccgggacgcccucgc

SEQ ID NO: 132191 - RNA, 32 nt, Homo Sapiens
gcugaccucuguuguccuccccuugggcggcu

SEQ ID NO: 132192 - RNA, 32 nt, Homo Sapiens
caucucaccaacggggaccuccggagagagau

SEQ ID NO: 132193 - RNA, 32 nt, Homo Sapiens
gcccugcagugcuacagcuuugagcacaccua

SEQ ID NO: 132194 - RNA, 32 nt, Homo Sapiens
uguucuaacauguggacccuuuauugucuaac

SEQ ID NO: 132195 - RNA, 32 nt, Homo Sapiens
acaugggcaccucgggaggcccgggcccugcc

SEQ ID NO: 132196 - RNA, 32 nt, Homo Sapiens
uguaguguuucauaaaaucuguaacucgcauu

SEQ ID NO: 132197 - RNA, 32 nt, Homo Sapiens
ugaggaacccgcgccaugaagugcguguuugu

SEQ ID NO: 132198 - RNA, 32 nt, Homo Sapiens
acggcugcucgaagaacaaugucagaaacucg

SEQ ID NO: 132199 - RNA, 32 nt, Homo Sapiens
cagcaggcagggugccucucuugcucaacucc

SEQ ID NO: 132200 - RNA, 32 nt, Homo Sapiens
cugcugcgcugugcuggucucuaggccugaac

SEQ ID NO: 132201 - RNA, 32 nt, Homo Sapiens
uacuuucauuuauguuuauuaucuuaaagcaa

SEQ ID NO: 132202 - RNA, 32 nt, Homo Sapiens
cggcucccgcgcacgcuccggccgucgcgcag

SEQ ID NO: 132203 - RNA, 32 nt, Homo Sapiens
uuaccuucacaccagcaguguauaggcguuuc

SEQ ID NO: 132204 - RNA, 32 nt, Homo Sapiens
cuuuccucgucccccgcucccccguccuccga

SEQ ID NO: 132205 - RNA, 32 nt, Homo Sapiens
ugaggauaucugggcaagggccccacaugccc

SEQ ID NO: 132206 - RNA, 32 nt, Homo Sapiens
aaguuaguggccacagaagagagaugaaaccu

SEQ ID NO: 132207 - RNA, 32 nt, Homo Sapiens
gugguaauuuugaaaggccuagcuccauugca

SEQ ID NO: 132208 - RNA, 32 nt, Homo Sapiens
cgcuagcacgcuuccugcucagagcagugaag

SEQ ID NO: 132209 - RNA, 32 nt, Homo Sapiens
uaacaagaucccauuucuuuccuuauugauaa

SEQ ID NO: 132210 - RNA, 30 nt, Homo Sapiens
cccggcuggccugagccgccggaggagcgg

SEQ ID NO: 132211 - RNA, 32 nt, Homo Sapiens
cacucacacuacugccugucccggcaucucuc

SEQ ID NO: 132212 - RNA, 32 nt, Homo Sapiens
gaugcuugcccuuuuuuagccagcggggccac

SEQ ID NO: 132213 - RNA, 32 nt, Homo Sapiens
ccucaggcucugaccuaugucuuugaagcagc

SEQ ID NO: 132214 - RNA, 32 nt, Homo Sapiens
uaaacuguaauacaauccuguuuauggauuug

SEQ ID NO: 132215 - RNA, 32 nt, Homo Sapiens
caaaggacuuccuagugggugugaaaggcagc

SEQ ID NO: 132216 - RNA, 32 nt, Homo Sapiens
uuucugcagggcauugguuacuucauagcauu

SEQ ID NO: 132217 - RNA, 32 nt, Homo Sapiens
cuauccccugcggcgcgagcccggggcggcuc

SEQ ID NO: 132218 - RNA, 32 nt, Homo Sapiens
cuaauuacuauagaaaaaucgaugaaguuuca

SEQ ID NO: 132219 - RNA, 28 nt, Homo Sapiens
auaauuugauaaauaauccuuugugaac

SEQ ID NO: 132220 - RNA, 32 nt, Homo Sapiens
ccaucccaaccuggcucccucccacccaacca

SEQ ID NO: 132221 - RNA, 32 nt, Homo Sapiens
agcaaacaggcagcgcgcgacaauggcggucg

SEQ ID NO: 132222 - RNA, 32 nt, Homo Sapiens
aacaccauuucucuccucuccuccuucugcuu

SEQ ID NO: 132223 - RNA, 32 nt, Homo Sapiens
cgcgccgagauguugcugcugcuguuacuggc

SEQ ID NO: 132224 - RNA, 27 nt, Homo Sapiens
uuccugaaauuugagagacaaaauaaa

SEQ ID NO: 132225 - RNA, 32 nt, Homo Sapiens
ugggaccugccagcaccguuuuugugguuagc

SEQ ID NO: 132226 - RNA, 32 nt, Homo Sapiens
cguguguuucaguuucacauuaaacugaaccu

SEQ ID NO: 132227 - RNA, 32 nt, Homo Sapiens
aucugaaauggcagccuuuauguucaucacca

SEQ ID NO: 132228 - RNA, 32 nt, Homo Sapiens
augggaaaugucaacaaguaugaauaaagaca

SEQ ID NO: 132229 - RNA, 32 nt, Homo Sapiens
gagaauugcuuuaagaagagugaauguuccaa

SEQ ID NO: 132230 - RNA, 32 nt, Homo Sapiens
ggggaggggguaaggccaagacuggguagauu

SEQ ID NO: 132231 - RNA, 32 nt, Homo Sapiens
agagagcugcugccacugcugcuaccacagga

SEQ ID NO: 132232 - RNA, 32 nt, Homo Sapiens
accuacagcucuuucucagcguuggaguggag

SEQ ID NO: 132233 - RNA, 32 nt, Homo Sapiens
acugaauuuauuucuaaguauuuuuacaguuu

SEQ ID NO: 132234 - RNA, 32 nt, Homo Sapiens
uuucuauuuuugguucacuaauuugguaguuu

SEQ ID NO: 132235 - RNA, 32 nt, Homo Sapiens
gaguuuccaagccccagcucacucugaccacu

SEQ ID NO: 132236 - RNA, 32 nt, Homo Sapiens
ggcuggggaggggguggcagggggcccugguu

SEQ ID NO: 132237 - RNA, 32 nt, Homo Sapiens
agaucaaaauaccacaucauaccccauaaaua

SEQ ID NO: 132238 - RNA, 32 nt, Homo Sapiens
aacaaauugcggacaacucucuauguacacuu

SEQ ID NO: 132239 - RNA, 32 nt, Homo Sapiens
gcaaaucguuuuugaguuuggcaauaaaggcu

SEQ ID NO: 132240 - RNA, 32 nt, Homo Sapiens
ggcucagggucucaccucacauugucccuaca

SEQ ID NO: 132241 - RNA, 32 nt, Homo Sapiens
cuugagcagaauuuucugagacugaagggaaa

SEQ ID NO: 132242 - RNA, 32 nt, Homo Sapiens
accccacugucaauucauauuugaacuuacca

SEQ ID NO: 132243 - RNA, 32 nt, Homo Sapiens
uauuagaacuaaaaaucuuaaaauacagccag

SEQ ID NO: 132244 - RNA, 32 nt, Homo Sapiens
ugcuuccuuuuugcaccuauuggguauguaca

SEQ ID NO: 132245 - RNA, 29 nt, Homo Sapiens
cuaacaauguguuucagaugggggcuggc

SEQ ID NO: 132246 - RNA, 31 nt, Homo Sapiens
ugcuuccuucuggugaaguccaccuccaaca

SEQ ID NO: 132247 - RNA, 32 nt, Homo Sapiens
gugauugguuggcucuucuuccaauugcacca

SEQ ID NO: 132248 - RNA, 32 nt, Homo Sapiens
auccccucauugcaacaaaaccuuaaacuggg

SEQ ID NO: 132249 - RNA, 32 nt, Homo Sapiens
ucuccauuuuucucuuucuccuccuggccugg

SEQ ID NO: 132250 - RNA, 31 nt, Homo Sapiens
gugcugcccccacgccugcccagcucguguu

SEQ ID NO: 132251 - RNA, 32 nt, Homo Sapiens
acugauuauuuuccucuuucuuugguaagguc

SEQ ID NO: 132252 - RNA, 32 nt, Homo Sapiens
guauggguguuggugaacuugguuuuaauuag

SEQ ID NO: 132253 - RNA, 32 nt, Homo Sapiens
gagccuucggcagcugcgggcggcggcggcgu

SEQ ID NO: 132254 - RNA, 32 nt, Homo Sapiens
agagccagccuggccuugcccagagcauacau

SEQ ID NO: 132255 - RNA, 32 nt, Homo Sapiens
uaaggaagaacuugcugcugcaguauugaaac

SEQ ID NO: 132256 - RNA, 32 nt, Homo Sapiens
agggugacggagagcuaggggaggcgcaauca

SEQ ID NO: 132257 - RNA, 32 nt, Homo Sapiens
uacacaugucauuuugugauauaggacuccca

SEQ ID NO: 132258 - RNA, 32 nt, Homo Sapiens
cacguugcgggaaagaggaagagagaguguga

SEQ ID NO: 132259 - RNA, 32 nt, Homo Sapiens
uggcaggugcuuaauuaggggacuuuguuuuc

SEQ ID NO: 132260 - RNA, 32 nt, Homo Sapiens
ucgaggcuuuugaaauguggaacuuguguguu

SEQ ID NO: 132261 - RNA, 32 nt, Homo Sapiens
cuggggccaaccccaggcugggccugcgcuga

SEQ ID NO: 132262 - RNA, 32 nt, Homo Sapiens
uaaaagaaaauauuguaagccucagcccuuug

SEQ ID NO: 132263 - RNA, 32 nt, Homo Sapiens
caaaacccacugauaggucucccaaaauguuu

SEQ ID NO: 132264 - RNA, 32 nt, Homo Sapiens
auucaaacagugaaacaaacaauaaaauaaau

SEQ ID NO: 132265 - RNA, 32 nt, Homo Sapiens
ucauaucugaagaugaaaacuaauugaaucaa

SEQ ID NO: 132266 - RNA, 32 nt, Homo Sapiens
cccucuguucccagccccagccuuucuaagcc

SEQ ID NO: 132267 - RNA, 32 nt, Homo Sapiens
ucaucuguaccgccagcuuugguguucauuaa

SEQ ID NO: 132268 - RNA, 32 nt, Homo Sapiens
agaagauagaaagaucuaagucaaaagccauu

SEQ ID NO: 132269 - RNA, 32 nt, Homo Sapiens
cgggagugcgcgcgcccgccucgcacagggcc

SEQ ID NO: 132270 - RNA, 32 nt, Homo Sapiens
ucagcucccgcacaguaaccuuuauccaaacc

SEQ ID NO: 132271 - RNA, 32 nt, Homo Sapiens
acugcguccacguggcgguggcguggggacuc

SEQ ID NO: 132272 - RNA, 32 nt, Homo Sapiens
guagagggacaguggauaggugcccgaggccu

SEQ ID NO: 132273 - RNA, 32 nt, Homo Sapiens
auuuugaaaaggaaaucuagcaugugagggga

SEQ ID NO: 132274 - RNA, 32 nt, Homo Sapiens
uuuggggacuuccgaaagcuaccagcacugca

SEQ ID NO: 132275 - RNA, 32 nt, Homo Sapiens
gugagagcgggaggagcccccgaccacacaaa

SEQ ID NO: 132276 - RNA, 32 nt, Homo Sapiens
ugcuucuuuugucugguaauagacauuggaca

SEQ ID NO: 132277 - RNA, 32 nt, Homo Sapiens
uuacaguguauauaaugguuguguuuucaugg

SEQ ID NO: 132278 - RNA, 32 nt, Homo Sapiens
ccuuuuuggcgcuuucugaagcgggacguaca

SEQ ID NO: 132279 - RNA, 32 nt, Homo Sapiens
ggcccugcagcaugcaagcacuuuuaaagagc

SEQ ID NO: 132280 - RNA, 32 nt, Homo Sapiens
ccugccaggcucaugucuuuacaccuucacuc

SEQ ID NO: 132281 - RNA, 32 nt, Homo Sapiens
aaauugaguauugauuuuuuuauauugacuuu

SEQ ID NO: 132282 - RNA, 32 nt, Homo Sapiens
acugugguuguagacaaaugugaaaguaaauu

SEQ ID NO: 132283 - RNA, 32 nt, Homo Sapiens
gauaauagauauuauuuuuucuuaugacagaa

SEQ ID NO: 132284 - RNA, 32 nt, Homo Sapiens
aggauuucuaguuucuugugggcuaauuaaau

SEQ ID NO: 132285 - RNA, 32 nt, Homo Sapiens
augacagaacagagauuugugugcucaucuua

SEQ ID NO: 132286 - RNA, 32 nt, Homo Sapiens
acagauaaaagcuauugugugaguauauugug

SEQ ID NO: 132287 - RNA, 32 nt, Homo Sapiens
auggcacuauguauauuaauguaaaacaaugu

SEQ ID NO: 132288 - RNA, 32 nt, Homo Sapiens
gaacuccagguuuuccuggagagaaccaagga

SEQ ID NO: 132289 - RNA, 32 nt, Homo Sapiens
ggaaaucugggucuuucugaaggcaucuucuu

SEQ ID NO: 132290 - RNA, 32 nt, Homo Sapiens
ugggggauugguuuuuacccuagacuucacuc

SEQ ID NO: 132291 - RNA, 32 nt, Homo Sapiens
cugauacgaaucucaagcagauuucuugcucu

SEQ ID NO: 132292 - RNA, 32 nt, Homo Sapiens
aucagcagaacagaauccuuuuccucuuuucc

SEQ ID NO: 132293 - RNA, 32 nt, Homo Sapiens
caauuuaaauuaaaaauguaauauagauucag

SEQ ID NO: 132294 - RNA, 32 nt, Homo Sapiens
ucugauugcaagcagcagcaucgcagccuaaa

SEQ ID NO: 132295 - RNA, 32 nt, Homo Sapiens
cuaacuggggacgugggcagcccugacgugau

SEQ ID NO: 132296 - RNA, 32 nt, Homo Sapiens
auccaggccccucccucuccagcaggcccaug

SEQ ID NO: 132297 - RNA, 32 nt, Homo Sapiens
aagucgcagggcccgccccgcgucugagggag

SEQ ID NO: 132298 - RNA, 32 nt, Homo Sapiens
guauaugucaaaccucuuauuaaauaugauuu

SEQ ID NO: 132299 - RNA, 32 nt, Homo Sapiens
gagauauuuuugggacauuauuuuggaaacuu

SEQ ID NO: 132300 - RNA, 32 nt, Homo Sapiens
gcagaauuuuaauaaaauucuaauuaugaugg

SEQ ID NO: 132301 - RNA, 32 nt, Homo Sapiens
uugccccuggcuaucaucauccuacauaaaau

SEQ ID NO: 132302 - RNA, 32 nt, Homo Sapiens
agcaccugucuccuuucaccccagggccugag

SEQ ID NO: 132303 - RNA, 32 nt, Homo Sapiens
acacugcccggcacgccacauccaccccuguc

SEQ ID NO: 132304 - RNA, 32 nt, Homo Sapiens
gggagcgucuggcgcgaucucugccugcuuac

SEQ ID NO: 132305 - RNA, 32 nt, Homo Sapiens
ucacaggccugggcuuccuggccugagugggu

SEQ ID NO: 132306 - RNA, 32 nt, Homo Sapiens
ucucuuccagcaucuagaugcagcuacucuca

SEQ ID NO: 132307 - RNA, 32 nt, Homo Sapiens
gucagaggcugcgagugucgcugcugaaggcu

SEQ ID NO: 132308 - RNA, 32 nt, Homo Sapiens
guuaguggcgcggcgggcggcgcggacagccg

SEQ ID NO: 132309 - RNA, 31 nt, Homo Sapiens
cagaugcuguggcugggaggaguccagacgu

SEQ ID NO: 132310 - RNA, 32 nt, Homo Sapiens
accuccucccccagccccggcucaagcaccau

SEQ ID NO: 132311 - RNA, 32 nt, Homo Sapiens
ucagaaacgucggccuggccuuguggggucag

SEQ ID NO: 132312 - RNA, 32 nt, Homo Sapiens
guugguguggugggcggagcucccagucgcau

SEQ ID NO: 132313 - RNA, 32 nt, Homo Sapiens
guggggagguggccaaggaugcuggagcugaa

SEQ ID NO: 132314 - RNA, 32 nt, Homo Sapiens
ugagugcgcugggcuuggggaagucggaagga

SEQ ID NO: 132315 - RNA, 32 nt, Homo Sapiens
ggggcauggagauaguuuuuacguacuggagg

SEQ ID NO: 132316 - RNA, 32 nt, Homo Sapiens
cuucauguacuucauuaaaaaauaacauggau

SEQ ID NO: 132317 - RNA, 29 nt, Homo Sapiens
aucuucuuuuaaaaauaccacaguuugua

SEQ ID NO: 132318 - RNA, 32 nt, Homo Sapiens
gggaacaguguuggguguaccacccaucccug

SEQ ID NO: 132319 - RNA, 32 nt, Homo Sapiens
ugaagcacugaauaaauagaucagaaugacug

SEQ ID NO: 132320 - RNA, 32 nt, Homo Sapiens
accuagaaaaagacacuggaagaagaguuugc

SEQ ID NO: 132321 - RNA, 32 nt, Homo Sapiens
gaggaggggcauucuuuggggguguucauggg

SEQ ID NO: 132322 - RNA, 32 nt, Homo Sapiens
cugcugcuggaugagcuccuggcgagcccgga

SEQ ID NO: 132323 - RNA, 32 nt, Homo Sapiens
uggaagagacccgggucgccuccggagcuuca

SEQ ID NO: 132324 - RNA, 32 nt, Homo Sapiens
uuugccacuuccuguuugauaggacagauaca

SEQ ID NO: 132325 - RNA, 32 nt, Homo Sapiens
aauauguaugaggaugaucacugaaauauuua

SEQ ID NO: 132326 - RNA, 32 nt, Homo Sapiens
guuuuugguguaaagguuaagaacuuggaauu

SEQ ID NO: 132327 - RNA, 32 nt, Homo Sapiens
ugggacuugggucuguccugcugugcguccau

SEQ ID NO: 132328 - RNA, 32 nt, Homo Sapiens
agagcccgcgcgccgcccgcuccgggugcuga

SEQ ID NO: 132329 - RNA, 32 nt, Homo Sapiens
aaaacuccagcuuuuccaagcaucauucacca

SEQ ID NO: 132330 - RNA, 32 nt, Homo Sapiens
agagcuaagcaugacagauaucaacagggcgg

SEQ ID NO: 132331 - RNA, 32 nt, Homo Sapiens
uagcugaggaggagcggggauuuggacgagag

SEQ ID NO: 132332 - RNA, 32 nt, Homo Sapiens
gggagcgugggaggcgggaguggaguggaaga

SEQ ID NO: 132333 - RNA, 31 nt, Homo Sapiens
ccacgcacgcgcucggcuccgcgcuuaaugg

SEQ ID NO: 132334 - RNA, 32 nt, Homo Sapiens
gacccuucuuguaggaaugugcuuccaguggu

SEQ ID NO: 132335 - RNA, 32 nt, Homo Sapiens
aggccuggccaggguacccuccgcggagcccg

SEQ ID NO: 132336 - RNA, 32 nt, Homo Sapiens
acacugagccagcagccuggcucucccagcca

SEQ ID NO: 132337 - RNA, 32 nt, Homo Sapiens
ugacuuugaaucuuugccuguuugucuaaaca

SEQ ID NO: 132338 - RNA, 32 nt, Homo Sapiens
ggaauuauguguauauaaaucuuugaaauauc

SEQ ID NO: 132339 - RNA, 32 nt, Homo Sapiens
gcugguccguauucugcgcagcaccgugaugg

SEQ ID NO: 132340 - RNA, 32 nt, Homo Sapiens
ucucccugaaauggggucugguccuuggucuc

SEQ ID NO: 132341 - RNA, 32 nt, Homo Sapiens
gguggaggcguucuuauaccacguuccacgga

SEQ ID NO: 132342 - RNA, 32 nt, Homo Sapiens
uuuauaaguuguauacacuuuacaauguaaaa

SEQ ID NO: 132343 - RNA, 32 nt, Homo Sapiens
agacccuggaggaggugggaucggagcugcac

SEQ ID NO: 132344 - RNA, 32 nt, Homo Sapiens
ugaauuuacuuugaaaaacaauuguaaugaau

SEQ ID NO: 132345 - RNA, 32 nt, Homo Sapiens
aauuugaaauucuuuuuuuuuaagccacauua

SEQ ID NO: 132346 - RNA, 32 nt, Homo Sapiens
ggagagauagagaacgggucaucauagggguu

SEQ ID NO: 132347 - RNA, 32 nt, Homo Sapiens
gucgcuuccagcugccagaucccgugcagucc

SEQ ID NO: 132348 - RNA, 32 nt, Homo Sapiens
ccagggcccaaccgugcaugaugacagggugc

SEQ ID NO: 132349 - RNA, 32 nt, Homo Sapiens
gucacacagagauacgcaaacacaccgaugca

SEQ ID NO: 132350 - RNA, 32 nt, Homo Sapiens
guucucugcuuucugcagacagggccuccccu

SEQ ID NO: 132351 - RNA, 32 nt, Homo Sapiens
ucucuccagcucuccgccgccgguacccacgg

SEQ ID NO: 132352 - RNA, 32 nt, Homo Sapiens
agaagaucauaaacauccuucuggagaucuug

SEQ ID NO: 132353 - RNA, 32 nt, Homo Sapiens
cuuggccauuuucauguucucugccaauuacu

SEQ ID NO: 132354 - RNA, 32 nt, Homo Sapiens
accugcccuuuccugggcaugcuuggugacuc

SEQ ID NO: 132355 - RNA, 32 nt, Homo Sapiens
aagcuccugucaaaguugugaaugcgacuuug

SEQ ID NO: 132356 - RNA, 32 nt, Homo Sapiens
cacuacacgcacccaauaaagcgaauggacca

SEQ ID NO: 132357 - RNA, 32 nt, Homo Sapiens
uuccuggagcucuccuggcccaggccuggcgg

SEQ ID NO: 132358 - RNA, 32 nt, Homo Sapiens
guagagcuggagaccaggauccguggcuugga

SEQ ID NO: 132359 - RNA, 32 nt, Homo Sapiens
accgaaggccccaacaggggaugcucaucacu

SEQ ID NO: 132360 - RNA, 29 nt, Homo Sapiens
ucuauauguugugguuauuuucuaucuua

SEQ ID NO: 132361 - RNA, 28 nt, Homo Sapiens
gucuggggcgcaggaccaacgggaccua

SEQ ID NO: 132362 - RNA, 32 nt, Homo Sapiens
augagauguacaaguaagugucuuaucuguac

SEQ ID NO: 132363 - RNA, 32 nt, Homo Sapiens
ucauauuucauuuugcagauguggccauaaaa

SEQ ID NO: 132364 - RNA, 32 nt, Homo Sapiens
ccacagggccccucuccugccuggacagcucu

SEQ ID NO: 132365 - RNA, 32 nt, Homo Sapiens
uuaaguggaucuuucuucuuugcccacagccu

SEQ ID NO: 132366 - RNA, 32 nt, Homo Sapiens
aauaaugccaguaauucagcugcuacauccaa

SEQ ID NO: 132367 - RNA, 32 nt, Homo Sapiens
aacauaggaucuguacuaauucuuacuauguc

SEQ ID NO: 132368 - RNA, 32 nt, Homo Sapiens
gguuauuuuuaaaacugauuguaucauugccu

SEQ ID NO: 132369 - RNA, 32 nt, Homo Sapiens
auuagauguuuguguaaccacuugcuuauuua

SEQ ID NO: 132370 - RNA, 32 nt, Homo Sapiens
aacaucuuggccagacacagcauuaauacagg

SEQ ID NO: 132371 - RNA, 32 nt, Homo Sapiens
gggcgcacccucgccagcccugcuggaguuug

SEQ ID NO: 132372 - RNA, 32 nt, Homo Sapiens
guuaaugaacaaacaaacuagauuugguaugu

SEQ ID NO: 132373 - RNA, 32 nt, Homo Sapiens
uuuguuuaaacuaugaaacuacacacuuaaaa

SEQ ID NO: 132374 - RNA, 32 nt, Homo Sapiens
guauauaaaguguuuuucaaagcggaaagaua

SEQ ID NO: 132375 - RNA, 32 nt, Homo Sapiens
cacuauuugggguuaugugcuggccuucgagu

SEQ ID NO: 132376 - RNA, 32 nt, Homo Sapiens
ugagaggcacagugagcuguauucacacugga

SEQ ID NO: 132377 - RNA, 29 nt, Homo Sapiens
ugcgauggcgcggacgcgggaccgcguac

SEQ ID NO: 132378 - RNA, 32 nt, Homo Sapiens
cuccuugccugccuacaaggugccugguuugc

SEQ ID NO: 132379 - RNA, 32 nt, Homo Sapiens
cccaagcugcguggagacccaggagccucggg

SEQ ID NO: 132380 - RNA, 32 nt, Homo Sapiens
gucugaacacuggccugugauugguccauucc

SEQ ID NO: 132381 - RNA, 32 nt, Homo Sapiens
ugcaucuccucccgcccuuccaugugccuuuc

SEQ ID NO: 132382 - RNA, 32 nt, Homo Sapiens
cccaaugugaaugcaucuacagaagaaacuga

SEQ ID NO: 132383 - RNA, 32 nt, Homo Sapiens
agaggcgccucccgggaaacuuccccuccacc

SEQ ID NO: 132384 - RNA, 32 nt, Homo Sapiens
ucucaccccacagauaacccaagacacaaaug

SEQ ID NO: 132385 - RNA, 32 nt, Homo Sapiens
agacuccuggccaggcgggcgcgguggcucau

SEQ ID NO: 132386 - RNA, 32 nt, Homo Sapiens
caggccauggugcacaaaagggacuuggaaaa

SEQ ID NO: 132387 - RNA, 32 nt, Homo Sapiens
uuccugcauauuguauauaccuguauauguuu

SEQ ID NO: 132388 - RNA, 27 nt, Homo Sapiens
gcauggccccacuucugagcauuaauu

SEQ ID NO: 132389 - RNA, 32 nt, Homo Sapiens
agccagcucaggugcuccccuccaccaugggc

SEQ ID NO: 132390 - RNA, 32 nt, Homo Sapiens
uauauuaaaaauuguaacuuggguguuaaaua

SEQ ID NO: 132391 - RNA, 32 nt, Homo Sapiens
gcagcaggagagaggagagggcagaacaggau

SEQ ID NO: 132392 - RNA, 32 nt, Homo Sapiens
guuugaauccgugaaaucaugccuguaaagcc

SEQ ID NO: 132393 - RNA, 32 nt, Homo Sapiens
aaaucuuaugguuuuucauaguaguuucuaag

SEQ ID NO: 132394 - RNA, 32 nt, Homo Sapiens
ccgccaccgagacugagccuccugcagacggg

SEQ ID NO: 132395 - RNA, 32 nt, Homo Sapiens
gaaacuuuuuaaaacuuugauugcaugaugua

SEQ ID NO: 132396 - RNA, 32 nt, Homo Sapiens
ggucaaggcugcagugagcugcacugcauucc

SEQ ID NO: 132397 - RNA, 32 nt, Homo Sapiens
gcgugggauguacugaagcaaaaacaccaaca

SEQ ID NO: 132398 - RNA, 32 nt, Homo Sapiens
ggguguuuucccugagagcccccucaucucug

SEQ ID NO: 132399 - RNA, 32 nt, Homo Sapiens
cgugguauggcuuuuuuaauucuuuugacagc

SEQ ID NO: 132400 - RNA, 32 nt, Homo Sapiens
aacuuuaauauauuugcugcugugacauuuca

SEQ ID NO: 132401 - RNA, 32 nt, Homo Sapiens
cugcacaauuucaccguauuaaaggcaaagca

SEQ ID NO: 132402 - RNA, 32 nt, Homo Sapiens
cggccacgccuggccccuccccacccaggagg

SEQ ID NO: 132403 - RNA, 32 nt, Homo Sapiens
ucggccagugccggggcuacccgcccuggggc

SEQ ID NO: 132404 - RNA, 32 nt, Homo Sapiens
ugcugauuggaacaccaggaggagguuggauu

SEQ ID NO: 132405 - RNA, 32 nt, Homo Sapiens
ugcaucuuauucuccuuggugucuggcccagc

SEQ ID NO: 132406 - RNA, 32 nt, Homo Sapiens
guugauuaaaauuuauuauaaggcauuacuuu

SEQ ID NO: 132407 - RNA, 32 nt, Homo Sapiens
augcagccaaaauuccuuuuuacaauuuguga

SEQ ID NO: 132408 - RNA, 32 nt, Homo Sapiens
ugugcacuuguacaguuguagcugcgagucca

SEQ ID NO: 132409 - RNA, 32 nt, Homo Sapiens
aacaugcaagauacaggaaaaaugaaaauguu

SEQ ID NO: 132410 - RNA, 32 nt, Homo Sapiens
gggcacaugcgugucggcgcacccacccagcc

SEQ ID NO: 132411 - RNA, 32 nt, Homo Sapiens
accccccagccccuccucccucagacccaggg

SEQ ID NO: 132412 - RNA, 32 nt, Homo Sapiens
cccaggccgggaagagccaccuggcagggcuc

SEQ ID NO: 132413 - RNA, 32 nt, Homo Sapiens
cuccuuccagucaugaguaaucaucaaggagc

SEQ ID NO: 132414 - RNA, 32 nt, Homo Sapiens
ucccuaaucugauacuggagucuaaauacaug

SEQ ID NO: 132415 - RNA, 32 nt, Homo Sapiens
gcaguuccuaacuucauagaaacuaaagcaga

SEQ ID NO: 132416 - RNA, 32 nt, Homo Sapiens
ccagucuucgccggccgcugcccgcugcgugu

SEQ ID NO: 132417 - RNA, 32 nt, Homo Sapiens
guaauaagaucagaggcagagaacuuugacca

SEQ ID NO: 132418 - RNA, 32 nt, Homo Sapiens
aaaaacuuaacauugaauaauagaacuuuuag

SEQ ID NO: 132419 - RNA, 32 nt, Homo Sapiens
cuccccgcugcccugcgcucggcgggcuggca

SEQ ID NO: 132420 - RNA, 32 nt, Homo Sapiens
ggccggucucaaacuccugaccucaggugaug

SEQ ID NO: 132421 - RNA, 32 nt, Homo Sapiens
cauggagcccaucgcccucccuggcggccuca

SEQ ID NO: 132422 - RNA, 32 nt, Homo Sapiens
uucggagaagcagcggcuggcgugggccaucc

SEQ ID NO: 132423 - RNA, 32 nt, Homo Sapiens
uaguaggugcggagaagaaauguuuggcagau

SEQ ID NO: 132424 - RNA, 32 nt, Homo Sapiens
cacuuugaagcaaauacaauucacagcacagu

SEQ ID NO: 132425 - RNA, 32 nt, Homo Sapiens
ccgaaugcugaauaagagacgguaagagccaa

SEQ ID NO: 132426 - RNA, 32 nt, Homo Sapiens
cgcaagcccgcgggcucuucgguggcucugcc

SEQ ID NO: 132427 - RNA, 32 nt, Homo Sapiens
uugccucugcucgacuccgagagcaggaaacc

SEQ ID NO: 132428 - RNA, 32 nt, Homo Sapiens
ccugcagcccucgccugggacagcggcgcgcu

SEQ ID NO: 132429 - RNA, 32 nt, Homo Sapiens
acuacugcauucuccuuaugugucucaggcug

SEQ ID NO: 132430 - RNA, 32 nt, Homo Sapiens
gggccacaaccacgccguuaccucuggggccu

SEQ ID NO: 132431 - RNA, 32 nt, Homo Sapiens
guaucaaauuucuauauagauuuuauaccuca

SEQ ID NO: 132432 - RNA, 32 nt, Homo Sapiens
gcccuggaacauggaggcccugcccggggcug

SEQ ID NO: 132433 - RNA, 32 nt, Homo Sapiens
gaaaaaugagaaaaccaggagcucugauacuu

SEQ ID NO: 132434 - RNA, 32 nt, Homo Sapiens
aguucaguuuuuacugaggaaauauuuccauu

SEQ ID NO: 132435 - RNA, 32 nt, Homo Sapiens
ucagcuucuggccacugggaggcgcugcuuga

SEQ ID NO: 132436 - RNA, 32 nt, Homo Sapiens
uaagauuuuuaucagcuuucucugucugaauc

SEQ ID NO: 132437 - RNA, 32 nt, Homo Sapiens
uuuauugaaaauuuauuucagagcggagaaac

SEQ ID NO: 132438 - RNA, 32 nt, Homo Sapiens
uccuggcccucccgcccccaccccucagggau

SEQ ID NO: 132439 - RNA, 32 nt, Homo Sapiens
uaucuuauuauuauguuacuguuuuuguucag

SEQ ID NO: 132440 - RNA, 32 nt, Homo Sapiens
aguccacuggggcuggccccagccaggcccug

SEQ ID NO: 132441 - RNA, 32 nt, Homo Sapiens
uccgagcagcccccagcccuccccucccaucu

SEQ ID NO: 132442 - RNA, 32 nt, Homo Sapiens
aaccccuccagaugcuuggcuaccugucagcc

SEQ ID NO: 132443 - RNA, 32 nt, Homo Sapiens
uuucccuugaguuuuuguuaaaacaaaucuua

SEQ ID NO: 132444 - RNA, 32 nt, Homo Sapiens
caggaagguuuuauuguuugcuuguuuuuugu

SEQ ID NO: 132445 - RNA, 32 nt, Homo Sapiens
cauugcagaugcacagcccuccccugcaaccc

SEQ ID NO: 132446 - RNA, 32 nt, Homo Sapiens
agaagagagauugccuggcccugcuugaaugu

SEQ ID NO: 132447 - RNA, 32 nt, Homo Sapiens
aggggaccaguagggugguuucccucucaggc

SEQ ID NO: 132448 - RNA, 32 nt, Homo Sapiens
guaauugaaaguguauuuuugguaugaagcug

SEQ ID NO: 132449 - RNA, 32 nt, Homo Sapiens
uugcugagcaaggugggcuucuccgggauuuu

SEQ ID NO: 132450 - RNA, 32 nt, Homo Sapiens
gaaaccaaacaaaacaacuucaggaaguaaca

SEQ ID NO: 132451 - RNA, 32 nt, Homo Sapiens
agcagguugaauuccuccaagguccaacaugg

SEQ ID NO: 132452 - RNA, 32 nt, Homo Sapiens
gcagucggccugguccagcugcagccucacag

SEQ ID NO: 132453 - RNA, 32 nt, Homo Sapiens
agagcgcccucauggugcuggugcuguugugu

SEQ ID NO: 132454 - RNA, 32 nt, Homo Sapiens
ucucccucgcuggccugcuccuccugcagggc

SEQ ID NO: 132455 - RNA, 32 nt, Homo Sapiens
accaauugauacuacuugcccucaacauuuuu

SEQ ID NO: 132456 - RNA, 32 nt, Homo Sapiens
ggaagaaagaacucagggcguuagaaaggauu

SEQ ID NO: 132457 - RNA, 32 nt, Homo Sapiens
aggccuacaugcuuugugaacaagucccugua

SEQ ID NO: 132458 - RNA, 31 nt, Homo Sapiens
uucuuaacucaaauaaaguccaguuuguacc

SEQ ID NO: 132459 - RNA, 32 nt, Homo Sapiens
ugccguccauucuccuuucaacucucagcccc

SEQ ID NO: 132460 - RNA, 32 nt, Homo Sapiens
guggguguuuuugucacucugaaguuuagacc

SEQ ID NO: 132461 - RNA, 32 nt, Homo Sapiens
agcgcccgccacccuguguccacagcccccac

SEQ ID NO: 132462 - RNA, 32 nt, Homo Sapiens
uagccagguucucauuagauuuugcucgggcc

SEQ ID NO: 132463 - RNA, 32 nt, Homo Sapiens
gcacgcccggugccgccuuccggcuccagucc

SEQ ID NO: 132464 - RNA, 32 nt, Homo Sapiens
uuucugaaugacuuaaauaagcuggauggauu

SEQ ID NO: 132465 - RNA, 32 nt, Homo Sapiens
cgcacuagcccucccuccauggaguucggccu

SEQ ID NO: 132466 - RNA, 32 nt, Homo Sapiens
agucucugggucugagggauggaaaguucuuc

SEQ ID NO: 132467 - RNA, 32 nt, Homo Sapiens
uacacaaaauuauuuuaacugcucuuauuaau

SEQ ID NO: 132468 - RNA, 32 nt, Homo Sapiens
ucccugugcaggucccagcguccaguccucca

SEQ ID NO: 132469 - RNA, 32 nt, Homo Sapiens
uuugcauacuuaugcaauaagauaaagguacc

SEQ ID NO: 132470 - RNA, 32 nt, Homo Sapiens
uucauaaaaauauauuuacuuugccaauaaaa

SEQ ID NO: 132471 - RNA, 32 nt, Homo Sapiens
ucccuguagaaagugaggcucagauuaaauuu

SEQ ID NO: 132472 - RNA, 32 nt, Homo Sapiens
cgggugggcagaggcaccuugcugggucugug

SEQ ID NO: 132473 - RNA, 32 nt, Homo Sapiens
aacuguaauaauaaaaaugauuuauccaauua

SEQ ID NO: 132474 - RNA, 32 nt, Homo Sapiens
agcaaagugaagaucuaggagucuguuccccu

SEQ ID NO: 132475 - RNA, 32 nt, Homo Sapiens
aucuguuuucuuucgcccagccaaaaucacag

SEQ ID NO: 132476 - RNA, 32 nt, Homo Sapiens
aggugaucucuuccuuuguucuuucaguacuu

SEQ ID NO: 132477 - RNA, 32 nt, Homo Sapiens
ccacacugggguaugccugggugaugggcacc

SEQ ID NO: 132478 - RNA, 32 nt, Homo Sapiens
cacauucuacaaaucagcuggaugccaacuua

SEQ ID NO: 132479 - RNA, 29 nt, Homo Sapiens
gaagcuuccagauccagaggcaacaggug

SEQ ID NO: 132480 - RNA, 30 nt, Homo Sapiens
ugcuuugucuguguuacaaugcuaugccua

SEQ ID NO: 132481 - RNA, 32 nt, Homo Sapiens
acccugucaccaucacaucuccaaugaaucug

SEQ ID NO: 132482 - RNA, 32 nt, Homo Sapiens
aaaguagauaucuaauuauuuaaaagaaaggc

SEQ ID NO: 132483 - RNA, 32 nt, Homo Sapiens
aauggcuauaauaaaaagucaaaaaauaacau

SEQ ID NO: 132484 - RNA, 32 nt, Homo Sapiens
cagaguauuuuuguauguacuguaagauacca

SEQ ID NO: 132485 - RNA, 32 nt, Homo Sapiens
gaagcggcgagggcggcgggcguccggcucug

SEQ ID NO: 132486 - RNA, 32 nt, Homo Sapiens
uccauggccaucacaccauuauuaaaaccucu

SEQ ID NO: 132487 - RNA, 32 nt, Homo Sapiens
gaugauacaucauugaacugcacuuuauauaa

SEQ ID NO: 132488 - RNA, 32 nt, Homo Sapiens
uccagcccuccccugcccccagcccguccccu

SEQ ID NO: 132489 - RNA, 32 nt, Homo Sapiens
agcuccuguuuggaaauggggagcuggccuag

SEQ ID NO: 132490 - RNA, 32 nt, Homo Sapiens
caggaccuggacagugagggagcccgggcagc

SEQ ID NO: 132491 - RNA, 32 nt, Homo Sapiens
ugcacucagugacaccaaauccaugauucaau

SEQ ID NO: 132492 - RNA, 32 nt, Homo Sapiens
gggcaaguuuacuuuuuuucugauguuuccua

SEQ ID NO: 132493 - RNA, 32 nt, Homo Sapiens
uggaaccugccacccaggauccugaucugccc

SEQ ID NO: 132494 - RNA, 32 nt, Homo Sapiens
ucacuugcugaauuuaaauuauuuacauauua

SEQ ID NO: 132495 - RNA, 32 nt, Homo Sapiens
ggauaaaagauaaggacagacccacgaaguca

SEQ ID NO: 132496 - RNA, 32 nt, Homo Sapiens
aucucccuguaucuagcucagacggccagggg

SEQ ID NO: 132497 - RNA, 32 nt, Homo Sapiens
ucuugguuuuugcugcugggcaggacuugacu

SEQ ID NO: 132498 - RNA, 32 nt, Homo Sapiens
agggggaccacacacacacacacacacacaca

SEQ ID NO: 132499 - RNA, 32 nt, Homo Sapiens
gaaagauguggccucaggaaaagggaugagag

SEQ ID NO: 132500 - RNA, 32 nt, Homo Sapiens
uaagccuaaaagaagaaaaacaaaaaaaauuc

SEQ ID NO: 132501 - RNA, 32 nt, Homo Sapiens
uuuugcuuuuauuugcauaugaaauuuuuauu

SEQ ID NO: 132502 - RNA, 32 nt, Homo Sapiens
ugcagaggaagaucgaugaguucuggugucgg

SEQ ID NO: 132503 - RNA, 32 nt, Homo Sapiens
gaugugacccaccagugccuucugucugcucg

SEQ ID NO: 132504 - RNA, 32 nt, Homo Sapiens
gagugaaaaaacaggaaguguauugaagcuug

SEQ ID NO: 132505 - RNA, 32 nt, Homo Sapiens
auauacuguaauucagacacucagcuucugau

SEQ ID NO: 132506 - RNA, 27 nt, Homo Sapiens
ucagcugcauuccgcagcccccacccc

SEQ ID NO: 132507 - RNA, 32 nt, Homo Sapiens
acaaguguuuguuaauuuuguagaaauuaacu

SEQ ID NO: 132508 - RNA, 32 nt, Homo Sapiens
uaugaggcagggagagggugugccgcucguac

SEQ ID NO: 132509 - RNA, 32 nt, Homo Sapiens
accaugcuuacaaagaaagcacuucuuauuga

SEQ ID NO: 132510 - RNA, 30 nt, Homo Sapiens
acgccgccucgccugccgccgcgcucgucc

SEQ ID NO: 132511 - RNA, 32 nt, Homo Sapiens
agcuguuucucggaagacccuggacaccugcu

SEQ ID NO: 132512 - RNA, 32 nt, Homo Sapiens
ugagugguggccuggggaaguugggagcucag

SEQ ID NO: 132513 - RNA, 32 nt, Homo Sapiens
uuuaaaaaggaacaguaaaaauauuaaucggu

SEQ ID NO: 132514 - RNA, 32 nt, Homo Sapiens
acauuugcacuggcuucuuguuuaggcugaau

SEQ ID NO: 132515 - RNA, 32 nt, Homo Sapiens
cugaggauuuaagggauggaaaaggaagacua

SEQ ID NO: 132516 - RNA, 32 nt, Homo Sapiens
ggguaggugagggaagcgcggaggcggggcgc

SEQ ID NO: 132517 - RNA, 32 nt, Homo Sapiens
ucgaguuuucuuugcuuucuggagcuaaaugg

SEQ ID NO: 132518 - RNA, 32 nt, Homo Sapiens
uuauuuagaugauuuaucugguaaaugaggca

SEQ ID NO: 132519 - RNA, 32 nt, Homo Sapiens
cuuugugucauucaguaaaauuuucuuuuuuc

SEQ ID NO: 132520 - RNA, 32 nt, Homo Sapiens
cgaucuccaagcauggaggaaaggcaaugccu

SEQ ID NO: 132521 - RNA, 32 nt, Homo Sapiens
guguaucucuucccuuuggcuguucaucuaca

SEQ ID NO: 132522 - RNA, 32 nt, Homo Sapiens
aaaaaagacauuuuuguuacaaaguuugcagu

SEQ ID NO: 132523 - RNA, 32 nt, Homo Sapiens
gcuucugaaaguaauaaaaaauuuuaggagaa

SEQ ID NO: 132524 - RNA, 32 nt, Homo Sapiens
guugagagaaauguggaccagugauucucagu

SEQ ID NO: 132525 - RNA, 32 nt, Homo Sapiens
guggccuugguuuugcaggagaacgaggaugg

SEQ ID NO: 132526 - RNA, 32 nt, Homo Sapiens
ggagucaccaaaaccagugcugggacaaagau

SEQ ID NO: 132527 - RNA, 32 nt, Homo Sapiens
uuuccugugugaagaaagccucagugaaacag

SEQ ID NO: 132528 - RNA, 32 nt, Homo Sapiens
cuuuacugccagccuugaggagagcagaagcc

SEQ ID NO: 132529 - RNA, 32 nt, Homo Sapiens
agagaagacagcugaggaugccaaggacuucu

SEQ ID NO: 132530 - RNA, 32 nt, Homo Sapiens
uugugggcacacugccuauggguagcccugcu

SEQ ID NO: 132531 - RNA, 32 nt, Homo Sapiens
gaaaccugagaaaugcuaauggagauuugcug

SEQ ID NO: 132532 - RNA, 32 nt, Homo Sapiens
uguaaugacagucuguuguucuauuucaauau

SEQ ID NO: 132533 - RNA, 32 nt, Homo Sapiens
ucucguggacacugcuggcuugcgggcagucg

SEQ ID NO: 132534 - RNA, 32 nt, Homo Sapiens
cugcucuucccucccccgccauagcuaagaug

SEQ ID NO: 132535 - RNA, 32 nt, Homo Sapiens
uauacuuuugugaacaaaaauugagacauuua

SEQ ID NO: 132536 - RNA, 32 nt, Homo Sapiens
ccgcggacggucuugggucgccugcugccugg

SEQ ID NO: 132537 - RNA, 32 nt, Homo Sapiens
ucuaccgacccuguuggcaagucuguaccugu

SEQ ID NO: 132538 - RNA, 32 nt, Homo Sapiens
cccagaaauaguauuucuuauuuaaacauuca

SEQ ID NO: 132539 - RNA, 32 nt, Homo Sapiens
ccauucuuguugcucuucuguguaaugaaguu

SEQ ID NO: 132540 - RNA, 32 nt, Homo Sapiens
uggucuauaacuccaaauaaacaaugcaacgu

SEQ ID NO: 132541 - RNA, 30 nt, Homo Sapiens
aaacucuguguugcugcaggguuugaacuu

SEQ ID NO: 132542 - RNA, 32 nt, Homo Sapiens
uagccccuggaacagugucaagccaaggccug

SEQ ID NO: 132543 - RNA, 32 nt, Homo Sapiens
ggaagagaaugggagacaaaggaccuggugau

SEQ ID NO: 132544 - RNA, 32 nt, Homo Sapiens
uuaggcauuucccucuugaccuccuaauggag

SEQ ID NO: 132545 - RNA, 32 nt, Homo Sapiens
agguguuaaugaucaagguagugguugagugg

SEQ ID NO: 132546 - RNA, 32 nt, Homo Sapiens
aggugcuguuuggcacagaauuuaauagggaa

SEQ ID NO: 132547 - RNA, 32 nt, Homo Sapiens
gcauaugaucaaaauacccacuuuuugauagc

SEQ ID NO: 132548 - RNA, 32 nt, Homo Sapiens
uaguacuuuguguuaaaugagcuaauuaagag

SEQ ID NO: 132549 - RNA, 32 nt, Homo Sapiens
cagugccuacacaaccugauaauccauuuucu

SEQ ID NO: 132550 - RNA, 32 nt, Homo Sapiens
auaagaggaaaauuauguuaugaagugcagga

SEQ ID NO: 132551 - RNA, 32 nt, Homo Sapiens
aagugaucagccuguccgauuccuccucccuc

SEQ ID NO: 132552 - RNA, 32 nt, Homo Sapiens
uaacagaaauacaucauauguuagauacacaa

SEQ ID NO: 132553 - RNA, 32 nt, Homo Sapiens
ugaagaacucaaaaaaacuuugaaaacuucag

SEQ ID NO: 132554 - RNA, 31 nt, Homo Sapiens
auuccuggggucuucaucugaguuaaauucu

SEQ ID NO: 132555 - RNA, 32 nt, Homo Sapiens
gaaaguuaaaagaauaaagacauuucuuuugg

SEQ ID NO: 132556 - RNA, 32 nt, Homo Sapiens
ccccugagugcuccccucccccugcagguccc

SEQ ID NO: 132557 - RNA, 32 nt, Homo Sapiens
aagaauggggccuggggcucucagggagaacu

SEQ ID NO: 132558 - RNA, 32 nt, Homo Sapiens
ccguuggcucuucaggccuccucaccucccac

SEQ ID NO: 132559 - RNA, 32 nt, Homo Sapiens
ggcucgaggggugggcugguaucucagaaagu

SEQ ID NO: 132560 - RNA, 32 nt, Homo Sapiens
gucucagccucugccagcgccagcgccaaaac

SEQ ID NO: 132561 - RNA, 32 nt, Homo Sapiens
guaacauaucaagauacauuuauuuuuaucug

SEQ ID NO: 132562 - RNA, 32 nt, Homo Sapiens
gaauaaaacaucuauuuuaaaaaugaaaaaaa

SEQ ID NO: 132563 - RNA, 32 nt, Homo Sapiens
ugugcaccuuggaugcacacgaugcaacuuau

SEQ ID NO: 132564 - RNA, 32 nt, Homo Sapiens
aauccguucagacccuccauggagaaguuugg

SEQ ID NO: 132565 - RNA, 32 nt, Homo Sapiens
gacagucagaucugcauuuaucuuagugagca

SEQ ID NO: 132566 - RNA, 32 nt, Homo Sapiens
ccuggaggucaucucccuguucucuguuggau

SEQ ID NO: 132567 - RNA, 32 nt, Homo Sapiens
cuucccuucacucucagacucccccacccccu

SEQ ID NO: 132568 - RNA, 32 nt, Homo Sapiens
ugcauggcgacggcgugugguggggcagucag

SEQ ID NO: 132569 - RNA, 32 nt, Homo Sapiens
augacaaauagaaaggcagagaaggaacuaag

SEQ ID NO: 132570 - RNA, 32 nt, Homo Sapiens
aggaaaaagcauugcaaaauuuucuguucugu

SEQ ID NO: 132571 - RNA, 32 nt, Homo Sapiens
cccacguuauuuauauaaaguaucucagugua

SEQ ID NO: 132572 - RNA, 32 nt, Homo Sapiens
gcggggggacgucugcggcccgcgucggcgcu

SEQ ID NO: 132573 - RNA, 32 nt, Homo Sapiens
gaugggacccagggagaguccuguggggauac

SEQ ID NO: 132574 - RNA, 32 nt, Homo Sapiens
aucgcgacgcuauuggggcuggagcacccagc

SEQ ID NO: 132575 - RNA, 32 nt, Homo Sapiens
ccagccugggagaggccaagggcugccuccua

SEQ ID NO: 132576 - RNA, 32 nt, Homo Sapiens
acucuuacaccuguuauggaaaaugucaaccu

SEQ ID NO: 132577 - RNA, 32 nt, Homo Sapiens
cuguuaucuacauugccuggaccuuguucuug

SEQ ID NO: 132578 - RNA, 32 nt, Homo Sapiens
agaguaaauaccauguuuagaagauguuuugu

SEQ ID NO: 132579 - RNA, 32 nt, Homo Sapiens
auggauuguggguuauuuauucaacugaagcc

SEQ ID NO: 132580 - RNA, 32 nt, Homo Sapiens
aacuaguugcugucucaauauccauuccuccc

SEQ ID NO: 132581 - RNA, 32 nt, Homo Sapiens
agagacacguggaccccgugccucgaaacagg

SEQ ID NO: 132582 - RNA, 32 nt, Homo Sapiens
gucuggagugaacaucuccuccccuucaugcc

SEQ ID NO: 132583 - RNA, 32 nt, Homo Sapiens
aggggaggggguagauucggcagcacucgggu

SEQ ID NO: 132584 - RNA, 32 nt, Homo Sapiens
auggacuguucauuugaaaccuuuuucuaguu

SEQ ID NO: 132585 - RNA, 32 nt, Homo Sapiens
gagaguugggcuggagagaaaagcaguuuuau

SEQ ID NO: 132586 - RNA, 32 nt, Homo Sapiens
acacgccccguccacaguggcaucacccucuu

SEQ ID NO: 132587 - RNA, 32 nt, Homo Sapiens
gaccccccucgcccggccccgcgacagccucc

SEQ ID NO: 132588 - RNA, 32 nt, Homo Sapiens
uaacguggcucuuuuuauauggcaugguucau

SEQ ID NO: 132589 - RNA, 32 nt, Homo Sapiens
accccucccucucuagaacccccucaguguag

SEQ ID NO: 132590 - RNA, 32 nt, Homo Sapiens
aaaaaaccugacgcugcggucacuuagcagag

SEQ ID NO: 132591 - RNA, 32 nt, Homo Sapiens
agagaacugggggugccuggaggagaugcuga

SEQ ID NO: 132592 - RNA, 32 nt, Homo Sapiens
uacucuccuacgaaccuccuaccuguuggcca

SEQ ID NO: 132593 - RNA, 32 nt, Homo Sapiens
guauugcuuagaauaugacaugcugaaccagg

SEQ ID NO: 132594 - RNA, 32 nt, Homo Sapiens
agaucuuguagauguggccaguggaguagaag

SEQ ID NO: 132595 - RNA, 30 nt, Homo Sapiens
gcguacggagguggcagcugugggaggagg

SEQ ID NO: 132596 - RNA, 29 nt, Homo Sapiens
uguacucccuugugaucuauaaaagauuu

SEQ ID NO: 132597 - RNA, 31 nt, Homo Sapiens
ucuggggagcgcagcagccauggcaagccgu

SEQ ID NO: 132598 - RNA, 32 nt, Homo Sapiens
aaagaggaagcagcuuuagagaaagcaccaca

SEQ ID NO: 132599 - RNA, 32 nt, Homo Sapiens
ccauccccugaucccacgucuuucuccaugag

SEQ ID NO: 132600 - RNA, 32 nt, Homo Sapiens
auguaguuauuuaaaaaagcaaugaacaauuu

SEQ ID NO: 132601 - RNA, 32 nt, Homo Sapiens
ggcccggcucccagccccucgccguccuccgg

SEQ ID NO: 132602 - RNA, 30 nt, Homo Sapiens
gaagagaacgcgcuugauggauagagcgcc

SEQ ID NO: 132603 - RNA, 32 nt, Homo Sapiens
gagcguacaaauauaacuuaaauaaacauccu

SEQ ID NO: 132604 - RNA, 32 nt, Homo Sapiens
ugggcagugggcauuuacugcugcucuuuaac

SEQ ID NO: 132605 - RNA, 32 nt, Homo Sapiens
auggaacaaaacuaaguuuauuagauuuacug

SEQ ID NO: 132606 - RNA, 32 nt, Homo Sapiens
gcuacagucagugccuucagcucugagcucag

SEQ ID NO: 132607 - RNA, 32 nt, Homo Sapiens
aguccgggcccgucccuccgcggccccauccg

SEQ ID NO: 132608 - RNA, 32 nt, Homo Sapiens
uugcauggagaauggacgaggacauuuguggg

SEQ ID NO: 132609 - RNA, 32 nt, Homo Sapiens
gggccguguguuuccaggucugcacagaccga

SEQ ID NO: 132610 - RNA, 32 nt, Homo Sapiens
cugccuguucaucccggcucacucccuggucc

SEQ ID NO: 132611 - RNA, 30 nt, Homo Sapiens
uuccagaauaucccuagaugaugaauuuaa

SEQ ID NO: 132612 - RNA, 32 nt, Homo Sapiens
uuagaucaaugagugcgggaauucuaaaaggg

SEQ ID NO: 132613 - RNA, 32 nt, Homo Sapiens
ccuggagagccggggcuggcggugccugagga

SEQ ID NO: 132614 - RNA, 32 nt, Homo Sapiens
uuuuaucacuaaaaguuggacucauugaugga

SEQ ID NO: 132615 - RNA, 32 nt, Homo Sapiens
ugaucaaaauuugcucucccaccaagaaaaug

SEQ ID NO: 132616 - RNA, 32 nt, Homo Sapiens
uccccacgccgggaaccaagcaggagacgaca

SEQ ID NO: 132617 - RNA, 32 nt, Homo Sapiens
agcuccgccucccagguucaagugauucuccu

SEQ ID NO: 132618 - RNA, 32 nt, Homo Sapiens
aagcuucauguugacucuauauaucaucuaag

SEQ ID NO: 132619 - RNA, 32 nt, Homo Sapiens
aaacaacaacaacaacaacauaaaaauccuug

SEQ ID NO: 132620 - RNA, 32 nt, Homo Sapiens
uuuuuuuuuuuuuuuucuuuuuaacuuuuuuu

SEQ ID NO: 132621 - RNA, 32 nt, Homo Sapiens
agguuguuuccaauuuuucauuauuaucagug

SEQ ID NO: 132622 - RNA, 32 nt, Homo Sapiens
gccccggggaccgcggacgccuggccaggaga

SEQ ID NO: 132623 - RNA, 32 nt, Homo Sapiens
gggaagacuguugccggaugacaaggcuguca

SEQ ID NO: 132624 - RNA, 32 nt, Homo Sapiens
aaggaaaauauuaccugggaauuaaaaaauau

SEQ ID NO: 132625 - RNA, 32 nt, Homo Sapiens
ccacggcggaagcucccuuggaggcagcccug

SEQ ID NO: 132626 - RNA, 32 nt, Homo Sapiens
uggaucgggcccccguaguccuggcagcccug

SEQ ID NO: 132627 - RNA, 31 nt, Homo Sapiens
caugcugcagccuuugcaggagucagggauc

SEQ ID NO: 132628 - RNA, 30 nt, Homo Sapiens
caucggcgacggcucccgccggcugggcgu

SEQ ID NO: 132629 - RNA, 32 nt, Homo Sapiens
acuugccccuuuguauaacaguucucauguau

SEQ ID NO: 132630 - RNA, 32 nt, Homo Sapiens
cccucccuggcaugucagagccaggcucugcc

SEQ ID NO: 132631 - RNA, 32 nt, Homo Sapiens
gcugggugaugucccccggcccggguucuggg

SEQ ID NO: 132632 - RNA, 32 nt, Homo Sapiens
guguuucggagguugccuuuuggaccuaccac

SEQ ID NO: 132633 - RNA, 32 nt, Homo Sapiens
ggcgcuuggcugguggggcccgcggcgggauu

SEQ ID NO: 132634 - RNA, 32 nt, Homo Sapiens
ugcgcacgggugugcuggccucccugggccgc

SEQ ID NO: 132635 - RNA, 32 nt, Homo Sapiens
ccccuaugcgcgcgcugccgcgacgagacgca

SEQ ID NO: 132636 - RNA, 32 nt, Homo Sapiens
ccccagcagaaucuggaugaauggcacagaau

SEQ ID NO: 132637 - RNA, 32 nt, Homo Sapiens
aagauggacaccuuuucccacgcuguuucgcu

SEQ ID NO: 132638 - RNA, 32 nt, Homo Sapiens
uuuuuuauuguaauaaaggcaggugcuauuuu

SEQ ID NO: 132639 - RNA, 32 nt, Homo Sapiens
ucccacugucagauuauauuaucuaacaauug

SEQ ID NO: 132640 - RNA, 32 nt, Homo Sapiens
uggagggguuucaagacuagaaacuguucuua

SEQ ID NO: 132641 - RNA, 32 nt, Homo Sapiens
uaaagucggggcggggcggcgguccucccccu

SEQ ID NO: 132642 - RNA, 32 nt, Homo Sapiens
agaaucaugcuuuuuaauuuaagauuuuuauu

SEQ ID NO: 132643 - RNA, 32 nt, Homo Sapiens
acuccuggguggccugggggcccccacccugc

SEQ ID NO: 132644 - RNA, 28 nt, Homo Sapiens
acuguggcgaggccgccgcccaguggau

SEQ ID NO: 132645 - RNA, 32 nt, Homo Sapiens
aaaaaucaaaaaauuucacauaaaaaucugga

SEQ ID NO: 132646 - RNA, 32 nt, Homo Sapiens
ucccaagaccuggcagauguggcugcucaaua

SEQ ID NO: 132647 - RNA, 32 nt, Homo Sapiens
ggcgccgcggcacguccacaggcugggucgcg

SEQ ID NO: 132648 - RNA, 32 nt, Homo Sapiens
cccauuaaauuaagacuugugcaugaucaaaa

SEQ ID NO: 132649 - RNA, 32 nt, Homo Sapiens
gagccugagcccaacccacaucacuauucuuc

SEQ ID NO: 132650 - RNA, 32 nt, Homo Sapiens
uuaucugucugauguugcaguauucuacaagu

SEQ ID NO: 132651 - RNA, 31 nt, Homo Sapiens
ggcugccgagccaccaugcuugccugaagcu

SEQ ID NO: 132652 - RNA, 32 nt, Homo Sapiens
uuguauugccuggcuuugaauuuugaggaauu

SEQ ID NO: 132653 - RNA, 32 nt, Homo Sapiens
ucuuacuaaugaaaauaauguuuucccauaua

SEQ ID NO: 132654 - RNA, 32 nt, Homo Sapiens
ccggcuguguccccggcgccccggaccacccu

SEQ ID NO: 132655 - RNA, 32 nt, Homo Sapiens
ccggccuggccgcucccggcccuggggugcac

SEQ ID NO: 132656 - RNA, 32 nt, Homo Sapiens
ucgcugaccaccccaaaucggauacguccaga

SEQ ID NO: 132657 - RNA, 32 nt, Homo Sapiens
ggcuaauauugcugaggccuuaaaggaaaugg

SEQ ID NO: 132658 - RNA, 32 nt, Homo Sapiens
ggugcagcacaccaacauggcacauguauaca

SEQ ID NO: 132659 - RNA, 31 nt, Homo Sapiens
accaggagggcgggcugcugaccgcggcguu

SEQ ID NO: 132660 - RNA, 32 nt, Homo Sapiens
ugcgcuggacccgaccccgagggcgggcgcaa

SEQ ID NO: 132661 - RNA, 32 nt, Homo Sapiens
gagcucuggagaccaccccccauccccugacc

SEQ ID NO: 132662 - RNA, 32 nt, Homo Sapiens
aagccaccaauccauuuuguggauuuuaugug

SEQ ID NO: 132663 - RNA, 32 nt, Homo Sapiens
aggauauagaaggcauuuuagcacuaauggaa

SEQ ID NO: 132664 - RNA, 32 nt, Homo Sapiens
acuuuauuucuuuuuucauccagguguuucau

SEQ ID NO: 132665 - RNA, 32 nt, Homo Sapiens
aauaaaucaggagaacaggaguuugaugaugc

SEQ ID NO: 132666 - RNA, 32 nt, Homo Sapiens
ugguugucauuuuuauuucaccaccauaaaac

SEQ ID NO: 132667 - RNA, 32 nt, Homo Sapiens
acaacaaauauuaaagcaaggaaaaguguaac

SEQ ID NO: 132668 - RNA, 32 nt, Homo Sapiens
acacuaaaccucaaccguuaaagcagaugcaa

SEQ ID NO: 132669 - RNA, 28 nt, Homo Sapiens
cacgcugcugucagcauguguuuucaaa

SEQ ID NO: 132670 - RNA, 30 nt, Homo Sapiens
uguagauacuuccugcccuaacucugccca

SEQ ID NO: 132671 - RNA, 32 nt, Homo Sapiens
aggggccgagaccacaguacuucugaaggggg

SEQ ID NO: 132672 - RNA, 32 nt, Homo Sapiens
cacaucccggcacagacagacacacacgaggc

SEQ ID NO: 132673 - RNA, 32 nt, Homo Sapiens
accccagccucccugcccauccuuccacugca

SEQ ID NO: 132674 - RNA, 32 nt, Homo Sapiens
cugagagaacagaagguguaacugcauuugaa

SEQ ID NO: 132675 - RNA, 32 nt, Homo Sapiens
aaugaaccauaaauuuuggaacuuccuuucag

SEQ ID NO: 132676 - RNA, 31 nt, Homo Sapiens
ggcugccaagccaugguaacuggaguuaaca

SEQ ID NO: 132677 - RNA, 32 nt, Homo Sapiens
gacuggcccuccccuccccacagcugcucuac

SEQ ID NO: 132678 - RNA, 32 nt, Homo Sapiens
cacaaggacaaguuuaaucugcuucagaaagc

SEQ ID NO: 132679 - RNA, 32 nt, Homo Sapiens
gucggcgcggaacccuggccucguccgcggcc

SEQ ID NO: 132680 - RNA, 32 nt, Homo Sapiens
gaaggugcagauucaaagugagcggcuccuga

SEQ ID NO: 132681 - RNA, 32 nt, Homo Sapiens
ugcggucugaauguaucccuccccucaguuuu

SEQ ID NO: 132682 - RNA, 32 nt, Homo Sapiens
gaguagaaggcacaacugguuugauaguuacu

SEQ ID NO: 132683 - RNA, 31 nt, Homo Sapiens
caucuuggacauaauuaauauuauaguaagc

SEQ ID NO: 132684 - RNA, 32 nt, Homo Sapiens
cugcuuacgaacagcaguucucagaagcuagc

SEQ ID NO: 132685 - RNA, 32 nt, Homo Sapiens
caggaacucuggaguucaucagaguuauggug

SEQ ID NO: 132686 - RNA, 32 nt, Homo Sapiens
cuuuccagugugaccuagggugaugaguucac

SEQ ID NO: 132687 - RNA, 32 nt, Homo Sapiens
ggcggaggccgcggcgcugguguggauucgcg

SEQ ID NO: 132688 - RNA, 32 nt, Homo Sapiens
caggccccucucugcaucuacuggaguggucc

SEQ ID NO: 132689 - RNA, 32 nt, Homo Sapiens
cggggggaaggaaaaugcaacauggcagcagc

SEQ ID NO: 132690 - RNA, 32 nt, Homo Sapiens
cugaggccuucgggagcuuucccgaggcaguu

SEQ ID NO: 132691 - RNA, 32 nt, Homo Sapiens
aagcaagaacuaauggcuaaauuaucaacuug

SEQ ID NO: 132692 - RNA, 32 nt, Homo Sapiens
uuuuuuauuuauuauuuuuucuuuuugagaug

SEQ ID NO: 132693 - RNA, 32 nt, Homo Sapiens
cugcgcugcgcagggcgcuaggaggcauuguc

SEQ ID NO: 132694 - RNA, 32 nt, Homo Sapiens
agaugaugagaaaaugccaaacaaagggaggc

SEQ ID NO: 132695 - RNA, 32 nt, Homo Sapiens
agcacaaaggauuugaguaggaagaugaccag

SEQ ID NO: 132696 - RNA, 32 nt, Homo Sapiens
cuggaaucaaggaauccugagucugggcaaug

SEQ ID NO: 132697 - RNA, 30 nt, Homo Sapiens
uucuguggagguggaaaagcaacauucaua

SEQ ID NO: 132698 - RNA, 32 nt, Homo Sapiens
caauggugaacaugcugcauuuuauguuugga

SEQ ID NO: 132699 - RNA, 32 nt, Homo Sapiens
guuuuugcauuacaggcugcauucuugccuua

SEQ ID NO: 132700 - RNA, 32 nt, Homo Sapiens
cuccuuuggagcaaagaaggagcugagaacaa

SEQ ID NO: 132701 - RNA, 32 nt, Homo Sapiens
ugaaaaucugccggcaagccuaccacacucaa

SEQ ID NO: 132702 - RNA, 32 nt, Homo Sapiens
gacuguccagcauccaagacguuucgguuaug

SEQ ID NO: 132703 - RNA, 32 nt, Homo Sapiens
auuaaucagggugcauuuuaaguucuaacuuc

SEQ ID NO: 132704 - RNA, 32 nt, Homo Sapiens
aacuagcugggugugguggcgcaugccuguag

SEQ ID NO: 132705 - RNA, 32 nt, Homo Sapiens
gcugcccugcaccuccgcagaccugcugugau

SEQ ID NO: 132706 - RNA, 32 nt, Homo Sapiens
uagaaaaggcagguggugggcggcuggcaggg

SEQ ID NO: 132707 - RNA, 32 nt, Homo Sapiens
aggcugaacugagccaggaucuugccaccaca

SEQ ID NO: 132708 - RNA, 32 nt, Homo Sapiens
uuuucagcugucugccuaugaaguucauugug

SEQ ID NO: 132709 - RNA, 32 nt, Homo Sapiens
gcccacagagagaucugggaaggaagggcucc

SEQ ID NO: 132710 - RNA, 31 nt, Homo Sapiens
acugccagaugcugauguucaguguaauuuc

SEQ ID NO: 132711 - RNA, 32 nt, Homo Sapiens
gcacuucucaacuuaaaaccauuucuggcauu

SEQ ID NO: 132712 - RNA, 32 nt, Homo Sapiens
ccagaaacagagccugccccgagccuggucac

SEQ ID NO: 132713 - RNA, 32 nt, Homo Sapiens
cagcacacaaggaaagccaaagccauuugagg

SEQ ID NO: 132714 - RNA, 32 nt, Homo Sapiens
uauuauuauuauuauuuuugagguggaguuuc

SEQ ID NO: 132715 - RNA, 32 nt, Homo Sapiens
guaacauacaauuuuuaagagcuuauauggca

SEQ ID NO: 132716 - RNA, 32 nt, Homo Sapiens
ccuucugcaaggggccugcagaugaaaggaaa

SEQ ID NO: 132717 - RNA, 32 nt, Homo Sapiens
agggcgggaaaggggccacuucuggcuuuguu

SEQ ID NO: 132718 - RNA, 32 nt, Homo Sapiens
uaugaacagaucugauuucuuacagagaggca

SEQ ID NO: 132719 - RNA, 32 nt, Homo Sapiens
gaccaaagcccgcgcgcagcugcaucccgcau

SEQ ID NO: 132720 - RNA, 32 nt, Homo Sapiens
agcuagagaggcgggcaagcaguuggcuucgc

SEQ ID NO: 132721 - RNA, 32 nt, Homo Sapiens
acagaacuguauuaaacuuaucuacuggaccc

SEQ ID NO: 132722 - RNA, 32 nt, Homo Sapiens
gaggccuccgcuaacuguucucuucuuuuccu

SEQ ID NO: 132723 - RNA, 32 nt, Homo Sapiens
ccugcucuccagugauucuguagcuccuggcu

SEQ ID NO: 132724 - RNA, 32 nt, Homo Sapiens
aaaguuccaaauaauccauagacagucaaaga

SEQ ID NO: 132725 - RNA, 32 nt, Homo Sapiens
gguucuggccccagcacgcguugcggcagccu

SEQ ID NO: 132726 - RNA, 32 nt, Homo Sapiens
caagcaggggagaggaaugaggggagcagcug

SEQ ID NO: 132727 - RNA, 32 nt, Homo Sapiens
uuuguagcuuucugguuauuuaauuuuauagu

SEQ ID NO: 132728 - RNA, 32 nt, Homo Sapiens
ccaguguucccucucucccuccagggccacug

SEQ ID NO: 132729 - RNA, 32 nt, Homo Sapiens
uccaguggggucucaguccaguccucacaugc

SEQ ID NO: 132730 - RNA, 32 nt, Homo Sapiens
uuaggcccaggagaacaaaacaaaacaaacac

SEQ ID NO: 132731 - RNA, 32 nt, Homo Sapiens
uccuuuuguuuuucuuuuuuuuuuguuuguua

SEQ ID NO: 132732 - RNA, 32 nt, Homo Sapiens
aagcugaugacgcauuaauguaaaaauggaac

SEQ ID NO: 132733 - RNA, 31 nt, Homo Sapiens
accugugggagguuaagaggagucccuucug

SEQ ID NO: 132734 - RNA, 32 nt, Homo Sapiens
cacagaaaacgcuuuauuagugaaccuuggga

SEQ ID NO: 132735 - RNA, 32 nt, Homo Sapiens
agauucauuaaaaacuagcugcucuuaaaaaa

SEQ ID NO: 132736 - RNA, 32 nt, Homo Sapiens
acuuuggcauuugggggacugguggcauggca

SEQ ID NO: 132737 - RNA, 32 nt, Homo Sapiens
aguggaggccgcggccuggcuggcacgagagc

SEQ ID NO: 132738 - RNA, 32 nt, Homo Sapiens
aggcagaauggaggaggcagguuuagggucug

SEQ ID NO: 132739 - RNA, 32 nt, Homo Sapiens
gcagagaccgccuuuacccgccccgcguggga

SEQ ID NO: 132740 - RNA, 32 nt, Homo Sapiens
ccucaguguguccccgcuacuuauuugugggu

SEQ ID NO: 132741 - RNA, 32 nt, Homo Sapiens
ugagcaugccagcacaugaugcaugcacaggu

SEQ ID NO: 132742 - RNA, 31 nt, Homo Sapiens
gcagggaugcugcacuccaugagccggcugu

SEQ ID NO: 132743 - RNA, 32 nt, Homo Sapiens
uggaaccagucgcgucccacuugacacagcac

SEQ ID NO: 132744 - RNA, 32 nt, Homo Sapiens
augggagcugucaucacuuccacuuuguaaac

SEQ ID NO: 132745 - RNA, 32 nt, Homo Sapiens
acuaguaugugcuuuaagacgggaaugcccuu

SEQ ID NO: 132746 - RNA, 32 nt, Homo Sapiens
cagcagagguuaauauacuaaaauuaaagggu

SEQ ID NO: 132747 - RNA, 30 nt, Homo Sapiens
ccagguggcaggcgcgcccguugggcacug

SEQ ID NO: 132748 - RNA, 32 nt, Homo Sapiens
gcccgaggcagacgucugucaggggcuuggau

SEQ ID NO: 132749 - RNA, 32 nt, Homo Sapiens
gugucuccaccucggggaccaaggacgccucc

SEQ ID NO: 132750 - RNA, 32 nt, Homo Sapiens
gcgggaggcgcugcgaggcgcugcuggcccuc

SEQ ID NO: 132751 - RNA, 32 nt, Homo Sapiens
aggucugggaccagucuucaguauaaucucag

SEQ ID NO: 132752 - RNA, 32 nt, Homo Sapiens
gguggaaaauauagacugcaaacaagugcuug

SEQ ID NO: 132753 - RNA, 32 nt, Homo Sapiens
gcucggcgggagaggugcgggccgaauccgag

SEQ ID NO: 132754 - RNA, 32 nt, Homo Sapiens
acacucauauuucauauuuuuauuuuugggug

SEQ ID NO: 132755 - RNA, 32 nt, Homo Sapiens
cagcucugaugagagagugcugagaaggacac

SEQ ID NO: 132756 - RNA, 32 nt, Homo Sapiens
ggccacugucuccuuuuauauauuauuauaau

SEQ ID NO: 132757 - RNA, 32 nt, Homo Sapiens
accagccucaacauggagaaaccccgucucua

SEQ ID NO: 132758 - RNA, 32 nt, Homo Sapiens
agaaccacuuuucucucggucucguuaaguca

SEQ ID NO: 132759 - RNA, 31 nt, Homo Sapiens
gaaagcauaugcagccaaccaagaugcaaau

SEQ ID NO: 132760 - RNA, 32 nt, Homo Sapiens
uucuuaaaagacuguugauacuauaaacauca

SEQ ID NO: 132761 - RNA, 32 nt, Homo Sapiens
gaggucauaaucagaagcuaagcugggugcag

SEQ ID NO: 132762 - RNA, 32 nt, Homo Sapiens
cugaggcugaggcgcccggccucccgcccgcc

SEQ ID NO: 132763 - RNA, 31 nt, Homo Sapiens
gugcugcucaagggagccccaagggcuggaa

SEQ ID NO: 132764 - RNA, 32 nt, Homo Sapiens
uuuuguuguuuuuuuucuuuguuuuuuuuuuc

SEQ ID NO: 132765 - RNA, 32 nt, Homo Sapiens
cacugcaaaaacucucccuuacauaugcaauu

SEQ ID NO: 132766 - RNA, 32 nt, Homo Sapiens
ggugaccgccgggacccugccugugacucucc

SEQ ID NO: 132767 - RNA, 32 nt, Homo Sapiens
ugagaucgaguaguaacagccacuccaacucu

SEQ ID NO: 132768 - RNA, 32 nt, Homo Sapiens
acauuaacaagcccucuaacaaaaacuuuaca

SEQ ID NO: 132769 - RNA, 32 nt, Homo Sapiens
uauacuccagggauugguuucaggaccccugc

SEQ ID NO: 132770 - RNA, 32 nt, Homo Sapiens
auaaauacuguaaaagcauggaaggugcaaaa

SEQ ID NO: 132771 - RNA, 32 nt, Homo Sapiens
ggagcugcgaggaggcagugggggcgagccug

SEQ ID NO: 132772 - RNA, 32 nt, Homo Sapiens
auucuuucaaaauaaaacuuuuugaaauuugg

SEQ ID NO: 132773 - RNA, 32 nt, Homo Sapiens
ggcucuucauucaaaagggaaaauaaugauuc

SEQ ID NO: 132774 - RNA, 32 nt, Homo Sapiens
ccuagcccuugcugcgcagaacagcuugcugg

SEQ ID NO: 132775 - RNA, 32 nt, Homo Sapiens
uuaguggagacgggguuuugccauauuggcca

SEQ ID NO: 132776 - RNA, 30 nt, Homo Sapiens
cacagaaaacccuccacccauuuuaaggau

SEQ ID NO: 132777 - RNA, 32 nt, Homo Sapiens
cacagacaacuaagugcuuauucaaagacuag

SEQ ID NO: 132778 - RNA, 32 nt, Homo Sapiens
auguccuuauaggagccugagaacagacuaau

SEQ ID NO: 132779 - RNA, 32 nt, Homo Sapiens
uuugccuccaacaaccugaggucccuggggcu

SEQ ID NO: 132780 - RNA, 32 nt, Homo Sapiens
ugcagggaaaugacuuacuuguccuuaagcag

SEQ ID NO: 132781 - RNA, 32 nt, Homo Sapiens
ccggggcccucccaccuccaacgccccgccca

SEQ ID NO: 132782 - RNA, 32 nt, Homo Sapiens
agguugcagugagccgagauuaugucacucca

SEQ ID NO: 132783 - RNA, 32 nt, Homo Sapiens
gccuguuucucuaacaaacaaacaaacaaaca

SEQ ID NO: 132784 - RNA, 32 nt, Homo Sapiens
aagaaugggaacacugaaaaguaggggcauuu

SEQ ID NO: 132785 - RNA, 32 nt, Homo Sapiens
agcauccaacugggagcguugucauugcauuu

SEQ ID NO: 132786 - RNA, 32 nt, Homo Sapiens
accauaugggccauuaauagcucuacuaaaac

SEQ ID NO: 132787 - RNA, 32 nt, Homo Sapiens
uauuacuaucuuuaagcauuuaaaaauacugu

SEQ ID NO: 132788 - RNA, 32 nt, Homo Sapiens
agguggaaacacuguccucucaucuugggacc

SEQ ID NO: 132789 - RNA, 32 nt, Homo Sapiens
gggcuccgugugccccggggccgcgggaaugc

SEQ ID NO: 132790 - RNA, 32 nt, Homo Sapiens
uuguuuugcugcgcuucaucauggagucauag

SEQ ID NO: 132791 - RNA, 32 nt, Homo Sapiens
augugauacugauucccacauuaagguugaac

SEQ ID NO: 132792 - RNA, 32 nt, Homo Sapiens
cauugauacugauauauucucgucauuuguuc

SEQ ID NO: 132793 - RNA, 32 nt, Homo Sapiens
uucagggcugucuauucaauuccauugguuuu

SEQ ID NO: 132794 - RNA, 32 nt, Homo Sapiens
cuuggggaggaaagaagguagagccuuucugu

SEQ ID NO: 132795 - RNA, 32 nt, Homo Sapiens
acuuauuauauuugggucugaaacuucucaca

SEQ ID NO: 132796 - RNA, 32 nt, Homo Sapiens
aucagcugguuucaacucuacugcgaaacaaa

SEQ ID NO: 132797 - RNA, 32 nt, Homo Sapiens
gaacaauagucauaaaugcacuuuucacacua

SEQ ID NO: 132798 - RNA, 32 nt, Homo Sapiens
agugcuaaaauauuuagugcgguauugcucug

SEQ ID NO: 132799 - RNA, 30 nt, Homo Sapiens
aagugaggcaggccuagcaguucccuuacc

SEQ ID NO: 132800 - RNA, 32 nt, Homo Sapiens
gcccuccccucgccccuuggcauuggaggcaa

SEQ ID NO: 132801 - RNA, 32 nt, Homo Sapiens
cagaaaaaaacaaaacaaaacuguuguuucuc

SEQ ID NO: 132802 - RNA, 32 nt, Homo Sapiens
gguuuuaggguaccuucaguacuuuuugcaau

SEQ ID NO: 132803 - RNA, 32 nt, Homo Sapiens
uguggguggcaccaggagcucuaaaaacugug

SEQ ID NO: 132804 - RNA, 32 nt, Homo Sapiens
aggugguggcagcuggagggacccaugcagca

SEQ ID NO: 132805 - RNA, 29 nt, Homo Sapiens
cgccaugugugcugcucggccagcggcgg

SEQ ID NO: 132806 - RNA, 32 nt, Homo Sapiens
gagcucccaagcagcagccaggaugcugauau

SEQ ID NO: 132807 - RNA, 32 nt, Homo Sapiens
gagagcuuucucgagaccuuuggaccaagcag

SEQ ID NO: 132808 - RNA, 32 nt, Homo Sapiens
ccacagcuucuuggcugaacguagaacuucuu

SEQ ID NO: 132809 - RNA, 32 nt, Homo Sapiens
aguuguuucuguuauuuuguccacagaacaga

SEQ ID NO: 132810 - RNA, 32 nt, Homo Sapiens
gggcagauauccacccuaauuaagcaugagag

SEQ ID NO: 132811 - RNA, 32 nt, Homo Sapiens
guugauuacugauacuuuaugcuaagcaguac

SEQ ID NO: 132812 - RNA, 32 nt, Homo Sapiens
cucaggcagcaaguuccaccgguaccagcguc

SEQ ID NO: 132813 - RNA, 32 nt, Homo Sapiens
ugaccuggggcugcacagccucauggaaacuc

SEQ ID NO: 132814 - RNA, 32 nt, Homo Sapiens
gggcaagaggggccaguguuguuguuaccuga

SEQ ID NO: 132815 - RNA, 32 nt, Homo Sapiens
auauauauauauauuuuacagucuuaucugcc

SEQ ID NO: 132816 - RNA, 32 nt, Homo Sapiens
uguaauauugagucuuuuuucuuucuuaccuu

SEQ ID NO: 132817 - RNA, 32 nt, Homo Sapiens
ggauauuggacuucuaguguacucaucaccca

SEQ ID NO: 132818 - RNA, 32 nt, Homo Sapiens
caucuaccgccaggcaggaaccccgcuggcag

SEQ ID NO: 132819 - RNA, 32 nt, Homo Sapiens
agccugcagcgccacaguccccggcccucgcc

SEQ ID NO: 132820 - RNA, 32 nt, Homo Sapiens
uuugccaaguuuuaagagaagaugugauuuau

SEQ ID NO: 132821 - RNA, 32 nt, Homo Sapiens
ugugaaaacuaaaguuugugucaugagaaugu

SEQ ID NO: 132822 - RNA, 32 nt, Homo Sapiens
gaaaaaauaaauuccugaaguauaaagcaucu

SEQ ID NO: 132823 - RNA, 32 nt, Homo Sapiens
gguccauccuucccucaguuccugcugccagu

SEQ ID NO: 132824 - RNA, 30 nt, Homo Sapiens
agaugaauugggucggggggucccggucca

SEQ ID NO: 132825 - RNA, 30 nt, Homo Sapiens
uuccauaugucacugggggaaaggcugccu

SEQ ID NO: 132826 - RNA, 32 nt, Homo Sapiens
gcccccugcuggaagccgcuugccgggcgcag

SEQ ID NO: 132827 - RNA, 30 nt, Homo Sapiens
cugaauuagaagcuuguuguguuucugaug

SEQ ID NO: 132828 - RNA, 32 nt, Homo Sapiens
cuucuuuauuugcugauaaaucuuaaaacaac

SEQ ID NO: 132829 - RNA, 32 nt, Homo Sapiens
ugugcagugggaguccugggggaaugggaaag

SEQ ID NO: 132830 - RNA, 32 nt, Homo Sapiens
agugcccugugcuaaugaugagacagugaauu

SEQ ID NO: 132831 - RNA, 32 nt, Homo Sapiens
ccugcccuguggacagcccaccccuccgcagc

SEQ ID NO: 132832 - RNA, 32 nt, Homo Sapiens
uccacugugaaugugauacgggauagagacug

SEQ ID NO: 132833 - RNA, 32 nt, Homo Sapiens
gcagaauuuccucaaaauguagaggaggagaa

SEQ ID NO: 132834 - RNA, 32 nt, Homo Sapiens
ggucucaaacuccuaaccuugugauccgcccu

SEQ ID NO: 132835 - RNA, 32 nt, Homo Sapiens
gacagaauucuacaucggucuaaucuacuuua

SEQ ID NO: 132836 - RNA, 32 nt, Homo Sapiens
ggcagcuggggcgggaaggcgggcgcuggggg

SEQ ID NO: 132837 - RNA, 32 nt, Homo Sapiens
ugucuuauuuuuguuuuucuuaagucagcugg

SEQ ID NO: 132838 - RNA, 32 nt, Homo Sapiens
ugaaauuagaauuuauaauaauugcaccuacc

SEQ ID NO: 132839 - RNA, 30 nt, Homo Sapiens
aggaaggcgcccggcugcgucugcagaggc

SEQ ID NO: 132840 - RNA, 32 nt, Homo Sapiens
cugaaaguguaaaucgcuuacugaagggcaca

SEQ ID NO: 132841 - RNA, 32 nt, Homo Sapiens
gccgaugaucuggccugaaggccucucacaaa

SEQ ID NO: 132842 - RNA, 32 nt, Homo Sapiens
cgccuucuuuaacagagaaacaaucugcaugg

SEQ ID NO: 132843 - RNA, 32 nt, Homo Sapiens
aaugcccagggacuccuggggcugcuggcccc

SEQ ID NO: 132844 - RNA, 32 nt, Homo Sapiens
accaucccaagagcaugggugcgcaggaccgu

SEQ ID NO: 132845 - RNA, 32 nt, Homo Sapiens
gaauucagauaaaauuuccuuauguucugcua

SEQ ID NO: 132846 - RNA, 32 nt, Homo Sapiens
gacacuaauauuuucauagaaauuaggcugga

SEQ ID NO: 132847 - RNA, 32 nt, Homo Sapiens
gggaggccaaggugggcggaugaccugagguc

SEQ ID NO: 132848 - RNA, 32 nt, Homo Sapiens
cuugagaaacauucucagcaucaggauugaua

SEQ ID NO: 132849 - RNA, 32 nt, Homo Sapiens
acaagcucagagauguuccuccccucaucugc

SEQ ID NO: 132850 - RNA, 32 nt, Homo Sapiens
caccgcccggaugggguagaauggaccuugua

SEQ ID NO: 132851 - RNA, 32 nt, Homo Sapiens
cuuugcuguuugcggugaaaugcuuuuugucc

SEQ ID NO: 132852 - RNA, 32 nt, Homo Sapiens
ccaaacuucacacuucccugccugcagaggau

SEQ ID NO: 132853 - RNA, 32 nt, Homo Sapiens
guguaugggccugaucacacacaaacacacac

SEQ ID NO: 132854 - RNA, 32 nt, Homo Sapiens
cgccuauaaucccagcacuuugggaggccaug

SEQ ID NO: 132855 - RNA, 32 nt, Homo Sapiens
cgccuguaaucccagcacuuugggaggccgug

SEQ ID NO: 132856 - RNA, 32 nt, Homo Sapiens
cgccugaaaucccagcacuuugggaggccgag

SEQ ID NO: 132857 - RNA, 32 nt, Homo Sapiens
gacaguugaugauguccuuauucauugccagg

SEQ ID NO: 132858 - RNA, 32 nt, Homo Sapiens
cagcacaaacaaaacugacuaguuuuuaaauu

SEQ ID NO: 132859 - RNA, 32 nt, Homo Sapiens
gccgccuagagcacaaguccugcuagucgccu

SEQ ID NO: 132860 - RNA, 32 nt, Homo Sapiens
aacccugagcggugggggaggaggguugugcu

SEQ ID NO: 132861 - RNA, 32 nt, Homo Sapiens
uaaggugaaggugaaucuagcuuauuuugagg

SEQ ID NO: 132862 - RNA, 32 nt, Homo Sapiens
gaccacaaggucgggagcgccugcggaggcuu

SEQ ID NO: 132863 - RNA, 32 nt, Homo Sapiens
gcgggcuccguccaacccggcccgacauggac

SEQ ID NO: 132864 - RNA, 32 nt, Homo Sapiens
uggauguuauuugcuuauauucuuauaauuuu

SEQ ID NO: 132865 - RNA, 32 nt, Homo Sapiens
cacagcuuugcaccccuuuccuccccauacac

SEQ ID NO: 132866 - RNA, 32 nt, Homo Sapiens
uaaaauggugguuugcagaaaccaugguagcc

SEQ ID NO: 132867 - RNA, 32 nt, Homo Sapiens
ucaagaccuaugccacaucacacuggggcuag

SEQ ID NO: 132868 - RNA, 32 nt, Homo Sapiens
aauggacccaaguuaggugugacacguucaca

SEQ ID NO: 132869 - RNA, 32 nt, Homo Sapiens
gaaagaagcaaugaaugaaacgcccaucgccu

SEQ ID NO: 132870 - RNA, 32 nt, Homo Sapiens
ccagcgugguugucuaucccgucuaccuggcc

SEQ ID NO: 132871 - RNA, 32 nt, Homo Sapiens
aauguuuguguauagguuuuauauuauuauuc

SEQ ID NO: 132872 - RNA, 32 nt, Homo Sapiens
aggcuaagugagcaccagcagcuccuggccua

SEQ ID NO: 132873 - RNA, 32 nt, Homo Sapiens
aacuuuaaaaacaucaaaaauuguuaaaauca

SEQ ID NO: 132874 - RNA, 32 nt, Homo Sapiens
acgccgccgcagccuucgcccuggaugccgcu

SEQ ID NO: 132875 - RNA, 32 nt, Homo Sapiens
ucuucuacacauuacuguaagcacuaaccauu

SEQ ID NO: 132876 - RNA, 32 nt, Homo Sapiens
uuugaaggcaccucaugguuuucaggaugcug

SEQ ID NO: 132877 - RNA, 32 nt, Homo Sapiens
auacauguuuccaauuauccuuuuucaaugag

SEQ ID NO: 132878 - RNA, 32 nt, Homo Sapiens
cucucaacacauugauauguucaccaaccagg

SEQ ID NO: 132879 - RNA, 32 nt, Homo Sapiens
guuagagaacaaaacacaucaauauaauuagu

SEQ ID NO: 132880 - RNA, 32 nt, Homo Sapiens
ggacuggccagggcccaagacccccgcugcuc

SEQ ID NO: 132881 - RNA, 32 nt, Homo Sapiens
gaugucuggugcccaaucccaggaagugagag

SEQ ID NO: 132882 - RNA, 32 nt, Homo Sapiens
gcccggcugugccccagguccccgcggucggg

SEQ ID NO: 132883 - RNA, 32 nt, Homo Sapiens
uuuuccaauauuuaguauuguagucuucauag

SEQ ID NO: 132884 - RNA, 32 nt, Homo Sapiens
uguucucacuguauuuuuuuuauccuggggcc

SEQ ID NO: 132885 - RNA, 32 nt, Homo Sapiens
gcgcucagauuuuccuguuuucguuguuuuca

SEQ ID NO: 132886 - RNA, 31 nt, Homo Sapiens
ccgcuuccuccuccugcuccaagggccuccu

SEQ ID NO: 132887 - RNA, 32 nt, Homo Sapiens
gcauucaguuuaucuguaaauauaauuuauug

SEQ ID NO: 132888 - RNA, 32 nt, Homo Sapiens
cgcugggggccugaagggggcugggggaugau

SEQ ID NO: 132889 - RNA, 32 nt, Homo Sapiens
gccucugagcgggagagucuguguguaugugu

SEQ ID NO: 132890 - RNA, 32 nt, Homo Sapiens
gagaacaaagugagacccccaucuauuaaaaa

SEQ ID NO: 132891 - RNA, 32 nt, Homo Sapiens
uuacuguucuuugucgaugcuauauaagccag

SEQ ID NO: 132892 - RNA, 32 nt, Homo Sapiens
agugagaagauaaaaacugcccauuguaacuu

SEQ ID NO: 132893 - RNA, 32 nt, Homo Sapiens
acacgaacaggugucuuaaugcauuuggauag

SEQ ID NO: 132894 - RNA, 32 nt, Homo Sapiens
accagccuuggauacuccauggaauucgagcu

SEQ ID NO: 132895 - RNA, 32 nt, Homo Sapiens
uuggacacuaucuaauguguguagaagaggac

SEQ ID NO: 132896 - RNA, 32 nt, Homo Sapiens
cugucugcaacaugcuuggggucccuuaagcu

SEQ ID NO: 132897 - RNA, 32 nt, Homo Sapiens
aaauuucuguuguuucagcuucucagucucug

SEQ ID NO: 132898 - RNA, 32 nt, Homo Sapiens
uuccccaacauccccgccccagccucccucuu

SEQ ID NO: 132899 - RNA, 32 nt, Homo Sapiens
auggcagucugccugccucggggacacuagug

SEQ ID NO: 132900 - RNA, 32 nt, Homo Sapiens
uuccuuaccucuagccagucacuuccuuuuuc

SEQ ID NO: 132901 - RNA, 32 nt, Homo Sapiens
ccaggaaucuuccagguauacuccaugggaug

SEQ ID NO: 132902 - RNA, 32 nt, Homo Sapiens
ggagcggggaggaggccggcgccauggagugg

SEQ ID NO: 132903 - RNA, 32 nt, Homo Sapiens
uguucugagcucucccgcauuccuccucccac

SEQ ID NO: 132904 - RNA, 32 nt, Homo Sapiens
gcagacuuuuccuguccaggaaugggagacaa

SEQ ID NO: 132905 - RNA, 32 nt, Homo Sapiens
cuccugcuuucugcgccaagggagcgcccaag

SEQ ID NO: 132906 - RNA, 32 nt, Homo Sapiens
gcagcgcccucccgccccggcccugccucaac

SEQ ID NO: 132907 - RNA, 32 nt, Homo Sapiens
ggccacucauuucagggaagcgaagggaagag

SEQ ID NO: 132908 - RNA, 32 nt, Homo Sapiens
guggcaaaacugccuccuacggcggcucugaa

SEQ ID NO: 132909 - RNA, 32 nt, Homo Sapiens
uuucauuaucuaaaaaggauuaauuauucaug

SEQ ID NO: 132910 - RNA, 32 nt, Homo Sapiens
aggaagaauaagucacuguaaaacagaacuuu

SEQ ID NO: 132911 - RNA, 32 nt, Homo Sapiens
uggucuuacaagcaguacuaaaaucaacccuc

SEQ ID NO: 132912 - RNA, 32 nt, Homo Sapiens
ugggaauccaacugaagagcagccagaggaga

SEQ ID NO: 132913 - RNA, 32 nt, Homo Sapiens
gacugugauucuuagcaaaaaaugaacaguga

SEQ ID NO: 132914 - RNA, 32 nt, Homo Sapiens
ggcgcucaggcugugaccguguuaacauuuuc

SEQ ID NO: 132915 - RNA, 32 nt, Homo Sapiens
gagggacacuaggaaucaaaacaaacauuucu

SEQ ID NO: 132916 - RNA, 32 nt, Homo Sapiens
gaagccuuuccacaguccuugugcucugagau

SEQ ID NO: 132917 - RNA, 32 nt, Homo Sapiens
gccugcaccccuccggccccgucucucuugga

SEQ ID NO: 132918 - RNA, 32 nt, Homo Sapiens
aaacuuaguuuauguuuuguguucaacacuac

SEQ ID NO: 132919 - RNA, 32 nt, Homo Sapiens
ccuggaaaauaugucauuuguguuuuugggga

SEQ ID NO: 132920 - RNA, 32 nt, Homo Sapiens
gucccggggccgagacauagugugcauggacc

SEQ ID NO: 132921 - RNA, 32 nt, Homo Sapiens
auaacuuccaguaucauuuuccaauuaauuau

SEQ ID NO: 132922 - RNA, 32 nt, Homo Sapiens
cccgacgcaaccccaggcucacucgcucaccc

SEQ ID NO: 132923 - RNA, 32 nt, Homo Sapiens
aggacggucccugcagcccgcgcgacagaaag

SEQ ID NO: 132924 - RNA, 32 nt, Homo Sapiens
cauuguguccccagcccucuucucgguucccc

SEQ ID NO: 132925 - RNA, 32 nt, Homo Sapiens
aaggaucacagcaaaacaucaauuauggauga

SEQ ID NO: 132926 - RNA, 32 nt, Homo Sapiens
agacaaggcagacaaagguucauuuguaaaga

SEQ ID NO: 132927 - RNA, 32 nt, Homo Sapiens
cagcgguuuucugaagauccaguuggacaauu

SEQ ID NO: 132928 - RNA, 32 nt, Homo Sapiens
ucuccaaaacaaaacaaacaaacaaaaagauu

SEQ ID NO: 132929 - RNA, 32 nt, Homo Sapiens
guccucgccgcaccacugccgcacacgacucc

SEQ ID NO: 132930 - RNA, 32 nt, Homo Sapiens
ucacccuucgugcaauuuugaaaauuauaauu

SEQ ID NO: 132931 - RNA, 32 nt, Homo Sapiens
aucuuaauuacaugucauaacguugcuucauu

SEQ ID NO: 132932 - RNA, 32 nt, Homo Sapiens
cuggcugagcugcugaagcugcacuacaugca

SEQ ID NO: 132933 - RNA, 32 nt, Homo Sapiens
auuccagacaccugcccuaauccucagccugc

SEQ ID NO: 132934 - RNA, 32 nt, Homo Sapiens
accugcggccuucgaguccgcggccuucgagu

SEQ ID NO: 132935 - RNA, 32 nt, Homo Sapiens
gcaaauguauuacuguauaaagcaaagcugua

SEQ ID NO: 132936 - RNA, 32 nt, Homo Sapiens
cgauggcaagggucuucuauaucaccagaaag

SEQ ID NO: 132937 - RNA, 32 nt, Homo Sapiens
gcugagccuuuuuuuuuuuaaucuucguaaca

SEQ ID NO: 132938 - RNA, 32 nt, Homo Sapiens
agagcacugagugcgaucucaugcuggcaucu

SEQ ID NO: 132939 - RNA, 32 nt, Homo Sapiens
gccgccgagcagccagcaguccccgggucgcc

SEQ ID NO: 132940 - RNA, 32 nt, Homo Sapiens
gagaggaggucuuccagcagcagcaggucugg

SEQ ID NO: 132941 - RNA, 32 nt, Homo Sapiens
cuacuauuguaaagcuaaugugaagauauuau

SEQ ID NO: 132942 - RNA, 32 nt, Homo Sapiens
gauaaugcaaaauaaaucaacacuagaacauc

SEQ ID NO: 132943 - RNA, 32 nt, Homo Sapiens
uuguaaauaaaacaggauuuugaaugcaaaaa

SEQ ID NO: 132944 - RNA, 28 nt, Homo Sapiens
ggaaggagauugaaacauuugauugccu

SEQ ID NO: 132945 - RNA, 32 nt, Homo Sapiens
ccgguccagcccugauggcgcgcgccuggucu

SEQ ID NO: 132946 - RNA, 32 nt, Homo Sapiens
aaagagaacucagaaauaauauuuucacauuc

SEQ ID NO: 132947 - RNA, 32 nt, Homo Sapiens
acgggaaugcccuuuuauaacacaugaguuuu

SEQ ID NO: 132948 - RNA, 29 nt, Homo Sapiens
gcagggagggggguggggacgaggagaug

SEQ ID NO: 132949 - RNA, 32 nt, Homo Sapiens
gacucuuccuucccuccgcaggacgagauuga

SEQ ID NO: 132950 - RNA, 32 nt, Homo Sapiens
aggcaccucugggguggcaccuggcacaacag

SEQ ID NO: 132951 - RNA, 32 nt, Homo Sapiens
ugugggguggagguugcagugagcugagauca

SEQ ID NO: 132952 - RNA, 32 nt, Homo Sapiens
gcccugcaggcuguccuccccgccucucugca

SEQ ID NO: 132953 - RNA, 32 nt, Homo Sapiens
uauaguuaaauauauguuagucuaaagauaaa

SEQ ID NO: 132954 - RNA, 32 nt, Homo Sapiens
cuggccaucagcaucgcucuccugcuaacagu

SEQ ID NO: 132955 - RNA, 32 nt, Homo Sapiens
ccucguccucugccccaggcccggccccgccc

SEQ ID NO: 132956 - RNA, 32 nt, Homo Sapiens
ugucuccaaaugaccaugaaaauacacacgua

SEQ ID NO: 132957 - RNA, 32 nt, Homo Sapiens
gugccgagggcgaggagauggaggcggcggcg

SEQ ID NO: 132958 - RNA, 32 nt, Homo Sapiens
cuccucguuuuauuuuuuguuaaacuuaugag

SEQ ID NO: 132959 - RNA, 32 nt, Homo Sapiens
aucagaguuggaggaccgauguguacaguucu

SEQ ID NO: 132960 - RNA, 32 nt, Homo Sapiens
cuaccccgcucccggagcucggagccggaggg

SEQ ID NO: 132961 - RNA, 32 nt, Homo Sapiens
gggccuccucgcaaaugcccaggcccugcauu

SEQ ID NO: 132962 - RNA, 32 nt, Homo Sapiens
ggagccacaugagagagggagaaggaccgcgu

SEQ ID NO: 132963 - RNA, 32 nt, Homo Sapiens
ggcuccaccuggauguucugugccuguaaaca

SEQ ID NO: 132964 - RNA, 30 nt, Homo Sapiens
gguccaggcaggcacugggcugugcccacu

SEQ ID NO: 132965 - RNA, 32 nt, Homo Sapiens
guacaguugcuguugugugaucaagcaugucu

SEQ ID NO: 132966 - RNA, 32 nt, Homo Sapiens
uuguuucugccuagucucugugcccugucuuu

SEQ ID NO: 132967 - RNA, 32 nt, Homo Sapiens
ccuggcucauuuccccgaugacccuggauugu

SEQ ID NO: 132968 - RNA, 32 nt, Homo Sapiens
uuggaggcaaccucaguauaggaacugccacu

SEQ ID NO: 132969 - RNA, 32 nt, Homo Sapiens
gucuaacaaucaagucuuuagauggaaggaau

SEQ ID NO: 132970 - RNA, 32 nt, Homo Sapiens
agcauuguaaccucaggaaacaguuuauuuug

SEQ ID NO: 132971 - RNA, 32 nt, Homo Sapiens
cauuaagaacagaggaggcugccuguuacucc

SEQ ID NO: 132972 - RNA, 32 nt, Homo Sapiens
gauaagaacaauguuauguuggggauauuggu

SEQ ID NO: 132973 - RNA, 32 nt, Homo Sapiens
aaccgcagugggccugcaagccgcccgagccu

SEQ ID NO: 132974 - RNA, 32 nt, Homo Sapiens
gagccugugauaggggcugaugagauggaauc

SEQ ID NO: 132975 - RNA, 31 nt, Homo Sapiens
aggacuauggaagcuguucaagauacauuug

SEQ ID NO: 132976 - RNA, 32 nt, Homo Sapiens
uuucuccaaaaauuaaaaauagaauucucaug

SEQ ID NO: 132977 - RNA, 32 nt, Homo Sapiens
aucagcagagaaaauaaguacacaacgucaug

SEQ ID NO: 132978 - RNA, 32 nt, Homo Sapiens
gcggccgggugcgggcggagucuuccucgauc

SEQ ID NO: 132979 - RNA, 32 nt, Homo Sapiens
cggccugugccuguuuucccuucugcgcuacc

SEQ ID NO: 132980 - RNA, 32 nt, Homo Sapiens
cccaagcggaggccgcgccgacgccugcgcaa

SEQ ID NO: 132981 - RNA, 32 nt, Homo Sapiens
gucuucuugcacacgcugucacuuccucucac

SEQ ID NO: 132982 - RNA, 32 nt, Homo Sapiens
guuuuuguuuuguuuuguuuucuuucuaaucg

SEQ ID NO: 132983 - RNA, 32 nt, Homo Sapiens
aaagaggaaaauuuuggaauaugccaggaaua

SEQ ID NO: 132984 - RNA, 32 nt, Homo Sapiens
uuguuuugagugcagagccuuuccaggacuuc

SEQ ID NO: 132985 - RNA, 32 nt, Homo Sapiens
gaguagccugccaccugaacuacucauaggaa

SEQ ID NO: 132986 - RNA, 32 nt, Homo Sapiens
uuccagaaaauaauucuuaaaacuggguuuua

SEQ ID NO: 132987 - RNA, 32 nt, Homo Sapiens
ccccuucccagggccucuguaggagggugggg

SEQ ID NO: 132988 - RNA, 32 nt, Homo Sapiens
accuuucuagaaugccuaggagcagaaaacaa

SEQ ID NO: 132989 - RNA, 32 nt, Homo Sapiens
cuuauugaaaaacagcuggaaauacaguggau

SEQ ID NO: 132990 - RNA, 32 nt, Homo Sapiens
gauguuuaaaauugagaaauacuuuugucaua

SEQ ID NO: 132991 - RNA, 32 nt, Homo Sapiens
ggggaccuuccuuccgccggaagaugggcacu

SEQ ID NO: 132992 - RNA, 32 nt, Homo Sapiens
caggcuggggcaccaggugugcaugugggugu

SEQ ID NO: 132993 - RNA, 32 nt, Homo Sapiens
cgacauugucccauucacacagauauuuuggg

SEQ ID NO: 132994 - RNA, 32 nt, Homo Sapiens
gagcuggggaucuggauuccugguucccugaa

SEQ ID NO: 132995 - RNA, 32 nt, Homo Sapiens
cguacacgcacgcacgcgaccggggcgguggu

SEQ ID NO: 132996 - RNA, 32 nt, Homo Sapiens
accgccuccuucccagccgcgcggcuuccucc

SEQ ID NO: 132997 - RNA, 32 nt, Homo Sapiens
aaagugucugaaauaacgcaugaugccacaaa

SEQ ID NO: 132998 - RNA, 32 nt, Homo Sapiens
uugccgcugaugcauuauccaaguggugguug

SEQ ID NO: 132999 - RNA, 32 nt, Homo Sapiens
uugccccuggggauugcgcggcugauguuuag

SEQ ID NO: 133000 - RNA, 32 nt, Homo Sapiens
acagaucagccagaccaucuuccuccuuccaa

SEQ ID NO: 133001 - RNA, 32 nt, Homo Sapiens
acaugagggagcaaagagcuugaggaaugcca

SEQ ID NO: 133002 - RNA, 32 nt, Homo Sapiens
cccgagcugccaggcucugugcucccacacug

SEQ ID NO: 133003 - RNA, 32 nt, Homo Sapiens
cugcagagaagcugaucaccgggcagagauag

SEQ ID NO: 133004 - RNA, 32 nt, Homo Sapiens
ucuggcagucauggauaacacuugcuuuucca

SEQ ID NO: 133005 - RNA, 32 nt, Homo Sapiens
accccggggggccugauguguguggguuguug

SEQ ID NO: 133006 - RNA, 29 nt, Homo Sapiens
gagagugagggacagaggaaacguuuauc

SEQ ID NO: 133007 - RNA, 32 nt, Homo Sapiens
auuaaaaaacaaaacagaagagaugucaggaa

SEQ ID NO: 133008 - RNA, 32 nt, Homo Sapiens
cagcaacaaguacacagugacggggcugcucc

SEQ ID NO: 133009 - RNA, 32 nt, Homo Sapiens
guggugugucuuccaacuuucauugaaaaugc

SEQ ID NO: 133010 - RNA, 32 nt, Homo Sapiens
ugccugccaugccccaggugacggccugcccg

SEQ ID NO: 133011 - RNA, 32 nt, Homo Sapiens
gcgaacaaaugguccaugagcggaaggugagg

SEQ ID NO: 133012 - RNA, 32 nt, Homo Sapiens
aguaugucauaugucacaaaagaaauugccuu

SEQ ID NO: 133013 - RNA, 32 nt, Homo Sapiens
cagggagaucccucccuucucugagccuagag

SEQ ID NO: 133014 - RNA, 32 nt, Homo Sapiens
aguaagacaaagugauuuaucaucuauaacuu

SEQ ID NO: 133015 - RNA, 32 nt, Homo Sapiens
aaacauguucugucacaaauagcagcaccacu

SEQ ID NO: 133016 - RNA, 32 nt, Homo Sapiens
uuguggccuggaggccuauuaagcacgacaca

SEQ ID NO: 133017 - RNA, 32 nt, Homo Sapiens
cuccuaugucuccuaggcuuuccaugauaauu

SEQ ID NO: 133018 - RNA, 32 nt, Homo Sapiens
uggagagaaugaauuagaggcaugaagaaagu

SEQ ID NO: 133019 - RNA, 32 nt, Homo Sapiens
aucccagagcuucccaggaucccucccagauc

SEQ ID NO: 133020 - RNA, 32 nt, Homo Sapiens
aggaccccaucggcccggggcccuacgccugu

SEQ ID NO: 133021 - RNA, 32 nt, Homo Sapiens
ucgcagcgcaggacgggcgcgcugcguguggg

SEQ ID NO: 133022 - RNA, 32 nt, Homo Sapiens
ggucggacagggacagcagagaagaaacuagc

SEQ ID NO: 133023 - RNA, 29 nt, Homo Sapiens
agaaagaugaagacucugaaagaggagau

SEQ ID NO: 133024 - RNA, 32 nt, Homo Sapiens
uucagaacauuaacugaacuauuuucaaagca

SEQ ID NO: 133025 - RNA, 32 nt, Homo Sapiens
ggguucccagugcccagcacuuuguagucuca

SEQ ID NO: 133026 - RNA, 32 nt, Homo Sapiens
ucuuuggucacagauuuuucaagaauguuucu

SEQ ID NO: 133027 - RNA, 32 nt, Homo Sapiens
ccuugcaugcuucucugauccuguggagauga

SEQ ID NO: 133028 - RNA, 32 nt, Homo Sapiens
cccccaugucucaucaccuccugccaggcccc

SEQ ID NO: 133029 - RNA, 32 nt, Homo Sapiens
ccuguuauuucuaugaaaaugggaugaauucu

SEQ ID NO: 133030 - RNA, 32 nt, Homo Sapiens
aaaaguggauuuuuaaagugccuuucaauugu

SEQ ID NO: 133031 - RNA, 31 nt, Homo Sapiens
ggaggcugacugagguucagagccuggcucc

SEQ ID NO: 133032 - RNA, 32 nt, Homo Sapiens
aaaaaagaaaucaaccaauauuuauggaguau

SEQ ID NO: 133033 - RNA, 32 nt, Homo Sapiens
gguugugcaaaagcuuucuguuuaaugcauag

SEQ ID NO: 133034 - RNA, 32 nt, Homo Sapiens
ccaagugguaaugaaauuucggugacuggccc

SEQ ID NO: 133035 - RNA, 32 nt, Homo Sapiens
augccuagguggaaauagcaaaaacaaggccc

SEQ ID NO: 133036 - RNA, 32 nt, Homo Sapiens
ggcucauguuucccucagacuuuuauucauuc

SEQ ID NO: 133037 - RNA, 32 nt, Homo Sapiens
aaaaguaaauuuccucauuaagccaaccugcc

SEQ ID NO: 133038 - RNA, 32 nt, Homo Sapiens
aauuugagcuaauggauuguuaauucugaaac

SEQ ID NO: 133039 - RNA, 32 nt, Homo Sapiens
uuaccaagauaaauauauguauauauaaccuu

SEQ ID NO: 133040 - RNA, 32 nt, Homo Sapiens
guaauucuaagucuuacaggauuucauggaga

SEQ ID NO: 133041 - RNA, 32 nt, Homo Sapiens
aggggaaaaaguuggaagugagauguaacucu

SEQ ID NO: 133042 - RNA, 32 nt, Homo Sapiens
cgucaccgcccgcauugccgcucccagucccg

SEQ ID NO: 133043 - RNA, 30 nt, Homo Sapiens
gcuugaagaugacuugaugacugugcauuu

SEQ ID NO: 133044 - RNA, 32 nt, Homo Sapiens
uauggcuucugugaggcccauuuucccuuuuc

SEQ ID NO: 133045 - RNA, 32 nt, Homo Sapiens
ccucccgcgagccuccuccccucccgcgagcc

SEQ ID NO: 133046 - RNA, 32 nt, Homo Sapiens
auaccugcuuugcauauucacacauggucaac

SEQ ID NO: 133047 - RNA, 32 nt, Homo Sapiens
gagaggagguccggcuucguuaucucguucug

SEQ ID NO: 133048 - RNA, 32 nt, Homo Sapiens
uaugcauguuugcaugggguuauugagacauu

SEQ ID NO: 133049 - RNA, 32 nt, Homo Sapiens
caucaucuugguuuuucauuuguuuuagaaua

SEQ ID NO: 133050 - RNA, 32 nt, Homo Sapiens
guuugauauuccaugaauaauugagaucagcc

SEQ ID NO: 133051 - RNA, 32 nt, Homo Sapiens
agaauagaaccaaaaacgccagucaugggagg

SEQ ID NO: 133052 - RNA, 32 nt, Homo Sapiens
gggaugccggguucuccuuucuuuccucaccc

SEQ ID NO: 133053 - RNA, 32 nt, Homo Sapiens
ugugcaauaugaggggacugcaugcaagcuca

SEQ ID NO: 133054 - RNA, 32 nt, Homo Sapiens
uuauuucaauaccuuuuagauuucauaaagug

SEQ ID NO: 133055 - RNA, 32 nt, Homo Sapiens
cugagcccagcucagcguuccuggacaaacag

SEQ ID NO: 133056 - RNA, 32 nt, Homo Sapiens
gcccacgugucuccacacgccagccacagggg

SEQ ID NO: 133057 - RNA, 32 nt, Homo Sapiens
cucccuuacuauccuccuuuuuuguuuucagu

SEQ ID NO: 133058 - RNA, 32 nt, Homo Sapiens
cggaccuuggcugcagaggccaucgcagcuuu

SEQ ID NO: 133059 - RNA, 32 nt, Homo Sapiens
cacccgccaagcauaguucagggccacgcgcc

SEQ ID NO: 133060 - RNA, 32 nt, Homo Sapiens
cagccaccucccacccaagccacuagcaagac

SEQ ID NO: 133061 - RNA, 32 nt, Homo Sapiens
gacucgggggagagggcgggaggaagagggac

SEQ ID NO: 133062 - RNA, 32 nt, Homo Sapiens
ccagaacugaggugcuggcuagcucaugugug

SEQ ID NO: 133063 - RNA, 32 nt, Homo Sapiens
acgcugcccagcgugacuggggcccccugggu

SEQ ID NO: 133064 - RNA, 32 nt, Homo Sapiens
cuauguucuaaaaguugggcuauacauaaauu

SEQ ID NO: 133065 - RNA, 32 nt, Homo Sapiens
ucuuuucaauuucugaaaacaguaacaggccc

SEQ ID NO: 133066 - RNA, 32 nt, Homo Sapiens
aaugcuuaauacuuuguucuguuuaaugaugu

SEQ ID NO: 133067 - RNA, 32 nt, Homo Sapiens
cugugggcacgcugugggcaggugggagcuug

SEQ ID NO: 133068 - RNA, 32 nt, Homo Sapiens
auauuguggaaugacuagcaaacaagcaaugu

SEQ ID NO: 133069 - RNA, 32 nt, Homo Sapiens
ccccugcugcggugccgucuugagcuuugccg

SEQ ID NO: 133070 - RNA, 32 nt, Homo Sapiens
acauuuacauuauguaaaaauaaauggaauaa

SEQ ID NO: 133071 - RNA, 31 nt, Homo Sapiens
gccugugccacgauugcaggagucccugcca

SEQ ID NO: 133072 - RNA, 32 nt, Homo Sapiens
aauuauucccuccccgacccagcccagugcca

SEQ ID NO: 133073 - RNA, 32 nt, Homo Sapiens
uauguugaggcacaauuauuuuuuccuuuuug

SEQ ID NO: 133074 - RNA, 32 nt, Homo Sapiens
acuuggcugucugaccagagaaugcaccucuu

SEQ ID NO: 133075 - RNA, 32 nt, Homo Sapiens
uuccuuuuguuuuaauaaaaugugucacugau

SEQ ID NO: 133076 - RNA, 32 nt, Homo Sapiens
gcagccugucuuccuuugaaauuguuuuacuc

SEQ ID NO: 133077 - RNA, 32 nt, Homo Sapiens
ucaugaugcugacuggcguuagcugauuaacc

SEQ ID NO: 133078 - RNA, 32 nt, Homo Sapiens
guauagugaccgugaacuuucuaacgcauaau

SEQ ID NO: 133079 - RNA, 31 nt, Homo Sapiens
auugaacuguggacugauucaguguaaauaa

SEQ ID NO: 133080 - RNA, 32 nt, Homo Sapiens
cuacauagcauuagucuuucacgugauaaagu

SEQ ID NO: 133081 - RNA, 32 nt, Homo Sapiens
gagcuugguuaucggccggcccgguggcuugg

SEQ ID NO: 133082 - RNA, 32 nt, Homo Sapiens
cccuucccuacccugcucggcugcguagugcg

SEQ ID NO: 133083 - RNA, 28 nt, Homo Sapiens
augcggcggcggccgcgcggcaggacca

SEQ ID NO: 133084 - RNA, 32 nt, Homo Sapiens
gcaccgcgcgucgcuuucccggccggagucuc

SEQ ID NO: 133085 - RNA, 31 nt, Homo Sapiens
uacuccugcggcugccugccccccagucucc

SEQ ID NO: 133086 - RNA, 32 nt, Homo Sapiens
uuucagcgggaaacagaagagacaguguccuu

SEQ ID NO: 133087 - RNA, 32 nt, Homo Sapiens
uccucuccuuccacccucugguuccaauuucc

SEQ ID NO: 133088 - RNA, 32 nt, Homo Sapiens
guauuuuuccuuucguuuucauuugaaguuuu

SEQ ID NO: 133089 - RNA, 32 nt, Homo Sapiens
uggggagcagcggccgccggcgcggggagggg

SEQ ID NO: 133090 - RNA, 32 nt, Homo Sapiens
cgggggcaccgggccgcccacccacucccaaa

SEQ ID NO: 133091 - RNA, 32 nt, Homo Sapiens
uauaaaauguuauaaauuaucuuagcaucuua

SEQ ID NO: 133092 - RNA, 32 nt, Homo Sapiens
gauauccuaccuuggugcuugcuuagauaacu

SEQ ID NO: 133093 - RNA, 28 nt, Homo Sapiens
agccaggagcugucgccgaggcgaggcu

SEQ ID NO: 133094 - RNA, 32 nt, Homo Sapiens
acugcgaacuagggaaagguugguaugaaaaa

SEQ ID NO: 133095 - RNA, 32 nt, Homo Sapiens
cggagugggccggagauggcggcggccgacgg

SEQ ID NO: 133096 - RNA, 32 nt, Homo Sapiens
uacacaaauauguauuuguuaugagguauuaa

SEQ ID NO: 133097 - RNA, 32 nt, Homo Sapiens
gccagauacauucuagagaauugugagacuuu

SEQ ID NO: 133098 - RNA, 32 nt, Homo Sapiens
auccaguuccaguucccaugguguaugugguu

SEQ ID NO: 133099 - RNA, 32 nt, Homo Sapiens
cacaaauuuucagaucuugcucauuaguuaug

SEQ ID NO: 133100 - RNA, 32 nt, Homo Sapiens
uguuucacgucucucccuuccauucugcagga

SEQ ID NO: 133101 - RNA, 32 nt, Homo Sapiens
cucauaguaaugaguucucacaagaucugaug

SEQ ID NO: 133102 - RNA, 32 nt, Homo Sapiens
caggcuagggaccuggggggaggagacccaug

SEQ ID NO: 133103 - RNA, 32 nt, Homo Sapiens
cugaccgucucuguugcuucucuucugguguu

SEQ ID NO: 133104 - RNA, 31 nt, Homo Sapiens
uuggagaagccccagagaaugagcauucccu

SEQ ID NO: 133105 - RNA, 32 nt, Homo Sapiens
uucaugaagauaauuggagagucuauucucug

SEQ ID NO: 133106 - RNA, 32 nt, Homo Sapiens
agagucuuucaggaccuggacagugagggagc

SEQ ID NO: 133107 - RNA, 32 nt, Homo Sapiens
gggugagggacgggaaggggagaauuucguaa

SEQ ID NO: 133108 - RNA, 32 nt, Homo Sapiens
gaaccucaaaccccaaaccagcccgaggagaa

SEQ ID NO: 133109 - RNA, 32 nt, Homo Sapiens
uuucaacuucuaaauagguaacucgacugcaa

SEQ ID NO: 133110 - RNA, 32 nt, Homo Sapiens
ggggcacaugcuggccgcuccucccucagaaa

SEQ ID NO: 133111 - RNA, 30 nt, Homo Sapiens
uuccaugucugugguagaagaagccccaca

SEQ ID NO: 133112 - RNA, 32 nt, Homo Sapiens
cagccgccgccgcuggccagggugcuggacaa

SEQ ID NO: 133113 - RNA, 32 nt, Homo Sapiens
cagccugggcgacagagccagacucuugucuc

SEQ ID NO: 133114 - RNA, 32 nt, Homo Sapiens
caaaacuguuuuccucucuccuccccccucca

SEQ ID NO: 133115 - RNA, 32 nt, Homo Sapiens
cauaaaggagccaauuccaacucuguaaaaaa

SEQ ID NO: 133116 - RNA, 32 nt, Homo Sapiens
cccaaagacuucgccgccgagaacugcgggug

SEQ ID NO: 133117 - RNA, 32 nt, Homo Sapiens
ucgcucgcgggccgggcccggcauggugcggc

SEQ ID NO: 133118 - RNA, 32 nt, Homo Sapiens
uuguuaucuucagaaaauauuauuugaccuac

SEQ ID NO: 133119 - RNA, 32 nt, Homo Sapiens
gugugcaauuguaaacagaaauugcaauaugg

SEQ ID NO: 133120 - RNA, 32 nt, Homo Sapiens
acggacaggaccagcaguucugcaggggcgug

SEQ ID NO: 133121 - RNA, 32 nt, Homo Sapiens
gaggaaaauaagaauuugauauuuuguuagaa

SEQ ID NO: 133122 - RNA, 32 nt, Homo Sapiens
agguaguaucuauacaauaacaacaaucucua

SEQ ID NO: 133123 - RNA, 32 nt, Homo Sapiens
uuaacuuauuuaauguauuucaucucauguuu

SEQ ID NO: 133124 - RNA, 32 nt, Homo Sapiens
acuguucacagcaaaugcuuggauuuuaugca

SEQ ID NO: 133125 - RNA, 32 nt, Homo Sapiens
auuuuguguacuuuuuauuuauuuuggagguu

SEQ ID NO: 133126 - RNA, 32 nt, Homo Sapiens
acgaggucaggaguucgagaccacccuggcca

SEQ ID NO: 133127 - RNA, 32 nt, Homo Sapiens
ugugucucugucaucacuaggaaucacagaua

SEQ ID NO: 133128 - RNA, 32 nt, Homo Sapiens
cugcgaggccaacaccuucgauggugagcgcu

SEQ ID NO: 133129 - RNA, 32 nt, Homo Sapiens
gaauuuaaaacaccucuuucuaauaauggcca

SEQ ID NO: 133130 - RNA, 32 nt, Homo Sapiens
gggcuguuggacauggcuggacaggcgcaggg

SEQ ID NO: 133131 - RNA, 32 nt, Homo Sapiens
cugcccuggcaggaagcuuccaagaguaaaca

SEQ ID NO: 133132 - RNA, 32 nt, Homo Sapiens
ucgcugcagccggcggcuagcgggcguccgcg

SEQ ID NO: 133133 - RNA, 32 nt, Homo Sapiens
uccuccagccccucccagucagcccucccguc

SEQ ID NO: 133134 - RNA, 32 nt, Homo Sapiens
guucccaggaugccacuuccuccacgaauagc

SEQ ID NO: 133135 - RNA, 32 nt, Homo Sapiens
gacgcugggaagcgcgcugugcaaagcgcucu

SEQ ID NO: 133136 - RNA, 29 nt, Homo Sapiens
uuuucauaaaguuuuauuugcaauuuuag

SEQ ID NO: 133137 - RNA, 32 nt, Homo Sapiens
uuguagcagugauucaguaaguagcaacccug

SEQ ID NO: 133138 - RNA, 32 nt, Homo Sapiens
caucccccaagccuccugggaggauccagcca

SEQ ID NO: 133139 - RNA, 32 nt, Homo Sapiens
gaagucuauuuucaccaauuauggaaacauac

SEQ ID NO: 133140 - RNA, 32 nt, Homo Sapiens
caaugaccagugcaguacagaacuccacauau

SEQ ID NO: 133141 - RNA, 32 nt, Homo Sapiens
cccaccugccagcgguuuccuggugugggucc

SEQ ID NO: 133142 - RNA, 32 nt, Homo Sapiens
cgcgccgcucccucaugcugcccgggcccuuc

SEQ ID NO: 133143 - RNA, 32 nt, Homo Sapiens
cguucaagcgauccuccugccucagccuccug

SEQ ID NO: 133144 - RNA, 32 nt, Homo Sapiens
gggugcgagaugccagcucuggaguucucggu

SEQ ID NO: 133145 - RNA, 32 nt, Homo Sapiens
cuugcugugcauaaaaagaaaauugaagaagu

SEQ ID NO: 133146 - RNA, 32 nt, Homo Sapiens
ugggucccaggauggaggagccccaggccggc

SEQ ID NO: 133147 - RNA, 32 nt, Homo Sapiens
ccuucccacucaccccggcagacgccggggac

SEQ ID NO: 133148 - RNA, 32 nt, Homo Sapiens
aaauccaacagcaagggagauuuuugaaucau

SEQ ID NO: 133149 - RNA, 32 nt, Homo Sapiens
ccucaacagaagaaagguuaaauauuacauuu

SEQ ID NO: 133150 - RNA, 32 nt, Homo Sapiens
gccaguuguacuuuauggagcuuauuuuauga

SEQ ID NO: 133151 - RNA, 32 nt, Homo Sapiens
caugcagcuuugcaucuguuccuuguacugua

SEQ ID NO: 133152 - RNA, 32 nt, Homo Sapiens
cauuuacuagaaaaaaggaauugguuguuuag

SEQ ID NO: 133153 - RNA, 32 nt, Homo Sapiens
aaugguacugaauauuugaaaucaggccuuuc

SEQ ID NO: 133154 - RNA, 32 nt, Homo Sapiens
gugggcggcuucuugggacccacaugagccag

SEQ ID NO: 133155 - RNA, 32 nt, Homo Sapiens
cucccacacugcucccaguccugggcacagug

SEQ ID NO: 133156 - RNA, 32 nt, Homo Sapiens
aggcucaccuggccacuguuuaggcacccaga

SEQ ID NO: 133157 - RNA, 32 nt, Homo Sapiens
gauuauuccagaagccagcaguauuucaguau

SEQ ID NO: 133158 - RNA, 32 nt, Homo Sapiens
aggagaagacaauaaagucgcuccgcagcugc

SEQ ID NO: 133159 - RNA, 32 nt, Homo Sapiens
cacacgcucauauguguuuacucuguaagucu

SEQ ID NO: 133160 - RNA, 32 nt, Homo Sapiens
cagcugguuuuugacagcuguugcugugguaa

SEQ ID NO: 133161 - RNA, 32 nt, Homo Sapiens
guccgggagagagcccggagcggcgugccauc

SEQ ID NO: 133162 - RNA, 32 nt, Homo Sapiens
uuaaaagcagagcuagucuauucuaguuacug

SEQ ID NO: 133163 - RNA, 32 nt, Homo Sapiens
guugccagcgaguuaccacgggaccagucgcg

SEQ ID NO: 133164 - RNA, 32 nt, Homo Sapiens
gccagccaacauacgacaguuuacuucaagac

SEQ ID NO: 133165 - RNA, 30 nt, Homo Sapiens
ucagcugucugugucuccagugcucccauu

SEQ ID NO: 133166 - RNA, 32 nt, Homo Sapiens
auuauucaauuucaugaauaacucuuguuugc

SEQ ID NO: 133167 - RNA, 32 nt, Homo Sapiens
cccacucagacuccggggaucccgcgggccga

SEQ ID NO: 133168 - RNA, 32 nt, Homo Sapiens
ggugggacccucaagaaaaugacggagaacau

SEQ ID NO: 133169 - RNA, 32 nt, Homo Sapiens
cuagagaguucaaaaguguuugaaaguacauu

SEQ ID NO: 133170 - RNA, 32 nt, Homo Sapiens
aggaggaguggcugaggcagggcauggagcgg

SEQ ID NO: 133171 - RNA, 32 nt, Homo Sapiens
augaccuaaccaaaaacauucaaggguucugc

SEQ ID NO: 133172 - RNA, 32 nt, Homo Sapiens
ugucacugucuugaaucagacucagaaauggc

SEQ ID NO: 133173 - RNA, 32 nt, Homo Sapiens
uccuuauauggaaaaccguuauagacccaaua

SEQ ID NO: 133174 - RNA, 32 nt, Homo Sapiens
cccacccccgcagaggccucuccggagccagg

SEQ ID NO: 133175 - RNA, 32 nt, Homo Sapiens
auuuuuaaugaaaucugggguuuuauauuuug

SEQ ID NO: 133176 - RNA, 32 nt, Homo Sapiens
aauuccuuuugauaauuuuuuaaguuuccagc

SEQ ID NO: 133177 - RNA, 32 nt, Homo Sapiens
uggaggggccggagggcgggccccuccucaca

SEQ ID NO: 133178 - RNA, 32 nt, Homo Sapiens
ccccaagcuggcacucacgggugggcaggcuc

SEQ ID NO: 133179 - RNA, 32 nt, Homo Sapiens
ugauuauuuacaugcauauaguauauacacuu

SEQ ID NO: 133180 - RNA, 32 nt, Homo Sapiens
uaugauaucagccaagaguuuuccugugguuc

SEQ ID NO: 133181 - RNA, 32 nt, Homo Sapiens
auuuauaauuuauguaugcauugauuuaauac

SEQ ID NO: 133182 - RNA, 32 nt, Homo Sapiens
cgcccuggaggcgguggcugggauaaacgugc

SEQ ID NO: 133183 - RNA, 32 nt, Homo Sapiens
ggaacacgaaacaggagucucuucuguucugc

SEQ ID NO: 133184 - RNA, 32 nt, Homo Sapiens
auucccacauucuccuuucugccacaucucgc

SEQ ID NO: 133185 - RNA, 32 nt, Homo Sapiens
uucuaacucugauguaaaugaaguaacuuguc

SEQ ID NO: 133186 - RNA, 32 nt, Homo Sapiens
ucaccucuuccgacucuuucugagugccuucu

SEQ ID NO: 133187 - RNA, 32 nt, Homo Sapiens
gggcaggucgcgccugcgggcggcagccgacc

SEQ ID NO: 133188 - RNA, 32 nt, Homo Sapiens
agccuaguuuuuaaauaucugaaucuuaagcg

SEQ ID NO: 133189 - RNA, 32 nt, Homo Sapiens
gggagccucacagcagccacgcagcaggcucu

SEQ ID NO: 133190 - RNA, 32 nt, Homo Sapiens
cagaagcuuccuggccacugggcuuggaugcu

SEQ ID NO: 133191 - RNA, 32 nt, Homo Sapiens
cucucagggucaucucggggaucacagggauc

SEQ ID NO: 133192 - RNA, 32 nt, Homo Sapiens
gccuacguccuccauggaagugccagcucauu

SEQ ID NO: 133193 - RNA, 32 nt, Homo Sapiens
auauuugcuuaauaauacacuaaaaguauaug

SEQ ID NO: 133194 - RNA, 32 nt, Homo Sapiens
gcccaaauuucugacccacaaaaacaugagau

SEQ ID NO: 133195 - RNA, 32 nt, Homo Sapiens
gagguugcaggaucgcuugagcccaggagguc

SEQ ID NO: 133196 - RNA, 32 nt, Homo Sapiens
aacccuaauguuucuuacuugcuaugugaccu

SEQ ID NO: 133197 - RNA, 32 nt, Homo Sapiens
cugguuccuuucuauuugugugcuauuuauuu

SEQ ID NO: 133198 - RNA, 32 nt, Homo Sapiens
ugugcuguggccgggggcggccguugaccugg

SEQ ID NO: 133199 - RNA, 32 nt, Homo Sapiens
aaaacacuaccacugcuauuuacguuuaagua

SEQ ID NO: 133200 - RNA, 32 nt, Homo Sapiens
gauugcaccggggcugauuugggggcugggaa

SEQ ID NO: 133201 - RNA, 32 nt, Homo Sapiens
gugccccgaagcgcucgcuucccgcggugcga

SEQ ID NO: 133202 - RNA, 32 nt, Homo Sapiens
gaugaaacacaagcuucuaauauucuggucca

SEQ ID NO: 133203 - RNA, 32 nt, Homo Sapiens
ggcaggguuuguggacagagcccuacuuucgg

SEQ ID NO: 133204 - RNA, 32 nt, Homo Sapiens
ggaaaguggacaggaggcucacccgucugcau

SEQ ID NO: 133205 - RNA, 32 nt, Homo Sapiens
auuguguugaagcagaaauuguuccggaucuc

SEQ ID NO: 133206 - RNA, 32 nt, Homo Sapiens
caagccguggcuucccgcucagcccucccugc

SEQ ID NO: 133207 - RNA, 32 nt, Homo Sapiens
ggccuucagcccucugugguccccucuccccg

SEQ ID NO: 133208 - RNA, 32 nt, Homo Sapiens
ucuuaagcauacagcuugaugaagauuuacaa

SEQ ID NO: 133209 - RNA, 32 nt, Homo Sapiens
acaggaggcagacaaauccuaggcagacaggg

SEQ ID NO: 133210 - RNA, 32 nt, Homo Sapiens
ucagccagagucuuaugggaucuucacuucac

SEQ ID NO: 133211 - RNA, 32 nt, Homo Sapiens
aauacuguauuuuuacuguaccuucuuuaugu

SEQ ID NO: 133212 - RNA, 32 nt, Homo Sapiens
gaaauauuacaauaagguuauuugcucaaaua

SEQ ID NO: 133213 - RNA, 32 nt, Homo Sapiens
cuccauccuccaugggggcucagccaggugcu

SEQ ID NO: 133214 - RNA, 32 nt, Homo Sapiens
cucugugacaauaggaucauggccuuacccuu

SEQ ID NO: 133215 - RNA, 32 nt, Homo Sapiens
aguccuacgugaaccucaaccaccacggccug

SEQ ID NO: 133216 - RNA, 32 nt, Homo Sapiens
gguuuggugaaccugaaugguccagccaccuu

SEQ ID NO: 133217 - RNA, 32 nt, Homo Sapiens
gaaacuccgucucuacaaaaaauagaaaaaau

SEQ ID NO: 133218 - RNA, 32 nt, Homo Sapiens
ucuggcucugagaugaggcagacggcacccag

SEQ ID NO: 133219 - RNA, 32 nt, Homo Sapiens
ccucgagauuaacggugcuaaccccgucugcu

SEQ ID NO: 133220 - RNA, 32 nt, Homo Sapiens
uauauauauguaguaaaccacuuuuuguaaaa

SEQ ID NO: 133221 - RNA, 32 nt, Homo Sapiens
cuuaguucucagcagcaaaucaucucuuuucc

SEQ ID NO: 133222 - RNA, 32 nt, Homo Sapiens
ucaguuugucuuuuuuuuuuuaaacuaaaaug

SEQ ID NO: 133223 - RNA, 32 nt, Homo Sapiens
uugcagugagucgagaucgcgccacugcacuc

SEQ ID NO: 133224 - RNA, 32 nt, Homo Sapiens
uuuguucguuuuuaaguuuacuucucuuuaau

SEQ ID NO: 133225 - RNA, 32 nt, Homo Sapiens
gucagggagaaaguagagaaagcugucaugcc

SEQ ID NO: 133226 - RNA, 32 nt, Homo Sapiens
aacccuucccucccuuuccccaccucuuacag

SEQ ID NO: 133227 - RNA, 32 nt, Homo Sapiens
ccaauggcggccuggccuaaccaggggugcag

SEQ ID NO: 133228 - RNA, 32 nt, Homo Sapiens
ggcacccccgguucccgccaggcccuccugcc

SEQ ID NO: 133229 - RNA, 31 nt, Homo Sapiens
accgacaugaagggaacaggcaucauggacu

SEQ ID NO: 133230 - RNA, 32 nt, Homo Sapiens
cagccuuggcagugacuggacagcuggguggg

SEQ ID NO: 133231 - RNA, 32 nt, Homo Sapiens
ucuguaggaggguggggcggggccaggccugc

SEQ ID NO: 133232 - RNA, 32 nt, Homo Sapiens
gguguccaagaugccaacaagaggcucucagu

SEQ ID NO: 133233 - RNA, 32 nt, Homo Sapiens
guauuacaaauauauagcacaucaccugggac

SEQ ID NO: 133234 - RNA, 32 nt, Homo Sapiens
uuggggugguggggccccgggcggcguugacc

SEQ ID NO: 133235 - RNA, 31 nt, Homo Sapiens
caagcucgaccacuggaguccacuccucugc

SEQ ID NO: 133236 - RNA, 32 nt, Homo Sapiens
ggccuuccugcccacaugccccgggagaaacc

SEQ ID NO: 133237 - RNA, 32 nt, Homo Sapiens
agcauaaugcuuugggcuuuauuaucuuguca

SEQ ID NO: 133238 - RNA, 30 nt, Homo Sapiens
gaaauggcaugcuuuacccaucuuacuuag

SEQ ID NO: 133239 - RNA, 32 nt, Homo Sapiens
ccugcggugcuaucucccccagccccauccuc

SEQ ID NO: 133240 - RNA, 32 nt, Homo Sapiens
auguccucaaccccaaaucccccgacucccuc

SEQ ID NO: 133241 - RNA, 32 nt, Homo Sapiens
ccccgagguuaaaacuuuucaccccuugaaga

SEQ ID NO: 133242 - RNA, 32 nt, Homo Sapiens
cagacaucuucaguccuuuggugauuaaaugc

SEQ ID NO: 133243 - RNA, 32 nt, Homo Sapiens
aaauuugcaaaacugugcuuuuauugacuuuu

SEQ ID NO: 133244 - RNA, 32 nt, Homo Sapiens
auuuuaacagagcacuacuuaauuuuggguua

SEQ ID NO: 133245 - RNA, 32 nt, Homo Sapiens
caccgcacccucacuagccaggguguugauga

SEQ ID NO: 133246 - RNA, 31 nt, Homo Sapiens
gacaggagaaacacuugaaccugggaggugg

SEQ ID NO: 133247 - RNA, 32 nt, Homo Sapiens
cccgugucagugccgcucugcgugugcgugug

SEQ ID NO: 133248 - RNA, 32 nt, Homo Sapiens
acaaugcgcccggcagucuggcgaccaccuug

SEQ ID NO: 133249 - RNA, 32 nt, Homo Sapiens
gauggcccugucagccacccucucucagucug

SEQ ID NO: 133250 - RNA, 32 nt, Homo Sapiens
aaauuaauguauacauuuuuuauuucuuucug

SEQ ID NO: 133251 - RNA, 32 nt, Homo Sapiens
cuguuauauauugugaaauuuauuuuauauag

SEQ ID NO: 133252 - RNA, 32 nt, Homo Sapiens
gaucuguuuuggauguugcuauagugacaugc

SEQ ID NO: 133253 - RNA, 32 nt, Homo Sapiens
cugguuucugcuuucuuuugacuacuugacug

SEQ ID NO: 133254 - RNA, 32 nt, Homo Sapiens
ggaggagaguaagggaacacuccaucgauugc

SEQ ID NO: 133255 - RNA, 32 nt, Homo Sapiens
uccuggccuuuccuccgccgggcccgcauuuu

SEQ ID NO: 133256 - RNA, 32 nt, Homo Sapiens
cuuuauuaucuaccaugaaucaacgaaacauu

SEQ ID NO: 133257 - RNA, 32 nt, Homo Sapiens
aauuguuaucuuauucuuuuuaucuuuaguag

SEQ ID NO: 133258 - RNA, 32 nt, Homo Sapiens
uggcugggggaucggggcugugcugggcgccg

SEQ ID NO: 133259 - RNA, 32 nt, Homo Sapiens
uugcgguggcagcaugacuccaaacaacauuu

SEQ ID NO: 133260 - RNA, 32 nt, Homo Sapiens
ugacguggccccagccccgccucccuccccac

SEQ ID NO: 133261 - RNA, 32 nt, Homo Sapiens
aaggagcuccagcccugaugguuacuugcuau

SEQ ID NO: 133262 - RNA, 32 nt, Homo Sapiens
uuuuaccguucacuuccccuuccaacuauguc

SEQ ID NO: 133263 - RNA, 32 nt, Homo Sapiens
caguuuuuacacaaggaaucucaaaaucuuaa

SEQ ID NO: 133264 - RNA, 32 nt, Homo Sapiens
cggccgcguccuugcuggccccuauggacgug

SEQ ID NO: 133265 - RNA, 32 nt, Homo Sapiens
aaacucuguaaaaugaacaauaaaauaaagca

SEQ ID NO: 133266 - RNA, 32 nt, Homo Sapiens
cuuuuaguucacuuguuuguauuucaucuuga

SEQ ID NO: 133267 - RNA, 32 nt, Homo Sapiens
uuucaaagaaaguuaagaaugaccuaaaaugu

SEQ ID NO: 133268 - RNA, 32 nt, Homo Sapiens
uuaucccaguuauaaccuugaccaaaggggaa

SEQ ID NO: 133269 - RNA, 32 nt, Homo Sapiens
ugcaguaaaauguccacuaggaccccauugcc

SEQ ID NO: 133270 - RNA, 32 nt, Homo Sapiens
gacgggguguugccagcguggcaacaggcggg

SEQ ID NO: 133271 - RNA, 32 nt, Homo Sapiens
uaagaccggcggccaugauggugcugaccucu

SEQ ID NO: 133272 - RNA, 32 nt, Homo Sapiens
uuuguugaaauucugcaugccuuuaaaucacu

SEQ ID NO: 133273 - RNA, 32 nt, Homo Sapiens
cccugcuuccuggccuaggcgaggguuccagg

SEQ ID NO: 133274 - RNA, 32 nt, Homo Sapiens
guguccggccgcgggccggccuuagugacugg

SEQ ID NO: 133275 - RNA, 32 nt, Homo Sapiens
cuccauccuugggcuucccgggccccugugac

SEQ ID NO: 133276 - RNA, 32 nt, Homo Sapiens
ggagaagaagaaagcggaaaagaggcagauuc

SEQ ID NO: 133277 - RNA, 32 nt, Homo Sapiens
ucggcagccucuacaggccuagcugcugccuc

SEQ ID NO: 133278 - RNA, 32 nt, Homo Sapiens
augcuuacacgaccucuuugugaagccucuuc

SEQ ID NO: 133279 - RNA, 32 nt, Homo Sapiens
cggcgaggaaaugaaagcgauucuccuugagu

SEQ ID NO: 133280 - RNA, 32 nt, Homo Sapiens
gaaaccccaucucuacuaaaaauagagaaaaa

SEQ ID NO: 133281 - RNA, 32 nt, Homo Sapiens
agcgugugcuugacuccuggaaccugccugcu

SEQ ID NO: 133282 - RNA, 32 nt, Homo Sapiens
gagaugacacugggcuuuaacacucuccccau

SEQ ID NO: 133283 - RNA, 32 nt, Homo Sapiens
uagcugcccacuuuucaguguuacgaagccug

SEQ ID NO: 133284 - RNA, 32 nt, Homo Sapiens
ugucaccgaugaugcugagcgccuccuucagc

SEQ ID NO: 133285 - RNA, 30 nt, Homo Sapiens
aggcucgaggucccugccuuaaauuuuccc

SEQ ID NO: 133286 - RNA, 32 nt, Homo Sapiens
ucagggcccuccccugccucuggguggcacug

SEQ ID NO: 133287 - RNA, 32 nt, Homo Sapiens
uuuuuuguugcuucuuuuuucuuuucuuucuu

SEQ ID NO: 133288 - RNA, 32 nt, Homo Sapiens
gugcuuaaaaauacuucuaugacucucugcua

SEQ ID NO: 133289 - RNA, 32 nt, Homo Sapiens
cuggggugaaguccuauccagacgguuggaau

SEQ ID NO: 133290 - RNA, 32 nt, Homo Sapiens
uuuuguaauauuucauuuguuaaguuuauauc

SEQ ID NO: 133291 - RNA, 32 nt, Homo Sapiens
aagaguggagcaaaugcuuaaaacaaggcuua

SEQ ID NO: 133292 - RNA, 32 nt, Homo Sapiens
cuacuaaguuuuuaaaaauucccuuuaugcac

SEQ ID NO: 133293 - RNA, 32 nt, Homo Sapiens
gguggagguaauugaaucauggaggugguuuc

SEQ ID NO: 133294 - RNA, 32 nt, Homo Sapiens
uguuggggucauucugcugggaagacauuccc

SEQ ID NO: 133295 - RNA, 32 nt, Homo Sapiens
cgagaucucggaccacccaaccugaaaggugc

SEQ ID NO: 133296 - RNA, 32 nt, Homo Sapiens
acucugggacaccaaagauucuacacaaucuu

SEQ ID NO: 133297 - RNA, 32 nt, Homo Sapiens
acacaccugcgguguuaucacggccacugccc

SEQ ID NO: 133298 - RNA, 32 nt, Homo Sapiens
aaaucacgccgcaugcacaaagggacaggccc

SEQ ID NO: 133299 - RNA, 32 nt, Homo Sapiens
gcacggaaggacccccgauccgccgggcacug

SEQ ID NO: 133300 - RNA, 32 nt, Homo Sapiens
uuguauuguuuuacuuuuuuuuuuauuucaau

SEQ ID NO: 133301 - RNA, 32 nt, Homo Sapiens
uuuuccuugaugucccauucucuuccacagcc

SEQ ID NO: 133302 - RNA, 31 nt, Homo Sapiens
cuguggcugcacugccugggugccgugggag

SEQ ID NO: 133303 - RNA, 32 nt, Homo Sapiens
aauuacugauaaaaaugauauugcucuauaug

SEQ ID NO: 133304 - RNA, 31 nt, Homo Sapiens
ggcggcggccagagcccuccccgcgcugcca

SEQ ID NO: 133305 - RNA, 32 nt, Homo Sapiens
gcgacuugccgagcagaaugagcucugcuccu

SEQ ID NO: 133306 - RNA, 32 nt, Homo Sapiens
cggccccgcaugcuccacgucugcccuuuggu

SEQ ID NO: 133307 - RNA, 32 nt, Homo Sapiens
gaaacccauagacugggaauagguuccaguua

SEQ ID NO: 133308 - RNA, 32 nt, Homo Sapiens
gaaaacacgcaccucacacagcuguaaaggga

SEQ ID NO: 133309 - RNA, 32 nt, Homo Sapiens
gauacugaacauuaaauagaaaaucuauuuag

SEQ ID NO: 133310 - RNA, 32 nt, Homo Sapiens
aguggcuuacaccuauaaucccagcaauuugg

SEQ ID NO: 133311 - RNA, 32 nt, Homo Sapiens
gugcucugccagcguugcugucuguaugcccu

SEQ ID NO: 133312 - RNA, 32 nt, Homo Sapiens
uuauucugucuccucuucuuugucaucagcca

SEQ ID NO: 133313 - RNA, 32 nt, Homo Sapiens
cugccugaguacuugccuuaugcugggauuuu

SEQ ID NO: 133314 - RNA, 32 nt, Homo Sapiens
auuaagacaguuucuuuuuucuuuucuuuuuu

SEQ ID NO: 133315 - RNA, 32 nt, Homo Sapiens
uuguguucggcugcggcacgcugcuaaguuuu

SEQ ID NO: 133316 - RNA, 32 nt, Homo Sapiens
uaaaugcuuuuuaucgcuaaaugacuugcaga

SEQ ID NO: 133317 - RNA, 32 nt, Homo Sapiens
gcaacuugacuucagagggauggcucaaugac

SEQ ID NO: 133318 - RNA, 32 nt, Homo Sapiens
aagaggggaggguggggccacgugaaaggcag

SEQ ID NO: 133319 - RNA, 32 nt, Homo Sapiens
ucuacagaaggggacaggaucucggaccccug

SEQ ID NO: 133320 - RNA, 32 nt, Homo Sapiens
ccugccccucugcggcaacgacauggagcgcu

SEQ ID NO: 133321 - RNA, 29 nt, Homo Sapiens
gauuauauauguauguguguacguauaug

SEQ ID NO: 133322 - RNA, 32 nt, Homo Sapiens
uagaauauaacguaucuaccaaagauuccguu

SEQ ID NO: 133323 - RNA, 32 nt, Homo Sapiens
aaccucuugaucugcccuccuuggccucccaa

SEQ ID NO: 133324 - RNA, 32 nt, Homo Sapiens
uuaagauuuauaugaauauuuucccaaaugcc

SEQ ID NO: 133325 - RNA, 32 nt, Homo Sapiens
uacuuagacaauaaaaaacuaauuauaaguga

SEQ ID NO: 133326 - RNA, 32 nt, Homo Sapiens
cgccaccgccccagcccgcccagcccggaggu

SEQ ID NO: 133327 - RNA, 29 nt, Homo Sapiens
aaauacuuguguauguacagaaggaaggg

SEQ ID NO: 133328 - RNA, 32 nt, Homo Sapiens
cuuggaggaaguaugagugcugauucaaacca

SEQ ID NO: 133329 - RNA, 32 nt, Homo Sapiens
aaacaauagcagcugggagaaauaucuauuaa

SEQ ID NO: 133330 - RNA, 32 nt, Homo Sapiens
ccgccgaggccgcaaccccggcucggccuccc

SEQ ID NO: 133331 - RNA, 32 nt, Homo Sapiens
cugccagccugccugaccuggauucugagaac

SEQ ID NO: 133332 - RNA, 32 nt, Homo Sapiens
ucuugugccccucccuggggcauggagggugg

SEQ ID NO: 133333 - RNA, 32 nt, Homo Sapiens
gaacccaggagguggagguugcggugagcuga

SEQ ID NO: 133334 - RNA, 32 nt, Homo Sapiens
gaacccaggagguggagguuguggugagccga

SEQ ID NO: 133335 - RNA, 32 nt, Homo Sapiens
gaaccugggagguggagguugcggugagccaa

SEQ ID NO: 133336 - RNA, 31 nt, Homo Sapiens
agucagagacugcagaaccagguaggcagac

SEQ ID NO: 133337 - RNA, 32 nt, Homo Sapiens
gucuggaauucuuggucccuccguggagaaac

SEQ ID NO: 133338 - RNA, 32 nt, Homo Sapiens
augccuuguuucuaucuuucucuauuuccgug

SEQ ID NO: 133339 - RNA, 32 nt, Homo Sapiens
cuaugaggaggcuucuguucucuccccaguac

SEQ ID NO: 133340 - RNA, 32 nt, Homo Sapiens
ccgcuguucuuuagauccgcucagcggcgcuu

SEQ ID NO: 133341 - RNA, 32 nt, Homo Sapiens
ggagauuuagacaccugaaacugggcguggag

SEQ ID NO: 133342 - RNA, 32 nt, Homo Sapiens
gccucgucagacucggagacgucugacaguga

SEQ ID NO: 133343 - RNA, 32 nt, Homo Sapiens
ucucuccgcaggccccggccgcggcguccucg

SEQ ID NO: 133344 - RNA, 32 nt, Homo Sapiens
cacacacacacacacacacacacacacucgca

SEQ ID NO: 133345 - RNA, 32 nt, Homo Sapiens
cacacauacacaaacacacacacacacuagua

SEQ ID NO: 133346 - RNA, 32 nt, Homo Sapiens
aaccucuuuuucugcucauaaaggagguagaa

SEQ ID NO: 133347 - RNA, 32 nt, Homo Sapiens
gcuggucccccuccgugaaaguguggauuccu

SEQ ID NO: 133348 - RNA, 32 nt, Homo Sapiens
uuuaguaaggauuuuauuaguucuuggcuuuu

SEQ ID NO: 133349 - RNA, 32 nt, Homo Sapiens
caacaaagccccaaacacaggugcacugagca

SEQ ID NO: 133350 - RNA, 32 nt, Homo Sapiens
uugaacaaauuguggaauauaaauacaacuau

SEQ ID NO: 133351 - RNA, 32 nt, Homo Sapiens
ccucccaccccaccccacccuucacaccuggc

SEQ ID NO: 133352 - RNA, 32 nt, Homo Sapiens
gcuuuuuuaucugguucagggauuggauuuca

SEQ ID NO: 133353 - RNA, 31 nt, Homo Sapiens
cggagccagcgcagccugcccggcucagccc

SEQ ID NO: 133354 - RNA, 32 nt, Homo Sapiens
ggauggcgucaacagucccaccuaccaacgcc

SEQ ID NO: 133355 - RNA, 32 nt, Homo Sapiens
gagaaagccagacugaugggaaugagacuuug

SEQ ID NO: 133356 - RNA, 32 nt, Homo Sapiens
cauuucuuacccuggugagaaaagcacaagcg

SEQ ID NO: 133357 - RNA, 32 nt, Homo Sapiens
aggccaauugccuggaucuccuccccucuccc

SEQ ID NO: 133358 - RNA, 32 nt, Homo Sapiens
agauauaccaaaacuguaauacagauauauac

SEQ ID NO: 133359 - RNA, 32 nt, Homo Sapiens
cuuaagucucagaguucucauuacggaaaugg

SEQ ID NO: 133360 - RNA, 32 nt, Homo Sapiens
gaauggaggcucccagggucccugcccacuuc

SEQ ID NO: 133361 - RNA, 32 nt, Homo Sapiens
cuaugguaucuaggaggcauauaaagagguaa

SEQ ID NO: 133362 - RNA, 31 nt, Homo Sapiens
aggauucauuugaguuccacauccaaguaac

SEQ ID NO: 133363 - RNA, 29 nt, Homo Sapiens
ugugugaugaagagcaagaugagacaggc

SEQ ID NO: 133364 - RNA, 32 nt, Homo Sapiens
accaggccuucuucacuaagacuuuguauuca

SEQ ID NO: 133365 - RNA, 32 nt, Homo Sapiens
aacucagaggccuuuaccgguucagauccuug

SEQ ID NO: 133366 - RNA, 32 nt, Homo Sapiens
aagcccaugagcacagggacuggcuaucccaa

SEQ ID NO: 133367 - RNA, 32 nt, Homo Sapiens
acaguaccuuguugcagaugggugauauauaa

SEQ ID NO: 133368 - RNA, 32 nt, Homo Sapiens
ucagggaagauaaguuggaaacacuaaauguu

SEQ ID NO: 133369 - RNA, 32 nt, Homo Sapiens
uugcuuggagucuguggggucguacucccucc

SEQ ID NO: 133370 - RNA, 32 nt, Homo Sapiens
gcggccggccccagucgccgucggucucccgc

SEQ ID NO: 133371 - RNA, 30 nt, Homo Sapiens
cgaagauggcggaggugcagguccuggugc

SEQ ID NO: 133372 - RNA, 32 nt, Homo Sapiens
uuacaugauaaaaagaaaugugauuugucuuc

SEQ ID NO: 133373 - RNA, 32 nt, Homo Sapiens
ugcccccuaauccccuucuccccugcacugua

SEQ ID NO: 133374 - RNA, 32 nt, Homo Sapiens
gacacaggaacuuuagaaauuuugguaugaca

SEQ ID NO: 133375 - RNA, 32 nt, Homo Sapiens
caaugggcagagagagcagagacagguggacc

SEQ ID NO: 133376 - RNA, 32 nt, Homo Sapiens
gcccgggccucgaggaggaaaagacaguaggg

SEQ ID NO: 133377 - RNA, 32 nt, Homo Sapiens
ccucccucuuugauuuuagaagcuauagacau

SEQ ID NO: 133378 - RNA, 32 nt, Homo Sapiens
gccaggagcucacggaggcggcaccgcucccg

SEQ ID NO: 133379 - RNA, 32 nt, Homo Sapiens
ggcuggcggcccugccugggcgcggagggcgg

SEQ ID NO: 133380 - RNA, 32 nt, Homo Sapiens
agccaagauugugccacugcacucuagccuag

SEQ ID NO: 133381 - RNA, 32 nt, Homo Sapiens
ggccggaugugguggcucacgccuguaauccc

SEQ ID NO: 133382 - RNA, 32 nt, Homo Sapiens
accaggaacagggaugagucaggcacaguccu

SEQ ID NO: 133383 - RNA, 32 nt, Homo Sapiens
uuccucugauagaacaaagcgaaaugcagguc

SEQ ID NO: 133384 - RNA, 32 nt, Homo Sapiens
gaccucugugggccgagcugccuguggacggu

SEQ ID NO: 133385 - RNA, 32 nt, Homo Sapiens
ugcagaagcugaugguuacagagcuaguccca

SEQ ID NO: 133386 - RNA, 32 nt, Homo Sapiens
gauccaggccccaggugggcaccaucagcagu

SEQ ID NO: 133387 - RNA, 32 nt, Homo Sapiens
aaaggaguauuaugauuguaaaauugcuaaau

SEQ ID NO: 133388 - RNA, 32 nt, Homo Sapiens
guccccuuucucaucgucggcuccaucuucau

SEQ ID NO: 133389 - RNA, 32 nt, Homo Sapiens
aggggcccaagccccaucucauccuggcacgc

SEQ ID NO: 133390 - RNA, 32 nt, Homo Sapiens
ccuggggucugccgccuauuaaaagugccgua

SEQ ID NO: 133391 - RNA, 32 nt, Homo Sapiens
gcgcccagcuccccgggaccccgguucccgga

SEQ ID NO: 133392 - RNA, 32 nt, Homo Sapiens
gccaaaauaccaucuggccagacgggcccacc

SEQ ID NO: 133393 - RNA, 32 nt, Homo Sapiens
accagagaagguuuuucccaggacgucucaug

SEQ ID NO: 133394 - RNA, 30 nt, Homo Sapiens
agaaaucaugcucgcuucccuuggcacacc

SEQ ID NO: 133395 - RNA, 32 nt, Homo Sapiens
ccgcacaccaggcaguggggacacggcaguaa

SEQ ID NO: 133396 - RNA, 32 nt, Homo Sapiens
cuacugaggagcuuaguaacugcuguuucugu

SEQ ID NO: 133397 - RNA, 32 nt, Homo Sapiens
ccuuauccuacguccuucucuccaucuaucgg

SEQ ID NO: 133398 - RNA, 32 nt, Homo Sapiens
cugcugcugcuuccggcccccgacccuuccuc

SEQ ID NO: 133399 - RNA, 32 nt, Homo Sapiens
aaauacaacaaauuauuuguuggcaagugaua

SEQ ID NO: 133400 - RNA, 32 nt, Homo Sapiens
uuuaugugugaauaauagcuucauuaacacaa

SEQ ID NO: 133401 - RNA, 32 nt, Homo Sapiens
gcugacagcggaugguaugacucauugggggc

SEQ ID NO: 133402 - RNA, 32 nt, Homo Sapiens
aaggaagggaugauuuggagacaaggaguaau

SEQ ID NO: 133403 - RNA, 32 nt, Homo Sapiens
uguacuuuuucaaauaaugauguuuaaaaauu

SEQ ID NO: 133404 - RNA, 32 nt, Homo Sapiens
gaccuagcgcgggccagcggcgcacggugggc

SEQ ID NO: 133405 - RNA, 32 nt, Homo Sapiens
cagggacgacccggggcgggcugaugucuucu

SEQ ID NO: 133406 - RNA, 32 nt, Homo Sapiens
gauauguccucuccggccccacuucguucuca

SEQ ID NO: 133407 - RNA, 32 nt, Homo Sapiens
ggacucgguucuccaggccugauuccccgacu

SEQ ID NO: 133408 - RNA, 32 nt, Homo Sapiens
auuuuuaaugaaauguuuuauuguuuacaaac

SEQ ID NO: 133409 - RNA, 32 nt, Homo Sapiens
uaacggcggcgguguuguaagagagggacuuu

SEQ ID NO: 133410 - RNA, 32 nt, Homo Sapiens
aagaaauuuuuccaacaagcaaaaaccuuuag

SEQ ID NO: 133411 - RNA, 32 nt, Homo Sapiens
ccggguugggauggagauaggaggaucucagu

SEQ ID NO: 133412 - RNA, 32 nt, Homo Sapiens
uguuuuaaacauucuucaguguucugauuucu

SEQ ID NO: 133413 - RNA, 31 nt, Homo Sapiens
uaauaacugugagguacuucagugugguuuu

SEQ ID NO: 133414 - RNA, 32 nt, Homo Sapiens
aacaaguaacaagcaaguuuuaaaauuuuaau

SEQ ID NO: 133415 - RNA, 32 nt, Homo Sapiens
cagagcucgacaagcccagcugcuacacugaa

SEQ ID NO: 133416 - RNA, 32 nt, Homo Sapiens
cuuuccuccuuaagaagaaaaaacagaaggau

SEQ ID NO: 133417 - RNA, 32 nt, Homo Sapiens
ucccagugauguguaaaugagagagaagaaua

SEQ ID NO: 133418 - RNA, 32 nt, Homo Sapiens
agguauguauuucuuucccauauagauaguau

SEQ ID NO: 133419 - RNA, 32 nt, Homo Sapiens
aucauagccaaauugcaaagaaaauuaugguu

SEQ ID NO: 133420 - RNA, 32 nt, Homo Sapiens
ucagugggugccagcccucaguguggcuuugu

SEQ ID NO: 133421 - RNA, 32 nt, Homo Sapiens
gcacccacucuuggagcagcucuccagggcug

SEQ ID NO: 133422 - RNA, 32 nt, Homo Sapiens
gcccgccagugccuuacaauuugcaaacgugu

SEQ ID NO: 133423 - RNA, 32 nt, Homo Sapiens
cuaugaccgggacgacaaggaggccccugacu

SEQ ID NO: 133424 - RNA, 32 nt, Homo Sapiens
gcuacugucuguacccccacuccaucccccag

SEQ ID NO: 133425 - RNA, 32 nt, Homo Sapiens
uuagagugaacaagaacaccccugccgacucc

SEQ ID NO: 133426 - RNA, 32 nt, Homo Sapiens
gaaagguugugauggcggcuauagcugcaucc

SEQ ID NO: 133427 - RNA, 32 nt, Homo Sapiens
cccccguccuggagguuccccagccccacuua

SEQ ID NO: 133428 - RNA, 32 nt, Homo Sapiens
ugcgaagccagcaagcuuuugcugcagaugga

SEQ ID NO: 133429 - RNA, 32 nt, Homo Sapiens
accugcacauucagcacauguaucccagaacu

SEQ ID NO: 133430 - RNA, 32 nt, Homo Sapiens
gaccguugagccuaaacaucuccugcagagug

SEQ ID NO: 133431 - RNA, 32 nt, Homo Sapiens
ccuccgcggcggugacggcgaccgcacucccc

SEQ ID NO: 133432 - RNA, 30 nt, Homo Sapiens
uagccuaggucuugagugaaccccaaaaaa

SEQ ID NO: 133433 - RNA, 32 nt, Homo Sapiens
ggucaguguuaccauccauacugugucaguau

SEQ ID NO: 133434 - RNA, 32 nt, Homo Sapiens
cuagcccggcagaugaaggcgaagcggcggcg

SEQ ID NO: 133435 - RNA, 32 nt, Homo Sapiens
uuugcuguucuaauguuugugaauuuucacuc

SEQ ID NO: 133436 - RNA, 32 nt, Homo Sapiens
caggccaugcugcuguagacccuaacagcguc

SEQ ID NO: 133437 - RNA, 32 nt, Homo Sapiens
uguuugcgcccccguguccccagcugcaaggu

SEQ ID NO: 133438 - RNA, 32 nt, Homo Sapiens
aucuccgccucccagguucaagcgauucucuu

SEQ ID NO: 133439 - RNA, 32 nt, Homo Sapiens
uaaccacucacagcaccuggcccgccaagguu

SEQ ID NO: 133440 - RNA, 32 nt, Homo Sapiens
gagcaucccuggauucuguucagggugggaag

SEQ ID NO: 133441 - RNA, 32 nt, Homo Sapiens
gcccagucccgucauucugggcuagaaggcag

SEQ ID NO: 133442 - RNA, 27 nt, Homo Sapiens
ccaggccucuucuucauccaccaccac

SEQ ID NO: 133443 - RNA, 32 nt, Homo Sapiens
ccgcugcgugugcgguacuguggaggcggcgg

SEQ ID NO: 133444 - RNA, 32 nt, Homo Sapiens
caacauauagaggguggaagaauagagagaua

SEQ ID NO: 133445 - RNA, 32 nt, Homo Sapiens
gcguagccccacgccccucccccguccgcgcc

SEQ ID NO: 133446 - RNA, 32 nt, Homo Sapiens
auugacuguauaugaccuuaaucuuugugcag

SEQ ID NO: 133447 - RNA, 32 nt, Homo Sapiens
cagcuucuccuaaaccacguggaucuccaaac

SEQ ID NO: 133448 - RNA, 32 nt, Homo Sapiens
agcaagccacucuuccaccucccuuacugcag

SEQ ID NO: 133449 - RNA, 32 nt, Homo Sapiens
agucacugcauauucccccagccccugggcaa

SEQ ID NO: 133450 - RNA, 32 nt, Homo Sapiens
uuuccuaaugaaacugcucauuugauuguugg

SEQ ID NO: 133451 - RNA, 32 nt, Homo Sapiens
ggggccucggggacagggcgccacucacagcc

SEQ ID NO: 133452 - RNA, 32 nt, Homo Sapiens
aguuggcugccaaucucccugcucuugguucu

SEQ ID NO: 133453 - RNA, 29 nt, Homo Sapiens
agccauggcggacgguggcggcggcggca

SEQ ID NO: 133454 - RNA, 32 nt, Homo Sapiens
agagggaaagcgagagggagacggacguugag

SEQ ID NO: 133455 - RNA, 32 nt, Homo Sapiens
aauauucuaaucuuuuuucauuuauaugcaaa

SEQ ID NO: 133456 - RNA, 32 nt, Homo Sapiens
uuguacuguuuuuacuguguauagaaauuagu

SEQ ID NO: 133457 - RNA, 32 nt, Homo Sapiens
aggauugugacuccccagccccugcccucaaa

SEQ ID NO: 133458 - RNA, 32 nt, Homo Sapiens
aaaaugaaggcuuuaaucagcauuguaaagga

SEQ ID NO: 133459 - RNA, 32 nt, Homo Sapiens
augcccccuccaggagagagccaggaugccca

SEQ ID NO: 133460 - RNA, 32 nt, Homo Sapiens
uuguaauugaucuuguaguuucccaguaucac

SEQ ID NO: 133461 - RNA, 32 nt, Homo Sapiens
ucacccacauuccaccaagaggaagcugaagc

SEQ ID NO: 133462 - RNA, 32 nt, Homo Sapiens
uggacaccuggaaggcuguggugcugaucuac

SEQ ID NO: 133463 - RNA, 32 nt, Homo Sapiens
cacccugcugccagagucaucauccucaaaaa

SEQ ID NO: 133464 - RNA, 32 nt, Homo Sapiens
uggggcucguuugggugauuucccucggcggu

SEQ ID NO: 133465 - RNA, 32 nt, Homo Sapiens
gaggcggccccggacggggauggucagcggcu

SEQ ID NO: 133466 - RNA, 32 nt, Homo Sapiens
ggcugcgcuccuucagacuugcugcagaauca

SEQ ID NO: 133467 - RNA, 32 nt, Homo Sapiens
cuauauugaggaugaaguuuucuaugguggga

SEQ ID NO: 133468 - RNA, 32 nt, Homo Sapiens
uuucccuuuccacauuaauaaaugccuuucug

SEQ ID NO: 133469 - RNA, 32 nt, Homo Sapiens
auggugggccucuggaguccaggggcuggccg

SEQ ID NO: 133470 - RNA, 32 nt, Homo Sapiens
gcaguagacacuaaucaaauggucacaaaaug

SEQ ID NO: 133471 - RNA, 32 nt, Homo Sapiens
cccauccuggccucagaacaugcugagcacau

SEQ ID NO: 133472 - RNA, 32 nt, Homo Sapiens
uuucuuuguaaguaauucuuuuggucucaagu

SEQ ID NO: 133473 - RNA, 32 nt, Homo Sapiens
uagaauugacauugaaaucuaggaaaauuauu

SEQ ID NO: 133474 - RNA, 32 nt, Homo Sapiens
ugugaagugcauuuaaauguuuguuggcuugu

SEQ ID NO: 133475 - RNA, 32 nt, Homo Sapiens
auguaguuuaggcuggaaaugguuucacuugc

SEQ ID NO: 133476 - RNA, 32 nt, Homo Sapiens
auugcaccuuucugcccuuucccccucauuau

SEQ ID NO: 133477 - RNA, 32 nt, Homo Sapiens
aacuauggccuguggaucaaauccagccugcu

SEQ ID NO: 133478 - RNA, 32 nt, Homo Sapiens
aaguguuguaaaauaauucagaguucaggacc

SEQ ID NO: 133479 - RNA, 32 nt, Homo Sapiens
gggagcccucaccagaacccagcccagcugua

SEQ ID NO: 133480 - RNA, 28 nt, Homo Sapiens
gugcgcgggcggccgccggcugaaugaa

SEQ ID NO: 133481 - RNA, 32 nt, Homo Sapiens
cgggagcugcgcagcgcuccacucggccggca

SEQ ID NO: 133482 - RNA, 32 nt, Homo Sapiens
uuauuuaaaaauuuuuuuuuagagaugaguuc

SEQ ID NO: 133483 - RNA, 32 nt, Homo Sapiens
agcacuuuuuauuuucauuuucugucacagac

SEQ ID NO: 133484 - RNA, 32 nt, Homo Sapiens
ggcagcaccaggccaucauggugcuggaggug

SEQ ID NO: 133485 - RNA, 32 nt, Homo Sapiens
aaguuuucaauacaacuccucuaccaacggcu

SEQ ID NO: 133486 - RNA, 32 nt, Homo Sapiens
gcggcucccuucccuugcaugcugcauugugu

SEQ ID NO: 133487 - RNA, 32 nt, Homo Sapiens
uaacuucaagccagaagauaucaccgaggcuc

SEQ ID NO: 133488 - RNA, 32 nt, Homo Sapiens
accuggggccccagcaccucuccuuggcuuug

SEQ ID NO: 133489 - RNA, 32 nt, Homo Sapiens
ugcaguagaagcuagugagcaugugagcaagc

SEQ ID NO: 133490 - RNA, 32 nt, Homo Sapiens
agaacauuacaauauaucuuuuucuacauaug

SEQ ID NO: 133491 - RNA, 28 nt, Homo Sapiens
uuugaucuuucuaauauguugguuugua

SEQ ID NO: 133492 - RNA, 32 nt, Homo Sapiens
caggaacucugcagaguccaugcugugagcuu

SEQ ID NO: 133493 - RNA, 32 nt, Homo Sapiens
aauuuagacaaugaaaugggcugggucuaccc

SEQ ID NO: 133494 - RNA, 32 nt, Homo Sapiens
acaaacaugcuucgucagagguguugggguug

SEQ ID NO: 133495 - RNA, 32 nt, Homo Sapiens
ggcaggggucccagaaggggccccauggacua

SEQ ID NO: 133496 - RNA, 32 nt, Homo Sapiens
cauuacagaaaaaguuugauaauuccugcuuu

SEQ ID NO: 133497 - RNA, 32 nt, Homo Sapiens
ccucuguccggacagggaaggugcuggggucc

SEQ ID NO: 133498 - RNA, 32 nt, Homo Sapiens
gagcaagagaauaaaaaucauguguuauuaaa

SEQ ID NO: 133499 - RNA, 32 nt, Homo Sapiens
cugaaaagaguugugagcuuuuuuauucauga

SEQ ID NO: 133500 - RNA, 32 nt, Homo Sapiens
uacccacccugccagcagcccuaggucuuccu

SEQ ID NO: 133501 - RNA, 32 nt, Homo Sapiens
uggaacaagagucuuaucuggauuggauccug

SEQ ID NO: 133502 - RNA, 32 nt, Homo Sapiens
accacaggacacaacugaauuaaacagauuga

SEQ ID NO: 133503 - RNA, 32 nt, Homo Sapiens
acuagauaaaagcagugcuuugugaaaugcag

SEQ ID NO: 133504 - RNA, 32 nt, Homo Sapiens
gguuuuggcuuuguuuuugauuuuuuuuuauu

SEQ ID NO: 133505 - RNA, 30 nt, Homo Sapiens
cacacacuacuugccagaugucgaguauuc

SEQ ID NO: 133506 - RNA, 32 nt, Homo Sapiens
gggccccuagcacgcgccccagccccagagca

SEQ ID NO: 133507 - RNA, 32 nt, Homo Sapiens
gggcagccagacccccaccuauagcuucccua

SEQ ID NO: 133508 - RNA, 32 nt, Homo Sapiens
agacacagacuacaauuuuagaugguaagguu

SEQ ID NO: 133509 - RNA, 32 nt, Homo Sapiens
uuggggcaaaaauaaaaguguaauuuguaaug

SEQ ID NO: 133510 - RNA, 32 nt, Homo Sapiens
cacacacacacacacacauacacacacgacug

SEQ ID NO: 133511 - RNA, 32 nt, Homo Sapiens
cgccccagcuccgccgagaggccgcuugcgca

SEQ ID NO: 133512 - RNA, 32 nt, Homo Sapiens
uagcagauucagaccaugccgcucaccucuca

SEQ ID NO: 133513 - RNA, 32 nt, Homo Sapiens
ccaaguguguagugagacaaauaccacuaccu

SEQ ID NO: 133514 - RNA, 32 nt, Homo Sapiens
uggggcuugucuugagacguggcaaauucucc

SEQ ID NO: 133515 - RNA, 32 nt, Homo Sapiens
cuccaguaguuccugcgccgcggcgacuaugc

SEQ ID NO: 133516 - RNA, 32 nt, Homo Sapiens
cauuccauucuauuguuuacacaacgauuacu

SEQ ID NO: 133517 - RNA, 32 nt, Homo Sapiens
uaacagaagaaccccuaaaacagguuaauuug

SEQ ID NO: 133518 - RNA, 32 nt, Homo Sapiens
uuggguugaggguggggggucugguagaacac

SEQ ID NO: 133519 - RNA, 32 nt, Homo Sapiens
uagaguccuagccccagagccccagccccuca

SEQ ID NO: 133520 - RNA, 32 nt, Homo Sapiens
ggaaacuuaaccguuacccaggcaauacucaa

SEQ ID NO: 133521 - RNA, 32 nt, Homo Sapiens
uggcuggaugggacaucuccagacuacaaaaa

SEQ ID NO: 133522 - RNA, 32 nt, Homo Sapiens
auagguauauauaugccaugauggaaauauuu

SEQ ID NO: 133523 - RNA, 32 nt, Homo Sapiens
uuauaaagcagccauggaggcuaagaacaugc

SEQ ID NO: 133524 - RNA, 32 nt, Homo Sapiens
cccaggaggcgagaaagggcugggcgccugag

SEQ ID NO: 133525 - RNA, 32 nt, Homo Sapiens
gcuggcccagccugugcuccccgggcugcuag

SEQ ID NO: 133526 - RNA, 32 nt, Homo Sapiens
gauuuugccugaugccucccaaggaggcugug

SEQ ID NO: 133527 - RNA, 32 nt, Homo Sapiens
ccccaccccgucugcguccugcauccaucucc

SEQ ID NO: 133528 - RNA, 32 nt, Homo Sapiens
gugaugugguagcaauuuuauaaauguugcuu

SEQ ID NO: 133529 - RNA, 30 nt, Homo Sapiens
caaagucuggacuaucuucauuuacuacau

SEQ ID NO: 133530 - RNA, 32 nt, Homo Sapiens
gggaacauacugauuggucuuaaaagacuaga

SEQ ID NO: 133531 - RNA, 32 nt, Homo Sapiens
acaccuagaaccccaauucagccuccugggca

SEQ ID NO: 133532 - RNA, 32 nt, Homo Sapiens
agcucagcucagcgcagcuccgcggccgccaa

SEQ ID NO: 133533 - RNA, 32 nt, Homo Sapiens
uaccacaaggacccccggggcugcagccuccu

SEQ ID NO: 133534 - RNA, 30 nt, Homo Sapiens
ggcggcggcggcggcggcgaagaacuguuc

SEQ ID NO: 133535 - RNA, 32 nt, Homo Sapiens
uuacaggugugagccaccacaccugcccccgc

SEQ ID NO: 133536 - RNA, 32 nt, Homo Sapiens
ugugucugcccccgucuucucuccauccucaa

SEQ ID NO: 133537 - RNA, 32 nt, Homo Sapiens
acaaucaauaguuuguuuuucuuuuuuaaaaa

SEQ ID NO: 133538 - RNA, 32 nt, Homo Sapiens
agaaugcugacuuuuccuacauuuccagaguu

SEQ ID NO: 133539 - RNA, 32 nt, Homo Sapiens
ugccucccacaguuccuccccuaaucugguuu

SEQ ID NO: 133540 - RNA, 31 nt, Homo Sapiens
gugcaguguaacauguaucccguugccuguu

SEQ ID NO: 133541 - RNA, 31 nt, Homo Sapiens
aagguuuuggaguagaaccagggguguguau

SEQ ID NO: 133542 - RNA, 32 nt, Homo Sapiens
ggaccaguucuuguugcuauuguacaaguuau

SEQ ID NO: 133543 - RNA, 32 nt, Homo Sapiens
ucuaucacaugauuuuaaaaaauacaccaaag

SEQ ID NO: 133544 - RNA, 32 nt, Homo Sapiens
aagguggaggccggcagggcggaggcggagcc

SEQ ID NO: 133545 - RNA, 32 nt, Homo Sapiens
ccugcuuuugugauggaugcuuccuucuggcu

SEQ ID NO: 133546 - RNA, 32 nt, Homo Sapiens
aucauggaaaggaaagagguuuguccucacug

SEQ ID NO: 133547 - RNA, 32 nt, Homo Sapiens
cuuaauggaauucucacuucauuugaauauaa

SEQ ID NO: 133548 - RNA, 32 nt, Homo Sapiens
gcgacgccugcccagcccuccuccccuuccgg

SEQ ID NO: 133549 - RNA, 32 nt, Homo Sapiens
uaguuuacagagagaaucacaaacaggauaac

SEQ ID NO: 133550 - RNA, 32 nt, Homo Sapiens
ucuuuauugaacauuuacccugugacagguac

SEQ ID NO: 133551 - RNA, 32 nt, Homo Sapiens
aggugucgccgagccgggaggcugggagucgc

SEQ ID NO: 133552 - RNA, 32 nt, Homo Sapiens
ccugcuggagcgcgcgcucccgggccgagcgc

SEQ ID NO: 133553 - RNA, 32 nt, Homo Sapiens
agcaccuggagcaucauuucugcugccacaug

SEQ ID NO: 133554 - RNA, 32 nt, Homo Sapiens
gugacgccaaaaucacgucucuggagacccgc

SEQ ID NO: 133555 - RNA, 32 nt, Homo Sapiens
uggcugcuggggaagcagcugcagcaggaggg

SEQ ID NO: 133556 - RNA, 32 nt, Homo Sapiens
uuucucagccccaccccacguuuggacauuug

SEQ ID NO: 133557 - RNA, 32 nt, Homo Sapiens
ucagucuggccuccugccuuucuggccugcag

SEQ ID NO: 133558 - RNA, 32 nt, Homo Sapiens
cucucccuccgagauacccacccagcuuuguc

SEQ ID NO: 133559 - RNA, 32 nt, Homo Sapiens
gcaguguccacuuuucuguauaaaauguauaa

SEQ ID NO: 133560 - RNA, 32 nt, Homo Sapiens
cucacuaugaaucuauuauacuguauuaagag

SEQ ID NO: 133561 - RNA, 32 nt, Homo Sapiens
ugccggaagauggucaacgaccgguggaagac

SEQ ID NO: 133562 - RNA, 27 nt, Homo Sapiens
gguagguggucuuucagccccuucuac

SEQ ID NO: 133563 - RNA, 32 nt, Homo Sapiens
gaaauggcuauagaaaaauuugucauaauaau

SEQ ID NO: 133564 - RNA, 32 nt, Homo Sapiens
gaaaaauuugaaaguagcaaaauagaaaauaa

SEQ ID NO: 133565 - RNA, 32 nt, Homo Sapiens
aaaaugaagaucugaucaagcauggcuggccu

SEQ ID NO: 133566 - RNA, 32 nt, Homo Sapiens
agaaagugcagguaaagguuuauacaacaaga

SEQ ID NO: 133567 - RNA, 32 nt, Homo Sapiens
ugcccggagcagcagcuucuccaggaagccca

SEQ ID NO: 133568 - RNA, 32 nt, Homo Sapiens
auauggaaaugaauugcucugugcugaaauuu

SEQ ID NO: 133569 - RNA, 32 nt, Homo Sapiens
aucagaggaugggaaagaauacuaccugagga

SEQ ID NO: 133570 - RNA, 32 nt, Homo Sapiens
aggcccauuuucccuuuuccccagcugaugag

SEQ ID NO: 133571 - RNA, 29 nt, Homo Sapiens
acagccccagaugagugagauugcugguc

SEQ ID NO: 133572 - RNA, 32 nt, Homo Sapiens
agucugcgaucuagcccagaauccgcgauccc

SEQ ID NO: 133573 - RNA, 32 nt, Homo Sapiens
uggcagcaaaaauuauugaaaaugucuguacc

SEQ ID NO: 133574 - RNA, 32 nt, Homo Sapiens
ucggagauauuguggguucaguuccagaccac

SEQ ID NO: 133575 - RNA, 32 nt, Homo Sapiens
cuuauguuauaacuucagucaauuaauauaag

SEQ ID NO: 133576 - RNA, 32 nt, Homo Sapiens
gccauuuugcgggaagaggaggcgcuguaccu

SEQ ID NO: 133577 - RNA, 32 nt, Homo Sapiens
ugggggccucaggccuaaccccugccucgggu

SEQ ID NO: 133578 - RNA, 32 nt, Homo Sapiens
acuuaaaacauucuuaaaaugguuggcuucuu

SEQ ID NO: 133579 - RNA, 32 nt, Homo Sapiens
augaaccgagcuucuuguugccgcccgcugcc

SEQ ID NO: 133580 - RNA, 32 nt, Homo Sapiens
gcuucccgggaagguuccacggcggccgaggg

SEQ ID NO: 133581 - RNA, 32 nt, Homo Sapiens
uucuggggggcgacgcgaccugcccgaaguga

SEQ ID NO: 133582 - RNA, 32 nt, Homo Sapiens
ccucucccuggcccuuguuuuccucuccacca

SEQ ID NO: 133583 - RNA, 32 nt, Homo Sapiens
uuagucuggaacaugaauucucuuuuuuaaac

SEQ ID NO: 133584 - RNA, 32 nt, Homo Sapiens
aaaguaugucauugggcuuuuucauccauaaa

SEQ ID NO: 133585 - RNA, 32 nt, Homo Sapiens
ggucagccaacccccauccaacccuuagacuc

SEQ ID NO: 133586 - RNA, 32 nt, Homo Sapiens
aaagaccccuauaaaucuauauauaacaaugu

SEQ ID NO: 133587 - RNA, 30 nt, Homo Sapiens
ucgccggcgcccgagccaguccgcgcgcac

SEQ ID NO: 133588 - RNA, 32 nt, Homo Sapiens
ugccucagcccagagacaccccugccuagcgu

SEQ ID NO: 133589 - RNA, 32 nt, Homo Sapiens
gaucauaucaacauguaugaacuuaaaauaug

SEQ ID NO: 133590 - RNA, 32 nt, Homo Sapiens
gccugugaguggccucagcaucagggccagcg

SEQ ID NO: 133591 - RNA, 32 nt, Homo Sapiens
gaguguggucgacugcugggccugccauaacc

SEQ ID NO: 133592 - RNA, 32 nt, Homo Sapiens
cucggucgcccacccgccugcccgccaugugu

SEQ ID NO: 133593 - RNA, 32 nt, Homo Sapiens
ggcccuccuagccgcgugcccgggccauggug

SEQ ID NO: 133594 - RNA, 32 nt, Homo Sapiens
ccccaggagguggucgugacccccaugauggg

SEQ ID NO: 133595 - RNA, 32 nt, Homo Sapiens
uuaacucuaaaauguacuugggagauaggcca

SEQ ID NO: 133596 - RNA, 28 nt, Homo Sapiens
gcccuggggcggcugaugccagggcggc

SEQ ID NO: 133597 - RNA, 32 nt, Homo Sapiens
cgguccgcagccucacaggggagcggcuuccg

SEQ ID NO: 133598 - RNA, 32 nt, Homo Sapiens
gauuuacaagugacugugauaauucucuggau

SEQ ID NO: 133599 - RNA, 32 nt, Homo Sapiens
agaugagcucugccugcuugucaucuuuaggu

SEQ ID NO: 133600 - RNA, 30 nt, Homo Sapiens
auuuuuguauguggcauggcagaaugaaaa

SEQ ID NO: 133601 - RNA, 32 nt, Homo Sapiens
auuaaucuccuuauuuuuuucuugaugauuug

SEQ ID NO: 133602 - RNA, 32 nt, Homo Sapiens
gccgcugcugaggagccggaccgcgcgcagcc

SEQ ID NO: 133603 - RNA, 32 nt, Homo Sapiens
aggaccacgcggggguuugccauggugacaua

SEQ ID NO: 133604 - RNA, 32 nt, Homo Sapiens
ucaugagcuacccaaaguaguaguuacugaag

SEQ ID NO: 133605 - RNA, 32 nt, Homo Sapiens
aaugccugucagucggagagaauggggugagc

SEQ ID NO: 133606 - RNA, 32 nt, Homo Sapiens
accccgccgggcggccgcgcccugcaugcgag

SEQ ID NO: 133607 - RNA, 32 nt, Homo Sapiens
ccuuggcagacgggagucuccgaccggcaaaa

SEQ ID NO: 133608 - RNA, 32 nt, Homo Sapiens
cucagaaacaauuaccaaaaaauacauaacuc

SEQ ID NO: 133609 - RNA, 32 nt, Homo Sapiens
gcucggugaggcgucccggaggcggcgaucac

SEQ ID NO: 133610 - RNA, 32 nt, Homo Sapiens
acaacuuaaugaucagaaagaaugcugcugua

SEQ ID NO: 133611 - RNA, 32 nt, Homo Sapiens
gaucccagggggagggugcagaugagggagcg

SEQ ID NO: 133612 - RNA, 32 nt, Homo Sapiens
uguaaaggcuaaagagaagcaguuugacggac

SEQ ID NO: 133613 - RNA, 32 nt, Homo Sapiens
ucuccucgcguaguccggcccgagccgcucgc

SEQ ID NO: 133614 - RNA, 32 nt, Homo Sapiens
aggcaucagagaugaugcugcaguggaaaacc

SEQ ID NO: 133615 - RNA, 32 nt, Homo Sapiens
ggucccagaggguggaaggagccaggacgcac

SEQ ID NO: 133616 - RNA, 32 nt, Homo Sapiens
gcccuggaacucccagggagcaacagcacaca

SEQ ID NO: 133617 - RNA, 32 nt, Homo Sapiens
uuauuuccucugucuacagcagaugggagucu

SEQ ID NO: 133618 - RNA, 32 nt, Homo Sapiens
cgcgugugggucccggggcagcccagcugcac

SEQ ID NO: 133619 - RNA, 32 nt, Homo Sapiens
uaaacaggaaugccuuuggcaauagccuugag

SEQ ID NO: 133620 - RNA, 32 nt, Homo Sapiens
ucuaaauuaacccuaauguuuaaaaacucacu

SEQ ID NO: 133621 - RNA, 32 nt, Homo Sapiens
cuucaagaccaucaagaaccuaagggcucaga

SEQ ID NO: 133622 - RNA, 32 nt, Homo Sapiens
guaaacguguauguauaaaauaaaguuuagca

SEQ ID NO: 133623 - RNA, 32 nt, Homo Sapiens
aaauuuuuagaauuaaaauacauuuaacucag

SEQ ID NO: 133624 - RNA, 32 nt, Homo Sapiens
caggaccgcgcgccccuuggcggcugagccug

SEQ ID NO: 133625 - RNA, 32 nt, Homo Sapiens
auuguaugauaaccugaaauguuuacuugugc

SEQ ID NO: 133626 - RNA, 32 nt, Homo Sapiens
aaucccaaucuuucuauauaaaauguauucaa

SEQ ID NO: 133627 - RNA, 32 nt, Homo Sapiens
cccaguccaucccaccaucaccccuucccccu

SEQ ID NO: 133628 - RNA, 32 nt, Homo Sapiens
uucgggcuccgcgaccggcgcuucgggcgguc

SEQ ID NO: 133629 - RNA, 32 nt, Homo Sapiens
cacggcugacgauggcccuuucugcggagacc

SEQ ID NO: 133630 - RNA, 30 nt, Homo Sapiens
agagagcgcgggcggccgccggggcugguc

SEQ ID NO: 133631 - RNA, 32 nt, Homo Sapiens
ucucuguaggcacagagcugcacuaucacgag

SEQ ID NO: 133632 - RNA, 32 nt, Homo Sapiens
aagcuacugugcuugucugggugggagggagc

SEQ ID NO: 133633 - RNA, 32 nt, Homo Sapiens
auauaugcacuaaucuaaauaaaggugucugu

SEQ ID NO: 133634 - RNA, 32 nt, Homo Sapiens
caucgucugacuugaagauucagacaccuucu

SEQ ID NO: 133635 - RNA, 32 nt, Homo Sapiens
gaagcugccagagaagcaggaggaggauggag

SEQ ID NO: 133636 - RNA, 32 nt, Homo Sapiens
ggcuuucucucuuggugacucccuugguguuu

SEQ ID NO: 133637 - RNA, 32 nt, Homo Sapiens
augaaaaauuuauauccaauuauuuuccaaau

SEQ ID NO: 133638 - RNA, 32 nt, Homo Sapiens
uguccugagagaaauagaaaaguuguuaaagu

SEQ ID NO: 133639 - RNA, 32 nt, Homo Sapiens
cagcaaguucccugaauuuuuccauggcacag

SEQ ID NO: 133640 - RNA, 32 nt, Homo Sapiens
auuaauuaaguggcuucaccuauauuucuguu

SEQ ID NO: 133641 - RNA, 32 nt, Homo Sapiens
gggaacuguauccacccaaaugucaccgauuu

SEQ ID NO: 133642 - RNA, 32 nt, Homo Sapiens
cgagacccccggcccggcacucgcucuccucc

SEQ ID NO: 133643 - RNA, 32 nt, Homo Sapiens
uuguuguagcaacaacaaaaaaugaacaugaa

SEQ ID NO: 133644 - RNA, 32 nt, Homo Sapiens
accgagcagagcggagcgcccgugguccagcg

SEQ ID NO: 133645 - RNA, 32 nt, Homo Sapiens
gaaaaucccagggcccuuaagauaugcuguau

SEQ ID NO: 133646 - RNA, 32 nt, Homo Sapiens
ucauucuuuuucuuuuaaauuuguugcuaauc

SEQ ID NO: 133647 - RNA, 32 nt, Homo Sapiens
aaucuggaucuuaaauuuaugugaauacauuu

SEQ ID NO: 133648 - RNA, 32 nt, Homo Sapiens
ugaagcuggugcccucccucgccguggccaca

SEQ ID NO: 133649 - RNA, 32 nt, Homo Sapiens
gaacuuuccuuccuuuccagcauuccccacag

SEQ ID NO: 133650 - RNA, 32 nt, Homo Sapiens
auauauauacacaacacacacacacauaugua

SEQ ID NO: 133651 - RNA, 32 nt, Homo Sapiens
uguagcuuuccacuggagucugggauuugcaa

SEQ ID NO: 133652 - RNA, 32 nt, Homo Sapiens
cacaguuuuuaguuuuuuccuuguuuuagauu

SEQ ID NO: 133653 - RNA, 32 nt, Homo Sapiens
gucaacuguacuuugcuauauucauccauuaa

SEQ ID NO: 133654 - RNA, 32 nt, Homo Sapiens
ugggggcugcgggacuccccaggccccggccc

SEQ ID NO: 133655 - RNA, 32 nt, Homo Sapiens
gcuacagaacucuugauguuucagugagcuuu

SEQ ID NO: 133656 - RNA, 32 nt, Homo Sapiens
ggggacaagcgguggagaaggguacgccaggg

SEQ ID NO: 133657 - RNA, 32 nt, Homo Sapiens
cucugcaucagcugcccuuccaaggagcuucu

SEQ ID NO: 133658 - RNA, 30 nt, Homo Sapiens
cucccguggggcgaucacuguguggggacc

SEQ ID NO: 133659 - RNA, 32 nt, Homo Sapiens
auucuaaaggaaauguucucugaugggaggag

SEQ ID NO: 133660 - RNA, 32 nt, Homo Sapiens
caguggaugcuguuucucaguauuaugacaug

SEQ ID NO: 133661 - RNA, 32 nt, Homo Sapiens
gagagggagacaugacagcuuuuuguaagucu

SEQ ID NO: 133662 - RNA, 32 nt, Homo Sapiens
gguacacaaacacaccgucaugcacauuucag

SEQ ID NO: 133663 - RNA, 32 nt, Homo Sapiens
guuuuucugccagcuauguugaaugcacaaau

SEQ ID NO: 133664 - RNA, 28 nt, Homo Sapiens
aaccugcaagugaaacauuugaaacgau

SEQ ID NO: 133665 - RNA, 32 nt, Homo Sapiens
agcuucauucagaagagucacaaaaucguucu

SEQ ID NO: 133666 - RNA, 32 nt, Homo Sapiens
aaguuugguccuuaguguucuuuguaaugcac

SEQ ID NO: 133667 - RNA, 32 nt, Homo Sapiens
gaaauuuuacuuuuccuuugcaacacauaaau

SEQ ID NO: 133668 - RNA, 32 nt, Homo Sapiens
cuuuuauucuucaugcaucuguaauuuaauuu

SEQ ID NO: 133669 - RNA, 32 nt, Homo Sapiens
ccuuucuugcuggaaggcugggggugaaagac

SEQ ID NO: 133670 - RNA, 27 nt, Homo Sapiens
cgauggcggcgguggcugcguugcagc

SEQ ID NO: 133671 - RNA, 32 nt, Homo Sapiens
agggaagugaggggcggcuggcgggggacugc

SEQ ID NO: 133672 - RNA, 28 nt, Homo Sapiens
ccgcucgggcggccgcggacaugugcag

SEQ ID NO: 133673 - RNA, 32 nt, Homo Sapiens
acaauaugugaaugugcugauuguguucccua

SEQ ID NO: 133674 - RNA, 32 nt, Homo Sapiens
gaaauaccaaaauauuugcagacuggauccaa

SEQ ID NO: 133675 - RNA, 32 nt, Homo Sapiens
auuguugcuuuuuuuccaauuuuguugcauca

SEQ ID NO: 133676 - RNA, 32 nt, Homo Sapiens
gaaacuucucguuuccucguuuagccccaccc

SEQ ID NO: 133677 - RNA, 32 nt, Homo Sapiens
ucuuuuagcaagagcucucaccaauuguagau

SEQ ID NO: 133678 - RNA, 31 nt, Homo Sapiens
gggggcugcgccugccugcuccgccccagac

SEQ ID NO: 133679 - RNA, 32 nt, Homo Sapiens
uugauaucauucuguguauauagaauguaaaa

SEQ ID NO: 133680 - RNA, 29 nt, Homo Sapiens
agaaaugauggcuggcuguggugaaauug

SEQ ID NO: 133681 - RNA, 32 nt, Homo Sapiens
aaaucugcuuuguauaauuucuguaaauuauc

SEQ ID NO: 133682 - RNA, 32 nt, Homo Sapiens
cacugcacuccagccuggugacuccgucucaa

SEQ ID NO: 133683 - RNA, 32 nt, Homo Sapiens
ccggggucacccuugcugaaccuugugcucca

SEQ ID NO: 133684 - RNA, 32 nt, Homo Sapiens
cggccggcggccucagaguccacggagcucgc

SEQ ID NO: 133685 - RNA, 32 nt, Homo Sapiens
uggauuugcuacuuccauaguuuacuugacau

SEQ ID NO: 133686 - RNA, 32 nt, Homo Sapiens
uacuuaccuggcccuccucccuagggagcaag

SEQ ID NO: 133687 - RNA, 32 nt, Homo Sapiens
ucuguuguucccuuuuuuguguccauggguac

SEQ ID NO: 133688 - RNA, 32 nt, Homo Sapiens
gggacacacagacuccuguuuucaaagcugac

SEQ ID NO: 133689 - RNA, 32 nt, Homo Sapiens
gcguggugcuaccgcccccgggcccgcugcgc

SEQ ID NO: 133690 - RNA, 32 nt, Homo Sapiens
ucugucgggcgccgcucagccgugcccuccgc

SEQ ID NO: 133691 - RNA, 32 nt, Homo Sapiens
cucccuuugccacaggauaccuuguaaaguuc

SEQ ID NO: 133692 - RNA, 32 nt, Homo Sapiens
ucaaggcccugcaccuccugcugcacggcauc

SEQ ID NO: 133693 - RNA, 30 nt, Homo Sapiens
caaagauguccuggcguccgcaauaccgua

SEQ ID NO: 133694 - RNA, 32 nt, Homo Sapiens
uugaaauaccaaaaccugaggagugggcaaug

SEQ ID NO: 133695 - RNA, 32 nt, Homo Sapiens
ccuaaugggaacccgaggcaaaaggaaacauc

SEQ ID NO: 133696 - RNA, 32 nt, Homo Sapiens
auaccaagcuauacuuccuguuuucacgugug

SEQ ID NO: 133697 - RNA, 32 nt, Homo Sapiens
ggaggagagggaggaggguaggaagacaguuu

SEQ ID NO: 133698 - RNA, 32 nt, Homo Sapiens
gcgccgggggcggccaaggggaggcgggauga

SEQ ID NO: 133699 - RNA, 32 nt, Homo Sapiens
ccauugaugugggcaagaccuccugacuagaa

SEQ ID NO: 133700 - RNA, 32 nt, Homo Sapiens
ucucauuuuuauuugugcaauauuuucaggca

SEQ ID NO: 133701 - RNA, 32 nt, Homo Sapiens
ugcgcccugccgccgcgcuugggaggccaagc

SEQ ID NO: 133702 - RNA, 32 nt, Homo Sapiens
cucccaggcccgcucccgagcccguuccgcuc

SEQ ID NO: 133703 - RNA, 32 nt, Homo Sapiens
cauaccucauuucugcuugccaaacccaccca

SEQ ID NO: 133704 - RNA, 32 nt, Homo Sapiens
uugauaaaucuauucaaauuuauuuuccuagu

SEQ ID NO: 133705 - RNA, 32 nt, Homo Sapiens
acuuuaaguucugggauacaugugcagaacau

SEQ ID NO: 133706 - RNA, 32 nt, Homo Sapiens
acgacaaagcaucuauauagcuaagcuaaaag

SEQ ID NO: 133707 - RNA, 32 nt, Homo Sapiens
guggggacgagccuuccccauccugguccaca

SEQ ID NO: 133708 - RNA, 32 nt, Homo Sapiens
cucauacccuucuccuuaguccuucauauuuc

SEQ ID NO: 133709 - RNA, 32 nt, Homo Sapiens
aaacacugcacccgaggcagccaggcagcuuc

SEQ ID NO: 133710 - RNA, 32 nt, Homo Sapiens
ucccucuugagaaaauacacgcuuucugcaug

SEQ ID NO: 133711 - RNA, 32 nt, Homo Sapiens
cucccucgcgcccuagccgcccugccgggcua

SEQ ID NO: 133712 - RNA, 32 nt, Homo Sapiens
uagauaucuccauauaaugccuguauauaaua

SEQ ID NO: 133713 - RNA, 32 nt, Homo Sapiens
auagcuuugucaaucacagccccauaggaacg

SEQ ID NO: 133714 - RNA, 32 nt, Homo Sapiens
cucccuuucagagccugcuccccgcccucucu

SEQ ID NO: 133715 - RNA, 32 nt, Homo Sapiens
acaguauuuuuuguuguuuuuaucaucaugug

SEQ ID NO: 133716 - RNA, 32 nt, Homo Sapiens
gugaucaggccagugauguuucccuuucagcc

SEQ ID NO: 133717 - RNA, 32 nt, Homo Sapiens
ucgaggagcaucugugauuuguccucugcuua

SEQ ID NO: 133718 - RNA, 32 nt, Homo Sapiens
uucccugucuucagcccucccugucuccccca

SEQ ID NO: 133719 - RNA, 32 nt, Homo Sapiens
uuuaaaaauaaucauuuaguuuuuguucucua

SEQ ID NO: 133720 - RNA, 32 nt, Homo Sapiens
agccucgccgcggcgcguucggggaccgggaa

SEQ ID NO: 133721 - RNA, 32 nt, Homo Sapiens
gaguagcggggagagcgggaagccugaggggg

SEQ ID NO: 133722 - RNA, 32 nt, Homo Sapiens
acaacaguuaaaacuuugauucucaaaugcaa

SEQ ID NO: 133723 - RNA, 32 nt, Homo Sapiens
auccuggacaucaucaccggccaugcugcacc

SEQ ID NO: 133724 - RNA, 32 nt, Homo Sapiens
caacuuguuuuugauuuuuuuaaaaaaccauu

SEQ ID NO: 133725 - RNA, 32 nt, Homo Sapiens
agaggagcacaccacaccagaaacagacaucu

SEQ ID NO: 133726 - RNA, 32 nt, Homo Sapiens
uuauuauuuaucuauuuauuauccuguugagu

SEQ ID NO: 133727 - RNA, 32 nt, Homo Sapiens
aaauagccccuugaugucauaugaauccacgc

SEQ ID NO: 133728 - RNA, 32 nt, Homo Sapiens
ggugcuggggagaggccggcggcucuggaacc

SEQ ID NO: 133729 - RNA, 32 nt, Homo Sapiens
ugggcgcaugcgccgagcggaacuggcugguu

SEQ ID NO: 133730 - RNA, 32 nt, Homo Sapiens
gacuugauaauuaugugucugaaugaaucagc

SEQ ID NO: 133731 - RNA, 32 nt, Homo Sapiens
uacuugauaauuauguuucugaaugaaucagc

SEQ ID NO: 133732 - RNA, 32 nt, Homo Sapiens
guuuaaccugguuuuauuuuuaugugccuguc

SEQ ID NO: 133733 - RNA, 32 nt, Homo Sapiens
ggugccucaauaguuucauaaucuucaugaag

SEQ ID NO: 133734 - RNA, 32 nt, Homo Sapiens
uuagguauuuaaauaauaaaauuucaagggau

SEQ ID NO: 133735 - RNA, 32 nt, Homo Sapiens
ucauggggucccccuuggggccccacaccccg

SEQ ID NO: 133736 - RNA, 32 nt, Homo Sapiens
ugagcugucucggucacucaggaggcaguugg

SEQ ID NO: 133737 - RNA, 32 nt, Homo Sapiens
ccgcccaccuugacugcccccagaaguguguc

SEQ ID NO: 133738 - RNA, 32 nt, Homo Sapiens
cacuuguuugcaagacgucugcauguccacaa

SEQ ID NO: 133739 - RNA, 32 nt, Homo Sapiens
ccagaguagugggucagccugggucccuguac

SEQ ID NO: 133740 - RNA, 29 nt, Homo Sapiens
agucauggaagacagcccgcugccagacc

SEQ ID NO: 133741 - RNA, 31 nt, Homo Sapiens
ggagauugcugguguggcccauagacucuuu

SEQ ID NO: 133742 - RNA, 32 nt, Homo Sapiens
aguuacucacugacaaagugauguuuucuucc

SEQ ID NO: 133743 - RNA, 32 nt, Homo Sapiens
gagaccccaagcacgcagccacccauuuccgg

SEQ ID NO: 133744 - RNA, 32 nt, Homo Sapiens
guuuacuaaauuuacuuagaaauauuugaaau

SEQ ID NO: 133745 - RNA, 32 nt, Homo Sapiens
gagcccuccggagccucgaaaagcagagugga

SEQ ID NO: 133746 - RNA, 32 nt, Homo Sapiens
acauuuuaauaaaucaccggaagcgggagaau

SEQ ID NO: 133747 - RNA, 32 nt, Homo Sapiens
auggaacaccccaaaugccauucuucagcgug

SEQ ID NO: 133748 - RNA, 32 nt, Homo Sapiens
uugcagccacagagacacuccacugcccuggg

SEQ ID NO: 133749 - RNA, 32 nt, Homo Sapiens
uuggagauauuuauggggggagaacuuacauu

SEQ ID NO: 133750 - RNA, 32 nt, Homo Sapiens
aaguaagauuucuauuugcaggaugaguuggg

SEQ ID NO: 133751 - RNA, 32 nt, Homo Sapiens
acagaaggcucccugcugcccggagcagguac

SEQ ID NO: 133752 - RNA, 32 nt, Homo Sapiens
caccaugugcccgugcacaccagugacuacgc

SEQ ID NO: 133753 - RNA, 32 nt, Homo Sapiens
cugagcagcaggaccccguccacagcugaucc

SEQ ID NO: 133754 - RNA, 28 nt, Homo Sapiens
ccugugaugagcaccaggauggcccugu

SEQ ID NO: 133755 - RNA, 32 nt, Homo Sapiens
cacugaagacugccuggaaggggccgcgcgug

SEQ ID NO: 133756 - RNA, 32 nt, Homo Sapiens
agaagcugugcagcugccgcugggugcacccu

SEQ ID NO: 133757 - RNA, 32 nt, Homo Sapiens
guccacagaggugguccaugcauuucugcuuc

SEQ ID NO: 133758 - RNA, 32 nt, Homo Sapiens
cagcuuugccagcccuaauaagaagcaugcua

SEQ ID NO: 133759 - RNA, 32 nt, Homo Sapiens
uacccuaccuucccugcaggccgcuguucaug

SEQ ID NO: 133760 - RNA, 32 nt, Homo Sapiens
agcuaagaauguauaauuuuuauauuuguaua

SEQ ID NO: 133761 - RNA, 32 nt, Homo Sapiens
ggacuuuuaaacaaaaguguaccuguaaaugu

SEQ ID NO: 133762 - RNA, 32 nt, Homo Sapiens
cuacaaaaccuucaugagacuauuggagaaau

SEQ ID NO: 133763 - RNA, 32 nt, Homo Sapiens
uggauggggcuuuggguccucgagguuggacc

SEQ ID NO: 133764 - RNA, 32 nt, Homo Sapiens
gaggaugugcuaauuguaaugucauagguaca

SEQ ID NO: 133765 - RNA, 32 nt, Homo Sapiens
gauaguccacacucaagagaacgggaugauac

SEQ ID NO: 133766 - RNA, 32 nt, Homo Sapiens
ucccacgagaagcgccagccugccuggcuguc

SEQ ID NO: 133767 - RNA, 32 nt, Homo Sapiens
guguugcaaaaauaaugaacgaauaaaacuug

SEQ ID NO: 133768 - RNA, 32 nt, Homo Sapiens
agcuccugcuggaugcguggccaggucagccu

SEQ ID NO: 133769 - RNA, 32 nt, Homo Sapiens
aaugauucugguauuucuuuugguaucuuucu

SEQ ID NO: 133770 - RNA, 32 nt, Homo Sapiens
uaugcuuugucaaacuaucccuuuaugcaauc

SEQ ID NO: 133771 - RNA, 32 nt, Homo Sapiens
agugaugcugguuagcuauuaagguggccugu

SEQ ID NO: 133772 - RNA, 32 nt, Homo Sapiens
gaaaccaaaaagauaaaaacugcauacuaaga

SEQ ID NO: 133773 - RNA, 32 nt, Homo Sapiens
uauaugaacuuauucuuaaauaauugaaccgu

SEQ ID NO: 133774 - RNA, 32 nt, Homo Sapiens
uagauggaaaaguuuuaagaaaauguuacuuu

SEQ ID NO: 133775 - RNA, 32 nt, Homo Sapiens
aaguuaauguguuccaggcauucuucuaagug

SEQ ID NO: 133776 - RNA, 32 nt, Homo Sapiens
uuucuuuaagauuuaacaaaaguucagccuuu

SEQ ID NO: 133777 - RNA, 32 nt, Homo Sapiens
agauguacuuuuuaaaucauguucccccuaaa

SEQ ID NO: 133778 - RNA, 32 nt, Homo Sapiens
guuuuguaugugcguguguuauacaguaguua

SEQ ID NO: 133779 - RNA, 32 nt, Homo Sapiens
agaauuccacgaucaugagguugugaguauau

SEQ ID NO: 133780 - RNA, 32 nt, Homo Sapiens
gaaagcaucuucuccuuccguucacggauuuu

SEQ ID NO: 133781 - RNA, 32 nt, Homo Sapiens
uguuuguuugguuuuuugauucuuguuuuugu

SEQ ID NO: 133782 - RNA, 32 nt, Homo Sapiens
augggcacauggacaggcugcagagggcucca

SEQ ID NO: 133783 - RNA, 32 nt, Homo Sapiens
cugcugggugguggccaucugcgacccggcag

SEQ ID NO: 133784 - RNA, 32 nt, Homo Sapiens
cauucaguccagugugaguauuuuggaguagg

SEQ ID NO: 133785 - RNA, 32 nt, Homo Sapiens
guauauagcaaaacagaagagucuuguuccaa

SEQ ID NO: 133786 - RNA, 32 nt, Homo Sapiens
gucugugcugaguuuuucaaaggucagagcag

SEQ ID NO: 133787 - RNA, 32 nt, Homo Sapiens
uugcugcuuuguuugucuaauugacucauuug

SEQ ID NO: 133788 - RNA, 32 nt, Homo Sapiens
agcugggcuaaauauucuuucuguaaagucaa

SEQ ID NO: 133789 - RNA, 32 nt, Homo Sapiens
cucaggguuuuuacagcacaaacaacugcaua

SEQ ID NO: 133790 - RNA, 32 nt, Homo Sapiens
uauauuuuuacucugucuuacucugucaccca

SEQ ID NO: 133791 - RNA, 32 nt, Homo Sapiens
cuggcaucacacucaugcuggggacaaacaga

SEQ ID NO: 133792 - RNA, 32 nt, Homo Sapiens
aggcaggggcugagcuacccucauggaaggga

SEQ ID NO: 133793 - RNA, 32 nt, Homo Sapiens
ucggaacccacccguugaguuuguggguaacc

SEQ ID NO: 133794 - RNA, 32 nt, Homo Sapiens
ugcuuuuuaaauauuucuacuaaaaaugaaaa

SEQ ID NO: 133795 - RNA, 32 nt, Homo Sapiens
caugagcagcauauggcuuuugaucaguuuuu

SEQ ID NO: 133796 - RNA, 32 nt, Homo Sapiens
aaaaggaaaaauacgaauugaaaauuaaggaa

SEQ ID NO: 133797 - RNA, 32 nt, Homo Sapiens
gaguuccaugucucuuuccccugccccuaguu

SEQ ID NO: 133798 - RNA, 32 nt, Homo Sapiens
aagaggaaagcaacuuacaaaggguauaugag

SEQ ID NO: 133799 - RNA, 32 nt, Homo Sapiens
uucacccgugugugcaaugccuuuuucugggg

SEQ ID NO: 133800 - RNA, 32 nt, Homo Sapiens
ugcugggguguuugucgcagcggguuuuccuc

SEQ ID NO: 133801 - RNA, 32 nt, Homo Sapiens
cccaccaaggugcccucuccccggggaccuua

SEQ ID NO: 133802 - RNA, 32 nt, Homo Sapiens
ggccgcuccgcgggcgcuucggauccucgcgg

SEQ ID NO: 133803 - RNA, 32 nt, Homo Sapiens
uuuaucugcagggcuguuguuuccagcaagac

SEQ ID NO: 133804 - RNA, 32 nt, Homo Sapiens
uguuuuaaaagugccugaaauaugacugccau

SEQ ID NO: 133805 - RNA, 32 nt, Homo Sapiens
auaccaaaaaauacaccaaaaccucugucaga

SEQ ID NO: 133806 - RNA, 32 nt, Homo Sapiens
aauuaacauacuuauuugcagaagugguguag

SEQ ID NO: 133807 - RNA, 32 nt, Homo Sapiens
aaguugcagucuuuuuuuuuuuuuuuuuuuuu

SEQ ID NO: 133808 - RNA, 32 nt, Homo Sapiens
ucuuucaugacggaaggcaggagaacaagcag

SEQ ID NO: 133809 - RNA, 32 nt, Homo Sapiens
cucucucgcucagacgccauggagcuggaucu

SEQ ID NO: 133810 - RNA, 32 nt, Homo Sapiens
gagacaggauaaagggcagaugucagcaauac

SEQ ID NO: 133811 - RNA, 32 nt, Homo Sapiens
agggccggcuccccaacugccgugccaccaag

SEQ ID NO: 133812 - RNA, 29 nt, Homo Sapiens
aucggcucauaugagagagcagguuccug

SEQ ID NO: 133813 - RNA, 32 nt, Homo Sapiens
cuggccucccccugagucagugggacucccag

SEQ ID NO: 133814 - RNA, 32 nt, Homo Sapiens
uuacacauuuucgcuucucccuggacugggcc

SEQ ID NO: 133815 - RNA, 30 nt, Homo Sapiens
acuggaucuguguuugcagaagaguucuag

SEQ ID NO: 133816 - RNA, 32 nt, Homo Sapiens
aauauuuuuaauuuauucuacugaaaugguuu

SEQ ID NO: 133817 - RNA, 32 nt, Homo Sapiens
gguuucuccauauuggucaggcuggucuugaa

SEQ ID NO: 133818 - RNA, 32 nt, Homo Sapiens
uuccuuguccucaccuuacuccccucaggacc

SEQ ID NO: 133819 - RNA, 32 nt, Homo Sapiens
uuuaaauguucuguuuaauggccauucauaaa

SEQ ID NO: 133820 - RNA, 32 nt, Homo Sapiens
gacgagaacgacccucgggugagagagcagcc

SEQ ID NO: 133821 - RNA, 32 nt, Homo Sapiens
ugacuuuuuuauuugaauuugucuuuuuuauu

SEQ ID NO: 133822 - RNA, 32 nt, Homo Sapiens
ugccucccucuggccugggagagccauggagu

SEQ ID NO: 133823 - RNA, 32 nt, Homo Sapiens
uuuauuaaacacagggaaagcauuuaggagaa

SEQ ID NO: 133824 - RNA, 32 nt, Homo Sapiens
aacauagcuuaagcuauugguuccuaaaaauc

SEQ ID NO: 133825 - RNA, 32 nt, Homo Sapiens
uuugaaacuauauuuagaaaacaaaccaaaca

SEQ ID NO: 133826 - RNA, 32 nt, Homo Sapiens
aggauccuguacaauugcauuauucuaaauau

SEQ ID NO: 133827 - RNA, 32 nt, Homo Sapiens
aguggacauggccccuucuccucagccuucca

SEQ ID NO: 133828 - RNA, 32 nt, Homo Sapiens
gguaugugugguuauuucugcccuucacgguc

SEQ ID NO: 133829 - RNA, 32 nt, Homo Sapiens
agcaagggcucacucugucacccaggcuggag

SEQ ID NO: 133830 - RNA, 31 nt, Homo Sapiens
ucucaagugaacacucucaggauacccaguu

SEQ ID NO: 133831 - RNA, 32 nt, Homo Sapiens
ccgcccgccauggcccggaucccgacggccgc

SEQ ID NO: 133832 - RNA, 32 nt, Homo Sapiens
acauuguugggaggaguccaggcauaaaguga

SEQ ID NO: 133833 - RNA, 32 nt, Homo Sapiens
agcggggguggggcugggguggcaauggcggu

SEQ ID NO: 133834 - RNA, 32 nt, Homo Sapiens
gaaucucugggugugagaugggaccaggaauc

SEQ ID NO: 133835 - RNA, 32 nt, Homo Sapiens
uggugguaacugugguaacauugcagcccuaa

SEQ ID NO: 133836 - RNA, 32 nt, Homo Sapiens
caagucuucuaaaugcaguacauauuuuauac

SEQ ID NO: 133837 - RNA, 32 nt, Homo Sapiens
uuuaagcaguguuaacuuuauguaauaguguu

SEQ ID NO: 133838 - RNA, 32 nt, Homo Sapiens
uccagcaggcgcggcugcgcgcggaaggcgcc

SEQ ID NO: 133839 - RNA, 32 nt, Homo Sapiens
auggcugagauuggaauccacucuaggaccuc

SEQ ID NO: 133840 - RNA, 32 nt, Homo Sapiens
cagaugggacauuugcuuugcacucacuaaug

SEQ ID NO: 133841 - RNA, 32 nt, Homo Sapiens
uuaucuuucucuucuugcuuauuuuagaguug

SEQ ID NO: 133842 - RNA, 32 nt, Homo Sapiens
uugucaucaaggaggcaaauugucuccccaag

SEQ ID NO: 133843 - RNA, 32 nt, Homo Sapiens
caaaaaaucaaaugaaagagcauuccuggggu

SEQ ID NO: 133844 - RNA, 32 nt, Homo Sapiens
cccacccuuugggucuccaggauccucaugga

SEQ ID NO: 133845 - RNA, 32 nt, Homo Sapiens
aucaacuuacucauaaagggacaggcuagcua

SEQ ID NO: 133846 - RNA, 32 nt, Homo Sapiens
ggcuuggugugaggaugaaaugagauagggaa

SEQ ID NO: 133847 - RNA, 32 nt, Homo Sapiens
aguggguuaauuuuuguacuuuugcagaagaa

SEQ ID NO: 133848 - RNA, 32 nt, Homo Sapiens
ccuuucaccaccagcuccucuccacuucccaa

SEQ ID NO: 133849 - RNA, 32 nt, Homo Sapiens
uauaaacuagcuuuaggauagugccagacaaa

SEQ ID NO: 133850 - RNA, 32 nt, Homo Sapiens
uaagaggacuagggcgggagcggcgcggaaga

SEQ ID NO: 133851 - RNA, 32 nt, Homo Sapiens
ucacuuuggaaacaaccuucucuuagaucagg

SEQ ID NO: 133852 - RNA, 32 nt, Homo Sapiens
cuuaauaaauauauuuuauuacuagagcaaga

SEQ ID NO: 133853 - RNA, 32 nt, Homo Sapiens
gugcaucuccggcuagccgccggcgccgcccg

SEQ ID NO: 133854 - RNA, 32 nt, Homo Sapiens
acaacauacuaaaaccucaucucuaugaaaaa

SEQ ID NO: 133855 - RNA, 32 nt, Homo Sapiens
cgcaggaggguggguggagcagguggacugga

SEQ ID NO: 133856 - RNA, 32 nt, Homo Sapiens
acacauacuuuuuuggauauaaaugaccauau

SEQ ID NO: 133857 - RNA, 32 nt, Homo Sapiens
uuuugguuucaucacuaacaaaagugccucau

SEQ ID NO: 133858 - RNA, 32 nt, Homo Sapiens
agucuauaugguacuugaucuacauuuaagug

SEQ ID NO: 133859 - RNA, 32 nt, Homo Sapiens
cauuuaagugguuuuucaucuuuccucccucc

SEQ ID NO: 133860 - RNA, 32 nt, Homo Sapiens
ugaauugagucauugcuuucugaaggaaucau

SEQ ID NO: 133861 - RNA, 32 nt, Homo Sapiens
agugcucugaagauuuaauguguuuauucaaa

SEQ ID NO: 133862 - RNA, 32 nt, Homo Sapiens
aagaaggccuucauggccccagcaggccggau

SEQ ID NO: 133863 - RNA, 32 nt, Homo Sapiens
cacagccccccgcccccauggccgcccgucgg

SEQ ID NO: 133864 - RNA, 32 nt, Homo Sapiens
uccaaagaguggaguauggaaagggaaacaua

SEQ ID NO: 133865 - RNA, 32 nt, Homo Sapiens
cugccccccaggcagugcugcagagcaguugg

SEQ ID NO: 133866 - RNA, 32 nt, Homo Sapiens
gagagaccaauauuugugacauggauaguuuc

SEQ ID NO: 133867 - RNA, 29 nt, Homo Sapiens
cgccauggcccugccucugcugccgggca

SEQ ID NO: 133868 - RNA, 32 nt, Homo Sapiens
aguuguaugucaucucuucucuagcaggaauu

SEQ ID NO: 133869 - RNA, 32 nt, Homo Sapiens
ucauugauaucaugacuuccaauugagaggaa

SEQ ID NO: 133870 - RNA, 32 nt, Homo Sapiens
ccuguggcugggcggcagccaguccagcucuu

SEQ ID NO: 133871 - RNA, 32 nt, Homo Sapiens
ggcagaggagggugaggccugugugccaaccu

SEQ ID NO: 133872 - RNA, 32 nt, Homo Sapiens
guaauuuugcucauuuuuauuaaacuucuggu

SEQ ID NO: 133873 - RNA, 32 nt, Homo Sapiens
ugcauguucaggcuggaauauuugaaugcugu

SEQ ID NO: 133874 - RNA, 32 nt, Homo Sapiens
gucacccucacagcccucugaugccaguccug

SEQ ID NO: 133875 - RNA, 30 nt, Homo Sapiens
augaauauccuguucaauuugacuaguuuu

SEQ ID NO: 133876 - RNA, 32 nt, Homo Sapiens
ugagucacccuccaugcccacccgucauaccc

SEQ ID NO: 133877 - RNA, 32 nt, Homo Sapiens
cagggaggcuuuggugacaucaucacucaugu

SEQ ID NO: 133878 - RNA, 32 nt, Homo Sapiens
cguggcggcagccucgcgccugcccggauggc

SEQ ID NO: 133879 - RNA, 32 nt, Homo Sapiens
caaguagaacagaagcccguuuccuucccuca

SEQ ID NO: 133880 - RNA, 32 nt, Homo Sapiens
ggaagcuggggucagaaaagagaaaugaccau

SEQ ID NO: 133881 - RNA, 32 nt, Homo Sapiens
agcuccgccucccggguucacgccauuuuccu

SEQ ID NO: 133882 - RNA, 32 nt, Homo Sapiens
cugaugcacuguaauacgugcuuaacuuugcu

SEQ ID NO: 133883 - RNA, 32 nt, Homo Sapiens
ggccaggccgagccccuggaaccaucccgucc

SEQ ID NO: 133884 - RNA, 32 nt, Homo Sapiens
auucuaaaaugaauccugggaaaugcacguuu

SEQ ID NO: 133885 - RNA, 32 nt, Homo Sapiens
aguagccacgggcgcgaucgggaccagaaguc

SEQ ID NO: 133886 - RNA, 32 nt, Homo Sapiens
ggcuggacagucucuuguccuguguuuguaau

SEQ ID NO: 133887 - RNA, 32 nt, Homo Sapiens
agugagcagcggggcuccugccucccggccug

SEQ ID NO: 133888 - RNA, 32 nt, Homo Sapiens
cagugcugccuugguuccuggaccccugggcc

SEQ ID NO: 133889 - RNA, 32 nt, Homo Sapiens
gcggcugccgacggcgggacuggguuuucuau

SEQ ID NO: 133890 - RNA, 32 nt, Homo Sapiens
auauauguucuuccacugugacuuuuuaguug

SEQ ID NO: 133891 - RNA, 32 nt, Homo Sapiens
acucuacaagauagauaaaagugugggauuuu

SEQ ID NO: 133892 - RNA, 32 nt, Homo Sapiens
uacauuacauaaguuccuuuuacaauuaaaaa

SEQ ID NO: 133893 - RNA, 30 nt, Homo Sapiens
cugcuggucugugcuggucucagaaggcca

SEQ ID NO: 133894 - RNA, 32 nt, Homo Sapiens
gacccccgagggugggggcggccgcccucgug

SEQ ID NO: 133895 - RNA, 32 nt, Homo Sapiens
gcuugggcgcugcggcaccccauccagguagc

SEQ ID NO: 133896 - RNA, 32 nt, Homo Sapiens
gacagcguuguccaaucagggauuguccugga

SEQ ID NO: 133897 - RNA, 32 nt, Homo Sapiens
agugccccuccccccgacccagccccaagguu

SEQ ID NO: 133898 - RNA, 32 nt, Homo Sapiens
gcaagccccccgcccaaucauguguucaguag

SEQ ID NO: 133899 - RNA, 32 nt, Homo Sapiens
ugcccagcuccucacauacccacacauuccag

SEQ ID NO: 133900 - RNA, 32 nt, Homo Sapiens
aaaaauacaaaacacuuagcugggcauggugg

SEQ ID NO: 133901 - RNA, 32 nt, Homo Sapiens
gcaccacuucuguggcuccugcauccaccagg

SEQ ID NO: 133902 - RNA, 32 nt, Homo Sapiens
ugcacccccuccccaccuccacggaccucgga

SEQ ID NO: 133903 - RNA, 32 nt, Homo Sapiens
augaacuugaucuuccacaucuaguaauuuaa

SEQ ID NO: 133904 - RNA, 32 nt, Homo Sapiens
cgggugggggcuggugggaggggccccacuag

SEQ ID NO: 133905 - RNA, 32 nt, Homo Sapiens
uaccuaucucaaaaaauuauugcacauauuaa

SEQ ID NO: 133906 - RNA, 32 nt, Homo Sapiens
caccaggagccagucgccgcgggccuggcucu

SEQ ID NO: 133907 - RNA, 32 nt, Homo Sapiens
uugacaugggagaggaaacguguaggacccgc

SEQ ID NO: 133908 - RNA, 32 nt, Homo Sapiens
gugaguguccgggaaccagacccgcuuggagg

SEQ ID NO: 133909 - RNA, 32 nt, Homo Sapiens
guucuccgggagccuccugggggcuccggcgg

SEQ ID NO: 133910 - RNA, 32 nt, Homo Sapiens
ccaacauuauaaacuugaaaugucugagugau

SEQ ID NO: 133911 - RNA, 32 nt, Homo Sapiens
cccccacccccuccccaggggagagggucugg

SEQ ID NO: 133912 - RNA, 32 nt, Homo Sapiens
guggggcacugacugaacuggaacccaucgag

SEQ ID NO: 133913 - RNA, 32 nt, Homo Sapiens
caaacgaggcacuuaauacauguauauaaugu

SEQ ID NO: 133914 - RNA, 32 nt, Homo Sapiens
agccuggggaaaacuucuguaugggaggaccu

SEQ ID NO: 133915 - RNA, 32 nt, Homo Sapiens
gcgcugcaguugcucaggacacgcuccuauag

SEQ ID NO: 133916 - RNA, 32 nt, Homo Sapiens
uuuacccaccgccaccaagaaagcaguccgau

SEQ ID NO: 133917 - RNA, 30 nt, Homo Sapiens
ccgucugcugcugcugcaggaggcuccacu

SEQ ID NO: 133918 - RNA, 32 nt, Homo Sapiens
uucaaaaacuguuacagccucaucucauugga

SEQ ID NO: 133919 - RNA, 32 nt, Homo Sapiens
gaccccgauggcggccucccggcuggcggcgc

SEQ ID NO: 133920 - RNA, 32 nt, Homo Sapiens
uugcuucucuaggcuccuggauguugcugcau

SEQ ID NO: 133921 - RNA, 32 nt, Homo Sapiens
ucuuugaaaaaugaguaguauggaauauuaag

SEQ ID NO: 133922 - RNA, 32 nt, Homo Sapiens
cauggugauauguggcuguagucccagcuacu

SEQ ID NO: 133923 - RNA, 32 nt, Homo Sapiens
uaucacaguauguacacacacacacacacaca

SEQ ID NO: 133924 - RNA, 32 nt, Homo Sapiens
agccuucugaccaucagccaagggaagcaggc

SEQ ID NO: 133925 - RNA, 32 nt, Homo Sapiens
auggauaaagaaccagggacuggccaugauag

SEQ ID NO: 133926 - RNA, 32 nt, Homo Sapiens
ggucagucaaggaaauugagguccacggaagc

SEQ ID NO: 133927 - RNA, 32 nt, Homo Sapiens
uucauuuauuuuuuccuuuucuucuuggcugg

SEQ ID NO: 133928 - RNA, 32 nt, Homo Sapiens
ggacugugcagcaaagaauccugggacagaaa

SEQ ID NO: 133929 - RNA, 32 nt, Homo Sapiens
ucugcuacgcggagcugggcaccaccaucucc

SEQ ID NO: 133930 - RNA, 29 nt, Homo Sapiens
cauaaauaaaguuauggcuucuuguugga

SEQ ID NO: 133931 - RNA, 32 nt, Homo Sapiens
ugaguuauguuuauaacauuuauuucagaaca

SEQ ID NO: 133932 - RNA, 30 nt, Homo Sapiens
acccuucuggacuguguggccaugcugguc

SEQ ID NO: 133933 - RNA, 32 nt, Homo Sapiens
guucaucuagccccaugauggcuguggacauc

SEQ ID NO: 133934 - RNA, 32 nt, Homo Sapiens
gggcagaaccaagggcauggggugugugggag

SEQ ID NO: 133935 - RNA, 32 nt, Homo Sapiens
uguuuucaccucccuccaacccuacauuucuu

SEQ ID NO: 133936 - RNA, 32 nt, Homo Sapiens
auagauucacauauuagcaacaaaaucccgua

SEQ ID NO: 133937 - RNA, 32 nt, Homo Sapiens
ggaaggaucauuugagcccagggguuugaagc

SEQ ID NO: 133938 - RNA, 32 nt, Homo Sapiens
ugaggaaaacuaaguauauacugugaaaacuu

SEQ ID NO: 133939 - RNA, 30 nt, Homo Sapiens
ggcacugucugugugcaggucaggcagggg

SEQ ID NO: 133940 - RNA, 32 nt, Homo Sapiens
uuucccacuccaguguauccaggguguuccag

SEQ ID NO: 133941 - RNA, 32 nt, Homo Sapiens
gcccgccgaggggcugcccaccgggugcacag

SEQ ID NO: 133942 - RNA, 32 nt, Homo Sapiens
gaugccucgccaggccacgucgcgguuggugg

SEQ ID NO: 133943 - RNA, 32 nt, Homo Sapiens
auucccucuacgcucccuccucuucuucaaua

SEQ ID NO: 133944 - RNA, 32 nt, Homo Sapiens
uguaacucaugaugaucugugaaaccuucaaa

SEQ ID NO: 133945 - RNA, 32 nt, Homo Sapiens
gccacccucacagcccucugaugccaguccug

SEQ ID NO: 133946 - RNA, 32 nt, Homo Sapiens
caagacacagaaagaaagcaggaaagcauauu

SEQ ID NO: 133947 - RNA, 32 nt, Homo Sapiens
cuucauaauuuaaccauuagcaucuuuggcca

SEQ ID NO: 133948 - RNA, 32 nt, Homo Sapiens
auuuccuccucccagugccuucugggaaggga

SEQ ID NO: 133949 - RNA, 32 nt, Homo Sapiens
cacaauuucuauuugaaaauucaaguaucaaa

SEQ ID NO: 133950 - RNA, 32 nt, Homo Sapiens
cuguacccggagccguggcagcagcccucauc

SEQ ID NO: 133951 - RNA, 32 nt, Homo Sapiens
uuaagguaaaauguuauuuugaacaaaaagac

SEQ ID NO: 133952 - RNA, 32 nt, Homo Sapiens
cugguauggcgggugacccucacgucugugca

SEQ ID NO: 133953 - RNA, 32 nt, Homo Sapiens
agggcuuguuuuaugaaagguacuauuccuuc

SEQ ID NO: 133954 - RNA, 32 nt, Homo Sapiens
ggcguccgaggccggccgaacucccgcgcucu

SEQ ID NO: 133955 - RNA, 31 nt, Homo Sapiens
gaggggcccacgguugggccaagggcagagg

SEQ ID NO: 133956 - RNA, 32 nt, Homo Sapiens
uugagaugaacuaauaaaaauauaguucauga

SEQ ID NO: 133957 - RNA, 30 nt, Homo Sapiens
auuuaguacugugcugaggagcauugggga

SEQ ID NO: 133958 - RNA, 32 nt, Homo Sapiens
ugccagagacccauuaggcugcugcugcugcu

SEQ ID NO: 133959 - RNA, 32 nt, Homo Sapiens
uuggucaugccaaagaggcagaguucaggauu

SEQ ID NO: 133960 - RNA, 32 nt, Homo Sapiens
ccaggggggaccgcggcggcccgcuagacucu

SEQ ID NO: 133961 - RNA, 32 nt, Homo Sapiens
ggugggggcuuaucuccucccccaggagggug

SEQ ID NO: 133962 - RNA, 32 nt, Homo Sapiens
aaugccuuuuacucagggaaucuccugcuacu

SEQ ID NO: 133963 - RNA, 32 nt, Homo Sapiens
aaacuaauaauaaugaguaaacacaguuacca

SEQ ID NO: 133964 - RNA, 32 nt, Homo Sapiens
uuaaggaaaacuguuguauaaaacuuuaccau

SEQ ID NO: 133965 - RNA, 32 nt, Homo Sapiens
gacucugaccucucuuguccaguggucuggug

SEQ ID NO: 133966 - RNA, 32 nt, Homo Sapiens
aucaucacagaaacaacuguuuuaagauuagu

SEQ ID NO: 133967 - RNA, 32 nt, Homo Sapiens
ggagaauggggagaacccgggaggcggagcuu

SEQ ID NO: 133968 - RNA, 32 nt, Homo Sapiens
gaaaguguugguuuuuuuaaggcaguaauuuu

SEQ ID NO: 133969 - RNA, 32 nt, Homo Sapiens
agcauaacuacugauggagauuuuaaagccug

SEQ ID NO: 133970 - RNA, 32 nt, Homo Sapiens
ccucacagcuccuggggccuuccuggcucugg

SEQ ID NO: 133971 - RNA, 32 nt, Homo Sapiens
uugguuuuucuuucccagcaucguggauguag

SEQ ID NO: 133972 - RNA, 32 nt, Homo Sapiens
ggcucaggcagacaaaucgcucuagcucagaa

SEQ ID NO: 133973 - RNA, 29 nt, Homo Sapiens
caggaugcccccugggguggacugcccca

SEQ ID NO: 133974 - RNA, 32 nt, Homo Sapiens
ccaucuguggguaacaaggggguguggguguu

SEQ ID NO: 133975 - RNA, 32 nt, Homo Sapiens
uggggugcagcaggcucugugcucccaccacu

SEQ ID NO: 133976 - RNA, 32 nt, Homo Sapiens
augaguaaacacaguuaccauacuuuucaauu

SEQ ID NO: 133977 - RNA, 32 nt, Homo Sapiens
agaagucacuguaucaauaugccuguguuaua

SEQ ID NO: 133978 - RNA, 32 nt, Homo Sapiens
ggccacagaaaaggggaaaagaggaaauaaua

SEQ ID NO: 133979 - RNA, 32 nt, Homo Sapiens
cuugucaagugaauucuuugcauguucaaaac

SEQ ID NO: 133980 - RNA, 32 nt, Homo Sapiens
aaggcagcuuuuaauucaguguuuccuuaugu

SEQ ID NO: 133981 - RNA, 30 nt, Homo Sapiens
ucuggguggggcggggacuuggagaacuuu

SEQ ID NO: 133982 - RNA, 32 nt, Homo Sapiens
ggcuucagaaaaggaguggccacagcaccccg

SEQ ID NO: 133983 - RNA, 32 nt, Homo Sapiens
cuuccggucugcagcacggaaaagcacauaau

SEQ ID NO: 133984 - RNA, 32 nt, Homo Sapiens
guggcuuugcauuuucugauuaaacgacugug

SEQ ID NO: 133985 - RNA, 32 nt, Homo Sapiens
ggcacccaagccagcugcaagcggcgcgugcu

SEQ ID NO: 133986 - RNA, 32 nt, Homo Sapiens
auggcauuucagaacacaaguaucacagagau

SEQ ID NO: 133987 - RNA, 32 nt, Homo Sapiens
ggaauaauuuuauguaaauuuucaugcuuuau

SEQ ID NO: 133988 - RNA, 32 nt, Homo Sapiens
ucaacuucgguaaugaggaagaaggagaaaga

SEQ ID NO: 133989 - RNA, 32 nt, Homo Sapiens
aucucacuuggagggaccauggagcaguauac

SEQ ID NO: 133990 - RNA, 32 nt, Homo Sapiens
auccgccucgguuuccuguccccccaccaccc

SEQ ID NO: 133991 - RNA, 32 nt, Homo Sapiens
ggccggcgggugccagccgccauggaggccgu

SEQ ID NO: 133992 - RNA, 32 nt, Homo Sapiens
ccuggggaagguggagacaggggcgggggucc

SEQ ID NO: 133993 - RNA, 32 nt, Homo Sapiens
cggacucgacguccuccaccaucuuggggcag

SEQ ID NO: 133994 - RNA, 32 nt, Homo Sapiens
aguaugacaagaagcuaugaaguaaaguuugg

SEQ ID NO: 133995 - RNA, 32 nt, Homo Sapiens
gugggaaagaagcaauggaaagcugggucagg

SEQ ID NO: 133996 - RNA, 32 nt, Homo Sapiens
ucuggucgcucacgagcagcucugcccgcacc

SEQ ID NO: 133997 - RNA, 32 nt, Homo Sapiens
ggcugauaaugauugucuuccuaauaugcaag

SEQ ID NO: 133998 - RNA, 32 nt, Homo Sapiens
aggugccggggucuccuuugccucaaugugaa

SEQ ID NO: 133999 - RNA, 32 nt, Homo Sapiens
ccacuacguggccugcgcaucugcagacgguu

SEQ ID NO: 134000 - RNA, 31 nt, Homo Sapiens
aaaagugcuccauucgcaggagcuuuuccug

SEQ ID NO: 134001 - RNA, 32 nt, Homo Sapiens
cucgcugggcgcccaacuacgacccgcucugc

SEQ ID NO: 134002 - RNA, 32 nt, Homo Sapiens
uugugugauugccuuagauauuaaauuuuccu

SEQ ID NO: 134003 - RNA, 32 nt, Homo Sapiens
cugacgacaccgugagccugccuuuguacuuc

SEQ ID NO: 134004 - RNA, 32 nt, Homo Sapiens
gcccugccuuggaguuuagaaguugagugcag

SEQ ID NO: 134005 - RNA, 32 nt, Homo Sapiens
acgugacagguccgccaauugcucguuugcac

SEQ ID NO: 134006 - RNA, 32 nt, Homo Sapiens
gguauuaaugcaauguguggugguuguauugg

SEQ ID NO: 134007 - RNA, 32 nt, Homo Sapiens
augagaagaucuauuuuaaacagucuaaauau

SEQ ID NO: 134008 - RNA, 32 nt, Homo Sapiens
cgcguuccccucgcugccccgggagccgcagc

SEQ ID NO: 134009 - RNA, 32 nt, Homo Sapiens
uauaggaguuucuauuuuuuuauuaaaauggc

SEQ ID NO: 134010 - RNA, 29 nt, Homo Sapiens
guaaugauauguauugcccaaggaaaaau

SEQ ID NO: 134011 - RNA, 32 nt, Homo Sapiens
cccuuugugcccccggcccgucuccgcgcuca

SEQ ID NO: 134012 - RNA, 32 nt, Homo Sapiens
uccucccucugcgggcuucucuugcucugagc

SEQ ID NO: 134013 - RNA, 32 nt, Homo Sapiens
caacgagaaaggagaguccuugaaagagaccc

SEQ ID NO: 134014 - RNA, 32 nt, Homo Sapiens
auuaacuagcuaagcauuauuauucaacuggu

SEQ ID NO: 134015 - RNA, 28 nt, Homo Sapiens
ccucgaugaugaugaugaugaugucgac

SEQ ID NO: 134016 - RNA, 32 nt, Homo Sapiens
agucucugguguuggggagggcccguguguuu

SEQ ID NO: 134017 - RNA, 32 nt, Homo Sapiens
agggugggaaaggggccacuucuggcuuuguu

SEQ ID NO: 134018 - RNA, 32 nt, Homo Sapiens
aagaagcguaaauuauuuucaguuguuuucug

SEQ ID NO: 134019 - RNA, 32 nt, Homo Sapiens
agaauucuuguccccacccccacuuacuauag

SEQ ID NO: 134020 - RNA, 32 nt, Homo Sapiens
uucuauuuaagugguuauuuguuuaaaugaug

SEQ ID NO: 134021 - RNA, 32 nt, Homo Sapiens
uuaaaguauuuuuuccuggaauauauugguau

SEQ ID NO: 134022 - RNA, 32 nt, Homo Sapiens
uccggaguuggccgcagacaagaaggggaggg

SEQ ID NO: 134023 - RNA, 32 nt, Homo Sapiens
caccacagucuccuccgcccaagcccuguccc

SEQ ID NO: 134024 - RNA, 32 nt, Homo Sapiens
ggagggggcucuguggggugggacauucacau

SEQ ID NO: 134025 - RNA, 32 nt, Homo Sapiens
cagcacguuucacaccucccccuucccucucc

SEQ ID NO: 134026 - RNA, 32 nt, Homo Sapiens
cccgccugccccccagcgucucauaucccuca

SEQ ID NO: 134027 - RNA, 31 nt, Homo Sapiens
cuagcacagugcaggaaccaggccagggggu

SEQ ID NO: 134028 - RNA, 32 nt, Homo Sapiens
acuauguugcuuaauaaaaacauuucucuaaa

SEQ ID NO: 134029 - RNA, 32 nt, Homo Sapiens
acaauuuucucugcuuuuuuuuuuuaauuaug

SEQ ID NO: 134030 - RNA, 27 nt, Homo Sapiens
agggccagcugauucugguacuagauu

SEQ ID NO: 134031 - RNA, 32 nt, Homo Sapiens
uaauuugauguaaaagaaauaguuaccaaugc

SEQ ID NO: 134032 - RNA, 32 nt, Homo Sapiens
agauauauuaaacaucucucagauggaaaaaa

SEQ ID NO: 134033 - RNA, 32 nt, Homo Sapiens
uuuccagucccaucccagaacaucaguuguaa

SEQ ID NO: 134034 - RNA, 32 nt, Homo Sapiens
uuacugugcgagaaucggagggcgcgcacgcg

SEQ ID NO: 134035 - RNA, 32 nt, Homo Sapiens
uguaauuucuuugccuguucaguuacagaaag

SEQ ID NO: 134036 - RNA, 32 nt, Homo Sapiens
cuucuucuuugccuuaaaucugauacaagagg

SEQ ID NO: 134037 - RNA, 32 nt, Homo Sapiens
ccucacucgccgccagcuccccgcgcccaccc

SEQ ID NO: 134038 - RNA, 32 nt, Homo Sapiens
uggccugugaaccagcagcauuuuuaucuucu

SEQ ID NO: 134039 - RNA, 32 nt, Homo Sapiens
ugaagggcagagccuacaaaacauuguauauu

SEQ ID NO: 134040 - RNA, 29 nt, Homo Sapiens
cacaauucuauccggccccacauaugcau

SEQ ID NO: 134041 - RNA, 32 nt, Homo Sapiens
cugccugggaaucuucuuuccuccccucccau

SEQ ID NO: 134042 - RNA, 32 nt, Homo Sapiens
aaaaccagcugagcagaaugccauguucugaa

SEQ ID NO: 134043 - RNA, 32 nt, Homo Sapiens
uacccucccucuaugaaaauagccaugcagac

SEQ ID NO: 134044 - RNA, 32 nt, Homo Sapiens
aacuaacaugaaauauguguuguuuucauuug

SEQ ID NO: 134045 - RNA, 31 nt, Homo Sapiens
agugaacacagacacugcagagccugggagc

SEQ ID NO: 134046 - RNA, 32 nt, Homo Sapiens
gcccggcaaacacuuuuacccucagauguuac

SEQ ID NO: 134047 - RNA, 32 nt, Homo Sapiens
uuuauccccagcugcgggaggcccuggugacu

SEQ ID NO: 134048 - RNA, 32 nt, Homo Sapiens
agaauacuuuuuucuuuuuuuuggccuuucuc

SEQ ID NO: 134049 - RNA, 32 nt, Homo Sapiens
ggcuucuucaugcuuuuucuucucaccauuuc

SEQ ID NO: 134050 - RNA, 32 nt, Homo Sapiens
ugaggagagcaagagggcaggggugggaaggc

SEQ ID NO: 134051 - RNA, 32 nt, Homo Sapiens
ucuuuccucuccaaagccucagucuagccugc

SEQ ID NO: 134052 - RNA, 32 nt, Homo Sapiens
auggcaauuacauuggucagcaacacugaaga

SEQ ID NO: 134053 - RNA, 32 nt, Homo Sapiens
cagagauccuugucagaaaacuugccacagag

SEQ ID NO: 134054 - RNA, 32 nt, Homo Sapiens
cgucuccggcgggcgggagccaggcgcugacg

SEQ ID NO: 134055 - RNA, 32 nt, Homo Sapiens
ugccugaggagcugccugccuucuuccaucug

SEQ ID NO: 134056 - RNA, 32 nt, Homo Sapiens
accuccucucuagccuaucuuuugcuguaguc

SEQ ID NO: 134057 - RNA, 32 nt, Homo Sapiens
gcucuugaacuuauuuuaauucuuauaauuug

SEQ ID NO: 134058 - RNA, 32 nt, Homo Sapiens
auuuuuuuucuuuuuucuuuuuuuuuauuuga

SEQ ID NO: 134059 - RNA, 32 nt, Homo Sapiens
auacauacuauaaggcacuuuuaacagauugu

SEQ ID NO: 134060 - RNA, 32 nt, Homo Sapiens
ccgcccaggggucgcugucgccugcugcuggc

SEQ ID NO: 134061 - RNA, 32 nt, Homo Sapiens
auauauuuuauuucuuuuuuugguguugucug

SEQ ID NO: 134062 - RNA, 32 nt, Homo Sapiens
uucucggucauggaaugagcuccccaaaaucg

SEQ ID NO: 134063 - RNA, 32 nt, Homo Sapiens
ggcaagaaacaaaagcccagcuuuauguugcc

SEQ ID NO: 134064 - RNA, 32 nt, Homo Sapiens
uaaagacuccuguuuaagagcuuucagaauug

SEQ ID NO: 134065 - RNA, 32 nt, Homo Sapiens
gcuaaaugaugaucuuuugcagagugauaaug

SEQ ID NO: 134066 - RNA, 32 nt, Homo Sapiens
gaauggcaugacugccuauguggguggcaagc

SEQ ID NO: 134067 - RNA, 32 nt, Homo Sapiens
gggugcuagacacccggcaccauucucccuuc

SEQ ID NO: 134068 - RNA, 32 nt, Homo Sapiens
aguguaguuuuuccccuuucauuugaauaaaa

SEQ ID NO: 134069 - RNA, 32 nt, Homo Sapiens
ggaagaacccaaggaccccccaguugcagcca

SEQ ID NO: 134070 - RNA, 32 nt, Homo Sapiens
gcucacaggggcaggaggcagcuccccugccu

SEQ ID NO: 134071 - RNA, 32 nt, Homo Sapiens
ggcaaagacacgggaacugaaaaacuccacag

SEQ ID NO: 134072 - RNA, 32 nt, Homo Sapiens
cgaaagcccucccuuggcuggccucacgaugg

SEQ ID NO: 134073 - RNA, 31 nt, Homo Sapiens
cgcccauucugcccccggccccgcgcggagg

SEQ ID NO: 134074 - RNA, 32 nt, Homo Sapiens
uacccauuccucccucauucauucauucagca

SEQ ID NO: 134075 - RNA, 32 nt, Homo Sapiens
gcaucucgugggaccuccaagcuccucugacu

SEQ ID NO: 134076 - RNA, 32 nt, Homo Sapiens
agauucaaucguaacugugucaacaguauugu

SEQ ID NO: 134077 - RNA, 32 nt, Homo Sapiens
uaaagucaucaaaacaacguuauauccugugu

SEQ ID NO: 134078 - RNA, 32 nt, Homo Sapiens
agggccccgacccacuaccccauccacugucc

SEQ ID NO: 134079 - RNA, 32 nt, Homo Sapiens
ggaugugcagauuguucuauguauuaucagua

SEQ ID NO: 134080 - RNA, 32 nt, Homo Sapiens
gaguggcaguugcuggagcauaacugcuucaa

SEQ ID NO: 134081 - RNA, 32 nt, Homo Sapiens
uuugaccgucacacuucuccaguguucagccc

SEQ ID NO: 134082 - RNA, 32 nt, Homo Sapiens
ucaauuucuguguaauuugcaaggcuguacaa

SEQ ID NO: 134083 - RNA, 32 nt, Homo Sapiens
cccucagcccccagccuccaggccugcugugg

SEQ ID NO: 134084 - RNA, 32 nt, Homo Sapiens
cuugcuucagaauugaaaugggagggggaugg

SEQ ID NO: 134085 - RNA, 32 nt, Homo Sapiens
cucuguuuuuauucuucaacucucacuuucuu

SEQ ID NO: 134086 - RNA, 32 nt, Homo Sapiens
gugcguuuucccuccucccccgcccucagggu

SEQ ID NO: 134087 - RNA, 32 nt, Homo Sapiens
uguuuccggaaauggaaggauugaaggccaua

SEQ ID NO: 134088 - RNA, 32 nt, Homo Sapiens
uuuuuggacuagccuucaggagguggagcucg

SEQ ID NO: 134089 - RNA, 32 nt, Homo Sapiens
cgcgagcccgucugcucccgcccugcccgugc

SEQ ID NO: 134090 - RNA, 32 nt, Homo Sapiens
caaaggaacaaauaaguggaagggcagcuauu

SEQ ID NO: 134091 - RNA, 32 nt, Homo Sapiens
agaagaauccgaaggaaaauccaggggcaaaa

SEQ ID NO: 134092 - RNA, 32 nt, Homo Sapiens
uggagugggggguggggguggggccacaaaag

SEQ ID NO: 134093 - RNA, 32 nt, Homo Sapiens
gggguguggaggaggugcggcucuagggacag

SEQ ID NO: 134094 - RNA, 30 nt, Homo Sapiens
cggggaggagguggaaagcggggcuguggc

SEQ ID NO: 134095 - RNA, 32 nt, Homo Sapiens
auuuuauauucauguuuaucaaagugagagga

SEQ ID NO: 134096 - RNA, 32 nt, Homo Sapiens
uaucuuuguuuuuauggaacauuuuuauuaca

SEQ ID NO: 134097 - RNA, 27 nt, Homo Sapiens
uguuaguccuucuacaccucaucugcu

SEQ ID NO: 134098 - RNA, 32 nt, Homo Sapiens
agccugcccucccugccggagccggcucugcc

SEQ ID NO: 134099 - RNA, 31 nt, Homo Sapiens
cgcggcccccggagaaagcggccgccucggg

SEQ ID NO: 134100 - RNA, 31 nt, Homo Sapiens
uccagugucaccucucucagagcaucuggcu

SEQ ID NO: 134101 - RNA, 31 nt, Homo Sapiens
cgagaaucagggagaaagucccuccccagca

SEQ ID NO: 134102 - RNA, 32 nt, Homo Sapiens
cuuugauuuuauucuuuuuuuuuuuucuguga

SEQ ID NO: 134103 - RNA, 32 nt, Homo Sapiens
cauuugucugcccagacacguaacugggaccu

SEQ ID NO: 134104 - RNA, 32 nt, Homo Sapiens
cauguagguguuuguucaucuguaacucuaaa

SEQ ID NO: 134105 - RNA, 32 nt, Homo Sapiens
aguauaguauuuaagugccaaauaucagucuu

SEQ ID NO: 134106 - RNA, 32 nt, Homo Sapiens
ugcggucucuggccagcacgcuggacugcgag

SEQ ID NO: 134107 - RNA, 32 nt, Homo Sapiens
acuuauggaaaacagugugcauauucugcuga

SEQ ID NO: 134108 - RNA, 32 nt, Homo Sapiens
ugauuuuuaaguacaaaaaaguuuaagauugc

SEQ ID NO: 134109 - RNA, 32 nt, Homo Sapiens
ugcugggagcagccuccuugggccucaggaaa

SEQ ID NO: 134110 - RNA, 32 nt, Homo Sapiens
cugcaguggugugcgcucucggcgcguggcgc

SEQ ID NO: 134111 - RNA, 32 nt, Homo Sapiens
guacugagccuccuguggcccgcagcagugag

SEQ ID NO: 134112 - RNA, 32 nt, Homo Sapiens
cccuuccucacagaguuaaauaugcaucuggc

SEQ ID NO: 134113 - RNA, 32 nt, Homo Sapiens
acaaaccaauuucaaaaauagacuaacugcaa

SEQ ID NO: 134114 - RNA, 32 nt, Homo Sapiens
uuaguuaaagcccucccccaaaaguuauaaaa

SEQ ID NO: 134115 - RNA, 32 nt, Homo Sapiens
agggaucaauuucaaacccugcuuaugauaug

SEQ ID NO: 134116 - RNA, 32 nt, Homo Sapiens
cuguugccuaggcuggaguacaguggccugau

SEQ ID NO: 134117 - RNA, 32 nt, Homo Sapiens
uuaugggagaaaccagagaugggaaugaggaa

SEQ ID NO: 134118 - RNA, 32 nt, Homo Sapiens
gcccaaggagagcggcaggaggggugggacca

SEQ ID NO: 134119 - RNA, 32 nt, Homo Sapiens
gccuuggcuacccgaggcuggcacuggcacaa

SEQ ID NO: 134120 - RNA, 32 nt, Homo Sapiens
gugaaaauuggaaacgaagccauugugaaaag

SEQ ID NO: 134121 - RNA, 32 nt, Homo Sapiens
auucccaucuccuuuccccucaccuuaaagga

SEQ ID NO: 134122 - RNA, 32 nt, Homo Sapiens
ccggagccagccaggcaguuuuauugaaaucu

SEQ ID NO: 134123 - RNA, 32 nt, Homo Sapiens
agaaaggugugagcucuggaacuacacaguuc

SEQ ID NO: 134124 - RNA, 32 nt, Homo Sapiens
cagaggcggcggcugcucuggaccucgguguu

SEQ ID NO: 134125 - RNA, 32 nt, Homo Sapiens
cugaagccuuguguagcuuucagagcacacgu

SEQ ID NO: 134126 - RNA, 32 nt, Homo Sapiens
gcugcugacccggcggccggccgccguuccgc

SEQ ID NO: 134127 - RNA, 32 nt, Homo Sapiens
uuuguagucaauccaacuguacuggccaauuu

SEQ ID NO: 134128 - RNA, 32 nt, Homo Sapiens
uuuuaaaauuuauccacuauuggcuuauguuu

SEQ ID NO: 134129 - RNA, 32 nt, Homo Sapiens
guaaauaacugcuauuugauaaaugaucacaa

SEQ ID NO: 134130 - RNA, 32 nt, Homo Sapiens
gggccagggccugaugggcaccacgugagggg

SEQ ID NO: 134131 - RNA, 32 nt, Homo Sapiens
uguugguuuccuucauaucaccucaagguuua

SEQ ID NO: 134132 - RNA, 32 nt, Homo Sapiens
agaggagcaacgccagccugggucacagucca

SEQ ID NO: 134133 - RNA, 32 nt, Homo Sapiens
ucagucccuggccaauugcccguucuuuucca

SEQ ID NO: 134134 - RNA, 32 nt, Homo Sapiens
cugucggccccggcccgacucuaucacaagaa

SEQ ID NO: 134135 - RNA, 32 nt, Homo Sapiens
acgcugacccugccagcccuccccucuccagg

SEQ ID NO: 134136 - RNA, 32 nt, Homo Sapiens
cgcucuccgagaccgaagagguggacugagcc

SEQ ID NO: 134137 - RNA, 32 nt, Homo Sapiens
cuguuggugcacauuaucuacauuuuccucag

SEQ ID NO: 134138 - RNA, 32 nt, Homo Sapiens
gacagaaaaugcagaaaauaaaaaauauuuua

SEQ ID NO: 134139 - RNA, 32 nt, Homo Sapiens
ucccugcucugcaaccuuucucuucucacggg

SEQ ID NO: 134140 - RNA, 32 nt, Homo Sapiens
ccugcguccucucggugagcugugcagugccg

SEQ ID NO: 134141 - RNA, 29 nt, Homo Sapiens
aucauuucuauccagagaucugagcagaa

SEQ ID NO: 134142 - RNA, 32 nt, Homo Sapiens
augggugaccucuggaggcaguggaccaagau

SEQ ID NO: 134143 - RNA, 32 nt, Homo Sapiens
cauccugagagaggcucuggcucccccaacaa

SEQ ID NO: 134144 - RNA, 31 nt, Homo Sapiens
aaucgccgugccugccugcccugccuacuga

SEQ ID NO: 134145 - RNA, 32 nt, Homo Sapiens
ugaauuaauuauguugugcuuaauuuuacaaa

SEQ ID NO: 134146 - RNA, 32 nt, Homo Sapiens
ucuucucgcugugcugacacccgccccuaaca

SEQ ID NO: 134147 - RNA, 32 nt, Homo Sapiens
caucuguaacugugcuaaucuaucuagagacc

SEQ ID NO: 134148 - RNA, 32 nt, Homo Sapiens
cccucacagaagccguuucucaucaugccaag

SEQ ID NO: 134149 - RNA, 32 nt, Homo Sapiens
aaguguggguugugcauccccaauccagauaa

SEQ ID NO: 134150 - RNA, 32 nt, Homo Sapiens
agguuucuucucaucaccagcucagcuaggcc

SEQ ID NO: 134151 - RNA, 32 nt, Homo Sapiens
acuaacuccccucccccacaacuucuccacgg

SEQ ID NO: 134152 - RNA, 32 nt, Homo Sapiens
gcucuucccuccccucuccagcuacauacucu

SEQ ID NO: 134153 - RNA, 32 nt, Homo Sapiens
uggggcccucccuccgcacccccucgccccga

SEQ ID NO: 134154 - RNA, 32 nt, Homo Sapiens
acuagucuggccaacauggugaaacacuaucu

SEQ ID NO: 134155 - RNA, 32 nt, Homo Sapiens
ccccgauccccgcucccaacacugccggaguc

SEQ ID NO: 134156 - RNA, 32 nt, Homo Sapiens
uuuugauucgauggcaugcagcugcgugaccu

SEQ ID NO: 134157 - RNA, 32 nt, Homo Sapiens
uuuguaagggaagccagguuggggaauaggag

SEQ ID NO: 134158 - RNA, 32 nt, Homo Sapiens
cuggagggcagacaauuuucugacuugcuuuu

SEQ ID NO: 134159 - RNA, 32 nt, Homo Sapiens
cuauuuuuauguuuauacuagguagggucuuu

SEQ ID NO: 134160 - RNA, 32 nt, Homo Sapiens
uccuucugggucugacaaagcagggaccaugu

SEQ ID NO: 134161 - RNA, 32 nt, Homo Sapiens
uggggguugagggaagaaaugcagcaguaugg

SEQ ID NO: 134162 - RNA, 32 nt, Homo Sapiens
guggccacagcuuuuuggguuuggaauggagu

SEQ ID NO: 134163 - RNA, 32 nt, Homo Sapiens
caggccccagcaugauccugaaaucugcaucc

SEQ ID NO: 134164 - RNA, 32 nt, Homo Sapiens
uggaaggaaggcuggcaucaaaauauuuugau

SEQ ID NO: 134165 - RNA, 32 nt, Homo Sapiens
cgaaggggcggcgggacgcgggccuggcccgu

SEQ ID NO: 134166 - RNA, 32 nt, Homo Sapiens
cuuaaaagaugguaacaauauacuguuuggua

SEQ ID NO: 134167 - RNA, 32 nt, Homo Sapiens
ggucaauuuuguuauguauauuuuauaucaau

SEQ ID NO: 134168 - RNA, 32 nt, Homo Sapiens
uugcaguuuaaggauuugauaauaaaucugcc

SEQ ID NO: 134169 - RNA, 32 nt, Homo Sapiens
gccgcccaguguucugugaccacccguguagc

SEQ ID NO: 134170 - RNA, 32 nt, Homo Sapiens
gacauuuuguguuuguggccaaaauuagaaac

SEQ ID NO: 134171 - RNA, 32 nt, Homo Sapiens
ugcacccggccgcgucccgggcuccgugcgcc

SEQ ID NO: 134172 - RNA, 32 nt, Homo Sapiens
aguuuuccucuuuuacggaccauccucaaagg

SEQ ID NO: 134173 - RNA, 32 nt, Homo Sapiens
guguggguuuuuuaauuaaaaauguuaaaagu

SEQ ID NO: 134174 - RNA, 32 nt, Homo Sapiens
cacgucccacccagagaaacucucguauuccc

SEQ ID NO: 134175 - RNA, 32 nt, Homo Sapiens
cagagccacucuggaggcugggcuggcacagu

SEQ ID NO: 134176 - RNA, 32 nt, Homo Sapiens
caagcuaacuuuccagaggaaauauccaaaua

SEQ ID NO: 134177 - RNA, 32 nt, Homo Sapiens
uuugaaguccccucauauacaaugaaaugaua

SEQ ID NO: 134178 - RNA, 32 nt, Homo Sapiens
aaguaccauuugcgguccaaauacuugagugu

SEQ ID NO: 134179 - RNA, 32 nt, Homo Sapiens
ccuggcagcacuuucccuuccagcuuuccuca

SEQ ID NO: 134180 - RNA, 32 nt, Homo Sapiens
aaauauaaaaauaauuaaaacaaaauccuugc

SEQ ID NO: 134181 - RNA, 32 nt, Homo Sapiens
auccuccuugucuuaaucguccugcugcugcu

SEQ ID NO: 134182 - RNA, 32 nt, Homo Sapiens
uacuugccugcugaagcuuuggagcacuugug

SEQ ID NO: 134183 - RNA, 32 nt, Homo Sapiens
uuaaaaugauggauucaacuucugccucggau

SEQ ID NO: 134184 - RNA, 32 nt, Homo Sapiens
ccgucauggggucaauaagaaaauagggguga

SEQ ID NO: 134185 - RNA, 32 nt, Homo Sapiens
agucuacaaauuauuucuuuuacacaaauaua

SEQ ID NO: 134186 - RNA, 32 nt, Homo Sapiens
cuuagguaccucagguggcccaggaggucccc

SEQ ID NO: 134187 - RNA, 32 nt, Homo Sapiens
cagcugggacuacaggcacgcgccaccacagc

SEQ ID NO: 134188 - RNA, 32 nt, Homo Sapiens
aaauuagcuggguguuguggugcaugccugua

SEQ ID NO: 134189 - RNA, 32 nt, Homo Sapiens
uuguccaugcguuauugguuuguaaugcuagc

SEQ ID NO: 134190 - RNA, 32 nt, Homo Sapiens
uggccacagccucagcuugggagccucuucug

SEQ ID NO: 134191 - RNA, 32 nt, Homo Sapiens
gagacgcggaggaggagacaugagccggcggg

SEQ ID NO: 134192 - RNA, 32 nt, Homo Sapiens
gcaggaggcgcggcccggcagcucccgcaugc

SEQ ID NO: 134193 - RNA, 32 nt, Homo Sapiens
cacaagaaugacuucacacugucacuuucaga

SEQ ID NO: 134194 - RNA, 32 nt, Homo Sapiens
acugcuguaaccccgcgccggcauagggaccu

SEQ ID NO: 134195 - RNA, 32 nt, Homo Sapiens
aaagcugcaucugucuguaucuuucuuuugua

SEQ ID NO: 134196 - RNA, 32 nt, Homo Sapiens
ggaaucggagcacaacuuggcccugcguuccc

SEQ ID NO: 134197 - RNA, 32 nt, Homo Sapiens
aaaccgauccaaccuagagaccauuuuuagga

SEQ ID NO: 134198 - RNA, 32 nt, Homo Sapiens
cguugcuccuuccccgagcuuccccggacagc

SEQ ID NO: 134199 - RNA, 32 nt, Homo Sapiens
gagcccgcccuuccuucgcccgcuacaccacu

SEQ ID NO: 134200 - RNA, 32 nt, Homo Sapiens
cccacagcagcaucagacccauccaggggcua

SEQ ID NO: 134201 - RNA, 32 nt, Homo Sapiens
cgagcgcgccggcaccgccugcaccgcccuuc

SEQ ID NO: 134202 - RNA, 29 nt, Homo Sapiens
aagagaauagugaugaacuuugaaguuau

SEQ ID NO: 134203 - RNA, 32 nt, Homo Sapiens
agaugaggucccugaggaugucuaacugauuc

SEQ ID NO: 134204 - RNA, 32 nt, Homo Sapiens
agacccacccagagcccuccugcccuccuucc

SEQ ID NO: 134205 - RNA, 32 nt, Homo Sapiens
acaggaggaggcuguggcugcagagccuggag

SEQ ID NO: 134206 - RNA, 32 nt, Homo Sapiens
uuuccauggacauuuaacauccuuccaauuuu

SEQ ID NO: 134207 - RNA, 32 nt, Homo Sapiens
cucaccuggugcccugaccucagccuccuccc

SEQ ID NO: 134208 - RNA, 32 nt, Homo Sapiens
uggcugaaaaagaauauaaaaagcuagacucu

SEQ ID NO: 134209 - RNA, 32 nt, Homo Sapiens
gccuauuuuuaaaaggaaucugaaauuuaauu

SEQ ID NO: 134210 - RNA, 32 nt, Homo Sapiens
cggccgccaagcuccgccucccgccccgggcu

SEQ ID NO: 134211 - RNA, 32 nt, Homo Sapiens
gcugguggccccagguuccaggccaucaguaa

SEQ ID NO: 134212 - RNA, 32 nt, Homo Sapiens
ggcucuaggagguagucacugagcuggaccuu

SEQ ID NO: 134213 - RNA, 32 nt, Homo Sapiens
auucuucuccuuucuuuuuuuuuuuuuuaauu

SEQ ID NO: 134214 - RNA, 31 nt, Homo Sapiens
ccagguccacccucaguacucaagcugcagu

SEQ ID NO: 134215 - RNA, 32 nt, Homo Sapiens
aauauuuuauacugacagaaaucaguaauauu

SEQ ID NO: 134216 - RNA, 32 nt, Homo Sapiens
uaauuuuuagagaaacaaaggcucuuucucag

SEQ ID NO: 134217 - RNA, 30 nt, Homo Sapiens
uccuggggcaggcgaggggcucagggcucu

SEQ ID NO: 134218 - RNA, 32 nt, Homo Sapiens
ccaugguggcugaguucuggaggcuguaauuu

SEQ ID NO: 134219 - RNA, 32 nt, Homo Sapiens
ccaagauguccugguccccacagcucgccaag

SEQ ID NO: 134220 - RNA, 32 nt, Homo Sapiens
uccccccaccccagcccuagcccuuuagccuu

SEQ ID NO: 134221 - RNA, 32 nt, Homo Sapiens
ugaaaccaacuuuuuacuuccaucauccuuuu

SEQ ID NO: 134222 - RNA, 32 nt, Homo Sapiens
ggagagcugaccaaacacuaaggaugcugaag

SEQ ID NO: 134223 - RNA, 32 nt, Homo Sapiens
aauccuuaggccucccucucccuucccucugu

SEQ ID NO: 134224 - RNA, 32 nt, Homo Sapiens
uaauaaaggugacacgaggucauuagaguggg

SEQ ID NO: 134225 - RNA, 32 nt, Homo Sapiens
ucacaggcggcucgcccgccuccggaucagcu

SEQ ID NO: 134226 - RNA, 32 nt, Homo Sapiens
gcaauguggcgacccgggaggcuguggguugg

SEQ ID NO: 134227 - RNA, 32 nt, Homo Sapiens
aguucaccccagagggucgggcagguugacau

SEQ ID NO: 134228 - RNA, 32 nt, Homo Sapiens
ccgucuuccaucugugaucuggcacucauucu

SEQ ID NO: 134229 - RNA, 32 nt, Homo Sapiens
auuccagggcuuuugggaguugaagcuggagg

SEQ ID NO: 134230 - RNA, 32 nt, Homo Sapiens
ggcaguggccgggcccgggggcugcgcuuuuc

SEQ ID NO: 134231 - RNA, 32 nt, Homo Sapiens
agugcagcguguaaguguggcuccucacaggc

SEQ ID NO: 134232 - RNA, 32 nt, Homo Sapiens
ugauuuaaaaagacaucuggaugugaacuuuc

SEQ ID NO: 134233 - RNA, 32 nt, Homo Sapiens
uuuuuucuauucaauuuugucuauauauugau

SEQ ID NO: 134234 - RNA, 32 nt, Homo Sapiens
uuuguaaccaucaugcagaaaaacagaacuuu

SEQ ID NO: 134235 - RNA, 32 nt, Homo Sapiens
uggcuacuagagagguugaggugggaggauca

SEQ ID NO: 134236 - RNA, 32 nt, Homo Sapiens
cuugauaaaaacaguggcgcaguuugagagaa

SEQ ID NO: 134237 - RNA, 32 nt, Homo Sapiens
uggucaacagaaaccccaucccugcccauaga

SEQ ID NO: 134238 - RNA, 32 nt, Homo Sapiens
agcccccuuucugauaaucagagagaacguuu

SEQ ID NO: 134239 - RNA, 32 nt, Homo Sapiens
augcauuucauucaaaucagugaucuauguuu

SEQ ID NO: 134240 - RNA, 32 nt, Homo Sapiens
agcuaacagcaucuuguguuggaaacgcacac

SEQ ID NO: 134241 - RNA, 32 nt, Homo Sapiens
cagagaaaugaaauaguuuuaucuggaaaauu

SEQ ID NO: 134242 - RNA, 32 nt, Homo Sapiens
uccaaaaucaaccugccacauuuugggagcuu

SEQ ID NO: 134243 - RNA, 32 nt, Homo Sapiens
gcaggcagaaaaguuccugagggcggaaaagu

SEQ ID NO: 134244 - RNA, 32 nt, Homo Sapiens
caccaucggcugagcccuccuggcccccgccu

SEQ ID NO: 134245 - RNA, 32 nt, Homo Sapiens
acccggccugccccgcggcaagauggcggccu

SEQ ID NO: 134246 - RNA, 32 nt, Homo Sapiens
cggcgcccaagccuggguucuccccaagacua

SEQ ID NO: 134247 - RNA, 32 nt, Homo Sapiens
acaaacuguacaaaauaauucugucuuuggga

SEQ ID NO: 134248 - RNA, 32 nt, Homo Sapiens
agugcucgcggggccgcggcggaguguaccgu

SEQ ID NO: 134249 - RNA, 32 nt, Homo Sapiens
uguuuuuugaugucucugugugccaaacagcc

SEQ ID NO: 134250 - RNA, 32 nt, Homo Sapiens
ggacaagcccgacuuaaaucucugcaauggcu

SEQ ID NO: 134251 - RNA, 32 nt, Homo Sapiens
acgugagaggagacuuccggccacugcguugu

SEQ ID NO: 134252 - RNA, 30 nt, Homo Sapiens
ccacugggucauguuugacauuuuauaaug

SEQ ID NO: 134253 - RNA, 32 nt, Homo Sapiens
gugcuccugugcuacggccuguggcuggacug

SEQ ID NO: 134254 - RNA, 32 nt, Homo Sapiens
ccuguaaaaugaacuacaggaauagcuacaga

SEQ ID NO: 134255 - RNA, 32 nt, Homo Sapiens
ucucauuaauaauuuugaguaccuguuaaaau

SEQ ID NO: 134256 - RNA, 32 nt, Homo Sapiens
gaucucuauauuaaauucuaaaaugggauuaa

SEQ ID NO: 134257 - RNA, 32 nt, Homo Sapiens
accucuuugcccagcuucuccccugcccuauu

SEQ ID NO: 134258 - RNA, 32 nt, Homo Sapiens
guuuuccugugcugccaagcucagaagccaga

SEQ ID NO: 134259 - RNA, 32 nt, Homo Sapiens
ugccggagccccgccgccgccggcuuggauuc

SEQ ID NO: 134260 - RNA, 32 nt, Homo Sapiens
auaaaaucuauuuuucuuuaaaucuuggaaaa

SEQ ID NO: 134261 - RNA, 32 nt, Homo Sapiens
ggauggagccucccauggauaggaacucuucc

SEQ ID NO: 134262 - RNA, 32 nt, Homo Sapiens
aacucagauaucagcucugcuauuuucuaacu

SEQ ID NO: 134263 - RNA, 30 nt, Homo Sapiens
caugccuccucugcugcagggcucccccac

SEQ ID NO: 134264 - RNA, 32 nt, Homo Sapiens
cgugcugccucuucuuaacuuugauuuccuga

SEQ ID NO: 134265 - RNA, 32 nt, Homo Sapiens
gggauggcaggagagucugggggacucucugg

SEQ ID NO: 134266 - RNA, 32 nt, Homo Sapiens
uuaacugcaagaagaggcgggauacuuucagc

SEQ ID NO: 134267 - RNA, 32 nt, Homo Sapiens
cuuaccauuuuucuuuuucugcaguguugauu

SEQ ID NO: 134268 - RNA, 32 nt, Homo Sapiens
uauucuauuguuuauuuacaccagcuuuucuu

SEQ ID NO: 134269 - RNA, 32 nt, Homo Sapiens
uuuggagccuaugcacuguacacaauggcaaa

SEQ ID NO: 134270 - RNA, 32 nt, Homo Sapiens
auaaguuuucaggaaauaaauuccuugagggc

SEQ ID NO: 134271 - RNA, 32 nt, Homo Sapiens
acagcugauuuucuuuuuccaguguuguuuuu

SEQ ID NO: 134272 - RNA, 32 nt, Homo Sapiens
accauuuaucauggacgguugucaugaguguu

SEQ ID NO: 134273 - RNA, 32 nt, Homo Sapiens
ucacugguccugucacauucugcaccacccag

SEQ ID NO: 134274 - RNA, 32 nt, Homo Sapiens
acugaaaccacugacaaguaugcugaauagaa

SEQ ID NO: 134275 - RNA, 32 nt, Homo Sapiens
aucacagaaaauuuaacuuaagaaaauuuaca

SEQ ID NO: 134276 - RNA, 32 nt, Homo Sapiens
ggaccaguggcucccauuuucauuuuagccau

SEQ ID NO: 134277 - RNA, 31 nt, Homo Sapiens
uccggcgggcgcugccugccuuccucccaga

SEQ ID NO: 134278 - RNA, 32 nt, Homo Sapiens
uaacuagaugaccuacuuugcuuuccuguaua

SEQ ID NO: 134279 - RNA, 32 nt, Homo Sapiens
cuggcuccagauaccccucccccacagauucc

SEQ ID NO: 134280 - RNA, 32 nt, Homo Sapiens
gagcugcuauccccggcucggcccgggcagcc

SEQ ID NO: 134281 - RNA, 32 nt, Homo Sapiens
ucauucagaacagaggcuuuucccagauccca

SEQ ID NO: 134282 - RNA, 32 nt, Homo Sapiens
agguggguagcauggugccuggcucaauguaa

SEQ ID NO: 134283 - RNA, 32 nt, Homo Sapiens
uucuugucaccgauggaacagucugucuuugu

SEQ ID NO: 134284 - RNA, 32 nt, Homo Sapiens
agucuguagaaaaaauaaaauaaaaugagccc

SEQ ID NO: 134285 - RNA, 32 nt, Homo Sapiens
uuguaacgaugaugguuacccuucauggacgu

SEQ ID NO: 134286 - RNA, 32 nt, Homo Sapiens
cagagccccuccccgccccucuccccacuccg

SEQ ID NO: 134287 - RNA, 32 nt, Homo Sapiens
cugacaagugcuuuugcuuucuuucuuucuuu

SEQ ID NO: 134288 - RNA, 32 nt, Homo Sapiens
ccagcccaaaauuauuucaucuuguauucuuu

SEQ ID NO: 134289 - RNA, 32 nt, Homo Sapiens
cccuccaguucccuccugagggcugugccagg

SEQ ID NO: 134290 - RNA, 32 nt, Homo Sapiens
cgugcuccucagggcccuccccugccucuggg

SEQ ID NO: 134291 - RNA, 32 nt, Homo Sapiens
ugugugcuaugaaaaaugaugucccauguuca

SEQ ID NO: 134292 - RNA, 32 nt, Homo Sapiens
uccacagaggauguuguucaaaccagaaaucu

SEQ ID NO: 134293 - RNA, 32 nt, Homo Sapiens
auccuccugccucagcauccacaguagcugau

SEQ ID NO: 134294 - RNA, 32 nt, Homo Sapiens
gcggcggugcggguucuagggcggcggccguc

SEQ ID NO: 134295 - RNA, 32 nt, Homo Sapiens
guauucaucuuccauccuuucauagucacaag

SEQ ID NO: 134296 - RNA, 32 nt, Homo Sapiens
ugccagacaggccccugaagaccugaacccag

SEQ ID NO: 134297 - RNA, 32 nt, Homo Sapiens
augcggggcacggccuccauggcggcuggcac

SEQ ID NO: 134298 - RNA, 32 nt, Homo Sapiens
cuccuuaauaaaagcaaagugauugaguaggu

SEQ ID NO: 134299 - RNA, 32 nt, Homo Sapiens
ggcaaagcaugucagaaacggaccuugguuuc

SEQ ID NO: 134300 - RNA, 32 nt, Homo Sapiens
uuauuaagguacaacuaauguacaauaaggug

SEQ ID NO: 134301 - RNA, 32 nt, Homo Sapiens
guauagcuugaaaaguuuuuuuuuaaugacug

SEQ ID NO: 134302 - RNA, 32 nt, Homo Sapiens
aauuuucuaaucuuuagaaaucucugcuguuc

SEQ ID NO: 134303 - RNA, 32 nt, Homo Sapiens
acauuugguuuaucugugucauuggucaaagu

SEQ ID NO: 134304 - RNA, 32 nt, Homo Sapiens
accgcgcacggccucuaggucuccucgccagg

SEQ ID NO: 134305 - RNA, 32 nt, Homo Sapiens
gccucguagugcaugaagugcaugucauacac

SEQ ID NO: 134306 - RNA, 32 nt, Homo Sapiens
aaugccuaagccaaaaugcuguagcucugcac

SEQ ID NO: 134307 - RNA, 32 nt, Homo Sapiens
cgcuguuugggaaguagcuggugcuccucugc

SEQ ID NO: 134308 - RNA, 32 nt, Homo Sapiens
ccauaaagcaaaaaauaauuugaaagcccguc

SEQ ID NO: 134309 - RNA, 32 nt, Homo Sapiens
ccacgccgccccaccacuauaggcugcuggag

SEQ ID NO: 134310 - RNA, 32 nt, Homo Sapiens
cauugcacuccagccugggugacagagcaaua

SEQ ID NO: 134311 - RNA, 32 nt, Homo Sapiens
gagcuccuggggagcuccugggacccuuggcu

SEQ ID NO: 134312 - RNA, 32 nt, Homo Sapiens
guaaauguaaaauuauuucaaaauaaauuuuu

SEQ ID NO: 134313 - RNA, 32 nt, Homo Sapiens
acccuuagucaauaguuaaccaaaaaauugca

SEQ ID NO: 134314 - RNA, 32 nt, Homo Sapiens
auaugaccaaaauuuuaaguaggaaagucacc

SEQ ID NO: 134315 - RNA, 32 nt, Homo Sapiens
ccagcuguucccuccgcggauucuccggggcu

SEQ ID NO: 134316 - RNA, 32 nt, Homo Sapiens
uaaguuccuuuaaauuuaauuaagcugaagau

SEQ ID NO: 134317 - RNA, 32 nt, Homo Sapiens
ccgccccccgguuggauguccuuccaagaaug

SEQ ID NO: 134318 - RNA, 32 nt, Homo Sapiens
cccccgugcgcccuaggcgccaccaugucggg

SEQ ID NO: 134319 - RNA, 32 nt, Homo Sapiens
uucuugacucaaugaacuuaugacuaauuauu

SEQ ID NO: 134320 - RNA, 32 nt, Homo Sapiens
gggcucacaccuguaaucccagcacuuuggga

SEQ ID NO: 134321 - RNA, 32 nt, Homo Sapiens
cuggcagcugucuccagaggaucaaagccaca

SEQ ID NO: 134322 - RNA, 32 nt, Homo Sapiens
aggaaggaauggggggccccagccccaggccg

SEQ ID NO: 134323 - RNA, 32 nt, Homo Sapiens
ggucuggggccuggggguuuugugucgugaca

SEQ ID NO: 134324 - RNA, 32 nt, Homo Sapiens
ucuaauaaaaauacgaaaaauuagcugggcau

SEQ ID NO: 134325 - RNA, 32 nt, Homo Sapiens
acugaagagguggcuggacaugugcuggguca

SEQ ID NO: 134326 - RNA, 32 nt, Homo Sapiens
aggagcgggcgggacauggacugcgugaucuu

SEQ ID NO: 134327 - RNA, 32 nt, Homo Sapiens
uccacaaaaaauacaaaaauuagcuagguguc

SEQ ID NO: 134328 - RNA, 32 nt, Homo Sapiens
uguggguccuuccuaaucccucugacgucaug

SEQ ID NO: 134329 - RNA, 32 nt, Homo Sapiens
cuugggaagacagagaaacauaaagaggaaau

SEQ ID NO: 134330 - RNA, 32 nt, Homo Sapiens
aaagcagcacgacuugaaacuuccuacauguu

SEQ ID NO: 134331 - RNA, 32 nt, Homo Sapiens
agcgcaggcacaggaagcuggugacggcgaug

SEQ ID NO: 134332 - RNA, 32 nt, Homo Sapiens
cucaaugccugccugggcacaggggaaaagcc

SEQ ID NO: 134333 - RNA, 32 nt, Homo Sapiens
cacugaggcaacaugaagcccgaggcccagau

SEQ ID NO: 134334 - RNA, 32 nt, Homo Sapiens
uauuguauaugauaauaauuauguccuauuua

SEQ ID NO: 134335 - RNA, 31 nt, Homo Sapiens
gcagaaaguuggacagaguccacuccuauuc

SEQ ID NO: 134336 - RNA, 32 nt, Homo Sapiens
gccggaagucccagcccaguccccgcgcgcgu

SEQ ID NO: 134337 - RNA, 31 nt, Homo Sapiens
gcuccgccgcgggucgcucgggcgcugucca

SEQ ID NO: 134338 - RNA, 32 nt, Homo Sapiens
ucagcucguccuccccgccccgcaccggccuu

SEQ ID NO: 134339 - RNA, 32 nt, Homo Sapiens
gaugucuuaguuuuuuauaaccauaguugauu

SEQ ID NO: 134340 - RNA, 32 nt, Homo Sapiens
ugggcuuucugcacucggcaugagcuccgccc

SEQ ID NO: 134341 - RNA, 32 nt, Homo Sapiens
cagggaaaggggcgccgccgcugcuggaaacu

SEQ ID NO: 134342 - RNA, 32 nt, Homo Sapiens
uuggaggcccuggcucaggagcucauagaugg

SEQ ID NO: 134343 - RNA, 32 nt, Homo Sapiens
agacguugauucaagaccacaagcaucaugac

SEQ ID NO: 134344 - RNA, 32 nt, Homo Sapiens
ggugaacgacacagucagaacuaugaugaccu

SEQ ID NO: 134345 - RNA, 32 nt, Homo Sapiens
gagccgcgccgguggccagcggugccggcugu

SEQ ID NO: 134346 - RNA, 32 nt, Homo Sapiens
gcccaucacaugcccuagaagguaagucccau

SEQ ID NO: 134347 - RNA, 32 nt, Homo Sapiens
gcaugacaaaaauuauuuuuuuuuuuguucuu

SEQ ID NO: 134348 - RNA, 32 nt, Homo Sapiens
uggagaacuggcccgcgcgccacgggggcacc

SEQ ID NO: 134349 - RNA, 32 nt, Homo Sapiens
acuuaaucucuucauguucaguuuuuacuuca

SEQ ID NO: 134350 - RNA, 32 nt, Homo Sapiens
ucacugacaggagagcagagacaggacguguc

SEQ ID NO: 134351 - RNA, 32 nt, Homo Sapiens
ggcuggugggucugcagcuggugugggaacuu

SEQ ID NO: 134352 - RNA, 32 nt, Homo Sapiens
ucccauuuguauccccugauugagacucagua

SEQ ID NO: 134353 - RNA, 32 nt, Homo Sapiens
ugaucgucgcuaccauaggagcuccccuuauc

SEQ ID NO: 134354 - RNA, 32 nt, Homo Sapiens
uuguucacuguggaggaguuaauuauagaaug

SEQ ID NO: 134355 - RNA, 32 nt, Homo Sapiens
auaaaugagaaucaugauaagcaguagacaag

SEQ ID NO: 134356 - RNA, 32 nt, Homo Sapiens
auucuccaaguggggcgggccugggccugggg

SEQ ID NO: 134357 - RNA, 32 nt, Homo Sapiens
cucuuugcccucgcgacgccgccaccuccgga

SEQ ID NO: 134358 - RNA, 32 nt, Homo Sapiens
acuuauuugucaaaauaaagauucucacauau

SEQ ID NO: 134359 - RNA, 32 nt, Homo Sapiens
gaaagcgccuucaagagcuaccucuggcggca

SEQ ID NO: 134360 - RNA, 32 nt, Homo Sapiens
cgucacgccagacagcggcccgcgcgccuucu

SEQ ID NO: 134361 - RNA, 30 nt, Homo Sapiens
acgggguuucaccagguuagccaggauggu

SEQ ID NO: 134362 - RNA, 32 nt, Homo Sapiens
cuccugagugaggagacaaaacgcauuuuccu

SEQ ID NO: 134363 - RNA, 32 nt, Homo Sapiens
ggcaaggccgggcgcaguggcucacgucugua

SEQ ID NO: 134364 - RNA, 32 nt, Homo Sapiens
cacccagcucuggacagaguucuuauaaaugu

SEQ ID NO: 134365 - RNA, 32 nt, Homo Sapiens
ggcgcugcagcugcagaauggucggcgguggc

SEQ ID NO: 134366 - RNA, 32 nt, Homo Sapiens
uaaugaguuugaaaagaaacaaugaaaugugu

SEQ ID NO: 134367 - RNA, 32 nt, Homo Sapiens
aauaaguaaacauuuccuggaccuccaagaag

SEQ ID NO: 134368 - RNA, 32 nt, Homo Sapiens
acccucggccagcaggguggccccagguccau

SEQ ID NO: 134369 - RNA, 32 nt, Homo Sapiens
gagccaccgcgcccggcccagguuucuuauuu

SEQ ID NO: 134370 - RNA, 32 nt, Homo Sapiens
cggguguggaccgcggacgucgcugggacagc

SEQ ID NO: 134371 - RNA, 32 nt, Homo Sapiens
cccucccaggucugggcugugcaguuccuccc

SEQ ID NO: 134372 - RNA, 32 nt, Homo Sapiens
ccccacccuggcccugccccagccuguguagc

SEQ ID NO: 134373 - RNA, 32 nt, Homo Sapiens
ccagguuggagaucguagcugcugcugcuugc

SEQ ID NO: 134374 - RNA, 32 nt, Homo Sapiens
uaaacaaauaaauaauguaguuugagauagug

SEQ ID NO: 134375 - RNA, 32 nt, Homo Sapiens
cacugcaccgaggcggggcgccagcgcccagg

SEQ ID NO: 134376 - RNA, 32 nt, Homo Sapiens
cccuuggcuggcuccuggcccuacuuggggug

SEQ ID NO: 134377 - RNA, 32 nt, Homo Sapiens
aacgaaggauaugugagggucugagaggggag

SEQ ID NO: 134378 - RNA, 32 nt, Homo Sapiens
aaaccaggcaucuggucaaaccagcagaucaa

SEQ ID NO: 134379 - RNA, 29 nt, Homo Sapiens
cugaagaugaagauuuagagcauauuuac

SEQ ID NO: 134380 - RNA, 32 nt, Homo Sapiens
agcaucuguccccuccucccccggccgcuccu

SEQ ID NO: 134381 - RNA, 32 nt, Homo Sapiens
aggcaggcgaggggcugggaguggguagccgu

SEQ ID NO: 134382 - RNA, 32 nt, Homo Sapiens
gaguucagguucagccaguggcguugcgcauu

SEQ ID NO: 134383 - RNA, 30 nt, Homo Sapiens
augugaggucuucuuccagaagcuucugca

SEQ ID NO: 134384 - RNA, 32 nt, Homo Sapiens
auugcuccccgagccccgggaccgcuguggac

SEQ ID NO: 134385 - RNA, 32 nt, Homo Sapiens
cucuugggcauaaaaucucagaggaagcuacu

SEQ ID NO: 134386 - RNA, 32 nt, Homo Sapiens
guauuuuuauuacuauuuaaacaagugauuaa

SEQ ID NO: 134387 - RNA, 32 nt, Homo Sapiens
gauauugccagcagacccccugccaucccccc

SEQ ID NO: 134388 - RNA, 32 nt, Homo Sapiens
cacucugggaccccugaugcucuucuuuguuc

SEQ ID NO: 134389 - RNA, 32 nt, Homo Sapiens
gcggagcuucccagccgcacacuuccucccuc

SEQ ID NO: 134390 - RNA, 32 nt, Homo Sapiens
uuuaugguugccguuugugucugauuugauuu

SEQ ID NO: 134391 - RNA, 27 nt, Homo Sapiens
uuaauucauuaauuuaguguaagaaga

SEQ ID NO: 134392 - RNA, 32 nt, Homo Sapiens
cccagcugcggaggccgacggcacccggcccc

SEQ ID NO: 134393 - RNA, 32 nt, Homo Sapiens
uggggcauuguuaaagguucacccucuuuuuu

SEQ ID NO: 134394 - RNA, 32 nt, Homo Sapiens
cauaacaaacaucaucauccagaaauguaagg

SEQ ID NO: 134395 - RNA, 32 nt, Homo Sapiens
ggacugggugcguugugcaggcagaauggcug

SEQ ID NO: 134396 - RNA, 32 nt, Homo Sapiens
uccagguguggccuaggcgccaccuucugcug

SEQ ID NO: 134397 - RNA, 32 nt, Homo Sapiens
gggacugugggaaagaagaccaaaggcaggcc

SEQ ID NO: 134398 - RNA, 32 nt, Homo Sapiens
ggaggcaaaaggcaguggggcuggggguaguu

SEQ ID NO: 134399 - RNA, 32 nt, Homo Sapiens
agcaccgaggcccucaugaaaagcaguccuga

SEQ ID NO: 134400 - RNA, 31 nt, Homo Sapiens
ccucgcauggagcgcgagcccagcgccucgg

SEQ ID NO: 134401 - RNA, 32 nt, Homo Sapiens
ccuggccaaaacugaacuaaauacucacuuca

SEQ ID NO: 134402 - RNA, 32 nt, Homo Sapiens
cucaagcaguccucccaccucagccucccaaa

SEQ ID NO: 134403 - RNA, 32 nt, Homo Sapiens
ggcccacugggcaucuucugcacuuucucugc

SEQ ID NO: 134404 - RNA, 32 nt, Homo Sapiens
ccaagaauuuaaaggaguuucuuaauuucgac

SEQ ID NO: 134405 - RNA, 32 nt, Homo Sapiens
agaaugcuauauuuuuaacagcacuccagcau

SEQ ID NO: 134406 - RNA, 32 nt, Homo Sapiens
caccagccgggcgcaguggcucacgccuguaa

SEQ ID NO: 134407 - RNA, 32 nt, Homo Sapiens
uucuguuuuuaacaagcccuccaggugauuuu

SEQ ID NO: 134408 - RNA, 29 nt, Homo Sapiens
agucaaacauugugaucuauaaaugcaca

SEQ ID NO: 134409 - RNA, 32 nt, Homo Sapiens
acuggcuauguuauuauuauuaaauuuauguu

SEQ ID NO: 134410 - RNA, 32 nt, Homo Sapiens
uucuguguaugucuccgcgucuuccgcggagc

SEQ ID NO: 134411 - RNA, 32 nt, Homo Sapiens
uccugccgcgcgccuacuaccgguggacccgc

SEQ ID NO: 134412 - RNA, 32 nt, Homo Sapiens
guuuauuuuacagucuucuccuuuaugauauc

SEQ ID NO: 134413 - RNA, 32 nt, Homo Sapiens
ccggagagcugggagcacaggucccggcagcc

SEQ ID NO: 134414 - RNA, 32 nt, Homo Sapiens
aacaaugaaauccccaaugccugugggaggug

SEQ ID NO: 134415 - RNA, 29 nt, Homo Sapiens
acaguaaaguuuuuauauuuucuaucaac

SEQ ID NO: 134416 - RNA, 32 nt, Homo Sapiens
ccagcucacggcggccccggccccggguggcu

SEQ ID NO: 134417 - RNA, 32 nt, Homo Sapiens
ccauggccacccccaccccugccucgcccccu

SEQ ID NO: 134418 - RNA, 32 nt, Homo Sapiens
uggaccuccccucccuugcuggagcuagaaug

SEQ ID NO: 134419 - RNA, 32 nt, Homo Sapiens
gggccacucgggcucagaggucacucaggguc

SEQ ID NO: 134420 - RNA, 32 nt, Homo Sapiens
ccuuauuccacuguggcauugccguucuaagc

SEQ ID NO: 134421 - RNA, 32 nt, Homo Sapiens
gcucagagguggcagagcuucgucagcuggag

SEQ ID NO: 134422 - RNA, 32 nt, Homo Sapiens
uuuaagauaaacuauaggauagauagaauggu

SEQ ID NO: 134423 - RNA, 32 nt, Homo Sapiens
ucagaagcuuggaagaggcaaagaagaauucu

SEQ ID NO: 134424 - RNA, 32 nt, Homo Sapiens
aguuaagaucauaauauguggaacaaauggaa

SEQ ID NO: 134425 - RNA, 32 nt, Homo Sapiens
cccagaaauggcagggacacuucucuugcaga

SEQ ID NO: 134426 - RNA, 32 nt, Homo Sapiens
ccacggacaggaagagcagcucuggcuaucac

SEQ ID NO: 134427 - RNA, 32 nt, Homo Sapiens
uucugaggaaaugggcaagauguugaaggagg

SEQ ID NO: 134428 - RNA, 32 nt, Homo Sapiens
cuucuuugacauuuuuuaguguaaagguaacu

SEQ ID NO: 134429 - RNA, 32 nt, Homo Sapiens
gccccaaacaaaucugacaaaaguuaaagacc

SEQ ID NO: 134430 - RNA, 32 nt, Homo Sapiens
ugggcgcaucgcgggcgggcagggccugaagu

SEQ ID NO: 134431 - RNA, 31 nt, Homo Sapiens
uaacacucacggagaaggucugcagguucau

SEQ ID NO: 134432 - RNA, 32 nt, Homo Sapiens
gcuggagacagagucagagcagucaagggugg

SEQ ID NO: 134433 - RNA, 32 nt, Homo Sapiens
ggggagcagcuaggaagagagaggcaagcuuu

SEQ ID NO: 134434 - RNA, 32 nt, Homo Sapiens
guguacugugaacuuaaauauuucauaucagu

SEQ ID NO: 134435 - RNA, 32 nt, Homo Sapiens
uggaggcucccuugucucccagccccauguac

SEQ ID NO: 134436 - RNA, 32 nt, Homo Sapiens
gguaggaggaaucuugguguaugaaaucauug

SEQ ID NO: 134437 - RNA, 32 nt, Homo Sapiens
ggggagcgcccggcccccucccgccccaugcg

SEQ ID NO: 134438 - RNA, 32 nt, Homo Sapiens
aacagccucuuugcaacaaaauagaccaguag

SEQ ID NO: 134439 - RNA, 32 nt, Homo Sapiens
auuaaauacacaguaaucuucaccagaccacu

SEQ ID NO: 134440 - RNA, 32 nt, Homo Sapiens
ggccgggugcgauggcggcgguggcugcguug

SEQ ID NO: 134441 - RNA, 32 nt, Homo Sapiens
gguggacaaguucaugcaggaccuacagugac

SEQ ID NO: 134442 - RNA, 32 nt, Homo Sapiens
uccuaaugauggcaucacuugcacuuggaaga

SEQ ID NO: 134443 - RNA, 32 nt, Homo Sapiens
uuugcgccucuugcgcgugcgccggggcacag

SEQ ID NO: 134444 - RNA, 32 nt, Homo Sapiens
guguacuagcaaauuugcugguucuuagugca

SEQ ID NO: 134445 - RNA, 32 nt, Homo Sapiens
ucauuuuuacuggcaaagaaauccggggagaa

SEQ ID NO: 134446 - RNA, 32 nt, Homo Sapiens
gggaggaucauuugagcucaggaguuccagac

SEQ ID NO: 134447 - RNA, 32 nt, Homo Sapiens
ccuuaaggaugaacuuuuuagagaagcaccuu

SEQ ID NO: 134448 - RNA, 32 nt, Homo Sapiens
cuuugagucaucuauuuucuuuuacagucauc

SEQ ID NO: 134449 - RNA, 29 nt, Homo Sapiens
uaugacauagugaauauagaacuaugcag

SEQ ID NO: 134450 - RNA, 32 nt, Homo Sapiens
cauaguuggucagucuuaauucccaugccaaa

SEQ ID NO: 134451 - RNA, 32 nt, Homo Sapiens
gaaacagugcagugacucacccccugcccccg

SEQ ID NO: 134452 - RNA, 32 nt, Homo Sapiens
gcauauuguaaaaaccuacugaaggucaaagc

SEQ ID NO: 134453 - RNA, 32 nt, Homo Sapiens
gccucgcagcggggccagggcuccgccugcug

SEQ ID NO: 134454 - RNA, 32 nt, Homo Sapiens
agaaaacuagccagaguaucugcacaggaagg

SEQ ID NO: 134455 - RNA, 32 nt, Homo Sapiens
ucuuucccaagcuuuuucagagacucuggagu

SEQ ID NO: 134456 - RNA, 32 nt, Homo Sapiens
uuugugcguggcaagugggaccuuaggaagga

SEQ ID NO: 134457 - RNA, 32 nt, Homo Sapiens
ucugggaaaaagauaauggcuucugauucaac

SEQ ID NO: 134458 - RNA, 32 nt, Homo Sapiens
uuaguaugauguaaggauuaucaucaggauca

SEQ ID NO: 134459 - RNA, 32 nt, Homo Sapiens
cagagaagguucccugaggaaauaguaccuga

SEQ ID NO: 134460 - RNA, 32 nt, Homo Sapiens
uuuuuaaaagauaauuuuuucuuaaaaaaaaa

SEQ ID NO: 134461 - RNA, 30 nt, Homo Sapiens
ccgaggugaaggcgcgcgccccuccccgcc

SEQ ID NO: 134462 - RNA, 32 nt, Homo Sapiens
gaguugagagcuuuugcaucaggcagaagcaa

SEQ ID NO: 134463 - RNA, 32 nt, Homo Sapiens
ggagcaggggagagaguggcuccguuugccuc

SEQ ID NO: 134464 - RNA, 32 nt, Homo Sapiens
uaggauuuucuuuucuuuaaaaaauguauauu

SEQ ID NO: 134465 - RNA, 32 nt, Homo Sapiens
uguguguuuuuacuuuuuggcuacucugaaug

SEQ ID NO: 134466 - RNA, 25 nt, Homo Sapiens
ggguauugguuugaccaggaauauu

SEQ ID NO: 134467 - RNA, 32 nt, Homo Sapiens
accuccagccucgagcccggcgcugcugcccg

SEQ ID NO: 134468 - RNA, 32 nt, Homo Sapiens
caggcggggggcacggagccacuuccuguaca

SEQ ID NO: 134469 - RNA, 32 nt, Homo Sapiens
ggcuguuccgggggcgggacugggcugggccu

SEQ ID NO: 134470 - RNA, 32 nt, Homo Sapiens
cauguuuucacagauguguacccucaagacua

SEQ ID NO: 134471 - RNA, 32 nt, Homo Sapiens
uuuugggaaaggaaaauauccugauuccacuu

SEQ ID NO: 134472 - RNA, 32 nt, Homo Sapiens
gcuacuuauauucugcagaaaauuaauugaaa

SEQ ID NO: 134473 - RNA, 32 nt, Homo Sapiens
cauguuccuaugcggaucuaaugccacugcug

SEQ ID NO: 134474 - RNA, 29 nt, Homo Sapiens
gcucucuucuuccaauacugggcaguaga

SEQ ID NO: 134475 - RNA, 32 nt, Homo Sapiens
gccgaguugcugcccuucccccgggaccgcgg

SEQ ID NO: 134476 - RNA, 32 nt, Homo Sapiens
gcgagggcggcgggcguccggcucugaggugg

SEQ ID NO: 134477 - RNA, 32 nt, Homo Sapiens
aggccggacagccugcccuggggcgcaacugg

SEQ ID NO: 134478 - RNA, 32 nt, Homo Sapiens
ggccacaaggccaggaggcagccuugcuacca

SEQ ID NO: 134479 - RNA, 31 nt, Homo Sapiens
ugaugcagcugcugccaaccagaaguacauu

SEQ ID NO: 134480 - RNA, 32 nt, Homo Sapiens
uugagacagggucuuucucuguugcccaggcu

SEQ ID NO: 134481 - RNA, 32 nt, Homo Sapiens
uaggguacugcaaugcguuaucacaggcagcc

SEQ ID NO: 134482 - RNA, 32 nt, Homo Sapiens
gaggcagccaacauuucucugcucuccuuaga

SEQ ID NO: 134483 - RNA, 32 nt, Homo Sapiens
gaguuugggaccagaauucagaugaacucauu

SEQ ID NO: 134484 - RNA, 32 nt, Homo Sapiens
uggcaugugaauuauuuccugcuuauucauaa

SEQ ID NO: 134485 - RNA, 32 nt, Homo Sapiens
ugaggaaccgggacccucagcacaugugggca

SEQ ID NO: 134486 - RNA, 32 nt, Homo Sapiens
uagacaacgaugaauuucuucuaauuauuuaa

SEQ ID NO: 134487 - RNA, 32 nt, Homo Sapiens
cgccuccgccgggcgagccggagccggagucg

SEQ ID NO: 134488 - RNA, 32 nt, Homo Sapiens
cuggccggccccagccugcccgccgcugccac

SEQ ID NO: 134489 - RNA, 32 nt, Homo Sapiens
gguguggugucagcacagcggcaggucaccgu

SEQ ID NO: 134490 - RNA, 32 nt, Homo Sapiens
uuacaagugugagccaccacacccagccuaau

SEQ ID NO: 134491 - RNA, 32 nt, Homo Sapiens
aaccaggguccucccuccccuuucugccuggu

SEQ ID NO: 134492 - RNA, 32 nt, Homo Sapiens
gcuuucagguagacagacgugauucaaaacuc

SEQ ID NO: 134493 - RNA, 32 nt, Homo Sapiens
ucugcaggaaggaaggcugaaaaagcggacga

SEQ ID NO: 134494 - RNA, 32 nt, Homo Sapiens
gcaccucuguucccgcuuugccccuggaggag

SEQ ID NO: 134495 - RNA, 32 nt, Homo Sapiens
ccuuagucacuuugucucuuucccucccugcc

SEQ ID NO: 134496 - RNA, 32 nt, Homo Sapiens
uggaacuuguaucuguaauacauccuaacucu

SEQ ID NO: 134497 - RNA, 32 nt, Homo Sapiens
ggaggcgccuggcguugccgcggcgcugggaa

SEQ ID NO: 134498 - RNA, 32 nt, Homo Sapiens
gcacaaugaggauaaacuuaugugacccacuu

SEQ ID NO: 134499 - RNA, 32 nt, Homo Sapiens
ccuugagcaaaaagcugaaaaagaagcaggag

SEQ ID NO: 134500 - RNA, 32 nt, Homo Sapiens
uugugucucccaaggugauguuuuugugguuu

SEQ ID NO: 134501 - RNA, 32 nt, Homo Sapiens
acucuaagaugaaucccgaccuggacaccggc

SEQ ID NO: 134502 - RNA, 32 nt, Homo Sapiens
agcugugauguuucaucugcuuugguuguuuu

SEQ ID NO: 134503 - RNA, 32 nt, Homo Sapiens
cuagcaacacccaaagguggccugcggggagc

SEQ ID NO: 134504 - RNA, 32 nt, Homo Sapiens
gguuguaagggaagaguuuaugcugacugcuu

SEQ ID NO: 134505 - RNA, 32 nt, Homo Sapiens
cuuuuaauuuuucugcuucucuaguaccuugu

SEQ ID NO: 134506 - RNA, 32 nt, Homo Sapiens
agaaauucgagcauagaggccaggugcggugg

SEQ ID NO: 134507 - RNA, 32 nt, Homo Sapiens
cacaguuuucccuuccauauuccucucuugag

SEQ ID NO: 134508 - RNA, 32 nt, Homo Sapiens
gaaugauaguugggaagaaaacuauuugcaca

SEQ ID NO: 134509 - RNA, 32 nt, Homo Sapiens
cuuagggaggguugaugggggaggcgugggga

SEQ ID NO: 134510 - RNA, 32 nt, Homo Sapiens
ugauaaggggcuuguaucuggaauauauaaau

SEQ ID NO: 134511 - RNA, 27 nt, Homo Sapiens
agugcccauucauucagcccccucaug

SEQ ID NO: 134512 - RNA, 32 nt, Homo Sapiens
aaguagguagacuuuacccagucucuuuccuu

SEQ ID NO: 134513 - RNA, 32 nt, Homo Sapiens
ccacugggacacugcccuucauccucucucac

SEQ ID NO: 134514 - RNA, 32 nt, Homo Sapiens
uaucaucugcagcuguuuuuuguuuuuaauau

SEQ ID NO: 134515 - RNA, 32 nt, Homo Sapiens
agcuaugccugcccucugugggugccuuagca

SEQ ID NO: 134516 - RNA, 32 nt, Homo Sapiens
acuguucuuucugcaaggacucaccuccuuga

SEQ ID NO: 134517 - RNA, 32 nt, Homo Sapiens
uguaugcaaagucuuacaguuauaaguguuaa

SEQ ID NO: 134518 - RNA, 32 nt, Homo Sapiens
ugguguuagcugacuuuuuuuuuccugauucu

SEQ ID NO: 134519 - RNA, 32 nt, Homo Sapiens
cagcaccuggggaucuggacccugcgggugaa

SEQ ID NO: 134520 - RNA, 32 nt, Homo Sapiens
cagcacuuagggaggcugagccagguggagcc

SEQ ID NO: 134521 - RNA, 32 nt, Homo Sapiens
gcggggcacacaggccggccggcagccgcugg

SEQ ID NO: 134522 - RNA, 32 nt, Homo Sapiens
cgccagcuacccgcuuccugccgcccgccgcu

SEQ ID NO: 134523 - RNA, 32 nt, Homo Sapiens
ggccucgacaaggcccggccuccugccuccag

SEQ ID NO: 134524 - RNA, 32 nt, Homo Sapiens
ugcaacccaaucaucaccaagcuguaccagag

SEQ ID NO: 134525 - RNA, 32 nt, Homo Sapiens
uguacucagaguguauuuucuuuguguagaac

SEQ ID NO: 134526 - RNA, 32 nt, Homo Sapiens
agcccuccaagguaccagacucuucuuacuac

SEQ ID NO: 134527 - RNA, 32 nt, Homo Sapiens
ugggguccuggaaaguggggccccaaggccug

SEQ ID NO: 134528 - RNA, 32 nt, Homo Sapiens
acaguuuuuucuuuuucuuaauggaagaagau

SEQ ID NO: 134529 - RNA, 32 nt, Homo Sapiens
uuaccaguugguuuuucauuuuuugucccuuu

SEQ ID NO: 134530 - RNA, 32 nt, Homo Sapiens
ccugaagacgcaggaaaagaaucuggcucuca

SEQ ID NO: 134531 - RNA, 32 nt, Homo Sapiens
acacgccccccuccccacaccuccaggaacuc

SEQ ID NO: 134532 - RNA, 32 nt, Homo Sapiens
cgcaccgugcgcgagccgaagcagggcgaggc

SEQ ID NO: 134533 - RNA, 32 nt, Homo Sapiens
acuuucacuuucccuuuuggguuccaggguau

SEQ ID NO: 134534 - RNA, 32 nt, Homo Sapiens
ggaaaggcgggcccggccuccgguugggucug

SEQ ID NO: 134535 - RNA, 32 nt, Homo Sapiens
ccugagcucaggugauccacccgccucagccu

SEQ ID NO: 134536 - RNA, 30 nt, Homo Sapiens
ugagggaauauccauucccucacucuacuc

SEQ ID NO: 134537 - RNA, 32 nt, Homo Sapiens
uuauugcucccugaucccauccuuccaaugug

SEQ ID NO: 134538 - RNA, 32 nt, Homo Sapiens
agcauauaucuggaaaauuugcugccugccuu

SEQ ID NO: 134539 - RNA, 32 nt, Homo Sapiens
cuuuggcaacacccucacagacacacucagga

SEQ ID NO: 134540 - RNA, 32 nt, Homo Sapiens
gauaacccaggccuccaccuccagcccaggug

SEQ ID NO: 134541 - RNA, 32 nt, Homo Sapiens
cauagaaagcaguaguugugggugaaagggca

SEQ ID NO: 134542 - RNA, 32 nt, Homo Sapiens
accgggcugccuuaaucuguccugcuuggaga

SEQ ID NO: 134543 - RNA, 32 nt, Homo Sapiens
agucuaggagcugggaggaaaagaaaagaggg

SEQ ID NO: 134544 - RNA, 32 nt, Homo Sapiens
gaccuauauaaauaguagauuuuuuaugguga

SEQ ID NO: 134545 - RNA, 32 nt, Homo Sapiens
aacccugcaccaagcgaccccgcuggggcgcc

SEQ ID NO: 134546 - RNA, 32 nt, Homo Sapiens
cuggccugaguaacugaagaucugaaaaucau

SEQ ID NO: 134547 - RNA, 32 nt, Homo Sapiens
ggaacuuaaaacaauccugcuuucucaaguac

SEQ ID NO: 134548 - RNA, 32 nt, Homo Sapiens
auaaguaucuugcuauguuaagaguaaagcaa

SEQ ID NO: 134549 - RNA, 32 nt, Homo Sapiens
gcccaggccccuccccgcugggguugggagcu

SEQ ID NO: 134550 - RNA, 32 nt, Homo Sapiens
uaaccccccagaguccaccccaucccccacag

SEQ ID NO: 134551 - RNA, 32 nt, Homo Sapiens
ccgcacgaccucacugaguccucacaacaaau

SEQ ID NO: 134552 - RNA, 30 nt, Homo Sapiens
uauaaggcagagaacuaugagucuuauuuu

SEQ ID NO: 134553 - RNA, 32 nt, Homo Sapiens
aaaaugaacaauuuuacaucuauucaaaaggg

SEQ ID NO: 134554 - RNA, 32 nt, Homo Sapiens
ggacuuacuauuaugacuuugaggaugagauc

SEQ ID NO: 134555 - RNA, 32 nt, Homo Sapiens
aaacuuuguugaccucuuucucuguagaaaug

SEQ ID NO: 134556 - RNA, 32 nt, Homo Sapiens
auuuguaugugcucugggcucaugaagauacu

SEQ ID NO: 134557 - RNA, 32 nt, Homo Sapiens
cuuccacccucgccgccgccgcagcuccccgc

SEQ ID NO: 134558 - RNA, 32 nt, Homo Sapiens
auucaggaaagacuuaaauaugaaagcaaauu

SEQ ID NO: 134559 - RNA, 32 nt, Homo Sapiens
cgccgccaacugguagacauggagaccccugc

SEQ ID NO: 134560 - RNA, 30 nt, Homo Sapiens
uguggagagaagcaguggguuuccccccaa

SEQ ID NO: 134561 - RNA, 32 nt, Homo Sapiens
ccagggagcagcgcccgucgggagccaagacg

SEQ ID NO: 134562 - RNA, 32 nt, Homo Sapiens
cccaggcucaaggcaaauuauaaguagggaac

SEQ ID NO: 134563 - RNA, 32 nt, Homo Sapiens
gcccgggccucugcagacagaccuccauaccc

SEQ ID NO: 134564 - RNA, 32 nt, Homo Sapiens
ugucacugugaagggggagaugggagaggagc

SEQ ID NO: 134565 - RNA, 32 nt, Homo Sapiens
auaaaggacccgcgaggaagggcccgcggaug

SEQ ID NO: 134566 - RNA, 32 nt, Homo Sapiens
cucgcagcaccggucagcaaucagcugcaucc

SEQ ID NO: 134567 - RNA, 32 nt, Homo Sapiens
caccaacgggaccccucugcccugccccacgg

SEQ ID NO: 134568 - RNA, 32 nt, Homo Sapiens
ggcgccggagaccgagggccuggcggccgaag

SEQ ID NO: 134569 - RNA, 32 nt, Homo Sapiens
aacaaaacaaaauaaugcuuuucgaaauuguu

SEQ ID NO: 134570 - RNA, 32 nt, Homo Sapiens
ucuugaagaaugcuugggaucugugaggaagc

SEQ ID NO: 134571 - RNA, 32 nt, Homo Sapiens
aacuuguguuacaaaaauacaaacacauguua

SEQ ID NO: 134572 - RNA, 32 nt, Homo Sapiens
caacuuguaaaaaugcaauuuaaauuuuaaua

SEQ ID NO: 134573 - RNA, 32 nt, Homo Sapiens
caccccgggugcugcucugugcucugcguguc

SEQ ID NO: 134574 - RNA, 32 nt, Homo Sapiens
uaugugucucuuaagaugugguccagauaacc

SEQ ID NO: 134575 - RNA, 32 nt, Homo Sapiens
aucgcugcaggaaaaagaugcaaccauuagau

SEQ ID NO: 134576 - RNA, 32 nt, Homo Sapiens
gcaccugggagaugggcggggggaggggggcg

SEQ ID NO: 134577 - RNA, 32 nt, Homo Sapiens
uccuugcugaacucacagaggacaauuuaggc

SEQ ID NO: 134578 - RNA, 32 nt, Homo Sapiens
accccaucccccacuccuauaccgguccucca

SEQ ID NO: 134579 - RNA, 32 nt, Homo Sapiens
uuuguguuucauuggucucuaucuccugaauc

SEQ ID NO: 134580 - RNA, 32 nt, Homo Sapiens
ugcaaacauuaucuaauuuagcuuaaaaguga

SEQ ID NO: 134581 - RNA, 32 nt, Homo Sapiens
uacuaaagcacuucuuuuuuauugcugugaau

SEQ ID NO: 134582 - RNA, 32 nt, Homo Sapiens
ugguggagccugcaucuugucucgucugccuc

SEQ ID NO: 134583 - RNA, 32 nt, Homo Sapiens
caggccucuugccucccuccccaccuacaagg

SEQ ID NO: 134584 - RNA, 32 nt, Homo Sapiens
gccuacaaaaacagccaggugaaagcuaaauc

SEQ ID NO: 134585 - RNA, 32 nt, Homo Sapiens
ugcaccccugggagaggaagccaggcaccgau

SEQ ID NO: 134586 - RNA, 32 nt, Homo Sapiens
gagaaguuguaaauauuuaacuuuuuauuuuu

SEQ ID NO: 134587 - RNA, 32 nt, Homo Sapiens
aggcgcuacgccaggaccgacgggaagguuuu

SEQ ID NO: 134588 - RNA, 32 nt, Homo Sapiens
cagcagcagcggcagcaccccaggcgcugaca

SEQ ID NO: 134589 - RNA, 32 nt, Homo Sapiens
cucacuuccuuccccagcucaccuggaacacc

SEQ ID NO: 134590 - RNA, 32 nt, Homo Sapiens
cccaggggccaacgaagaaguacccggaggca

SEQ ID NO: 134591 - RNA, 32 nt, Homo Sapiens
gugggcugggcggagccgcagcugcaaacucu

SEQ ID NO: 134592 - RNA, 32 nt, Homo Sapiens
gcguccgccccggcccgcaccauggcacgguu

SEQ ID NO: 134593 - RNA, 32 nt, Homo Sapiens
agagaaagcagaaagagaaguaguugugagac

SEQ ID NO: 134594 - RNA, 32 nt, Homo Sapiens
uggagggagucuuuuugugucagccuaaagcu

SEQ ID NO: 134595 - RNA, 32 nt, Homo Sapiens
cuuacauaaaccaaaucacaauaaaguucaua

SEQ ID NO: 134596 - RNA, 30 nt, Homo Sapiens
agagaugucuguguucuuggaguauuucac

SEQ ID NO: 134597 - RNA, 32 nt, Homo Sapiens
uaauucuuggugggcucuguaguuuaauaaua

SEQ ID NO: 134598 - RNA, 32 nt, Homo Sapiens
augcuucauggggcuccaggaagccuguauca

SEQ ID NO: 134599 - RNA, 32 nt, Homo Sapiens
auauuuguaaauuuauguguauggcaaagaag

SEQ ID NO: 134600 - RNA, 32 nt, Homo Sapiens
cgaucagugucuagcgaugucaaggcccccag

SEQ ID NO: 134601 - RNA, 32 nt, Homo Sapiens
cggcgcugcucggcugccaggaccugcugagg

SEQ ID NO: 134602 - RNA, 32 nt, Homo Sapiens
gaagaggccgaaguuugccgcggccgugaguu

SEQ ID NO: 134603 - RNA, 28 nt, Homo Sapiens
accaugcgagcacaaauugaagugauac

SEQ ID NO: 134604 - RNA, 32 nt, Homo Sapiens
aguuuucuagaaaaaaggaguagaaaaaacaa

SEQ ID NO: 134605 - RNA, 32 nt, Homo Sapiens
auuuacuagaaaaaaggaauugguuguuuagg

SEQ ID NO: 134606 - RNA, 32 nt, Homo Sapiens
cgggcacccggucggcauagggaccagcuguu

SEQ ID NO: 134607 - RNA, 32 nt, Homo Sapiens
ggacaggccaggggagggcaucuggaccaggg

SEQ ID NO: 134608 - RNA, 30 nt, Homo Sapiens
gagcugcggcuguugccgccgggcugcgca

SEQ ID NO: 134609 - RNA, 32 nt, Homo Sapiens
guggguggugccacuggugccggugccugaga

SEQ ID NO: 134610 - RNA, 32 nt, Homo Sapiens
uguacaucaaaauuauuuuuguccuuaaucag

SEQ ID NO: 134611 - RNA, 32 nt, Homo Sapiens
uaacuccauuuucuccagcagccauaaaauga

SEQ ID NO: 134612 - RNA, 32 nt, Homo Sapiens
ccccacaucccauugauugauuagucaggcag

SEQ ID NO: 134613 - RNA, 32 nt, Homo Sapiens
cuucuacauaguaaaaucacaauuguggaauu

SEQ ID NO: 134614 - RNA, 32 nt, Homo Sapiens
cugccccaguucacccaauaucuuaggccuca

SEQ ID NO: 134615 - RNA, 32 nt, Homo Sapiens
uugucugaggcccuggguccuggugcuggaag

SEQ ID NO: 134616 - RNA, 32 nt, Homo Sapiens
gcugggacugggaacagaacucggugucccca

SEQ ID NO: 134617 - RNA, 32 nt, Homo Sapiens
aacuauggcaaaaaaugaaacugcuuuaaacu

SEQ ID NO: 134618 - RNA, 32 nt, Homo Sapiens
cagaggucgcagugagucgagaucgcaccacg

SEQ ID NO: 134619 - RNA, 32 nt, Homo Sapiens
cuuguccugggguuaaaaguugaagauauuuu

SEQ ID NO: 134620 - RNA, 32 nt, Homo Sapiens
augucucucgguuuccucaucugcugccucuc

SEQ ID NO: 134621 - RNA, 32 nt, Homo Sapiens
ucccugaggacggggcugugucugccucagac

SEQ ID NO: 134622 - RNA, 32 nt, Homo Sapiens
gggauuugggggugggguggucagcuggccaa

SEQ ID NO: 134623 - RNA, 32 nt, Homo Sapiens
uuuuaauucagcaaauuuuuugaaauugcugc

SEQ ID NO: 134624 - RNA, 32 nt, Homo Sapiens
cuccacgucauuuugucaggcugguuauaagc

SEQ ID NO: 134625 - RNA, 32 nt, Homo Sapiens
accagcagcaggcucgccgagcaggaggagga

SEQ ID NO: 134626 - RNA, 32 nt, Homo Sapiens
ccugcgucagggccuccuucccugccccggcg

SEQ ID NO: 134627 - RNA, 32 nt, Homo Sapiens
cugacccuuccagacauagaaaacacaaacca

SEQ ID NO: 134628 - RNA, 32 nt, Homo Sapiens
gaagccuggggcacguccugugcggugccacc

SEQ ID NO: 134629 - RNA, 32 nt, Homo Sapiens
gggcacggucgcgggcggucagcccuguucgc

SEQ ID NO: 134630 - RNA, 32 nt, Homo Sapiens
ugccccgggcccucugguucucgucccgcagc

SEQ ID NO: 134631 - RNA, 27 nt, Homo Sapiens
gaauaguuucaucucagcccccauuag

SEQ ID NO: 134632 - RNA, 32 nt, Homo Sapiens
gagggcgugcgcggcaccugcgaagaugcuuc

SEQ ID NO: 134633 - RNA, 32 nt, Homo Sapiens
ucugcggcucugcgugcaggcgcuccugcugc

SEQ ID NO: 134634 - RNA, 32 nt, Homo Sapiens
uucugcccaagcacuagccaggggaugaugga

SEQ ID NO: 134635 - RNA, 32 nt, Homo Sapiens
ucugauggacauuuguggcugacuuucauggg

SEQ ID NO: 134636 - RNA, 32 nt, Homo Sapiens
cagaaguaaugugugaauauauuuuccuuaua

SEQ ID NO: 134637 - RNA, 32 nt, Homo Sapiens
gaauuuaaguuacuuugugagauuugggccug

SEQ ID NO: 134638 - RNA, 32 nt, Homo Sapiens
uagauaucgacuuguuuuugcacauguuuccu

SEQ ID NO: 134639 - RNA, 32 nt, Homo Sapiens
cgcucgccccuucucucccguccucacccacc

SEQ ID NO: 134640 - RNA, 32 nt, Homo Sapiens
gaaauucucuaauuuuuucucaucacuucccc

SEQ ID NO: 134641 - RNA, 32 nt, Homo Sapiens
uuuauugcauuuaugauucaguggcugggaau

SEQ ID NO: 134642 - RNA, 32 nt, Homo Sapiens
uggguaacagagcgagacuuucuagaaaaagc

SEQ ID NO: 134643 - RNA, 32 nt, Homo Sapiens
aaaaauaauccgacucccacuacaucaagacu

SEQ ID NO: 134644 - RNA, 29 nt, Homo Sapiens
ggcagauuuuaguuuuauuuucuaaagua

SEQ ID NO: 134645 - RNA, 32 nt, Homo Sapiens
auuuggaaugaaaagcacuucgucagaaccuu

SEQ ID NO: 134646 - RNA, 32 nt, Homo Sapiens
gaaagccaugaguuuaaacaaauauuuacauu

SEQ ID NO: 134647 - RNA, 32 nt, Homo Sapiens
cggcgccuccuccacaccccccgccgcagcag

SEQ ID NO: 134648 - RNA, 32 nt, Homo Sapiens
ucuguggcaugggggcggccaugccccuuggu

SEQ ID NO: 134649 - RNA, 32 nt, Homo Sapiens
ugcugucugccuccccggcugauuggauucgu

SEQ ID NO: 134650 - RNA, 32 nt, Homo Sapiens
ugcgagggacccagcucuguuucugcugcuuc

SEQ ID NO: 134651 - RNA, 32 nt, Homo Sapiens
acaauauuuuuccaugucauucuaaaagaauc

SEQ ID NO: 134652 - RNA, 32 nt, Homo Sapiens
gaguaaacguucgguggauccucugucuuugu

SEQ ID NO: 134653 - RNA, 32 nt, Homo Sapiens
ucagcuugggccagugacaaucugcaaggcug

SEQ ID NO: 134654 - RNA, 32 nt, Homo Sapiens
cucuuugucucgcaauuuugaggagguuguuc

SEQ ID NO: 134655 - RNA, 32 nt, Homo Sapiens
uaagacuaggaauaggaauaucugaaaacagc

SEQ ID NO: 134656 - RNA, 32 nt, Homo Sapiens
uccuagggccuucuuugcuuccaggucagggg

SEQ ID NO: 134657 - RNA, 32 nt, Homo Sapiens
uuuaaaccauuuucuuuuuuugugguuagaaa

SEQ ID NO: 134658 - RNA, 32 nt, Homo Sapiens
aagcaaaaugaaguucuuucuguugcuuuuca

SEQ ID NO: 134659 - RNA, 32 nt, Homo Sapiens
gacauuuuuuaaaauaacuuuguguaauacuu

SEQ ID NO: 134660 - RNA, 32 nt, Homo Sapiens
uggaggggcagcuguguucaugcccugugcua

SEQ ID NO: 134661 - RNA, 32 nt, Homo Sapiens
ucuuggcaaugaaauuugcagcuccucccuuc

SEQ ID NO: 134662 - RNA, 32 nt, Homo Sapiens
gugugcgcuccagcccagcccgcugcucacuu

SEQ ID NO: 134663 - RNA, 32 nt, Homo Sapiens
guccgagaugggaugccugagcucuugaagcu

SEQ ID NO: 134664 - RNA, 32 nt, Homo Sapiens
ccgcagagccauggagaucggcaccgagauca

SEQ ID NO: 134665 - RNA, 32 nt, Homo Sapiens
uagagugucccagaaaaaaaccacuugggcuc

SEQ ID NO: 134666 - RNA, 32 nt, Homo Sapiens
cacucccccagccccagagaaacugccacaua

SEQ ID NO: 134667 - RNA, 32 nt, Homo Sapiens
uaugcgaggucuccacugaggacgugagccug

SEQ ID NO: 134668 - RNA, 32 nt, Homo Sapiens
aggagcgucucucccuggccgccccgucugag

SEQ ID NO: 134669 - RNA, 32 nt, Homo Sapiens
aaaaaggauaaugcucuuucauguugucuuac

SEQ ID NO: 134670 - RNA, 32 nt, Homo Sapiens
cccccaggaaggaaacagauuuaagcaagacc

SEQ ID NO: 134671 - RNA, 32 nt, Homo Sapiens
uguauccuuucuggccauuuggacaaaagcag

SEQ ID NO: 134672 - RNA, 32 nt, Homo Sapiens
uuccuggaucauuuuuaagacauucccucuug

SEQ ID NO: 134673 - RNA, 32 nt, Homo Sapiens
augaggucaggagauugagaccuuccuggcua

SEQ ID NO: 134674 - RNA, 32 nt, Homo Sapiens
ucccccaauuuaauuaauggaccaugugcaua

SEQ ID NO: 134675 - RNA, 32 nt, Homo Sapiens
uuugugauuucuuucuguuucuucccacaaag

SEQ ID NO: 134676 - RNA, 32 nt, Homo Sapiens
uugauuuuguuuugcuuguuaagcaaaggaau

SEQ ID NO: 134677 - RNA, 32 nt, Homo Sapiens
uuuguggccauauacauacuagguggcucuac

SEQ ID NO: 134678 - RNA, 32 nt, Homo Sapiens
gguuuugccauguuggccaggcuggucucaaa

SEQ ID NO: 134679 - RNA, 32 nt, Homo Sapiens
gcuaugugaacagcuuuuacagucauuaaauu

SEQ ID NO: 134680 - RNA, 32 nt, Homo Sapiens
aaaugaaagauuggcaagaaaagcagucggac

SEQ ID NO: 134681 - RNA, 32 nt, Homo Sapiens
uacgguggcgccagcccuaggcuacccuugcc

SEQ ID NO: 134682 - RNA, 32 nt, Homo Sapiens
uucacugcagccuccgcccuccagguucaagu

SEQ ID NO: 134683 - RNA, 32 nt, Homo Sapiens
gucuuuggaaaauucagauaaugguaauuuag

SEQ ID NO: 134684 - RNA, 31 nt, Homo Sapiens
gcuacugcaagguuaaagccggaguggaccu

SEQ ID NO: 134685 - RNA, 32 nt, Homo Sapiens
aaaucccaccaaaaccaagacagugacaaaag

SEQ ID NO: 134686 - RNA, 32 nt, Homo Sapiens
gggguggagcagccagcuggguccggggagcg

SEQ ID NO: 134687 - RNA, 32 nt, Homo Sapiens
caacagaucauauugcccuuuauaguggggau

SEQ ID NO: 134688 - RNA, 32 nt, Homo Sapiens
uauaaaaguauuagccauuuguuguaaaugcc

SEQ ID NO: 134689 - RNA, 32 nt, Homo Sapiens
gggaacuggacagggugaaaguccucaaacuc

SEQ ID NO: 134690 - RNA, 32 nt, Homo Sapiens
gggugacgcaugccucuggucuaauaaacugg

SEQ ID NO: 134691 - RNA, 32 nt, Homo Sapiens
gcaacagcacuuccuucguggaggaaguggac

SEQ ID NO: 134692 - RNA, 30 nt, Homo Sapiens
accccuguucugaugggggagggcggucuu

SEQ ID NO: 134693 - RNA, 32 nt, Homo Sapiens
aagaaugaggagaaguuuaauauuuugcccuu

SEQ ID NO: 134694 - RNA, 32 nt, Homo Sapiens
auaaauauuuuugaaugaagguaauagaaaac

SEQ ID NO: 134695 - RNA, 32 nt, Homo Sapiens
ggaaguucagcaugcauuuucguuacauugug

SEQ ID NO: 134696 - RNA, 32 nt, Homo Sapiens
auugucaugauuguuuauccuaaucccaaugc

SEQ ID NO: 134697 - RNA, 32 nt, Homo Sapiens
cgcccgcgcucgcuccucucccucgcagccgg

SEQ ID NO: 134698 - RNA, 32 nt, Homo Sapiens
caggucuggggcugcacacagagccuucugca

SEQ ID NO: 134699 - RNA, 32 nt, Homo Sapiens
ucuaaauuguuuugggucacagaguuccacuu

SEQ ID NO: 134700 - RNA, 32 nt, Homo Sapiens
ucuucugagcggcaguggcgccagaagcaguc

SEQ ID NO: 134701 - RNA, 32 nt, Homo Sapiens
aguuucccaguauauauaaaauacaucaaguc

SEQ ID NO: 134702 - RNA, 32 nt, Homo Sapiens
uccccgugacuggccgggccuggggucgcugu

SEQ ID NO: 134703 - RNA, 32 nt, Homo Sapiens
ugauucagggccucggcuucccucacgauauu

SEQ ID NO: 134704 - RNA, 32 nt, Homo Sapiens
gaagaagaaaaagaagguagaguagaggccua

SEQ ID NO: 134705 - RNA, 32 nt, Homo Sapiens
agaacauggcugguagaggcucuagcugugug

SEQ ID NO: 134706 - RNA, 32 nt, Homo Sapiens
uugucuuuauuacuauauguaaauuagacauu

SEQ ID NO: 134707 - RNA, 32 nt, Homo Sapiens
cagcucccgacuccccgccgcucgggcugccg

SEQ ID NO: 134708 - RNA, 32 nt, Homo Sapiens
guccugccuguuuccucccaauggaggguuuu

SEQ ID NO: 134709 - RNA, 32 nt, Homo Sapiens
uaaucaagaacaugagcgaaaagcagacauaa

SEQ ID NO: 134710 - RNA, 32 nt, Homo Sapiens
gagcgaacgugagugugaaaccucuuuaagac

SEQ ID NO: 134711 - RNA, 29 nt, Homo Sapiens
gggccccguguuuucagagucauggaggc

SEQ ID NO: 134712 - RNA, 32 nt, Homo Sapiens
cuuauagacuauuuuucuugcucugcagcaug

SEQ ID NO: 134713 - RNA, 32 nt, Homo Sapiens
auagaggaauuguucuggggguccuggagacu

SEQ ID NO: 134714 - RNA, 32 nt, Homo Sapiens
ccaggauccucgggcucugguccuggcugggg

SEQ ID NO: 134715 - RNA, 32 nt, Homo Sapiens
caccucccacggaguccacgggccuggugggg

SEQ ID NO: 134716 - RNA, 32 nt, Homo Sapiens
auacauauauauaguugacacuugaaaaaugc

SEQ ID NO: 134717 - RNA, 32 nt, Homo Sapiens
gucaccccggauccccaccccauccccauuuu

SEQ ID NO: 134718 - RNA, 32 nt, Homo Sapiens
gggcguuggccugaggguccuuggugccgcgg

SEQ ID NO: 134719 - RNA, 32 nt, Homo Sapiens
auaaauaaaaacaaggcuuuuggaaaauaaaa

SEQ ID NO: 134720 - RNA, 32 nt, Homo Sapiens
ugaauacuucagaggacuuuggccuuuguauu

SEQ ID NO: 134721 - RNA, 31 nt, Homo Sapiens
uguuuuugaaacacaagcugggcuucuggua

SEQ ID NO: 134722 - RNA, 32 nt, Homo Sapiens
ucugucuguuuucauucauuauugacucaaag

SEQ ID NO: 134723 - RNA, 30 nt, Homo Sapiens
uacaggcgcgcgccaccaggaucugcuaau

SEQ ID NO: 134724 - RNA, 32 nt, Homo Sapiens
guccuccaaaaauaaacauuuuauauagacaa

SEQ ID NO: 134725 - RNA, 29 nt, Homo Sapiens
gccagaaucuguuucagauccaagaugga

SEQ ID NO: 134726 - RNA, 32 nt, Homo Sapiens
cccagcacuggugucucugugcuuccuucacu

SEQ ID NO: 134727 - RNA, 32 nt, Homo Sapiens
cuuuaguacaauaguauacauuuuauaaugau

SEQ ID NO: 134728 - RNA, 32 nt, Homo Sapiens
agcucugaugcagcuggagagcagcgcucaag

SEQ ID NO: 134729 - RNA, 32 nt, Homo Sapiens
gcagcugguguagaagaauacuccugaggcac

SEQ ID NO: 134730 - RNA, 32 nt, Homo Sapiens
cgaccccccucgcccgccgccuccccuccggu

SEQ ID NO: 134731 - RNA, 32 nt, Homo Sapiens
gcuuuuguucuagacuuccccaucccgaagcc

SEQ ID NO: 134732 - RNA, 32 nt, Homo Sapiens
auggcgagcgcaucauggcgauugaaggugga

SEQ ID NO: 134733 - RNA, 32 nt, Homo Sapiens
aauugaauuuaaaaaugagagaguauuaaaac

SEQ ID NO: 134734 - RNA, 32 nt, Homo Sapiens
aauuuagauugugacuucaauguucguuuuca

SEQ ID NO: 134735 - RNA, 32 nt, Homo Sapiens
aggagaaaauuccacuuuguuuagcauuucaa

SEQ ID NO: 134736 - RNA, 32 nt, Homo Sapiens
auuucagaaaucacuguguucaucaucaaauu

SEQ ID NO: 134737 - RNA, 32 nt, Homo Sapiens
uuucugccagagcagagcagccauggcaccag

SEQ ID NO: 134738 - RNA, 32 nt, Homo Sapiens
cgccuggugucugccucgccauccugggguaa

SEQ ID NO: 134739 - RNA, 32 nt, Homo Sapiens
cuggcguggaugcaccgugccuuaucaaagcc

SEQ ID NO: 134740 - RNA, 32 nt, Homo Sapiens
gcaagggccaaacauucuuuaucccucccacc

SEQ ID NO: 134741 - RNA, 32 nt, Homo Sapiens
guuucucugcaguuuccaacauggcagggagg

SEQ ID NO: 134742 - RNA, 32 nt, Homo Sapiens
agcagaggagucacaguugauuuucuggcccu

SEQ ID NO: 134743 - RNA, 32 nt, Homo Sapiens
uucuggguccacuguaggucuuuccaucacaa

SEQ ID NO: 134744 - RNA, 32 nt, Homo Sapiens
gucaggaagaacuucauccuccugcaggagaa

SEQ ID NO: 134745 - RNA, 32 nt, Homo Sapiens
uuggaucacuguuauugaaaugucuuauuagc

SEQ ID NO: 134746 - RNA, 32 nt, Homo Sapiens
cuugcuagucacuggaggaaaggaguucuuaa

SEQ ID NO: 134747 - RNA, 32 nt, Homo Sapiens
uggcugcugcugccaccgcugcugcugcuucu

SEQ ID NO: 134748 - RNA, 32 nt, Homo Sapiens
ugaggggauguuucauccaaaguacaaccuga

SEQ ID NO: 134749 - RNA, 32 nt, Homo Sapiens
ccacgggugucccugcccacucguguggcaag

SEQ ID NO: 134750 - RNA, 32 nt, Homo Sapiens
cuaccccgcccgccacgccgccgucgaugcca

SEQ ID NO: 134751 - RNA, 32 nt, Homo Sapiens
uguuuuacaucauauacagaaaauuagcucaa

SEQ ID NO: 134752 - RNA, 32 nt, Homo Sapiens
uuguuuagagaaugagaaauggaacagugagg

SEQ ID NO: 134753 - RNA, 32 nt, Homo Sapiens
uggggaggcaaaugcaguguuccugcccucac

SEQ ID NO: 134754 - RNA, 32 nt, Homo Sapiens
acaaccacagaacuacagaacuguauacuuua

SEQ ID NO: 134755 - RNA, 32 nt, Homo Sapiens
gaagccacgugaccccuccuagccucaggcuc

SEQ ID NO: 134756 - RNA, 32 nt, Homo Sapiens
gcagccacacguuggagcugguggcacuggac

SEQ ID NO: 134757 - RNA, 32 nt, Homo Sapiens
uugccugcaaaauuauuuaagaaaaaaaaaaa

SEQ ID NO: 134758 - RNA, 32 nt, Homo Sapiens
caaaacagaagaaacaaacaaacaaacaaaca

SEQ ID NO: 134759 - RNA, 30 nt, Homo Sapiens
cauggacucagaaaagcugagucuggcuag

SEQ ID NO: 134760 - RNA, 32 nt, Homo Sapiens
aacuuggagcaaaaauucccacugucauagcu

SEQ ID NO: 134761 - RNA, 32 nt, Homo Sapiens
agcugcuuccucaggauguccuguguagcagc

SEQ ID NO: 134762 - RNA, 32 nt, Homo Sapiens
uaagcaaaggauuucacaguguucuagguacu

SEQ ID NO: 134763 - RNA, 32 nt, Homo Sapiens
cagauagaucauagaucacguuacaagcacuu

SEQ ID NO: 134764 - RNA, 32 nt, Homo Sapiens
cgggggccgcgcgucggaguuucccccuuucu

SEQ ID NO: 134765 - RNA, 32 nt, Homo Sapiens
uuuugcaccaaccuaauagaaugucaguucuu

SEQ ID NO: 134766 - RNA, 32 nt, Homo Sapiens
caaggaggguccccuuucagccugcaguuccu

SEQ ID NO: 134767 - RNA, 32 nt, Homo Sapiens
agaguccucaucugcuggcauuuuguggggug

SEQ ID NO: 134768 - RNA, 32 nt, Homo Sapiens
guagauuuguuguuuacuuuuuugugugguca

SEQ ID NO: 134769 - RNA, 32 nt, Homo Sapiens
cuaaauuuuuuuuuuuuuuuuagagaaagggu

SEQ ID NO: 134770 - RNA, 32 nt, Homo Sapiens
acugagcauaauggcauuuuagggccugugac

SEQ ID NO: 134771 - RNA, 32 nt, Homo Sapiens
ucacugcaacauucaccucccagguucaugca

SEQ ID NO: 134772 - RNA, 32 nt, Homo Sapiens
ccucauccacccaaggccccagccagcgcuca

SEQ ID NO: 134773 - RNA, 32 nt, Homo Sapiens
agaguuucgccauggcccggggccccaagaag

SEQ ID NO: 134774 - RNA, 32 nt, Homo Sapiens
ccccuucugacccaugcugcccugugaguacu

SEQ ID NO: 134775 - RNA, 32 nt, Homo Sapiens
uuguccgcucuggggaucacaggccgcggaga

SEQ ID NO: 134776 - RNA, 32 nt, Homo Sapiens
guguccagcuccgacgugaccugcgccacccc

SEQ ID NO: 134777 - RNA, 32 nt, Homo Sapiens
ugagugggccucucaggucacucgugcccugc

SEQ ID NO: 134778 - RNA, 32 nt, Homo Sapiens
uggaggugaaauuuauauaagaugaaauuaac

SEQ ID NO: 134779 - RNA, 28 nt, Homo Sapiens
ucagagaaagauugagaaugaauaagcc

SEQ ID NO: 134780 - RNA, 32 nt, Homo Sapiens
gaaguguagcggggggaggcggcggccaccgc

SEQ ID NO: 134781 - RNA, 32 nt, Homo Sapiens
ggccaagccccgagggccccugcaagcacuuu

SEQ ID NO: 134782 - RNA, 31 nt, Homo Sapiens
cugaaguuuccaguggaaaaguuccugacga

SEQ ID NO: 134783 - RNA, 30 nt, Homo Sapiens
cugugagagaagcuuguccaguguccucau

SEQ ID NO: 134784 - RNA, 32 nt, Homo Sapiens
agauggcuccccuggugucaccaccggacaug

SEQ ID NO: 134785 - RNA, 32 nt, Homo Sapiens
agaagaagagaugaggacacagacacacacag

SEQ ID NO: 134786 - RNA, 32 nt, Homo Sapiens
aagcccuguucuggaucccccauccccuccag

SEQ ID NO: 134787 - RNA, 32 nt, Homo Sapiens
cgcccgggcuucugggguguuccccaaccacg

SEQ ID NO: 134788 - RNA, 32 nt, Homo Sapiens
uuaauuuuuguacagucugugggcauuuacac

SEQ ID NO: 134789 - RNA, 32 nt, Homo Sapiens
uuggcuucccucccagucccagcccugcuucc

SEQ ID NO: 134790 - RNA, 32 nt, Homo Sapiens
uugcauuucuaaaaaacaucuaccaagguuac

SEQ ID NO: 134791 - RNA, 32 nt, Homo Sapiens
uaggagcuggagaugaagagacugcuagaagc

SEQ ID NO: 134792 - RNA, 32 nt, Homo Sapiens
gaaucugauugagucuccacuccacaagcacu

SEQ ID NO: 134793 - RNA, 32 nt, Homo Sapiens
cuguugcguggccagcuggucuagcagcauga

SEQ ID NO: 134794 - RNA, 32 nt, Homo Sapiens
acccagaccugccugucucccacccuuucugc

SEQ ID NO: 134795 - RNA, 32 nt, Homo Sapiens
gaagggccugcgcucagcugcucuggcacccc

SEQ ID NO: 134796 - RNA, 32 nt, Homo Sapiens
aucuguccuccaggcccucccuucccuccaga

SEQ ID NO: 134797 - RNA, 31 nt, Homo Sapiens
auauauuuuuggguuacuucaguguguuuga

SEQ ID NO: 134798 - RNA, 32 nt, Homo Sapiens
cuuugguucucuuggcagcugcaccauucaug

SEQ ID NO: 134799 - RNA, 31 nt, Homo Sapiens
cccugcauggcggcugcccccuccgcgcugc

SEQ ID NO: 134800 - RNA, 32 nt, Homo Sapiens
ccagccaucacguaucccugaagauaaaccug

SEQ ID NO: 134801 - RNA, 32 nt, Homo Sapiens
agccaagcccagggcuggccugaagcccccgg

SEQ ID NO: 134802 - RNA, 32 nt, Homo Sapiens
cacuccuggguggccugggggcccccacccug

SEQ ID NO: 134803 - RNA, 32 nt, Homo Sapiens
ggagguguccccgguggcgagcgcggccagaa

SEQ ID NO: 134804 - RNA, 32 nt, Homo Sapiens
agccaaaauguaaaaauggcuguaauauuuaa

SEQ ID NO: 134805 - RNA, 32 nt, Homo Sapiens
cucauuuccugcuuuuucaguuuccuugggga

SEQ ID NO: 134806 - RNA, 32 nt, Homo Sapiens
caggcagaggggccuuuugcgacuguugguug

SEQ ID NO: 134807 - RNA, 32 nt, Homo Sapiens
aaauguuguaaauucccugaguguuauucuac

SEQ ID NO: 134808 - RNA, 32 nt, Homo Sapiens
cugucccuuguacacauucugguaugaauuug

SEQ ID NO: 134809 - RNA, 32 nt, Homo Sapiens
uagcugagggucacucgcccugcaagagucac

SEQ ID NO: 134810 - RNA, 32 nt, Homo Sapiens
gggccgaucgcuauggaguauuucauggugcc

SEQ ID NO: 134811 - RNA, 32 nt, Homo Sapiens
guggagaggaggcgggcggggccgguggaucu

SEQ ID NO: 134812 - RNA, 32 nt, Homo Sapiens
auaacaaaauuugcuaagguuugcuaaaaauu

SEQ ID NO: 134813 - RNA, 32 nt, Homo Sapiens
uaucauauauacaaaucaggaaucagguccgu

SEQ ID NO: 134814 - RNA, 32 nt, Homo Sapiens
uucagcucuuugauccccuguguuagaguaau

SEQ ID NO: 134815 - RNA, 32 nt, Homo Sapiens
augagacucugcagcagggcaagauauuacaa

SEQ ID NO: 134816 - RNA, 32 nt, Homo Sapiens
cgagagccuggggggccccccggagacggagc

SEQ ID NO: 134817 - RNA, 32 nt, Homo Sapiens
auaaucuguagagccuccauggcucuaaaauu

SEQ ID NO: 134818 - RNA, 32 nt, Homo Sapiens
aaucacaacuucaggagacaucugaaaagaau

SEQ ID NO: 134819 - RNA, 32 nt, Homo Sapiens
uacuguauauauaugcaacauuuuauauuuuu

SEQ ID NO: 134820 - RNA, 32 nt, Homo Sapiens
uguaggcaggugggcucugcuucccgauuccc

SEQ ID NO: 134821 - RNA, 32 nt, Homo Sapiens
ccacgcauuuccccaaggucuccaccaagagc

SEQ ID NO: 134822 - RNA, 32 nt, Homo Sapiens
aauugugaugaaaagaaauuaacugcuuauuu

SEQ ID NO: 134823 - RNA, 32 nt, Homo Sapiens
gccccucucuaccacccucacuccaugaccug

SEQ ID NO: 134824 - RNA, 30 nt, Homo Sapiens
aacccgggagguggagguugcagggagccg

SEQ ID NO: 134825 - RNA, 30 nt, Homo Sapiens
aaccugggagguggauguugcagugagcug

SEQ ID NO: 134826 - RNA, 32 nt, Homo Sapiens
ugagcccggggcagcccuccaccugcccacca

SEQ ID NO: 134827 - RNA, 32 nt, Homo Sapiens
cucaaugagagaaugugauuuacuuuauagaa

SEQ ID NO: 134828 - RNA, 32 nt, Homo Sapiens
cucgugugccuggcccgagcccugcuccgcaa

SEQ ID NO: 134829 - RNA, 32 nt, Homo Sapiens
ugagaucucacccaagcuccuguccaagcauc

SEQ ID NO: 134830 - RNA, 29 nt, Homo Sapiens
cacacuucguguuagugguaacucaguuu

SEQ ID NO: 134831 - RNA, 32 nt, Homo Sapiens
ugcuuauuaucaaaagaauaauuaaaaucaug

SEQ ID NO: 134832 - RNA, 32 nt, Homo Sapiens
cugcacugcauuccagccugggugacagagug

SEQ ID NO: 134833 - RNA, 32 nt, Homo Sapiens
gagccuugccggcaucagcaucagcccuuccu

SEQ ID NO: 134834 - RNA, 32 nt, Homo Sapiens
ccgccggcucaucacccagucuggagaccgaa

SEQ ID NO: 134835 - RNA, 32 nt, Homo Sapiens
ggcacgaggucuuguuaugcaaauaggcuucc

SEQ ID NO: 134836 - RNA, 32 nt, Homo Sapiens
ggaagcugccagcccagaacaccccuaaugag

SEQ ID NO: 134837 - RNA, 32 nt, Homo Sapiens
guuccuucacaccaauucuccuccugagacgg

SEQ ID NO: 134838 - RNA, 32 nt, Homo Sapiens
cccgggccgggcugcgggaggagcucgcggug

SEQ ID NO: 134839 - RNA, 32 nt, Homo Sapiens
agccucagccgcacacugagagucacgggagg

SEQ ID NO: 134840 - RNA, 32 nt, Homo Sapiens
acaaaaaaaaagacaaaaauauuauucagaag

SEQ ID NO: 134841 - RNA, 32 nt, Homo Sapiens
caggcggacauggaagcccccgggccgggccc

SEQ ID NO: 134842 - RNA, 32 nt, Homo Sapiens
guuaaaauacucuuuuuacaauccauauaagc

SEQ ID NO: 134843 - RNA, 32 nt, Homo Sapiens
agucaggccgaugaagagcggcugaggccgug

SEQ ID NO: 134844 - RNA, 32 nt, Homo Sapiens
gugacuaaaaacaguuuuuuauuugugugcug

SEQ ID NO: 134845 - RNA, 32 nt, Homo Sapiens
ccucgcccggugccuaggugcccggccccaca

SEQ ID NO: 134846 - RNA, 32 nt, Homo Sapiens
aacuuuaaaauaguuaccuugccuuuuaggau

SEQ ID NO: 134847 - RNA, 32 nt, Homo Sapiens
ugugcgcgggaggcggacgcgcugcucaccug

SEQ ID NO: 134848 - RNA, 32 nt, Homo Sapiens
ccccauacacacucacaaguacaaacacaagc

SEQ ID NO: 134849 - RNA, 32 nt, Homo Sapiens
auacauugauucacuggcgucuguuuucauuu

SEQ ID NO: 134850 - RNA, 32 nt, Homo Sapiens
ccucucucucaccuccccuggcccuguucacc

SEQ ID NO: 134851 - RNA, 32 nt, Homo Sapiens
aaauccuaggacuuagggaggccgaggcaggu

SEQ ID NO: 134852 - RNA, 32 nt, Homo Sapiens
uuaugcuuaaauaaguuuuaguugauuaaaaa

SEQ ID NO: 134853 - RNA, 32 nt, Homo Sapiens
uuugagcaucaguuuccucuaaugccaagugg

SEQ ID NO: 134854 - RNA, 32 nt, Homo Sapiens
aaaguacucugcagcagcucuguuuuaugggu

SEQ ID NO: 134855 - RNA, 32 nt, Homo Sapiens
ccaggauaacccuaugucuccucccccagaau

SEQ ID NO: 134856 - RNA, 32 nt, Homo Sapiens
gagcccagaacaugcauauaaaggaaacauau

SEQ ID NO: 134857 - RNA, 32 nt, Homo Sapiens
caccacauaaauaacaugguagaaaaauugcc

SEQ ID NO: 134858 - RNA, 32 nt, Homo Sapiens
gccuuaccccuucuccuucaggccaaguuucg

SEQ ID NO: 134859 - RNA, 32 nt, Homo Sapiens
uuuuaucuuuuggggacacauuuuggauuuuu

SEQ ID NO: 134860 - RNA, 32 nt, Homo Sapiens
aaugcacuaagugauuuaaauucaauugauga

SEQ ID NO: 134861 - RNA, 32 nt, Homo Sapiens
cagcgccgccagagccgaguuugccugcgccc

SEQ ID NO: 134862 - RNA, 32 nt, Homo Sapiens
ggcacgaggggcugcgcaguggagcggccagu

SEQ ID NO: 134863 - RNA, 32 nt, Homo Sapiens
guuaagggaguaauugugacaauauaaaaugg

SEQ ID NO: 134864 - RNA, 32 nt, Homo Sapiens
gaacuucgcucuuugccuuaaaccucuuuauu

SEQ ID NO: 134865 - RNA, 32 nt, Homo Sapiens
uuuuuacuuguugauaaaauggucauauuuga

SEQ ID NO: 134866 - RNA, 32 nt, Homo Sapiens
acugcugcuucaggagcgcccggccgucgccg

SEQ ID NO: 134867 - RNA, 32 nt, Homo Sapiens
uacauucucaguuuuucuuaauauauagcauu

SEQ ID NO: 134868 - RNA, 31 nt, Homo Sapiens
uuaagauuggauaguuaauagauuaauacaa

SEQ ID NO: 134869 - RNA, 32 nt, Homo Sapiens
gagaacuuccuccggauuccccggcgccucgg

SEQ ID NO: 134870 - RNA, 32 nt, Homo Sapiens
uguauucugugccuuccaucaugauuuccaca

SEQ ID NO: 134871 - RNA, 29 nt, Homo Sapiens
uuaauauaaaguuguauuuucacugaaau

SEQ ID NO: 134872 - RNA, 30 nt, Homo Sapiens
cagccuucugacugcauucagcccucucua

SEQ ID NO: 134873 - RNA, 32 nt, Homo Sapiens
ggcgaagcggcuggagggcggcgagagacaca

SEQ ID NO: 134874 - RNA, 32 nt, Homo Sapiens
acauaaauauuaccaugaugaauucuagugaa

SEQ ID NO: 134875 - RNA, 32 nt, Homo Sapiens
agcgaagaauccacaccuguguggagaccucc

SEQ ID NO: 134876 - RNA, 32 nt, Homo Sapiens
gccccuagcccucaggccucucuucuuaucca

SEQ ID NO: 134877 - RNA, 32 nt, Homo Sapiens
cgauaugauugguggucuugguuuucuggaau

SEQ ID NO: 134878 - RNA, 32 nt, Homo Sapiens
aucagucaauauuuuuagauaguuagaaccug

SEQ ID NO: 134879 - RNA, 32 nt, Homo Sapiens
cuaaggccaucccaauccccggggccaagucu

SEQ ID NO: 134880 - RNA, 32 nt, Homo Sapiens
uaaaugacuaggguucacuuucugggacugau

SEQ ID NO: 134881 - RNA, 32 nt, Homo Sapiens
ugggcagcacucugucuccuccccuccugccu

SEQ ID NO: 134882 - RNA, 32 nt, Homo Sapiens
gaaugcagcuuucuuggugucuugauguuugu

SEQ ID NO: 134883 - RNA, 32 nt, Homo Sapiens
uggcuagugggaaggagggggugaacuaauuc

SEQ ID NO: 134884 - RNA, 32 nt, Homo Sapiens
ugccucugaagcagggagugucugcauuaaaa

SEQ ID NO: 134885 - RNA, 32 nt, Homo Sapiens
aguaacugggacuacaggcgcccgccaccacg

SEQ ID NO: 134886 - RNA, 32 nt, Homo Sapiens
aaaccugggggacggggguggggggugguagu

SEQ ID NO: 134887 - RNA, 32 nt, Homo Sapiens
acuccuuuuccuuccuggcccucgggggccuc

SEQ ID NO: 134888 - RNA, 32 nt, Homo Sapiens
guuggcaucaccugcgcagggcccucuggggc

SEQ ID NO: 134889 - RNA, 32 nt, Homo Sapiens
gggaucgagcagccuucuucuuugggaccccu

SEQ ID NO: 134890 - RNA, 32 nt, Homo Sapiens
agugagcuggugugauuagguuuucuaaacau

SEQ ID NO: 134891 - RNA, 32 nt, Homo Sapiens
ugaggcccagggaguagcagccaggcccuuau

SEQ ID NO: 134892 - RNA, 32 nt, Homo Sapiens
ucucggccccucugcuggcguccccggagccc

SEQ ID NO: 134893 - RNA, 32 nt, Homo Sapiens
ggccgggcgcgguggcucacgccuggaauccc

SEQ ID NO: 134894 - RNA, 32 nt, Homo Sapiens
cuuguagagggagagagaagagcaagggacgu

SEQ ID NO: 134895 - RNA, 32 nt, Homo Sapiens
uugauuuugaggaaacaaggcaaguugcugaa

SEQ ID NO: 134896 - RNA, 32 nt, Homo Sapiens
ugccaggcgcaucagcccgcacaacuucuggc

SEQ ID NO: 134897 - RNA, 32 nt, Homo Sapiens
cguuucaucauguuggcuaggcuggucuugaa

SEQ ID NO: 134898 - RNA, 32 nt, Homo Sapiens
uggauuuuggugagugaucauuaaacuguuuu

SEQ ID NO: 134899 - RNA, 32 nt, Homo Sapiens
caugcuucaucauucccucucaucucagguag

SEQ ID NO: 134900 - RNA, 32 nt, Homo Sapiens
uccggcccgcggcgaccgccggcaacuguugu

SEQ ID NO: 134901 - RNA, 32 nt, Homo Sapiens
aguggccugcucuggcaggugugugcaggaua

SEQ ID NO: 134902 - RNA, 32 nt, Homo Sapiens
gggacaggcugugcccuuggcggcgcccaccc

SEQ ID NO: 134903 - RNA, 32 nt, Homo Sapiens
agaaacaaaaacaaaaacguaagugauacucu

SEQ ID NO: 134904 - RNA, 32 nt, Homo Sapiens
cauuuuggucccuaucacaucuccaacucugg

SEQ ID NO: 134905 - RNA, 32 nt, Homo Sapiens
cuugaccuugaccaagucuuguccuuguuuag

SEQ ID NO: 134906 - RNA, 32 nt, Homo Sapiens
cauucauuucacaacuagauuguauaaggaua

SEQ ID NO: 134907 - RNA, 32 nt, Homo Sapiens
agaggcugggggagggaugcagugacuuuucc

SEQ ID NO: 134908 - RNA, 32 nt, Homo Sapiens
augugugcgcgccggccacaccugcagucaca

SEQ ID NO: 134909 - RNA, 32 nt, Homo Sapiens
uuccagguucccuccaauuccucaccagcaaa

SEQ ID NO: 134910 - RNA, 32 nt, Homo Sapiens
uugcguggaggguggggggagcucaguggcag

SEQ ID NO: 134911 - RNA, 32 nt, Homo Sapiens
uuuuggaaaucaagaacacauucagagaaaug

SEQ ID NO: 134912 - RNA, 32 nt, Homo Sapiens
aaguaugauuuuaauguaaaucauuuaaaaag

SEQ ID NO: 134913 - RNA, 32 nt, Homo Sapiens
gaauuuguugagaagcacuuuaaugacuuaaa

SEQ ID NO: 134914 - RNA, 32 nt, Homo Sapiens
ccagaggaaggggagaaugagugucgccugcu

SEQ ID NO: 134915 - RNA, 32 nt, Homo Sapiens
cagguggugagcuccugccugcuggagguugc

SEQ ID NO: 134916 - RNA, 32 nt, Homo Sapiens
uauuuuaaauacugguuaaaucuuagaaucuu

SEQ ID NO: 134917 - RNA, 32 nt, Homo Sapiens
ugacagugaaacaaauuuacaucagaaguuug

SEQ ID NO: 134918 - RNA, 32 nt, Homo Sapiens
cagcggucacgcccggcccagcccugccggcc

SEQ ID NO: 134919 - RNA, 32 nt, Homo Sapiens
cccuuaaauuuaauaccagauaccuuaucuua

SEQ ID NO: 134920 - RNA, 32 nt, Homo Sapiens
cgcacggcauuagcuuccugccccagacagac

SEQ ID NO: 134921 - RNA, 32 nt, Homo Sapiens
agcacauggaaaagagucacuggccauguuau

SEQ ID NO: 134922 - RNA, 32 nt, Homo Sapiens
gaugcaguucccuccuggcauaggcucccagg

SEQ ID NO: 134923 - RNA, 32 nt, Homo Sapiens
cggacggugcgcggcccggcccgucucgcgaa

SEQ ID NO: 134924 - RNA, 32 nt, Homo Sapiens
cgauuccauaugggcgccggcgcggagcgccg

SEQ ID NO: 134925 - RNA, 32 nt, Homo Sapiens
caggugggcagacagugaccucucuaggugug

SEQ ID NO: 134926 - RNA, 32 nt, Homo Sapiens
ucagguuucugcauucaggcuuuacaugguca

SEQ ID NO: 134927 - RNA, 32 nt, Homo Sapiens
cugcguggcggcggcgggagcagucggcgaag

SEQ ID NO: 134928 - RNA, 32 nt, Homo Sapiens
uagggcagcuggccuggaugggcuucacuggg

SEQ ID NO: 134929 - RNA, 32 nt, Homo Sapiens
acccauuaaggaaacagauuuguuauaaauua

SEQ ID NO: 134930 - RNA, 32 nt, Homo Sapiens
ugaccagaugacucuaguuaaaauuuuugaag

SEQ ID NO: 134931 - RNA, 32 nt, Homo Sapiens
cgcgcggcgaccucgggucccggagcgaccgc

SEQ ID NO: 134932 - RNA, 32 nt, Homo Sapiens
gugcuuguaaaaagucaauguuuucaguucuc

SEQ ID NO: 134933 - RNA, 32 nt, Homo Sapiens
auauauaaccucaguccaaaguggugauugau

SEQ ID NO: 134934 - RNA, 32 nt, Homo Sapiens
aaccuagaaaauuuggauucuagaccaaaaau

SEQ ID NO: 134935 - RNA, 32 nt, Homo Sapiens
caugcaugguggccacgggcaugaggagggug

SEQ ID NO: 134936 - RNA, 32 nt, Homo Sapiens
gaacagcacuccugggcggcuccugugggcuu

SEQ ID NO: 134937 - RNA, 32 nt, Homo Sapiens
cucccugggaccaucgcccaccauggcugugg

SEQ ID NO: 134938 - RNA, 32 nt, Homo Sapiens
gcuacgcaggguggaggcugggcugaggauua

SEQ ID NO: 134939 - RNA, 32 nt, Homo Sapiens
ccuccugcuuccccggcacccuagccccaucu

SEQ ID NO: 134940 - RNA, 32 nt, Homo Sapiens
uacaaguaauuuccugagcuaaaugcuucauu

SEQ ID NO: 134941 - RNA, 32 nt, Homo Sapiens
ggaagggucccgggaacgugguggggcagggc

SEQ ID NO: 134942 - RNA, 32 nt, Homo Sapiens
ugccacugcauuccagccugggugacagaaug

SEQ ID NO: 134943 - RNA, 30 nt, Homo Sapiens
ggcggcugagagggcggcggcgggagcgga

SEQ ID NO: 134944 - RNA, 32 nt, Homo Sapiens
aguuuccauuuacugucucaccacauuuauug

SEQ ID NO: 134945 - RNA, 32 nt, Homo Sapiens
gaagccgggagguggggguugcagugagccga

SEQ ID NO: 134946 - RNA, 32 nt, Homo Sapiens
cccgcccaaccugguccgcugccucuucggcc

SEQ ID NO: 134947 - RNA, 32 nt, Homo Sapiens
acaaaacuguugcugcacacaucuguacucgu

SEQ ID NO: 134948 - RNA, 31 nt, Homo Sapiens
caaaagaaauaaagugauguuaauaaaaguu

SEQ ID NO: 134949 - RNA, 32 nt, Homo Sapiens
ggcggcucgcgcacggcuccgcggucccuuuu

SEQ ID NO: 134950 - RNA, 32 nt, Homo Sapiens
gggugggggguucagccuguccugucaccucu

SEQ ID NO: 134951 - RNA, 32 nt, Homo Sapiens
ucucauugucuccaucuuuguuggucauggua

SEQ ID NO: 134952 - RNA, 29 nt, Homo Sapiens
gcaauguuuagagucuauuuucuaaaguu

SEQ ID NO: 134953 - RNA, 32 nt, Homo Sapiens
uuaugagaaagauaauauuguacagaaguauu

SEQ ID NO: 134954 - RNA, 32 nt, Homo Sapiens
ggcccugucaggaaacacacggggaccucucu

SEQ ID NO: 134955 - RNA, 32 nt, Homo Sapiens
uuguguuugaugugucccaagaccuccugaag

SEQ ID NO: 134956 - RNA, 32 nt, Homo Sapiens
gugucuuaaaagauuauguuuaccaaacugca

SEQ ID NO: 134957 - RNA, 32 nt, Homo Sapiens
cccaucacugaacuuuauaauguaauguuuau

SEQ ID NO: 134958 - RNA, 32 nt, Homo Sapiens
gcuaagaacuuacagaaugcaaacacgagcac

SEQ ID NO: 134959 - RNA, 32 nt, Homo Sapiens
cugccuuuguaucuuguaccuuuucagagaaa

SEQ ID NO: 134960 - RNA, 32 nt, Homo Sapiens
cgagcauggccaucguggcuacaucagucccg

SEQ ID NO: 134961 - RNA, 32 nt, Homo Sapiens
uuugacuuagaguauuaauacauggccaaaau

SEQ ID NO: 134962 - RNA, 32 nt, Homo Sapiens
acgucuuacuugugaaacuauaagcagcaaag

SEQ ID NO: 134963 - RNA, 32 nt, Homo Sapiens
auugcaagcacuuuaaagauuugaaaccacau

SEQ ID NO: 134964 - RNA, 32 nt, Homo Sapiens
ugcgcucagcugcucuggcaccccgcugcagg

SEQ ID NO: 134965 - RNA, 32 nt, Homo Sapiens
agcacaggccccaggcuuccugccagggcccc

SEQ ID NO: 134966 - RNA, 32 nt, Homo Sapiens
ucacaccccccuucacaggggucguaugagua

SEQ ID NO: 134967 - RNA, 32 nt, Homo Sapiens
guggcugcggccgggagcccgccccgcuuccc

SEQ ID NO: 134968 - RNA, 32 nt, Homo Sapiens
ggaaggagaugauagaggaaaagcagggugau

SEQ ID NO: 134969 - RNA, 32 nt, Homo Sapiens
cagugccaugaucccaccugcgaccucuagug

SEQ ID NO: 134970 - RNA, 32 nt, Homo Sapiens
agguuuugucugaguucaaacuagugccugug

SEQ ID NO: 134971 - RNA, 32 nt, Homo Sapiens
ucuuggaggcuuucuucagaacugaacuagaa

SEQ ID NO: 134972 - RNA, 32 nt, Homo Sapiens
cagaaacaguuucuccuccuccccucagccuu

SEQ ID NO: 134973 - RNA, 32 nt, Homo Sapiens
aaugaugaauacugaagugaagugauggacuc

SEQ ID NO: 134974 - RNA, 32 nt, Homo Sapiens
aaaugcagaaagccgaagaguuagaacuuuug

SEQ ID NO: 134975 - RNA, 32 nt, Homo Sapiens
gugaaauugacuguguccaugugaugaugccc

SEQ ID NO: 134976 - RNA, 32 nt, Homo Sapiens
gucagugagcaguagaugauauuauuaccauc

SEQ ID NO: 134977 - RNA, 32 nt, Homo Sapiens
auggcagagaauacgguuuugguguccugcua

SEQ ID NO: 134978 - RNA, 32 nt, Homo Sapiens
accuuaugcaaccugacaaaccacugagguca

SEQ ID NO: 134979 - RNA, 32 nt, Homo Sapiens
uuacaggugugagccaccgcacccaauccuau

SEQ ID NO: 134980 - RNA, 32 nt, Homo Sapiens
ucaguagucaucucuguaaaucugcaauuucu

SEQ ID NO: 134981 - RNA, 30 nt, Homo Sapiens
gaaacagggaagcuuggggcucaguuugag

SEQ ID NO: 134982 - RNA, 29 nt, Homo Sapiens
gaaccauaaaguugaaaacuuuuuucucu

SEQ ID NO: 134983 - RNA, 32 nt, Homo Sapiens
cuguacuaaaauguuacuuuguaucaaaaguu

SEQ ID NO: 134984 - RNA, 32 nt, Homo Sapiens
acaagaauaaaguggauguaguauuguaaaau

SEQ ID NO: 134985 - RNA, 32 nt, Homo Sapiens
gaacaauuggcuauccacggacucuuguuuau

SEQ ID NO: 134986 - RNA, 31 nt, Homo Sapiens
gcagcacggcacugcccacccggcugcugau

SEQ ID NO: 134987 - RNA, 31 nt, Homo Sapiens
cccaggaugaggaggagcuuggcucccagcc

SEQ ID NO: 134988 - RNA, 32 nt, Homo Sapiens
auaccucccuccccgagcuaagucccagggca

SEQ ID NO: 134989 - RNA, 32 nt, Homo Sapiens
uugcaguccaccuuuacucuacuugggguuca

SEQ ID NO: 134990 - RNA, 32 nt, Homo Sapiens
ucacaucugaaacucaucuguaccucacuuag

SEQ ID NO: 134991 - RNA, 32 nt, Homo Sapiens
gccuccaccucccgccagcauucccaugccgg

SEQ ID NO: 134992 - RNA, 32 nt, Homo Sapiens
augagugaaguacccacgaugugcuaagcauc

SEQ ID NO: 134993 - RNA, 32 nt, Homo Sapiens
cucucugccguggccaguaaauguccagccag

SEQ ID NO: 134994 - RNA, 32 nt, Homo Sapiens
cccacccguucgccccucccccugccccguuc

SEQ ID NO: 134995 - RNA, 32 nt, Homo Sapiens
aaggagaagaucuggucaacacagcuccugaa

SEQ ID NO: 134996 - RNA, 32 nt, Homo Sapiens
agguacucuccauuuuauugccuuaccugaau

SEQ ID NO: 134997 - RNA, 32 nt, Homo Sapiens
acacugggaaaggggcugcagguuccggaccg

SEQ ID NO: 134998 - RNA, 30 nt, Homo Sapiens
uccuaggccguucugucacccaaauagcug

SEQ ID NO: 134999 - RNA, 32 nt, Homo Sapiens
aggucaggggccaagggguccuggaccgcugc

SEQ ID NO: 135000 - RNA, 32 nt, Homo Sapiens
gagcaggaggcagaggagcagauggagcagcu

SEQ ID NO: 135001 - RNA, 32 nt, Homo Sapiens
ccaucagucuggccaucugucacgucacagaa

SEQ ID NO: 135002 - RNA, 32 nt, Homo Sapiens
cuaugcccacuuuagauguaucuaauucuccu

SEQ ID NO: 135003 - RNA, 32 nt, Homo Sapiens
gugcccggggucacacucucugccugacugac

SEQ ID NO: 135004 - RNA, 32 nt, Homo Sapiens
ugcgcugcggacgacccggccgucccggaggc

SEQ ID NO: 135005 - RNA, 32 nt, Homo Sapiens
cccacauugaugacuuuuuuuuuuucuuuuaa

SEQ ID NO: 135006 - RNA, 32 nt, Homo Sapiens
cucaagauuuucauaaucaauuuuuagaacca

SEQ ID NO: 135007 - RNA, 32 nt, Homo Sapiens
guguuuugaugauuuuacacuacauuuccugu

SEQ ID NO: 135008 - RNA, 32 nt, Homo Sapiens
auggcaugacagagcuagagcucgggcccagc

SEQ ID NO: 135009 - RNA, 32 nt, Homo Sapiens
cagagcuccauauauauguagaugccauccuu

SEQ ID NO: 135010 - RNA, 27 nt, Homo Sapiens
caguguuccguuuccagcccccaaucu

SEQ ID NO: 135011 - RNA, 32 nt, Homo Sapiens
gcacagauugaacugcugaacuaguuggaggu

SEQ ID NO: 135012 - RNA, 31 nt, Homo Sapiens
gcggcagaggcgguguccaggcuuccgggcg

SEQ ID NO: 135013 - RNA, 32 nt, Homo Sapiens
aguggagauaaaagaauauuaagaguccagaa

SEQ ID NO: 135014 - RNA, 31 nt, Homo Sapiens
cagaaacauugagccaucagaaugaacugug

SEQ ID NO: 135015 - RNA, 32 nt, Homo Sapiens
agguguggggagaggcccccucaagugucugg

SEQ ID NO: 135016 - RNA, 32 nt, Homo Sapiens
gggcuucggaagcgcuggagcuugagagguuu

SEQ ID NO: 135017 - RNA, 32 nt, Homo Sapiens
acaauguauuaggcacuguucuaaauauuaag

SEQ ID NO: 135018 - RNA, 32 nt, Homo Sapiens
ccccaucccguccacguugcugugucgugagg

SEQ ID NO: 135019 - RNA, 32 nt, Homo Sapiens
gauaaaagagagggcuuccaacuuuuuucuac

SEQ ID NO: 135020 - RNA, 32 nt, Homo Sapiens
ucugaccugucugaucaaauaaaggcauuccu

SEQ ID NO: 135021 - RNA, 32 nt, Homo Sapiens
aguucucggcccacgcgguccgcggccaaggg

SEQ ID NO: 135022 - RNA, 32 nt, Homo Sapiens
ucaccggaauacugaggaggaaggacucaagu

SEQ ID NO: 135023 - RNA, 32 nt, Homo Sapiens
aggaauuuucucuccuccuuucaaguuguuca

SEQ ID NO: 135024 - RNA, 32 nt, Homo Sapiens
aggcagugaugaagaaucuuuaccaagauuuu

SEQ ID NO: 135025 - RNA, 32 nt, Homo Sapiens
agcagagcaguuccuccuggggccugcggugu

SEQ ID NO: 135026 - RNA, 32 nt, Homo Sapiens
ccaggcuccgcgggaugcaccgugguagccga

SEQ ID NO: 135027 - RNA, 32 nt, Homo Sapiens
cuagacucauuuccaaaucaaaaccacacguu

SEQ ID NO: 135028 - RNA, 32 nt, Homo Sapiens
gguuugcaaccucaagcuucgcagcagcggcg

SEQ ID NO: 135029 - RNA, 32 nt, Homo Sapiens
guucacgccgauccaugaaaaugcuuuggaaa

SEQ ID NO: 135030 - RNA, 32 nt, Homo Sapiens
ccaggauacauaucaggguuaaccugacuuug

SEQ ID NO: 135031 - RNA, 32 nt, Homo Sapiens
cgcgucugaaacaccccgcgggccucccguug

SEQ ID NO: 135032 - RNA, 32 nt, Homo Sapiens
ugauucucuuucuccuucucucagggcuuuua

SEQ ID NO: 135033 - RNA, 32 nt, Homo Sapiens
acaauuccaaaaaucaucaugguuggaaauuu

SEQ ID NO: 135034 - RNA, 32 nt, Homo Sapiens
aaugucaauuugauguaguucuuuucaugcaa

SEQ ID NO: 135035 - RNA, 32 nt, Homo Sapiens
agacuuaagacauggagauauaucuugcuaga

SEQ ID NO: 135036 - RNA, 32 nt, Homo Sapiens
gccccggcuccggcgcgccgcggaguuggcug

SEQ ID NO: 135037 - RNA, 32 nt, Homo Sapiens
guaaaguugcuguugauccaaauauuuucaag

SEQ ID NO: 135038 - RNA, 32 nt, Homo Sapiens
agcagugauucaguaaguagcaacccugugau

SEQ ID NO: 135039 - RNA, 32 nt, Homo Sapiens
cggcggcggcugccagcuccugagcucuguaa

SEQ ID NO: 135040 - RNA, 32 nt, Homo Sapiens
aggaagaugccagcuggcaccacugcacugug

SEQ ID NO: 135041 - RNA, 32 nt, Homo Sapiens
gccauucccugccuggggcgggccccucaucg

SEQ ID NO: 135042 - RNA, 32 nt, Homo Sapiens
caugaaguccugggggcgccaugggaggagau

SEQ ID NO: 135043 - RNA, 32 nt, Homo Sapiens
cccaaccaccuuaugcagcaguucuuaggacc

SEQ ID NO: 135044 - RNA, 32 nt, Homo Sapiens
guggcaguuaggauggcuggagaguaggauag

SEQ ID NO: 135045 - RNA, 31 nt, Homo Sapiens
uuauuacaaaagaaaaauauguugcuaagau

SEQ ID NO: 135046 - RNA, 32 nt, Homo Sapiens
ucccacuggauccaggcccccauccggcuggc

SEQ ID NO: 135047 - RNA, 32 nt, Homo Sapiens
uuaguauuuuucaaguuauagauugugaaauu

SEQ ID NO: 135048 - RNA, 32 nt, Homo Sapiens
cacaucugagcccuccucccaagacucacaca

SEQ ID NO: 135049 - RNA, 29 nt, Homo Sapiens
ugagggugacuuuuccugcugccuggccu

SEQ ID NO: 135050 - RNA, 32 nt, Homo Sapiens
ucuuuaaaaaucaaugaguuuauguuuuaacu

SEQ ID NO: 135051 - RNA, 32 nt, Homo Sapiens
uuuucaacucaggaccuauccaaaugaggaau

SEQ ID NO: 135052 - RNA, 32 nt, Homo Sapiens
ccggggaagagaggaugggucugugcugaagg

SEQ ID NO: 135053 - RNA, 32 nt, Homo Sapiens
guacuccccccacccccuccccacgcccuggg

SEQ ID NO: 135054 - RNA, 32 nt, Homo Sapiens
gccgcaccugaacauagcuggugcuuaugccg

SEQ ID NO: 135055 - RNA, 32 nt, Homo Sapiens
ugugccuuuucauuuuaaugcuggaauuuuua

SEQ ID NO: 135056 - RNA, 32 nt, Homo Sapiens
gggagaggcagacguguccugcagcccucucu

SEQ ID NO: 135057 - RNA, 32 nt, Homo Sapiens
ggagccucuucugcaccuaggagcccaggacc

SEQ ID NO: 135058 - RNA, 32 nt, Homo Sapiens
gucucuguuucaucaggacauucugaaauuua

SEQ ID NO: 135059 - RNA, 32 nt, Homo Sapiens
augcaguauauacuuuucucauuuuuaaacag

SEQ ID NO: 135060 - RNA, 32 nt, Homo Sapiens
cuuucccaccgcccacuucugacauuuuuauu

SEQ ID NO: 135061 - RNA, 32 nt, Homo Sapiens
cccacccccaaucccaccccgccccgccgcgc

SEQ ID NO: 135062 - RNA, 32 nt, Homo Sapiens
acauuuuaguuuccuuguuucucugguuccca

SEQ ID NO: 135063 - RNA, 32 nt, Homo Sapiens
aggcccugucuccccagcauccucccuggugg

SEQ ID NO: 135064 - RNA, 32 nt, Homo Sapiens
augagauauccauagcuaacuugcuugcucag

SEQ ID NO: 135065 - RNA, 32 nt, Homo Sapiens
ucccgccgcgugcgccccggcgcagcccgcca

SEQ ID NO: 135066 - RNA, 32 nt, Homo Sapiens
gauaauuucacagaugcuguguaacagaacac

SEQ ID NO: 135067 - RNA, 32 nt, Homo Sapiens
gcuugaggucucggcguccgcguccugcggug

SEQ ID NO: 135068 - RNA, 32 nt, Homo Sapiens
cuccuccgccuggccugggccgucugcccgca

SEQ ID NO: 135069 - RNA, 32 nt, Homo Sapiens
ugccugccggggauuggccggauucuccgccg

SEQ ID NO: 135070 - RNA, 32 nt, Homo Sapiens
aaguuggaaaaaacagaaguaaaauaaauagc

SEQ ID NO: 135071 - RNA, 32 nt, Homo Sapiens
uucucuaggaggcauuccagaauagaguagca

SEQ ID NO: 135072 - RNA, 32 nt, Homo Sapiens
uggcagggccccagccccucugaccacucugc

SEQ ID NO: 135073 - RNA, 32 nt, Homo Sapiens
uaggugcuucccuuuuucuccucacaaggagg

SEQ ID NO: 135074 - RNA, 32 nt, Homo Sapiens
gagucuggacgccccgccugugggagagagcg

SEQ ID NO: 135075 - RNA, 32 nt, Homo Sapiens
auauaaggaaaacauaauaaaaaguagacuuc

SEQ ID NO: 135076 - RNA, 32 nt, Homo Sapiens
cccucgucguucccggccccggccccccaccc

SEQ ID NO: 135077 - RNA, 32 nt, Homo Sapiens
aauuucuugccaaagaaaauugauucugccca

SEQ ID NO: 135078 - RNA, 32 nt, Homo Sapiens
uuauauagcaagacauaaacagauuauaaaca

SEQ ID NO: 135079 - RNA, 32 nt, Homo Sapiens
ugggaauuugaaagaagaaaaccagauggaac

SEQ ID NO: 135080 - RNA, 32 nt, Homo Sapiens
uagccaaauguuucuucagaauacguguaaaa

SEQ ID NO: 135081 - RNA, 32 nt, Homo Sapiens
uuuaggguucgggggaucuccuccuuccacaa

SEQ ID NO: 135082 - RNA, 32 nt, Homo Sapiens
gaagccgcucaacauccugcaaugcaugggac

SEQ ID NO: 135083 - RNA, 32 nt, Homo Sapiens
acacuugcuagagaauaaaacacaauaaugca

SEQ ID NO: 135084 - RNA, 31 nt, Homo Sapiens
agagugaaauaaaaugcuaucucaaaguuua

SEQ ID NO: 135085 - RNA, 32 nt, Homo Sapiens
cuuagggagacaaagaauuucucuuaggaaag

SEQ ID NO: 135086 - RNA, 32 nt, Homo Sapiens
gucacaggugacagcccuccugaggcccacac

SEQ ID NO: 135087 - RNA, 32 nt, Homo Sapiens
ucacguggucaaggcccggccccaucagaggc

SEQ ID NO: 135088 - RNA, 32 nt, Homo Sapiens
aggagaggcgcccccggggacgcacugagauu

SEQ ID NO: 135089 - RNA, 32 nt, Homo Sapiens
cccuccccagcucgagaucauucuucaauuag

SEQ ID NO: 135090 - RNA, 32 nt, Homo Sapiens
ugacccagcagcaucaagccccucgcugggca

SEQ ID NO: 135091 - RNA, 32 nt, Homo Sapiens
gccugaaggacuauggaaucuugcuugucagg

SEQ ID NO: 135092 - RNA, 31 nt, Homo Sapiens
uguaagcagcacugccucucuguuuggggag

SEQ ID NO: 135093 - RNA, 32 nt, Homo Sapiens
gcucuagugucuagcaccagaccaguaggugc

SEQ ID NO: 135094 - RNA, 31 nt, Homo Sapiens
cacacucugugaggcagcagagccugggcag

SEQ ID NO: 135095 - RNA, 32 nt, Homo Sapiens
cccuuuaugacuauuucuuuuuauacuucaac

SEQ ID NO: 135096 - RNA, 32 nt, Homo Sapiens
uguaucuguuugggcacggucuauguaacacu

SEQ ID NO: 135097 - RNA, 31 nt, Homo Sapiens
cccuggcuuuggcauucagugagacgcccug

SEQ ID NO: 135098 - RNA, 32 nt, Homo Sapiens
aagugcauaauuaccaaaauuguauguacuau

SEQ ID NO: 135099 - RNA, 32 nt, Homo Sapiens
acucauaccucgguccaaaccaaaaagguucu

SEQ ID NO: 135100 - RNA, 29 nt, Homo Sapiens
uaguuuuauaaccauuaccacaaucaauu

SEQ ID NO: 135101 - RNA, 32 nt, Homo Sapiens
cauuuuaaacaaaagcagaguacaccgguauu

SEQ ID NO: 135102 - RNA, 32 nt, Homo Sapiens
cccgucuggccguguagcccgccccgcuccuc

SEQ ID NO: 135103 - RNA, 32 nt, Homo Sapiens
aaagaaaugcuguguuuaaucuucuuaaaaug

SEQ ID NO: 135104 - RNA, 32 nt, Homo Sapiens
caaccccuuccucuggccccgccccgucccau

SEQ ID NO: 135105 - RNA, 32 nt, Homo Sapiens
agcauuuuucuuuuaaaagacaaguguaauag

SEQ ID NO: 135106 - RNA, 32 nt, Homo Sapiens
acaagguucccauuuuuguuguuguuguuguu

SEQ ID NO: 135107 - RNA, 32 nt, Homo Sapiens
uccuucacagaaaaaacucuacagagacguga

SEQ ID NO: 135108 - RNA, 32 nt, Homo Sapiens
cuccgccgcccggaccugggcugggcgccgug

SEQ ID NO: 135109 - RNA, 32 nt, Homo Sapiens
uacuggguaaacaaaacaaagauggacuuguu

SEQ ID NO: 135110 - RNA, 32 nt, Homo Sapiens
gugaggguuuauuuuucuuuuacuuuuauucu

SEQ ID NO: 135111 - RNA, 32 nt, Homo Sapiens
agacuguggagauggaaggugguggacacucg

SEQ ID NO: 135112 - RNA, 32 nt, Homo Sapiens
ggaggaacgcuggguccccggcgccgcgggag

SEQ ID NO: 135113 - RNA, 29 nt, Homo Sapiens
cgcuucgugccuuuccuguaacguuggau

SEQ ID NO: 135114 - RNA, 32 nt, Homo Sapiens
gccucagccccggccccugguccccagcccuc

SEQ ID NO: 135115 - RNA, 32 nt, Homo Sapiens
aaucaaugcggcuuugucugggacgcccacau

SEQ ID NO: 135116 - RNA, 32 nt, Homo Sapiens
agacuugcgaaggcggcugggguguucggauu

SEQ ID NO: 135117 - RNA, 32 nt, Homo Sapiens
ucgaccccauggcgcugcagacgcugcagagc

SEQ ID NO: 135118 - RNA, 32 nt, Homo Sapiens
guaauaaauuauuuuuuaaaucuugaaauuua

SEQ ID NO: 135119 - RNA, 32 nt, Homo Sapiens
ccagcagaggacugaggcugagcaggccacuu

SEQ ID NO: 135120 - RNA, 32 nt, Homo Sapiens
cggggacucuauaggcagcugcuccugcccgc

SEQ ID NO: 135121 - RNA, 32 nt, Homo Sapiens
auggaccaguaccccacacgaacugaggaguc

SEQ ID NO: 135122 - RNA, 32 nt, Homo Sapiens
cgauguggaccacgggauuuguagccagccag

SEQ ID NO: 135123 - RNA, 32 nt, Homo Sapiens
aaagcaagaauaugaagaaguaguucagacug

SEQ ID NO: 135124 - RNA, 32 nt, Homo Sapiens
aaaugaaggauuuuaauaaaauuuucaauaga

SEQ ID NO: 135125 - RNA, 32 nt, Homo Sapiens
cugagcugagugcugcccuuuauuaaagauga

SEQ ID NO: 135126 - RNA, 32 nt, Homo Sapiens
ggggcagagauuucuagauugacagcuguuuu

SEQ ID NO: 135127 - RNA, 32 nt, Homo Sapiens
gaggugacgaccggcuucggagagucuaucau

SEQ ID NO: 135128 - RNA, 32 nt, Homo Sapiens
uaaagauguuugcaugagguaaaucuauagca

SEQ ID NO: 135129 - RNA, 32 nt, Homo Sapiens
cacagguuucccuccgccuccugagggccuuu

SEQ ID NO: 135130 - RNA, 30 nt, Homo Sapiens
cagacuggcaggcgggcgggcggccgcagc

SEQ ID NO: 135131 - RNA, 32 nt, Homo Sapiens
cuuaauggaaggucuuuuaaaaaguuaacuug

SEQ ID NO: 135132 - RNA, 32 nt, Homo Sapiens
cagcagcccagccagcagcacagucucuaugg

SEQ ID NO: 135133 - RNA, 32 nt, Homo Sapiens
uguacuaguuuugaaucuguucugaauggagu

SEQ ID NO: 135134 - RNA, 32 nt, Homo Sapiens
uuucaccuguagucccagcugcucuggaguuu

SEQ ID NO: 135135 - RNA, 32 nt, Homo Sapiens
gccaugaagauaagucuuccauggccaaaucg

SEQ ID NO: 135136 - RNA, 32 nt, Homo Sapiens
gauauugggguggcgaaggggaggcgggggcc

SEQ ID NO: 135137 - RNA, 32 nt, Homo Sapiens
uaauucuucuaaaaguuuucuaauuugcacua

SEQ ID NO: 135138 - RNA, 32 nt, Homo Sapiens
cacccgcacccucuccgcucgcgcccugcuca

SEQ ID NO: 135139 - RNA, 32 nt, Homo Sapiens
cagucggaagcuccagaagaacaaagagccca

SEQ ID NO: 135140 - RNA, 28 nt, Homo Sapiens
ggcuacguggcuaccaaaugccuaaggg

SEQ ID NO: 135141 - RNA, 32 nt, Homo Sapiens
aaggggaugcuaaaggagauaaagccaagacg

SEQ ID NO: 135142 - RNA, 32 nt, Homo Sapiens
caucuccuucgcugcuggacagauggaagaag

SEQ ID NO: 135143 - RNA, 32 nt, Homo Sapiens
cccucaccuccuuuuccagccuuugcacagcu

SEQ ID NO: 135144 - RNA, 32 nt, Homo Sapiens
gcucuccgagaccgaagagguggacugagccg

SEQ ID NO: 135145 - RNA, 32 nt, Homo Sapiens
agauucuuuuuucuuuuuguucuacuuuucgc

SEQ ID NO: 135146 - RNA, 32 nt, Homo Sapiens
ugugagagccccacagagcagguguugccaau

SEQ ID NO: 135147 - RNA, 32 nt, Homo Sapiens
cacuggauuggguaugucuaccuggcagauac

SEQ ID NO: 135148 - RNA, 30 nt, Homo Sapiens
cacagacacugugcuggcaggagcuucaga

SEQ ID NO: 135149 - RNA, 32 nt, Homo Sapiens
caccaguauccacggggcuuguccuauaacag

SEQ ID NO: 135150 - RNA, 32 nt, Homo Sapiens
ccagaagaggaagaggaaagcaaaggagucag

SEQ ID NO: 135151 - RNA, 32 nt, Homo Sapiens
guuaauauaauggaauguuacaaagcuaccaa

SEQ ID NO: 135152 - RNA, 32 nt, Homo Sapiens
agaaguuaaggauacauaguagggaauggggg

SEQ ID NO: 135153 - RNA, 32 nt, Homo Sapiens
agaugugaaaagacauuaaauuuaggugaaag

SEQ ID NO: 135154 - RNA, 32 nt, Homo Sapiens
gugccuuggccgccugcagaucuacaguguga

SEQ ID NO: 135155 - RNA, 32 nt, Homo Sapiens
agagccuuucccuuuaccgcacccaagagcug

SEQ ID NO: 135156 - RNA, 32 nt, Homo Sapiens
uucucuuguccccacacccauucccaacccaa

SEQ ID NO: 135157 - RNA, 32 nt, Homo Sapiens
gcugggcggcgguggagauagcggcggugcug

SEQ ID NO: 135158 - RNA, 32 nt, Homo Sapiens
accagguggccugcuccuuuucugggcccuag

SEQ ID NO: 135159 - RNA, 32 nt, Homo Sapiens
aauuggauuuggggauauucccugcccaaaaa

SEQ ID NO: 135160 - RNA, 32 nt, Homo Sapiens
ggcggugcgcaggggcgggcggaggcgcuguc

SEQ ID NO: 135161 - RNA, 32 nt, Homo Sapiens
agauauacagcuuuugucugguccucugagcc

SEQ ID NO: 135162 - RNA, 32 nt, Homo Sapiens
auuuaaaacaaauuuaaagggucuguuaauuc

SEQ ID NO: 135163 - RNA, 30 nt, Homo Sapiens
ugggugcccugcuggagguguggcugacuu

SEQ ID NO: 135164 - RNA, 32 nt, Homo Sapiens
gauccaaacuggguuuggagucgcaacagaaa

SEQ ID NO: 135165 - RNA, 32 nt, Homo Sapiens
ggcacucaaggaucuuccaaaacagaggacca

SEQ ID NO: 135166 - RNA, 32 nt, Homo Sapiens
gauuuguuugcguauuugaauuccgauuuuag

SEQ ID NO: 135167 - RNA, 32 nt, Homo Sapiens
cucucaggaagcuucuagagacuuuaugcccu

SEQ ID NO: 135168 - RNA, 32 nt, Homo Sapiens
cagcggccgcagaaggggcagcgcccccuggc

SEQ ID NO: 135169 - RNA, 32 nt, Homo Sapiens
ugaggcuuguucccggggcuggaccgacaucc

SEQ ID NO: 135170 - RNA, 32 nt, Homo Sapiens
uugcuauaauuucaaggagugagauuauaaau

SEQ ID NO: 135171 - RNA, 32 nt, Homo Sapiens
augaggcuugcguuguucgggcgucugcuggc

SEQ ID NO: 135172 - RNA, 32 nt, Homo Sapiens
gagggcgaggcccgggucccgcgcuccccugg

SEQ ID NO: 135173 - RNA, 32 nt, Homo Sapiens
cguugagauccucugucugaagaaauuguguu

SEQ ID NO: 135174 - RNA, 32 nt, Homo Sapiens
gccauuaaugaaauccacuguccugaguauua

SEQ ID NO: 135175 - RNA, 32 nt, Homo Sapiens
uugaaaauaaacugcuagaauaaagaaaugcu

SEQ ID NO: 135176 - RNA, 32 nt, Homo Sapiens
ggaccugggagguggagguugcggugagcuga

SEQ ID NO: 135177 - RNA, 32 nt, Homo Sapiens
ccagugggaggagggaggggccaggcagcuga

SEQ ID NO: 135178 - RNA, 32 nt, Homo Sapiens
gauuacaggcgugagccaccacgucuggccuu

SEQ ID NO: 135179 - RNA, 32 nt, Homo Sapiens
aaacauuuguguugcaccuguuaggccagcug

SEQ ID NO: 135180 - RNA, 32 nt, Homo Sapiens
uugcuggaucauaugaaacucuauuuaacccu

SEQ ID NO: 135181 - RNA, 32 nt, Homo Sapiens
aagacacaugguugcacagaaggugaaaccaa

SEQ ID NO: 135182 - RNA, 32 nt, Homo Sapiens
gucuccaaugaaaguuuucucauucaccucug

SEQ ID NO: 135183 - RNA, 32 nt, Homo Sapiens
acucuuggaggagaggcccauguaucugcacg

SEQ ID NO: 135184 - RNA, 32 nt, Homo Sapiens
cggcuccguacuccggccccggccugcgcccu

SEQ ID NO: 135185 - RNA, 32 nt, Homo Sapiens
accauaauucguguuguaaaucagacuccagc

SEQ ID NO: 135186 - RNA, 32 nt, Homo Sapiens
ccuccgcagggccgggcacuacuuuccgucug

SEQ ID NO: 135187 - RNA, 32 nt, Homo Sapiens
aguuuaucuacaauggcuucugcagccauggg

SEQ ID NO: 135188 - RNA, 32 nt, Homo Sapiens
ucuucggugacauucuucuaccuaguaggagu

SEQ ID NO: 135189 - RNA, 32 nt, Homo Sapiens
uacuggcaggcccuuggcccccggggccggga

SEQ ID NO: 135190 - RNA, 32 nt, Homo Sapiens
ggcugauagaagacauaacugaauguucaaug

SEQ ID NO: 135191 - RNA, 32 nt, Homo Sapiens
aaauuauauauucaguuauauuauauuuggcu

SEQ ID NO: 135192 - RNA, 32 nt, Homo Sapiens
auuuuuauggauuuuuuuuucuuuuuuuuuuu

SEQ ID NO: 135193 - RNA, 32 nt, Homo Sapiens
ugagcaaaucuguguccacaguuucugaugac

SEQ ID NO: 135194 - RNA, 32 nt, Homo Sapiens
gccucacccggcucccucuccucacccuccug

SEQ ID NO: 135195 - RNA, 32 nt, Homo Sapiens
ugaccuacugucugccuauauuaaggguccac

SEQ ID NO: 135196 - RNA, 32 nt, Homo Sapiens
ugauugaggaugugugaaaagcucacagagcc

SEQ ID NO: 135197 - RNA, 32 nt, Homo Sapiens
aagacguccccugaggacccaggcccacaccc

SEQ ID NO: 135198 - RNA, 32 nt, Homo Sapiens
augagagacugggaagggaaaagcauauauau

SEQ ID NO: 135199 - RNA, 32 nt, Homo Sapiens
acaucagggcugagggggcucuggcuaaaccc

SEQ ID NO: 135200 - RNA, 32 nt, Homo Sapiens
gggcggcggaggaggagacggcaggucgggca

SEQ ID NO: 135201 - RNA, 32 nt, Homo Sapiens
cagugccccacuuuucugcaaguagcuggcuu

SEQ ID NO: 135202 - RNA, 32 nt, Homo Sapiens
aucagcucggcagucgcgaagcagcaaccaug

SEQ ID NO: 135203 - RNA, 32 nt, Homo Sapiens
uuccuggcuguacauguuggggugcuggauuu

SEQ ID NO: 135204 - RNA, 32 nt, Homo Sapiens
aacacaaagauugcugugaaaacgaaaaugug

SEQ ID NO: 135205 - RNA, 32 nt, Homo Sapiens
uccccagcguagcccucccccaucgcagccag

SEQ ID NO: 135206 - RNA, 32 nt, Homo Sapiens
uuguauuaucccauuuaauacuuagaacaacc

SEQ ID NO: 135207 - RNA, 32 nt, Homo Sapiens
aauuccuucuauuuaaacuaaacucaaguagu

SEQ ID NO: 135208 - RNA, 32 nt, Homo Sapiens
gcuuauucuuguuuuucuuuuuucaaaagugu

SEQ ID NO: 135209 - RNA, 32 nt, Homo Sapiens
aguggcuuuguacaguccaucugcaagaggca

SEQ ID NO: 135210 - RNA, 32 nt, Homo Sapiens
gagacugguuuaaaguaacaugccagaacuua

SEQ ID NO: 135211 - RNA, 32 nt, Homo Sapiens
acaauuuaaaaucuuauuuaaguuccaccagu

SEQ ID NO: 135212 - RNA, 32 nt, Homo Sapiens
auugcagacuauggaagaaaaguacaacucag

SEQ ID NO: 135213 - RNA, 32 nt, Homo Sapiens
cuuguuuucaggaaacauuagaggaaauuugg

SEQ ID NO: 135214 - RNA, 32 nt, Homo Sapiens
gcaaaggaggguggaggggugucggccuagac

SEQ ID NO: 135215 - RNA, 28 nt, Homo Sapiens
caaacagagaagcaacauuugaaaguag

SEQ ID NO: 135216 - RNA, 32 nt, Homo Sapiens
guccugaagaauagguuacaaaaaauaaacuc

SEQ ID NO: 135217 - RNA, 32 nt, Homo Sapiens
ccuccgggauccacgcggcgcugugaucacag

SEQ ID NO: 135218 - RNA, 32 nt, Homo Sapiens
auuccuucugucaucuccagcaucagcugcca

SEQ ID NO: 135219 - RNA, 32 nt, Homo Sapiens
cgauuuugcaaggauguuugugaauguacuuu

SEQ ID NO: 135220 - RNA, 32 nt, Homo Sapiens
uugacuuaauauauuugcuuuuuuucucaccu

SEQ ID NO: 135221 - RNA, 32 nt, Homo Sapiens
acgccggcaccgugagauggcgcccguggcca

SEQ ID NO: 135222 - RNA, 32 nt, Homo Sapiens
ggaucuuaaggguagaauuuugugaaagguga

SEQ ID NO: 135223 - RNA, 32 nt, Homo Sapiens
uuguuuuggauuuaaggagauguuuuagauca

SEQ ID NO: 135224 - RNA, 32 nt, Homo Sapiens
cccgagaaacguuuuuccccuucgagacucag

SEQ ID NO: 135225 - RNA, 32 nt, Homo Sapiens
ccucuguaaucccagcacuuugggaggccaag

SEQ ID NO: 135226 - RNA, 32 nt, Homo Sapiens
cgcuuucgaauagaaauacaaugccagacaca

SEQ ID NO: 135227 - RNA, 32 nt, Homo Sapiens
uauuauucaaaaauuauauccugaucaccuuu

SEQ ID NO: 135228 - RNA, 32 nt, Homo Sapiens
ggcccggaggggcucugcguucuguaguggcg

SEQ ID NO: 135229 - RNA, 32 nt, Homo Sapiens
acugcagcaguuccuaaaugauucucacaagc

SEQ ID NO: 135230 - RNA, 32 nt, Homo Sapiens
aguaagcacugacuucguagaaaaccauaaca

SEQ ID NO: 135231 - RNA, 32 nt, Homo Sapiens
ccgacuacaccugcuucugguccuguccacau

SEQ ID NO: 135232 - RNA, 31 nt, Homo Sapiens
ggcuccccagcugcgcugccccgggcgucca

SEQ ID NO: 135233 - RNA, 31 nt, Homo Sapiens
cacgccaugagggcccugugggugcugggcc

SEQ ID NO: 135234 - RNA, 32 nt, Homo Sapiens
caaccugcacccguccuucucuaaaguauggu

SEQ ID NO: 135235 - RNA, 32 nt, Homo Sapiens
auucagccuccguuuuguucucucuccuuuuc

SEQ ID NO: 135236 - RNA, 32 nt, Homo Sapiens
aucauuuaauuuccuuucugcaaauuaaaacu

SEQ ID NO: 135237 - RNA, 32 nt, Homo Sapiens
caaaauuugugauuuuuuagaaguacuugcua

SEQ ID NO: 135238 - RNA, 32 nt, Homo Sapiens
ccuccgcauccacauccgcaucgucguccucc

SEQ ID NO: 135239 - RNA, 32 nt, Homo Sapiens
ccuguggcggugccgccgccccacggagccgc

SEQ ID NO: 135240 - RNA, 32 nt, Homo Sapiens
acaguccuggguggagagaggccgggggcugc

SEQ ID NO: 135241 - RNA, 32 nt, Homo Sapiens
uccggcaggaccagaaguggccacucaacaca

SEQ ID NO: 135242 - RNA, 32 nt, Homo Sapiens
gucguggcaggucugagagcugucccacuggc

SEQ ID NO: 135243 - RNA, 32 nt, Homo Sapiens
cggaggaggagcuccugccugcgguuuugugu

SEQ ID NO: 135244 - RNA, 32 nt, Homo Sapiens
uuuucucucccggccgagccgcggcggcagca

SEQ ID NO: 135245 - RNA, 32 nt, Homo Sapiens
ccaauagaggggcuagacaagauucuuuucca

SEQ ID NO: 135246 - RNA, 32 nt, Homo Sapiens
caguggaaggguuugucuugugcccaggccuu

SEQ ID NO: 135247 - RNA, 32 nt, Homo Sapiens
aucuugaaaauuuuaaaaccaaaaugaggagu

SEQ ID NO: 135248 - RNA, 32 nt, Homo Sapiens
aggaugcaauacucagacacuagcuuuuuucu

SEQ ID NO: 135249 - RNA, 32 nt, Homo Sapiens
ggugcucaggguggacagcugcucuugccaac

SEQ ID NO: 135250 - RNA, 32 nt, Homo Sapiens
uuguuguuaauuuaagaaauagacuuacuuaa

SEQ ID NO: 135251 - RNA, 32 nt, Homo Sapiens
gaugaugaugaccccgccacccgugacuccac

SEQ ID NO: 135252 - RNA, 32 nt, Homo Sapiens
cugcagucccaacccgggccugcccgggagga

SEQ ID NO: 135253 - RNA, 32 nt, Homo Sapiens
agcuucagugauucuguuuucauaggcuuuuu

SEQ ID NO: 135254 - RNA, 32 nt, Homo Sapiens
aguugauuuaaagauuuguuuggcauugauaa

SEQ ID NO: 135255 - RNA, 32 nt, Homo Sapiens
cucuuccaucuauagacuuugucauuuuuguc

SEQ ID NO: 135256 - RNA, 32 nt, Homo Sapiens
gccccucccccucccccucgaacaaauggguc

SEQ ID NO: 135257 - RNA, 28 nt, Homo Sapiens
cucagguugucuaaguguuuuuauguaa

SEQ ID NO: 135258 - RNA, 32 nt, Homo Sapiens
auauuuaaaucauuuuaacuucuauagguuuu

SEQ ID NO: 135259 - RNA, 32 nt, Homo Sapiens
ucucauuuucuuuugcugcugccauguaagaa

SEQ ID NO: 135260 - RNA, 32 nt, Homo Sapiens
aaucucagcauuggaagaaaaagaaaccacag

SEQ ID NO: 135261 - RNA, 32 nt, Homo Sapiens
ccagugcaauguuuaauggaaguaauaauggc

SEQ ID NO: 135262 - RNA, 32 nt, Homo Sapiens
gcgcucagcuggacacugggcgcccgccagcc

SEQ ID NO: 135263 - RNA, 32 nt, Homo Sapiens
ucucacauagaguaucuccgaaugcagcuaug

SEQ ID NO: 135264 - RNA, 32 nt, Homo Sapiens
ggucccagguccccggcccucgccucagcccc

SEQ ID NO: 135265 - RNA, 32 nt, Homo Sapiens
gucucagacuccuggguagggguggggguuug

SEQ ID NO: 135266 - RNA, 32 nt, Homo Sapiens
ugccucccaaggaaaugcaaagguaggaaaag

SEQ ID NO: 135267 - RNA, 32 nt, Homo Sapiens
gcuuuucaaauuauaguuuaucuucuguauaa

SEQ ID NO: 135268 - RNA, 32 nt, Homo Sapiens
cuucaacuggaacaaccagcgcugcaaaaccc

SEQ ID NO: 135269 - RNA, 32 nt, Homo Sapiens
gugaauauucuauuugcuugcaguaucuguuu

SEQ ID NO: 135270 - RNA, 32 nt, Homo Sapiens
auuacaggcauuagccaccaugccuggccuau

SEQ ID NO: 135271 - RNA, 32 nt, Homo Sapiens
gucauuuugaaauacuuaaugccaaguaacaa

SEQ ID NO: 135272 - RNA, 32 nt, Homo Sapiens
caaaguccagaaggcucugguuuucauaaaag

SEQ ID NO: 135273 - RNA, 32 nt, Homo Sapiens
aguguauaacaaacagaauuggaggcugguuu

SEQ ID NO: 135274 - RNA, 32 nt, Homo Sapiens
ggagacaaucuugcuaccugugcgaccugccc

SEQ ID NO: 135275 - RNA, 32 nt, Homo Sapiens
ggccucagcuccgauguccacccuugucccca

SEQ ID NO: 135276 - RNA, 32 nt, Homo Sapiens
gcuuccagcucuuccaggcugcaugucccccu

SEQ ID NO: 135277 - RNA, 32 nt, Homo Sapiens
uuagccaugcgugguggugggcaucuguaauc

SEQ ID NO: 135278 - RNA, 32 nt, Homo Sapiens
cugggucccucauaagcacuuugguuuuaccg

SEQ ID NO: 135279 - RNA, 32 nt, Homo Sapiens
uacuugggcucuuuccuuuaaucuucggaggc

SEQ ID NO: 135280 - RNA, 32 nt, Homo Sapiens
accccucuguucccagccccagccuuucuaag

SEQ ID NO: 135281 - RNA, 32 nt, Homo Sapiens
ugucggccauccaggaagaacuguacuggcca

SEQ ID NO: 135282 - RNA, 32 nt, Homo Sapiens
cucuuccaaacacagguuccggcauacccagg

SEQ ID NO: 135283 - RNA, 32 nt, Homo Sapiens
uccuguguguggaauagaggccccucgugcua

SEQ ID NO: 135284 - RNA, 32 nt, Homo Sapiens
agggcugcgggaaggaaagggggcggcguccu

SEQ ID NO: 135285 - RNA, 32 nt, Homo Sapiens
cucugggcucuccuuucuccuuuggaauaacu

SEQ ID NO: 135286 - RNA, 32 nt, Homo Sapiens
gccucagcugcccacaccucuucccggccccu

SEQ ID NO: 135287 - RNA, 32 nt, Homo Sapiens
ggagggcaggguggagggcaaggcugggggga

SEQ ID NO: 135288 - RNA, 32 nt, Homo Sapiens
agagaaggaaaagaaaugcuaggagaagagcc

SEQ ID NO: 135289 - RNA, 30 nt, Homo Sapiens
ccagagaauauccgccuuauuguucagaac

SEQ ID NO: 135290 - RNA, 32 nt, Homo Sapiens
uuauucauugauucuuuuuuucuuuauagaag

SEQ ID NO: 135291 - RNA, 32 nt, Homo Sapiens
caagagaaaccuggugauauugccagcagacc

SEQ ID NO: 135292 - RNA, 32 nt, Homo Sapiens
uccaacuuucugaaaugaaauguuuuuagauu

SEQ ID NO: 135293 - RNA, 32 nt, Homo Sapiens
cuacuccucaccacgugaccgccccgccaggc

SEQ ID NO: 135294 - RNA, 32 nt, Homo Sapiens
aauggaauguuuucuuuuuuuguuucccauaa

SEQ ID NO: 135295 - RNA, 32 nt, Homo Sapiens
uacaucuuuaaauggaugagauggcuaccacu

SEQ ID NO: 135296 - RNA, 32 nt, Homo Sapiens
uguugucaaaaauaccaauguuaauaugauua

SEQ ID NO: 135297 - RNA, 32 nt, Homo Sapiens
aggcuuuaaaacacuauggacuuaccacuuuc

SEQ ID NO: 135298 - RNA, 32 nt, Homo Sapiens
uagcaguguauuacucacaugggugcaaucuu

SEQ ID NO: 135299 - RNA, 32 nt, Homo Sapiens
uaggcagcacagggcacagagcccugagccug

SEQ ID NO: 135300 - RNA, 32 nt, Homo Sapiens
cgcucguggagccgcacacacgucucccacca

SEQ ID NO: 135301 - RNA, 32 nt, Homo Sapiens
ugcggggacuucccaaggucacacagcaagaa

SEQ ID NO: 135302 - RNA, 32 nt, Homo Sapiens
guguuccuaccuuuucugaaccucuuagacuc

SEQ ID NO: 135303 - RNA, 32 nt, Homo Sapiens
gugacccagaaaggcaagggcauggggaagaa

SEQ ID NO: 135304 - RNA, 32 nt, Homo Sapiens
caagaccguacuagguagauggucaauuagag

SEQ ID NO: 135305 - RNA, 32 nt, Homo Sapiens
uguggacauaaggcccucugugaucaugccuc

SEQ ID NO: 135306 - RNA, 32 nt, Homo Sapiens
cucugcgcccccagccugccccagcccagucc

SEQ ID NO: 135307 - RNA, 32 nt, Homo Sapiens
gaggggguccauguccuucccucccccacccc

SEQ ID NO: 135308 - RNA, 32 nt, Homo Sapiens
cccacagcuuugaccuaggcccgccccucgag

SEQ ID NO: 135309 - RNA, 32 nt, Homo Sapiens
ggcuaccccgcucgggaccccuuccacgcugu

SEQ ID NO: 135310 - RNA, 32 nt, Homo Sapiens
gcauggcucauccuggccccagaauccagucu

SEQ ID NO: 135311 - RNA, 32 nt, Homo Sapiens
uaugaaugaggaaacugaaaauggccuuaagg

SEQ ID NO: 135312 - RNA, 32 nt, Homo Sapiens
ugcuuccagagaugaauguggcacucccuccu

SEQ ID NO: 135313 - RNA, 32 nt, Homo Sapiens
gcguccccggccacgucugugcucuguccuug

SEQ ID NO: 135314 - RNA, 32 nt, Homo Sapiens
ggcuauuugaggaaugcggccuuuuugcauaa

SEQ ID NO: 135315 - RNA, 32 nt, Homo Sapiens
agaagcaagauucaaaucucuugcuuucuuuc

SEQ ID NO: 135316 - RNA, 32 nt, Homo Sapiens
cccguccauugccccaggagacugcuucgccc

SEQ ID NO: 135317 - RNA, 32 nt, Homo Sapiens
gucucaagcacuaaaaaguggcuaauucaauu

SEQ ID NO: 135318 - RNA, 32 nt, Homo Sapiens
cggccgcucccggcaccaggggacgccggacg

SEQ ID NO: 135319 - RNA, 32 nt, Homo Sapiens
gcugggccgcggcugcccggcagcaacugggg

SEQ ID NO: 135320 - RNA, 32 nt, Homo Sapiens
cccaguuccuuccccuccuccaugccagggag

SEQ ID NO: 135321 - RNA, 32 nt, Homo Sapiens
cuucaguguuaguuuucuuaauuuuuuuuuuc

SEQ ID NO: 135322 - RNA, 32 nt, Homo Sapiens
agcucugaaggccuaacuguguguacacuuua

SEQ ID NO: 135323 - RNA, 32 nt, Homo Sapiens
ugcauucuuucugcuuuuagaaauguagacau

SEQ ID NO: 135324 - RNA, 32 nt, Homo Sapiens
accucucgaugaugaugacggcaccagugaaa

SEQ ID NO: 135325 - RNA, 32 nt, Homo Sapiens
gugugcgcagggagagaacgccggccaccuuc

SEQ ID NO: 135326 - RNA, 32 nt, Homo Sapiens
acucuuuguaaauuuuaacucauuuuaguuga

SEQ ID NO: 135327 - RNA, 32 nt, Homo Sapiens
ugggcagcaucgugagacccccguuucuacaa

SEQ ID NO: 135328 - RNA, 32 nt, Homo Sapiens
uugcugugcccucuccugggacaggccugaug

SEQ ID NO: 135329 - RNA, 32 nt, Homo Sapiens
gucauauucuaugggugcaguuccugguaccc

SEQ ID NO: 135330 - RNA, 32 nt, Homo Sapiens
cugaggcccagcaagaggcagcccuggugcag

SEQ ID NO: 135331 - RNA, 32 nt, Homo Sapiens
ccaccaaagggaggcuagggacaggaaagcca

SEQ ID NO: 135332 - RNA, 32 nt, Homo Sapiens
cacacacgcacauacuccugcacauguuccca

SEQ ID NO: 135333 - RNA, 32 nt, Homo Sapiens
guaaauacaaauauacauuuccauccauccau

SEQ ID NO: 135334 - RNA, 32 nt, Homo Sapiens
ucugguuuuggaguagagaaaaucacaauggu

SEQ ID NO: 135335 - RNA, 32 nt, Homo Sapiens
uagagguuuuguaucuagaggaucucaguuca

SEQ ID NO: 135336 - RNA, 32 nt, Homo Sapiens
uugaaaauguaucaugauaacuauaauuuauu

SEQ ID NO: 135337 - RNA, 32 nt, Homo Sapiens
ucauuuuuugucccuuuccccuagauccagaa

SEQ ID NO: 135338 - RNA, 32 nt, Homo Sapiens
ggcggcggugaccccggccuggaacugccccg

SEQ ID NO: 135339 - RNA, 32 nt, Homo Sapiens
uaaaaauaaaaaguagguuacuaaaauaccuc

SEQ ID NO: 135340 - RNA, 32 nt, Homo Sapiens
caccucacccucagcucuggccucuuacucac

SEQ ID NO: 135341 - RNA, 32 nt, Homo Sapiens
uguguguggcuucgaagccuucaucaguggga

SEQ ID NO: 135342 - RNA, 32 nt, Homo Sapiens
guugagauuauuauauacuguauuuucuucua

SEQ ID NO: 135343 - RNA, 32 nt, Homo Sapiens
caagaugaucauucuggcccagcccuuuuauc

SEQ ID NO: 135344 - RNA, 32 nt, Homo Sapiens
caaauggagaaaauugacagauaauauuuuug

SEQ ID NO: 135345 - RNA, 32 nt, Homo Sapiens
auaaaugaaaauuuauuuuuagugauaagauu

SEQ ID NO: 135346 - RNA, 32 nt, Homo Sapiens
gcccuauuccucuccuccuccuccuccugggu

SEQ ID NO: 135347 - RNA, 30 nt, Homo Sapiens
uugcacaucuguaagggggaaaaacaguau

SEQ ID NO: 135348 - RNA, 32 nt, Homo Sapiens
caaaagcagauguagcucucuaucucugagcc

SEQ ID NO: 135349 - RNA, 32 nt, Homo Sapiens
cagacuguucuuacuguaacuacuuccugauu

SEQ ID NO: 135350 - RNA, 32 nt, Homo Sapiens
cuacaggagcccccaccuucccugcccaagag

SEQ ID NO: 135351 - RNA, 32 nt, Homo Sapiens
ugcaccgcauccccuccugcacccccuggaug

SEQ ID NO: 135352 - RNA, 32 nt, Homo Sapiens
aauguuaagaguuaaacuuaucuuucccaaau

SEQ ID NO: 135353 - RNA, 32 nt, Homo Sapiens
cguauaaauggcagcucagauuccugaauuaa

SEQ ID NO: 135354 - RNA, 32 nt, Homo Sapiens
uggacugugggaacaaaaaacaguauaggaag

SEQ ID NO: 135355 - RNA, 32 nt, Homo Sapiens
ucaguuauauuuaaucuuuguaaucucacuaa

SEQ ID NO: 135356 - RNA, 32 nt, Homo Sapiens
uugagaggaauuucuuuuacuccacgaggcug

SEQ ID NO: 135357 - RNA, 32 nt, Homo Sapiens
cugugauuuuuggcacaacuugcgaguguagu

SEQ ID NO: 135358 - RNA, 32 nt, Homo Sapiens
agcuccgccucccagguucaugucauucuccu

SEQ ID NO: 135359 - RNA, 32 nt, Homo Sapiens
ggccuucucagccuucuccccgcggccagcug

SEQ ID NO: 135360 - RNA, 32 nt, Homo Sapiens
ccugugaguucaucagagucagcuccaggaac

SEQ ID NO: 135361 - RNA, 32 nt, Homo Sapiens
acuuuaaaaugagaaucugguguuacuguauu

SEQ ID NO: 135362 - RNA, 32 nt, Homo Sapiens
auuguaugguuucuugaugauucuguuuugca

SEQ ID NO: 135363 - RNA, 30 nt, Homo Sapiens
cucugggccuucagcgcggguccuggugcu

SEQ ID NO: 135364 - RNA, 32 nt, Homo Sapiens
caugagcccucccugucugcacugcccaggcc

SEQ ID NO: 135365 - RNA, 32 nt, Homo Sapiens
aucacccaacugagaguuugcagucacugggc

SEQ ID NO: 135366 - RNA, 32 nt, Homo Sapiens
gcuuuuguguaccccaccaccccauuaccaca

SEQ ID NO: 135367 - RNA, 32 nt, Homo Sapiens
ucucucugucaguggcggcugcugccugcucu

SEQ ID NO: 135368 - RNA, 32 nt, Homo Sapiens
ugaaccacagauuucugcuaugugucaucaaa

SEQ ID NO: 135369 - RNA, 32 nt, Homo Sapiens
cggcaguagagagcggacuccagccggcggac

SEQ ID NO: 135370 - RNA, 32 nt, Homo Sapiens
accuagccggggggcgcacggucacccaaagg

SEQ ID NO: 135371 - RNA, 32 nt, Homo Sapiens
gcacccuagggucagugcaggagcccagccgc

SEQ ID NO: 135372 - RNA, 32 nt, Homo Sapiens
uuaguuuuguuuuaccugaauguaauaaauuu

SEQ ID NO: 135373 - RNA, 32 nt, Homo Sapiens
agauacugagccucucaccucccagcccucag

SEQ ID NO: 135374 - RNA, 32 nt, Homo Sapiens
aggaaggaccgcacgcccuuucgcgcaggaga

SEQ ID NO: 135375 - RNA, 32 nt, Homo Sapiens
uuugugucagucaucagcacucuaguaugaau

SEQ ID NO: 135376 - RNA, 32 nt, Homo Sapiens
ccggcugcucccuggcuccucccggccauggg

SEQ ID NO: 135377 - RNA, 32 nt, Homo Sapiens
uuuggcggcucggaggagcggcugcugcugcu

SEQ ID NO: 135378 - RNA, 32 nt, Homo Sapiens
uccaaucacaugcaggccccaggccccucaga

SEQ ID NO: 135379 - RNA, 32 nt, Homo Sapiens
uuucugccuaggccaccguagggccugacucc

SEQ ID NO: 135380 - RNA, 32 nt, Homo Sapiens
ccagagggggcagaaucuccaauagaggacug

SEQ ID NO: 135381 - RNA, 32 nt, Homo Sapiens
aacuguggucgcugaucaaugacaccuuccug

SEQ ID NO: 135382 - RNA, 32 nt, Homo Sapiens
gauacgucauauucucaacaguuucuuuguag

SEQ ID NO: 135383 - RNA, 32 nt, Homo Sapiens
ggggcccucggguuccaccuucauccacccac

SEQ ID NO: 135384 - RNA, 32 nt, Homo Sapiens
aaagaacuuacugauucccauaggugugucaa

SEQ ID NO: 135385 - RNA, 32 nt, Homo Sapiens
caucagaaagccuccucuacccggcccuugua

SEQ ID NO: 135386 - RNA, 32 nt, Homo Sapiens
gucuguugguggcaaugugagggugauacucu

SEQ ID NO: 135387 - RNA, 32 nt, Homo Sapiens
gccuccucugcccauggguccugggcacccag

SEQ ID NO: 135388 - RNA, 32 nt, Homo Sapiens
aagcuccugcucugcugggugcugccugugag

SEQ ID NO: 135389 - RNA, 32 nt, Homo Sapiens
cagggcuuacgugggaagagccaggcauggca

SEQ ID NO: 135390 - RNA, 30 nt, Homo Sapiens
cccaagcaggucggcggcggcggcaggaga

SEQ ID NO: 135391 - RNA, 32 nt, Homo Sapiens
guucaagauuaucuggcguuuuagacaaauuu

SEQ ID NO: 135392 - RNA, 32 nt, Homo Sapiens
agcuucugccccccaccccccguccccauguc

SEQ ID NO: 135393 - RNA, 32 nt, Homo Sapiens
uuuguaaauccuuuaaaaaauauuugguuagu

SEQ ID NO: 135394 - RNA, 32 nt, Homo Sapiens
gauauaggggaaccucuuacugauuguuuaaa

SEQ ID NO: 135395 - RNA, 32 nt, Homo Sapiens
ggcaggcugcugucaccucgaccuccuugacc

SEQ ID NO: 135396 - RNA, 32 nt, Homo Sapiens
aucguugauccagaggcuuccaaacuuuuccu

SEQ ID NO: 135397 - RNA, 32 nt, Homo Sapiens
uuucugaauuguggccaccuucauaccagucu

SEQ ID NO: 135398 - RNA, 29 nt, Homo Sapiens
gaaaaaugaaguuuauuuuaucuuguuua

SEQ ID NO: 135399 - RNA, 32 nt, Homo Sapiens
ccagcuucucucccuuuccagcaagggcagag

SEQ ID NO: 135400 - RNA, 31 nt, Homo Sapiens
caauggaaauaaaaccaaucagucaguuagc

SEQ ID NO: 135401 - RNA, 32 nt, Homo Sapiens
gagcucuagcgcgcccggcuuuccggcgcacu

SEQ ID NO: 135402 - RNA, 32 nt, Homo Sapiens
agacaguuauuuauagucauuuauuuuaaaaa

SEQ ID NO: 135403 - RNA, 32 nt, Homo Sapiens
cacaaguuuuacgagggaaaacugaaaaagga

SEQ ID NO: 135404 - RNA, 32 nt, Homo Sapiens
guuuaaggggagaggaaauauugcugggguca

SEQ ID NO: 135405 - RNA, 32 nt, Homo Sapiens
gcgugcagcuccgaagcucuuuggaccuagca

SEQ ID NO: 135406 - RNA, 32 nt, Homo Sapiens
ggcccacgaaggagaaaggcugccucggauuc

SEQ ID NO: 135407 - RNA, 32 nt, Homo Sapiens
ccgucucucgcgucuuuuccuggucccaggca

SEQ ID NO: 135408 - RNA, 32 nt, Homo Sapiens
agagucucccccuuaaauuuccugguaccccc

SEQ ID NO: 135409 - RNA, 32 nt, Homo Sapiens
uaacauucugguuuccuccuuccuugaagucc

SEQ ID NO: 135410 - RNA, 30 nt, Homo Sapiens
ucccgcgccauggagaucgcccuggugccc

SEQ ID NO: 135411 - RNA, 32 nt, Homo Sapiens
ggcauuaaaaauuuuacaaaaacauaauuuua

SEQ ID NO: 135412 - RNA, 32 nt, Homo Sapiens
uuguaauuguggauuaaugucaauguuaauca

SEQ ID NO: 135413 - RNA, 32 nt, Homo Sapiens
acggagcacuguauuuccuucucgugucacca

SEQ ID NO: 135414 - RNA, 32 nt, Homo Sapiens
cugcucaucauaaccggcaccucuccaugucg

SEQ ID NO: 135415 - RNA, 32 nt, Homo Sapiens
cuuggaggagggcagaggcagugugggcugau

SEQ ID NO: 135416 - RNA, 32 nt, Homo Sapiens
ccucugaaggagccagugccagccaucaccaa

SEQ ID NO: 135417 - RNA, 32 nt, Homo Sapiens
cuccaagccguugggcacuagcaagaaggugc

SEQ ID NO: 135418 - RNA, 32 nt, Homo Sapiens
uuagugaguuaaaauuccuggaguaacuacug

SEQ ID NO: 135419 - RNA, 32 nt, Homo Sapiens
cuuacuccaccuccccgccagccuggggccac

SEQ ID NO: 135420 - RNA, 32 nt, Homo Sapiens
cuguggagauaaagcaguuccugcucuugagg

SEQ ID NO: 135421 - RNA, 32 nt, Homo Sapiens
ccccccucagggucccaagcucccucacugcc

SEQ ID NO: 135422 - RNA, 32 nt, Homo Sapiens
agcccacagaugcccucgcagcccuuucgcgc

SEQ ID NO: 135423 - RNA, 32 nt, Homo Sapiens
guccagguuaaucugaaguuugaaagcucaga

SEQ ID NO: 135424 - RNA, 32 nt, Homo Sapiens
uguaccugugacuaaacaacuaccuccucagu

SEQ ID NO: 135425 - RNA, 32 nt, Homo Sapiens
uaaaccaagucauugggacuuagcgucuuucu

SEQ ID NO: 135426 - RNA, 32 nt, Homo Sapiens
auccagcauucagaucuuucuagucaccuuag

SEQ ID NO: 135427 - RNA, 32 nt, Homo Sapiens
uaguuuuauuuuuguaaugcacauggcaaagc

SEQ ID NO: 135428 - RNA, 32 nt, Homo Sapiens
cccuuggcgcuucauguacaugugucuauuca

SEQ ID NO: 135429 - RNA, 32 nt, Homo Sapiens
ugauuugaggcuuuaguuugcugauuuccuaa

SEQ ID NO: 135430 - RNA, 32 nt, Homo Sapiens
acagggcuauacaugaaguuaaaauuguguag

SEQ ID NO: 135431 - RNA, 32 nt, Homo Sapiens
uagccaccacuuccccgcaauggaccauguaa

SEQ ID NO: 135432 - RNA, 32 nt, Homo Sapiens
aaauuagcuggguaugguggcuuacgccuaua

SEQ ID NO: 135433 - RNA, 32 nt, Homo Sapiens
ucuggaaguguauugggcugaggugggauuuu

SEQ ID NO: 135434 - RNA, 32 nt, Homo Sapiens
gugcgccgguaggggacgcgccggcacagcaa

SEQ ID NO: 135435 - RNA, 32 nt, Homo Sapiens
agcaucagcgaguucacacuggagaaagaccu

SEQ ID NO: 135436 - RNA, 32 nt, Homo Sapiens
ggaagccucucauagaaauugccuccagucca

SEQ ID NO: 135437 - RNA, 32 nt, Homo Sapiens
gaugugccgggcggggggcccggguucgccga

SEQ ID NO: 135438 - RNA, 32 nt, Homo Sapiens
auguuuuucuuacugucacuucuaaauagaaa

SEQ ID NO: 135439 - RNA, 32 nt, Homo Sapiens
uggaggagcugagggagggagccauggaaggu

SEQ ID NO: 135440 - RNA, 32 nt, Homo Sapiens
cuccugccuuucggcagccucuccaggcccag

SEQ ID NO: 135441 - RNA, 32 nt, Homo Sapiens
acaguuuuaguauagagaaauguaaugguuuu

SEQ ID NO: 135442 - RNA, 31 nt, Homo Sapiens
cagaugaaauaaaauauauaucuguuuaguc

SEQ ID NO: 135443 - RNA, 32 nt, Homo Sapiens
ugauuacacacaaugaaugggggcaaugagag

SEQ ID NO: 135444 - RNA, 32 nt, Homo Sapiens
caaauacauuagcuucaucagaugaacuguag

SEQ ID NO: 135445 - RNA, 32 nt, Homo Sapiens
ugucuauagaaaggcauucuuaaaaguuaaag

SEQ ID NO: 135446 - RNA, 32 nt, Homo Sapiens
ggcacgaggguggggccaugguggucuugcgg

SEQ ID NO: 135447 - RNA, 32 nt, Homo Sapiens
agcagauacuaaaacaaacaaaacuuuggacc

SEQ ID NO: 135448 - RNA, 32 nt, Homo Sapiens
cuuuaacuuuuaaaaugaagcuuugguucucu

SEQ ID NO: 135449 - RNA, 32 nt, Homo Sapiens
gcggcggcggcguuugaguggaggaagauggc

SEQ ID NO: 135450 - RNA, 32 nt, Homo Sapiens
agggagugaccguguucucaggaugcagcgac

SEQ ID NO: 135451 - RNA, 32 nt, Homo Sapiens
auuugauuugcaacacuggccaaacaucaguc

SEQ ID NO: 135452 - RNA, 32 nt, Homo Sapiens
cuggugcccccuccccgaugugacugagggug

SEQ ID NO: 135453 - RNA, 32 nt, Homo Sapiens
acagugcccuccccacagcacuaccucacccc

SEQ ID NO: 135454 - RNA, 32 nt, Homo Sapiens
caucucucccuccugcccucugcuugggggac

SEQ ID NO: 135455 - RNA, 32 nt, Homo Sapiens
guuuaaauuuuuugauauccauguagggguau

SEQ ID NO: 135456 - RNA, 32 nt, Homo Sapiens
cuccagcacagggaugcugugcaugccugagu

SEQ ID NO: 135457 - RNA, 32 nt, Homo Sapiens
ggugucucggaagaguugcaucaugagacccu

SEQ ID NO: 135458 - RNA, 32 nt, Homo Sapiens
gagguucugugucccaguuguuuuccaauuuc

SEQ ID NO: 135459 - RNA, 32 nt, Homo Sapiens
gcggcuggagcaggcgagcggcggcggccgau

SEQ ID NO: 135460 - RNA, 32 nt, Homo Sapiens
cccacaucaguucaacauccucugguuuuucu

SEQ ID NO: 135461 - RNA, 32 nt, Homo Sapiens
ugcaaaggucugaguuauuacgcuacaugaca

SEQ ID NO: 135462 - RNA, 32 nt, Homo Sapiens
uuggacuuuuggaugccuggccuuaggcugug

SEQ ID NO: 135463 - RNA, 32 nt, Homo Sapiens
agggacucaugcugccacuugggccugguuuu

SEQ ID NO: 135464 - RNA, 30 nt, Homo Sapiens
auuuuccugugguugaccuauacgaccagg

SEQ ID NO: 135465 - RNA, 32 nt, Homo Sapiens
aauugaggggauguuacucauaaaacagauaa

SEQ ID NO: 135466 - RNA, 32 nt, Homo Sapiens
cacaacaguauccugauucucaucuuaaagau

SEQ ID NO: 135467 - RNA, 32 nt, Homo Sapiens
auggacaaugaaggccuuucugaugaggucuc

SEQ ID NO: 135468 - RNA, 32 nt, Homo Sapiens
ugccccucacugggcaggccauggccuacagc

SEQ ID NO: 135469 - RNA, 32 nt, Homo Sapiens
ccugaggaccucccuuuuccagauggggaaac

SEQ ID NO: 135470 - RNA, 32 nt, Homo Sapiens
guacagucugauucuuuuuaucugggguaggg

SEQ ID NO: 135471 - RNA, 32 nt, Homo Sapiens
aucuguuuaguacuguauuguggaauauuuga

SEQ ID NO: 135472 - RNA, 32 nt, Homo Sapiens
augcaauuccugaguguagaaacuucuugcac

SEQ ID NO: 135473 - RNA, 32 nt, Homo Sapiens
caaagagaaagauggacugguguuugugaaac

SEQ ID NO: 135474 - RNA, 29 nt, Homo Sapiens
guucaagucuguauguauggaguggguug

SEQ ID NO: 135475 - RNA, 32 nt, Homo Sapiens
uuaggggcgggugggaagggaugggacacagc

SEQ ID NO: 135476 - RNA, 32 nt, Homo Sapiens
gaagggcgcgaaugggcagagcagaacuucua

SEQ ID NO: 135477 - RNA, 32 nt, Homo Sapiens
acggugcguccggccucgcccgcggcugcucg

SEQ ID NO: 135478 - RNA, 32 nt, Homo Sapiens
ugacucacaccuguauccgaacacuuugggag

SEQ ID NO: 135479 - RNA, 32 nt, Homo Sapiens
augcuuuucugcacgugguugccuuagucauc

SEQ ID NO: 135480 - RNA, 32 nt, Homo Sapiens
aaacaggauaggaguuuagagaaggcaccaaa

SEQ ID NO: 135481 - RNA, 32 nt, Homo Sapiens
ggggauaucccuaugucccagccccugguacu

SEQ ID NO: 135482 - RNA, 32 nt, Homo Sapiens
ccaaguacuggauuuuaaaucuguauguaucu

SEQ ID NO: 135483 - RNA, 32 nt, Homo Sapiens
guuugggcugguccgcugcuccccaccuacca

SEQ ID NO: 135484 - RNA, 32 nt, Homo Sapiens
aggaggggaggggugcagaucggacaggaagu

SEQ ID NO: 135485 - RNA, 32 nt, Homo Sapiens
gagcucuugucuuccauacgugucucagccag

SEQ ID NO: 135486 - RNA, 32 nt, Homo Sapiens
cccaccucaccuuuccucugcugaaggagaau

SEQ ID NO: 135487 - RNA, 32 nt, Homo Sapiens
cacugcacuccagccugggugacagauugaga

SEQ ID NO: 135488 - RNA, 32 nt, Homo Sapiens
ccuuaccuuucugucccuguguauagauuaug

SEQ ID NO: 135489 - RNA, 32 nt, Homo Sapiens
gcaggaauggccugcuaggagaugcagugagc

SEQ ID NO: 135490 - RNA, 32 nt, Homo Sapiens
cgagccaauacgggccgagcccggggcugcgc

SEQ ID NO: 135491 - RNA, 32 nt, Homo Sapiens
gagucccccuaggucucuggcugcccaugagg

SEQ ID NO: 135492 - RNA, 32 nt, Homo Sapiens
accuuucugagugacaugggugugccaggcua

SEQ ID NO: 135493 - RNA, 32 nt, Homo Sapiens
auaauuugauucaagugcagcuccaguucaau

SEQ ID NO: 135494 - RNA, 30 nt, Homo Sapiens
caccccaguaucccugcaccucuucauccc

SEQ ID NO: 135495 - RNA, 32 nt, Homo Sapiens
gcuagguuuuuggagcuucucugcuucauguc

SEQ ID NO: 135496 - RNA, 32 nt, Homo Sapiens
ugugcuguguucauggugugcacggagagagg

SEQ ID NO: 135497 - RNA, 32 nt, Homo Sapiens
aggagggaacuuuuggcaaaaagcagaagaga

SEQ ID NO: 135498 - RNA, 32 nt, Homo Sapiens
uuaagccacuuaaaauguucacuuuugacaaa

SEQ ID NO: 135499 - RNA, 32 nt, Homo Sapiens
uccucuacacacaaauuccuauggaaauaccu

SEQ ID NO: 135500 - RNA, 32 nt, Homo Sapiens
gcacuguucacuuuuccuuuauucuuaauggc

SEQ ID NO: 135501 - RNA, 32 nt, Homo Sapiens
caggacagcuggagaaugggccguccacuugg

SEQ ID NO: 135502 - RNA, 32 nt, Homo Sapiens
guggcugccgggcggagaggcuccucacuucu

SEQ ID NO: 135503 - RNA, 32 nt, Homo Sapiens
cauauuuugaagaauuucuauaguacauauuu

SEQ ID NO: 135504 - RNA, 32 nt, Homo Sapiens
gcuguaggcuuuuauuucuuuuuuauuuuuug

SEQ ID NO: 135505 - RNA, 32 nt, Homo Sapiens
uuacaguggaaugaguacuggacaaggaguca

SEQ ID NO: 135506 - RNA, 32 nt, Homo Sapiens
augcccaaccaccauuaagauuuuggcaggaa

SEQ ID NO: 135507 - RNA, 32 nt, Homo Sapiens
ucugcucugucugcggccaaaguccauacaca

SEQ ID NO: 135508 - RNA, 32 nt, Homo Sapiens
uucccugcagugucacuguuaaagcaacaguc

SEQ ID NO: 135509 - RNA, 32 nt, Homo Sapiens
gagauccgauguauagaugaugaccaccaggg

SEQ ID NO: 135510 - RNA, 32 nt, Homo Sapiens
uucuuugguuuuuguuucuaagaaagaggaag

SEQ ID NO: 135511 - RNA, 32 nt, Homo Sapiens
gaauuuugaaacuaaaucuuugaaacuugcca

SEQ ID NO: 135512 - RNA, 32 nt, Homo Sapiens
gacggcuuccauauuuucugacccuacaaaca

SEQ ID NO: 135513 - RNA, 32 nt, Homo Sapiens
uuuuggauacucaggaggaaagauaagauaca

SEQ ID NO: 135514 - RNA, 32 nt, Homo Sapiens
aaaaguaguacaagccuuagccaggcacggug

SEQ ID NO: 135515 - RNA, 32 nt, Homo Sapiens
ugaggcucuggaugacuuuauucuucaaaugg

SEQ ID NO: 135516 - RNA, 32 nt, Homo Sapiens
auuuuaaacaauuuaucugcauuucacuggua

SEQ ID NO: 135517 - RNA, 32 nt, Homo Sapiens
ggaccgacgcgcgcaccagcuccggagcccag

SEQ ID NO: 135518 - RNA, 32 nt, Homo Sapiens
cgggcggaugacccccagcccuacccuuggug

SEQ ID NO: 135519 - RNA, 32 nt, Homo Sapiens
cauaaaagcaaccuaaaaauuaaacugucauc

SEQ ID NO: 135520 - RNA, 32 nt, Homo Sapiens
ccuggaaaaugguguuggguuuggucuccagc

SEQ ID NO: 135521 - RNA, 32 nt, Homo Sapiens
gcagggcggggcccggccauggcgaccgcgga

SEQ ID NO: 135522 - RNA, 32 nt, Homo Sapiens
ggacuucuaucaaugguacucuaaucaguccu

SEQ ID NO: 135523 - RNA, 32 nt, Homo Sapiens
gguccccagcgaugucuccaccaccgcugcug

SEQ ID NO: 135524 - RNA, 32 nt, Homo Sapiens
cgggugggaggagaggcacgccgggguucugg

SEQ ID NO: 135525 - RNA, 32 nt, Homo Sapiens
acuccucucccgcuccugggcgccgcugccac

SEQ ID NO: 135526 - RNA, 32 nt, Homo Sapiens
uuagaccuuugcuuaugcaaaucagaaaaaca

SEQ ID NO: 135527 - RNA, 32 nt, Homo Sapiens
uguuuagagauuaacagauuucagaaugucuu

SEQ ID NO: 135528 - RNA, 32 nt, Homo Sapiens
uauuugugguuuuuauuuugaacgcuugcuuu

SEQ ID NO: 135529 - RNA, 32 nt, Homo Sapiens
gagaugccagguuucuuuuuuaucuagaaaug

SEQ ID NO: 135530 - RNA, 32 nt, Homo Sapiens
gguggaccgggcggcugaccgaggggcggacg

SEQ ID NO: 135531 - RNA, 32 nt, Homo Sapiens
cgucaucuggauuuuggauuucccuccaugca

SEQ ID NO: 135532 - RNA, 32 nt, Homo Sapiens
ucacuugggggguggggcuggcacuggcccca

SEQ ID NO: 135533 - RNA, 32 nt, Homo Sapiens
gagguugguguggaugaagagggcuuuaucua

SEQ ID NO: 135534 - RNA, 32 nt, Homo Sapiens
aaacgcagcagaugcagacgcuccugaugaaa

SEQ ID NO: 135535 - RNA, 32 nt, Homo Sapiens
cucugcugcccccuuccccagcccuuagcaca

SEQ ID NO: 135536 - RNA, 32 nt, Homo Sapiens
cucagaaaaaacauuugaaaacaaagaaggaa

SEQ ID NO: 135537 - RNA, 32 nt, Homo Sapiens
uguaauuccagcugcuugggagccugaggcag

SEQ ID NO: 135538 - RNA, 32 nt, Homo Sapiens
aauguuaaacuaucugggggaauagaaagccc

SEQ ID NO: 135539 - RNA, 32 nt, Homo Sapiens
gaggaccuggcguccgccuccucccuccccuu

SEQ ID NO: 135540 - RNA, 32 nt, Homo Sapiens
ucuuuuugccccacccccugccgucaguucuu

SEQ ID NO: 135541 - RNA, 32 nt, Homo Sapiens
gcuuuuuuuuuuuuuuuuaauugcaucaauuc

SEQ ID NO: 135542 - RNA, 32 nt, Homo Sapiens
aggcaccccacuuucuccuaguaacaugggcu

SEQ ID NO: 135543 - RNA, 32 nt, Homo Sapiens
aauagccugcgcgcuccaggacugccuaccca

SEQ ID NO: 135544 - RNA, 32 nt, Homo Sapiens
acauuaaacaauuguuguguucuuuuuaccuu

SEQ ID NO: 135545 - RNA, 32 nt, Homo Sapiens
aggcgggucucacuuugucacccaggcuagag

SEQ ID NO: 135546 - RNA, 28 nt, Homo Sapiens
uggacggggcggcuggccgggcagaggg

SEQ ID NO: 135547 - RNA, 32 nt, Homo Sapiens
aaccauaucugggucaucuggauucuguacag

SEQ ID NO: 135548 - RNA, 32 nt, Homo Sapiens
auugucugugggcuuguuucuaccuguacagu

SEQ ID NO: 135549 - RNA, 32 nt, Homo Sapiens
ucaagguuauauucagaaaauauuucccagua

SEQ ID NO: 135550 - RNA, 32 nt, Homo Sapiens
gaggucccugaaccagaggcacuaggauuacc

SEQ ID NO: 135551 - RNA, 28 nt, Homo Sapiens
gcaaugaaaugguaacauuugaaacuaa

SEQ ID NO: 135552 - RNA, 30 nt, Homo Sapiens
aguaaaugcaguggcaugcuaaguacccaa

SEQ ID NO: 135553 - RNA, 32 nt, Homo Sapiens
cguuagagccagcagggaccucccaugucucc

SEQ ID NO: 135554 - RNA, 32 nt, Homo Sapiens
aggcuggaguggagugguaugaucuugacuca

SEQ ID NO: 135555 - RNA, 32 nt, Homo Sapiens
ccaccaacgcucucccgggcucuuccgcguua

SEQ ID NO: 135556 - RNA, 32 nt, Homo Sapiens
ggagggagcugacccuugacuccagcauagcu

SEQ ID NO: 135557 - RNA, 32 nt, Homo Sapiens
ggcagaagaaggaaacuggacucuuacccuuc

SEQ ID NO: 135558 - RNA, 32 nt, Homo Sapiens
ucauuagagaauuuauacuggagagacuucac

SEQ ID NO: 135559 - RNA, 32 nt, Homo Sapiens
ccagucccaagccaccagcugucugcuccugg

SEQ ID NO: 135560 - RNA, 32 nt, Homo Sapiens
ccagggaagacgggauaaaguagccauggguc

SEQ ID NO: 135561 - RNA, 32 nt, Homo Sapiens
gagaccuuugaaaaggguccaugaacucugaa

SEQ ID NO: 135562 - RNA, 32 nt, Homo Sapiens
gcuccggcccuguccucaaauuggggggcuga

SEQ ID NO: 135563 - RNA, 30 nt, Homo Sapiens
ucuuauuugcuaaugggagcacuucuuccu

SEQ ID NO: 135564 - RNA, 32 nt, Homo Sapiens
agcuuggagggccagccuucucaaauguccug

SEQ ID NO: 135565 - RNA, 32 nt, Homo Sapiens
ggcuugcgaaggagagagccgcagccgcggcc

SEQ ID NO: 135566 - RNA, 32 nt, Homo Sapiens
ugucuauacuucccccuccccagccccaaaca

SEQ ID NO: 135567 - RNA, 32 nt, Homo Sapiens
gguguguccccgcucccgucgucccgcccacc

SEQ ID NO: 135568 - RNA, 32 nt, Homo Sapiens
aaaucuuguauuuauaaauguaaugaagguau

SEQ ID NO: 135569 - RNA, 32 nt, Homo Sapiens
uuuuugugacaugcuaacacauuuucagaaua

SEQ ID NO: 135570 - RNA, 32 nt, Homo Sapiens
gagaaggggaggagggcggggggcaccuacua

SEQ ID NO: 135571 - RNA, 32 nt, Homo Sapiens
ucggugugaacuuuucucuuuaauuuuaacug

SEQ ID NO: 135572 - RNA, 32 nt, Homo Sapiens
uacaggccaauauaucugaugaacauuaaugc

SEQ ID NO: 135573 - RNA, 32 nt, Homo Sapiens
aagcucaaauaaauagauuagauccagagaag

SEQ ID NO: 135574 - RNA, 32 nt, Homo Sapiens
cucucuccagcccuggaguccugagcaaugau

SEQ ID NO: 135575 - RNA, 32 nt, Homo Sapiens
uucucagagaggcaucugggguccuggaacuu

SEQ ID NO: 135576 - RNA, 32 nt, Homo Sapiens
uuccacgucccuggggggcaggggccaggcca

SEQ ID NO: 135577 - RNA, 32 nt, Homo Sapiens
auaauauauggacuaaacaaaauaaaauaaca

SEQ ID NO: 135578 - RNA, 32 nt, Homo Sapiens
uugggcauuagagugaaguuucccugcuuuuc

SEQ ID NO: 135579 - RNA, 32 nt, Homo Sapiens
gaagauuggaaucugccuggaacaaagaacug

SEQ ID NO: 135580 - RNA, 32 nt, Homo Sapiens
cugcccuaaaagacaguaaguaggaauauuug

SEQ ID NO: 135581 - RNA, 32 nt, Homo Sapiens
auggccgggaugcgaagauggcccugcaacgc

SEQ ID NO: 135582 - RNA, 32 nt, Homo Sapiens
aguccaguccuccauugauggacacguagguu

SEQ ID NO: 135583 - RNA, 32 nt, Homo Sapiens
acuucccagagccugccuggagcgcguacuca

SEQ ID NO: 135584 - RNA, 32 nt, Homo Sapiens
gacgccgcccgcccgcgcagugcuagcuccau

SEQ ID NO: 135585 - RNA, 32 nt, Homo Sapiens
ccacagggcuccugaaggaagccccuggaucu

SEQ ID NO: 135586 - RNA, 32 nt, Homo Sapiens
uagaagaguuccuuuaccuguacuuaacuccc

SEQ ID NO: 135587 - RNA, 32 nt, Homo Sapiens
auugauuuacuuucuuuuuuuagguuuuaugu

SEQ ID NO: 135588 - RNA, 32 nt, Homo Sapiens
cugcuguccucuguugucuuugucuuuucacg

SEQ ID NO: 135589 - RNA, 32 nt, Homo Sapiens
augaauaccaauuuaauuuuuuaguauuuacc

SEQ ID NO: 135590 - RNA, 32 nt, Homo Sapiens
gagccuuggagaugccuggacuaguuggagga

SEQ ID NO: 135591 - RNA, 32 nt, Homo Sapiens
cugaggucaggaguucaagagcagccuggcca

SEQ ID NO: 135592 - RNA, 32 nt, Homo Sapiens
cugggaggaguugccacugccugggugaagaa

SEQ ID NO: 135593 - RNA, 32 nt, Homo Sapiens
cacucccccauaaaucgucuccuggguccuuc

SEQ ID NO: 135594 - RNA, 32 nt, Homo Sapiens
aucaggccaggagagguacuggacgccgcgca

SEQ ID NO: 135595 - RNA, 32 nt, Homo Sapiens
accccaacuccagcucccagcaggagguggcu

SEQ ID NO: 135596 - RNA, 32 nt, Homo Sapiens
agauguuuguagaacagauccguguaaaaguc

SEQ ID NO: 135597 - RNA, 32 nt, Homo Sapiens
cacgucccugcagcugaaaauagcacggggag

SEQ ID NO: 135598 - RNA, 32 nt, Homo Sapiens
guuugcucgcgcccucacgcgcuuuggguuuc

SEQ ID NO: 135599 - RNA, 32 nt, Homo Sapiens
aaauacgcauauuuuuaaggcuuuuguuaugu

SEQ ID NO: 135600 - RNA, 32 nt, Homo Sapiens
ugcccugccuugcuuggcacccgcuccggcga

SEQ ID NO: 135601 - RNA, 32 nt, Homo Sapiens
ugugacagccuaugcacaaaagcauuaccuga

SEQ ID NO: 135602 - RNA, 32 nt, Homo Sapiens
gaucauacuuaaaauuuguauuacaauuuuua

SEQ ID NO: 135603 - RNA, 32 nt, Homo Sapiens
agagcuggggacgccacgugccauucccaugg

SEQ ID NO: 135604 - RNA, 32 nt, Homo Sapiens
uauucagaauccggagcagagaggacaugaug

SEQ ID NO: 135605 - RNA, 32 nt, Homo Sapiens
cucagcuacuugggaggcugaggugggaggau

SEQ ID NO: 135606 - RNA, 32 nt, Homo Sapiens
uuacauaccgacaaaaaugaaaaaauaaauaa

SEQ ID NO: 135607 - RNA, 32 nt, Homo Sapiens
uccccacugccuccuucaaccccgccucuucc

SEQ ID NO: 135608 - RNA, 32 nt, Homo Sapiens
gcucagaggaggaggacaaagacggcggggug

SEQ ID NO: 135609 - RNA, 32 nt, Homo Sapiens
uccaggacgggcgcacagcagcagccgaggcu

SEQ ID NO: 135610 - RNA, 32 nt, Homo Sapiens
gcccuuaacauaugauuucaaaacacugcucc

SEQ ID NO: 135611 - RNA, 32 nt, Homo Sapiens
gccaagggaggacuagucuggagcacgcucgg

SEQ ID NO: 135612 - RNA, 32 nt, Homo Sapiens
aaugugggagaauggcuugagcccaggaguuc

SEQ ID NO: 135613 - RNA, 32 nt, Homo Sapiens
caaagcuguuuuuauuucuagcuucagucagc

SEQ ID NO: 135614 - RNA, 32 nt, Homo Sapiens
gugagaggacugugccagaggaggaagaggac

SEQ ID NO: 135615 - RNA, 32 nt, Homo Sapiens
cugucuugucauuguuuucuuguuaguccagg

SEQ ID NO: 135616 - RNA, 32 nt, Homo Sapiens
uggaaaauaauaaguggaauaugauacaauug

SEQ ID NO: 135617 - RNA, 31 nt, Homo Sapiens
gcccaggccguucuccugcccccgcggcugg

SEQ ID NO: 135618 - RNA, 32 nt, Homo Sapiens
uagaauguuugugaaaaauaaguaugguaucc

SEQ ID NO: 135619 - RNA, 32 nt, Homo Sapiens
cccccuaccugggguccauggacucccugaaa

SEQ ID NO: 135620 - RNA, 32 nt, Homo Sapiens
cucgcuucuccucuccuccuccugaccuggau

SEQ ID NO: 135621 - RNA, 32 nt, Homo Sapiens
uuucccaaacuaagugaacauuagauuuaauu

SEQ ID NO: 135622 - RNA, 32 nt, Homo Sapiens
uuguuuccuuaaucuggcucauuugaaauuuc

SEQ ID NO: 135623 - RNA, 32 nt, Homo Sapiens
ugucauggugcauccguuucaguauuauuucc

SEQ ID NO: 135624 - RNA, 32 nt, Homo Sapiens
guuggagcagugcugggcaagcucaccagggc

SEQ ID NO: 135625 - RNA, 32 nt, Homo Sapiens
aaauuggggcagguuaguuaaucuucaugucu

SEQ ID NO: 135626 - RNA, 32 nt, Homo Sapiens
gggugaggguggcuugggaaccgacccaguga

SEQ ID NO: 135627 - RNA, 32 nt, Homo Sapiens
aaaguuccaagguuuguggcuugaauuauucu

SEQ ID NO: 135628 - RNA, 32 nt, Homo Sapiens
accuccgccucccagguuuaagcgauucuccu

SEQ ID NO: 135629 - RNA, 32 nt, Homo Sapiens
ugguccuaggacaggaggagcuucgggcccag

SEQ ID NO: 135630 - RNA, 32 nt, Homo Sapiens
uuuggcugagauccagacccaggcccaccucu

SEQ ID NO: 135631 - RNA, 32 nt, Homo Sapiens
uuaaugcuuuuguauggcaguauguauauauu

SEQ ID NO: 135632 - RNA, 32 nt, Homo Sapiens
aucuuuucaccuguugaugggugucuggacug

SEQ ID NO: 135633 - RNA, 32 nt, Homo Sapiens
acuuauuguaaauuuuagaaaccccucuguag

SEQ ID NO: 135634 - RNA, 32 nt, Homo Sapiens
gccccuguaacccuacucuccucucucccugg

SEQ ID NO: 135635 - RNA, 32 nt, Homo Sapiens
ggaguguggcugcaagagaaaaggggcuggag

SEQ ID NO: 135636 - RNA, 32 nt, Homo Sapiens
cccuccacccuauggacuuuggucacugcuau

SEQ ID NO: 135637 - RNA, 32 nt, Homo Sapiens
acccauauaucccuccuuuaccauaguacucc

SEQ ID NO: 135638 - RNA, 32 nt, Homo Sapiens
gauaccucaaggauaucauuuuugauuuugug

SEQ ID NO: 135639 - RNA, 32 nt, Homo Sapiens
gguucauuugguuuuugucaugugcaaggaag

SEQ ID NO: 135640 - RNA, 31 nt, Homo Sapiens
aagagugcaaggucugccaggucagauggag

SEQ ID NO: 135641 - RNA, 32 nt, Homo Sapiens
ucugauuuagaccggcccgcugggcccgugcc

SEQ ID NO: 135642 - RNA, 32 nt, Homo Sapiens
acguugaucugaacuuuaaaucaaucagugcu

SEQ ID NO: 135643 - RNA, 32 nt, Homo Sapiens
guaaaugcuguaaaauagauuuauauucaguu

SEQ ID NO: 135644 - RNA, 32 nt, Homo Sapiens
guucaucuuuugcugguccaacccaaguaguu

SEQ ID NO: 135645 - RNA, 32 nt, Homo Sapiens
aggaacgcgggcgucuggaggggggacaucgg

SEQ ID NO: 135646 - RNA, 32 nt, Homo Sapiens
aaaaaagaaaacaguaaaugaacaaaaacauc

SEQ ID NO: 135647 - RNA, 32 nt, Homo Sapiens
acaucaaggcuucaaaaauacucacauggcua

SEQ ID NO: 135648 - RNA, 32 nt, Homo Sapiens
ccuuaugucguguacauacauugucuuugaaa

SEQ ID NO: 135649 - RNA, 32 nt, Homo Sapiens
uguagcugggucuacagucagacuuccugcuc

SEQ ID NO: 135650 - RNA, 32 nt, Homo Sapiens
cuguggcuguuguuagacgcgcaccagcgggg

SEQ ID NO: 135651 - RNA, 32 nt, Homo Sapiens
uacaaaaaaguuuaaaaaauuagccaggcgug

SEQ ID NO: 135652 - RNA, 30 nt, Homo Sapiens
cccuaaccucugagucaccaucuuaagaga

SEQ ID NO: 135653 - RNA, 32 nt, Homo Sapiens
gagguggcagccaucuccuucucggcaucaug

SEQ ID NO: 135654 - RNA, 32 nt, Homo Sapiens
gagcagguagagaugggagugggggagcugga

SEQ ID NO: 135655 - RNA, 32 nt, Homo Sapiens
uuuucacauuuuuuuucuuuuucuuuuuuuuu

SEQ ID NO: 135656 - RNA, 32 nt, Homo Sapiens
aagcacuuucuaaaaagucuugagaucccacc

SEQ ID NO: 135657 - RNA, 32 nt, Homo Sapiens
gcggauccaggccgaggaccgaaaggggccgc

SEQ ID NO: 135658 - RNA, 30 nt, Homo Sapiens
gggaagcagagagccaaugagucugccugg

SEQ ID NO: 135659 - RNA, 26 nt, Homo Sapiens
caugcugugcggccgcuggaggcguu

SEQ ID NO: 135660 - RNA, 32 nt, Homo Sapiens
gaaaaacuaagaacaugaaaugucaagagugg

SEQ ID NO: 135661 - RNA, 32 nt, Homo Sapiens
uagugagcucuucaaaaugaaaacagaaugac

SEQ ID NO: 135662 - RNA, 32 nt, Homo Sapiens
ugacgcugguggccgccgcggucuccuaccug

SEQ ID NO: 135663 - RNA, 32 nt, Homo Sapiens
ggggcuugguaguuuggaaaguucuuaggcac

SEQ ID NO: 135664 - RNA, 32 nt, Homo Sapiens
uauccauuguaccugcucuugaaauugucaau

SEQ ID NO: 135665 - RNA, 32 nt, Homo Sapiens
gcuccgaccuccaugauccgagagugggaaaa

SEQ ID NO: 135666 - RNA, 32 nt, Homo Sapiens
gguugaauuugugcuuacaugcacuccuggca

SEQ ID NO: 135667 - RNA, 32 nt, Homo Sapiens
agaggugcacaccaccauaucuggcuuauuuu

SEQ ID NO: 135668 - RNA, 32 nt, Homo Sapiens
gggucccucuuccguccccccagcccagcuac

SEQ ID NO: 135669 - RNA, 26 nt, Homo Sapiens
accucuguuuuccucgugccgaauuc

SEQ ID NO: 135670 - RNA, 32 nt, Homo Sapiens
ugcuuuuggggauauacaaauagcagcauauu

SEQ ID NO: 135671 - RNA, 32 nt, Homo Sapiens
cuuggguaggcgggaaggaggguuagggaggg

SEQ ID NO: 135672 - RNA, 32 nt, Homo Sapiens
caucaaaacuggccaguaagugcacaagaaau

SEQ ID NO: 135673 - RNA, 30 nt, Homo Sapiens
ucuaaucgccuugugccgccgcagcgccag

SEQ ID NO: 135674 - RNA, 32 nt, Homo Sapiens
cagguucuucuuccugaagcugaggcucaggg

SEQ ID NO: 135675 - RNA, 31 nt, Homo Sapiens
ucccgugcaaggugugcugggguuguguagg

SEQ ID NO: 135676 - RNA, 32 nt, Homo Sapiens
gcagccccacccagaagcgguucagcacacgg

SEQ ID NO: 135677 - RNA, 32 nt, Homo Sapiens
ggagggcauuauuaauaauuaucuuguaauga

SEQ ID NO: 135678 - RNA, 30 nt, Homo Sapiens
guaugucuaaccucugcagaaguucagguu

SEQ ID NO: 135679 - RNA, 32 nt, Homo Sapiens
cugagcaaccgcagccuccgcggccgagagug

SEQ ID NO: 135680 - RNA, 32 nt, Homo Sapiens
gguaucuguaguaguggaauguuauagauuug

SEQ ID NO: 135681 - RNA, 32 nt, Homo Sapiens
aguaacaaacuccagucuguugcaguaacaaa

SEQ ID NO: 135682 - RNA, 32 nt, Homo Sapiens
cacgacggccccagcacccaacuuuaccaccc

SEQ ID NO: 135683 - RNA, 32 nt, Homo Sapiens
ugacauuuuggaagcugagauuacucugaaaa

SEQ ID NO: 135684 - RNA, 32 nt, Homo Sapiens
gcugcucgggcagcugcaccaccugcaccgcg

SEQ ID NO: 135685 - RNA, 32 nt, Homo Sapiens
agcaaucguagcaacuaauuccacuaaguaca

SEQ ID NO: 135686 - RNA, 32 nt, Homo Sapiens
aacucagacaagauuauauuuaauauauuaau

SEQ ID NO: 135687 - RNA, 32 nt, Homo Sapiens
uauuuaauuucgcagauuuuuaaacuuuauuu

SEQ ID NO: 135688 - RNA, 32 nt, Homo Sapiens
ugaggaggagccgaggccccagcuucauccag

SEQ ID NO: 135689 - RNA, 32 nt, Homo Sapiens
gccggcugccgcgcagacccagcugcguccug

SEQ ID NO: 135690 - RNA, 32 nt, Homo Sapiens
aaauaagaaagggaggcuaauauuuuucaugc

SEQ ID NO: 135691 - RNA, 32 nt, Homo Sapiens
ucagagggacgggugaugggcagauuggaaaa

SEQ ID NO: 135692 - RNA, 32 nt, Homo Sapiens
aagccucauugaauggcuuucagcuagcacau

SEQ ID NO: 135693 - RNA, 32 nt, Homo Sapiens
cccucaaugcccauuaaauacucuugccugcc

SEQ ID NO: 135694 - RNA, 32 nt, Homo Sapiens
agggaacuugagcagaauaaggagagaccacc

SEQ ID NO: 135695 - RNA, 32 nt, Homo Sapiens
cuccugcaguuccagcuugauuuuaaguaguu

SEQ ID NO: 135696 - RNA, 32 nt, Homo Sapiens
ugucugguuuuuauuucauugguuucaugaaa

SEQ ID NO: 135697 - RNA, 32 nt, Homo Sapiens
agcaggaaaagaaagcaccacugcacaauuua

SEQ ID NO: 135698 - RNA, 32 nt, Homo Sapiens
cccugcgcgggccauggccucggccugcgggg

SEQ ID NO: 135699 - RNA, 32 nt, Homo Sapiens
ucuccuacacuugaaaauucuagacagacugu

SEQ ID NO: 135700 - RNA, 32 nt, Homo Sapiens
uuuaccaacaauaugauuaucuauaugguuau

SEQ ID NO: 135701 - RNA, 32 nt, Homo Sapiens
ucuugccccuugggccuccccccagccccucc

SEQ ID NO: 135702 - RNA, 32 nt, Homo Sapiens
gguggggaaggggugucucaccugagcugacu

SEQ ID NO: 135703 - RNA, 32 nt, Homo Sapiens
guguauguaagacuuuuauuaaaucuuccuua

SEQ ID NO: 135704 - RNA, 32 nt, Homo Sapiens
uaaagcaguuuagguauggugauuuagcagaa

SEQ ID NO: 135705 - RNA, 32 nt, Homo Sapiens
cggguugggcugugacgcugcugcugggguca

SEQ ID NO: 135706 - RNA, 32 nt, Homo Sapiens
ggaacccggggcuccagggucuggggcagcuu

SEQ ID NO: 135707 - RNA, 28 nt, Homo Sapiens
agggaggggcggcugcugccuggugacg

SEQ ID NO: 135708 - RNA, 32 nt, Homo Sapiens
uccuccccuguacgugccccagcauucugggg

SEQ ID NO: 135709 - RNA, 32 nt, Homo Sapiens
ccgucgcccucccuacgggcagcccccggggg

SEQ ID NO: 135710 - RNA, 32 nt, Homo Sapiens
cucugacuuuggcuucugcucccggccuugga

SEQ ID NO: 135711 - RNA, 32 nt, Homo Sapiens
guaagucuaagucaagcaagacuuugugaauu

SEQ ID NO: 135712 - RNA, 32 nt, Homo Sapiens
caaaagaaauaucuugaugcaaugccucuuua

SEQ ID NO: 135713 - RNA, 32 nt, Homo Sapiens
guuguuccuuuuucuuuuuuuaaauuuucuuu

SEQ ID NO: 135714 - RNA, 32 nt, Homo Sapiens
ugccggcccauccacacccugcguccacacca

SEQ ID NO: 135715 - RNA, 32 nt, Homo Sapiens
uuucauuuaaaguuuuauccaauauucuagga

SEQ ID NO: 135716 - RNA, 32 nt, Homo Sapiens
gaaauuaagaaaaagucgcccgaaacaccaag

SEQ ID NO: 135717 - RNA, 32 nt, Homo Sapiens
uauggaaaacaaaacauugaacaguuugaauu

SEQ ID NO: 135718 - RNA, 32 nt, Homo Sapiens
caaccuuaacugaguugggcuacauuuucaga

SEQ ID NO: 135719 - RNA, 32 nt, Homo Sapiens
ggguucucugguccaagacccugcuuuaaaga

SEQ ID NO: 135720 - RNA, 32 nt, Homo Sapiens
ugaggcggcgggggccauggcuggggucgcgu

SEQ ID NO: 135721 - RNA, 32 nt, Homo Sapiens
uauuugcugaaagagagcacaaaaaugggaga

SEQ ID NO: 135722 - RNA, 32 nt, Homo Sapiens
cugccucucuucauuuucuuucaucuacaugg

SEQ ID NO: 135723 - RNA, 32 nt, Homo Sapiens
aauggauaugaacaacaaaaccacgagucucg

SEQ ID NO: 135724 - RNA, 32 nt, Homo Sapiens
gguggcugcggcgacaaaaugaagauauucgu

SEQ ID NO: 135725 - RNA, 32 nt, Homo Sapiens
uacauccguccuccccgccucgcagaguuggg

SEQ ID NO: 135726 - RNA, 32 nt, Homo Sapiens
uauacucuuauagacaacauggccgugaacuu

SEQ ID NO: 135727 - RNA, 32 nt, Homo Sapiens
uuggaugcaucauuccuguguguuacaguauu

SEQ ID NO: 135728 - RNA, 32 nt, Homo Sapiens
cccaugccccuaacccaccucuacccucaugg

SEQ ID NO: 135729 - RNA, 32 nt, Homo Sapiens
agcaggcagugccacuguggacaguguacacu

SEQ ID NO: 135730 - RNA, 32 nt, Homo Sapiens
uccuucuaccacuggggugcugcuguaccaca

SEQ ID NO: 135731 - RNA, 32 nt, Homo Sapiens
aagcacaauuuaaugaauaaguuaaaauauua

SEQ ID NO: 135732 - RNA, 32 nt, Homo Sapiens
gggcccgagggcggggcgagcgagacggcgcu

SEQ ID NO: 135733 - RNA, 32 nt, Homo Sapiens
ggcuguggaccucguccucaccaccauggucg

SEQ ID NO: 135734 - RNA, 32 nt, Homo Sapiens
uauauugucaguuugauauuuauuuuaaauug

SEQ ID NO: 135735 - RNA, 32 nt, Homo Sapiens
ccacagcugucccccaggaucccacuccuuuc

SEQ ID NO: 135736 - RNA, 32 nt, Homo Sapiens
cuccuccuagcuagcggccgccgcccgccgcc

SEQ ID NO: 135737 - RNA, 32 nt, Homo Sapiens
auucuugaagaaagaagaagaugccacugcca

SEQ ID NO: 135738 - RNA, 30 nt, Homo Sapiens
cacucugccguuccgaggaccugggaggag

SEQ ID NO: 135739 - RNA, 32 nt, Homo Sapiens
uccucaacaucgacuuuagcaaugcagacauu

SEQ ID NO: 135740 - RNA, 32 nt, Homo Sapiens
gauggcugucuaggauuucagaauaucaacuc

SEQ ID NO: 135741 - RNA, 32 nt, Homo Sapiens
ugcauguaggcaaagauuuugaagauacauuu

SEQ ID NO: 135742 - RNA, 32 nt, Homo Sapiens
ggccgcuccggugcuguccagcagccauaggg

SEQ ID NO: 135743 - RNA, 31 nt, Homo Sapiens
uaggucugaaacacuaaggagacuuggccug

SEQ ID NO: 135744 - RNA, 32 nt, Homo Sapiens
cuuugagugagaagacaguuuauuuaaaacuu

SEQ ID NO: 135745 - RNA, 32 nt, Homo Sapiens
gauacaaguuugaucccaggaacuugaguucu

SEQ ID NO: 135746 - RNA, 32 nt, Homo Sapiens
auaugauuuuuguagcuuuuuguaaauuauuu

SEQ ID NO: 135747 - RNA, 32 nt, Homo Sapiens
ucuagauauacuuuauauguauuguuacuuuu

SEQ ID NO: 135748 - RNA, 32 nt, Homo Sapiens
ucaggcagccucagcccaagcuucuaccugcc

SEQ ID NO: 135749 - RNA, 32 nt, Homo Sapiens
uaguauuuguaucuucaguucauuccacuuua

SEQ ID NO: 135750 - RNA, 32 nt, Homo Sapiens
cagauugcucaagcaguuccccugccucaagg

SEQ ID NO: 135751 - RNA, 32 nt, Homo Sapiens
gaaagagaaggacgacccaaagggcauuuccc

SEQ ID NO: 135752 - RNA, 32 nt, Homo Sapiens
auuucacaaaagacauaggacuuaacuggaaa

SEQ ID NO: 135753 - RNA, 32 nt, Homo Sapiens
guuuucuccgcgggcgccucgggcggaaccug

SEQ ID NO: 135754 - RNA, 32 nt, Homo Sapiens
ccugaggucggcggcgcacgcuguugccccgu

SEQ ID NO: 135755 - RNA, 32 nt, Homo Sapiens
guuccuuccuuccauaccccagcauaccuucu

SEQ ID NO: 135756 - RNA, 32 nt, Homo Sapiens
uuguagaauaugacuuuagacauaucacugua

SEQ ID NO: 135757 - RNA, 32 nt, Homo Sapiens
cugauggccccggcacccucgcaggguuugaa

SEQ ID NO: 135758 - RNA, 32 nt, Homo Sapiens
gucuggcgcucgccggcgugggcgggccggac

SEQ ID NO: 135759 - RNA, 32 nt, Homo Sapiens
cccuaagcuccaauacuucagaaugugacgcu

SEQ ID NO: 135760 - RNA, 32 nt, Homo Sapiens
aaucauugccuuguguuacagauucagccugc

SEQ ID NO: 135761 - RNA, 32 nt, Homo Sapiens
aaggagggaugugagggaaauagggacccccc

SEQ ID NO: 135762 - RNA, 32 nt, Homo Sapiens
cgcugcccaucccgggcccuuucaucaguaau

SEQ ID NO: 135763 - RNA, 32 nt, Homo Sapiens
ggcaucaccccaccccacauucuccccgaugu

SEQ ID NO: 135764 - RNA, 32 nt, Homo Sapiens
gacuaaaucuguaagcucuuugaaacaacuuu

SEQ ID NO: 135765 - RNA, 32 nt, Homo Sapiens
uaggaggaaugggaagcccgcuaagagaacag

SEQ ID NO: 135766 - RNA, 32 nt, Homo Sapiens
agaggggcagccccccaccuugucacccucag

SEQ ID NO: 135767 - RNA, 32 nt, Homo Sapiens
uugcaauuucaguaucuucaucucuaaacuag

SEQ ID NO: 135768 - RNA, 32 nt, Homo Sapiens
ggacccgggcccggcccggcgagaucacugac

SEQ ID NO: 135769 - RNA, 32 nt, Homo Sapiens
acuacaaaaggauggugccaagggcaggugac

SEQ ID NO: 135770 - RNA, 32 nt, Homo Sapiens
acuuaggcugguggagaggguugugccuccug

SEQ ID NO: 135771 - RNA, 32 nt, Homo Sapiens
uaaagacuuaaauauaagaccugaaauuauga

SEQ ID NO: 135772 - RNA, 32 nt, Homo Sapiens
augccuggcuaauuuuuuuuuauaccuuuaau

SEQ ID NO: 135773 - RNA, 32 nt, Homo Sapiens
ggcccccgagaccugggaugcugccuguuucu

SEQ ID NO: 135774 - RNA, 32 nt, Homo Sapiens
cuccgcgagcucagccgcucagcgaguggggu

SEQ ID NO: 135775 - RNA, 32 nt, Homo Sapiens
ccaccugcgcggggaggacgcgcacuccagcg

SEQ ID NO: 135776 - RNA, 32 nt, Homo Sapiens
accuuagagaaaaauccuucagccuuuuacca

SEQ ID NO: 135777 - RNA, 32 nt, Homo Sapiens
uuuccauuguuguuuacuuuaguucuggaacu

SEQ ID NO: 135778 - RNA, 32 nt, Homo Sapiens
caggccuaguuucaguggcagaauaggauugg

SEQ ID NO: 135779 - RNA, 32 nt, Homo Sapiens
cucuugugcuagcuggagcagcuccuuccccu

SEQ ID NO: 135780 - RNA, 32 nt, Homo Sapiens
uguuucauauuuuuccuuucacuuucgguuua

SEQ ID NO: 135781 - RNA, 32 nt, Homo Sapiens
ggugggaggagaaaaaguuauuuauuaccguu

SEQ ID NO: 135782 - RNA, 31 nt, Homo Sapiens
ucuucacuuucauggcgacgucuacuauuac

SEQ ID NO: 135783 - RNA, 32 nt, Homo Sapiens
cagaaaauaucagaagauaaucaaaugaauca

SEQ ID NO: 135784 - RNA, 32 nt, Homo Sapiens
gaucccugcugccugcacugggggugccaauu

SEQ ID NO: 135785 - RNA, 29 nt, Homo Sapiens
uaggcaggaggacagaggggcuggucuca

SEQ ID NO: 135786 - RNA, 32 nt, Homo Sapiens
aaaacguaaacagaaauugaaaacuugaagga

SEQ ID NO: 135787 - RNA, 32 nt, Homo Sapiens
agacaaaauuuauuuuccagggauuuaauacg

SEQ ID NO: 135788 - RNA, 32 nt, Homo Sapiens
cgguucuuuaccaaaugugcuugcuucuccua

SEQ ID NO: 135789 - RNA, 32 nt, Homo Sapiens
ccucaccuuucugcaaagcagaaaaaguauga

SEQ ID NO: 135790 - RNA, 32 nt, Homo Sapiens
ccugagggaaagggcccuggcacuggguguag

SEQ ID NO: 135791 - RNA, 32 nt, Homo Sapiens
ccagggacguaccccaaauguugcccagguug

SEQ ID NO: 135792 - RNA, 32 nt, Homo Sapiens
ccgggagcaagcugcggugguucaccaccuug

SEQ ID NO: 135793 - RNA, 32 nt, Homo Sapiens
gcgcuguagcuuaucugacaacgcugaggcca

SEQ ID NO: 135794 - RNA, 32 nt, Homo Sapiens
cgaggaagccucaggauaaggaagggggcagg

SEQ ID NO: 135795 - RNA, 32 nt, Homo Sapiens
ugugugcuggcugcgccugagcuccgagacag

SEQ ID NO: 135796 - RNA, 32 nt, Homo Sapiens
agguauuggggaugcagguuguggggagcugg

SEQ ID NO: 135797 - RNA, 32 nt, Homo Sapiens
ggcccuccaagccagguugaggucugguaaca

SEQ ID NO: 135798 - RNA, 32 nt, Homo Sapiens
uagggagagaacgccagagggaggcggcuggc

SEQ ID NO: 135799 - RNA, 32 nt, Homo Sapiens
cggauuggcccugccccucccccuaccgcaug

SEQ ID NO: 135800 - RNA, 32 nt, Homo Sapiens
caaaaaacaaaauaaaauaaucuuccuguuuu

SEQ ID NO: 135801 - RNA, 32 nt, Homo Sapiens
aaaggagcaugaugaacaacaguaugaaugaa

SEQ ID NO: 135802 - RNA, 32 nt, Homo Sapiens
aacagauauaugugacagaaaucuaacuucaa

SEQ ID NO: 135803 - RNA, 32 nt, Homo Sapiens
ugaacuuugaaaaaauacuugacucuacuuuu

SEQ ID NO: 135804 - RNA, 32 nt, Homo Sapiens
cccucccagacaccccgccucaucuggaaaua

SEQ ID NO: 135805 - RNA, 31 nt, Homo Sapiens
gaauaaauuacaugucauucuacuguaacgu

SEQ ID NO: 135806 - RNA, 32 nt, Homo Sapiens
ccgacgcgccuggcuaggagcgccgaccgcag

SEQ ID NO: 135807 - RNA, 32 nt, Homo Sapiens
uuauuauuaaauauuucuacuuaaugaaucaa

SEQ ID NO: 135808 - RNA, 32 nt, Homo Sapiens
uguggagaacuaaagguggccacaaauucuuu

SEQ ID NO: 135809 - RNA, 32 nt, Homo Sapiens
augggucuguggguuuugcugcugcuguugcu

SEQ ID NO: 135810 - RNA, 32 nt, Homo Sapiens
agcagcuggaggaggaggaggaggauacgcca

SEQ ID NO: 135811 - RNA, 32 nt, Homo Sapiens
agacuccuccuggccugggaagggugacaugg

SEQ ID NO: 135812 - RNA, 32 nt, Homo Sapiens
cgaccgccccaccuccucccucccucccgccc

SEQ ID NO: 135813 - RNA, 32 nt, Homo Sapiens
gccgcccccuccccgagaccuguccugccguc

SEQ ID NO: 135814 - RNA, 32 nt, Homo Sapiens
aagggcagggggacggggaggggguugggauc

SEQ ID NO: 135815 - RNA, 32 nt, Homo Sapiens
ugugaggggccggcggggcccggagcgguccc

SEQ ID NO: 135816 - RNA, 29 nt, Homo Sapiens
guugcgggacgucuucgcggggcgggagg

SEQ ID NO: 135817 - RNA, 29 nt, Homo Sapiens
ccgaauggcggccgacaagggcccggcgg

SEQ ID NO: 135818 - RNA, 32 nt, Homo Sapiens
auuagggccuucaagggcuggcagucuuacag

SEQ ID NO: 135819 - RNA, 32 nt, Homo Sapiens
aagcaguuuuauuacuugauaauuuuccaaau

SEQ ID NO: 135820 - RNA, 32 nt, Homo Sapiens
aaaaaugagaaccugaagcaaugcuuacagua

SEQ ID NO: 135821 - RNA, 32 nt, Homo Sapiens
uuucuguuauuuuuaagcuuuuauuucuugua

SEQ ID NO: 135822 - RNA, 32 nt, Homo Sapiens
gcuuuuccuuccccaccccccagccuuagaug

SEQ ID NO: 135823 - RNA, 32 nt, Homo Sapiens
aucucauggaaauggcugaacuuugugguagc

SEQ ID NO: 135824 - RNA, 32 nt, Homo Sapiens
aacuggcaggagccucguguccugcuagcugu

SEQ ID NO: 135825 - RNA, 32 nt, Homo Sapiens
uuuucgcacuaaaaugggacuuuauuauuccu

SEQ ID NO: 135826 - RNA, 32 nt, Homo Sapiens
accuaaaugugguugguaaaucuuacucucau

SEQ ID NO: 135827 - RNA, 30 nt, Homo Sapiens
ggcuucuaggugcugccgccgccaccgcca

SEQ ID NO: 135828 - RNA, 32 nt, Homo Sapiens
ccaaaaaggucaccuuaguuuauuuuuccaaa

SEQ ID NO: 135829 - RNA, 32 nt, Homo Sapiens
uuuccaugaaauggcaacaaacauacauuuau

SEQ ID NO: 135830 - RNA, 32 nt, Homo Sapiens
gaggccagagcgguuugaaaacauccugaaag

SEQ ID NO: 135831 - RNA, 32 nt, Homo Sapiens
uccagcauagcggggaagauguugaccaaggu

SEQ ID NO: 135832 - RNA, 32 nt, Homo Sapiens
guccggcgccgagguucuugacugcugugccg

SEQ ID NO: 135833 - RNA, 32 nt, Homo Sapiens
ucauuuuaaaauguauuuguugagaagucaug

SEQ ID NO: 135834 - RNA, 32 nt, Homo Sapiens
gagagcugcccgcuccugcccucuggaugaca

SEQ ID NO: 135835 - RNA, 32 nt, Homo Sapiens
aggccggcggguggcaggaagacaccaggcug

SEQ ID NO: 135836 - RNA, 32 nt, Homo Sapiens
gauugccgggaagcuccugggggaugcucuaa

SEQ ID NO: 135837 - RNA, 32 nt, Homo Sapiens
acacuggcggccuccgaccucucagaccuagu

SEQ ID NO: 135838 - RNA, 32 nt, Homo Sapiens
uuuaaaaaugauguaacuuacauggaagucuu

SEQ ID NO: 135839 - RNA, 32 nt, Homo Sapiens
aaaggcagcuccuggggacucccaggaccaca

SEQ ID NO: 135840 - RNA, 32 nt, Homo Sapiens
ccauaagauugugaaggguuuacugcuccuuc

SEQ ID NO: 135841 - RNA, 32 nt, Homo Sapiens
agucagcagcucagccagggaugcagaaccau

SEQ ID NO: 135842 - RNA, 32 nt, Homo Sapiens
aaugccuggaggagccagcggcugcgggugcg

SEQ ID NO: 135843 - RNA, 32 nt, Homo Sapiens
auaacaugggagccuuuuuuucguuguuuuca

SEQ ID NO: 135844 - RNA, 32 nt, Homo Sapiens
ucuccgggaaaugacuuagucuggccacaugc

SEQ ID NO: 135845 - RNA, 32 nt, Homo Sapiens
ucgggugccacuuuuuuuuuuuucagauucca

SEQ ID NO: 135846 - RNA, 32 nt, Homo Sapiens
gacaagcagauuuuuguaaaauuuuauauuag

SEQ ID NO: 135847 - RNA, 32 nt, Homo Sapiens
ggcgcagcccgcgucagaacuuagagggccag

SEQ ID NO: 135848 - RNA, 32 nt, Homo Sapiens
auauuguguauccuguuucagauuguuuccgu

SEQ ID NO: 135849 - RNA, 32 nt, Homo Sapiens
ggaccagucaucuacuauaccauguuuaucuu

SEQ ID NO: 135850 - RNA, 32 nt, Homo Sapiens
aguccacagagccagcagcuuggguugagaug

SEQ ID NO: 135851 - RNA, 32 nt, Homo Sapiens
agaagcuucaaggggacagcaccuggggaggg

SEQ ID NO: 135852 - RNA, 32 nt, Homo Sapiens
ugaggcucagacagagcagcugcuguuccagc

SEQ ID NO: 135853 - RNA, 32 nt, Homo Sapiens
acugaguacugacaccagacaaagacuccaaa

SEQ ID NO: 135854 - RNA, 32 nt, Homo Sapiens
ugcuuuuugcuuaaauuaaaacuuuaugccgg

SEQ ID NO: 135855 - RNA, 32 nt, Homo Sapiens
aauauuauuuuugauuugaccaccaagaugua

SEQ ID NO: 135856 - RNA, 32 nt, Homo Sapiens
gugaggacaaaagcaaauaaaaauuaagaagc

SEQ ID NO: 135857 - RNA, 32 nt, Homo Sapiens
gacccucccagggcauuccagcucaagcugcu

SEQ ID NO: 135858 - RNA, 32 nt, Homo Sapiens
cuagggacaggagaagcagaggaagaggcuuc

SEQ ID NO: 135859 - RNA, 32 nt, Homo Sapiens
agcacugaccccgauggcgauggacuacugaa

SEQ ID NO: 135860 - RNA, 32 nt, Homo Sapiens
accuuuguaucuagcucagggauuguaaacgc

SEQ ID NO: 135861 - RNA, 32 nt, Homo Sapiens
gaaggggaaacgcacguugcugucccagccac

SEQ ID NO: 135862 - RNA, 32 nt, Homo Sapiens
ugcuaagugaaauaaacuagucacaaaacgaa

SEQ ID NO: 135863 - RNA, 32 nt, Homo Sapiens
ugcaccccaucccgacccugucuccgccaccu

SEQ ID NO: 135864 - RNA, 32 nt, Homo Sapiens
acaguauacuaucuaaauuugcugcucacuuu

SEQ ID NO: 135865 - RNA, 32 nt, Homo Sapiens
ugagcugggccgccuccuccaggaagccuccu

SEQ ID NO: 135866 - RNA, 32 nt, Homo Sapiens
cagccgcugaaugaggcuuccaggcguccgcu

SEQ ID NO: 135867 - RNA, 32 nt, Homo Sapiens
cuaaguauuaaacauauuucuguauucuucca

SEQ ID NO: 135868 - RNA, 30 nt, Homo Sapiens
aguuagaauaucccuacucuucuaaauaau

SEQ ID NO: 135869 - RNA, 32 nt, Homo Sapiens
uggacacggaggaggggguagagguggugugg

SEQ ID NO: 135870 - RNA, 32 nt, Homo Sapiens
ccuggccucaggugcggagucugcgggagcag

SEQ ID NO: 135871 - RNA, 32 nt, Homo Sapiens
cugcagugugugggacaaaggcugggccgcuc

SEQ ID NO: 135872 - RNA, 32 nt, Homo Sapiens
cggcuguaaucccagcacuuugggaggccaag

SEQ ID NO: 135873 - RNA, 32 nt, Homo Sapiens
ccaggccucacaccagaacugucuaguauacu

SEQ ID NO: 135874 - RNA, 32 nt, Homo Sapiens
gauaccaagggaugacaguguauuuuauauua

SEQ ID NO: 135875 - RNA, 32 nt, Homo Sapiens
guugcagcagugccuucuucauccuuccuuac

SEQ ID NO: 135876 - RNA, 32 nt, Homo Sapiens
guucuucucaaggccuggccagcccuguggcu

SEQ ID NO: 135877 - RNA, 32 nt, Homo Sapiens
cagagggcggaaugcagaugaggcugcugugg

SEQ ID NO: 135878 - RNA, 32 nt, Homo Sapiens
auuuaaaggcuaccuuauuguacguuuaaagu

SEQ ID NO: 135879 - RNA, 32 nt, Homo Sapiens
uguccgccccacggccggcguugccgggguaa

SEQ ID NO: 135880 - RNA, 32 nt, Homo Sapiens
aaauugugaucaauaauaguaccuuugauuau

SEQ ID NO: 135881 - RNA, 32 nt, Homo Sapiens
cgugcaugccaggccgggcccgaggcucgaaa

SEQ ID NO: 135882 - RNA, 28 nt, Homo Sapiens
cuggacagagcacacagcaaagggcucc

SEQ ID NO: 135883 - RNA, 32 nt, Homo Sapiens
uucuuaaaaacggauaaguuugaaaggaaacu

SEQ ID NO: 135884 - RNA, 32 nt, Homo Sapiens
uguaacgggcaggacaguuggguguggccugg

SEQ ID NO: 135885 - RNA, 32 nt, Homo Sapiens
uuuaauguaagagaaacuauuuuucuccuguu

SEQ ID NO: 135886 - RNA, 32 nt, Homo Sapiens
aucaggcauggagagcacuuugucagcuucca

SEQ ID NO: 135887 - RNA, 32 nt, Homo Sapiens
uccaggcggcugcggcagcucugguaacgccg

SEQ ID NO: 135888 - RNA, 32 nt, Homo Sapiens
caagccuguagucauauuuucaauugcugcug

SEQ ID NO: 135889 - RNA, 32 nt, Homo Sapiens
ggcucuaaguucuggaaggugugugcacagag

SEQ ID NO: 135890 - RNA, 32 nt, Homo Sapiens
uuagggugagcuugcuuuuggcaggccuuccu

SEQ ID NO: 135891 - RNA, 32 nt, Homo Sapiens
ccagggauaggcuacaccacccugcccugacc

SEQ ID NO: 135892 - RNA, 32 nt, Homo Sapiens
cauuuuauuuuuggcauuuuuuacaagauacc

SEQ ID NO: 135893 - RNA, 32 nt, Homo Sapiens
acucccgucaggcugcuuuuaagaaccguaac

SEQ ID NO: 135894 - RNA, 32 nt, Homo Sapiens
accacugccucccagguucaagagauucuccu

SEQ ID NO: 135895 - RNA, 32 nt, Homo Sapiens
ccuaugcacauuggcuugugggcuuguucuuc

SEQ ID NO: 135896 - RNA, 31 nt, Homo Sapiens
ugcauuuugugcucaguuguuuauuguaauu

SEQ ID NO: 135897 - RNA, 32 nt, Homo Sapiens
uggggguuggucgggagaagggugagaggcag

SEQ ID NO: 135898 - RNA, 32 nt, Homo Sapiens
ugcuugaaugucaugaacaggugugcuggggg

SEQ ID NO: 135899 - RNA, 32 nt, Homo Sapiens
ccucucacaccagguuacccagcaaaugaaua

SEQ ID NO: 135900 - RNA, 32 nt, Homo Sapiens
auuauuauuauuauuuacagucauauuacuga

SEQ ID NO: 135901 - RNA, 32 nt, Homo Sapiens
acaagaacaagaaaaaagauuauauugauuuu

SEQ ID NO: 135902 - RNA, 32 nt, Homo Sapiens
gccugcaagcugccuuuuggacaggcuguuga

SEQ ID NO: 135903 - RNA, 32 nt, Homo Sapiens
gccuggauuuaaaacacagccgucuggccagc

SEQ ID NO: 135904 - RNA, 31 nt, Homo Sapiens
uuucaauauuuguguaguucaguuuuucuac

SEQ ID NO: 135905 - RNA, 32 nt, Homo Sapiens
augauucucauugauuaauuugccauauaaca

SEQ ID NO: 135906 - RNA, 32 nt, Homo Sapiens
auuucuugccaauucuaacacugucuagggaa

SEQ ID NO: 135907 - RNA, 32 nt, Homo Sapiens
cgcugcaucggauuuuaacagacauccuggaa

SEQ ID NO: 135908 - RNA, 32 nt, Homo Sapiens
ccaagagguguaccuuuucagaugccauuuua

SEQ ID NO: 135909 - RNA, 32 nt, Homo Sapiens
acggagggacgcggccggcgcccauggcguuc

SEQ ID NO: 135910 - RNA, 32 nt, Homo Sapiens
ucauuaaaauuuggaaacagaguaaugaagaa

SEQ ID NO: 135911 - RNA, 32 nt, Homo Sapiens
cccaccgagccgggcggcuaggaugaugaacc

SEQ ID NO: 135912 - RNA, 32 nt, Homo Sapiens
uuuuuaaagcuagaugacuuugaaaugcuaua

SEQ ID NO: 135913 - RNA, 32 nt, Homo Sapiens
cacugccaucgugggcagaugcagcuuccauc

SEQ ID NO: 135914 - RNA, 32 nt, Homo Sapiens
cagaggggucucuggaggcagacagggugggc

SEQ ID NO: 135915 - RNA, 32 nt, Homo Sapiens
cccauugccgugcauccuggucaagccccccu

SEQ ID NO: 135916 - RNA, 32 nt, Homo Sapiens
acucuuuccagggaaacaucucuucuugauuu

SEQ ID NO: 135917 - RNA, 32 nt, Homo Sapiens
ggguggugucacugcagccggagggagaccuc

SEQ ID NO: 135918 - RNA, 29 nt, Homo Sapiens
gcagaaguauguauguauuuaguucaggu

SEQ ID NO: 135919 - RNA, 32 nt, Homo Sapiens
ucccugagccagcaucuccauccaccaccccg

SEQ ID NO: 135920 - RNA, 31 nt, Homo Sapiens
gcacucucacggagcgagaaccuagcucauc

SEQ ID NO: 135921 - RNA, 32 nt, Homo Sapiens
ggcaagcaggcaucagcuccggcgcuggucuc

SEQ ID NO: 135922 - RNA, 32 nt, Homo Sapiens
agaugagaacuaaaaugccguugaauuuagca

SEQ ID NO: 135923 - RNA, 32 nt, Homo Sapiens
cccuuaaaacaagugagcauugugaaaaggaa

SEQ ID NO: 135924 - RNA, 32 nt, Homo Sapiens
ugaggccgagcgagccgcggggcccgcgcagc

SEQ ID NO: 135925 - RNA, 32 nt, Homo Sapiens
cuuuaauguaaauagagagaugaugaaaaaag

SEQ ID NO: 135926 - RNA, 32 nt, Homo Sapiens
cugugugugcugauggggagcucuacguggcc

SEQ ID NO: 135927 - RNA, 32 nt, Homo Sapiens
guuucaagggaaguaccuaagaagauauagag

SEQ ID NO: 135928 - RNA, 32 nt, Homo Sapiens
gucauccguuaugguccccacagccacagccu

SEQ ID NO: 135929 - RNA, 32 nt, Homo Sapiens
aauuuguuaauuaaauauuucuuaaguauaaa

SEQ ID NO: 135930 - RNA, 32 nt, Homo Sapiens
cgccuguacucccagcacuuugggaggccgag

SEQ ID NO: 135931 - RNA, 32 nt, Homo Sapiens
agccuguaaucccagcacuuugggaggccgag

SEQ ID NO: 135932 - RNA, 32 nt, Homo Sapiens
ugccuguaauccuagcacuuuggguggcugag

SEQ ID NO: 135933 - RNA, 32 nt, Homo Sapiens
cggggcgcggcguggcucucuaggcgcuuaug

SEQ ID NO: 135934 - RNA, 32 nt, Homo Sapiens
ccaagaacccaccaauuccggacacaauacua

SEQ ID NO: 135935 - RNA, 32 nt, Homo Sapiens
aaaacuaaaacguagauuuaaaaaagaacugc

SEQ ID NO: 135936 - RNA, 32 nt, Homo Sapiens
cuuuuagauccucaguagaacaguccagaagc

SEQ ID NO: 135937 - RNA, 32 nt, Homo Sapiens
cugguagauaaaaugaaaaaccacucagguaa

SEQ ID NO: 135938 - RNA, 32 nt, Homo Sapiens
cugacagccaaggaggugguucgguuucugca

SEQ ID NO: 135939 - RNA, 32 nt, Homo Sapiens
ggaugcucugucauguuucucuguaaauuguu

SEQ ID NO: 135940 - RNA, 32 nt, Homo Sapiens
uuacaggcgugagccaccacgcccggcccgua

SEQ ID NO: 135941 - RNA, 32 nt, Homo Sapiens
gcuggugcugacccaccaggaccuccucucug

SEQ ID NO: 135942 - RNA, 32 nt, Homo Sapiens
uuuguagcaggguaaaucguccugucaaaggg

SEQ ID NO: 135943 - RNA, 32 nt, Homo Sapiens
auguaauguguuucuuuauuaacaucacuaga

SEQ ID NO: 135944 - RNA, 32 nt, Homo Sapiens
ugauaauagcuguuucaucauugucuucagga

SEQ ID NO: 135945 - RNA, 32 nt, Homo Sapiens
ccccagacaccuucccugaggacacucaauaa

SEQ ID NO: 135946 - RNA, 32 nt, Homo Sapiens
ggaccugacauggcucugcauccaccaggcuu

SEQ ID NO: 135947 - RNA, 32 nt, Homo Sapiens
aggugcgucuucuaguuuauuccuccugggga

SEQ ID NO: 135948 - RNA, 32 nt, Homo Sapiens
uucaccuaauuuuuauacugaaauguagaugc

SEQ ID NO: 135949 - RNA, 32 nt, Homo Sapiens
uguugugugcccagccccuuuaggggcccaua

SEQ ID NO: 135950 - RNA, 32 nt, Homo Sapiens
gagaaaaagaauccucaguuuauuuuuccacu

SEQ ID NO: 135951 - RNA, 32 nt, Homo Sapiens
aggaugaauuuaauuccuacguacaugcgccc

SEQ ID NO: 135952 - RNA, 32 nt, Homo Sapiens
caugacauguaaucuuuuuuucuugaauucuu

SEQ ID NO: 135953 - RNA, 32 nt, Homo Sapiens
cugagaucgugacaccacuugaguggaauuuu

SEQ ID NO: 135954 - RNA, 32 nt, Homo Sapiens
agagacaaauacuuagaucaagaagaaaaaug

SEQ ID NO: 135955 - RNA, 32 nt, Homo Sapiens
gcgagccccguccuccuucgccgccgcgcaca

SEQ ID NO: 135956 - RNA, 32 nt, Homo Sapiens
ggguuugccauguaggccaggcuggucccaaa

SEQ ID NO: 135957 - RNA, 32 nt, Homo Sapiens
cgggggcagacaccugugcaccccaugaguag

SEQ ID NO: 135958 - RNA, 32 nt, Homo Sapiens
aggcaggcagaucaccugaggucaggaguucg

SEQ ID NO: 135959 - RNA, 32 nt, Homo Sapiens
uuuauaaacuacagcuuagaaaacagaguaag

SEQ ID NO: 135960 - RNA, 32 nt, Homo Sapiens
ucuaaacucugcagagggcgagcggcgcggcc

SEQ ID NO: 135961 - RNA, 32 nt, Homo Sapiens
guaguuuaaguauugucauacaguguucaaaa

SEQ ID NO: 135962 - RNA, 32 nt, Homo Sapiens
guggcccacgggggugcuggaauuggcacuuc

SEQ ID NO: 135963 - RNA, 32 nt, Homo Sapiens
augaagaaaacuaaauauaaggauuauuucca

SEQ ID NO: 135964 - RNA, 32 nt, Homo Sapiens
uuuucuccaagaagguacagauaccucagauu

SEQ ID NO: 135965 - RNA, 32 nt, Homo Sapiens
ccugucaaucugguuuuugucacuauggacuu

SEQ ID NO: 135966 - RNA, 32 nt, Homo Sapiens
agcaccauuaugugacucuucauauaacccuu

SEQ ID NO: 135967 - RNA, 32 nt, Homo Sapiens
uuggucaggcuggucaugaacucgugaccuug

SEQ ID NO: 135968 - RNA, 32 nt, Homo Sapiens
gugauccgcgcgccucggccucccaaagugcu

SEQ ID NO: 135969 - RNA, 32 nt, Homo Sapiens
cuccucaucacagggacgagaugacaguggga

SEQ ID NO: 135970 - RNA, 27 nt, Homo Sapiens
uucucuccuagccucagcccccagcug

SEQ ID NO: 135971 - RNA, 32 nt, Homo Sapiens
uuugggcggcguggagccugcugccaugaagu

SEQ ID NO: 135972 - RNA, 32 nt, Homo Sapiens
cugcuccuuuugcugcuuguuuuuccagaguc

SEQ ID NO: 135973 - RNA, 32 nt, Homo Sapiens
ucuguugcuauggugagcugcaugucuggagg

SEQ ID NO: 135974 - RNA, 32 nt, Homo Sapiens
aacaaagggccaaauagaguuuuuauauuugu

SEQ ID NO: 135975 - RNA, 32 nt, Homo Sapiens
uggguuauauugcaaaugaucuguacuuuagg

SEQ ID NO: 135976 - RNA, 32 nt, Homo Sapiens
ucucucuguggagggaggggcugccuggggua

SEQ ID NO: 135977 - RNA, 32 nt, Homo Sapiens
gggguuuuagacccuugacccuggacauauuc

SEQ ID NO: 135978 - RNA, 32 nt, Homo Sapiens
ccacuauuaggagguaaaaaucaauaaaaugg

SEQ ID NO: 135979 - RNA, 32 nt, Homo Sapiens
cacuuugggaggaggccgagcugggcggaucg

SEQ ID NO: 135980 - RNA, 32 nt, Homo Sapiens
gagggaaggcccucucucuacuccuugacccc

SEQ ID NO: 135981 - RNA, 32 nt, Homo Sapiens
gaugacaaacaaaacuggcaagaucacuaaaa

SEQ ID NO: 135982 - RNA, 32 nt, Homo Sapiens
agauuguauauuuuaaaauacuguuuagaguu

SEQ ID NO: 135983 - RNA, 31 nt, Homo Sapiens
ugcuuuauggauugaaggauaugguaaaaug

SEQ ID NO: 135984 - RNA, 32 nt, Homo Sapiens
gcgcggacucugccagccccagcuucagcccc

SEQ ID NO: 135985 - RNA, 32 nt, Homo Sapiens
cacagagggcauguuaucugcuaaagcaaaca

SEQ ID NO: 135986 - RNA, 32 nt, Homo Sapiens
cccagccggguucgugucgccauggggcagau

SEQ ID NO: 135987 - RNA, 32 nt, Homo Sapiens
acagacaauagaccaaagucccugcccucgag

SEQ ID NO: 135988 - RNA, 32 nt, Homo Sapiens
aggcgccugcuaccacauccagcuaauuuuuu

SEQ ID NO: 135989 - RNA, 32 nt, Homo Sapiens
agacuggaaugggaaacauacaagaacuaagg

SEQ ID NO: 135990 - RNA, 32 nt, Homo Sapiens
uagggaaggaguugaugcuuguccuguguugu

SEQ ID NO: 135991 - RNA, 32 nt, Homo Sapiens
gacgcgccgucucccgggacaagcgcaggcug

SEQ ID NO: 135992 - RNA, 32 nt, Homo Sapiens
gcuacuuccaggagggccugcggcacggauuu

SEQ ID NO: 135993 - RNA, 32 nt, Homo Sapiens
aaauuagcugggugugguggcacaugccugua

SEQ ID NO: 135994 - RNA, 32 nt, Homo Sapiens
uuucuacaugucuguuuucucaucuguaaagu

SEQ ID NO: 135995 - RNA, 32 nt, Homo Sapiens
ucccgggccucccuucuguuuccugggcugca

SEQ ID NO: 135996 - RNA, 32 nt, Homo Sapiens
gugucugagaagccgggagccuggacacaaac

SEQ ID NO: 135997 - RNA, 32 nt, Homo Sapiens
guuucucuucagaacaucuuuuuucauaccac

SEQ ID NO: 135998 - RNA, 32 nt, Homo Sapiens
uaccaguuucuuugucccaccaacuuaaaaaa

SEQ ID NO: 135999 - RNA, 32 nt, Homo Sapiens
aacuaaauaaaauuauuuuacuaucaaaaaaa

SEQ ID NO: 136000 - RNA, 32 nt, Homo Sapiens
augaucuaacaagucagaccuuauuuguucuc

SEQ ID NO: 136001 - RNA, 32 nt, Homo Sapiens
agggcuuugcagccugcagaugccaccugucc

SEQ ID NO: 136002 - RNA, 32 nt, Homo Sapiens
ggcccaagcaggucggcggcggcggcaggaga

SEQ ID NO: 136003 - RNA, 32 nt, Homo Sapiens
caaaaaaaaaacacaaaaaaccacagaaacaa

SEQ ID NO: 136004 - RNA, 32 nt, Homo Sapiens
cuagugcuaaauaaaaacucuaucuucaaaug

SEQ ID NO: 136005 - RNA, 32 nt, Homo Sapiens
uuuuaugcgcaaauacaaaaugauugucuuuu

SEQ ID NO: 136006 - RNA, 32 nt, Homo Sapiens
cuccuucccuugcuaccacggccuccuuuccg

SEQ ID NO: 136007 - RNA, 32 nt, Homo Sapiens
aaaagaaacccaaaggaguguuguguggacau

SEQ ID NO: 136008 - RNA, 32 nt, Homo Sapiens
auaaaaaguggaagugcaaagaguggaccuuc

SEQ ID NO: 136009 - RNA, 32 nt, Homo Sapiens
gaacaagguggggauaaaguagaguggaaaua

SEQ ID NO: 136010 - RNA, 32 nt, Homo Sapiens
ugcccauccccgagucucuggugugucugccc

SEQ ID NO: 136011 - RNA, 32 nt, Homo Sapiens
auuucaauaauuaauucuuaaucauuaagaga

SEQ ID NO: 136012 - RNA, 32 nt, Homo Sapiens
gcuagaggacagagaaagagaauagaaugaaa

SEQ ID NO: 136013 - RNA, 32 nt, Homo Sapiens
uacugacgacgaugcuuuuggccugguuacca

SEQ ID NO: 136014 - RNA, 32 nt, Homo Sapiens
cuagagcagcccuggagucaugccaagcauuu

SEQ ID NO: 136015 - RNA, 32 nt, Homo Sapiens
cuagcccggcuguggcuccaccuccagcucuc

SEQ ID NO: 136016 - RNA, 32 nt, Homo Sapiens
acccgugcaggccccaggagagccgcaggggc

SEQ ID NO: 136017 - RNA, 32 nt, Homo Sapiens
ugggguuucucauauuggucaggcuggucuug

SEQ ID NO: 136018 - RNA, 32 nt, Homo Sapiens
gaccuguagguucaccuauaaaacagggaaau

SEQ ID NO: 136019 - RNA, 32 nt, Homo Sapiens
ccuugggccuugcugcugcugcacccaacuac

SEQ ID NO: 136020 - RNA, 32 nt, Homo Sapiens
ccaugguguuuguuuuuagaaguuuugccagu

SEQ ID NO: 136021 - RNA, 32 nt, Homo Sapiens
ggagacaggaagagacuggugauucaagagag

SEQ ID NO: 136022 - RNA, 32 nt, Homo Sapiens
aaaaauuuuaaauuauuucacauuagccauuu

SEQ ID NO: 136023 - RNA, 32 nt, Homo Sapiens
gauaacaagauuacaaauucacaauaccuaau

SEQ ID NO: 136024 - RNA, 32 nt, Homo Sapiens
uccuccuucacaauuuuugauugcuuugacuu

SEQ ID NO: 136025 - RNA, 32 nt, Homo Sapiens
uaagauacuguaaaauguggaggcagggcaaa

SEQ ID NO: 136026 - RNA, 32 nt, Homo Sapiens
caaagaaccccagaucucaaaccccguccuuc

SEQ ID NO: 136027 - RNA, 32 nt, Homo Sapiens
uuucucaucuucucucuacugccucugaguug

SEQ ID NO: 136028 - RNA, 32 nt, Homo Sapiens
cagauccccccagcucucggccucggacccgg

SEQ ID NO: 136029 - RNA, 32 nt, Homo Sapiens
cugugaaaauuauuauuuuacuuuuggaagac

SEQ ID NO: 136030 - RNA, 32 nt, Homo Sapiens
gcugggcccaacccugucuguagagggcccug

SEQ ID NO: 136031 - RNA, 32 nt, Homo Sapiens
ggaggcggcggcggcccgagggcgacuugcgg

SEQ ID NO: 136032 - RNA, 32 nt, Homo Sapiens
ggauggaggguggcagguggggcgucugcagg

SEQ ID NO: 136033 - RNA, 32 nt, Homo Sapiens
cagcaggccccgguaugugauguuccccuucg

SEQ ID NO: 136034 - RNA, 32 nt, Homo Sapiens
cucugcagggguuuccucuccauccauuuccu

SEQ ID NO: 136035 - RNA, 32 nt, Homo Sapiens
uguuuuggugaccucugaaacucaguacugcg

SEQ ID NO: 136036 - RNA, 32 nt, Homo Sapiens
gcaggcuggacucaggcccccacacaugccca

SEQ ID NO: 136037 - RNA, 32 nt, Homo Sapiens
cugcccaccaaaaugauccagucuggaauaac

SEQ ID NO: 136038 - RNA, 32 nt, Homo Sapiens
gcagugcuguccaugauguaauggaagcuacc

SEQ ID NO: 136039 - RNA, 32 nt, Homo Sapiens
auaucguagucaguaauaagugaggagagaug

SEQ ID NO: 136040 - RNA, 32 nt, Homo Sapiens
uacauuuuuccauuuuaugcucuaugaucuga

SEQ ID NO: 136041 - RNA, 32 nt, Homo Sapiens
ucucggagccugugacacuggcuaugugcucc

SEQ ID NO: 136042 - RNA, 32 nt, Homo Sapiens
aauaaguacugcaugaaaagggaguaucaaau

SEQ ID NO: 136043 - RNA, 32 nt, Homo Sapiens
uuacaggugugagccaccacgcccagccauga

SEQ ID NO: 136044 - RNA, 32 nt, Homo Sapiens
uuuuuuuuuguacagagcuuuuaagcauuaaa

SEQ ID NO: 136045 - RNA, 32 nt, Homo Sapiens
aagaagaugaugaagagggggaguguggugca

SEQ ID NO: 136046 - RNA, 32 nt, Homo Sapiens
guaaacgcagcgugugcccacgcucagcaggu

SEQ ID NO: 136047 - RNA, 32 nt, Homo Sapiens
auaaaugugaugugugugggaaagccuucagu

SEQ ID NO: 136048 - RNA, 32 nt, Homo Sapiens
gcacaggcuguggcuugcacuccagccgcucu

SEQ ID NO: 136049 - RNA, 32 nt, Homo Sapiens
uccucggacagcagcugcacccgcccacccag

SEQ ID NO: 136050 - RNA, 32 nt, Homo Sapiens
gcaagaaagagggagggaaaucuuucaacuua

SEQ ID NO: 136051 - RNA, 32 nt, Homo Sapiens
agaggguaaaguucauacauggcgaccugugu

SEQ ID NO: 136052 - RNA, 32 nt, Homo Sapiens
aacuuuugaaagaucuuugcaguguaauucuu

SEQ ID NO: 136053 - RNA, 32 nt, Homo Sapiens
cgccaccgccugugucgccgccgccucgggac

SEQ ID NO: 136054 - RNA, 32 nt, Homo Sapiens
ugcuggaggacaauuucuccuaguuaccacua

SEQ ID NO: 136055 - RNA, 32 nt, Homo Sapiens
guucaccaagggaaacaaggugguucucacac

SEQ ID NO: 136056 - RNA, 32 nt, Homo Sapiens
ccgaagcucccucaauccuugucugguacuag

SEQ ID NO: 136057 - RNA, 32 nt, Homo Sapiens
gcuuucagacugaguugcaugucacucuuuag

SEQ ID NO: 136058 - RNA, 32 nt, Homo Sapiens
agugcagucaacaugagauugcuaggcauucu

SEQ ID NO: 136059 - RNA, 32 nt, Homo Sapiens
accaaaaggaaucagaauaaggaucacugaga

SEQ ID NO: 136060 - RNA, 32 nt, Homo Sapiens
accuggcgcagggcuccccggccacggcagca

SEQ ID NO: 136061 - RNA, 32 nt, Homo Sapiens
uggagcugaugaaaauguacucuuuuagcgug

SEQ ID NO: 136062 - RNA, 32 nt, Homo Sapiens
caagucugauucccuuucccugucuucccgcu

SEQ ID NO: 136063 - RNA, 32 nt, Homo Sapiens
ucaggcgaccucugcccucccugccucuccuc

SEQ ID NO: 136064 - RNA, 32 nt, Homo Sapiens
uacacuuuucugaaagcuacuccacccuaccc

SEQ ID NO: 136065 - RNA, 32 nt, Homo Sapiens
gcuguaccuaccucacagggcuguugugagga

SEQ ID NO: 136066 - RNA, 32 nt, Homo Sapiens
cugugaagucagcugugcuguuuuccauucgc

SEQ ID NO: 136067 - RNA, 32 nt, Homo Sapiens
augagacugcaggaaauauaagaauauuuuug

SEQ ID NO: 136068 - RNA, 32 nt, Homo Sapiens
gguuuguauguggugggggaauaaacacacuu

SEQ ID NO: 136069 - RNA, 32 nt, Homo Sapiens
cuggccccagggcuaccacugguauuccugag

SEQ ID NO: 136070 - RNA, 29 nt, Homo Sapiens
uucugcuuuuauuucagagacagacaugu

SEQ ID NO: 136071 - RNA, 32 nt, Homo Sapiens
uggcccaccauaauuacccccauacuccuuac

SEQ ID NO: 136072 - RNA, 32 nt, Homo Sapiens
uuuaaauuaagaacugcacuuuauugacuucg

SEQ ID NO: 136073 - RNA, 32 nt, Homo Sapiens
auucucaaaaaaaucuauuacgaaagucaaua

SEQ ID NO: 136074 - RNA, 32 nt, Homo Sapiens
aucacuauuuuuuucuuuuuuaucugguaaau

SEQ ID NO: 136075 - RNA, 32 nt, Homo Sapiens
aaaugucuuggaaagaaaaaguucaucacaga

SEQ ID NO: 136076 - RNA, 32 nt, Homo Sapiens
aagcaaucguagccaucaaucugggcaagagg

SEQ ID NO: 136077 - RNA, 32 nt, Homo Sapiens
agcucuugauuuuauugauuaacaucaaucag

SEQ ID NO: 136078 - RNA, 32 nt, Homo Sapiens
gagacugucaucaucacccuuucauucaucau

SEQ ID NO: 136079 - RNA, 32 nt, Homo Sapiens
aaaguccccuuagugcuggcuuccucuuugca

SEQ ID NO: 136080 - RNA, 32 nt, Homo Sapiens
cugccucccgcgcuccuccccgaggaaaggau

SEQ ID NO: 136081 - RNA, 32 nt, Homo Sapiens
aaguuuccacugugcgggaacucugagucaga

SEQ ID NO: 136082 - RNA, 32 nt, Homo Sapiens
ucaggagauuccaugucuuucucauauuucag

SEQ ID NO: 136083 - RNA, 31 nt, Homo Sapiens
uugaugaaauaaaauaucaauauuuucugca

SEQ ID NO: 136084 - RNA, 32 nt, Homo Sapiens
aagaacaaagagaaaaguaaguuuuguuaaug

SEQ ID NO: 136085 - RNA, 32 nt, Homo Sapiens
augauaaaauauaaaaauaaugucagauccau

SEQ ID NO: 136086 - RNA, 32 nt, Homo Sapiens
caggcagcacaccacccagcagccagagcacc

SEQ ID NO: 136087 - RNA, 32 nt, Homo Sapiens
uccgggguuccuaagccgcggggccccucgcu

SEQ ID NO: 136088 - RNA, 32 nt, Homo Sapiens
uaauuuccugucauuaagauuuauuuuuaaau

SEQ ID NO: 136089 - RNA, 32 nt, Homo Sapiens
auggcaaaaggaacuuuacaagaauaucauga

SEQ ID NO: 136090 - RNA, 32 nt, Homo Sapiens
aagagagaacaguaaaagugagcaauacuucc

SEQ ID NO: 136091 - RNA, 32 nt, Homo Sapiens
gaggugaugagcggcggagacacgcggggcug

SEQ ID NO: 136092 - RNA, 32 nt, Homo Sapiens
aguacauauuuauuuucuuuugaauuguuuuu

SEQ ID NO: 136093 - RNA, 32 nt, Homo Sapiens
uagguauguaucuuuaaguccuugcuugugaa

SEQ ID NO: 136094 - RNA, 32 nt, Homo Sapiens
cacuuuggaugaaccaaggccuuuuccuuauu

SEQ ID NO: 136095 - RNA, 32 nt, Homo Sapiens
ucguggaucaaaacgaggucuuccaguucugc

SEQ ID NO: 136096 - RNA, 32 nt, Homo Sapiens
cuagucuauuugacaaagucuuucuguguugg

SEQ ID NO: 136097 - RNA, 32 nt, Homo Sapiens
ggauucuccucauuccucucuugacuugagaa

SEQ ID NO: 136098 - RNA, 32 nt, Homo Sapiens
cucacauucugagaaacaaaaagaaauaaagu

SEQ ID NO: 136099 - RNA, 32 nt, Homo Sapiens
gacaugguaagugaaagaguguacauaaagua

SEQ ID NO: 136100 - RNA, 32 nt, Homo Sapiens
aaccaggaggaauggaacaggcaauggaaggg

SEQ ID NO: 136101 - RNA, 32 nt, Homo Sapiens
aaaagauagggaaugaagaaugcaaaaugguu

SEQ ID NO: 136102 - RNA, 32 nt, Homo Sapiens
accagucugggcaacauagugagacccuuucc

SEQ ID NO: 136103 - RNA, 32 nt, Homo Sapiens
aguauugacaccuaguccuugcugcauuguac

SEQ ID NO: 136104 - RNA, 32 nt, Homo Sapiens
cgcuccaccccgguccccggcgagcacgcggc

SEQ ID NO: 136105 - RNA, 32 nt, Homo Sapiens
acagacagccccaacacaugcacaugugugua

SEQ ID NO: 136106 - RNA, 32 nt, Homo Sapiens
uaacuugcaaagauguucuaaauacacaugcu

SEQ ID NO: 136107 - RNA, 32 nt, Homo Sapiens
gugaauuucuucauagagcaucugaaauaucu

SEQ ID NO: 136108 - RNA, 32 nt, Homo Sapiens
caugucucuccauuccucuccaacccugccca

SEQ ID NO: 136109 - RNA, 32 nt, Homo Sapiens
uuccuaugcucuuuucaugcuguguuggaggg

SEQ ID NO: 136110 - RNA, 29 nt, Homo Sapiens
caauuaaaagucgugugaaagcuacacag

SEQ ID NO: 136111 - RNA, 32 nt, Homo Sapiens
uuacggugguggcaggagcaaggagagaggga

SEQ ID NO: 136112 - RNA, 32 nt, Homo Sapiens
uguaaugaaugucggcggcgcugggguugcag

SEQ ID NO: 136113 - RNA, 31 nt, Homo Sapiens
gaaggugaagaggucaaaugaguuaaugucu

SEQ ID NO: 136114 - RNA, 32 nt, Homo Sapiens
ggacuguggcugccuccccuccacggccucca

SEQ ID NO: 136115 - RNA, 32 nt, Homo Sapiens
gagggaggcugcacgcucggcccacgggaggg

SEQ ID NO: 136116 - RNA, 32 nt, Homo Sapiens
cucuccccaucccagccucccaugccaaggcc

SEQ ID NO: 136117 - RNA, 32 nt, Homo Sapiens
aaacccuugcaguuuaaucugcucuuggcguc

SEQ ID NO: 136118 - RNA, 32 nt, Homo Sapiens
uugauuggguauauauuucaaaaaugacaugu

SEQ ID NO: 136119 - RNA, 32 nt, Homo Sapiens
ggagagaauuuugagcgcuagccgucucucag

SEQ ID NO: 136120 - RNA, 32 nt, Homo Sapiens
auucuagaggauguaucucacaaguaggauca

SEQ ID NO: 136121 - RNA, 32 nt, Homo Sapiens
uguaguuguaaaacauuauuaauagcagccau

SEQ ID NO: 136122 - RNA, 32 nt, Homo Sapiens
agaaugguauuuuuaauauuuguacacauucu

SEQ ID NO: 136123 - RNA, 32 nt, Homo Sapiens
ccuuucggaaggugaaggauacuggguuuuua

SEQ ID NO: 136124 - RNA, 32 nt, Homo Sapiens
aagggucucaccuuccgcgcaaggcugagcug

SEQ ID NO: 136125 - RNA, 32 nt, Homo Sapiens
uucuauuuuaguugcuaacaaacggcuacaca

SEQ ID NO: 136126 - RNA, 32 nt, Homo Sapiens
auugaaaaguuccaagcuguuacuuaccuuaa

SEQ ID NO: 136127 - RNA, 30 nt, Homo Sapiens
cuacugaauaaaagaaggggguaugcaccc

SEQ ID NO: 136128 - RNA, 32 nt, Homo Sapiens
cacguccuccgccacuuggagagaugagaacc

SEQ ID NO: 136129 - RNA, 32 nt, Homo Sapiens
ccacgcguccgauucugaugccaggaauguuc

SEQ ID NO: 136130 - RNA, 32 nt, Homo Sapiens
cacuuaaccaugaugcaaauguuuuucauuuu

SEQ ID NO: 136131 - RNA, 32 nt, Homo Sapiens
uccggauaccaagacgcaaacacuuucacuuu

SEQ ID NO: 136132 - RNA, 32 nt, Homo Sapiens
agcaaaucccccacccccuaccugggggacag

SEQ ID NO: 136133 - RNA, 32 nt, Homo Sapiens
accagcccgugggcugcccccugccuccccac

SEQ ID NO: 136134 - RNA, 32 nt, Homo Sapiens
uaauucccacuuuggcuguguacaucaaauga

SEQ ID NO: 136135 - RNA, 32 nt, Homo Sapiens
auaugaauuuaaauauaauucuguaaauguga

SEQ ID NO: 136136 - RNA, 32 nt, Homo Sapiens
aggacaagauaccaaggcaaacccuagauugg

SEQ ID NO: 136137 - RNA, 32 nt, Homo Sapiens
uccgucaguuaagggaggcuacgugugaauuu

SEQ ID NO: 136138 - RNA, 32 nt, Homo Sapiens
guaauuaacaguucacaggggucaaauuccuu

SEQ ID NO: 136139 - RNA, 32 nt, Homo Sapiens
gcuggagauuuaugugaucaauuuaucuuaug

SEQ ID NO: 136140 - RNA, 32 nt, Homo Sapiens
cuuugagugucugucuuuguccagguuucaga

SEQ ID NO: 136141 - RNA, 32 nt, Homo Sapiens
uggauuccucaggcccgggcgcuccuacagca

SEQ ID NO: 136142 - RNA, 32 nt, Homo Sapiens
cucuacagccucagccaggggcacucagcugu

SEQ ID NO: 136143 - RNA, 32 nt, Homo Sapiens
accaucacacugggguuucuggaugggaaaua

SEQ ID NO: 136144 - RNA, 32 nt, Homo Sapiens
ggaaaagauaaaauacuuggacuauauuuuaa

SEQ ID NO: 136145 - RNA, 32 nt, Homo Sapiens
agauuccaggugguguuaucuuccaccagaaa

SEQ ID NO: 136146 - RNA, 32 nt, Homo Sapiens
uguuuugccugccaauugaaugauuucguagc

SEQ ID NO: 136147 - RNA, 32 nt, Homo Sapiens
ggucacuguccucgccccgccucccccuuccc

SEQ ID NO: 136148 - RNA, 32 nt, Homo Sapiens
ccaaugagguccagcucugaggcuucuuuccu

SEQ ID NO: 136149 - RNA, 32 nt, Homo Sapiens
aguaauaaaaauuuuaucacgaaaaaaaaaaa

SEQ ID NO: 136150 - RNA, 32 nt, Homo Sapiens
uucauuuuuuuuucuuuuuuaagagcgagcgg

SEQ ID NO: 136151 - RNA, 32 nt, Homo Sapiens
ugagaaauagagacgugucaacagaugcauuc

SEQ ID NO: 136152 - RNA, 32 nt, Homo Sapiens
acgccagacaccuuuugaaagcuaauuuuugg

SEQ ID NO: 136153 - RNA, 31 nt, Homo Sapiens
acuucugacccacagaaccauaagaugguaa

SEQ ID NO: 136154 - RNA, 32 nt, Homo Sapiens
ugaagauauggacauuucuggaauuaagagcc

SEQ ID NO: 136155 - RNA, 32 nt, Homo Sapiens
aggcuggcucugccugcgccucacucucuccu

SEQ ID NO: 136156 - RNA, 32 nt, Homo Sapiens
aggggcgcuaggguuugaggccugcuuucugc

SEQ ID NO: 136157 - RNA, 32 nt, Homo Sapiens
ggguugggcuccgccccggcgccgcagcuccc

SEQ ID NO: 136158 - RNA, 32 nt, Homo Sapiens
acccucaaacauuccggacuccccucauaaca

SEQ ID NO: 136159 - RNA, 32 nt, Homo Sapiens
auuccccggccgcccaggcgcggggagaguga

SEQ ID NO: 136160 - RNA, 32 nt, Homo Sapiens
augggcuggggaaagacacaccccucucuaug

SEQ ID NO: 136161 - RNA, 32 nt, Homo Sapiens
uuuguacagaacaaaauaauauguagcagcuu

SEQ ID NO: 136162 - RNA, 30 nt, Homo Sapiens
ucuuucucugccugaggggaaacugaagcu

SEQ ID NO: 136163 - RNA, 32 nt, Homo Sapiens
gggggcugugucugcugggagguggcuuggau

SEQ ID NO: 136164 - RNA, 32 nt, Homo Sapiens
ugcuaucuauagauucaguaucuacuacccau

SEQ ID NO: 136165 - RNA, 32 nt, Homo Sapiens
ugaagauaauaggauuaagagauuaaagacag

SEQ ID NO: 136166 - RNA, 32 nt, Homo Sapiens
caacuucucugccccagggacccgaggccacc

SEQ ID NO: 136167 - RNA, 32 nt, Homo Sapiens
ugccuguccggggcucgggggguggggggagc

SEQ ID NO: 136168 - RNA, 32 nt, Homo Sapiens
cucucugggccuuuccucucccuuuacugaga

SEQ ID NO: 136169 - RNA, 32 nt, Homo Sapiens
gaagugaggaccagggaugcugugcugcucuc

SEQ ID NO: 136170 - RNA, 32 nt, Homo Sapiens
gggagcgugggcucagcagggcuggucaccuc

SEQ ID NO: 136171 - RNA, 32 nt, Homo Sapiens
cuccuguccuccccgggguuuuugcagacucg

SEQ ID NO: 136172 - RNA, 32 nt, Homo Sapiens
aggagugggcaacuugccaagcccuuaacucu

SEQ ID NO: 136173 - RNA, 32 nt, Homo Sapiens
cucugcuacaaauuaaagaaauccuaaaaguu

SEQ ID NO: 136174 - RNA, 32 nt, Homo Sapiens
cugaggucaggaguuugagaccagccuagaca

SEQ ID NO: 136175 - RNA, 32 nt, Homo Sapiens
agaagccuuggggacaggaaaagcaugaccag

SEQ ID NO: 136176 - RNA, 32 nt, Homo Sapiens
ucagccguggcaucggacuugcagcuucauuu

SEQ ID NO: 136177 - RNA, 32 nt, Homo Sapiens
ccagccagaaaagugguaagcggagcaagugc

SEQ ID NO: 136178 - RNA, 32 nt, Homo Sapiens
uuccgcgcccgugacgcggggccugagagacg

SEQ ID NO: 136179 - RNA, 32 nt, Homo Sapiens
gggcagcggccgcguggagaggagguggcagc

SEQ ID NO: 136180 - RNA, 32 nt, Homo Sapiens
agaguuuguuuccucagcagcccaugagagcu

SEQ ID NO: 136181 - RNA, 32 nt, Homo Sapiens
ugagggggcuccugcugugcugcugagccgca

SEQ ID NO: 136182 - RNA, 32 nt, Homo Sapiens
cucuuugaaagcuggucaggaaugggagaagu

SEQ ID NO: 136183 - RNA, 32 nt, Homo Sapiens
ccucuuguacccuccucucccucccccagugg

SEQ ID NO: 136184 - RNA, 32 nt, Homo Sapiens
cuuuacaggggagaauuucauauuuuaccuga

SEQ ID NO: 136185 - RNA, 32 nt, Homo Sapiens
ucauaauguuaagggagaugcuaguguguggc

SEQ ID NO: 136186 - RNA, 32 nt, Homo Sapiens
uucucucuggaagacuuauuccaguugcuuuc

SEQ ID NO: 136187 - RNA, 32 nt, Homo Sapiens
ccggguucggagccguuccggaugcuuuaggc

SEQ ID NO: 136188 - RNA, 32 nt, Homo Sapiens
cuggauuggggauggggacaaagaaauagcaa

SEQ ID NO: 136189 - RNA, 32 nt, Homo Sapiens
gcuacaaauauuaaaggaggagaaaagguaau

SEQ ID NO: 136190 - RNA, 32 nt, Homo Sapiens
gaccgcucaagggguuauucuaccucagccuc

SEQ ID NO: 136191 - RNA, 32 nt, Homo Sapiens
caggccgagcgcggggcgccggaggcaggugu

SEQ ID NO: 136192 - RNA, 32 nt, Homo Sapiens
aaaaauaauguuuugguugauucuguauuuga

SEQ ID NO: 136193 - RNA, 32 nt, Homo Sapiens
gucaucugggggaaaaccuguuuaucacucca

SEQ ID NO: 136194 - RNA, 32 nt, Homo Sapiens
cgccuuucguuugcacuauuggaccauuaucu

SEQ ID NO: 136195 - RNA, 32 nt, Homo Sapiens
gauuaucacaccccaaaugcauaaucucguua

SEQ ID NO: 136196 - RNA, 32 nt, Homo Sapiens
cgauaggcuuauauucaaaacaucuuagucau

SEQ ID NO: 136197 - RNA, 32 nt, Homo Sapiens
guagcaaacauuucuguaaauuaucacaagcu

SEQ ID NO: 136198 - RNA, 32 nt, Homo Sapiens
guguacaauuuaauggcuuucaguaaauucac

SEQ ID NO: 136199 - RNA, 32 nt, Homo Sapiens
acagaggacuagaugauucuacuugaagcaaa

SEQ ID NO: 136200 - RNA, 31 nt, Homo Sapiens
cacuugccucccugccugcuucuggccgccu

SEQ ID NO: 136201 - RNA, 32 nt, Homo Sapiens
cccugggcagaccagcaggcagacccuguccc

SEQ ID NO: 136202 - RNA, 32 nt, Homo Sapiens
uucuagggaugcucugcgugugucucagcacc

SEQ ID NO: 136203 - RNA, 32 nt, Homo Sapiens
gauucauuuuuaguaguuuuagccccuuaaua

SEQ ID NO: 136204 - RNA, 32 nt, Homo Sapiens
auacaguguggacuuuaguuaauauaaaugag

SEQ ID NO: 136205 - RNA, 32 nt, Homo Sapiens
cuggcuggagggucggggaggggcuggcagag

SEQ ID NO: 136206 - RNA, 32 nt, Homo Sapiens
agagcccugcgcccgcgccuccccuugcgcac

SEQ ID NO: 136207 - RNA, 32 nt, Homo Sapiens
gaagucaggcuuuccacagagagacgggacua

SEQ ID NO: 136208 - RNA, 32 nt, Homo Sapiens
guagacuguuggagaugucccgggccaauuuc

SEQ ID NO: 136209 - RNA, 32 nt, Homo Sapiens
cccgcagcggccaagcucauggccggcugagc

SEQ ID NO: 136210 - RNA, 32 nt, Homo Sapiens
uucucuauugguuuuucaauauauuuuucugu

SEQ ID NO: 136211 - RNA, 32 nt, Homo Sapiens
gaagggaaagggcuuuggggucagguggcagc

SEQ ID NO: 136212 - RNA, 32 nt, Homo Sapiens
auugaacaucucuauuuggccaucuccuucag

SEQ ID NO: 136213 - RNA, 32 nt, Homo Sapiens
gaagaaggaugaugaugaugaggagauaggag

SEQ ID NO: 136214 - RNA, 32 nt, Homo Sapiens
gaguucaggaccagccuggccaauauggugaa

SEQ ID NO: 136215 - RNA, 32 nt, Homo Sapiens
auuauguaagaagauagcacagauaucgggau

SEQ ID NO: 136216 - RNA, 32 nt, Homo Sapiens
agcuuccggagacugcucuccucaccacacag

SEQ ID NO: 136217 - RNA, 28 nt, Homo Sapiens
aggcaguuguaaagaauguguuuauaua

SEQ ID NO: 136218 - RNA, 32 nt, Homo Sapiens
uagagaggguggcaggccugcugcuggacccc

SEQ ID NO: 136219 - RNA, 32 nt, Homo Sapiens
auccugaguccagaaugguacacaauguguuu

SEQ ID NO: 136220 - RNA, 32 nt, Homo Sapiens
ggcccuuugucuuuuucaccaugcuuugggca

SEQ ID NO: 136221 - RNA, 32 nt, Homo Sapiens
cggaagagcuguuuccuccccccaccuuuugu

SEQ ID NO: 136222 - RNA, 31 nt, Homo Sapiens
aggaaggagccccuuagaggacaggccugca

SEQ ID NO: 136223 - RNA, 32 nt, Homo Sapiens
aggcaggaaaauuuauugaaccugggaggcgg

SEQ ID NO: 136224 - RNA, 32 nt, Homo Sapiens
uggcuccccagucuccucuccugaucuccucc

SEQ ID NO: 136225 - RNA, 32 nt, Homo Sapiens
cuggguccagaccaggcucgcugcucucuggg

SEQ ID NO: 136226 - RNA, 32 nt, Homo Sapiens
aagacucgguugcugcagacccccagaaggaa

SEQ ID NO: 136227 - RNA, 32 nt, Homo Sapiens
ggcggcggcggccugcccccucugcgggaagc

SEQ ID NO: 136228 - RNA, 32 nt, Homo Sapiens
aucggccucacagacucagagcgugaaaauga

SEQ ID NO: 136229 - RNA, 32 nt, Homo Sapiens
agggguauuauuacauauuaucagugaaauac

SEQ ID NO: 136230 - RNA, 32 nt, Homo Sapiens
ucugaggggagacugaggaagggcagagccag

SEQ ID NO: 136231 - RNA, 32 nt, Homo Sapiens
gucuacaacgugcuccuugguuugcucucaag

SEQ ID NO: 136232 - RNA, 32 nt, Homo Sapiens
caccgugacgcccaccgccaucggagacagca

SEQ ID NO: 136233 - RNA, 32 nt, Homo Sapiens
gccaugaagaucucugacauggugcugagacg

SEQ ID NO: 136234 - RNA, 32 nt, Homo Sapiens
uacaggcgcaugccaccacaccuggcuaguuu

SEQ ID NO: 136235 - RNA, 32 nt, Homo Sapiens
ccuguggcgucccacccgccuccaacggguca

SEQ ID NO: 136236 - RNA, 32 nt, Homo Sapiens
ucagggcagcucuuucugggguguuuuaaauc

SEQ ID NO: 136237 - RNA, 32 nt, Homo Sapiens
cgugcuuuuguacagaccuuuguaacaagugu

SEQ ID NO: 136238 - RNA, 32 nt, Homo Sapiens
guuucuuuuguaguuuuaaccaaaaaagugcc

SEQ ID NO: 136239 - RNA, 32 nt, Homo Sapiens
gggguguacagcuauggacugaugcaucccau

SEQ ID NO: 136240 - RNA, 31 nt, Homo Sapiens
ccuuguggggcgguggggccugaccucaccu

SEQ ID NO: 136241 - RNA, 32 nt, Homo Sapiens
gcacucgggugcgcuccggcguccggugugug

SEQ ID NO: 136242 - RNA, 32 nt, Homo Sapiens
cgcugaggggcguucgggcgccaccgagcagc

SEQ ID NO: 136243 - RNA, 31 nt, Homo Sapiens
gguugcagugagcugagaucgagccacugca

SEQ ID NO: 136244 - RNA, 30 nt, Homo Sapiens
uauuuuucuacuuggggggaaaaaaguccu

SEQ ID NO: 136245 - RNA, 32 nt, Homo Sapiens
cuccaggcugcugggcagcugggcagagcucu

SEQ ID NO: 136246 - RNA, 32 nt, Homo Sapiens
uguguggaaguugagacuaagaauaauccuag

SEQ ID NO: 136247 - RNA, 32 nt, Homo Sapiens
cucccacagcccagccagagacaagggaccug

SEQ ID NO: 136248 - RNA, 32 nt, Homo Sapiens
ggcugaccaaaggcuuuucuaauuuuuguuac

SEQ ID NO: 136249 - RNA, 32 nt, Homo Sapiens
uauaaaaaacaaaaaccuuaccgguaguaaua

SEQ ID NO: 136250 - RNA, 32 nt, Homo Sapiens
cggggaagugauuuauuggggguguacacugg

SEQ ID NO: 136251 - RNA, 32 nt, Homo Sapiens
cagggugacaaggccugcuugacuuuccagaa

SEQ ID NO: 136252 - RNA, 32 nt, Homo Sapiens
gccuugcucaggugacuguucuuccagaccag

SEQ ID NO: 136253 - RNA, 32 nt, Homo Sapiens
uugacugugagaauuagauaaacuauagucau

SEQ ID NO: 136254 - RNA, 32 nt, Homo Sapiens
caaauuuggacauuuuaauuguuuaaaaauug

SEQ ID NO: 136255 - RNA, 30 nt, Homo Sapiens
ucgacauggcggugcagccgaaggagacgc

SEQ ID NO: 136256 - RNA, 32 nt, Homo Sapiens
ccgccuuugaacaaucaugcuucagaaaucug

SEQ ID NO: 136257 - RNA, 32 nt, Homo Sapiens
cagcguucuugggugggcgcgggcggcgucuc

SEQ ID NO: 136258 - RNA, 26 nt, Homo Sapiens
cauggaggccaccggggugcugccgu

SEQ ID NO: 136259 - RNA, 32 nt, Homo Sapiens
caagaaauacucaaagcuguagaucagaagcu

SEQ ID NO: 136260 - RNA, 32 nt, Homo Sapiens
auguuuuaaagguucauccauguaucaaacag

SEQ ID NO: 136261 - RNA, 32 nt, Homo Sapiens
gcuuaaauauuaugaaauguacuuagucaacu

SEQ ID NO: 136262 - RNA, 32 nt, Homo Sapiens
guuguggcaguggagaccugggggguggccag

SEQ ID NO: 136263 - RNA, 32 nt, Homo Sapiens
cucagcggggacccgggcucagggacgcggcg

SEQ ID NO: 136264 - RNA, 32 nt, Homo Sapiens
ucaggucucgggcgcgggaggggguggcggag

SEQ ID NO: 136265 - RNA, 32 nt, Homo Sapiens
cucuguuccgcggaggcacgcccccucccguc

SEQ ID NO: 136266 - RNA, 32 nt, Homo Sapiens
ggucucccaaaccagccacucccuucccauga

SEQ ID NO: 136267 - RNA, 32 nt, Homo Sapiens
ggcuggaccccgcguuccuccucccugccggu

SEQ ID NO: 136268 - RNA, 31 nt, Homo Sapiens
agccuaugucagcucucuccaagggcacugg

SEQ ID NO: 136269 - RNA, 32 nt, Homo Sapiens
aagcugagcguggcucccggugagaggacccc

SEQ ID NO: 136270 - RNA, 32 nt, Homo Sapiens
uuuuaggaauuugcuucccacccagugcccug

SEQ ID NO: 136271 - RNA, 32 nt, Homo Sapiens
guaacuuuccccagguaacucaguaaacagug

SEQ ID NO: 136272 - RNA, 32 nt, Homo Sapiens
gggagcaggacaccucaccugaguuucauuuu

SEQ ID NO: 136273 - RNA, 32 nt, Homo Sapiens
aacuuagaaugauaucuagaaaauauuuauuu

SEQ ID NO: 136274 - RNA, 32 nt, Homo Sapiens
caguuucugugccauugcuggugcugguggag

SEQ ID NO: 136275 - RNA, 32 nt, Homo Sapiens
caaagcuagaaaaggaggaggaagaaacugac

SEQ ID NO: 136276 - RNA, 32 nt, Homo Sapiens
agccugaccaacauggagaaaccccgucucua

SEQ ID NO: 136277 - RNA, 32 nt, Homo Sapiens
ugccugaccaacauggugaaaccccgucucua

SEQ ID NO: 136278 - RNA, 32 nt, Homo Sapiens
cuggugcaaggacuucuguuccaaaggcuggg

SEQ ID NO: 136279 - RNA, 32 nt, Homo Sapiens
cucaucuauauuaaaugcuggugcugaguuaa

SEQ ID NO: 136280 - RNA, 32 nt, Homo Sapiens
cucccugcccuucuuccugcccuuccucugaa

SEQ ID NO: 136281 - RNA, 32 nt, Homo Sapiens
gugggguuggagcccccauggggcccgcuggg

SEQ ID NO: 136282 - RNA, 32 nt, Homo Sapiens
ucccagccuggcugaagcggggccccccacgg

SEQ ID NO: 136283 - RNA, 32 nt, Homo Sapiens
cuagauucacuuuaacgcuuaaugccuucaaa

SEQ ID NO: 136284 - RNA, 32 nt, Homo Sapiens
gagugagugaguuguggccagcccuauacccc

SEQ ID NO: 136285 - RNA, 32 nt, Homo Sapiens
cgcuccuuggcggugccuggagcccgggcgca

SEQ ID NO: 136286 - RNA, 32 nt, Homo Sapiens
cuggagcccuggagaccccaccagccucacca

SEQ ID NO: 136287 - RNA, 32 nt, Homo Sapiens
uuggauauggcggggggagggcugggacuguu

SEQ ID NO: 136288 - RNA, 32 nt, Homo Sapiens
ucgaucucauuuccacaaaggauaugaagcgu

SEQ ID NO: 136289 - RNA, 27 nt, Homo Sapiens
ggaugucugcccguggcccggcuaucg

SEQ ID NO: 136290 - RNA, 32 nt, Homo Sapiens
ggcaggccaggagaggugugggaaggaucuga

SEQ ID NO: 136291 - RNA, 32 nt, Homo Sapiens
augucauugucuaugacagcgucaagacugcc

SEQ ID NO: 136292 - RNA, 32 nt, Homo Sapiens
cuaauaaauauguauauuuuuugagauggagu

SEQ ID NO: 136293 - RNA, 32 nt, Homo Sapiens
accagggggagcuucggcagggccugcagaga

SEQ ID NO: 136294 - RNA, 32 nt, Homo Sapiens
gaaccaaaauggugguuuauccuuguaucucu

SEQ ID NO: 136295 - RNA, 32 nt, Homo Sapiens
guucauugcucaacaagaacgauucaccuggg

SEQ ID NO: 136296 - RNA, 32 nt, Homo Sapiens
uugaugccacaauaaacuugauuuuucuuuac

SEQ ID NO: 136297 - RNA, 32 nt, Homo Sapiens
acagggcagagcaggucuggggccugaggcag

SEQ ID NO: 136298 - RNA, 32 nt, Homo Sapiens
aggcuaagugagcaccagcagcuccuggccca

SEQ ID NO: 136299 - RNA, 32 nt, Homo Sapiens
uuagaauagugucaguuauuucuuaaguaacu

SEQ ID NO: 136300 - RNA, 32 nt, Homo Sapiens
cugccaucgggcuccuugcggcugggauccug

SEQ ID NO: 136301 - RNA, 32 nt, Homo Sapiens
acgcccagcuagcucucgccucacugcggcuu

SEQ ID NO: 136302 - RNA, 32 nt, Homo Sapiens
cagccgagggaccgccggcagccuccaaaacc

SEQ ID NO: 136303 - RNA, 32 nt, Homo Sapiens
caggacagaaaagauuuauggggauuuuaaaa

SEQ ID NO: 136304 - RNA, 32 nt, Homo Sapiens
gugaugggggacgagggccaggcacccacauc

SEQ ID NO: 136305 - RNA, 32 nt, Homo Sapiens
ccugcgcccucccucccuccacaccuccaccc

SEQ ID NO: 136306 - RNA, 32 nt, Homo Sapiens
gugcuccagucuguccccuccuccuccacucu

SEQ ID NO: 136307 - RNA, 32 nt, Homo Sapiens
aguucaaauuaauguauuauagaaguuaugag

SEQ ID NO: 136308 - RNA, 32 nt, Homo Sapiens
aacuauuaaggacuuucuuuuuuuaauguugu

SEQ ID NO: 136309 - RNA, 32 nt, Homo Sapiens
cgcauggaggccuggggcggcccagaggagcu

SEQ ID NO: 136310 - RNA, 32 nt, Homo Sapiens
guuucccccgugucgcguuuccccugugcagg

SEQ ID NO: 136311 - RNA, 32 nt, Homo Sapiens
cccgucgcccucggggcucccgccggaacucc

SEQ ID NO: 136312 - RNA, 32 nt, Homo Sapiens
acaagcugccuuguuuagccugcuuuacauug

SEQ ID NO: 136313 - RNA, 32 nt, Homo Sapiens
uggagaaucuagcaauaagauucaaagcuaau

SEQ ID NO: 136314 - RNA, 32 nt, Homo Sapiens
gguccggcucugcgucucccucucugcagccu

SEQ ID NO: 136315 - RNA, 32 nt, Homo Sapiens
gggaggccgagauggguggaucaugaggucag

SEQ ID NO: 136316 - RNA, 32 nt, Homo Sapiens
cugcaucuuccuccugccacagauggaggccc

SEQ ID NO: 136317 - RNA, 32 nt, Homo Sapiens
ugguggcucacgccuguaaucccggcaguuug

SEQ ID NO: 136318 - RNA, 32 nt, Homo Sapiens
acuauuugggcgggcuggcucuuuugcagcuu

SEQ ID NO: 136319 - RNA, 32 nt, Homo Sapiens
aaauuaaaauauuauuugauaucugaaaaaaa

SEQ ID NO: 136320 - RNA, 32 nt, Homo Sapiens
cucugggacggcaugagaaaggcagaaaggga

SEQ ID NO: 136321 - RNA, 32 nt, Homo Sapiens
cuguccuggugcccagcccaacgugguccaag

SEQ ID NO: 136322 - RNA, 32 nt, Homo Sapiens
cguuggggcuggaaguucccgccagguccgug

SEQ ID NO: 136323 - RNA, 27 nt, Homo Sapiens
cgcagagacccucucagcccccaccuc

SEQ ID NO: 136324 - RNA, 32 nt, Homo Sapiens
aaaaaguuuagaauggaagaacaaagaaaacc

SEQ ID NO: 136325 - RNA, 32 nt, Homo Sapiens
acaaggugucucaucugaaaagaaaccugagc

SEQ ID NO: 136326 - RNA, 32 nt, Homo Sapiens
acauuaucugauguucccauggagagauuaga

SEQ ID NO: 136327 - RNA, 32 nt, Homo Sapiens
ccugcguuaauuuuuuuuuuuaauaauuuuca

SEQ ID NO: 136328 - RNA, 32 nt, Homo Sapiens
aauucucccuguuuccuucucugcccccagag

SEQ ID NO: 136329 - RNA, 32 nt, Homo Sapiens
ccuuuguuacagcugggaaagaacaguucugu

SEQ ID NO: 136330 - RNA, 32 nt, Homo Sapiens
ggacaggggagaaacgaaaaccacaaaaagaa

SEQ ID NO: 136331 - RNA, 27 nt, Homo Sapiens
acugucccugcuuucugguauaaagcu

SEQ ID NO: 136332 - RNA, 32 nt, Homo Sapiens
cggcaaggccuucagcuggaacuccaauuucc

SEQ ID NO: 136333 - RNA, 31 nt, Homo Sapiens
ucugcccuguuguucagcagugaugaggagg

SEQ ID NO: 136334 - RNA, 32 nt, Homo Sapiens
acaggaaaaugaacuuaaucaagagagacugu

SEQ ID NO: 136335 - RNA, 32 nt, Homo Sapiens
uugugagacagaaccaaguaaaaggaaacaug

SEQ ID NO: 136336 - RNA, 32 nt, Homo Sapiens
gcugcucuacgcccugcuggcggcgcugugcu

SEQ ID NO: 136337 - RNA, 32 nt, Homo Sapiens
augccuuuguaucucuccaugucacgcgcucc

SEQ ID NO: 136338 - RNA, 32 nt, Homo Sapiens
aaacacaguauuuauuuuuuuaccuccuuuaa

SEQ ID NO: 136339 - RNA, 32 nt, Homo Sapiens
acuuaguacugacuugcacugaggccaggaaa

SEQ ID NO: 136340 - RNA, 32 nt, Homo Sapiens
gaagggguaaaaaaacagcaucagagugcaac

SEQ ID NO: 136341 - RNA, 32 nt, Homo Sapiens
uacguuguccuuuuucacuuugaaaaguugga

SEQ ID NO: 136342 - RNA, 32 nt, Homo Sapiens
aaaguaaugcugugcugcauuauuuaagacua

SEQ ID NO: 136343 - RNA, 32 nt, Homo Sapiens
uguugaaacuuacacuguuucaucucagcuuu

SEQ ID NO: 136344 - RNA, 32 nt, Homo Sapiens
guccguaauaguuuccucuccccucccuucua

SEQ ID NO: 136345 - RNA, 32 nt, Homo Sapiens
uguacuucuagugccccugcagaugggcagag

SEQ ID NO: 136346 - RNA, 32 nt, Homo Sapiens
ugaggagcacacuguagacagcugcaucagug

SEQ ID NO: 136347 - RNA, 32 nt, Homo Sapiens
gaauauuuggcuuuucucacuuucucuguaga

SEQ ID NO: 136348 - RNA, 32 nt, Homo Sapiens
ugggauucaugauauuugauauauucguaagc

SEQ ID NO: 136349 - RNA, 32 nt, Homo Sapiens
uccccucacagugggcgacagaucugaaguga

SEQ ID NO: 136350 - RNA, 32 nt, Homo Sapiens
ucuuuuccuggucauuggguggggcugagugc

SEQ ID NO: 136351 - RNA, 32 nt, Homo Sapiens
ugcuuacgcgcgcugcggauuguugcuccguu

SEQ ID NO: 136352 - RNA, 32 nt, Homo Sapiens
cacggaggcuguuuccucuccggggccuccag

SEQ ID NO: 136353 - RNA, 32 nt, Homo Sapiens
ggcucagucaguauauauuuugaaagauucau

SEQ ID NO: 136354 - RNA, 32 nt, Homo Sapiens
cucucggccgaggugcgccgccgucagugccu

SEQ ID NO: 136355 - RNA, 32 nt, Homo Sapiens
ucuugaagaacaaaaagaaagccgggcaugac

SEQ ID NO: 136356 - RNA, 32 nt, Homo Sapiens
ccuggaacgaggaaucuggugcccugaaaggc

SEQ ID NO: 136357 - RNA, 32 nt, Homo Sapiens
caguuguucaggcugugcacugcacaagggca

SEQ ID NO: 136358 - RNA, 32 nt, Homo Sapiens
ugccuguagucccagcacuuugggaggccgag

SEQ ID NO: 136359 - RNA, 32 nt, Homo Sapiens
ugccuauagucccagcacuuugggaggccaag

SEQ ID NO: 136360 - RNA, 32 nt, Homo Sapiens
ucuucuguucucuggagaaggcaggaggaaag

SEQ ID NO: 136361 - RNA, 32 nt, Homo Sapiens
agccucucuguccaaugcugccuggacauuua

SEQ ID NO: 136362 - RNA, 32 nt, Homo Sapiens
caagagugaaacugucucaaaaaacaacuuuu

SEQ ID NO: 136363 - RNA, 32 nt, Homo Sapiens
ggucaggcaccugcagaggagccccgccgcuc

SEQ ID NO: 136364 - RNA, 32 nt, Homo Sapiens
gccuguccccaacuccuccccaccccuccccc

SEQ ID NO: 136365 - RNA, 32 nt, Homo Sapiens
gccccaucuccagccugauccucugaaucuuc

SEQ ID NO: 136366 - RNA, 32 nt, Homo Sapiens
agagcaaaccaucaagcaguaauugacauuaa

SEQ ID NO: 136367 - RNA, 32 nt, Homo Sapiens
auucaugccaaagcaaaagaaguaaaagcuaa

SEQ ID NO: 136368 - RNA, 30 nt, Homo Sapiens
cuggguguuucugcugcagguggcaggugg

SEQ ID NO: 136369 - RNA, 32 nt, Homo Sapiens
cuggcuaaaaauuuuuaauuggauguguuugg

SEQ ID NO: 136370 - RNA, 32 nt, Homo Sapiens
uuuuugguaccaaaccugaggucuuuuggaag

SEQ ID NO: 136371 - RNA, 32 nt, Homo Sapiens
cagugcccgccuuagaggugcgcuuauuugau

SEQ ID NO: 136372 - RNA, 32 nt, Homo Sapiens
gggguggcccuggcgugcgggcggcgacaugg

SEQ ID NO: 136373 - RNA, 32 nt, Homo Sapiens
uucaaugguugcaccuuaugccuugagggaaa

SEQ ID NO: 136374 - RNA, 32 nt, Homo Sapiens
cuauuaaaccaucauugacuauggaaauacuu

SEQ ID NO: 136375 - RNA, 32 nt, Homo Sapiens
cugccacuucgccgcugccccggagacuuuuc

SEQ ID NO: 136376 - RNA, 28 nt, Homo Sapiens
gauuuguaugacugaauguguuucaaau

SEQ ID NO: 136377 - RNA, 32 nt, Homo Sapiens
ugguaucguggaguuuuaaaagaucaaguuag

SEQ ID NO: 136378 - RNA, 32 nt, Homo Sapiens
aauggagaaaaguuuucagaaaacugcuaugu

SEQ ID NO: 136379 - RNA, 32 nt, Homo Sapiens
uuugguagucauccucuguccaaauauuguau

SEQ ID NO: 136380 - RNA, 32 nt, Homo Sapiens
ucccagugacgcccgagaucuuucuccagaug

SEQ ID NO: 136381 - RNA, 32 nt, Homo Sapiens
guggugcucgccucgcagcugcgcccgccggc

SEQ ID NO: 136382 - RNA, 32 nt, Homo Sapiens
acagugugagaaaaccccccugaggguugggu

SEQ ID NO: 136383 - RNA, 32 nt, Homo Sapiens
gggccgcgcgggcuccaguccaccccguuucu

SEQ ID NO: 136384 - RNA, 32 nt, Homo Sapiens
uugcaaauuguacacaaacaaacaaaaaggug

SEQ ID NO: 136385 - RNA, 32 nt, Homo Sapiens
aggccaagagccccaaacucaggcugccccga

SEQ ID NO: 136386 - RNA, 32 nt, Homo Sapiens
uucuucuaagagauaaauugauauaucauuca

SEQ ID NO: 136387 - RNA, 30 nt, Homo Sapiens
uuguuugucuguggcaauucuuagcuuuau

SEQ ID NO: 136388 - RNA, 32 nt, Homo Sapiens
uggcacucuguuagggugcuguagaagacuag

SEQ ID NO: 136389 - RNA, 32 nt, Homo Sapiens
uuugcuucuuaagaccacuccucccuccagaa

SEQ ID NO: 136390 - RNA, 32 nt, Homo Sapiens
cauuugucuauuauuggauuucauuaucauau

SEQ ID NO: 136391 - RNA, 32 nt, Homo Sapiens
gagaaggcgcggggcgggcuguccggcccgca

SEQ ID NO: 136392 - RNA, 32 nt, Homo Sapiens
caucuguaauccccgcacuuugugaggcugaa

SEQ ID NO: 136393 - RNA, 32 nt, Homo Sapiens
ucuggcccaggcggggggcggggccagcacga

SEQ ID NO: 136394 - RNA, 32 nt, Homo Sapiens
gaaggaaaacaucagaaugguguaucuagaau

SEQ ID NO: 136395 - RNA, 32 nt, Homo Sapiens
uuuucaggucuauuugaacagaguccaagucu

SEQ ID NO: 136396 - RNA, 32 nt, Homo Sapiens
cuuugagaaaaucaguccuuuuuuauguuuaa

SEQ ID NO: 136397 - RNA, 32 nt, Homo Sapiens
uugguuggagagcugaacaggcugggacugag

SEQ ID NO: 136398 - RNA, 32 nt, Homo Sapiens
caaguuuuaguggaaaauaaaaucacacucua

SEQ ID NO: 136399 - RNA, 32 nt, Homo Sapiens
uuaauggauaacaauuucuuuacugcucaaaa

SEQ ID NO: 136400 - RNA, 32 nt, Homo Sapiens
ggacuagguuugugcaggaaggugaugcccac

SEQ ID NO: 136401 - RNA, 32 nt, Homo Sapiens
aauuggacauuguagaagguauguaaaucauc

SEQ ID NO: 136402 - RNA, 32 nt, Homo Sapiens
ccucugcuccagggcuggccucugcagagcug

SEQ ID NO: 136403 - RNA, 32 nt, Homo Sapiens
agagcauaaaaccuaaagguuauaguagaaca

SEQ ID NO: 136404 - RNA, 32 nt, Homo Sapiens
cacucuccucucuccuucugcaguucuaaacc

SEQ ID NO: 136405 - RNA, 32 nt, Homo Sapiens
cucauaggaaauguucaacaauucugugaaag

SEQ ID NO: 136406 - RNA, 32 nt, Homo Sapiens
aaauuauaaaaagcaaagagaagacuuuguac

SEQ ID NO: 136407 - RNA, 32 nt, Homo Sapiens
uaaaccaaccucaggaagguauuauguacaga

SEQ ID NO: 136408 - RNA, 32 nt, Homo Sapiens
gaggcacucagaggaggcgccaugucagaacc

SEQ ID NO: 136409 - RNA, 32 nt, Homo Sapiens
ggggaugggaugcaagucuaaccacaaaauuc

SEQ ID NO: 136410 - RNA, 32 nt, Homo Sapiens
ggguugaagauaaauaagguagcaaugucuau

SEQ ID NO: 136411 - RNA, 32 nt, Homo Sapiens
cagaaggacagauaagaaugcccaaguucaag

SEQ ID NO: 136412 - RNA, 32 nt, Homo Sapiens
cucugcacuccagaaacacccugacaggcuca

SEQ ID NO: 136413 - RNA, 32 nt, Homo Sapiens
uauuucuccgugucagaaugggaaugucuauc

SEQ ID NO: 136414 - RNA, 32 nt, Homo Sapiens
aggguccaugaacucugaaaucacugagaaca

SEQ ID NO: 136415 - RNA, 32 nt, Homo Sapiens
aagaggaacuuuuaauaaaaauaaauggauuc

SEQ ID NO: 136416 - RNA, 32 nt, Homo Sapiens
ucucuuggcucuucuuauucgagugaugagga

SEQ ID NO: 136417 - RNA, 32 nt, Homo Sapiens
ucacuguagcagcuggcauguguggucaagug

SEQ ID NO: 136418 - RNA, 32 nt, Homo Sapiens
cacuuuuagcugggcgggagggcuggagagcc

SEQ ID NO: 136419 - RNA, 32 nt, Homo Sapiens
aucccuguuguccuccaggguaagcugacacg

SEQ ID NO: 136420 - RNA, 32 nt, Homo Sapiens
gucacaccagugccauuacggugcccucgcuu

SEQ ID NO: 136421 - RNA, 32 nt, Homo Sapiens
auugggguucggcccugcccguagcacagcca

SEQ ID NO: 136422 - RNA, 32 nt, Homo Sapiens
ggcaaggcgaggcccgcagagaaggaugccaa

SEQ ID NO: 136423 - RNA, 32 nt, Homo Sapiens
cagaguagauauuuuuucacaaggcaguuugu

SEQ ID NO: 136424 - RNA, 32 nt, Homo Sapiens
uguuuuuccuuguuuuucucuuuuuaaagacc

SEQ ID NO: 136425 - RNA, 32 nt, Homo Sapiens
uaauguaaaguucuacaaaauaaagcuaguag

SEQ ID NO: 136426 - RNA, 32 nt, Homo Sapiens
ugcucuucccacucaccuuguugcucccaugc

SEQ ID NO: 136427 - RNA, 32 nt, Homo Sapiens
aaaucaaugugaaagcacuauaaaaauauuau

SEQ ID NO: 136428 - RNA, 32 nt, Homo Sapiens
agcauaauuaacuacuuugauugugggcugac

SEQ ID NO: 136429 - RNA, 32 nt, Homo Sapiens
ugaagaguguuugugucuuuugugcuuuuuug

SEQ ID NO: 136430 - RNA, 32 nt, Homo Sapiens
gauagaaaauuuggaaagugcaaauaagcaaa

SEQ ID NO: 136431 - RNA, 32 nt, Homo Sapiens
auccaaaggugcucagagagccggcccgccug

SEQ ID NO: 136432 - RNA, 32 nt, Homo Sapiens
ucgucuagcgcgcgccgcgcagacgcccccgg

SEQ ID NO: 136433 - RNA, 32 nt, Homo Sapiens
uggugauucggcuguguauaucuccuaggagg

SEQ ID NO: 136434 - RNA, 32 nt, Homo Sapiens
uuugcccucacagguaaguauaaguagcuuga

SEQ ID NO: 136435 - RNA, 32 nt, Homo Sapiens
gagcugcucugcucaccucuagaugcucccca

SEQ ID NO: 136436 - RNA, 32 nt, Homo Sapiens
cgggcccgagggcaucagacggcggcugauua

SEQ ID NO: 136437 - RNA, 32 nt, Homo Sapiens
cauuuugccguaguauuuuuugaaaaagggac

SEQ ID NO: 136438 - RNA, 32 nt, Homo Sapiens
guccaagccccccacaccuuuuccccaaccac

SEQ ID NO: 136439 - RNA, 32 nt, Homo Sapiens
cuccagaucguuagaaggaaaaguaagauuuc

SEQ ID NO: 136440 - RNA, 32 nt, Homo Sapiens
ugcucccaggcaggaaguacuacuucagagug

SEQ ID NO: 136441 - RNA, 32 nt, Homo Sapiens
ccaucuucagguggcggccccucggaggacaa

SEQ ID NO: 136442 - RNA, 32 nt, Homo Sapiens
uaaaaauaaaaauaaauuugguucuaauagaa

SEQ ID NO: 136443 - RNA, 32 nt, Homo Sapiens
guugcaaggagcccuccugccugggagcuugu

SEQ ID NO: 136444 - RNA, 32 nt, Homo Sapiens
guggggaccagcugcgcacgaggccagcggcg

SEQ ID NO: 136445 - RNA, 31 nt, Homo Sapiens
uagaucuccuaggagacuuccacuccaugug

SEQ ID NO: 136446 - RNA, 32 nt, Homo Sapiens
auuuauuuguuguuuucuguggguugcgaccc

SEQ ID NO: 136447 - RNA, 32 nt, Homo Sapiens
cacaaacucccccaagcugacucauccuaacu

SEQ ID NO: 136448 - RNA, 32 nt, Homo Sapiens
cacugggacgugccauguugggacgccacucc

SEQ ID NO: 136449 - RNA, 32 nt, Homo Sapiens
uaaacacaaaaauaaauuuauguugaauuggc

SEQ ID NO: 136450 - RNA, 32 nt, Homo Sapiens
gauuccgcuuucgucucgcccuggcgguucuu

SEQ ID NO: 136451 - RNA, 32 nt, Homo Sapiens
ucuuggaaaaauuuauccaacuauagacaucu

SEQ ID NO: 136452 - RNA, 32 nt, Homo Sapiens
acaccuagcuaauuuuuguauuuuuuguagag

SEQ ID NO: 136453 - RNA, 32 nt, Homo Sapiens
acaucgucaacauagccgauccuguuacauuu

SEQ ID NO: 136454 - RNA, 32 nt, Homo Sapiens
ugucagagggcccgcccuccccgcuccucagu

SEQ ID NO: 136455 - RNA, 32 nt, Homo Sapiens
cguucacccccgcuggucuuuuacugccauca

SEQ ID NO: 136456 - RNA, 32 nt, Homo Sapiens
aauucucagaugccugaggagcucccagucuc

SEQ ID NO: 136457 - RNA, 32 nt, Homo Sapiens
gcccggaacaaagggaucaaucaccuuuuaag

SEQ ID NO: 136458 - RNA, 32 nt, Homo Sapiens
ccacccccauucugagucucuguccuucuccu

SEQ ID NO: 136459 - RNA, 32 nt, Homo Sapiens
uagugagacugggauucaccacucagaauggg

SEQ ID NO: 136460 - RNA, 32 nt, Homo Sapiens
cacagcggccgcgcuccggccucgcuccgccg

SEQ ID NO: 136461 - RNA, 32 nt, Homo Sapiens
aggaaaguugcaggauuagcggaauguauggu

SEQ ID NO: 136462 - RNA, 32 nt, Homo Sapiens
uucaaaugacagaauuuuuuccaauuguaaaa

SEQ ID NO: 136463 - RNA, 32 nt, Homo Sapiens
cugaacuaggagaaccuggggguggauuuggg

SEQ ID NO: 136464 - RNA, 32 nt, Homo Sapiens
ucaagcaauucuguagcagcgucccgaggagc

SEQ ID NO: 136465 - RNA, 32 nt, Homo Sapiens
gaaaauaaacacagagaaggaaucucauuuuu

SEQ ID NO: 136466 - RNA, 32 nt, Homo Sapiens
ccuuccagaaaccaccagguccggcacuugga

SEQ ID NO: 136467 - RNA, 32 nt, Homo Sapiens
cgggguggggccugggccucugcgugcaaacc

SEQ ID NO: 136468 - RNA, 32 nt, Homo Sapiens
cacccuuucagccccagggcccggcucugugu

SEQ ID NO: 136469 - RNA, 32 nt, Homo Sapiens
cugcagacgacgagggagcugccucgcaagaa

SEQ ID NO: 136470 - RNA, 30 nt, Homo Sapiens
agcguagucuccagcggcggcgacgagggc

SEQ ID NO: 136471 - RNA, 32 nt, Homo Sapiens
ggaaggcaauuuuuccacggacccgggugggg

SEQ ID NO: 136472 - RNA, 32 nt, Homo Sapiens
ccagauuuucggguccgagggaaggaggaccc

SEQ ID NO: 136473 - RNA, 32 nt, Homo Sapiens
ggcuggacggguugcaauugcuaugcacagcc

SEQ ID NO: 136474 - RNA, 32 nt, Homo Sapiens
gggaacugcauaucggaggugguggaggagga

SEQ ID NO: 136475 - RNA, 32 nt, Homo Sapiens
aguugucugcuguguggacugggugugaugag

SEQ ID NO: 136476 - RNA, 32 nt, Homo Sapiens
agacugggcuaaguucugcugcuaucucuaga

SEQ ID NO: 136477 - RNA, 32 nt, Homo Sapiens
auaauaaaaaauuuuucauuuuggcuuuucag

SEQ ID NO: 136478 - RNA, 32 nt, Homo Sapiens
gggagagcccuucuucccuucuccaccuagug

SEQ ID NO: 136479 - RNA, 32 nt, Homo Sapiens
gccucacucucccucccuggugcuguaugcgu

SEQ ID NO: 136480 - RNA, 32 nt, Homo Sapiens
aacuuggcauuugguuaccccugcugauaaga

SEQ ID NO: 136481 - RNA, 32 nt, Homo Sapiens
auuuuggaagguccuguggaccgacccguacu

SEQ ID NO: 136482 - RNA, 32 nt, Homo Sapiens
cccgucucugugcuugcccccaucucagggac

SEQ ID NO: 136483 - RNA, 32 nt, Homo Sapiens
uaaauauccaaguuucuugaugcagagacuca

SEQ ID NO: 136484 - RNA, 32 nt, Homo Sapiens
uaaauuuggguacugggugcuguuggcccugg

SEQ ID NO: 136485 - RNA, 32 nt, Homo Sapiens
agcuucgcguccucugcuggugucucuccuuc

SEQ ID NO: 136486 - RNA, 30 nt, Homo Sapiens
aguuagcgccacggcggcggcaguggccgc

SEQ ID NO: 136487 - RNA, 31 nt, Homo Sapiens
ucccacuuggaccugcucagagcccugugua

SEQ ID NO: 136488 - RNA, 32 nt, Homo Sapiens
cuuuaaacugcacuucccucuccugcgcuucc

SEQ ID NO: 136489 - RNA, 32 nt, Homo Sapiens
ggacaaaggcauugcaccuacuuucuccuuga

SEQ ID NO: 136490 - RNA, 32 nt, Homo Sapiens
uguguuccguccuggccaugggcuuguugcag

SEQ ID NO: 136491 - RNA, 32 nt, Homo Sapiens
ucuagcguugcucuucuuaucaucucagaaug

SEQ ID NO: 136492 - RNA, 32 nt, Homo Sapiens
cagugaggauuacugauguggacaguugaugg

SEQ ID NO: 136493 - RNA, 32 nt, Homo Sapiens
cucacugcaaccuccgccucccagguucaagc

SEQ ID NO: 136494 - RNA, 32 nt, Homo Sapiens
cucacuguaaccuccgccucccagguucaagu

SEQ ID NO: 136495 - RNA, 32 nt, Homo Sapiens
gccugaggcagccgcuccugccugagccugga

SEQ ID NO: 136496 - RNA, 32 nt, Homo Sapiens
uccugaggccuugauuucagguuuggauaauc

SEQ ID NO: 136497 - RNA, 32 nt, Homo Sapiens
caggcacacuauaaagcuggugguuucuuccu

SEQ ID NO: 136498 - RNA, 32 nt, Homo Sapiens
uuagagauaaugucuguaaagcauuuaagguu

SEQ ID NO: 136499 - RNA, 32 nt, Homo Sapiens
ggggcucccuggaggcaccccucccccauucc

SEQ ID NO: 136500 - RNA, 32 nt, Homo Sapiens
aaauauuuaaacagcauuacaaaauccuaguu

SEQ ID NO: 136501 - RNA, 32 nt, Homo Sapiens
uacugcuaccacaacuauauuaucaugcaaau

SEQ ID NO: 136502 - RNA, 32 nt, Homo Sapiens
uagacaucuugauuauugugacaacucuagac

SEQ ID NO: 136503 - RNA, 32 nt, Homo Sapiens
auuaacaaaaauauuagcaaacugaauccagc

SEQ ID NO: 136504 - RNA, 32 nt, Homo Sapiens
cauguaucuauuuacuguguuuuucugaauac

SEQ ID NO: 136505 - RNA, 32 nt, Homo Sapiens
gcagugguguggcauccaucauggugaauggc

SEQ ID NO: 136506 - RNA, 32 nt, Homo Sapiens
ccuguuugcucgcagaccucccauugccacag

SEQ ID NO: 136507 - RNA, 31 nt, Homo Sapiens
ggaacucagcggagaaacgcgauugagaaau

SEQ ID NO: 136508 - RNA, 32 nt, Homo Sapiens
acuugcgcaccugggagggagcugccauccgg

SEQ ID NO: 136509 - RNA, 32 nt, Homo Sapiens
cauucuggucgccacccgccucacgguggaag

SEQ ID NO: 136510 - RNA, 32 nt, Homo Sapiens
cacauucugcaccuccuuccugcuuuccuaga

SEQ ID NO: 136511 - RNA, 32 nt, Homo Sapiens
gcaaaacaggaagggggaaaaggugggauuca

SEQ ID NO: 136512 - RNA, 32 nt, Homo Sapiens
auguugggaacaggccccugaaucuggccaua

SEQ ID NO: 136513 - RNA, 32 nt, Homo Sapiens
gugauacuacuagaucacuuguccucuugccc

SEQ ID NO: 136514 - RNA, 32 nt, Homo Sapiens
auggagaaaaauuugaaaauaucaucacugag

SEQ ID NO: 136515 - RNA, 32 nt, Homo Sapiens
uguuaacugugacgcagauaucauuagucuuc

SEQ ID NO: 136516 - RNA, 32 nt, Homo Sapiens
gacuuauucacagaugccaucaagcugaaucc

SEQ ID NO: 136517 - RNA, 32 nt, Homo Sapiens
ugcaccugcugcccuccuucccagugaaagag

SEQ ID NO: 136518 - RNA, 32 nt, Homo Sapiens
uuucccagccuugagcgcacgcacacaccaca

SEQ ID NO: 136519 - RNA, 32 nt, Homo Sapiens
agggucugaguucuagcaggguccugggggua

SEQ ID NO: 136520 - RNA, 32 nt, Homo Sapiens
ccaccccagacggagcggggacaggcugccga

SEQ ID NO: 136521 - RNA, 32 nt, Homo Sapiens
gagcugaaucaucaaagaugacucaaaguuuc

SEQ ID NO: 136522 - RNA, 32 nt, Homo Sapiens
cgaaggcuuuaaaggccaagaaggcaguguug

SEQ ID NO: 136523 - RNA, 32 nt, Homo Sapiens
uugauaaaaugaaugucaguagugagccuuuu

SEQ ID NO: 136524 - RNA, 28 nt, Homo Sapiens
auaaggagacauuaacaugaaucucauu

SEQ ID NO: 136525 - RNA, 32 nt, Homo Sapiens
ucuuuuauuccuucuuuuuuccuccuuucauu

SEQ ID NO: 136526 - RNA, 32 nt, Homo Sapiens
ccggugccgggcgcccagggguugccgcgcug

SEQ ID NO: 136527 - RNA, 32 nt, Homo Sapiens
gggcagggguagggcgggagagcgaugcuugg

SEQ ID NO: 136528 - RNA, 32 nt, Homo Sapiens
cacuaugugggucuuccuuuccccucaagaga

SEQ ID NO: 136529 - RNA, 32 nt, Homo Sapiens
auguagaagaaagcaaaaaauaaaauaagucc

SEQ ID NO: 136530 - RNA, 32 nt, Homo Sapiens
ccagaccagacaccuggcagcccugccucaua

SEQ ID NO: 136531 - RNA, 32 nt, Homo Sapiens
cuuaaauggacgggauugacuuaaaagcaaga

SEQ ID NO: 136532 - RNA, 32 nt, Homo Sapiens
gaguagcugugcuacuugugcuggcagcugca

SEQ ID NO: 136533 - RNA, 32 nt, Homo Sapiens
ccaggucuccccgcugcgcugcuugaggcuca

SEQ ID NO: 136534 - RNA, 32 nt, Homo Sapiens
uuuugggggccagucccugggguguggagccg

SEQ ID NO: 136535 - RNA, 32 nt, Homo Sapiens
cacaaggaacacuucuuuuggccacagcauaa

SEQ ID NO: 136536 - RNA, 32 nt, Homo Sapiens
agagccagcuuggacaaugcucuucuugcccc

SEQ ID NO: 136537 - RNA, 32 nt, Homo Sapiens
cacuuauucuccuauuuggaaucuucaacuuc

SEQ ID NO: 136538 - RNA, 32 nt, Homo Sapiens
aucgcugguacucugaauaaauaagcaugguc

SEQ ID NO: 136539 - RNA, 32 nt, Homo Sapiens
caaccaaagagugcccuccuccccucucagcc

SEQ ID NO: 136540 - RNA, 32 nt, Homo Sapiens
ucugucccccgcagagcugccgcccgcgcucu

SEQ ID NO: 136541 - RNA, 32 nt, Homo Sapiens
gcaguucgggugcgguacguugcauuccggua

SEQ ID NO: 136542 - RNA, 32 nt, Homo Sapiens
ggagaucaagaccauccuggcuaacaugguga

SEQ ID NO: 136543 - RNA, 32 nt, Homo Sapiens
gcgguggaguucccuccucgcugcuggagaac

SEQ ID NO: 136544 - RNA, 32 nt, Homo Sapiens
cgcagggaccucugccguugaaagcugggugu

SEQ ID NO: 136545 - RNA, 32 nt, Homo Sapiens
ucuguugcuucuucccugaaugccugccuucc

SEQ ID NO: 136546 - RNA, 32 nt, Homo Sapiens
guggauaaaggcaaauuaagauauaggaccaa

SEQ ID NO: 136547 - RNA, 32 nt, Homo Sapiens
augcuggcccgugcccggggcugcccccgcgg

SEQ ID NO: 136548 - RNA, 32 nt, Homo Sapiens
agaucugggauacuguucugcugcugaucacg

SEQ ID NO: 136549 - RNA, 32 nt, Homo Sapiens
uuuuggggggauccuuugcugcugagcuuccc

SEQ ID NO: 136550 - RNA, 32 nt, Homo Sapiens
uuauucuuacggaugaaaaaacaaauuugcaa

SEQ ID NO: 136551 - RNA, 32 nt, Homo Sapiens
cuggacggcugccaaggaggccccaaacccag

SEQ ID NO: 136552 - RNA, 32 nt, Homo Sapiens
aacuuaaacuaaaauuuuggguauaugaaaga

SEQ ID NO: 136553 - RNA, 32 nt, Homo Sapiens
gaaauugcaaauaguuaacuuuucaucaugua

SEQ ID NO: 136554 - RNA, 32 nt, Homo Sapiens
agaaaaauuacauuccuugucauuguaaauua

SEQ ID NO: 136555 - RNA, 32 nt, Homo Sapiens
uaugggaaggagaguaauuuuacaauggauaa

SEQ ID NO: 136556 - RNA, 32 nt, Homo Sapiens
caaagacaauuucaaagaaaaaugacaguaaa

SEQ ID NO: 136557 - RNA, 32 nt, Homo Sapiens
ucaguuuccguccaagguccgccuccuaccuc

SEQ ID NO: 136558 - RNA, 32 nt, Homo Sapiens
gguggugauguuccucuuccagcuguccccuc

SEQ ID NO: 136559 - RNA, 32 nt, Homo Sapiens
ccgccaggggcugggggcaucccggcuuccac

SEQ ID NO: 136560 - RNA, 32 nt, Homo Sapiens
uaaaaaugcaagaucaaggcuuggcccagaaa

SEQ ID NO: 136561 - RNA, 32 nt, Homo Sapiens
gugugacccagcugccacccaccuccuccauc

SEQ ID NO: 136562 - RNA, 32 nt, Homo Sapiens
cagcaucugcuucuucuggggugugaggcggg

SEQ ID NO: 136563 - RNA, 32 nt, Homo Sapiens
gccagccaugcccuuccccugggcuaccauug

SEQ ID NO: 136564 - RNA, 32 nt, Homo Sapiens
uucccgcgcugcgccuggggcugcugggcagc

SEQ ID NO: 136565 - RNA, 32 nt, Homo Sapiens
ugccugucaucccagcacuuugggaggccgag

SEQ ID NO: 136566 - RNA, 32 nt, Homo Sapiens
gcagcaccaaagguuuuugucuugggaaggca

SEQ ID NO: 136567 - RNA, 32 nt, Homo Sapiens
uagccugaguuugguuaugucaagcuuaccgu

SEQ ID NO: 136568 - RNA, 30 nt, Homo Sapiens
gaaauggauaaaaaucacaagugccguuuc

SEQ ID NO: 136569 - RNA, 32 nt, Homo Sapiens
ggcaaauauggacaguuacuuuccucuugccu

SEQ ID NO: 136570 - RNA, 32 nt, Homo Sapiens
ugugaggggcggauccugggaggaugugacgu

SEQ ID NO: 136571 - RNA, 32 nt, Homo Sapiens
agggaaggacaaaaacagaaaaauguuugggc

SEQ ID NO: 136572 - RNA, 32 nt, Homo Sapiens
gcggagggggagagagaggaggacaggcugcg

SEQ ID NO: 136573 - RNA, 32 nt, Homo Sapiens
aggacuucuccauguacaguggcgcggugucc

SEQ ID NO: 136574 - RNA, 32 nt, Homo Sapiens
cccaccucagcuucccaaagugccgggauuac

SEQ ID NO: 136575 - RNA, 32 nt, Homo Sapiens
gacuggaaucucagccucuuucuacuaccaca

SEQ ID NO: 136576 - RNA, 32 nt, Homo Sapiens
ucacucacucccucgcucucuaacccacuccu

SEQ ID NO: 136577 - RNA, 32 nt, Homo Sapiens
ggagcaguuucugcuauugugcucuuucauuu

SEQ ID NO: 136578 - RNA, 32 nt, Homo Sapiens
ccaucguuaaaauuauuuauguguaacauuca

SEQ ID NO: 136579 - RNA, 32 nt, Homo Sapiens
ggugugcagaggagguggccugcccgggaagc

SEQ ID NO: 136580 - RNA, 31 nt, Homo Sapiens
aauuuggagccccagcccaacuccagaaccc

SEQ ID NO: 136581 - RNA, 32 nt, Homo Sapiens
uuguaauauuuuacuuguaaugaaauggauca

SEQ ID NO: 136582 - RNA, 32 nt, Homo Sapiens
ucuucugcagcuccuggugcugcuugugugcu

SEQ ID NO: 136583 - RNA, 31 nt, Homo Sapiens
aaaugcaaauaaaaugauauaugucaaaaau

SEQ ID NO: 136584 - RNA, 32 nt, Homo Sapiens
cgcugcugaggggaagggagggggcgggcagg

SEQ ID NO: 136585 - RNA, 32 nt, Homo Sapiens
guccucacaugcagaguugugcaugccccuga

SEQ ID NO: 136586 - RNA, 32 nt, Homo Sapiens
aagccuguccuugccuugucccugauggcucu

SEQ ID NO: 136587 - RNA, 32 nt, Homo Sapiens
uugggaacacuggguauucucaugagcucauc

SEQ ID NO: 136588 - RNA, 32 nt, Homo Sapiens
ggcgugcugcucguccggccccggcccggaac

SEQ ID NO: 136589 - RNA, 32 nt, Homo Sapiens
gcugucccgggaacuuggucgucuuaggcaau

SEQ ID NO: 136590 - RNA, 32 nt, Homo Sapiens
ugcaaaaacgagcucuucauuacaaagauacg

SEQ ID NO: 136591 - RNA, 32 nt, Homo Sapiens
aacugaugacagacauaacucaucauucccca

SEQ ID NO: 136592 - RNA, 32 nt, Homo Sapiens
caacguuucuucacuuuugcaagguuccacag

SEQ ID NO: 136593 - RNA, 32 nt, Homo Sapiens
gaccaaggcaccaccccauccacagcugaccc

SEQ ID NO: 136594 - RNA, 32 nt, Homo Sapiens
cccuuuugcugccucaggaucccuggcauguu

SEQ ID NO: 136595 - RNA, 32 nt, Homo Sapiens
aaucuuuuuaucauaugcuuucuugugaauuu

SEQ ID NO: 136596 - RNA, 32 nt, Homo Sapiens
gggggcagcccacugcucuuggucccugugcc

SEQ ID NO: 136597 - RNA, 30 nt, Homo Sapiens
ccgguagcgcccgugccgguagcgccgcug

SEQ ID NO: 136598 - RNA, 32 nt, Homo Sapiens
uuggaaauguguuuuucuucaauuacaucuac

SEQ ID NO: 136599 - RNA, 32 nt, Homo Sapiens
ccgagauuaugccacuguacuccagcgugggu

SEQ ID NO: 136600 - RNA, 32 nt, Homo Sapiens
caagacagagauccagccuggaccucuuauuu

SEQ ID NO: 136601 - RNA, 32 nt, Homo Sapiens
ccuaucuuuuguuuugaaaacaucucaguuuu

SEQ ID NO: 136602 - RNA, 32 nt, Homo Sapiens
aaggucagagccgccuagaagcagaagcgcag

SEQ ID NO: 136603 - RNA, 32 nt, Homo Sapiens
gacugcagaccucagcuuaauaucaguuguug

SEQ ID NO: 136604 - RNA, 32 nt, Homo Sapiens
uuuaagcacucgucucucugggaggcccagac

SEQ ID NO: 136605 - RNA, 32 nt, Homo Sapiens
cuauagaaaguggauaaaagauauaccaaaac

SEQ ID NO: 136606 - RNA, 32 nt, Homo Sapiens
cgcugcuccagcugccaacuuugcugcagagc

SEQ ID NO: 136607 - RNA, 32 nt, Homo Sapiens
cucugucacaaagggacuuuggaaaacuacuu

SEQ ID NO: 136608 - RNA, 32 nt, Homo Sapiens
gcacgccccggccccgccccagcccuccugau

SEQ ID NO: 136609 - RNA, 32 nt, Homo Sapiens
ugaacacuuuuuaaauguguguugcuuauuuu

SEQ ID NO: 136610 - RNA, 30 nt, Homo Sapiens
ugugaggguggacgugaugaguguaucugg

SEQ ID NO: 136611 - RNA, 32 nt, Homo Sapiens
uucagauuugaaauacugcaauaaugguuguc

SEQ ID NO: 136612 - RNA, 32 nt, Homo Sapiens
cuuaaaucucaaacuuuguuaggaguaacagg

SEQ ID NO: 136613 - RNA, 32 nt, Homo Sapiens
gcuggcugcccucuuugccuucuggccuccag

SEQ ID NO: 136614 - RNA, 32 nt, Homo Sapiens
cuggucuggcccccuccuccggguuaggggag

SEQ ID NO: 136615 - RNA, 32 nt, Homo Sapiens
aaugaauaaaauuuaugaauaugacuuaaaaa

SEQ ID NO: 136616 - RNA, 32 nt, Homo Sapiens
gagaaggaggcacaacuuggagugaagucugu

SEQ ID NO: 136617 - RNA, 32 nt, Homo Sapiens
ggagcagcacaccaggagccaugagaagugcc

SEQ ID NO: 136618 - RNA, 32 nt, Homo Sapiens
guuuuccucccucuccucuggcugcuacaacu

SEQ ID NO: 136619 - RNA, 32 nt, Homo Sapiens
ggcagugacucgugccuucccuccucagggcc

SEQ ID NO: 136620 - RNA, 32 nt, Homo Sapiens
gcaaaggaagguaacuucaauguaauagcuuc

SEQ ID NO: 136621 - RNA, 32 nt, Homo Sapiens
uguuccucacaggcuuccagguuaggcacugu

SEQ ID NO: 136622 - RNA, 32 nt, Homo Sapiens
cccuuuuauaaaaccaucaaaucuugugagac

SEQ ID NO: 136623 - RNA, 32 nt, Homo Sapiens
cccaccccuuaauuuuaacuuugugguaacug

SEQ ID NO: 136624 - RNA, 32 nt, Homo Sapiens
acuggacuccggcauaagccacuuccccacaa

SEQ ID NO: 136625 - RNA, 32 nt, Homo Sapiens
cuguuauccuguucuuuuuucaaggugcccag

SEQ ID NO: 136626 - RNA, 32 nt, Homo Sapiens
ggaggaagcaaaugcaagcugggcugggucua

SEQ ID NO: 136627 - RNA, 32 nt, Homo Sapiens
uuuuaucuugaugcauuguaaguaaaaugaau

SEQ ID NO: 136628 - RNA, 32 nt, Homo Sapiens
ccggcacgugacagcuacucacuuccucaguc

SEQ ID NO: 136629 - RNA, 32 nt, Homo Sapiens
ugugaaaauauuauuaacacuggggacuccuu

SEQ ID NO: 136630 - RNA, 32 nt, Homo Sapiens
aaugcaaagcaucuuaaggagugaaaauagag

SEQ ID NO: 136631 - RNA, 32 nt, Homo Sapiens
gcccccaguauggagcagcaucgaggguucgc

SEQ ID NO: 136632 - RNA, 32 nt, Homo Sapiens
aaacugcuaugugucuucuguuuaaaauaauc

SEQ ID NO: 136633 - RNA, 32 nt, Homo Sapiens
cagccagaucaguggaggaagaggagaaagag

SEQ ID NO: 136634 - RNA, 32 nt, Homo Sapiens
uaaccuugcauuaccacuggucuggccacguu

SEQ ID NO: 136635 - RNA, 32 nt, Homo Sapiens
aaaaguauguauuugcacauguguuuuuauuu

SEQ ID NO: 136636 - RNA, 32 nt, Homo Sapiens
acuauguggagcccagcugcugcagcccaggg

SEQ ID NO: 136637 - RNA, 32 nt, Homo Sapiens
guuucccuucccucccccauaccuagcccgag

SEQ ID NO: 136638 - RNA, 32 nt, Homo Sapiens
gggcucugcaggccgccucccggaacgggagg

SEQ ID NO: 136639 - RNA, 32 nt, Homo Sapiens
aaauucuaaucuauguugaacuuuguauacuu

SEQ ID NO: 136640 - RNA, 32 nt, Homo Sapiens
gaugggacaguuagaggggaugugcuaaagcg

SEQ ID NO: 136641 - RNA, 32 nt, Homo Sapiens
aaagguauaguggaugcuauuuaugauccaag

SEQ ID NO: 136642 - RNA, 32 nt, Homo Sapiens
cuggcuaauguuuaaauuuuauguagagaugg

SEQ ID NO: 136643 - RNA, 32 nt, Homo Sapiens
uuguacauuguuaaaauaguuuuuaagauuau

SEQ ID NO: 136644 - RNA, 32 nt, Homo Sapiens
ccauuggcugguggagaaggaggaggcagaau

SEQ ID NO: 136645 - RNA, 32 nt, Homo Sapiens
auucucugucuccuucucgucggucuacccca

SEQ ID NO: 136646 - RNA, 32 nt, Homo Sapiens
aacccugugaauguaagaaauguagaaaagca

SEQ ID NO: 136647 - RNA, 32 nt, Homo Sapiens
acuggugcauuacaaaacaguguucuuuugaa

SEQ ID NO: 136648 - RNA, 32 nt, Homo Sapiens
ccucccagcucacggcggccccggccccgggu

SEQ ID NO: 136649 - RNA, 32 nt, Homo Sapiens
ggaaauugcuccauuccugaguaaacagauau

SEQ ID NO: 136650 - RNA, 32 nt, Homo Sapiens
gcgcagucaccggcgcggucuauggcugcgac

SEQ ID NO: 136651 - RNA, 32 nt, Homo Sapiens
guggcuucccguuaaucucauccuucuuagau

SEQ ID NO: 136652 - RNA, 32 nt, Homo Sapiens
uaugaaauguauuugggaacuacauuaaacuu

SEQ ID NO: 136653 - RNA, 32 nt, Homo Sapiens
cuaggaggcugggccggagggaggcggaggaa

SEQ ID NO: 136654 - RNA, 32 nt, Homo Sapiens
aggcgcuguuaggcgauuucgucgcugugcga

SEQ ID NO: 136655 - RNA, 32 nt, Homo Sapiens
accccuuucuccaccugcuccuccuccucuga

SEQ ID NO: 136656 - RNA, 32 nt, Homo Sapiens
aauagggaaaauaauugaaucauuuuagaagu

SEQ ID NO: 136657 - RNA, 32 nt, Homo Sapiens
ggaguuuugacugggguaggagaaacccauga

SEQ ID NO: 136658 - RNA, 32 nt, Homo Sapiens
cuccaucuccuuccccauuccucccccaguug

SEQ ID NO: 136659 - RNA, 32 nt, Homo Sapiens
uuaagaacauucaacauguauuguucauuaag

SEQ ID NO: 136660 - RNA, 32 nt, Homo Sapiens
ugucuuucauuuccaaccauuuuucaagagaa

SEQ ID NO: 136661 - RNA, 32 nt, Homo Sapiens
ccuggccuggggggcggggagaggcagcagaa

SEQ ID NO: 136662 - RNA, 28 nt, Homo Sapiens
gcaccauacuggaaaauuauaaagugcu

SEQ ID NO: 136663 - RNA, 31 nt, Homo Sapiens
ucacuccugagcaccccuccaagggccuaaa

SEQ ID NO: 136664 - RNA, 32 nt, Homo Sapiens
cacgguuccucuucuggugggccacauaaagg

SEQ ID NO: 136665 - RNA, 32 nt, Homo Sapiens
cgccuccguccggcugcugcccuucaacaaca

SEQ ID NO: 136666 - RNA, 32 nt, Homo Sapiens
uuuucuagagaacuaacugaaagagauuuuca

SEQ ID NO: 136667 - RNA, 32 nt, Homo Sapiens
gaaggccccagagggacccaggcuaucguccu

SEQ ID NO: 136668 - RNA, 32 nt, Homo Sapiens
cacaaggacaaagggagcggccaccucgaccc

SEQ ID NO: 136669 - RNA, 32 nt, Homo Sapiens
uacaaugaauggggaaucacauguguagagcc

SEQ ID NO: 136670 - RNA, 32 nt, Homo Sapiens
uuuucuuuaaaacuuggauagauuccaaaagu

SEQ ID NO: 136671 - RNA, 32 nt, Homo Sapiens
ucugguaaacuuauuuuauugauguuuucaua

SEQ ID NO: 136672 - RNA, 32 nt, Homo Sapiens
agggugcaagcacuuaggaugcuuuuuggaau

SEQ ID NO: 136673 - RNA, 32 nt, Homo Sapiens
ggauaaaagaggaucaagaagaacgaacccua

SEQ ID NO: 136674 - RNA, 32 nt, Homo Sapiens
agugacacagaaaggaagaaacuagcgguguu

SEQ ID NO: 136675 - RNA, 32 nt, Homo Sapiens
caggagcuuccacucucagaccuugccucccg

SEQ ID NO: 136676 - RNA, 32 nt, Homo Sapiens
cugcuccucuccacccagcagugggcuaguag

SEQ ID NO: 136677 - RNA, 30 nt, Homo Sapiens
gccaggcucagguggccuccuggccuuucc

SEQ ID NO: 136678 - RNA, 32 nt, Homo Sapiens
uccagcuuuuagaauggguguacaaugcccug

SEQ ID NO: 136679 - RNA, 32 nt, Homo Sapiens
acaaagagaugaauaauuccaugggccaguau

SEQ ID NO: 136680 - RNA, 32 nt, Homo Sapiens
cuucccaguuccuucccgggccccacacgcug

SEQ ID NO: 136681 - RNA, 32 nt, Homo Sapiens
ggucauguugcaguuuuuuccuugaaggacaa

SEQ ID NO: 136682 - RNA, 32 nt, Homo Sapiens
cuaagacuacauguuugucaucuuauaaagca

SEQ ID NO: 136683 - RNA, 32 nt, Homo Sapiens
ggaagaaauagcggggagaaaagggaguuggu

SEQ ID NO: 136684 - RNA, 32 nt, Homo Sapiens
uucuuccccccgcgcucagacuugccucaaag

SEQ ID NO: 136685 - RNA, 32 nt, Homo Sapiens
agaggcucuccacuguccacccuaacacauac

SEQ ID NO: 136686 - RNA, 32 nt, Homo Sapiens
uaaguagauauaaagugauuuaaaagacagca

SEQ ID NO: 136687 - RNA, 30 nt, Homo Sapiens
ucaagaugccgcuagugaaaagaaacaucg

SEQ ID NO: 136688 - RNA, 32 nt, Homo Sapiens
gauggagcagugcuguuucugcauucauaaug

SEQ ID NO: 136689 - RNA, 32 nt, Homo Sapiens
ugugaaguauuguagaggagacacaaaaggaa

SEQ ID NO: 136690 - RNA, 32 nt, Homo Sapiens
gcaugcaaaaauaccaaggaagaacuucucuu

SEQ ID NO: 136691 - RNA, 32 nt, Homo Sapiens
cuuuuuaaauguuuugcuauugguuccauauu

SEQ ID NO: 136692 - RNA, 32 nt, Homo Sapiens
cccuacgcccuuacauucugcacuucauaguu

SEQ ID NO: 136693 - RNA, 32 nt, Homo Sapiens
gacgggaacgacccuucggugagagagcaccc

SEQ ID NO: 136694 - RNA, 32 nt, Homo Sapiens
augacugauauuuuuucuuauagauaacacau

SEQ ID NO: 136695 - RNA, 32 nt, Homo Sapiens
uccugaccuugcaaccauguauggaagugccc

SEQ ID NO: 136696 - RNA, 32 nt, Homo Sapiens
ccaaccagacugcgcccugggaagggugugca

SEQ ID NO: 136697 - RNA, 32 nt, Homo Sapiens
auaggcuuuaaaugaucagggauucagguuca

SEQ ID NO: 136698 - RNA, 32 nt, Homo Sapiens
acauucaaaaauuucaucugagcuggaugcag

SEQ ID NO: 136699 - RNA, 32 nt, Homo Sapiens
ugccaguuauuuuauuugauaaugcuuauggu

SEQ ID NO: 136700 - RNA, 32 nt, Homo Sapiens
uuuuucuugucaucuuuuaaaacuacaguuau

SEQ ID NO: 136701 - RNA, 32 nt, Homo Sapiens
cacgucggccccagcccugaggagccggaccg

SEQ ID NO: 136702 - RNA, 28 nt, Homo Sapiens
ggaaggggagagaugccgagguggucag

SEQ ID NO: 136703 - RNA, 28 nt, Homo Sapiens
uucagcuucuuguaaauguguuuuccuu

SEQ ID NO: 136704 - RNA, 32 nt, Homo Sapiens
cagcugugcuccuggggccggcgcggguuuug

SEQ ID NO: 136705 - RNA, 32 nt, Homo Sapiens
ccacugccuguggaggccccagcuggccacgg

SEQ ID NO: 136706 - RNA, 32 nt, Homo Sapiens
acagagacacacucacacguuaugacacuuga

SEQ ID NO: 136707 - RNA, 32 nt, Homo Sapiens
uagggcugccguuuucuguuucucccugggcu

SEQ ID NO: 136708 - RNA, 32 nt, Homo Sapiens
cggcgguucgggucgcagagccagggacccca

SEQ ID NO: 136709 - RNA, 32 nt, Homo Sapiens
uauuuauauauucugauuauuaauccuuuguu

SEQ ID NO: 136710 - RNA, 32 nt, Homo Sapiens
uguaauguguaauuucuuucugaaauaaaacc

SEQ ID NO: 136711 - RNA, 32 nt, Homo Sapiens
gauucccccacuuuucugucuuagaaaauugu

SEQ ID NO: 136712 - RNA, 32 nt, Homo Sapiens
uccaacgucaacuuccuauccuugccugacac

SEQ ID NO: 136713 - RNA, 32 nt, Homo Sapiens
gaaacucagauuuaaccuguuauuucuaugaa

SEQ ID NO: 136714 - RNA, 32 nt, Homo Sapiens
cagccugcugguuuuacauuagauuuauucgc

SEQ ID NO: 136715 - RNA, 32 nt, Homo Sapiens
agaaacuuaggacagaagccuaccucauccca

SEQ ID NO: 136716 - RNA, 32 nt, Homo Sapiens
acaaacuuuuauauccuucucaugucuucuac

SEQ ID NO: 136717 - RNA, 31 nt, Homo Sapiens
cucacuauggggaaccacuugacugagaugg

SEQ ID NO: 136718 - RNA, 32 nt, Homo Sapiens
acgcaaggagaggagggcgcgcggccugcagc

SEQ ID NO: 136719 - RNA, 32 nt, Homo Sapiens
cugcuggucccagcugaggacguacuggucag

SEQ ID NO: 136720 - RNA, 32 nt, Homo Sapiens
agccuccccucuggagucugcacuccaggcuu

SEQ ID NO: 136721 - RNA, 32 nt, Homo Sapiens
uauaagaaaaggaaauuuggccacuuacacuc

SEQ ID NO: 136722 - RNA, 32 nt, Homo Sapiens
ucuguauguuguaucuuuugcauguagcuucc

SEQ ID NO: 136723 - RNA, 32 nt, Homo Sapiens
aaggagcuauuaugagacguguauuguagugc

SEQ ID NO: 136724 - RNA, 32 nt, Homo Sapiens
ggaggggccaggggcggaaugauaugguuugg

SEQ ID NO: 136725 - RNA, 32 nt, Homo Sapiens
cauacaaaucaacagaaagagcuucugaagga

SEQ ID NO: 136726 - RNA, 32 nt, Homo Sapiens
aacacuguauuguaggauuuauaauuuguagu

SEQ ID NO: 136727 - RNA, 32 nt, Homo Sapiens
cauuucauaccuguauuaaaauaucucaugua

SEQ ID NO: 136728 - RNA, 32 nt, Homo Sapiens
uggcuucuguugcgccacugagacggcagaga

SEQ ID NO: 136729 - RNA, 32 nt, Homo Sapiens
gagagaagcauuaagugacuuucaaagacuuu

SEQ ID NO: 136730 - RNA, 32 nt, Homo Sapiens
aaaggggcaaauagagaccaguccccggugga

SEQ ID NO: 136731 - RNA, 32 nt, Homo Sapiens
cccacuaugaccugcugugaccucaagcucag

SEQ ID NO: 136732 - RNA, 32 nt, Homo Sapiens
aauaucacagaaaagcauggcuugaauaagga

SEQ ID NO: 136733 - RNA, 32 nt, Homo Sapiens
acuguacuauaaauaauacgaauaugccaaca

SEQ ID NO: 136734 - RNA, 32 nt, Homo Sapiens
gaaggcgcagcugcugccgccgcggcccauca

SEQ ID NO: 136735 - RNA, 32 nt, Homo Sapiens
acaaccgcccugggcaggccgcuccugagcug

SEQ ID NO: 136736 - RNA, 32 nt, Homo Sapiens
gcggacgacagaggaugccgaaccacuccagu

SEQ ID NO: 136737 - RNA, 32 nt, Homo Sapiens
caacaacugugauguaacaugaaaauaccuga

SEQ ID NO: 136738 - RNA, 32 nt, Homo Sapiens
cauuguaaauagugccucuguaaugugguucu

SEQ ID NO: 136739 - RNA, 32 nt, Homo Sapiens
aaaggaaucaacaugauaaaauuuaggcgaag

SEQ ID NO: 136740 - RNA, 32 nt, Homo Sapiens
cgggagucuagggagcgagaaggagaaggagg

SEQ ID NO: 136741 - RNA, 32 nt, Homo Sapiens
ggaggcccuggggucuuauuaguugaaggaaa

SEQ ID NO: 136742 - RNA, 32 nt, Homo Sapiens
acauuuauugcguaccuccuauauucugcaaa

SEQ ID NO: 136743 - RNA, 32 nt, Homo Sapiens
gcuuuccaggggccuuccugugcccagcuucu

SEQ ID NO: 136744 - RNA, 32 nt, Homo Sapiens
uugccaauguuaaugauuauucuuuuuauugc

SEQ ID NO: 136745 - RNA, 32 nt, Homo Sapiens
aacaagcccucccaugccauguccccgugggc

SEQ ID NO: 136746 - RNA, 28 nt, Homo Sapiens
ccauaugugcugucuauuauaaauggga

SEQ ID NO: 136747 - RNA, 32 nt, Homo Sapiens
uggggcucggcgacgagggccucuacaccugc

SEQ ID NO: 136748 - RNA, 32 nt, Homo Sapiens
uauccuggucuauaaccccccacacauacacc

SEQ ID NO: 136749 - RNA, 32 nt, Homo Sapiens
ugccccaccccaggaaaacgggcccgcaaacc

SEQ ID NO: 136750 - RNA, 32 nt, Homo Sapiens
ugcucauuucccagcccucuucuucucaagcc

SEQ ID NO: 136751 - RNA, 32 nt, Homo Sapiens
acauaaacagcuuuaaugaccucuucaccuag

SEQ ID NO: 136752 - RNA, 32 nt, Homo Sapiens
agcaauaauaaaccuuuuuuuuuuuuuuuuuu

SEQ ID NO: 136753 - RNA, 32 nt, Homo Sapiens
agugaagaguugggcuugcugcugcugucuuc

SEQ ID NO: 136754 - RNA, 26 nt, Homo Sapiens
gaugaggccggagggaggaaaagcga

SEQ ID NO: 136755 - RNA, 32 nt, Homo Sapiens
guccccuggccgguuguccgucauuuucacgg

SEQ ID NO: 136756 - RNA, 32 nt, Homo Sapiens
uucaguauaauagauggaauuuuuuguugccu

SEQ ID NO: 136757 - RNA, 32 nt, Homo Sapiens
gauacucuuccauccuucucuuccugaagaaa

SEQ ID NO: 136758 - RNA, 31 nt, Homo Sapiens
uuuaauuaaaacaaacagaacaauuuucccc

SEQ ID NO: 136759 - RNA, 32 nt, Homo Sapiens
aggcauagucaucagugugucaaaagcacaaa

SEQ ID NO: 136760 - RNA, 32 nt, Homo Sapiens
gccguuggcggcggcccgagcaguuuucgcug

SEQ ID NO: 136761 - RNA, 27 nt, Homo Sapiens
ccccuucucugguucagcccccacgcc

SEQ ID NO: 136762 - RNA, 32 nt, Homo Sapiens
uaagauugaugcugggcaaaauguagaugauc

SEQ ID NO: 136763 - RNA, 32 nt, Homo Sapiens
cacugguguggcugcucugggcagaugacagc

SEQ ID NO: 136764 - RNA, 32 nt, Homo Sapiens
uggccggcucuguggugaucguggugauggug

SEQ ID NO: 136765 - RNA, 32 nt, Homo Sapiens
aggaagggagcagagagcacugagagcaauag

SEQ ID NO: 136766 - RNA, 32 nt, Homo Sapiens
uucuguuuucccccagcaacgccccuccaaac

SEQ ID NO: 136767 - RNA, 32 nt, Homo Sapiens
cguggcaaggaccuggagcgcuggaaauccug

SEQ ID NO: 136768 - RNA, 32 nt, Homo Sapiens
caucccugagcucucggcuccuccuccgucuu

SEQ ID NO: 136769 - RNA, 32 nt, Homo Sapiens
uaaggaaccugaucuuugaguauuaaaaagug

SEQ ID NO: 136770 - RNA, 32 nt, Homo Sapiens
gguggaggacgcggcugcuucaaguccuuggc

SEQ ID NO: 136771 - RNA, 32 nt, Homo Sapiens
gcagcaugaggacuuaaaaggugguuuucauu

SEQ ID NO: 136772 - RNA, 32 nt, Homo Sapiens
accacaaaaaauaaucugagaauuguaucauu

SEQ ID NO: 136773 - RNA, 32 nt, Homo Sapiens
aucucccuugcacaguucuccuccucggccug

SEQ ID NO: 136774 - RNA, 32 nt, Homo Sapiens
aauccaucaguuccucccuagggugcaguucu

SEQ ID NO: 136775 - RNA, 32 nt, Homo Sapiens
uaccucaguucuucuuuucuuuugcaugcauu

SEQ ID NO: 136776 - RNA, 32 nt, Homo Sapiens
uuaggugaucacgugcaucuuuucuuguaugg

SEQ ID NO: 136777 - RNA, 32 nt, Homo Sapiens
uuggcaaucacagcccgcagaaccaucaugug

SEQ ID NO: 136778 - RNA, 32 nt, Homo Sapiens
ugcaaaauauaucuuguaaaauuuagaccacu

SEQ ID NO: 136779 - RNA, 32 nt, Homo Sapiens
cccuccccuccccuaccagucuucccggcccc

SEQ ID NO: 136780 - RNA, 32 nt, Homo Sapiens
ccacagaggcggaaauaccggagggcuuugcc

SEQ ID NO: 136781 - RNA, 32 nt, Homo Sapiens
uaaauguuucuuuuauguugcagauacauagu

SEQ ID NO: 136782 - RNA, 32 nt, Homo Sapiens
cccauauuucuuuugaugcauaaauaucccuc

SEQ ID NO: 136783 - RNA, 32 nt, Homo Sapiens
uacuuguacagcugcaagcuuugaacaauaga

SEQ ID NO: 136784 - RNA, 32 nt, Homo Sapiens
uagcucuuccuccccaggacuuggucuuuuuu

SEQ ID NO: 136785 - RNA, 32 nt, Homo Sapiens
ugcugggcgucccaggcauggucuggugcguu

SEQ ID NO: 136786 - RNA, 32 nt, Homo Sapiens
cuuugaggcucauccauuuucuauccuguguc

SEQ ID NO: 136787 - RNA, 32 nt, Homo Sapiens
ccaaacugccccccgagcuucuuccccaucac

SEQ ID NO: 136788 - RNA, 32 nt, Homo Sapiens
gaguaaaaagccaaccaacaaacacaucucuu

SEQ ID NO: 136789 - RNA, 32 nt, Homo Sapiens
gcacauuuaugggccgggaggcauccgugugg

SEQ ID NO: 136790 - RNA, 30 nt, Homo Sapiens
ucaaaaccacuugccauccuguuagauugc

SEQ ID NO: 136791 - RNA, 32 nt, Homo Sapiens
uucccuaguuuaggaaauaaaaccuaacaauu

SEQ ID NO: 136792 - RNA, 32 nt, Homo Sapiens
cuuguuacaugaaaacaaaaugcuacuuguua

SEQ ID NO: 136793 - RNA, 32 nt, Homo Sapiens
ugcacaggagacuuaaaauaguugccagcaga

SEQ ID NO: 136794 - RNA, 32 nt, Homo Sapiens
gcuaccggggaccgggacccggcggcccugcu

SEQ ID NO: 136795 - RNA, 32 nt, Homo Sapiens
uagggcgugucagcagggcgugcccaccgagg

SEQ ID NO: 136796 - RNA, 32 nt, Homo Sapiens
cgccagcucacgccgcgcagugcgcuuuuccg

SEQ ID NO: 136797 - RNA, 32 nt, Homo Sapiens
cuccccaaggagaugaggagcggugaugccag

SEQ ID NO: 136798 - RNA, 32 nt, Homo Sapiens
acacacgugagcacgcacacaccaauuccacu

SEQ ID NO: 136799 - RNA, 32 nt, Homo Sapiens
aagguuauggccuuuugacaagagggauucug

SEQ ID NO: 136800 - RNA, 32 nt, Homo Sapiens
uuaacuccaagaggcagaacucguucuagaag

SEQ ID NO: 136801 - RNA, 32 nt, Homo Sapiens
agggcuccaggccccacccccacgccagccau

SEQ ID NO: 136802 - RNA, 32 nt, Homo Sapiens
accuauuguugaccagaagucuuacugauaac

SEQ ID NO: 136803 - RNA, 32 nt, Homo Sapiens
agcacagacccugcccugugggcccccaaaug

SEQ ID NO: 136804 - RNA, 32 nt, Homo Sapiens
cucuccagggcuguugguucuuucuccugacu

SEQ ID NO: 136805 - RNA, 32 nt, Homo Sapiens
cgcccagagcccuccgccguccccagcgcagu

SEQ ID NO: 136806 - RNA, 32 nt, Homo Sapiens
guggauuauagcaaaauggaccaggguaacaa

SEQ ID NO: 136807 - RNA, 32 nt, Homo Sapiens
agaaaaccaaaauaaaaauugaaaaauaaaaa

SEQ ID NO: 136808 - RNA, 30 nt, Homo Sapiens
gccaggacugucccugccaccccucucucc

SEQ ID NO: 136809 - RNA, 32 nt, Homo Sapiens
agcauucuaaaagauagcaaguaaaaugaugu

SEQ ID NO: 136810 - RNA, 32 nt, Homo Sapiens
acccucccucuacacuugaggaccacaguugg

SEQ ID NO: 136811 - RNA, 32 nt, Homo Sapiens
ccauuucuacaaaaauacaaaacuuagcuggg

SEQ ID NO: 136812 - RNA, 32 nt, Homo Sapiens
uagcauauaaaagguauagaaacagcacuaag

SEQ ID NO: 136813 - RNA, 32 nt, Homo Sapiens
guguugcagacggcgccggccgggaagggggg

SEQ ID NO: 136814 - RNA, 32 nt, Homo Sapiens
cgagaggcagcccauguuccucacgccagcgg

SEQ ID NO: 136815 - RNA, 32 nt, Homo Sapiens
aaagggauccagaagagacacuuuuuaguuga

SEQ ID NO: 136816 - RNA, 32 nt, Homo Sapiens
ggaggaaacccccacccuccccucccaaccca

SEQ ID NO: 136817 - RNA, 32 nt, Homo Sapiens
aagacuggcauccugggacugcacgaugaacu

SEQ ID NO: 136818 - RNA, 32 nt, Homo Sapiens
gccaagcucagguugggugguucugugcugua

SEQ ID NO: 136819 - RNA, 32 nt, Homo Sapiens
gcccuauucugcacuguucaguuuuauggagg

SEQ ID NO: 136820 - RNA, 32 nt, Homo Sapiens
acucuagaacuguguaccauccaauucgccau

SEQ ID NO: 136821 - RNA, 32 nt, Homo Sapiens
aaaacagcugucucuaacuuauuuuauuucca

SEQ ID NO: 136822 - RNA, 32 nt, Homo Sapiens
guuccagagagauuaagaagcuugcccaaggg

SEQ ID NO: 136823 - RNA, 32 nt, Homo Sapiens
auaucuuuuaugaacaaaucugaacaauuugu

SEQ ID NO: 136824 - RNA, 32 nt, Homo Sapiens
ucccauuuacuuugguugcaaauaaggaagau

SEQ ID NO: 136825 - RNA, 32 nt, Homo Sapiens
agcacacuuuauuugcauuugaucuguauuug

SEQ ID NO: 136826 - RNA, 32 nt, Homo Sapiens
gaggcgcagcgcacuccuccccugcccaagcc

SEQ ID NO: 136827 - RNA, 32 nt, Homo Sapiens
ugauuuuugagauuaaaacaaacaaaaagaga

SEQ ID NO: 136828 - RNA, 32 nt, Homo Sapiens
cauagaaaguaacaaaauuugcugucaccuua

SEQ ID NO: 136829 - RNA, 32 nt, Homo Sapiens
uccgcggaggccgacaggauucguuggcugcc

SEQ ID NO: 136830 - RNA, 31 nt, Homo Sapiens
cucacugggcgacagagccagauucugucuc

SEQ ID NO: 136831 - RNA, 32 nt, Homo Sapiens
cucuggauguuugugcgcguguguggacaguc

SEQ ID NO: 136832 - RNA, 32 nt, Homo Sapiens
uaauuguucuuugaaggcuguuuaugacuaga

SEQ ID NO: 136833 - RNA, 32 nt, Homo Sapiens
aacuguuauuacagaggaauuguuauaacuac

SEQ ID NO: 136834 - RNA, 32 nt, Homo Sapiens
uaaaauaaagcauguuacaauuuccuuuaggu

SEQ ID NO: 136835 - RNA, 32 nt, Homo Sapiens
uuugauggcaacacccugaggaccucccuuuu

SEQ ID NO: 136836 - RNA, 32 nt, Homo Sapiens
ugucaguugcagcaaaaauuuacuacacaaga

SEQ ID NO: 136837 - RNA, 32 nt, Homo Sapiens
uuauguaauauuguguuaaauuauauuguuuu

SEQ ID NO: 136838 - RNA, 32 nt, Homo Sapiens
uaggggugcagggucagugcugaggccugggc

SEQ ID NO: 136839 - RNA, 32 nt, Homo Sapiens
accuaccccuggauuuuguaccaccaccucua

SEQ ID NO: 136840 - RNA, 32 nt, Homo Sapiens
ccuucuuuguaauacuuucuaugugacauuuc

SEQ ID NO: 136841 - RNA, 32 nt, Homo Sapiens
acauugagcuggcuuuaccauguuuggugaaa

SEQ ID NO: 136842 - RNA, 32 nt, Homo Sapiens
ucugccagcuggaagugcuuggcuccacuuag

SEQ ID NO: 136843 - RNA, 32 nt, Homo Sapiens
aucugggaggauuuuuugguugccuaaagugg

SEQ ID NO: 136844 - RNA, 32 nt, Homo Sapiens
ugaaugccccaccccaggaaaacgggcccgca

SEQ ID NO: 136845 - RNA, 30 nt, Homo Sapiens
cgucuaccaaaauaaaguuguagugauucc

SEQ ID NO: 136846 - RNA, 29 nt, Homo Sapiens
uuucuggagaaggugccguuauuuuccuc

SEQ ID NO: 136847 - RNA, 32 nt, Homo Sapiens
accaggacuucagggaguuucagaccugcaga

SEQ ID NO: 136848 - RNA, 32 nt, Homo Sapiens
agcugaagggaguuacugagaaaauaguuaac

SEQ ID NO: 136849 - RNA, 32 nt, Homo Sapiens
ggagaaauaggaucucacaaaggaaaguagaa

SEQ ID NO: 136850 - RNA, 32 nt, Homo Sapiens
ugagcucagggagaccccgguguguccguucu

SEQ ID NO: 136851 - RNA, 32 nt, Homo Sapiens
cuguggccugcgccgcgcgggcaggcaccugu

SEQ ID NO: 136852 - RNA, 32 nt, Homo Sapiens
ugucuucuuuggagaaacaucuauucaaguuu

SEQ ID NO: 136853 - RNA, 32 nt, Homo Sapiens
guuccaacaugacuuaaauaaauacacugacu

SEQ ID NO: 136854 - RNA, 32 nt, Homo Sapiens
cugccuguagcggcguuguugccacuccgcca

SEQ ID NO: 136855 - RNA, 32 nt, Homo Sapiens
gaaugucugaggggucaggcggugcuggcaag

SEQ ID NO: 136856 - RNA, 32 nt, Homo Sapiens
ucagugagcauggaggggcagggccaucccug

SEQ ID NO: 136857 - RNA, 32 nt, Homo Sapiens
aauaguaaucuuuuuccagcguucucucuucu

SEQ ID NO: 136858 - RNA, 32 nt, Homo Sapiens
uugucacccauugagcugcaagagggaccaag

SEQ ID NO: 136859 - RNA, 32 nt, Homo Sapiens
cucccagcgcuggcuccaggcuccucaugagg

SEQ ID NO: 136860 - RNA, 32 nt, Homo Sapiens
ccgugcggcuccugcgggugaccaggagcgcg

SEQ ID NO: 136861 - RNA, 32 nt, Homo Sapiens
aaauuggcaaaugucaucaguguuuuaaacag

SEQ ID NO: 136862 - RNA, 32 nt, Homo Sapiens
ugcugccgcgccgugucugaugugucagugcu

SEQ ID NO: 136863 - RNA, 30 nt, Homo Sapiens
uuugcuccacuugcugguguuuuauagauu

SEQ ID NO: 136864 - RNA, 32 nt, Homo Sapiens
auaacuucucgcguccccggcguccgccgccg

SEQ ID NO: 136865 - RNA, 32 nt, Homo Sapiens
ccagcggcgccuccuccacaccccccgccgca

SEQ ID NO: 136866 - RNA, 32 nt, Homo Sapiens
ggugcggucauugugaggaaggggaugaguga

SEQ ID NO: 136867 - RNA, 32 nt, Homo Sapiens
ccuggagcccuauggccaacugcgaguucagc

SEQ ID NO: 136868 - RNA, 32 nt, Homo Sapiens
ccugggccucccagcccagcccagccugagaa

SEQ ID NO: 136869 - RNA, 32 nt, Homo Sapiens
ucuaaaacaagcuacuaacaagagagagaaca

SEQ ID NO: 136870 - RNA, 32 nt, Homo Sapiens
gccuggacuucagcagaguccuggagcugcug

SEQ ID NO: 136871 - RNA, 30 nt, Homo Sapiens
cugccuccuggagugggggaaacgcagcac

SEQ ID NO: 136872 - RNA, 32 nt, Homo Sapiens
cagugaccugucaaggcuuaugcuaacaggag

SEQ ID NO: 136873 - RNA, 32 nt, Homo Sapiens
gcgcagccccagggaggugcuuccugcaccuc

SEQ ID NO: 136874 - RNA, 32 nt, Homo Sapiens
cucauuccuuccccuuuuuuuuucaaauggca

SEQ ID NO: 136875 - RNA, 32 nt, Homo Sapiens
gagugucgccgggaggccuucagggugggggg

SEQ ID NO: 136876 - RNA, 32 nt, Homo Sapiens
aauagagaaguuuguauauacacauaauuaaa

SEQ ID NO: 136877 - RNA, 32 nt, Homo Sapiens
uacaggcccagcugcagaaggaccucaccugu

SEQ ID NO: 136878 - RNA, 32 nt, Homo Sapiens
ggguugcagacaccagcagcccccuauugcug

SEQ ID NO: 136879 - RNA, 32 nt, Homo Sapiens
cggaggaggaggagcggccgagcaucucucuc

SEQ ID NO: 136880 - RNA, 32 nt, Homo Sapiens
uugaaggcgaagcugcagaugccauuccagag

SEQ ID NO: 136881 - RNA, 32 nt, Homo Sapiens
ucgcgacugcggcucuuccucgggcagcggaa

SEQ ID NO: 136882 - RNA, 32 nt, Homo Sapiens
ugugacugcccccaacacauucaaaacccuag

SEQ ID NO: 136883 - RNA, 32 nt, Homo Sapiens
gguccguggucagaggaugggugcuggugggg

SEQ ID NO: 136884 - RNA, 32 nt, Homo Sapiens
gucggguugacccagggcugucucccuccaga

SEQ ID NO: 136885 - RNA, 32 nt, Homo Sapiens
aaacucuucuaaaaagcaaaacugcauuauua

SEQ ID NO: 136886 - RNA, 32 nt, Homo Sapiens
ccauggcagacaccccaugucuuuguuacccc

SEQ ID NO: 136887 - RNA, 32 nt, Homo Sapiens
aaaaaaagacuugauucucaccacagagcugc

SEQ ID NO: 136888 - RNA, 32 nt, Homo Sapiens
ugggaacaggccuccuaucuuuagucacuuug

SEQ ID NO: 136889 - RNA, 32 nt, Homo Sapiens
gagagggccacaagagggccacagggguggcc

SEQ ID NO: 136890 - RNA, 31 nt, Homo Sapiens
uacaugaaauucaacuuuccaaauaaaaguu

SEQ ID NO: 136891 - RNA, 32 nt, Homo Sapiens
gcgacuuggcucgggcagcugaccccaaagug

SEQ ID NO: 136892 - RNA, 32 nt, Homo Sapiens
ucuccgugugggggcuacaugcgacccucucc

SEQ ID NO: 136893 - RNA, 32 nt, Homo Sapiens
agccucgacuucucggggccaagcgauccucc

SEQ ID NO: 136894 - RNA, 32 nt, Homo Sapiens
ggugaaugucauuggcauuggcaccagugugg

SEQ ID NO: 136895 - RNA, 32 nt, Homo Sapiens
uccaacuccccauaccucugucucucucugcu

SEQ ID NO: 136896 - RNA, 32 nt, Homo Sapiens
gggccccugcagaauaaaucugccaguuuuua

SEQ ID NO: 136897 - RNA, 32 nt, Homo Sapiens
gggcagccucucgcacggauuucagcgccuuc

SEQ ID NO: 136898 - RNA, 32 nt, Homo Sapiens
agucuggcucugcugcccaggcuggaaugcag

SEQ ID NO: 136899 - RNA, 32 nt, Homo Sapiens
cugugggaaacgcaggcccugagagaggcucc

SEQ ID NO: 136900 - RNA, 32 nt, Homo Sapiens
gccggcuggcguucacgugacccggcgucauu

SEQ ID NO: 136901 - RNA, 32 nt, Homo Sapiens
ugcuacaaaaagacaucggucaguaacgagca

SEQ ID NO: 136902 - RNA, 32 nt, Homo Sapiens
caggagucuuugccgagccggagggaggcgca

SEQ ID NO: 136903 - RNA, 32 nt, Homo Sapiens
uccccaccccccagccccuuggcccucuccug

SEQ ID NO: 136904 - RNA, 32 nt, Homo Sapiens
aggcccuggccggcccucccccugcucugcuu

SEQ ID NO: 136905 - RNA, 32 nt, Homo Sapiens
aaagggaagcagaaacaaaugaaguugcagcc

SEQ ID NO: 136906 - RNA, 32 nt, Homo Sapiens
uagucuuguaucuauuaaauguauaccuauua

SEQ ID NO: 136907 - RNA, 32 nt, Homo Sapiens
aucuuguguaauauaauuuaaauucauuuuag

SEQ ID NO: 136908 - RNA, 32 nt, Homo Sapiens
aaugggaguuugggggcagcuaaaguugacau

SEQ ID NO: 136909 - RNA, 32 nt, Homo Sapiens
ccauuaaaaugaauuucuuuuuuuuuaagaca

SEQ ID NO: 136910 - RNA, 32 nt, Homo Sapiens
gcgccggcggugagggagccggaguucgcgcc

SEQ ID NO: 136911 - RNA, 32 nt, Homo Sapiens
ccccaagaagaagcagaagagaaguugguaau

SEQ ID NO: 136912 - RNA, 32 nt, Homo Sapiens
uuggccucagaauucacaaaauuuccacaaaa

SEQ ID NO: 136913 - RNA, 32 nt, Homo Sapiens
ugaaacucuaaaugcauagaaauaaaaauaau

SEQ ID NO: 136914 - RNA, 32 nt, Homo Sapiens
auaaagguguuuucauuuuccuguucuuaccu

SEQ ID NO: 136915 - RNA, 32 nt, Homo Sapiens
caucccugucuccagagucuuucagaauccag

SEQ ID NO: 136916 - RNA, 32 nt, Homo Sapiens
cuaugcugguugagaagaaguguacuugccac

SEQ ID NO: 136917 - RNA, 32 nt, Homo Sapiens
uaaauggcagagcuauguguaaauauuuuaag

SEQ ID NO: 136918 - RNA, 32 nt, Homo Sapiens
aucuacaaaaauuuauuauauauuuacagaag

SEQ ID NO: 136919 - RNA, 32 nt, Homo Sapiens
agacaauaaaauggaaagguccugcuguggaa

SEQ ID NO: 136920 - RNA, 32 nt, Homo Sapiens
uucuaaugaugauauuguacagcuucuaauuc

SEQ ID NO: 136921 - RNA, 32 nt, Homo Sapiens
cucuuaaguauuucaguguaucugcaucuuug

SEQ ID NO: 136922 - RNA, 32 nt, Homo Sapiens
gaaugcagcuggaggcuacgcauggccucugc

SEQ ID NO: 136923 - RNA, 32 nt, Homo Sapiens
caugcuccaccuggugccccaggccacagcug

SEQ ID NO: 136924 - RNA, 32 nt, Homo Sapiens
uccauccacacacguuugaaaaacacuauuag

SEQ ID NO: 136925 - RNA, 32 nt, Homo Sapiens
augggaugcagcgugggggcugucugaaggac

SEQ ID NO: 136926 - RNA, 32 nt, Homo Sapiens
cggcuguggccgcggcagcgcacguguccgcu

SEQ ID NO: 136927 - RNA, 32 nt, Homo Sapiens
cgaggaggagggcugcgccuccaucccccugu

SEQ ID NO: 136928 - RNA, 28 nt, Homo Sapiens
ccagucuaauuuaaaauguguuuguugg

SEQ ID NO: 136929 - RNA, 32 nt, Homo Sapiens
gcaagagaggggcauuacugucaccugacuug

SEQ ID NO: 136930 - RNA, 32 nt, Homo Sapiens
aggcccaauauuuaggggucuggaaccccgag

SEQ ID NO: 136931 - RNA, 32 nt, Homo Sapiens
agucaagugccuaaguuuuuaauauuggacuu

SEQ ID NO: 136932 - RNA, 32 nt, Homo Sapiens
aaauuagcugggugugguggcgggcgccugua

SEQ ID NO: 136933 - RNA, 32 nt, Homo Sapiens
cgcccggccccggcacugcccggggcaucugg

SEQ ID NO: 136934 - RNA, 31 nt, Homo Sapiens
gcccugccuccgucccaaccaugggcugcug

SEQ ID NO: 136935 - RNA, 32 nt, Homo Sapiens
ccuccuggcuucagcauccugcagguagagca

SEQ ID NO: 136936 - RNA, 32 nt, Homo Sapiens
ugucggcucaggaugccggaaaaugaccugua

SEQ ID NO: 136937 - RNA, 32 nt, Homo Sapiens
ugaccauucagggaucuuacuccagcuugauu

SEQ ID NO: 136938 - RNA, 32 nt, Homo Sapiens
gugguggcucugccccuugcugcagugagccc

SEQ ID NO: 136939 - RNA, 32 nt, Homo Sapiens
ucucucgcgcagggcccccgcggccggggcag

SEQ ID NO: 136940 - RNA, 32 nt, Homo Sapiens
cacugcacuccagccugggcuacagagcgaga

SEQ ID NO: 136941 - RNA, 32 nt, Homo Sapiens
uguucucccucauggugggcaucuucucuguc

SEQ ID NO: 136942 - RNA, 32 nt, Homo Sapiens
gcgagcggccucggggaccauggggagcgauc

SEQ ID NO: 136943 - RNA, 32 nt, Homo Sapiens
guuuagcgggugccgccucuaaagagagcaau

SEQ ID NO: 136944 - RNA, 32 nt, Homo Sapiens
aaccauacugaauacauauaaugacuaugugc

SEQ ID NO: 136945 - RNA, 32 nt, Homo Sapiens
ccccggggaccgggccggcgccauggaccgag

SEQ ID NO: 136946 - RNA, 32 nt, Homo Sapiens
accgcacaccucccgggcccgcugcucuccau

SEQ ID NO: 136947 - RNA, 32 nt, Homo Sapiens
cccaccgacucuugguacuggccacggccaug

SEQ ID NO: 136948 - RNA, 32 nt, Homo Sapiens
uaugugauauuuuugacauccuugugcuaaaa

SEQ ID NO: 136949 - RNA, 32 nt, Homo Sapiens
ugaagggaauaaaauuuguguaagaaaaaagc

SEQ ID NO: 136950 - RNA, 32 nt, Homo Sapiens
aggacgacucuugaaacaaaaugagacguggu

SEQ ID NO: 136951 - RNA, 28 nt, Homo Sapiens
ugaagaguggcuagugguuggcccaugu

SEQ ID NO: 136952 - RNA, 31 nt, Homo Sapiens
agaucaaaagguuaauaaaguaauuauaacu

SEQ ID NO: 136953 - RNA, 32 nt, Homo Sapiens
aucgucuucaacaugaagauagccacaguguc

SEQ ID NO: 136954 - RNA, 32 nt, Homo Sapiens
ugcuuucccccucccuagaggugcccauucca

SEQ ID NO: 136955 - RNA, 29 nt, Homo Sapiens
auggcagcuguauccaaccacaaacaaca

SEQ ID NO: 136956 - RNA, 32 nt, Homo Sapiens
agaccauugugauaccugaccccgcccaccug

SEQ ID NO: 136957 - RNA, 32 nt, Homo Sapiens
ggcugcggagcaccccaccugcccccgagacc

SEQ ID NO: 136958 - RNA, 32 nt, Homo Sapiens
aacaagcaguagacgccuccucgaagcauccg

SEQ ID NO: 136959 - RNA, 32 nt, Homo Sapiens
uuaaaagaaaaucaguaaaauauuuugcuugu

SEQ ID NO: 136960 - RNA, 32 nt, Homo Sapiens
cuaucagucucgcgcucaccgcccggcugagg

SEQ ID NO: 136961 - RNA, 32 nt, Homo Sapiens
caaacagaaaucagguguuuuaagacugaaug

SEQ ID NO: 136962 - RNA, 32 nt, Homo Sapiens
uagcauacguuuuucuuaauuguuaucagcau

SEQ ID NO: 136963 - RNA, 32 nt, Homo Sapiens
uucuguuccagaauuaaagaaguuuuuagauu

SEQ ID NO: 136964 - RNA, 32 nt, Homo Sapiens
gcacugggagacgaaaguuuuggcaucuguuc

SEQ ID NO: 136965 - RNA, 32 nt, Homo Sapiens
agauauuuucuuucuccugaccauguauuuua

SEQ ID NO: 136966 - RNA, 32 nt, Homo Sapiens
gggucggagcuugggggcagguccugggagug

SEQ ID NO: 136967 - RNA, 32 nt, Homo Sapiens
agccacggccccacccacagccuggucaucca

SEQ ID NO: 136968 - RNA, 32 nt, Homo Sapiens
uccucccccgguugccccccacucuaaagccu

SEQ ID NO: 136969 - RNA, 32 nt, Homo Sapiens
cuuucaauauuuuuauaaacuuuugugugugc

SEQ ID NO: 136970 - RNA, 32 nt, Homo Sapiens
aaagaggauggcaaacagaaaauguaaaagaa

SEQ ID NO: 136971 - RNA, 32 nt, Homo Sapiens
cucccaugaagauaauuauggugucauaaaau

SEQ ID NO: 136972 - RNA, 32 nt, Homo Sapiens
caugagcugcccacauggaggacccagccacc

SEQ ID NO: 136973 - RNA, 32 nt, Homo Sapiens
gaagcauguauuaaugcuguggcuaugagagg

SEQ ID NO: 136974 - RNA, 32 nt, Homo Sapiens
agucuucgccuuccucuuuuuaagcuguuuua

SEQ ID NO: 136975 - RNA, 25 nt, Homo Sapiens
augccggcugagcugcugcugcugc

SEQ ID NO: 136976 - RNA, 32 nt, Homo Sapiens
uccauaaauuaggcccgcucucuggagggaag

SEQ ID NO: 136977 - RNA, 32 nt, Homo Sapiens
auccaacacagauuccaggaccacugaaacca

SEQ ID NO: 136978 - RNA, 32 nt, Homo Sapiens
uacaggugugugccuccacacccggcuaauuu

SEQ ID NO: 136979 - RNA, 32 nt, Homo Sapiens
ggagagcaaauuauggaaauguguauuuuaua

SEQ ID NO: 136980 - RNA, 32 nt, Homo Sapiens
gacgggccugacgcgggcggguugaacgcgcu

SEQ ID NO: 136981 - RNA, 32 nt, Homo Sapiens
aggaggaggaggaguagcccugaaacaaagca

SEQ ID NO: 136982 - RNA, 32 nt, Homo Sapiens
gggcgggcgcgguggcucacgccuguaauccc

SEQ ID NO: 136983 - RNA, 32 nt, Homo Sapiens
uacgguagauacuguuguuauccucacccauc

SEQ ID NO: 136984 - RNA, 31 nt, Homo Sapiens
aggaucuauugagugaacagaauugcaaaua

SEQ ID NO: 136985 - RNA, 30 nt, Homo Sapiens
gaacaauaaaauugcauguuuacuucuaaa

SEQ ID NO: 136986 - RNA, 32 nt, Homo Sapiens
cugccccccucccccgcagcagcgggccuugc

SEQ ID NO: 136987 - RNA, 32 nt, Homo Sapiens
caggagcacggcauggcgggagcggggcugca

SEQ ID NO: 136988 - RNA, 32 nt, Homo Sapiens
uuuuacuuuuucuggcugaaaggauuuuacau

SEQ ID NO: 136989 - RNA, 32 nt, Homo Sapiens
uccacagagaauaugcauggaugugugguugg

SEQ ID NO: 136990 - RNA, 32 nt, Homo Sapiens
gacgagguggcagucgcaggauuuggcuauga

SEQ ID NO: 136991 - RNA, 32 nt, Homo Sapiens
ccugccuggaccagccucuccacucaugugac

SEQ ID NO: 136992 - RNA, 32 nt, Homo Sapiens
cugaaguuucccucugucuccuccucuaauua

SEQ ID NO: 136993 - RNA, 32 nt, Homo Sapiens
cugggggcggggcaggggcagguguagccucu

SEQ ID NO: 136994 - RNA, 31 nt, Homo Sapiens
gccgcgaugguguuguuggagagcgagcagu

SEQ ID NO: 136995 - RNA, 32 nt, Homo Sapiens
ugugaaugucauugucccuuguguucuguggc

SEQ ID NO: 136996 - RNA, 32 nt, Homo Sapiens
cagaaaaaacuuaugaaaacauucaauguaga

SEQ ID NO: 136997 - RNA, 32 nt, Homo Sapiens
ugauauuagauuguuccuuuuacaaaaguguu

SEQ ID NO: 136998 - RNA, 32 nt, Homo Sapiens
uugugcucuucuguuccaaggaccacagguau

SEQ ID NO: 136999 - RNA, 32 nt, Homo Sapiens
acccacaaaacaauguaaucccagcgauggac

SEQ ID NO: 137000 - RNA, 32 nt, Homo Sapiens
gaggguguccugcaccggggccugggcaggag

SEQ ID NO: 137001 - RNA, 32 nt, Homo Sapiens
uacuguuagaucuauuucauguuuuuauuaug

SEQ ID NO: 137002 - RNA, 28 nt, Homo Sapiens
aagaggaaagauuaacuauuugcaccga

SEQ ID NO: 137003 - RNA, 32 nt, Homo Sapiens
guguguguggcguugaucuuuagccugucuca

SEQ ID NO: 137004 - RNA, 32 nt, Homo Sapiens
uuacuuuucuuuucuuuuuuuuuuuuuuuuug

SEQ ID NO: 137005 - RNA, 32 nt, Homo Sapiens
gucccuguggcuauguuuccaguguccucugg

SEQ ID NO: 137006 - RNA, 32 nt, Homo Sapiens
ccugcuggaguggcagcuggggugauggccag

SEQ ID NO: 137007 - RNA, 30 nt, Homo Sapiens
ucaacaugcgcugcucgccgggaggcgucu

SEQ ID NO: 137008 - RNA, 32 nt, Homo Sapiens
aauuauauccuaaaauguauauuuugcauaaa

SEQ ID NO: 137009 - RNA, 32 nt, Homo Sapiens
gacaaaaucuaaggcuccauggagccaccacg

SEQ ID NO: 137010 - RNA, 32 nt, Homo Sapiens
guuaaugagcugugagaugaggcgcugcugcg

SEQ ID NO: 137011 - RNA, 32 nt, Homo Sapiens
uuccucagcuacaaaaugcacaugacaguacu

SEQ ID NO: 137012 - RNA, 32 nt, Homo Sapiens
cugaucugccucucacacagguccuggugucu

SEQ ID NO: 137013 - RNA, 32 nt, Homo Sapiens
uagcucugaggguggaaggcagggaggugcca

SEQ ID NO: 137014 - RNA, 32 nt, Homo Sapiens
auguucagcucuuuuauggaagcauguguaaa

SEQ ID NO: 137015 - RNA, 32 nt, Homo Sapiens
gacuacauuucccgacaggccucccggcucuc

SEQ ID NO: 137016 - RNA, 32 nt, Homo Sapiens
auauuguacuuacugugacagcagauaauaaa

SEQ ID NO: 137017 - RNA, 32 nt, Homo Sapiens
guguccucagagcagccucgccugcugacccc

SEQ ID NO: 137018 - RNA, 29 nt, Homo Sapiens
uuaucuaccauugaaggaaagcuauaucu

SEQ ID NO: 137019 - RNA, 32 nt, Homo Sapiens
cacugcacuccagccugggugacagagugaga

SEQ ID NO: 137020 - RNA, 32 nt, Homo Sapiens
caccgcacuccagccugggugacagagcgaga

SEQ ID NO: 137021 - RNA, 32 nt, Homo Sapiens
caccacacuccagccugggugacagagcaaga

SEQ ID NO: 137022 - RNA, 32 nt, Homo Sapiens
accccgggccccuccgccgccgccauggcucg

SEQ ID NO: 137023 - RNA, 32 nt, Homo Sapiens
gaaccugggagguggagguuguggugaggcga

SEQ ID NO: 137024 - RNA, 32 nt, Homo Sapiens
auuguaggggagacgcccagagcgccauuugg

SEQ ID NO: 137025 - RNA, 32 nt, Homo Sapiens
aggucuccccgccucacucgggcccguggccg

SEQ ID NO: 137026 - RNA, 32 nt, Homo Sapiens
uugucugcucagcucuucuccuuguuacauag

SEQ ID NO: 137027 - RNA, 32 nt, Homo Sapiens
agcuagucauucagccuguguaaccaugugga

SEQ ID NO: 137028 - RNA, 32 nt, Homo Sapiens
uauaauaaagagcaauuuguaacugaguggca

SEQ ID NO: 137029 - RNA, 32 nt, Homo Sapiens
aggcagcaguugcagugagcugagauggugcc

SEQ ID NO: 137030 - RNA, 32 nt, Homo Sapiens
aagaaacacacagguacuuucagaugcugaua

SEQ ID NO: 137031 - RNA, 32 nt, Homo Sapiens
auugaaacaaaguggugucaaaauaaagcccc

SEQ ID NO: 137032 - RNA, 32 nt, Homo Sapiens
cuuguguuauuuaaugagucagucaaucggcu

SEQ ID NO: 137033 - RNA, 32 nt, Homo Sapiens
uuuacuuuauagaacugucuaccugggagagg

SEQ ID NO: 137034 - RNA, 32 nt, Homo Sapiens
cagguguucaacagauauugugcucauucaau

SEQ ID NO: 137035 - RNA, 32 nt, Homo Sapiens
guauauucagcacaagucuacugcaauuaugu

SEQ ID NO: 137036 - RNA, 32 nt, Homo Sapiens
cacucuaaaaaauaaaauugcuuuguacuaga

SEQ ID NO: 137037 - RNA, 32 nt, Homo Sapiens
gaggcggcgguagcauggagggggagaguacg

SEQ ID NO: 137038 - RNA, 32 nt, Homo Sapiens
ggagcgaguccccgcgcguggcagcucggcgg

SEQ ID NO: 137039 - RNA, 32 nt, Homo Sapiens
cucccacucccugguggccccaucccccaguu

SEQ ID NO: 137040 - RNA, 32 nt, Homo Sapiens
cuuuagcccaaccagugcccugaggguggcau

SEQ ID NO: 137041 - RNA, 32 nt, Homo Sapiens
gggaguaagaugagcuagagaaaauaaccugg

SEQ ID NO: 137042 - RNA, 32 nt, Homo Sapiens
cugggcaccugccucugacagacaccagacca

SEQ ID NO: 137043 - RNA, 32 nt, Homo Sapiens
agaaaggaaagauaaauguauggaccgaccuu

SEQ ID NO: 137044 - RNA, 32 nt, Homo Sapiens
uucagggcuucuuuguauguguucuagauaca

SEQ ID NO: 137045 - RNA, 32 nt, Homo Sapiens
cugaagaucaaggaagagagugaggcauuuuc

SEQ ID NO: 137046 - RNA, 32 nt, Homo Sapiens
aaccugcugaugucuauuuaauugaugaacca

SEQ ID NO: 137047 - RNA, 32 nt, Homo Sapiens
gucaacccugucaaugacccaccccacaucau

SEQ ID NO: 137048 - RNA, 32 nt, Homo Sapiens
cacauugccccggcugcucuccaaccccugag

SEQ ID NO: 137049 - RNA, 32 nt, Homo Sapiens
aguuuacagauguuuuuaauucuacuauuuua

SEQ ID NO: 137050 - RNA, 32 nt, Homo Sapiens
gucaucaccagcaagcucugcuccucauucgg

SEQ ID NO: 137051 - RNA, 32 nt, Homo Sapiens
auuaauguuuuaaagcacugggauagucuaau

SEQ ID NO: 137052 - RNA, 32 nt, Homo Sapiens
aaaugugaaaaacguggcaaagcuuuucauua

SEQ ID NO: 137053 - RNA, 32 nt, Homo Sapiens
cugcaacuuccaccuccuggguucaagcaauu

SEQ ID NO: 137054 - RNA, 32 nt, Homo Sapiens
ccgcccgcucagcgcccggccccgggaugacg

SEQ ID NO: 137055 - RNA, 32 nt, Homo Sapiens
ugaacacacauggaugcacacacacacacgcc

SEQ ID NO: 137056 - RNA, 32 nt, Homo Sapiens
gggaugcaaggaggugaugaaaaggagacagg

SEQ ID NO: 137057 - RNA, 30 nt, Homo Sapiens
cuuccggcgcccggagcugcuggcccaaag

SEQ ID NO: 137058 - RNA, 32 nt, Homo Sapiens
gcaccugacaucucccacgcuccaccugcgcg

SEQ ID NO: 137059 - RNA, 32 nt, Homo Sapiens
agguuacaaugcugaacgcaugagauggaaga

SEQ ID NO: 137060 - RNA, 32 nt, Homo Sapiens
cacagaggacaguuuccccaucgccuucuggu

SEQ ID NO: 137061 - RNA, 32 nt, Homo Sapiens
gggcgugggcccggccgcggagcccacacugc

SEQ ID NO: 137062 - RNA, 32 nt, Homo Sapiens
aagggauccaacaaagaagccaugaccaguua

SEQ ID NO: 137063 - RNA, 32 nt, Homo Sapiens
gauucauggguccccuaguuaggcccagauaa

SEQ ID NO: 137064 - RNA, 32 nt, Homo Sapiens
gacccaggagagucgcugccagggccaucacg

SEQ ID NO: 137065 - RNA, 32 nt, Homo Sapiens
aacagagauuguggcuacgcaaaugcaccaaa

SEQ ID NO: 137066 - RNA, 32 nt, Homo Sapiens
accuauaauucccagcacuuugggaggccaag

SEQ ID NO: 137067 - RNA, 32 nt, Homo Sapiens
ggucuuucuuguuuuuaauauucaugcaugua

SEQ ID NO: 137068 - RNA, 32 nt, Homo Sapiens
aggucaaggaacuggaggagaagacagccacg

SEQ ID NO: 137069 - RNA, 32 nt, Homo Sapiens
guauuggcucugugguaaaucugugaagucau

SEQ ID NO: 137070 - RNA, 32 nt, Homo Sapiens
cccucccugugugcggccucuccaccucucac

SEQ ID NO: 137071 - RNA, 32 nt, Homo Sapiens
gccucuuuucuaaauguucaggaaaagcaucg

SEQ ID NO: 137072 - RNA, 32 nt, Homo Sapiens
aauuguaagauaagaaacaguuucuuagagca

SEQ ID NO: 137073 - RNA, 32 nt, Homo Sapiens
uauucauaaugaauuuacucuguugauauuaa

SEQ ID NO: 137074 - RNA, 32 nt, Homo Sapiens
auguauaauacuauauguuagcacugaccauc

SEQ ID NO: 137075 - RNA, 32 nt, Homo Sapiens
aaagaaguuuucaacuaaauccaaaagugcgg

SEQ ID NO: 137076 - RNA, 32 nt, Homo Sapiens
gggagacggagcgaguccagcggccgcgggca

SEQ ID NO: 137077 - RNA, 32 nt, Homo Sapiens
caccgggcguccccgggcgcggccauggcaag

SEQ ID NO: 137078 - RNA, 32 nt, Homo Sapiens
uauaaauacugaaaaugugauguucugcuuau

SEQ ID NO: 137079 - RNA, 32 nt, Homo Sapiens
aauaaaaauggcauacuguagggucuucagag

SEQ ID NO: 137080 - RNA, 32 nt, Homo Sapiens
gugagagacaagagacacacacagagagacgg

SEQ ID NO: 137081 - RNA, 32 nt, Homo Sapiens
gccagugacgccucuguguucuggggcggaau

SEQ ID NO: 137082 - RNA, 32 nt, Homo Sapiens
gcccucucuccugacccccacccagguggcau

SEQ ID NO: 137083 - RNA, 32 nt, Homo Sapiens
agggaucugucguggggugcugcaauguuccu

SEQ ID NO: 137084 - RNA, 32 nt, Homo Sapiens
ugagacgcgccggccucccgcugcugcuccgg

SEQ ID NO: 137085 - RNA, 32 nt, Homo Sapiens
gggcuggcuggccucacccaccccugcacagu

SEQ ID NO: 137086 - RNA, 32 nt, Homo Sapiens
auuacaggaauaucagaagagaaugaaaaaac

SEQ ID NO: 137087 - RNA, 32 nt, Homo Sapiens
cucuccucuccucuccuauggugagcccagcg

SEQ ID NO: 137088 - RNA, 32 nt, Homo Sapiens
uugguucagugaucuuggagugaugaugguaa

SEQ ID NO: 137089 - RNA, 32 nt, Homo Sapiens
ccgauuuugugauagccaagugcuuggccugg

SEQ ID NO: 137090 - RNA, 32 nt, Homo Sapiens
auuuccugcuuggcugcccaaggauucccagu

SEQ ID NO: 137091 - RNA, 32 nt, Homo Sapiens
cauucggagccuccguccacuccaguuuuauc

SEQ ID NO: 137092 - RNA, 32 nt, Homo Sapiens
aaacacgguuaagggaggucgucacuggggug

SEQ ID NO: 137093 - RNA, 32 nt, Homo Sapiens
cuuucuucccauccccccuccuccugacaaac

SEQ ID NO: 137094 - RNA, 32 nt, Homo Sapiens
acccuugaaaauaaagaaguaauuauugacac

SEQ ID NO: 137095 - RNA, 32 nt, Homo Sapiens
ugccugcucuucugccacuccucccaccccgu

SEQ ID NO: 137096 - RNA, 32 nt, Homo Sapiens
cugguuugaagccccagguaucccccuucccu

SEQ ID NO: 137097 - RNA, 32 nt, Homo Sapiens
uuaccacuaauucgucauaggcacauauuuuu

SEQ ID NO: 137098 - RNA, 32 nt, Homo Sapiens
cuuuugcccugugggccucaguucuugcagua

SEQ ID NO: 137099 - RNA, 32 nt, Homo Sapiens
uugaucuucuauuaaaaugauuccucuuuauu

SEQ ID NO: 137100 - RNA, 32 nt, Homo Sapiens
ccguggggaaagggcauagucugcccguuucu

SEQ ID NO: 137101 - RNA, 32 nt, Homo Sapiens
uguguuucuaagcuagggaacaccaguaagug

SEQ ID NO: 137102 - RNA, 32 nt, Homo Sapiens
caugauaaauguuauugucgcuguuuuaccga

SEQ ID NO: 137103 - RNA, 32 nt, Homo Sapiens
ggcggcugcagcgcuagcggcgcgggggcugg

SEQ ID NO: 137104 - RNA, 32 nt, Homo Sapiens
uccaggggccccagccccccaggaacuugggg

SEQ ID NO: 137105 - RNA, 32 nt, Homo Sapiens
aagagaaaccauuuccuugauuguguaaggaa

SEQ ID NO: 137106 - RNA, 32 nt, Homo Sapiens
ucgaaaaaacacacaggagcacuccaucauga

SEQ ID NO: 137107 - RNA, 32 nt, Homo Sapiens
acgcagacgcagaggucgagcgcaggccgaaa

SEQ ID NO: 137108 - RNA, 32 nt, Homo Sapiens
ugaaguucaggucuugccauugccauuacaga

SEQ ID NO: 137109 - RNA, 32 nt, Homo Sapiens
gggggugggggccaacucuaggagcaccuaau

SEQ ID NO: 137110 - RNA, 32 nt, Homo Sapiens
ggggcagaugacacgaugcacauccuggugga

SEQ ID NO: 137111 - RNA, 32 nt, Homo Sapiens
uuaaauaucccauuuugacugagaauauugac

SEQ ID NO: 137112 - RNA, 32 nt, Homo Sapiens
ccaguccuucccuuccucuccucacucugacu

SEQ ID NO: 137113 - RNA, 32 nt, Homo Sapiens
aagccgaaccaaauccaccucccucaggugug

SEQ ID NO: 137114 - RNA, 32 nt, Homo Sapiens
uaucucuuaaaauggugauggaugugacaccu

SEQ ID NO: 137115 - RNA, 32 nt, Homo Sapiens
guaacagccaucugugaccuggaagcuuccuu

SEQ ID NO: 137116 - RNA, 32 nt, Homo Sapiens
gaccugggcuccucagggccccggggcaggcu

SEQ ID NO: 137117 - RNA, 32 nt, Homo Sapiens
ccuguguauucucauugggguugcaacaauaa

SEQ ID NO: 137118 - RNA, 32 nt, Homo Sapiens
gacaagccugccucaccuccagcaccuguagg

SEQ ID NO: 137119 - RNA, 32 nt, Homo Sapiens
acgaaugaggcacaacuauacuacauggacag

SEQ ID NO: 137120 - RNA, 32 nt, Homo Sapiens
uguggaaucaucacuugugucaaucaugcugu

SEQ ID NO: 137121 - RNA, 32 nt, Homo Sapiens
ccaaaucuuuugccuucugggcccagccaggc

SEQ ID NO: 137122 - RNA, 32 nt, Homo Sapiens
cuccuggaggucgguugcgacgaguaacggcg

SEQ ID NO: 137123 - RNA, 32 nt, Homo Sapiens
uaauggaauuguaguucucaggauaguauuuu

SEQ ID NO: 137124 - RNA, 32 nt, Homo Sapiens
cgggcgcgccccagcccacccacucgcgugcc

SEQ ID NO: 137125 - RNA, 32 nt, Homo Sapiens
gcagcuuggcucuuaaauuuuacuggcaggug

SEQ ID NO: 137126 - RNA, 32 nt, Homo Sapiens
gacugguguaagggagggagggguagggacag

SEQ ID NO: 137127 - RNA, 32 nt, Homo Sapiens
aauguaaaacacauacaaaagaauuaaaccca

SEQ ID NO: 137128 - RNA, 32 nt, Homo Sapiens
cuuaacuuuggguugacuuucaacagugaaua

SEQ ID NO: 137129 - RNA, 32 nt, Homo Sapiens
acaaccuugagcccaagcagcacuuuggguca

SEQ ID NO: 137130 - RNA, 32 nt, Homo Sapiens
gcaaaugccuucuugcuguccugucggucuca

SEQ ID NO: 137131 - RNA, 32 nt, Homo Sapiens
cccaccugacuuggcuuucucauccuucccaa

SEQ ID NO: 137132 - RNA, 32 nt, Homo Sapiens
gagcaaacauguccaggcuacucacuuuagug

SEQ ID NO: 137133 - RNA, 32 nt, Homo Sapiens
gcaaguggcuuucaacacacaacagcagaugg

SEQ ID NO: 137134 - RNA, 32 nt, Homo Sapiens
auuagcauugugaugcuuucugaaagaaauau

SEQ ID NO: 137135 - RNA, 32 nt, Homo Sapiens
ggggcugcuaugcacagauugccguuucccac

SEQ ID NO: 137136 - RNA, 32 nt, Homo Sapiens
guucucaauguuguaugaaccuccuucacaug

SEQ ID NO: 137137 - RNA, 32 nt, Homo Sapiens
uggcagggggcuugagauauuccuuuuuaaca

SEQ ID NO: 137138 - RNA, 32 nt, Homo Sapiens
gaaaaaggaacccauaaaaugucugguagagg

SEQ ID NO: 137139 - RNA, 32 nt, Homo Sapiens
agauccccucgguccagggccggcgccuggga

SEQ ID NO: 137140 - RNA, 32 nt, Homo Sapiens
cuuguuuuucuuuuccucuagagaccucggcu

SEQ ID NO: 137141 - RNA, 32 nt, Homo Sapiens
cagauucaaagugauccugugucuaaaccuuu

SEQ ID NO: 137142 - RNA, 32 nt, Homo Sapiens
ccacccugguccugacgccuccccucacuuag

SEQ ID NO: 137143 - RNA, 32 nt, Homo Sapiens
uguacugagagcacguaccaauaaaaauguua

SEQ ID NO: 137144 - RNA, 32 nt, Homo Sapiens
auucaagcugucuuugcacuagcucuaaagaa

SEQ ID NO: 137145 - RNA, 32 nt, Homo Sapiens
ggccaggcauggccuccaccaagcucagcccu

SEQ ID NO: 137146 - RNA, 32 nt, Homo Sapiens
auuccuccagagcuugaccccuggacauuugc

SEQ ID NO: 137147 - RNA, 32 nt, Homo Sapiens
uugggggccuaggaagccccccugcucccaca

SEQ ID NO: 137148 - RNA, 31 nt, Homo Sapiens
uuacacagagggagaaaggcucacuuuccaa

SEQ ID NO: 137149 - RNA, 32 nt, Homo Sapiens
aagaacgguuccugggggaagcagaggccagg

SEQ ID NO: 137150 - RNA, 32 nt, Homo Sapiens
ggaggggucguggcaggcagggugggccacgg

SEQ ID NO: 137151 - RNA, 32 nt, Homo Sapiens
uacuggagaaaagccauauaaauguagugagu

SEQ ID NO: 137152 - RNA, 32 nt, Homo Sapiens
cagggaggccccaggacccugugguccccugg

SEQ ID NO: 137153 - RNA, 32 nt, Homo Sapiens
aagauugacaaugaaaguggguucuccugggg

SEQ ID NO: 137154 - RNA, 32 nt, Homo Sapiens
ccgugguggccuggcugcuugcugucugugaa

SEQ ID NO: 137155 - RNA, 32 nt, Homo Sapiens
aacuauguuaguagauucuucaaugcuauaag

SEQ ID NO: 137156 - RNA, 32 nt, Homo Sapiens
ggaguccgacgcgggcgcgggcggggagcgug

SEQ ID NO: 137157 - RNA, 32 nt, Homo Sapiens
agaagauuacaauggcuauuagugcuacauuu

SEQ ID NO: 137158 - RNA, 32 nt, Homo Sapiens
uggugugacuccuggugccccgcggcuguggu

SEQ ID NO: 137159 - RNA, 32 nt, Homo Sapiens
gucgggaggaagaagagguggaggugugguug

SEQ ID NO: 137160 - RNA, 32 nt, Homo Sapiens
auuugaguugaaacgagugcgauuuauuuaag

SEQ ID NO: 137161 - RNA, 32 nt, Homo Sapiens
cucccugaacucucucuugcucgggaccugcc

SEQ ID NO: 137162 - RNA, 32 nt, Homo Sapiens
gaccaccuugcacuauuggacuuuggaaggag

SEQ ID NO: 137163 - RNA, 32 nt, Homo Sapiens
uguacaacaauuuuaaugauucccuuguucau

SEQ ID NO: 137164 - RNA, 32 nt, Homo Sapiens
uuaugaugauuuacaaaaauugagcuuacagg

SEQ ID NO: 137165 - RNA, 32 nt, Homo Sapiens
gauggauccuggauugauacaagguugagaaa

SEQ ID NO: 137166 - RNA, 32 nt, Homo Sapiens
gcuagaggcagagggagguaacacggaguccc

SEQ ID NO: 137167 - RNA, 32 nt, Homo Sapiens
uaucaaagaaaucgauacguaauagcagauug

SEQ ID NO: 137168 - RNA, 32 nt, Homo Sapiens
aaguguuuuccccccacccccacucgcccacc

SEQ ID NO: 137169 - RNA, 32 nt, Homo Sapiens
aguucccauuauuauuucuguucuuacaaaug

SEQ ID NO: 137170 - RNA, 32 nt, Homo Sapiens
auugcccucagccagcacuuuaggacaucugg

SEQ ID NO: 137171 - RNA, 32 nt, Homo Sapiens
ccgggauguuuccauugcuucauguuucagua

SEQ ID NO: 137172 - RNA, 32 nt, Homo Sapiens
accacagaauuuccuuuuaccccgggcugcuc

SEQ ID NO: 137173 - RNA, 31 nt, Homo Sapiens
ccugacauggggauuggugacccacauggac

SEQ ID NO: 137174 - RNA, 32 nt, Homo Sapiens
ucuuaggaagggggcaugucagacucgcaugc

SEQ ID NO: 137175 - RNA, 32 nt, Homo Sapiens
uagugcaaucagggcucacugcagcuuugacu

SEQ ID NO: 137176 - RNA, 32 nt, Homo Sapiens
accacugugagcccgcggcgugaggcguggga

SEQ ID NO: 137177 - RNA, 32 nt, Homo Sapiens
ccccgucggcccgccccgggcucccgcagauu

SEQ ID NO: 137178 - RNA, 32 nt, Homo Sapiens
ucacuggucgcucuguugugccccacagcacu

SEQ ID NO: 137179 - RNA, 32 nt, Homo Sapiens
ccaccugccacuuuuccaaugcuacuacaaga

SEQ ID NO: 137180 - RNA, 32 nt, Homo Sapiens
uugcuuuuuuauuuauuguuucauuucuuuau

SEQ ID NO: 137181 - RNA, 32 nt, Homo Sapiens
cagccucaugugucucgagcucuuccacucca

SEQ ID NO: 137182 - RNA, 32 nt, Homo Sapiens
gugggauugggagagguggggguggguucgcg

SEQ ID NO: 137183 - RNA, 32 nt, Homo Sapiens
aggcccuggaggggcugcugcuccucaguugc

SEQ ID NO: 137184 - RNA, 32 nt, Homo Sapiens
augagcuccuggauggcauuuuccagggcagg

SEQ ID NO: 137185 - RNA, 32 nt, Homo Sapiens
gcggaguaguccucauggccgccccgccggag

SEQ ID NO: 137186 - RNA, 32 nt, Homo Sapiens
guuuguagcgucggcucagagcccugguaccu

SEQ ID NO: 137187 - RNA, 32 nt, Homo Sapiens
gcuggagguccaggugaugcaggggacccaga

SEQ ID NO: 137188 - RNA, 32 nt, Homo Sapiens
agauuugguuggaaaucauguucguguuuuca

SEQ ID NO: 137189 - RNA, 32 nt, Homo Sapiens
cuucgcacagacugaagcugguaaaggugcug

SEQ ID NO: 137190 - RNA, 32 nt, Homo Sapiens
uacacuggaguucccacccccaccccccaccc

SEQ ID NO: 137191 - RNA, 32 nt, Homo Sapiens
gaugugcauuuucaccugagguuucccugcau

SEQ ID NO: 137192 - RNA, 32 nt, Homo Sapiens
aauacaaaaaucagccagcguuguguugcaag

SEQ ID NO: 137193 - RNA, 32 nt, Homo Sapiens
aaaaaaugacagagcugauggccaguguauac

SEQ ID NO: 137194 - RNA, 32 nt, Homo Sapiens
uucacugggucuuuuuccagccuucaguucua

SEQ ID NO: 137195 - RNA, 32 nt, Homo Sapiens
aguuuuaucuucuguuuuguuuuuguuuuuau

SEQ ID NO: 137196 - RNA, 32 nt, Homo Sapiens
aggagggugcucagagaagaccacggggacuc

SEQ ID NO: 137197 - RNA, 32 nt, Homo Sapiens
cggccagaaugaauucuauggacaggcacauc

SEQ ID NO: 137198 - RNA, 32 nt, Homo Sapiens
aggcggaggaggagcugggacgaacaaggacu

SEQ ID NO: 137199 - RNA, 32 nt, Homo Sapiens
cauacuuuuccacacaucuuuggacuuuucuu

SEQ ID NO: 137200 - RNA, 32 nt, Homo Sapiens
ucacccacggagaagagaaggacuagaggggg

SEQ ID NO: 137201 - RNA, 32 nt, Homo Sapiens
gcgucuccggcgggcgggagccaggcgcugac

SEQ ID NO: 137202 - RNA, 32 nt, Homo Sapiens
augaauuaugugcagagugaaaagcacacagg

SEQ ID NO: 137203 - RNA, 32 nt, Homo Sapiens
ccuaagaaauaccaggaaggagucccacagug

SEQ ID NO: 137204 - RNA, 32 nt, Homo Sapiens
gucggaaggaccagucuggggucauccuugcc

SEQ ID NO: 137205 - RNA, 32 nt, Homo Sapiens
cagccgggacgccagcgguucugauuacagac

SEQ ID NO: 137206 - RNA, 32 nt, Homo Sapiens
aaaccagaggcaccuuugcugcugccgcuguu

SEQ ID NO: 137207 - RNA, 32 nt, Homo Sapiens
cuccuaguucuucaucccacuccaacucuucc

SEQ ID NO: 137208 - RNA, 32 nt, Homo Sapiens
uuggccagagagccuggugcugcugcugcugu

SEQ ID NO: 137209 - RNA, 32 nt, Homo Sapiens
gcauuuggacagcucccaucucucccauggcc

SEQ ID NO: 137210 - RNA, 32 nt, Homo Sapiens
caucgucagaaggaagggauugguuuggcaag

SEQ ID NO: 137211 - RNA, 32 nt, Homo Sapiens
agucugcccagcugcaguacucacgccccaug

SEQ ID NO: 137212 - RNA, 32 nt, Homo Sapiens
gcaacccacccaauugaaucugcauuuucuuu

SEQ ID NO: 137213 - RNA, 30 nt, Homo Sapiens
uuuuaaccacuugcaaaauuuauaacacac

SEQ ID NO: 137214 - RNA, 31 nt, Homo Sapiens
gcaaauccacccucucagcucagcccagccc

SEQ ID NO: 137215 - RNA, 32 nt, Homo Sapiens
ugcuguguugguuuuuaaauuuguauuauuuu

SEQ ID NO: 137216 - RNA, 32 nt, Homo Sapiens
acggaguuuugcucuuguuacccaggcuggag

SEQ ID NO: 137217 - RNA, 32 nt, Homo Sapiens
uaguagccagucugcugugaccacaggcucag

SEQ ID NO: 137218 - RNA, 32 nt, Homo Sapiens
cccucuaccuguccccucccccuuugguugua

SEQ ID NO: 137219 - RNA, 32 nt, Homo Sapiens
guuuuuuaauaaaucugaaauaggcuacuggu

SEQ ID NO: 137220 - RNA, 32 nt, Homo Sapiens
cccccugccucccgaacaaaggaccucacgug

SEQ ID NO: 137221 - RNA, 32 nt, Homo Sapiens
cacuacgcucuuuuaugggaacugugugaacu

SEQ ID NO: 137222 - RNA, 32 nt, Homo Sapiens
ucaaccucuauuucuagaucacauuuucuuga

SEQ ID NO: 137223 - RNA, 32 nt, Homo Sapiens
aaaaagaaauccauaacuauuaaaagauuuua

SEQ ID NO: 137224 - RNA, 32 nt, Homo Sapiens
acaguguuuuacugccugguagaacacuaaua

SEQ ID NO: 137225 - RNA, 32 nt, Homo Sapiens
gacgggcacugggcgacugugccucgcugagg

SEQ ID NO: 137226 - RNA, 32 nt, Homo Sapiens
gggggcuggugccggccuugccugcagcaaug

SEQ ID NO: 137227 - RNA, 32 nt, Homo Sapiens
ggaggcuucuuugccgcucaggcuuuaucagu

SEQ ID NO: 137228 - RNA, 32 nt, Homo Sapiens
gucuucccucccccgaccccagccugucaguc

SEQ ID NO: 137229 - RNA, 32 nt, Homo Sapiens
ccagggcuaccugcgaucuguguuugcccuga

SEQ ID NO: 137230 - RNA, 32 nt, Homo Sapiens
guuuauguuacaccucuuucagcccugcuagu

SEQ ID NO: 137231 - RNA, 32 nt, Homo Sapiens
gaucauccagagucuacaacguggugauauac

SEQ ID NO: 137232 - RNA, 32 nt, Homo Sapiens
gaagaaaguggaugcgcagaguucggcuggaa

SEQ ID NO: 137233 - RNA, 32 nt, Homo Sapiens
gcacagucccgacgccgaccgccccggacccc

SEQ ID NO: 137234 - RNA, 32 nt, Homo Sapiens
uuuauaaccacuucuaaauauucucaguucuu

SEQ ID NO: 137235 - RNA, 32 nt, Homo Sapiens
cccaggggagaauggguguuguauggggaggc

SEQ ID NO: 137236 - RNA, 32 nt, Homo Sapiens
ggcgaggggacgggacugggcccugaaccaau

SEQ ID NO: 137237 - RNA, 32 nt, Homo Sapiens
gugauuuguaaaauuugcacaugugauuguga

SEQ ID NO: 137238 - RNA, 32 nt, Homo Sapiens
ggaaagaaaaaagucuugguugugaaaaacga

SEQ ID NO: 137239 - RNA, 32 nt, Homo Sapiens
ccuugaaguauguguuuaguagccucaauucu

SEQ ID NO: 137240 - RNA, 32 nt, Homo Sapiens
ccuagauuuuugggaaaaaacuuuggaaagug

SEQ ID NO: 137241 - RNA, 32 nt, Homo Sapiens
guguauuuuuaaauaacuggugaucuauaauu

SEQ ID NO: 137242 - RNA, 32 nt, Homo Sapiens
ggagacaggaggagaggcuacgugaacaggag

SEQ ID NO: 137243 - RNA, 32 nt, Homo Sapiens
cuuucuguggcccccaccacucagcccuuccc

SEQ ID NO: 137244 - RNA, 32 nt, Homo Sapiens
uaguacuuaauuuguuuauacuguaaaguaua

SEQ ID NO: 137245 - RNA, 32 nt, Homo Sapiens
ucuuuagagauccaaagacaccccaagcaucc

SEQ ID NO: 137246 - RNA, 30 nt, Homo Sapiens
ugggagcgggaggggcggggucccggcuga

SEQ ID NO: 137247 - RNA, 32 nt, Homo Sapiens
ccucacagcucuuccccagcuccgccucccca

SEQ ID NO: 137248 - RNA, 32 nt, Homo Sapiens
gugcuuuuuguacaguaauaaaaaauaaguau

SEQ ID NO: 137249 - RNA, 32 nt, Homo Sapiens
gcauuguuugugcucaauuucagacacucauu

SEQ ID NO: 137250 - RNA, 32 nt, Homo Sapiens
aguaagcaaggaggucugcugcuccaguuggc

SEQ ID NO: 137251 - RNA, 32 nt, Homo Sapiens
gcugggaguuuggggcuguggguggauccucu

SEQ ID NO: 137252 - RNA, 32 nt, Homo Sapiens
cgcggggaaccaggcgggagggacugaguggc

SEQ ID NO: 137253 - RNA, 31 nt, Homo Sapiens
gggcccuggaggagaaagccauucugaacac

SEQ ID NO: 137254 - RNA, 32 nt, Homo Sapiens
ucuccaauauuaaugauuaauuuuuaaaacuu

SEQ ID NO: 137255 - RNA, 32 nt, Homo Sapiens
agaagugccccucaccucccagauggggcggc

SEQ ID NO: 137256 - RNA, 32 nt, Homo Sapiens
ccucucccagcgggccucccccuuccuacuca

SEQ ID NO: 137257 - RNA, 32 nt, Homo Sapiens
uggaaaauauuuuuauauggucuguuguauuu

SEQ ID NO: 137258 - RNA, 32 nt, Homo Sapiens
uuugugccucaguuuacccacccauuaaaugg

SEQ ID NO: 137259 - RNA, 32 nt, Homo Sapiens
ucaaaauugucucuucugaggaccgcugauaa

SEQ ID NO: 137260 - RNA, 32 nt, Homo Sapiens
gcccgugaguccuugaaaccagcccuccgaac

SEQ ID NO: 137261 - RNA, 32 nt, Homo Sapiens
uccuucaccauccguuguggguuccuggaguc

SEQ ID NO: 137262 - RNA, 32 nt, Homo Sapiens
cgcagagggaauuuuucccugcugcuucuuau

SEQ ID NO: 137263 - RNA, 32 nt, Homo Sapiens
cgcugcugcgagaccccggcccgcgucggucc

SEQ ID NO: 137264 - RNA, 32 nt, Homo Sapiens
guagagucggagcuuuaccauguuggucaggc

SEQ ID NO: 137265 - RNA, 32 nt, Homo Sapiens
gcaaggauguuguagagcugccauaccagucc

SEQ ID NO: 137266 - RNA, 32 nt, Homo Sapiens
cgggcagacaccuccggcccacacagccguuc

SEQ ID NO: 137267 - RNA, 32 nt, Homo Sapiens
cgaaggcggcggcgaaggcccgggcugggagc

SEQ ID NO: 137268 - RNA, 32 nt, Homo Sapiens
cugcugcauguggaagggcacacagcagcagg

SEQ ID NO: 137269 - RNA, 32 nt, Homo Sapiens
ggcuuuucaaccaaacauuguugcuaaucccu

SEQ ID NO: 137270 - RNA, 32 nt, Homo Sapiens
ggagggaugaacugucgaggggcccagggcag

SEQ ID NO: 137271 - RNA, 32 nt, Homo Sapiens
acacaccacacacgcacacacacacaccaagu

SEQ ID NO: 137272 - RNA, 32 nt, Homo Sapiens
uuuggaugaaguuuuucuuuguuuugauauau

SEQ ID NO: 137273 - RNA, 32 nt, Homo Sapiens
gaaaaagauuucuaucuuuuuaucuuggcgca

SEQ ID NO: 137274 - RNA, 32 nt, Homo Sapiens
aaacuaaguacuuuuauauaauucaucacuuu

SEQ ID NO: 137275 - RNA, 32 nt, Homo Sapiens
cggagcuggcccgcuccuccccgccgagccgg

SEQ ID NO: 137276 - RNA, 32 nt, Homo Sapiens
auuuuacaaaaaugguuauuaaaguagaugau

SEQ ID NO: 137277 - RNA, 32 nt, Homo Sapiens
aucaacaaacuuaugguuuguuucaauugaug

SEQ ID NO: 137278 - RNA, 32 nt, Homo Sapiens
cauuagucagauuugaauaacgagguuuugaa

SEQ ID NO: 137279 - RNA, 32 nt, Homo Sapiens
gccuuggcguccggcccggccugggcccuuag

SEQ ID NO: 137280 - RNA, 32 nt, Homo Sapiens
agauaaaguucugguaucugguuugaugcugc

SEQ ID NO: 137281 - RNA, 32 nt, Homo Sapiens
gugucuggcaggcaugcaauucucauugaaua

SEQ ID NO: 137282 - RNA, 32 nt, Homo Sapiens
aacagacccaggacagggaaaagcagugcgga

SEQ ID NO: 137283 - RNA, 32 nt, Homo Sapiens
aaggcaggggcuccccggggcucccacacacu

SEQ ID NO: 137284 - RNA, 32 nt, Homo Sapiens
cgaagacggccuuuuuacccucuacaacgcag

SEQ ID NO: 137285 - RNA, 32 nt, Homo Sapiens
gcaagaccuacugcggaaaggaucucgaucuc

SEQ ID NO: 137286 - RNA, 32 nt, Homo Sapiens
uauuccuuaaaggggacgcgccauugucaaga

SEQ ID NO: 137287 - RNA, 32 nt, Homo Sapiens
ccgucugugcagcgagcagccggcgcggggag

SEQ ID NO: 137288 - RNA, 32 nt, Homo Sapiens
ucuucuccuucugcugcugccauccuccagca

SEQ ID NO: 137289 - RNA, 32 nt, Homo Sapiens
cauuuucaagcagauagcaggagaugacaugg

SEQ ID NO: 137290 - RNA, 32 nt, Homo Sapiens
aguuccaguauuuuauguuuacaugucuuauu

SEQ ID NO: 137291 - RNA, 32 nt, Homo Sapiens
cacuuuaauuguuuuucuuuaucuacaaaauu

SEQ ID NO: 137292 - RNA, 32 nt, Homo Sapiens
aggucugggaucucugguuuuauccgacuucu

SEQ ID NO: 137293 - RNA, 32 nt, Homo Sapiens
guuuaagaagcaccuuauauaguauaauauau

SEQ ID NO: 137294 - RNA, 31 nt, Homo Sapiens
uggccgagcucaagaaaguccucucaggcga

SEQ ID NO: 137295 - RNA, 32 nt, Homo Sapiens
gcuuuucuguuaugaaauguuuuaauuaguaa

SEQ ID NO: 137296 - RNA, 32 nt, Homo Sapiens
aaaauuuuuuuagcuuugacaaacacacaaaa

SEQ ID NO: 137297 - RNA, 32 nt, Homo Sapiens
aaacggaugacgggccucuaggcggucuucug

SEQ ID NO: 137298 - RNA, 32 nt, Homo Sapiens
uuaacugauuaaaaauaccuucuauguauuag

SEQ ID NO: 137299 - RNA, 30 nt, Homo Sapiens
ugacacggccugugccggccggcgcggacc

SEQ ID NO: 137300 - RNA, 32 nt, Homo Sapiens
agagcuucugggaaacaagcuuacauagucuu

SEQ ID NO: 137301 - RNA, 32 nt, Homo Sapiens
aagauucagacaccuucuccccaggagaugua

SEQ ID NO: 137302 - RNA, 32 nt, Homo Sapiens
aaggcccuuuuggagauauacuugguguuggu

SEQ ID NO: 137303 - RNA, 32 nt, Homo Sapiens
auauaaaaacugugucuuguuauaguaguaca

SEQ ID NO: 137304 - RNA, 32 nt, Homo Sapiens
cagguucugcuguuugguugcugaaggggguc

SEQ ID NO: 137305 - RNA, 32 nt, Homo Sapiens
uaaaaugggauccccagagaccauuaaccaau

SEQ ID NO: 137306 - RNA, 32 nt, Homo Sapiens
ccuuauucucuugagaacuauauuuugguucc

SEQ ID NO: 137307 - RNA, 32 nt, Homo Sapiens
ccuuuuaguuuuccaucuuuucccucccuggu

SEQ ID NO: 137308 - RNA, 32 nt, Homo Sapiens
gauucaguacagagacaaagaaauccccugcc

SEQ ID NO: 137309 - RNA, 32 nt, Homo Sapiens
ggcugcagccccagcuggacuccagccugucc

SEQ ID NO: 137310 - RNA, 32 nt, Homo Sapiens
aaaaggaaacauuaaccucuaaucagcauaac

SEQ ID NO: 137311 - RNA, 32 nt, Homo Sapiens
gcagcugggggcuuuauggaucuuugggugug

SEQ ID NO: 137312 - RNA, 32 nt, Homo Sapiens
cuuccucccugaggaccccaccccccuacccc

SEQ ID NO: 137313 - RNA, 32 nt, Homo Sapiens
guucccaaacaggauuaacugugaagacuaau

SEQ ID NO: 137314 - RNA, 32 nt, Homo Sapiens
cuaaccagucauauacacuggauaauuuggua

SEQ ID NO: 137315 - RNA, 32 nt, Homo Sapiens
gaauaaaaauuugugcaagucagagaagggug

SEQ ID NO: 137316 - RNA, 32 nt, Homo Sapiens
gucacagaugacuggauuaauuaagugcuaag

SEQ ID NO: 137317 - RNA, 32 nt, Homo Sapiens
uaggaaacccucagcucagagaacaacccugc

SEQ ID NO: 137318 - RNA, 32 nt, Homo Sapiens
ucugaugggagggcaggcaaguaaaucaguaa

SEQ ID NO: 137319 - RNA, 32 nt, Homo Sapiens
cagguucgugcccggcuggcgcggcgugguuu

SEQ ID NO: 137320 - RNA, 32 nt, Homo Sapiens
acacucuaccaccaugaauccauuccugaucc

SEQ ID NO: 137321 - RNA, 32 nt, Homo Sapiens
uaaaccuuuuauaaaaaggaaacuauaccauu

SEQ ID NO: 137322 - RNA, 32 nt, Homo Sapiens
guccauuuaaacuugucuucuaccucauaacg

SEQ ID NO: 137323 - RNA, 32 nt, Homo Sapiens
uucccuaucaguuacuacuaagaguucucuua

SEQ ID NO: 137324 - RNA, 32 nt, Homo Sapiens
uucggcgagucuuuuuguuugguuuuuuguuu

SEQ ID NO: 137325 - RNA, 32 nt, Homo Sapiens
auaauaucuaagaggaaagguuuugucauccc

SEQ ID NO: 137326 - RNA, 32 nt, Homo Sapiens
caagaagauaaaaagcacuguugaggcagugu

SEQ ID NO: 137327 - RNA, 32 nt, Homo Sapiens
aagaggggcccgugaggcgcgcgcggagucgg

SEQ ID NO: 137328 - RNA, 32 nt, Homo Sapiens
uuacacuuuuaacuuagcaugugguguugaag

SEQ ID NO: 137329 - RNA, 32 nt, Homo Sapiens
guacucaaugcccuacauucucuucugugguc

SEQ ID NO: 137330 - RNA, 32 nt, Homo Sapiens
cggcggcagccccuccuccccggcgcccucag

SEQ ID NO: 137331 - RNA, 32 nt, Homo Sapiens
cgcggcgaggacgacuucugcuuuuguuguug

SEQ ID NO: 137332 - RNA, 32 nt, Homo Sapiens
guccccugcugccccccgccagcccucaccac

SEQ ID NO: 137333 - RNA, 32 nt, Homo Sapiens
uguacaaggcggcgggcggcggcggcccgcug

SEQ ID NO: 137334 - RNA, 32 nt, Homo Sapiens
ccguggccacacuccagcacucagcccccuug

SEQ ID NO: 137335 - RNA, 32 nt, Homo Sapiens
uacacacugucaugcuucaucauucccucuca

SEQ ID NO: 137336 - RNA, 32 nt, Homo Sapiens
cgccgggaccccagcucugcguucacugcccc

SEQ ID NO: 137337 - RNA, 32 nt, Homo Sapiens
aaagugucugcacugacacuuuucgucaguag

SEQ ID NO: 137338 - RNA, 32 nt, Homo Sapiens
cggacgccgcuaacggccucccucggcgcuga

SEQ ID NO: 137339 - RNA, 32 nt, Homo Sapiens
uuauacugcccggcuggacuggaagcuugcug

SEQ ID NO: 137340 - RNA, 32 nt, Homo Sapiens
aguauucauucugcauugcuagauaaaagcug

SEQ ID NO: 137341 - RNA, 32 nt, Homo Sapiens
uuucccauguucucuuuuuuugaaugcaaugu

SEQ ID NO: 137342 - RNA, 32 nt, Homo Sapiens
ccuggggcggcgccgccucuccacccgcagcc

SEQ ID NO: 137343 - RNA, 32 nt, Homo Sapiens
uuaguagaaaauauauaucuuuuacauaugua

SEQ ID NO: 137344 - RNA, 32 nt, Homo Sapiens
accauggaagcagcauccugaccacagcuggc

SEQ ID NO: 137345 - RNA, 32 nt, Homo Sapiens
auuugaaagucucuauacuaagaacuaccuuc

SEQ ID NO: 137346 - RNA, 32 nt, Homo Sapiens
cagcccggcacuccagccuggcgacaagagug

SEQ ID NO: 137347 - RNA, 32 nt, Homo Sapiens
gcagcgggggguggaggaacccacuaggccgu

SEQ ID NO: 137348 - RNA, 32 nt, Homo Sapiens
uauuuaaagggaauucuuucuuacauaauaua

SEQ ID NO: 137349 - RNA, 32 nt, Homo Sapiens
auucuauuguauuauaaugaugauucugucaa

SEQ ID NO: 137350 - RNA, 32 nt, Homo Sapiens
acuaaagaucacauuuuaccuguauggaugga

SEQ ID NO: 137351 - RNA, 32 nt, Homo Sapiens
cuccaggcccagggcaugguccugcugcuuca

SEQ ID NO: 137352 - RNA, 32 nt, Homo Sapiens
agcuuuggccccagcagccacuuuguuuaacc

SEQ ID NO: 137353 - RNA, 32 nt, Homo Sapiens
agcguuaugagcauaguauguggauagguauc

SEQ ID NO: 137354 - RNA, 32 nt, Homo Sapiens
uaagcgucacggguggggcugcagcuucugga

SEQ ID NO: 137355 - RNA, 32 nt, Homo Sapiens
ucaagaaugaaauaaaccagaguuagacccgc

SEQ ID NO: 137356 - RNA, 32 nt, Homo Sapiens
acauggaaccauucaguagguauuauuuugug

SEQ ID NO: 137357 - RNA, 32 nt, Homo Sapiens
ccagaaggcuccugggguauuagacccagcug

SEQ ID NO: 137358 - RNA, 32 nt, Homo Sapiens
cuggagaguggcgacgccgggcggcgggaccc

SEQ ID NO: 137359 - RNA, 32 nt, Homo Sapiens
caagaaaggagaggcagucaaaaaagacaggu

SEQ ID NO: 137360 - RNA, 32 nt, Homo Sapiens
uuuaaaaaacaaagacuguaagccugugugug

SEQ ID NO: 137361 - RNA, 32 nt, Homo Sapiens
cagccgggggccgguggccagagcgagggcac

SEQ ID NO: 137362 - RNA, 32 nt, Homo Sapiens
ccuuugcagugggguggccuccccucugucug

SEQ ID NO: 137363 - RNA, 32 nt, Homo Sapiens
auucuuuagcaaguacacuuaaaagccuuugc

SEQ ID NO: 137364 - RNA, 32 nt, Homo Sapiens
cuguuagacgcagcgcgccgggagacugagag

SEQ ID NO: 137365 - RNA, 32 nt, Homo Sapiens
uuauauaaaugaaauggaccuauaucaagagg

SEQ ID NO: 137366 - RNA, 32 nt, Homo Sapiens
uguugggaugagucuuuuuuuguuucuguuca

SEQ ID NO: 137367 - RNA, 32 nt, Homo Sapiens
uugcuuguguggaaaguuacguucacuucaac

SEQ ID NO: 137368 - RNA, 32 nt, Homo Sapiens
uuucaugugucaacuucaacauuuacauguau

SEQ ID NO: 137369 - RNA, 32 nt, Homo Sapiens
uuugucagguuaauguagcauguuaaggacuc

SEQ ID NO: 137370 - RNA, 31 nt, Homo Sapiens
guucaauaaaugcccugugacucucagcuug

SEQ ID NO: 137371 - RNA, 32 nt, Homo Sapiens
cauuaaauauaaaauauuuuguaaugcugcac

SEQ ID NO: 137372 - RNA, 32 nt, Homo Sapiens
aguccagccugggugacauagcaagacccugu

SEQ ID NO: 137373 - RNA, 32 nt, Homo Sapiens
uuccaguauuacaagaucaacuucugacccug

SEQ ID NO: 137374 - RNA, 32 nt, Homo Sapiens
agccggcgcuggggacgcgcgcggccgagacu

SEQ ID NO: 137375 - RNA, 32 nt, Homo Sapiens
ugugaucucccucucugcagggaggccccagc

SEQ ID NO: 137376 - RNA, 32 nt, Homo Sapiens
auuuaauguauuuauuuuuuuacuuggacaug

SEQ ID NO: 137377 - RNA, 32 nt, Homo Sapiens
uuuuuuuuuuuuaauuuuuuuaaugagacaga

SEQ ID NO: 137378 - RNA, 32 nt, Homo Sapiens
aggcucccgagcuaagggacucgccuaggguc

SEQ ID NO: 137379 - RNA, 32 nt, Homo Sapiens
aucaacucaauccuaaggauauacaaguucug

SEQ ID NO: 137380 - RNA, 32 nt, Homo Sapiens
ggcccuacugcuuccuggugcugcuggccgcc

SEQ ID NO: 137381 - RNA, 32 nt, Homo Sapiens
gacaaaaccacugcuccuggaccuccuaccac

SEQ ID NO: 137382 - RNA, 32 nt, Homo Sapiens
uaguacagaaaagaauguacauuuagacauuu

SEQ ID NO: 137383 - RNA, 32 nt, Homo Sapiens
ccagcccugccaggacugggacgcugcugcug

SEQ ID NO: 137384 - RNA, 32 nt, Homo Sapiens
auucacaguugccaagagcagcuccgcgccug

SEQ ID NO: 137385 - RNA, 32 nt, Homo Sapiens
aauccauuucuguguccugcuggagguuuuaa

SEQ ID NO: 137386 - RNA, 32 nt, Homo Sapiens
gaccagaccgcuccccaauacucuccuaaaau

SEQ ID NO: 137387 - RNA, 32 nt, Homo Sapiens
cccucuucucugggcccagagagaggcguccu

SEQ ID NO: 137388 - RNA, 32 nt, Homo Sapiens
ucagacugccuggccagccuggggcacugaaa

SEQ ID NO: 137389 - RNA, 32 nt, Homo Sapiens
cuacuggaaauauuuuuaaguggaaccaaaau

SEQ ID NO: 137390 - RNA, 32 nt, Homo Sapiens
uuccgacuccgucuuggccaugucuaguaauu

SEQ ID NO: 137391 - RNA, 32 nt, Homo Sapiens
uuauaaugcccuuguucccaauaaaacugggc

SEQ ID NO: 137392 - RNA, 32 nt, Homo Sapiens
cugacagugucaucauagauggucaacaccgu

SEQ ID NO: 137393 - RNA, 32 nt, Homo Sapiens
cugccugccaccucucggacuccagcuugaug

SEQ ID NO: 137394 - RNA, 32 nt, Homo Sapiens
cacaucacaauuuguacaguuccacauaaguc

SEQ ID NO: 137395 - RNA, 32 nt, Homo Sapiens
uugaauauuccccaugagacccugggccgacc

SEQ ID NO: 137396 - RNA, 32 nt, Homo Sapiens
cuaauaaaaguacaaggcacauauacgugaca

SEQ ID NO: 137397 - RNA, 28 nt, Homo Sapiens
aaaggggugggagccccgaggugagcgg

SEQ ID NO: 137398 - RNA, 32 nt, Homo Sapiens
ccucuacuucuggugcaguccugggacaagga

SEQ ID NO: 137399 - RNA, 32 nt, Homo Sapiens
ugaaauaaugaaaaucauaaucaauaaaaacu

SEQ ID NO: 137400 - RNA, 30 nt, Homo Sapiens
ccuuuagagaagcuugaucuuggaggccuc

SEQ ID NO: 137401 - RNA, 32 nt, Homo Sapiens
gaggaauggguguucuguggccucgaguccuc

SEQ ID NO: 137402 - RNA, 32 nt, Homo Sapiens
ggaaagcgccgcggguagcggcggcgggcgcu

SEQ ID NO: 137403 - RNA, 32 nt, Homo Sapiens
uggagucagagucagagcucucgucugacaag

SEQ ID NO: 137404 - RNA, 32 nt, Homo Sapiens
gccacgaccugccugccugggcuggagcucuu

SEQ ID NO: 137405 - RNA, 32 nt, Homo Sapiens
ucguuuagccccacccagaucaggugaaaggg

SEQ ID NO: 137406 - RNA, 32 nt, Homo Sapiens
agugggugggcagccugagcucccucgggcuc

SEQ ID NO: 137407 - RNA, 32 nt, Homo Sapiens
ucuguuggucgucuuugaaaugggcgaggacg

SEQ ID NO: 137408 - RNA, 32 nt, Homo Sapiens
agucucuccaguggaagcaaccccaguguucu

SEQ ID NO: 137409 - RNA, 32 nt, Homo Sapiens
gaagaagacccucgggaagcagucagacugca

SEQ ID NO: 137410 - RNA, 32 nt, Homo Sapiens
auuggugcagcuuuuucaguucagauaucaca

SEQ ID NO: 137411 - RNA, 32 nt, Homo Sapiens
cgugcgcugcaggguugugggccacggucacu

SEQ ID NO: 137412 - RNA, 32 nt, Homo Sapiens
cugaggccuggggaugugaacaaccugcucac

SEQ ID NO: 137413 - RNA, 32 nt, Homo Sapiens
cauggagguccccuccucuccuagcuucccgc

SEQ ID NO: 137414 - RNA, 32 nt, Homo Sapiens
cggggcaggacuuccaggaggaccccaacccg

SEQ ID NO: 137415 - RNA, 32 nt, Homo Sapiens
ugaucgcgcugcggacgcuggugcagcucucg

SEQ ID NO: 137416 - RNA, 28 nt, Homo Sapiens
cucgcggggcggcugcgguguuucaccg

SEQ ID NO: 137417 - RNA, 32 nt, Homo Sapiens
uuacagcccggcgggggcuggccgagccacac

SEQ ID NO: 137418 - RNA, 32 nt, Homo Sapiens
ccaaaaguucccucuguguuacucccauuuag

SEQ ID NO: 137419 - RNA, 32 nt, Homo Sapiens
aguguucuuggugacugcuuaaucaaauggau

SEQ ID NO: 137420 - RNA, 32 nt, Homo Sapiens
auuuguaaaaaaaaaaucaugucauauuuuau

SEQ ID NO: 137421 - RNA, 32 nt, Homo Sapiens
caggcuugggccuggggugcagcagagaccca

SEQ ID NO: 137422 - RNA, 32 nt, Homo Sapiens
gagaucccuaaccuauuguuuuauugacagcc

SEQ ID NO: 137423 - RNA, 32 nt, Homo Sapiens
aucuucccagggguccaccucccuuuauaaac

SEQ ID NO: 137424 - RNA, 32 nt, Homo Sapiens
augaaagcugaauuguuacuuaauaaauucac

SEQ ID NO: 137425 - RNA, 32 nt, Homo Sapiens
uuucucugagucucacuuuccuccucugugaa

SEQ ID NO: 137426 - RNA, 32 nt, Homo Sapiens
uccugcagcugggccuggccaagggcgaggag

SEQ ID NO: 137427 - RNA, 32 nt, Homo Sapiens
gcccagaccccaucaggggagaggugguaaag

SEQ ID NO: 137428 - RNA, 28 nt, Homo Sapiens
ggaagauaaagguacauuauaaaacaca

SEQ ID NO: 137429 - RNA, 32 nt, Homo Sapiens
acgagggcugagagggcccgcggguaggcaug

SEQ ID NO: 137430 - RNA, 31 nt, Homo Sapiens
aaguuugcaagguucauuuauguucaugggc

SEQ ID NO: 137431 - RNA, 32 nt, Homo Sapiens
ucucaauauauucaguaaugaagaauggugcc

SEQ ID NO: 137432 - RNA, 32 nt, Homo Sapiens
ugaagagaacaucagugacgugugugaccuca

SEQ ID NO: 137433 - RNA, 32 nt, Homo Sapiens
auccuggguggguuucuguggcacucuuuuag

SEQ ID NO: 137434 - RNA, 32 nt, Homo Sapiens
cagaaguauugauacaacuaagauccuaaaug

SEQ ID NO: 137435 - RNA, 32 nt, Homo Sapiens
gagcaugcauggcaggaggcugucugagacua

SEQ ID NO: 137436 - RNA, 32 nt, Homo Sapiens
uaagcuuuguuuuacuacaacuuguacaaagu

SEQ ID NO: 137437 - RNA, 32 nt, Homo Sapiens
ccuuauuacaugccaauauuuguacaaaaaag

SEQ ID NO: 137438 - RNA, 29 nt, Homo Sapiens
ucauggcuagugauguauaaaauaaaaua

SEQ ID NO: 137439 - RNA, 32 nt, Homo Sapiens
uggggagucuuccaggccuccucagaggucuu

SEQ ID NO: 137440 - RNA, 32 nt, Homo Sapiens
aguggggucuugcucugucacccagguggcug

SEQ ID NO: 137441 - RNA, 32 nt, Homo Sapiens
uuccccuuccuuuuuuuuuuuaauuaaauaaa

SEQ ID NO: 137442 - RNA, 32 nt, Homo Sapiens
cauuuucuucgugagaaagaaaucgacgugcu

SEQ ID NO: 137443 - RNA, 28 nt, Homo Sapiens
aaaaauaaaaacaaaaacgaugaaacug

SEQ ID NO: 137444 - RNA, 32 nt, Homo Sapiens
gcauuuaaagcaaacaaacaaacaaaaaaagc

SEQ ID NO: 137445 - RNA, 31 nt, Homo Sapiens
auuugagcaauuucuauaggauauguauuua

SEQ ID NO: 137446 - RNA, 32 nt, Homo Sapiens
ggcuuccagcugcccaguggcucuuaaacagu

SEQ ID NO: 137447 - RNA, 32 nt, Homo Sapiens
uccucccgucuugccuucucccucgaguuggg

SEQ ID NO: 137448 - RNA, 32 nt, Homo Sapiens
ccuggcaugugcuaacgauacaacauugaaca

SEQ ID NO: 137449 - RNA, 32 nt, Homo Sapiens
aucauuaucaccaacagcugguggguggccgg

SEQ ID NO: 137450 - RNA, 32 nt, Homo Sapiens
cuccgccccagccccagccagccaggcccugg

SEQ ID NO: 137451 - RNA, 32 nt, Homo Sapiens
acaccgagugugccgcgcccgggggaugccuc

SEQ ID NO: 137452 - RNA, 31 nt, Homo Sapiens
cagugguggagcucggaugugcuguuguugg

SEQ ID NO: 137453 - RNA, 32 nt, Homo Sapiens
ucugggcagcgggacacgggcgcaagaaguca

SEQ ID NO: 137454 - RNA, 32 nt, Homo Sapiens
gguuuacuucucaaaugaaauauuuuuaguaa

SEQ ID NO: 137455 - RNA, 32 nt, Homo Sapiens
caacaggcuguggucuaaaauaaacuuuuaau

SEQ ID NO: 137456 - RNA, 32 nt, Homo Sapiens
gcagccacucccuccagggcgcaccugcaggu

SEQ ID NO: 137457 - RNA, 32 nt, Homo Sapiens
agcuacucauugaggcuguuccaggauaagcu

SEQ ID NO: 137458 - RNA, 32 nt, Homo Sapiens
guggcggcggcggcgcuccggucgcgaugggc

SEQ ID NO: 137459 - RNA, 32 nt, Homo Sapiens
augugucugaguccggccuccucgggucggcu

SEQ ID NO: 137460 - RNA, 32 nt, Homo Sapiens
cucugugaaucacagacacgcgggaccccagc

SEQ ID NO: 137461 - RNA, 32 nt, Homo Sapiens
cugggcggaggccgaggcgcggcucggacucc

SEQ ID NO: 137462 - RNA, 32 nt, Homo Sapiens
aucuauaauuuaauaaaauuuuucguuggugu

SEQ ID NO: 137463 - RNA, 32 nt, Homo Sapiens
gaaagcccaacgaccauggagagaugggccgu

SEQ ID NO: 137464 - RNA, 32 nt, Homo Sapiens
auaaaaagacauuaauaaaaaucugaaagggc

SEQ ID NO: 137465 - RNA, 32 nt, Homo Sapiens
ccaaccagagcaucugcggagaaggaggcaca

SEQ ID NO: 137466 - RNA, 32 nt, Homo Sapiens
cggacggacggacggaaggcgacucgagggcc

SEQ ID NO: 137467 - RNA, 32 nt, Homo Sapiens
cacccggggggcccugggucggggcggaucag

SEQ ID NO: 137468 - RNA, 32 nt, Homo Sapiens
acagaaucaaccccaaugcucacuaacaaacu

SEQ ID NO: 137469 - RNA, 28 nt, Homo Sapiens
cauugugggcggcccgagaugggcucag

SEQ ID NO: 137470 - RNA, 32 nt, Homo Sapiens
ucuugcgguggaguccuguugcugugagggag

SEQ ID NO: 137471 - RNA, 32 nt, Homo Sapiens
cucacuuauuaaagcacaaaauguuuuaccua

SEQ ID NO: 137472 - RNA, 32 nt, Homo Sapiens
cgggcgguccucggagacacgcggcggugucc

SEQ ID NO: 137473 - RNA, 32 nt, Homo Sapiens
agaggcacugaagaggguaggguagaaaagac

SEQ ID NO: 137474 - RNA, 32 nt, Homo Sapiens
cucucaggccccacaacuuacuuccugcauuu

SEQ ID NO: 137475 - RNA, 32 nt, Homo Sapiens
uaaacaccaaccccugaccuaccccagccagg

SEQ ID NO: 137476 - RNA, 32 nt, Homo Sapiens
cuuggcccaaccccaccagccuggcccuggga

SEQ ID NO: 137477 - RNA, 31 nt, Homo Sapiens
cugacaauaaauuguauggagaaugguauuu

SEQ ID NO: 137478 - RNA, 32 nt, Homo Sapiens
cgcgccccgcggcucgcugugcgugggagggc

SEQ ID NO: 137479 - RNA, 32 nt, Homo Sapiens
gucaccgacagggcgauugcagugcguuccgg

SEQ ID NO: 137480 - RNA, 32 nt, Homo Sapiens
cugccugccugccugucugccuaugugaugau

SEQ ID NO: 137481 - RNA, 32 nt, Homo Sapiens
cuucauccuugacuccuuugguauuucacuga

SEQ ID NO: 137482 - RNA, 32 nt, Homo Sapiens
ucucgccggccgcgcgaacccguuugagcucg

SEQ ID NO: 137483 - RNA, 32 nt, Homo Sapiens
agacaccccucccccaccucaugucuucacag

SEQ ID NO: 137484 - RNA, 32 nt, Homo Sapiens
ugcuauuguauaucuuguuagagcagccgaag

SEQ ID NO: 137485 - RNA, 32 nt, Homo Sapiens
ucuuuggucaaaaggaauauaaguaaucauau

SEQ ID NO: 137486 - RNA, 32 nt, Homo Sapiens
gaaaagcacaacaaaauucuuaauguacacag

SEQ ID NO: 137487 - RNA, 32 nt, Homo Sapiens
uaguauucacuuuaugaauauuuaauucauuu

SEQ ID NO: 137488 - RNA, 32 nt, Homo Sapiens
guacaauauugccuguggucuuuccauuugac

SEQ ID NO: 137489 - RNA, 32 nt, Homo Sapiens
cagccccucccgcagcccuccucccucccgcu

SEQ ID NO: 137490 - RNA, 32 nt, Homo Sapiens
accggccuggcugguccacgccagccgcagac

SEQ ID NO: 137491 - RNA, 32 nt, Homo Sapiens
auuuuuccaaacaaaacaaaacacuggcacuu

SEQ ID NO: 137492 - RNA, 29 nt, Homo Sapiens
uaagauguguccuggggcacugugggugg

SEQ ID NO: 137493 - RNA, 32 nt, Homo Sapiens
uguagggaagccagaaagaaaagacggcccag

SEQ ID NO: 137494 - RNA, 32 nt, Homo Sapiens
ccucgggagacgggagcugcgagcaggugggc

SEQ ID NO: 137495 - RNA, 31 nt, Homo Sapiens
cuuccagcugagcccaugcaagauugcaguu

SEQ ID NO: 137496 - RNA, 32 nt, Homo Sapiens
uucugguuauaagaagcauagcuuacaaagca

SEQ ID NO: 137497 - RNA, 32 nt, Homo Sapiens
acauggggacaccaagaaaaacaaaguaugcu

SEQ ID NO: 137498 - RNA, 32 nt, Homo Sapiens
cauguuauucuaguacuagaaacugaagacca

SEQ ID NO: 137499 - RNA, 32 nt, Homo Sapiens
uguuuauggugcaccaugauuagcucacacac

SEQ ID NO: 137500 - RNA, 32 nt, Homo Sapiens
cagggcccgggcgggggacgcgcgcucuuggc

SEQ ID NO: 137501 - RNA, 32 nt, Homo Sapiens
uagcagugugaaguacaauaauucauauucuu

SEQ ID NO: 137502 - RNA, 32 nt, Homo Sapiens
ugugccguguggaacguguagcuguugagagg

SEQ ID NO: 137503 - RNA, 32 nt, Homo Sapiens
cacauggaaaauugugaaaguuagaacacgga

SEQ ID NO: 137504 - RNA, 32 nt, Homo Sapiens
uuuuuucccuuaggacucugcacuuuauagaa

SEQ ID NO: 137505 - RNA, 32 nt, Homo Sapiens
agaucuuccuuccucaguucccuuaaagcaca

SEQ ID NO: 137506 - RNA, 32 nt, Homo Sapiens
cagcuucccccuccuucccugucaguccgcug

SEQ ID NO: 137507 - RNA, 32 nt, Homo Sapiens
cacuuguaaucauagcacuuugggaggcugag

SEQ ID NO: 137508 - RNA, 32 nt, Homo Sapiens
gcaccugugaaugggaauugagccaacuguua

SEQ ID NO: 137509 - RNA, 32 nt, Homo Sapiens
acgaugcccucucagccaacacugccaaccug

SEQ ID NO: 137510 - RNA, 32 nt, Homo Sapiens
ucauuucgggugaaucugucuaucugugaacg

SEQ ID NO: 137511 - RNA, 32 nt, Homo Sapiens
ucugguaggagagagugcugcagagccacgug

SEQ ID NO: 137512 - RNA, 32 nt, Homo Sapiens
aggguugauggggacggaaccacagaagcacc

SEQ ID NO: 137513 - RNA, 32 nt, Homo Sapiens
uuguguguuuuguugaauuuuuucauaaugua

SEQ ID NO: 137514 - RNA, 32 nt, Homo Sapiens
uaauuggggaacagaagggucucuagagggua

SEQ ID NO: 137515 - RNA, 32 nt, Homo Sapiens
aaucauaugaucagcucaauagaugcaaaaaa

SEQ ID NO: 137516 - RNA, 32 nt, Homo Sapiens
gccgggcggcgggacuccauguccuagagugc

SEQ ID NO: 137517 - RNA, 32 nt, Homo Sapiens
gugguggcgggugccuguauugccagcuacuc

SEQ ID NO: 137518 - RNA, 32 nt, Homo Sapiens
cuguagguaaaacuuuuauuuauuuuuuccca

SEQ ID NO: 137519 - RNA, 32 nt, Homo Sapiens
uucuagcagcauauguaaucuuagucuuuuag

SEQ ID NO: 137520 - RNA, 32 nt, Homo Sapiens
uguacauugcaaacaaauacagaaugcaaacc

SEQ ID NO: 137521 - RNA, 32 nt, Homo Sapiens
agaggaguccgaagaggacagcggcgaugggg

SEQ ID NO: 137522 - RNA, 32 nt, Homo Sapiens
cuaaaaagucagagugauacaaaagugauauu

SEQ ID NO: 137523 - RNA, 32 nt, Homo Sapiens
cucacugcaaccuccgccucccagguuccagc

SEQ ID NO: 137524 - RNA, 32 nt, Homo Sapiens
cauaauucuggugauagaaauuuuuauuugcu

SEQ ID NO: 137525 - RNA, 32 nt, Homo Sapiens
gacucagucucuaugaugguauuaguaacugg

SEQ ID NO: 137526 - RNA, 32 nt, Homo Sapiens
acaaagaccacuuuucccacuaccugcagccu

SEQ ID NO: 137527 - RNA, 32 nt, Homo Sapiens
uugcugcccuuaacuguguucugaaguuucac

SEQ ID NO: 137528 - RNA, 32 nt, Homo Sapiens
ucaccauaaaauguauuagguaggagaagaua

SEQ ID NO: 137529 - RNA, 32 nt, Homo Sapiens
uacugucaucgauguguaaacucuguuuuuau

SEQ ID NO: 137530 - RNA, 32 nt, Homo Sapiens
acaugaacaggugucuuaaugcauuuggauac

SEQ ID NO: 137531 - RNA, 32 nt, Homo Sapiens
aguccuucagaauuaaaauacuuaggcuugga

SEQ ID NO: 137532 - RNA, 32 nt, Homo Sapiens
auaucaguuaauuuacuuguacguguccucuc

SEQ ID NO: 137533 - RNA, 32 nt, Homo Sapiens
uuaauccuuuuuugugccuuucaucagaaagu

SEQ ID NO: 137534 - RNA, 32 nt, Homo Sapiens
gguuuuugauucaacggugcuauaaccagggu

SEQ ID NO: 137535 - RNA, 32 nt, Homo Sapiens
uguguacauuuuaucugagguggaaaugaaaa

SEQ ID NO: 137536 - RNA, 32 nt, Homo Sapiens
caggaguagacacccggacacccagcaccccu

SEQ ID NO: 137537 - RNA, 32 nt, Homo Sapiens
caacagacaagucaugcacaauguaaaaccag

SEQ ID NO: 137538 - RNA, 32 nt, Homo Sapiens
acuguuugaagaggagcagagaggcuggcacu

SEQ ID NO: 137539 - RNA, 32 nt, Homo Sapiens
cgcagggcucugcagcaugugggagcuccgcu

SEQ ID NO: 137540 - RNA, 32 nt, Homo Sapiens
uuguuuggcagagcuuuuaccuguuauucuuu

SEQ ID NO: 137541 - RNA, 32 nt, Homo Sapiens
uuugcguccuuccuauuugacucagucuauga

SEQ ID NO: 137542 - RNA, 32 nt, Homo Sapiens
gggccauuuacauacaucaugaaugggaaugc

SEQ ID NO: 137543 - RNA, 32 nt, Homo Sapiens
gaggucuucaggcgaaccgaccuucccccuuc

SEQ ID NO: 137544 - RNA, 32 nt, Homo Sapiens
gaagaauaugggggccagggggugugguacua

SEQ ID NO: 137545 - RNA, 32 nt, Homo Sapiens
cgacggcggcgguggcggcuuggacgacucgg

SEQ ID NO: 137546 - RNA, 32 nt, Homo Sapiens
agguuuuuuggaggcuuuuuguaaauugugau

SEQ ID NO: 137547 - RNA, 32 nt, Homo Sapiens
uuaaaggaugaaauuuugugggguuuuagucu

SEQ ID NO: 137548 - RNA, 32 nt, Homo Sapiens
cccgccaugcucccucuccccccacuggcguc

SEQ ID NO: 137549 - RNA, 32 nt, Homo Sapiens
auacggcuccucaacuuuggaccuccagccuc

SEQ ID NO: 137550 - RNA, 32 nt, Homo Sapiens
ccuggaacucuggcuacagccauuguaggaac

SEQ ID NO: 137551 - RNA, 32 nt, Homo Sapiens
ugacaguguccuaacagcugguggguauggag

SEQ ID NO: 137552 - RNA, 32 nt, Homo Sapiens
cauaugaggaacaaaauuaaauuugaauacag

SEQ ID NO: 137553 - RNA, 30 nt, Homo Sapiens
guaaaauguccacuaggaccccauugccaa

SEQ ID NO: 137554 - RNA, 32 nt, Homo Sapiens
gcgucgggucacgugggcgcgcagcagaccgc

SEQ ID NO: 137555 - RNA, 32 nt, Homo Sapiens
cgaggagcucugcggcgagcgcgugaucguag

SEQ ID NO: 137556 - RNA, 32 nt, Homo Sapiens
aaugaauguguaaaugcuaugaaaauaguuac

SEQ ID NO: 137557 - RNA, 32 nt, Homo Sapiens
acuauuuacuaauuuuuauuaagggaaaugga

SEQ ID NO: 137558 - RNA, 32 nt, Homo Sapiens
accuguucuuguagaucuagcuccucagaguu

SEQ ID NO: 137559 - RNA, 32 nt, Homo Sapiens
uuccuguuaacauaggaggugugugcagacuu

SEQ ID NO: 137560 - RNA, 32 nt, Homo Sapiens
ggucggcggcggugcugggccaggggaaggaa

SEQ ID NO: 137561 - RNA, 32 nt, Homo Sapiens
cuucagggauggaaacaaaccagcucgucuca

SEQ ID NO: 137562 - RNA, 32 nt, Homo Sapiens
acugacacugucagcucuccuggguggcaaga

SEQ ID NO: 137563 - RNA, 32 nt, Homo Sapiens
cuauacaauggggcaguggugcccugagucau

SEQ ID NO: 137564 - RNA, 32 nt, Homo Sapiens
ugcugggcucccugggucucugcccaaggccc

SEQ ID NO: 137565 - RNA, 32 nt, Homo Sapiens
ggggggaggguuauuugcuuuuuuaucuuccu

SEQ ID NO: 137566 - RNA, 32 nt, Homo Sapiens
aggagcuggcgcgcucggcgucgggcucggcg

SEQ ID NO: 137567 - RNA, 32 nt, Homo Sapiens
aggucauuagcaugcauauugaguuugcccuu

SEQ ID NO: 137568 - RNA, 32 nt, Homo Sapiens
accaauugcuaaguauugaauuucagaaaaaa

SEQ ID NO: 137569 - RNA, 32 nt, Homo Sapiens
cuucuuggagauaagucgggcuuuuggugaga

SEQ ID NO: 137570 - RNA, 32 nt, Homo Sapiens
caccaugacaauaaacaaaaacacuuaaaaau

SEQ ID NO: 137571 - RNA, 32 nt, Homo Sapiens
gcacccagccccagccccauccccagccccag

SEQ ID NO: 137572 - RNA, 32 nt, Homo Sapiens
ucugcugcuuuuguuggugcugcccacacugc

SEQ ID NO: 137573 - RNA, 32 nt, Homo Sapiens
uggucuaaaaauuacuuuucuagaaacaccau

SEQ ID NO: 137574 - RNA, 30 nt, Homo Sapiens
cagggagccgguccgccgccggaacgggag

SEQ ID NO: 137575 - RNA, 32 nt, Homo Sapiens
ugccugcgggcuugcuugcugacuccucucaa

SEQ ID NO: 137576 - RNA, 32 nt, Homo Sapiens
cccggaccccuggggcgcggcgcgccccugaa

SEQ ID NO: 137577 - RNA, 32 nt, Homo Sapiens
agagcccgcccccacccggcccgcagccccuc

SEQ ID NO: 137578 - RNA, 32 nt, Homo Sapiens
gagagagcccugagaccagugcaccgcugcug

SEQ ID NO: 137579 - RNA, 32 nt, Homo Sapiens
uugcccaccugccucuggccuucccugggguc

SEQ ID NO: 137580 - RNA, 32 nt, Homo Sapiens
uaguucuguugucuuguugucucagucuuuua

SEQ ID NO: 137581 - RNA, 32 nt, Homo Sapiens
cugcaaggccgcgcuggggcucugucuuggug

SEQ ID NO: 137582 - RNA, 32 nt, Homo Sapiens
gcuugucagcaggaaugcugcucccgccaucg

SEQ ID NO: 137583 - RNA, 32 nt, Homo Sapiens
aaaugauucugugcccaggagcagcugggggu

SEQ ID NO: 137584 - RNA, 32 nt, Homo Sapiens
gacggaacagagccauauuucucuucuuucaa

SEQ ID NO: 137585 - RNA, 32 nt, Homo Sapiens
uuuuugaucaggggaagugaaguucuacaauu

SEQ ID NO: 137586 - RNA, 32 nt, Homo Sapiens
gagggcucagccuucccaccagcccuggagag

SEQ ID NO: 137587 - RNA, 32 nt, Homo Sapiens
ccccuuuaccuugaguugauagcaauagagca

SEQ ID NO: 137588 - RNA, 32 nt, Homo Sapiens
uaguauuguuuccccacuuaaaauaguccugc

SEQ ID NO: 137589 - RNA, 32 nt, Homo Sapiens
acgacacaagagaacaagaauaaaacaauaac

SEQ ID NO: 137590 - RNA, 32 nt, Homo Sapiens
cuguugcacaaaugcauauugguuauagguuu

SEQ ID NO: 137591 - RNA, 32 nt, Homo Sapiens
gaggccugacugugcuuuuguaaauuuucaca

SEQ ID NO: 137592 - RNA, 32 nt, Homo Sapiens
acugccacaucucagccuguaagcaaagcagg

SEQ ID NO: 137593 - RNA, 32 nt, Homo Sapiens
ucaagaccauucugcuccugcugcuggagacc

SEQ ID NO: 137594 - RNA, 32 nt, Homo Sapiens
ucgugaaagaucugggcgauucuggccaugcc

SEQ ID NO: 137595 - RNA, 32 nt, Homo Sapiens
uggaggcugcucagcacagagcccuuucuggu

SEQ ID NO: 137596 - RNA, 32 nt, Homo Sapiens
uuuugcuugacuuuuccaagaggagagggcug

SEQ ID NO: 137597 - RNA, 32 nt, Homo Sapiens
ccuggaacacaagccuaggugaggcccagucu

SEQ ID NO: 137598 - RNA, 32 nt, Homo Sapiens
aagauuaguuguucuuuuucauuuguauuuau

SEQ ID NO: 137599 - RNA, 32 nt, Homo Sapiens
gcauuugaaaaagucugucugauuccagggug

SEQ ID NO: 137600 - RNA, 32 nt, Homo Sapiens
ccuucccggcccccggccaaggacccaggcgc

SEQ ID NO: 137601 - RNA, 32 nt, Homo Sapiens
guaagucaaaaauaaauuuaauggaccgggcu

SEQ ID NO: 137602 - RNA, 32 nt, Homo Sapiens
gucugucuauaaauaaugaguauguguaauaa

SEQ ID NO: 137603 - RNA, 32 nt, Homo Sapiens
ccacgaccuggauucagacuguggucuuguga

SEQ ID NO: 137604 - RNA, 32 nt, Homo Sapiens
gcucuaacccauuuuccuccagcccuggcuac

SEQ ID NO: 137605 - RNA, 32 nt, Homo Sapiens
acucuauuuuccuuuccaacuuucaauucugu

SEQ ID NO: 137606 - RNA, 32 nt, Homo Sapiens
uguaguccagugcgugucguguuugucugcag

SEQ ID NO: 137607 - RNA, 32 nt, Homo Sapiens
ccauuuguaaaauaaaauagagcagaaaaaca

SEQ ID NO: 137608 - RNA, 32 nt, Homo Sapiens
gucugaaugaauugguaccuaaaagcuuccaa

SEQ ID NO: 137609 - RNA, 32 nt, Homo Sapiens
caggaguacccugaagaccacccaggugggag

SEQ ID NO: 137610 - RNA, 32 nt, Homo Sapiens
caaaagccucauuuuauuuugcugguuugauu

SEQ ID NO: 137611 - RNA, 32 nt, Homo Sapiens
uauucaaagcaucaauccaagaaggagguuau

SEQ ID NO: 137612 - RNA, 32 nt, Homo Sapiens
uaaaaacgcucgcaagcgccaagucuccucag

SEQ ID NO: 137613 - RNA, 32 nt, Homo Sapiens
uuuuguaaaugucaaggacauuuggauuuacu

SEQ ID NO: 137614 - RNA, 32 nt, Homo Sapiens
cucgcgcccgcggcauggugcccgccggccug

SEQ ID NO: 137615 - RNA, 32 nt, Homo Sapiens
cccuuccgacagagcggggacuagagccgggg

SEQ ID NO: 137616 - RNA, 32 nt, Homo Sapiens
ugagaacgaaccccuucagagaggcccuacaa

SEQ ID NO: 137617 - RNA, 32 nt, Homo Sapiens
gcauugggaauagggauagacuuuacagauuu

SEQ ID NO: 137618 - RNA, 32 nt, Homo Sapiens
uacgcgggccguacagaggagcucuagagggc

SEQ ID NO: 137619 - RNA, 32 nt, Homo Sapiens
cuggggaagggggccucuggggccugaccagg

SEQ ID NO: 137620 - RNA, 32 nt, Homo Sapiens
acagggaaauguuugauuuuuauguucuguug

SEQ ID NO: 137621 - RNA, 32 nt, Homo Sapiens
auugugaaacugaguuuccuuuaacuuacaaa

SEQ ID NO: 137622 - RNA, 32 nt, Homo Sapiens
cuucuccccgaggcugccccaggccggagccc

SEQ ID NO: 137623 - RNA, 32 nt, Homo Sapiens
gauuugaggacauaucauuauuagauuugcca

SEQ ID NO: 137624 - RNA, 32 nt, Homo Sapiens
uuuacucuuuucuguauguaucaaaaauacug

SEQ ID NO: 137625 - RNA, 32 nt, Homo Sapiens
gugauggcaaggaaaaagcaacuauguucaca

SEQ ID NO: 137626 - RNA, 32 nt, Homo Sapiens
cgucagcaccccuaccccggcgcggcggcgug

SEQ ID NO: 137627 - RNA, 32 nt, Homo Sapiens
cauauguguggcaagaucuuuagucugagguc

SEQ ID NO: 137628 - RNA, 32 nt, Homo Sapiens
gaggacagaaaacaacuggacuccucagcccc

SEQ ID NO: 137629 - RNA, 32 nt, Homo Sapiens
cacugcacuccagcuugggugacagagugaga

SEQ ID NO: 137630 - RNA, 32 nt, Homo Sapiens
cacugcacuccagccugggugauagagugaga

SEQ ID NO: 137631 - RNA, 32 nt, Homo Sapiens
uuacguugaaaucccucauuuauuuucuucuc

SEQ ID NO: 137632 - RNA, 32 nt, Homo Sapiens
aucggugcugucagcccugcugucagaccuuc

SEQ ID NO: 137633 - RNA, 32 nt, Homo Sapiens
aauguauuucuacuauaaaauagaaucaacuu

SEQ ID NO: 137634 - RNA, 32 nt, Homo Sapiens
cuucauacccacacuucauccuccucaguuuc

SEQ ID NO: 137635 - RNA, 32 nt, Homo Sapiens
caggguuggggauaaggucacagaucaacagg

SEQ ID NO: 137636 - RNA, 32 nt, Homo Sapiens
ucagcgagaaagugcaaggaguucucucacug

SEQ ID NO: 137637 - RNA, 32 nt, Homo Sapiens
uggaaggagcagcaggcccaagucucuggaug

SEQ ID NO: 137638 - RNA, 32 nt, Homo Sapiens
gcaccucuucuauugcucuccucuguccaccg

SEQ ID NO: 137639 - RNA, 32 nt, Homo Sapiens
gugauuggaagacacucugcgacaguguucag

SEQ ID NO: 137640 - RNA, 32 nt, Homo Sapiens
gccgcggcggccuuacccugccgcgagcgccu

SEQ ID NO: 137641 - RNA, 32 nt, Homo Sapiens
uugagauccuugguugaaaggcaccauaggag

SEQ ID NO: 137642 - RNA, 32 nt, Homo Sapiens
guguuugucauauuuuucuucauuucacaaag

SEQ ID NO: 137643 - RNA, 32 nt, Homo Sapiens
auccgcugcuggcgcaagugcuggccgaagau

SEQ ID NO: 137644 - RNA, 32 nt, Homo Sapiens
cacgagcagcgggcaggacggccgcagcggau

SEQ ID NO: 137645 - RNA, 30 nt, Homo Sapiens
acuugguugcuaaugggacccacucuacug

SEQ ID NO: 137646 - RNA, 32 nt, Homo Sapiens
gggacuggugccucgcuggugcugggucucug

SEQ ID NO: 137647 - RNA, 32 nt, Homo Sapiens
cgggcggcggggagcagcauggagccggcggc

SEQ ID NO: 137648 - RNA, 32 nt, Homo Sapiens
aguuagaauauguuccaagguuggugaggggc

SEQ ID NO: 137649 - RNA, 32 nt, Homo Sapiens
gcgggugggaugcacagagcacagcgcggugg

SEQ ID NO: 137650 - RNA, 32 nt, Homo Sapiens
ucuuauuccagaagacuguuuuuaguagcuua

SEQ ID NO: 137651 - RNA, 32 nt, Homo Sapiens
cgguccucggugcagcagcaucagcuucacuu

SEQ ID NO: 137652 - RNA, 32 nt, Homo Sapiens
gcuguagacaccuucaccuccaucgugcccuc

SEQ ID NO: 137653 - RNA, 32 nt, Homo Sapiens
ggggagugcggggcgggcgcgccuaggcugcc

SEQ ID NO: 137654 - RNA, 28 nt, Homo Sapiens
ggaauguguucccuccccauggcaagau

SEQ ID NO: 137655 - RNA, 32 nt, Homo Sapiens
cugcuggugugaaaggcagggauugucagccc

SEQ ID NO: 137656 - RNA, 32 nt, Homo Sapiens
ugcugggcaggggacaguguccccugcuaccg

SEQ ID NO: 137657 - RNA, 32 nt, Homo Sapiens
accuaggcaguugacagccuggcuuaccaccu

SEQ ID NO: 137658 - RNA, 32 nt, Homo Sapiens
gcuuagcaucagagguuugcuuccucaguaac

SEQ ID NO: 137659 - RNA, 32 nt, Homo Sapiens
ccuuugauggucaacagcaucaaggagccuaa

SEQ ID NO: 137660 - RNA, 31 nt, Homo Sapiens
cugcucuuggugagaaagugccuccuucuuc

SEQ ID NO: 137661 - RNA, 32 nt, Homo Sapiens
agaggcuccgcggcaggaggagccggugcucu

SEQ ID NO: 137662 - RNA, 32 nt, Homo Sapiens
ggauucucccucggcccucccggccgauucgg

SEQ ID NO: 137663 - RNA, 32 nt, Homo Sapiens
caauaaagauaaaaccacuuaacucuuaagug

SEQ ID NO: 137664 - RNA, 32 nt, Homo Sapiens
ucucuugauauuaagcuggguugucuuuaaac

SEQ ID NO: 137665 - RNA, 32 nt, Homo Sapiens
aacuuguaucgguucuuaauuaaauuauccaa

SEQ ID NO: 137666 - RNA, 32 nt, Homo Sapiens
cuccucuccuccccggccccuaccccucaggg

SEQ ID NO: 137667 - RNA, 32 nt, Homo Sapiens
gacucucuucccuccagagaccaccccgcucc

SEQ ID NO: 137668 - RNA, 32 nt, Homo Sapiens
accacaaacauccaucagggauggccagcugc

SEQ ID NO: 137669 - RNA, 32 nt, Homo Sapiens
acaugguucagcaucaucuuuuaacaaggccc

SEQ ID NO: 137670 - RNA, 32 nt, Homo Sapiens
gcgggcuucauggccuucuccuccaggaagcu

SEQ ID NO: 137671 - RNA, 32 nt, Homo Sapiens
ucauuuucacuuuaauucggugaugccucugu

SEQ ID NO: 137672 - RNA, 32 nt, Homo Sapiens
aaauguaugcugacaauucugaagacauuucu

SEQ ID NO: 137673 - RNA, 32 nt, Homo Sapiens
ccacugccagcugagagcugcuucccaauggc

SEQ ID NO: 137674 - RNA, 32 nt, Homo Sapiens
ggcagucccgguuuccccuuguaaagauggcg

SEQ ID NO: 137675 - RNA, 32 nt, Homo Sapiens
uccuaaaaaaucaguaaaucuaaugacaacaa

SEQ ID NO: 137676 - RNA, 32 nt, Homo Sapiens
cugaggcuccuggcccggggcaugguguuaga

SEQ ID NO: 137677 - RNA, 32 nt, Homo Sapiens
cucccauuguccucgaaaacagacacagguca

SEQ ID NO: 137678 - RNA, 32 nt, Homo Sapiens
gcaaacucauuucaauuccagggagagcauuu

SEQ ID NO: 137679 - RNA, 32 nt, Homo Sapiens
aaaaagaaagaauacuuuuuuauaccucacua

SEQ ID NO: 137680 - RNA, 30 nt, Homo Sapiens
cggcggaucuucggcggaucuucggcggau

SEQ ID NO: 137681 - RNA, 32 nt, Homo Sapiens
uagugaaacgugaugucugguuuucuauugca

SEQ ID NO: 137682 - RNA, 32 nt, Homo Sapiens
uuuguuuauuuuuaucguuuuuguuuacuggc

SEQ ID NO: 137683 - RNA, 32 nt, Homo Sapiens
uggcccaagagccccagagacugugccagggg

SEQ ID NO: 137684 - RNA, 32 nt, Homo Sapiens
gaaagggccuuggguauagagagcagcucaga

SEQ ID NO: 137685 - RNA, 32 nt, Homo Sapiens
gggagacagcggggaugcugcagcacagcccg

SEQ ID NO: 137686 - RNA, 32 nt, Homo Sapiens
gcggcgccucccgccgcgcccgggauguauuc

SEQ ID NO: 137687 - RNA, 32 nt, Homo Sapiens
agagcccuaccuuccaaggucuugaucccagc

SEQ ID NO: 137688 - RNA, 32 nt, Homo Sapiens
ccauguugucucuauuuggaauuaugguuggg

SEQ ID NO: 137689 - RNA, 32 nt, Homo Sapiens
ccuggaauucauuuaugacagaauagaucuag

SEQ ID NO: 137690 - RNA, 32 nt, Homo Sapiens
cgccgccgccccaucagguguccuacgauuac

SEQ ID NO: 137691 - RNA, 32 nt, Homo Sapiens
aaagcuccagauggcucuggaacuuaugagga

SEQ ID NO: 137692 - RNA, 32 nt, Homo Sapiens
ggccuuaugugauccgcccaccuuggcuuccc

SEQ ID NO: 137693 - RNA, 32 nt, Homo Sapiens
gcuugagcuuaacauagguaaauaucaccaac

SEQ ID NO: 137694 - RNA, 32 nt, Homo Sapiens
uuuauaaaauuucaaaaggaaguagauacacu

SEQ ID NO: 137695 - RNA, 32 nt, Homo Sapiens
cuaugugucacugucaauaaaauguaaaauau

SEQ ID NO: 137696 - RNA, 32 nt, Homo Sapiens
cacccccacccugggacuuuggaugcucccau

SEQ ID NO: 137697 - RNA, 32 nt, Homo Sapiens
agcacggcugucagccucggcaggaggaagac

SEQ ID NO: 137698 - RNA, 32 nt, Homo Sapiens
agccggccugcgccgggacaugcggccccagg

SEQ ID NO: 137699 - RNA, 32 nt, Homo Sapiens
auccuaagggaagauaaagaugauauuaagaa

SEQ ID NO: 137700 - RNA, 32 nt, Homo Sapiens
agcccucacagcccucgcuugcucucccugcc

SEQ ID NO: 137701 - RNA, 32 nt, Homo Sapiens
gcggggcagaggggugggggcuggggagaggc

SEQ ID NO: 137702 - RNA, 32 nt, Homo Sapiens
ugcacauugaguuuugucagguuuuguuuuca

SEQ ID NO: 137703 - RNA, 32 nt, Homo Sapiens
ucuguaucaccugaccucuggaugccaaaacg

SEQ ID NO: 137704 - RNA, 32 nt, Homo Sapiens
auguuccaguguuccuggcaacaacgauucau

SEQ ID NO: 137705 - RNA, 32 nt, Homo Sapiens
acugauuaagggugagcagaggcauuuaucuc

SEQ ID NO: 137706 - RNA, 32 nt, Homo Sapiens
uuucuuucaagcaacuaaaaaauauaugguaa

SEQ ID NO: 137707 - RNA, 31 nt, Homo Sapiens
ugacccggcuccugcuugccccgcagccccg

SEQ ID NO: 137708 - RNA, 32 nt, Homo Sapiens
ccccagccccugucagggccucugccaaggaa

SEQ ID NO: 137709 - RNA, 32 nt, Homo Sapiens
uggagguaguuggguagaaaaauuauuagaac

SEQ ID NO: 137710 - RNA, 32 nt, Homo Sapiens
gugaaguaaaauugagugcacuaaacaaauaa

SEQ ID NO: 137711 - RNA, 32 nt, Homo Sapiens
gaaccuggcugagacgcaccugcaacuguuug

SEQ ID NO: 137712 - RNA, 32 nt, Homo Sapiens
aucucugucugugaccuucuccugccccauuu

SEQ ID NO: 137713 - RNA, 32 nt, Homo Sapiens
aguacugaaaaauuaauaaaauugcaaguuaa

SEQ ID NO: 137714 - RNA, 32 nt, Homo Sapiens
uugauggugguugaaauugauuucuggcuggu

SEQ ID NO: 137715 - RNA, 32 nt, Homo Sapiens
cuggaucaggacuucacacuugauaacggaau

SEQ ID NO: 137716 - RNA, 32 nt, Homo Sapiens
aauggguuaauaauauucaacaugucaacaaa

SEQ ID NO: 137717 - RNA, 32 nt, Homo Sapiens
uuuuguuuguuucucuaauagcugccauccug

SEQ ID NO: 137718 - RNA, 32 nt, Homo Sapiens
ccuggaagucuugacucugugcuuucugcuua

SEQ ID NO: 137719 - RNA, 32 nt, Homo Sapiens
aggacauucacauuuaaccuguauacaaguua

SEQ ID NO: 137720 - RNA, 32 nt, Homo Sapiens
aaucccaguuggaauccacgggcccucuggag

SEQ ID NO: 137721 - RNA, 32 nt, Homo Sapiens
gucuagguucugccuuccuuaaccaugggcag

SEQ ID NO: 137722 - RNA, 32 nt, Homo Sapiens
uauagcauguaauauuaaauuccuccugucuc

SEQ ID NO: 137723 - RNA, 32 nt, Homo Sapiens
aaacaccucagaugccuauuaaaagaggaaug

SEQ ID NO: 137724 - RNA, 29 nt, Homo Sapiens
cuccagaguaucugggacuacaguugcau

SEQ ID NO: 137725 - RNA, 30 nt, Homo Sapiens
gcccgaugcuugcaguggggcccgccaugg

SEQ ID NO: 137726 - RNA, 32 nt, Homo Sapiens
uaggucagugacugaagggaccaagaacgcag

SEQ ID NO: 137727 - RNA, 32 nt, Homo Sapiens
ccugccccgucgcccggccgccggcuuagggc

SEQ ID NO: 137728 - RNA, 32 nt, Homo Sapiens
gcaagagacuugcgcgcacgcacaguccucug

SEQ ID NO: 137729 - RNA, 32 nt, Homo Sapiens
gggcugaggaggaggagcagggggugcugcgu

SEQ ID NO: 137730 - RNA, 32 nt, Homo Sapiens
uuuaaguugggucuccuucuucuucaccacaa

SEQ ID NO: 137731 - RNA, 32 nt, Homo Sapiens
gugaccauuccgcuccucucccacuacccucc

SEQ ID NO: 137732 - RNA, 32 nt, Homo Sapiens
cagcagacgcuccgccccacccggugauggag

SEQ ID NO: 137733 - RNA, 32 nt, Homo Sapiens
uucuaggagggaagcuucugugcugcugcccu

SEQ ID NO: 137734 - RNA, 32 nt, Homo Sapiens
cagcagaaaaagaugaguuguaacacugaucu

SEQ ID NO: 137735 - RNA, 32 nt, Homo Sapiens
uauuuuaaauaauaguggauauuuuaaugcug

SEQ ID NO: 137736 - RNA, 32 nt, Homo Sapiens
gcagcgugucccagcccucaaccccgagcccc

SEQ ID NO: 137737 - RNA, 32 nt, Homo Sapiens
ucauuuaugcaaacaaggacaauuaagggaac

SEQ ID NO: 137738 - RNA, 32 nt, Homo Sapiens
uuuuggacuugagugccuggaagcugaaugcc

SEQ ID NO: 137739 - RNA, 32 nt, Homo Sapiens
acugggcuggccuggguacugcauccgugugu

SEQ ID NO: 137740 - RNA, 32 nt, Homo Sapiens
agguuuuugcuucuuugaaauuucugagucau

SEQ ID NO: 137741 - RNA, 32 nt, Homo Sapiens
uggaacugaguucccagcaucaucuuauucug

SEQ ID NO: 137742 - RNA, 29 nt, Homo Sapiens
agcccuucuucuuuccaccacaaauuaau

SEQ ID NO: 137743 - RNA, 32 nt, Homo Sapiens
agcuccggcugcgucuucccgcagcgcuaccc

SEQ ID NO: 137744 - RNA, 32 nt, Homo Sapiens
cacagccccgaaguucgccgggcccggccacc

SEQ ID NO: 137745 - RNA, 32 nt, Homo Sapiens
ccuaaaaaugcucgcucagagaauuaauuaua

SEQ ID NO: 137746 - RNA, 32 nt, Homo Sapiens
gcuuuuccaaauaaauuugauuaacuuguuaa

SEQ ID NO: 137747 - RNA, 32 nt, Homo Sapiens
gaucucagcucacuacaagcuccccuucccag

SEQ ID NO: 137748 - RNA, 32 nt, Homo Sapiens
aagccgcgggcucuuuugcgccgcagccucgg

SEQ ID NO: 137749 - RNA, 32 nt, Homo Sapiens
gggugcgugccuccuuugcucuaggcacugag

SEQ ID NO: 137750 - RNA, 32 nt, Homo Sapiens
ucuucgagagccagacagccugccuugugcug

SEQ ID NO: 137751 - RNA, 32 nt, Homo Sapiens
aaaacauguaauaaaaaguauauguuaggaua

SEQ ID NO: 137752 - RNA, 32 nt, Homo Sapiens
uagcauuuuuauucaugccaucuguuuucaac

SEQ ID NO: 137753 - RNA, 32 nt, Homo Sapiens
uuuucaugauauuguucacugccucuaccacc

SEQ ID NO: 137754 - RNA, 32 nt, Homo Sapiens
aucaaugaauuuguucuuucugauuuuaaguu

SEQ ID NO: 137755 - RNA, 32 nt, Homo Sapiens
uguucagacacagccauccuucagugucaucu

SEQ ID NO: 137756 - RNA, 32 nt, Homo Sapiens
ggugugcucugacaucaugaccucaaaucuaa

SEQ ID NO: 137757 - RNA, 27 nt, Homo Sapiens
cuagcguucgccuucagccaccauggg

SEQ ID NO: 137758 - RNA, 32 nt, Homo Sapiens
cuggagcaugcugagauuaaggugguugccaa

SEQ ID NO: 137759 - RNA, 32 nt, Homo Sapiens
auagaguaugcuguaaucuuaaggcauagguu

SEQ ID NO: 137760 - RNA, 32 nt, Homo Sapiens
cuuugcauguuucugucuuaaucuccucuucu

SEQ ID NO: 137761 - RNA, 32 nt, Homo Sapiens
uggcggaaaaucauuucagggauggauccagc

SEQ ID NO: 137762 - RNA, 32 nt, Homo Sapiens
cagugaaguauguuuuauggacuuaaaugcca

SEQ ID NO: 137763 - RNA, 32 nt, Homo Sapiens
ccacuuucugguagccucucugcuuccuguaa

SEQ ID NO: 137764 - RNA, 32 nt, Homo Sapiens
ucaagauuucccuuuucucuuucaaaagguuu

SEQ ID NO: 137765 - RNA, 32 nt, Homo Sapiens
cagacuaaaaaaaaaauguaugcugacaauuc

SEQ ID NO: 137766 - RNA, 32 nt, Homo Sapiens
aaauuuucaaccaaacugaucaugguugaaau

SEQ ID NO: 137767 - RNA, 32 nt, Homo Sapiens
aacaucuaaaagaacuucaucaucaagauguc

SEQ ID NO: 137768 - RNA, 32 nt, Homo Sapiens
ccccucucauaacuucuccccaucccaggagg

SEQ ID NO: 137769 - RNA, 32 nt, Homo Sapiens
uagccggccaaggaggcugugcagcccgaggc

SEQ ID NO: 137770 - RNA, 30 nt, Homo Sapiens
gcgcggccauuucagccccaucuuggccca

SEQ ID NO: 137771 - RNA, 32 nt, Homo Sapiens
cccugucuuccucuccucucuuuaagcuucac

SEQ ID NO: 137772 - RNA, 32 nt, Homo Sapiens
agcucggggcgccccgcaggcgcacgguaccc

SEQ ID NO: 137773 - RNA, 32 nt, Homo Sapiens
cagccugggugacagggcaagacccugucuca

SEQ ID NO: 137774 - RNA, 32 nt, Homo Sapiens
acuuuagaaagauguuaauguacauaaauaga

SEQ ID NO: 137775 - RNA, 32 nt, Homo Sapiens
ucuacaaaaaauauuuaaaaaauuagccaggu

SEQ ID NO: 137776 - RNA, 32 nt, Homo Sapiens
aaaaguauuucacagcacuaaugcugaucaaa

SEQ ID NO: 137777 - RNA, 32 nt, Homo Sapiens
ucuugggcaaacguccuuccucacggggcgcc

SEQ ID NO: 137778 - RNA, 32 nt, Homo Sapiens
aauauauucugguuguuuuucuaaaugugaag

SEQ ID NO: 137779 - RNA, 30 nt, Homo Sapiens
uauuuuuuuugaaugggggaggcuauuuau

SEQ ID NO: 137780 - RNA, 32 nt, Homo Sapiens
ggauuacaggcccgugcccagcccuaaaguuu

SEQ ID NO: 137781 - RNA, 32 nt, Homo Sapiens
gggcucacauucagauguggcuauccagugug

SEQ ID NO: 137782 - RNA, 32 nt, Homo Sapiens
uaaaauuuuggagucuuaauuuucauguguac

SEQ ID NO: 137783 - RNA, 32 nt, Homo Sapiens
cugcgugagggggcagaggcgagguggaggcg

SEQ ID NO: 137784 - RNA, 32 nt, Homo Sapiens
gaggauccuucuuguuauugcugggugggggu

SEQ ID NO: 137785 - RNA, 32 nt, Homo Sapiens
agagccaggagguccaaccgccguagacagga

SEQ ID NO: 137786 - RNA, 32 nt, Homo Sapiens
ccaggggcaaaauaaaguucaacaaaagugca

SEQ ID NO: 137787 - RNA, 32 nt, Homo Sapiens
gugcaagaucacauagucaggaggugacacag

SEQ ID NO: 137788 - RNA, 32 nt, Homo Sapiens
ugguguaaacauuuauacuguuuuguucacug

SEQ ID NO: 137789 - RNA, 32 nt, Homo Sapiens
uauaccauuggacaugucucuaucuucugaaa

SEQ ID NO: 137790 - RNA, 32 nt, Homo Sapiens
auggcugagcuggcccggggcugccccggucu

SEQ ID NO: 137791 - RNA, 32 nt, Homo Sapiens
agccagcagaucugcucccuucugggacccag

SEQ ID NO: 137792 - RNA, 32 nt, Homo Sapiens
ggugggaccaggggcgggaccuggggcggggg

SEQ ID NO: 137793 - RNA, 29 nt, Homo Sapiens
ucauacauauguauuaggacaccaauaca

SEQ ID NO: 137794 - RNA, 32 nt, Homo Sapiens
cuguaguccacuuuuccaucguaauugcuuua

SEQ ID NO: 137795 - RNA, 32 nt, Homo Sapiens
cgacuuuucuccgcucugccagcccucacugc

SEQ ID NO: 137796 - RNA, 32 nt, Homo Sapiens
aacaaggggucaaugucauaaaugucacaaua

SEQ ID NO: 137797 - RNA, 32 nt, Homo Sapiens
cuguauauaaguugaauauauuaugcacauau

SEQ ID NO: 137798 - RNA, 29 nt, Homo Sapiens
uccgugguguguauguaccauguuuucuu

SEQ ID NO: 137799 - RNA, 32 nt, Homo Sapiens
cacaaguauaaaauauguguguauuauaaaac

SEQ ID NO: 137800 - RNA, 32 nt, Homo Sapiens
ggguguugugguuugucuuucuaauuaggugu

SEQ ID NO: 137801 - RNA, 32 nt, Homo Sapiens
cuucucugagcagcuccuccccggaggacccc

SEQ ID NO: 137802 - RNA, 32 nt, Homo Sapiens
aaaaaaucaagcuauguacuuauuuucuauau

SEQ ID NO: 137803 - RNA, 32 nt, Homo Sapiens
ugaauuaaguuaauguuuuucuuauaagaaau

SEQ ID NO: 137804 - RNA, 32 nt, Homo Sapiens
gaggaagaaaaauuaagaagacaacuuacaaa

SEQ ID NO: 137805 - RNA, 32 nt, Homo Sapiens
cagccuggguccccuccucccaauagaggcug

SEQ ID NO: 137806 - RNA, 32 nt, Homo Sapiens
ccagccccaauuuucuggggcuccucacauag

SEQ ID NO: 137807 - RNA, 32 nt, Homo Sapiens
ugggaacacgggggcggggcggccgcggcucu

SEQ ID NO: 137808 - RNA, 32 nt, Homo Sapiens
ccucuggcacugugucuacuaggccuaaugga

SEQ ID NO: 137809 - RNA, 32 nt, Homo Sapiens
gucuguuaaaacuagucugcagauguuucuug

SEQ ID NO: 137810 - RNA, 32 nt, Homo Sapiens
ugcuagcacuauuguaccuugaaaggauuucc

SEQ ID NO: 137811 - RNA, 32 nt, Homo Sapiens
aaccucucugccucuggaggagggugggguau

SEQ ID NO: 137812 - RNA, 32 nt, Homo Sapiens
cccaguuacauuugcaucguagauaaagaaag

SEQ ID NO: 137813 - RNA, 30 nt, Homo Sapiens
gcggcguggggcgggucucauugaaucucc

SEQ ID NO: 137814 - RNA, 32 nt, Homo Sapiens
aaauucauuauuguuguuuuuaucccuggucu

SEQ ID NO: 137815 - RNA, 32 nt, Homo Sapiens
cagguugugaauguguuuuuauucugaauuau

SEQ ID NO: 137816 - RNA, 32 nt, Homo Sapiens
cuuuuuaaacaaaacaaacccuaccagauuuc

SEQ ID NO: 137817 - RNA, 32 nt, Homo Sapiens
ucuggcuagagugggaagagggggcuggccau

SEQ ID NO: 137818 - RNA, 32 nt, Homo Sapiens
ugcaaccguugaugaggccauaaacagaaaca

SEQ ID NO: 137819 - RNA, 32 nt, Homo Sapiens
augccuguguacugccuuaaauguaccuaugg

SEQ ID NO: 137820 - RNA, 32 nt, Homo Sapiens
aagcugaugacucuguucccccggggggcagc

SEQ ID NO: 137821 - RNA, 32 nt, Homo Sapiens
uuucucgacgaccccaccagguacaucucacc

SEQ ID NO: 137822 - RNA, 32 nt, Homo Sapiens
uugaaguucaucugaaaugcaaggugcuuuca

SEQ ID NO: 137823 - RNA, 32 nt, Homo Sapiens
gagagaggaggaggagugcggcgcggcggccc

SEQ ID NO: 137824 - RNA, 32 nt, Homo Sapiens
cccagagauguuuggaaaggugguuggcuugg

SEQ ID NO: 137825 - RNA, 32 nt, Homo Sapiens
cccgggauggcuaucugaaaugucuggaaaau

SEQ ID NO: 137826 - RNA, 32 nt, Homo Sapiens
gacuauuuugcaugcugaaacuucucaaccag

SEQ ID NO: 137827 - RNA, 32 nt, Homo Sapiens
aguugagggaaagugcugcugcugggucugca

SEQ ID NO: 137828 - RNA, 31 nt, Homo Sapiens
guggcccagccccagccucagggacggggag

SEQ ID NO: 137829 - RNA, 32 nt, Homo Sapiens
cagucuggccccaguaccuaccugggagguug

SEQ ID NO: 137830 - RNA, 32 nt, Homo Sapiens
ggugaguggcggggcggggcagaggugagggc

SEQ ID NO: 137831 - RNA, 32 nt, Homo Sapiens
aacaacccacggcucaacuccuccuuuaucau

SEQ ID NO: 137832 - RNA, 32 nt, Homo Sapiens
ucaaagaagucuuuugaauuaauuacgcuaau

SEQ ID NO: 137833 - RNA, 32 nt, Homo Sapiens
cuaauuaauaaguaaacuuaagguguuuaaaa

SEQ ID NO: 137834 - RNA, 32 nt, Homo Sapiens
cuaaggccaagagcaucaccuccaaucauccu

SEQ ID NO: 137835 - RNA, 32 nt, Homo Sapiens
aguuguggccccagccccucucccugugcugu

SEQ ID NO: 137836 - RNA, 32 nt, Homo Sapiens
cuaguggugcuucauuuccagggcaucugaga

SEQ ID NO: 137837 - RNA, 32 nt, Homo Sapiens
guuuuauuuuuaccuaacacuaacaugaguaa

SEQ ID NO: 137838 - RNA, 32 nt, Homo Sapiens
cguccccgcgucugccuugggggcccgagucc

SEQ ID NO: 137839 - RNA, 32 nt, Homo Sapiens
ucacacucggcuccgcgccgccuccggccacc

SEQ ID NO: 137840 - RNA, 32 nt, Homo Sapiens
aacuggugagccuggcugugugccaaucaagc

SEQ ID NO: 137841 - RNA, 32 nt, Homo Sapiens
uucguaucaaagcuccucaaaccccguccccc

SEQ ID NO: 137842 - RNA, 32 nt, Homo Sapiens
cacacaggaccacagcagcaucacugagccga

SEQ ID NO: 137843 - RNA, 31 nt, Homo Sapiens
cagaggcugccggcggcucguagcuggguuc

SEQ ID NO: 137844 - RNA, 32 nt, Homo Sapiens
aaccguuugugauugccauuugagcucuggaa

SEQ ID NO: 137845 - RNA, 32 nt, Homo Sapiens
ggauuuagccugcagcugggguccccggugca

SEQ ID NO: 137846 - RNA, 32 nt, Homo Sapiens
gauaaucuaauaccugugaaaacugacuaauc

SEQ ID NO: 137847 - RNA, 32 nt, Homo Sapiens
acggccucaauccuugaaaagcuuacaguaac

SEQ ID NO: 137848 - RNA, 32 nt, Homo Sapiens
ccccagaggucucagacacguuuggucaucag

SEQ ID NO: 137849 - RNA, 32 nt, Homo Sapiens
aaguuuggacauuucauuuugguguugauaau

SEQ ID NO: 137850 - RNA, 32 nt, Homo Sapiens
ccgucggagucugugugcuggugcaaggucug

SEQ ID NO: 137851 - RNA, 32 nt, Homo Sapiens
uuaaauauaaaguuguagauucuuauguguuu

SEQ ID NO: 137852 - RNA, 32 nt, Homo Sapiens
gagaagacugauuuaauguggugugauuauuc

SEQ ID NO: 137853 - RNA, 32 nt, Homo Sapiens
acaguaccaaaauaaaccuucacauuuauagu

SEQ ID NO: 137854 - RNA, 32 nt, Homo Sapiens
ggccuccgcgccuccccucccccgacucucug

SEQ ID NO: 137855 - RNA, 32 nt, Homo Sapiens
ggcugggcaugguggcucacgccuguaguccc

SEQ ID NO: 137856 - RNA, 32 nt, Homo Sapiens
guccaccucucagccccuccccucaccccugc

SEQ ID NO: 137857 - RNA, 32 nt, Homo Sapiens
uuugauuguguauuauggauaccaaggaagag

SEQ ID NO: 137858 - RNA, 28 nt, Homo Sapiens
ggggaaaggauuuaacauuuagaauaaa

SEQ ID NO: 137859 - RNA, 32 nt, Homo Sapiens
ugccacagaaacaaaauauugggaaagagucu

SEQ ID NO: 137860 - RNA, 32 nt, Homo Sapiens
uaacuuuuucuuuugauaaguaugauauucaa

SEQ ID NO: 137861 - RNA, 32 nt, Homo Sapiens
auuuauauugauugcacuugccugccaugauu

SEQ ID NO: 137862 - RNA, 32 nt, Homo Sapiens
uguuucuugguguuuguugucuccagguguaa

SEQ ID NO: 137863 - RNA, 32 nt, Homo Sapiens
cccgcgcagccgccgcgcuccugcgcuccgag

SEQ ID NO: 137864 - RNA, 32 nt, Homo Sapiens
uaaacgaucuuuucuuuuucucccauccuuuu

SEQ ID NO: 137865 - RNA, 32 nt, Homo Sapiens
ccugaauucugccucccuguuauagucccugu

SEQ ID NO: 137866 - RNA, 32 nt, Homo Sapiens
aaauauuguuaauaauacacagcuucugaauc

SEQ ID NO: 137867 - RNA, 32 nt, Homo Sapiens
cagaguccugguuuccucagccucacccugca

SEQ ID NO: 137868 - RNA, 32 nt, Homo Sapiens
guuuuuguuuuaaagcaucuuaaucuuuuaag

SEQ ID NO: 137869 - RNA, 32 nt, Homo Sapiens
cacucaccaagaugaacuauuugccgcccugu

SEQ ID NO: 137870 - RNA, 32 nt, Homo Sapiens
gcugugucaguuuuguaaaaaauguacauuau

SEQ ID NO: 137871 - RNA, 32 nt, Homo Sapiens
accugcuggacagggcugggcggcauaccagu

SEQ ID NO: 137872 - RNA, 32 nt, Homo Sapiens
gaaagcugacagucuguucuuuguaaacugcc

SEQ ID NO: 137873 - RNA, 32 nt, Homo Sapiens
acagccauuguuucugcuuccacucauauucu

SEQ ID NO: 137874 - RNA, 32 nt, Homo Sapiens
caugccagauuggagaagauccaagccaggaa

SEQ ID NO: 137875 - RNA, 32 nt, Homo Sapiens
acaaacauuauuuuguuuuugguuuauuuaua

SEQ ID NO: 137876 - RNA, 32 nt, Homo Sapiens
cgcccacccuguccuccuccugcgggagcguu

SEQ ID NO: 137877 - RNA, 32 nt, Homo Sapiens
uccacaguggcugggugaccacagcagcugca

SEQ ID NO: 137878 - RNA, 32 nt, Homo Sapiens
ugggagagagcuaaagcuuaugcuggucgcaa

SEQ ID NO: 137879 - RNA, 32 nt, Homo Sapiens
gguuuuucucugaaacuucuuugaucuuuuaa

SEQ ID NO: 137880 - RNA, 32 nt, Homo Sapiens
cggcucugacuggcaggcagaaagugcaacug

SEQ ID NO: 137881 - RNA, 32 nt, Homo Sapiens
agccgcgcgugcccucccggggaccgagccag

SEQ ID NO: 137882 - RNA, 32 nt, Homo Sapiens
uauuucaauuugauuaauccacuauuauauaa

SEQ ID NO: 137883 - RNA, 32 nt, Homo Sapiens
gagagcgcuugcgggcgccgggcggagcugcu

SEQ ID NO: 137884 - RNA, 31 nt, Homo Sapiens
ggggcuguguggcucauucagaguugcacag

SEQ ID NO: 137885 - RNA, 32 nt, Homo Sapiens
aguaauuucuauuugcacugugccuuucaacu

SEQ ID NO: 137886 - RNA, 32 nt, Homo Sapiens
auaguuguuguaauauuuaauccaguagcaua

SEQ ID NO: 137887 - RNA, 32 nt, Homo Sapiens
ugguggcagcaacagcagcagcagcuggggag

SEQ ID NO: 137888 - RNA, 32 nt, Homo Sapiens
gcgggaggcggguuauggcggcggcggcagug

SEQ ID NO: 137889 - RNA, 32 nt, Homo Sapiens
guucacgggaugcaccaaaguguguaccccgu

SEQ ID NO: 137890 - RNA, 32 nt, Homo Sapiens
uguguguucaauuuuguauuuucacugucuuc

SEQ ID NO: 137891 - RNA, 32 nt, Homo Sapiens
ugggaccccguccagugucugcugcugugggg

SEQ ID NO: 137892 - RNA, 32 nt, Homo Sapiens
ugcugguacuauugugaccacaggcuggugug

SEQ ID NO: 137893 - RNA, 32 nt, Homo Sapiens
uuuuucuuccuaauguaaaauaaaauaaaaca

SEQ ID NO: 137894 - RNA, 32 nt, Homo Sapiens
gcucuugccaauggugcugcaguggccauucu

SEQ ID NO: 137895 - RNA, 32 nt, Homo Sapiens
cagggauggugggcuggaguagggugcuggca

SEQ ID NO: 137896 - RNA, 32 nt, Homo Sapiens
aaaucuugaaauuuauaauaaaaauacuuuac

SEQ ID NO: 137897 - RNA, 32 nt, Homo Sapiens
uauuauuuuugcucaucaaaaaauaaggauuu

SEQ ID NO: 137898 - RNA, 32 nt, Homo Sapiens
auuaaauacuauuaaucauaggcagauacuau

SEQ ID NO: 137899 - RNA, 32 nt, Homo Sapiens
gucauuuguaaaacuaaaucagauuguaaucc

SEQ ID NO: 137900 - RNA, 32 nt, Homo Sapiens
caggcagccucccuggccccaggcagcccuuu

SEQ ID NO: 137901 - RNA, 32 nt, Homo Sapiens
acugagggacaucuguuggucuauguauaacu

SEQ ID NO: 137902 - RNA, 32 nt, Homo Sapiens
guuacuguuguccuguucauaagccuguguuc

SEQ ID NO: 137903 - RNA, 32 nt, Homo Sapiens
uccuccugcuucagccuccagagcagcuggga

SEQ ID NO: 137904 - RNA, 32 nt, Homo Sapiens
cccagagaccagcagaacggcaucccagccac

SEQ ID NO: 137905 - RNA, 32 nt, Homo Sapiens
uuguucugagaauuaaauauggcugcuuacau

SEQ ID NO: 137906 - RNA, 32 nt, Homo Sapiens
gagaagaaaaauacgaaaaguaaguucaucac

SEQ ID NO: 137907 - RNA, 32 nt, Homo Sapiens
gucuugguaguuucuggugggauucagugggu

SEQ ID NO: 137908 - RNA, 32 nt, Homo Sapiens
cggugcggggccugggaugcccgcgccacccg

SEQ ID NO: 137909 - RNA, 32 nt, Homo Sapiens
guuguacucuccucauucugcacugcaaggcc

SEQ ID NO: 137910 - RNA, 32 nt, Homo Sapiens
agacacuguuuccauucuaauuuaucaaaaau

SEQ ID NO: 137911 - RNA, 32 nt, Homo Sapiens
uuuagaacaaagucaaguauaaauuuacagag

SEQ ID NO: 137912 - RNA, 32 nt, Homo Sapiens
ggguaagacaccugcuuacauucucuaagccu

SEQ ID NO: 137913 - RNA, 32 nt, Homo Sapiens
acgauuuucuguacucgccguccuccuguccu

SEQ ID NO: 137914 - RNA, 32 nt, Homo Sapiens
cccagaugacuucagaccccauagcugggcaa

SEQ ID NO: 137915 - RNA, 32 nt, Homo Sapiens
cuuugaaaagagaauauuuacaauauaugacu

SEQ ID NO: 137916 - RNA, 32 nt, Homo Sapiens
gcgggcagccgaagcaguggcucucggagggg

SEQ ID NO: 137917 - RNA, 32 nt, Homo Sapiens
cagcugggcuguaaggagugugaaugccggcg

SEQ ID NO: 137918 - RNA, 32 nt, Homo Sapiens
guggaucgugcuguggggccaggccgccccgg

SEQ ID NO: 137919 - RNA, 32 nt, Homo Sapiens
gcccucggccccaccgagugccggcucccgcg

SEQ ID NO: 137920 - RNA, 32 nt, Homo Sapiens
caaggauccuucuuaaggucuuaucucaagag

SEQ ID NO: 137921 - RNA, 32 nt, Homo Sapiens
ugcccacccccuccuuugccuggagugagggu

SEQ ID NO: 137922 - RNA, 32 nt, Homo Sapiens
aagggugcagccaagcucugcagacuuuugca

SEQ ID NO: 137923 - RNA, 32 nt, Homo Sapiens
cauggagggggaaguauaagcgugucuuuuca

SEQ ID NO: 137924 - RNA, 32 nt, Homo Sapiens
ucggugcagucgagaccccccuccccauccca

SEQ ID NO: 137925 - RNA, 32 nt, Homo Sapiens
ggccagugaacaggguggguucguggaagaga

SEQ ID NO: 137926 - RNA, 32 nt, Homo Sapiens
aaacgccuccggcggccgcgcccgagagcccc

SEQ ID NO: 137927 - RNA, 32 nt, Homo Sapiens
gucaguauuucaacugcuguaaaauuauaaac

SEQ ID NO: 137928 - RNA, 32 nt, Homo Sapiens
gugguuguccaagcccaggucccggcccuggg

SEQ ID NO: 137929 - RNA, 32 nt, Homo Sapiens
gcagugcccuccccgucccaugcucggcgagc

SEQ ID NO: 137930 - RNA, 32 nt, Homo Sapiens
aacccccagcuccacaccccccagacccagcu

SEQ ID NO: 137931 - RNA, 32 nt, Homo Sapiens
ggaacgagggucaugagagguguggacuggaa

SEQ ID NO: 137932 - RNA, 32 nt, Homo Sapiens
gcugugaauggaaacagaauacacuuaacaua

SEQ ID NO: 137933 - RNA, 32 nt, Homo Sapiens
cucuagggcauaauuuaugggcucagaaaggg

SEQ ID NO: 137934 - RNA, 32 nt, Homo Sapiens
cgcccgccuuuccaggccccgccccgccuaaa

SEQ ID NO: 137935 - RNA, 32 nt, Homo Sapiens
agggcaaacaauuuauguaauucaacuaauac

SEQ ID NO: 137936 - RNA, 32 nt, Homo Sapiens
ucuuuccgguggcaauaggcaggaugccuggc

SEQ ID NO: 137937 - RNA, 32 nt, Homo Sapiens
cucuugggccucuucccuuccuggacaaggcc

SEQ ID NO: 137938 - RNA, 32 nt, Homo Sapiens
uuuuuuugaaagacaguuuuaguuuuaucuug

SEQ ID NO: 137939 - RNA, 32 nt, Homo Sapiens
uagcaccaggaucgugucucauuuugaaccca

SEQ ID NO: 137940 - RNA, 31 nt, Homo Sapiens
aagguugcgaagauggcgacggccuugagcg

SEQ ID NO: 137941 - RNA, 32 nt, Homo Sapiens
aagauccuauuauagcuuccuucuguugaacc

SEQ ID NO: 137942 - RNA, 32 nt, Homo Sapiens
caacguggggagagggaagugaauugcagagg

SEQ ID NO: 137943 - RNA, 32 nt, Homo Sapiens
aguauguuuuccauucuuccacagcaauaugc

SEQ ID NO: 137944 - RNA, 32 nt, Homo Sapiens
auuuuuuaaauugaauucuacuauuuauguga

SEQ ID NO: 137945 - RNA, 32 nt, Homo Sapiens
ucuacuaaaaauacaaaaauuaucugggugug

SEQ ID NO: 137946 - RNA, 32 nt, Homo Sapiens
ggaucucuuacgcugugaaagccuucuugguc

SEQ ID NO: 137947 - RNA, 32 nt, Homo Sapiens
cugggaaagggcugagugucaacaggccugug

SEQ ID NO: 137948 - RNA, 32 nt, Homo Sapiens
uagaguuuuagguaaaaguggaucuaggguua

SEQ ID NO: 137949 - RNA, 32 nt, Homo Sapiens
uuuuauucugguguuuuaaauauggggagggg

SEQ ID NO: 137950 - RNA, 32 nt, Homo Sapiens
acagugaaaccccgucucuaauaaaaauacga

SEQ ID NO: 137951 - RNA, 32 nt, Homo Sapiens
ugcccggaucucuggcuccucaucucuccggu

SEQ ID NO: 137952 - RNA, 32 nt, Homo Sapiens
aaagcaggauuuuaauaaaaacuggauacuuc

SEQ ID NO: 137953 - RNA, 32 nt, Homo Sapiens
ggaacugaagaccugaugggaaaaaaaccuuc

SEQ ID NO: 137954 - RNA, 32 nt, Homo Sapiens
uuuugagcucuuuuuucccccccaacaaaguu

SEQ ID NO: 137955 - RNA, 32 nt, Homo Sapiens
cccaaauauaaaaagauaaaauaaaaagccgg

SEQ ID NO: 137956 - RNA, 32 nt, Homo Sapiens
uuauuguacuuuggauuugguuaaccuguuuu

SEQ ID NO: 137957 - RNA, 32 nt, Homo Sapiens
uuuucuuguucacaguaaugcaugucaauaau

SEQ ID NO: 137958 - RNA, 32 nt, Homo Sapiens
gagacuccaaauaaaccgguucuugucaaggc

SEQ ID NO: 137959 - RNA, 32 nt, Homo Sapiens
cggggggcuccggcccggggugggcaccauuc

SEQ ID NO: 137960 - RNA, 32 nt, Homo Sapiens
uaggaggauuaaaauauuauuuuaaagaaacc

SEQ ID NO: 137961 - RNA, 32 nt, Homo Sapiens
aaguagaaguacacucuaaaauauuaaauugg

SEQ ID NO: 137962 - RNA, 32 nt, Homo Sapiens
uaccgauuucaaaguccagauaccaagcaugu

SEQ ID NO: 137963 - RNA, 32 nt, Homo Sapiens
uuggcaaauggggcuccugggcccaguccugc

SEQ ID NO: 137964 - RNA, 32 nt, Homo Sapiens
gccauccucuggguccucuccaaguccuacua

SEQ ID NO: 137965 - RNA, 32 nt, Homo Sapiens
acacagacggugaugaugucacacacagacac

SEQ ID NO: 137966 - RNA, 32 nt, Homo Sapiens
aauaugacuguuacauaauuacacuuauaaca

SEQ ID NO: 137967 - RNA, 32 nt, Homo Sapiens
uuaucagaguauuagaccagacuuuauuugca

SEQ ID NO: 137968 - RNA, 32 nt, Homo Sapiens
uguggacccccggccccugggacucacaggug

SEQ ID NO: 137969 - RNA, 32 nt, Homo Sapiens
cugccuugccccuaugccugcccgccuccuau

SEQ ID NO: 137970 - RNA, 32 nt, Homo Sapiens
gccgcauccaccugggaccccaggguggcccg

SEQ ID NO: 137971 - RNA, 32 nt, Homo Sapiens
aucccaauggcggccuggccuaaccaggggug

SEQ ID NO: 137972 - RNA, 32 nt, Homo Sapiens
uuugggaucaaguuuaccuuugccaagccuuu

SEQ ID NO: 137973 - RNA, 32 nt, Homo Sapiens
uagguucuccagcagagcucuggccagcugcc

SEQ ID NO: 137974 - RNA, 29 nt, Homo Sapiens
ugaaccauauguaauugccaagauuuuac

SEQ ID NO: 137975 - RNA, 29 nt, Homo Sapiens
uccaaauaaaguucuuuuucuaagaacau

SEQ ID NO: 137976 - RNA, 32 nt, Homo Sapiens
ccgcgaggccgcgggcggguggaggcgcgucu

SEQ ID NO: 137977 - RNA, 30 nt, Homo Sapiens
gagagggcgcccgggccccccagucuaucc

SEQ ID NO: 137978 - RNA, 32 nt, Homo Sapiens
gcugaaaacuucaaaaucagggccuggcagag

SEQ ID NO: 137979 - RNA, 32 nt, Homo Sapiens
cccagcuucccgcuccgccuuccccgcgcagc

SEQ ID NO: 137980 - RNA, 32 nt, Homo Sapiens
gcuugaauauauuuuauaugauuuuuaaucca

SEQ ID NO: 137981 - RNA, 32 nt, Homo Sapiens
cgguaccugccagugguggggcacacggacgg

SEQ ID NO: 137982 - RNA, 32 nt, Homo Sapiens
agggugcgcuccggccacgaaaagcggacugu

SEQ ID NO: 137983 - RNA, 32 nt, Homo Sapiens
cuggacgugcgcgaugccuggggucgucugcc

SEQ ID NO: 137984 - RNA, 32 nt, Homo Sapiens
uuccuugaaaaacuuaaaauagaauuaccguu

SEQ ID NO: 137985 - RNA, 32 nt, Homo Sapiens
cagggagaggccggugaauacaggggcugacg

SEQ ID NO: 137986 - RNA, 32 nt, Homo Sapiens
accagagucugccucccugagguucuuguaua

SEQ ID NO: 137987 - RNA, 32 nt, Homo Sapiens
cgcgggcggcggugacaucacggccacggcgg

SEQ ID NO: 137988 - RNA, 32 nt, Homo Sapiens
uucauuaugucacagugaugcaugucuuagca

SEQ ID NO: 137989 - RNA, 32 nt, Homo Sapiens
uauuaauauuuugaaccaauuuuuugggcauu

SEQ ID NO: 137990 - RNA, 32 nt, Homo Sapiens
aacccaaagggaauagagauucuccaggaauu

SEQ ID NO: 137991 - RNA, 32 nt, Homo Sapiens
gaucacgucccuuuguucugcuccaugugagc

SEQ ID NO: 137992 - RNA, 31 nt, Homo Sapiens
aaagaacaugaccauuaagugcuguuuuaug

SEQ ID NO: 137993 - RNA, 32 nt, Homo Sapiens
cauuuuaaacgaauuuauccuggagcuuagug

SEQ ID NO: 137994 - RNA, 32 nt, Homo Sapiens
uuucuaaaaugaaugugaaugccaucuuuuau

SEQ ID NO: 137995 - RNA, 32 nt, Homo Sapiens
cgcucgcgggcauggacagcgcggccgccgcc

SEQ ID NO: 137996 - RNA, 32 nt, Homo Sapiens
uucagguuggucagcccuccugagccucacag

SEQ ID NO: 137997 - RNA, 32 nt, Homo Sapiens
cccuaacacacacagcggggaagcugggccga

SEQ ID NO: 137998 - RNA, 32 nt, Homo Sapiens
agccuggugccgugaaaaucgccccgccagag

SEQ ID NO: 137999 - RNA, 32 nt, Homo Sapiens
ucccaagugucugccggucgaccaaucugccu

SEQ ID NO: 138000 - RNA, 32 nt, Homo Sapiens
gagccagcggcuucgggugcaggagcaggaga

SEQ ID NO: 138001 - RNA, 32 nt, Homo Sapiens
uccccucgccugggccguugugugggcggacu

SEQ ID NO: 138002 - RNA, 32 nt, Homo Sapiens
cacucagcccagcccaucaguuuuucagccca

SEQ ID NO: 138003 - RNA, 32 nt, Homo Sapiens
agugccuuccaagucaguccuuuggaaaccag

SEQ ID NO: 138004 - RNA, 32 nt, Homo Sapiens
cuuuucucagauggauugauaauugcauucau

SEQ ID NO: 138005 - RNA, 32 nt, Homo Sapiens
auaggauuuuucugcaggacuuuaaagcuuug

SEQ ID NO: 138006 - RNA, 32 nt, Homo Sapiens
cuggguugggcaggacugauauucccaagcug

SEQ ID NO: 138007 - RNA, 32 nt, Homo Sapiens
aacggaucagaguuucauaguuucuauaguaa

SEQ ID NO: 138008 - RNA, 32 nt, Homo Sapiens
uaugaauagauauuaaagaaaauaaaaacaag

SEQ ID NO: 138009 - RNA, 32 nt, Homo Sapiens
cgcuaccuggcgggcuucugcugcccucucgg

SEQ ID NO: 138010 - RNA, 32 nt, Homo Sapiens
acaguuuaacuuuuuucuuuaaauuuuguugu

SEQ ID NO: 138011 - RNA, 32 nt, Homo Sapiens
gcccaacauggcuggagcgcggcggaggugag

SEQ ID NO: 138012 - RNA, 32 nt, Homo Sapiens
guugcugugguaauauuuuugacaugugaugg

SEQ ID NO: 138013 - RNA, 32 nt, Homo Sapiens
cgggggcccguccaagaccuggccucccuuaa

SEQ ID NO: 138014 - RNA, 32 nt, Homo Sapiens
cuuuuaauauaaagccuguuuugucuucuguu

SEQ ID NO: 138015 - RNA, 32 nt, Homo Sapiens
cauuauuuaugaaucacaucuuugaaacugug

SEQ ID NO: 138016 - RNA, 32 nt, Homo Sapiens
uggcgccggccgcaggccucggucacgccccc

SEQ ID NO: 138017 - RNA, 32 nt, Homo Sapiens
aagugcccaaaauaaaauauugcugauugucu

SEQ ID NO: 138018 - RNA, 32 nt, Homo Sapiens
aauuaggaaugggcuuugcuaacccuucugag

SEQ ID NO: 138019 - RNA, 32 nt, Homo Sapiens
uuucaugggccauuuuaacaguuuuauuucaa

SEQ ID NO: 138020 - RNA, 32 nt, Homo Sapiens
cugugcugccgcaggagggcaggccgcaagug

SEQ ID NO: 138021 - RNA, 32 nt, Homo Sapiens
uguucuuuuaucgucucgguuuuagccaaaag

SEQ ID NO: 138022 - RNA, 32 nt, Homo Sapiens
aaagaaaauguaaaaauguaacuauagcauau

SEQ ID NO: 138023 - RNA, 32 nt, Homo Sapiens
ugcggaaccucggcgcucggccccaccccgcc

SEQ ID NO: 138024 - RNA, 32 nt, Homo Sapiens
cacugucugcuguggggaugguguguuuaugg

SEQ ID NO: 138025 - RNA, 32 nt, Homo Sapiens
acugcuuuaaaucuuauuauuuuauagucuuc

SEQ ID NO: 138026 - RNA, 32 nt, Homo Sapiens
gaugaacuaaggcugcuggugcccugagcaac

SEQ ID NO: 138027 - RNA, 32 nt, Homo Sapiens
auuucacggacggagugagcagugcuggcuug

SEQ ID NO: 138028 - RNA, 32 nt, Homo Sapiens
cauuauuacugauacuugcacacagucaaaag

SEQ ID NO: 138029 - RNA, 32 nt, Homo Sapiens
guuuugucuucuguugggaugaacuuuguuaa

SEQ ID NO: 138030 - RNA, 31 nt, Homo Sapiens
ccccacggcuccucccugccccugccccucc

SEQ ID NO: 138031 - RNA, 32 nt, Homo Sapiens
gguuguuucggucuguuuucauuuucaguuuu

SEQ ID NO: 138032 - RNA, 32 nt, Homo Sapiens
aucaagcgccgggcucugucuccucggcgccc

SEQ ID NO: 138033 - RNA, 32 nt, Homo Sapiens
cacugacaagguggagggcuggacggccauca

SEQ ID NO: 138034 - RNA, 29 nt, Homo Sapiens
gaugguguggcgcuccugccguggguguu

SEQ ID NO: 138035 - RNA, 32 nt, Homo Sapiens
aaggauaaaggcaaaaucaauuuuguaauuug

SEQ ID NO: 138036 - RNA, 32 nt, Homo Sapiens
uugaaccugugcuauuaaauggaaauuuccau

SEQ ID NO: 138037 - RNA, 32 nt, Homo Sapiens
uguuggaggacaccccucgccaucucgcccuu

SEQ ID NO: 138038 - RNA, 32 nt, Homo Sapiens
gagaagacaauauguuucuaaaaauugguacu

SEQ ID NO: 138039 - RNA, 32 nt, Homo Sapiens
uuuugcgguguugaguguguggauucccuuuu

SEQ ID NO: 138040 - RNA, 32 nt, Homo Sapiens
ccgcggcguccccagggcgccacguucgcccu

SEQ ID NO: 138041 - RNA, 32 nt, Homo Sapiens
ccugggacagugggcucugcauguucuccacu

SEQ ID NO: 138042 - RNA, 32 nt, Homo Sapiens
cugcccuccagcucuuuccuccuuccauggaa

SEQ ID NO: 138043 - RNA, 32 nt, Homo Sapiens
gcuagguagcagccucccggcccucgggaaag

SEQ ID NO: 138044 - RNA, 32 nt, Homo Sapiens
auucauacucuauguuuauagaacauggugaa

SEQ ID NO: 138045 - RNA, 32 nt, Homo Sapiens
agugcucaguggagagcggggaguugugucca

SEQ ID NO: 138046 - RNA, 32 nt, Homo Sapiens
ccgagauagugccauuguacuccagcuugggc

SEQ ID NO: 138047 - RNA, 32 nt, Homo Sapiens
auuacagcuucguaucucuaauuuauggucua

SEQ ID NO: 138048 - RNA, 32 nt, Homo Sapiens
cuccaccccccucccuggcagcaccucgagca

SEQ ID NO: 138049 - RNA, 32 nt, Homo Sapiens
acaguuccugcuuggucccacccacugaagua

SEQ ID NO: 138050 - RNA, 32 nt, Homo Sapiens
ucccccuuucccuugagaaaucuuuaaguuuc

SEQ ID NO: 138051 - RNA, 32 nt, Homo Sapiens
ccuugggaaaauaaugauuccaauuaaagagg

SEQ ID NO: 138052 - RNA, 32 nt, Homo Sapiens
gcaucuggaaggacacagguugccagagcccc

SEQ ID NO: 138053 - RNA, 32 nt, Homo Sapiens
ggauuuugaccauguagaaauuccuugaaaca

SEQ ID NO: 138054 - RNA, 32 nt, Homo Sapiens
uuguccacucccaaaaaaguaaucgggugugu

SEQ ID NO: 138055 - RNA, 30 nt, Homo Sapiens
cgcugcagcugcggcggcggcagcgaagcc

SEQ ID NO: 138056 - RNA, 32 nt, Homo Sapiens
aagaacuaacugaguuuuaaagccaaacugac

SEQ ID NO: 138057 - RNA, 32 nt, Homo Sapiens
auccaccuggccgccuccauggacccuuggug

SEQ ID NO: 138058 - RNA, 32 nt, Homo Sapiens
ucaccuggugaaaucuugaaucuuacuguuca

SEQ ID NO: 138059 - RNA, 32 nt, Homo Sapiens
cgaagccccggugcagcccuggcgggaccgca

SEQ ID NO: 138060 - RNA, 32 nt, Homo Sapiens
ggucuaugaguuggcuucggguccuuguuaau

SEQ ID NO: 138061 - RNA, 32 nt, Homo Sapiens
ccggagccggagucgagccgcggccgggagcc

SEQ ID NO: 138062 - RNA, 32 nt, Homo Sapiens
uuuuuuuuuaaaccuacuuuagaauaggaaac

SEQ ID NO: 138063 - RNA, 32 nt, Homo Sapiens
caccauugcuguccagccugggugacagagca

SEQ ID NO: 138064 - RNA, 32 nt, Homo Sapiens
uuuuccuaggcagagcuauccaagucauuuuu

SEQ ID NO: 138065 - RNA, 32 nt, Homo Sapiens
uuugccauuucccaguacuucccuuuacaguc

SEQ ID NO: 138066 - RNA, 32 nt, Homo Sapiens
ccugcgggugaaggaggcucgugccggagggg

SEQ ID NO: 138067 - RNA, 32 nt, Homo Sapiens
gaagccgagucgaguccucuuaucuugguugg

SEQ ID NO: 138068 - RNA, 32 nt, Homo Sapiens
ccugacaggugugggccccggcggcggcggcg

SEQ ID NO: 138069 - RNA, 32 nt, Homo Sapiens
aaauagguauauaaaaugugucacagaaaaac

SEQ ID NO: 138070 - RNA, 32 nt, Homo Sapiens
caggcccgggacgaggccuccccuucagcuca

SEQ ID NO: 138071 - RNA, 32 nt, Homo Sapiens
ugcggugaggggcugaggcuggcugccuggug

SEQ ID NO: 138072 - RNA, 32 nt, Homo Sapiens
uauuaaagguggcggcggaagagcuaagcaac

SEQ ID NO: 138073 - RNA, 32 nt, Homo Sapiens
ugacucacaggaaggaugcaaaaacuacaaaa

SEQ ID NO: 138074 - RNA, 32 nt, Homo Sapiens
caugcccacuguuuuucuugaagcuucucaaa

SEQ ID NO: 138075 - RNA, 32 nt, Homo Sapiens
ucuguucggcccgaccuccaccccggcuccca

SEQ ID NO: 138076 - RNA, 32 nt, Homo Sapiens
cucuuggaggacaugaaauuauagaaauguug

SEQ ID NO: 138077 - RNA, 32 nt, Homo Sapiens
guugcagaacagacacuuuaaaagcuucugca

SEQ ID NO: 138078 - RNA, 32 nt, Homo Sapiens
aaaauuuucuccaaauacaauagaggagaaua

SEQ ID NO: 138079 - RNA, 32 nt, Homo Sapiens
ggccagagggaaaacugcacaaguacgggugu

SEQ ID NO: 138080 - RNA, 32 nt, Homo Sapiens
gccggggugggguggggcaggaugcuggaugg

SEQ ID NO: 138081 - RNA, 32 nt, Homo Sapiens
gaaggagcgggcccucccgcgcccugugcugg

SEQ ID NO: 138082 - RNA, 30 nt, Homo Sapiens
cuacugaagaagcuuuugaaguuuguggua

SEQ ID NO: 138083 - RNA, 32 nt, Homo Sapiens
agggggcugaggugcugggcaaccagccugcu

SEQ ID NO: 138084 - RNA, 32 nt, Homo Sapiens
aaucgugcugaauuauaauguggcuuacugca

SEQ ID NO: 138085 - RNA, 32 nt, Homo Sapiens
agcgcccugccagcugggacuccagcaaggcc

SEQ ID NO: 138086 - RNA, 32 nt, Homo Sapiens
cgugcauggauuucuuuuuaaaucccauauuu

SEQ ID NO: 138087 - RNA, 32 nt, Homo Sapiens
cugcgagggccgauagcgaggguguggcccuu

SEQ ID NO: 138088 - RNA, 32 nt, Homo Sapiens
cccgagucacaaaguagaaaacaucaaagccu

SEQ ID NO: 138089 - RNA, 32 nt, Homo Sapiens
guuaaacacagacgaggaaacacacguuuuua

SEQ ID NO: 138090 - RNA, 32 nt, Homo Sapiens
cugcucuccuuccccgcccccagccugcuaag

SEQ ID NO: 138091 - RNA, 32 nt, Homo Sapiens
ucucuccgcagaccugccccccggggccccac

SEQ ID NO: 138092 - RNA, 32 nt, Homo Sapiens
gauccucccaggcuuccgugugggucaguggg

SEQ ID NO: 138093 - RNA, 32 nt, Homo Sapiens
gaagccugcaguggacccugcugcugccaagc

SEQ ID NO: 138094 - RNA, 32 nt, Homo Sapiens
aaacaaacaaacaaacaaaaauagaagacaaa

SEQ ID NO: 138095 - RNA, 32 nt, Homo Sapiens
uugcuuuugaagaggguaaagucaaguuucua

SEQ ID NO: 138096 - RNA, 32 nt, Homo Sapiens
ggcucacugcccaugauucagagcuuucaagg

SEQ ID NO: 138097 - RNA, 28 nt, Homo Sapiens
agccuaagagacuaacauuuggauaugu

SEQ ID NO: 138098 - RNA, 32 nt, Homo Sapiens
gaaagaaucuucacuauaaacagagacccauu

SEQ ID NO: 138099 - RNA, 32 nt, Homo Sapiens
cuagaauuuuguauuguuuaaaacaguaaaug

SEQ ID NO: 138100 - RNA, 32 nt, Homo Sapiens
acuguucucugcugggaccacccagggucgga

SEQ ID NO: 138101 - RNA, 32 nt, Homo Sapiens
ggggggugagcggggcccacccugcccagcuc

SEQ ID NO: 138102 - RNA, 32 nt, Homo Sapiens
ugccuggaaucccagcacuuugggagguggag

SEQ ID NO: 138103 - RNA, 32 nt, Homo Sapiens
agugcaguggcucaaucuugggcucacugcag

SEQ ID NO: 138104 - RNA, 32 nt, Homo Sapiens
agccuugccaagauggugacaccccuugguuu

SEQ ID NO: 138105 - RNA, 32 nt, Homo Sapiens
ggcaaguguuuugaaucuuagcaaguguuuug

SEQ ID NO: 138106 - RNA, 32 nt, Homo Sapiens
cgcagucggaaaguuauccgcggcgguucccu

SEQ ID NO: 138107 - RNA, 32 nt, Homo Sapiens
cggagcccgcggggccggcgcucucagcccgu

SEQ ID NO: 138108 - RNA, 32 nt, Homo Sapiens
aaggauuugaagcacuuuuaaaauagaagcau

SEQ ID NO: 138109 - RNA, 32 nt, Homo Sapiens
ccaccgcgccagguuccggccgcggccacccu

SEQ ID NO: 138110 - RNA, 32 nt, Homo Sapiens
uggaucaccgaccucucccaagaggggccugg

SEQ ID NO: 138111 - RNA, 32 nt, Homo Sapiens
uccgggaccugccgccgcugccugcgcgcccc

SEQ ID NO: 138112 - RNA, 32 nt, Homo Sapiens
uaaggcacuuuuuuuucuuuuuugagacggag

SEQ ID NO: 138113 - RNA, 32 nt, Homo Sapiens
aauagguuggcgcauacccacccccgccacgg

SEQ ID NO: 138114 - RNA, 32 nt, Homo Sapiens
auuuacugagagcuuacugugugcuaggcauu

SEQ ID NO: 138115 - RNA, 32 nt, Homo Sapiens
gaguguaaauguuuuuuaggauacuauaaaga

SEQ ID NO: 138116 - RNA, 32 nt, Homo Sapiens
ccuuccccaagccacacauccuccucccaucc

SEQ ID NO: 138117 - RNA, 32 nt, Homo Sapiens
cacacacacacacacacacacacacacaccac

SEQ ID NO: 138118 - RNA, 32 nt, Homo Sapiens
ugggcaaguauuuugugcucuguguauuuuuu

SEQ ID NO: 138119 - RNA, 32 nt, Homo Sapiens
ugccucagagguugccuugggguguggugugu

SEQ ID NO: 138120 - RNA, 32 nt, Homo Sapiens
gcuaaagaaaaaauacgggauauggagacugg

SEQ ID NO: 138121 - RNA, 32 nt, Homo Sapiens
auugguuauauuaccaaugcuuugauucggau

SEQ ID NO: 138122 - RNA, 32 nt, Homo Sapiens
agaucaguaucuuuuuacaguauucuuucuac

SEQ ID NO: 138123 - RNA, 32 nt, Homo Sapiens
uaaauggugaugugacuuuucuucuuacaugc

SEQ ID NO: 138124 - RNA, 32 nt, Homo Sapiens
guuuaaggaaaugugcaggauacuacaugcuu

SEQ ID NO: 138125 - RNA, 30 nt, Homo Sapiens
gauggcaagacaguagaugagucugguuaa

SEQ ID NO: 138126 - RNA, 32 nt, Homo Sapiens
uguacuaaugaaauuccugacuuuaauuucug

SEQ ID NO: 138127 - RNA, 32 nt, Homo Sapiens
guguucagccgggucuucaaaacuguaggggg

SEQ ID NO: 138128 - RNA, 32 nt, Homo Sapiens
guggggcaaccugguuccugcuaacugccaga

SEQ ID NO: 138129 - RNA, 27 nt, Homo Sapiens
uuauggggaagggaggcccagcccacc

SEQ ID NO: 138130 - RNA, 30 nt, Homo Sapiens
gaacagggaggugggagguggauuuuguuu

SEQ ID NO: 138131 - RNA, 32 nt, Homo Sapiens
gcucucgaggucccggcccucgcccccgcgcg

SEQ ID NO: 138132 - RNA, 32 nt, Homo Sapiens
ggagguuccuucccucucaccugcauuuuugc

SEQ ID NO: 138133 - RNA, 32 nt, Homo Sapiens
uauauuuguaaguuaaaucauuggugcuaaua

SEQ ID NO: 138134 - RNA, 32 nt, Homo Sapiens
aacauuccagagaaaaucauguuuauucccug

SEQ ID NO: 138135 - RNA, 32 nt, Homo Sapiens
guuauguguuuuuauggaaagcuaauaaauua

SEQ ID NO: 138136 - RNA, 32 nt, Homo Sapiens
gggcaggcuuucugugugacucgggaguucuu

SEQ ID NO: 138137 - RNA, 32 nt, Homo Sapiens
gacugggcggugccggcgccggagacgaugcc

SEQ ID NO: 138138 - RNA, 32 nt, Homo Sapiens
ccaaaccuuuaaaggggaccucccuuguuagc

SEQ ID NO: 138139 - RNA, 32 nt, Homo Sapiens
gggcaguguugcuguucauagauuuuguucca

SEQ ID NO: 138140 - RNA, 32 nt, Homo Sapiens
gagaagagauaaaguaaagacagucccugggu

SEQ ID NO: 138141 - RNA, 32 nt, Homo Sapiens
cagaaaaacaaauuaggcagaauugcuaugug

SEQ ID NO: 138142 - RNA, 32 nt, Homo Sapiens
cccaagucuccaucgcgcagcguggggccgag

SEQ ID NO: 138143 - RNA, 32 nt, Homo Sapiens
ucuguuuugugaggguuuggggugcagaaaac

SEQ ID NO: 138144 - RNA, 32 nt, Homo Sapiens
agggaagggaggaggaggaggacgccggucug

SEQ ID NO: 138145 - RNA, 32 nt, Homo Sapiens
augaaacaaggugucagagguuuugaaucuuu

SEQ ID NO: 138146 - RNA, 32 nt, Homo Sapiens
gcgaaggaaaccgauggggaucggaaccguag

SEQ ID NO: 138147 - RNA, 32 nt, Homo Sapiens
acaggaagauaaaggcgaaggaaucauuaugg

SEQ ID NO: 138148 - RNA, 32 nt, Homo Sapiens
cacacucaccuccacacccaacucacaggaag

SEQ ID NO: 138149 - RNA, 30 nt, Homo Sapiens
ggcggcggcggcggcggcgcuugacagaca

SEQ ID NO: 138150 - RNA, 32 nt, Homo Sapiens
uggcugucuuagggcuggccucagaacccagc

SEQ ID NO: 138151 - RNA, 29 nt, Homo Sapiens
agaugagaggggcucaguuuuacgcaaca

SEQ ID NO: 138152 - RNA, 32 nt, Homo Sapiens
gccuugaggucuuucaguggaaaggugguuca

SEQ ID NO: 138153 - RNA, 32 nt, Homo Sapiens
acuccuucucaaaacaaacaaacaaacaccau

SEQ ID NO: 138154 - RNA, 32 nt, Homo Sapiens
cacccagccuaaucuuuuuuuuuuuuuuuuuu

SEQ ID NO: 138155 - RNA, 32 nt, Homo Sapiens
uggagaagugaacaaggagucaaauuuauuuu

SEQ ID NO: 138156 - RNA, 32 nt, Homo Sapiens
guccucaaaccucuaacuguggcacucuaguc

SEQ ID NO: 138157 - RNA, 32 nt, Homo Sapiens
accugcuuacaauggaauguaacugcagcuag

SEQ ID NO: 138158 - RNA, 32 nt, Homo Sapiens
ccagacgguguuggccacucccuucuaaaaca

SEQ ID NO: 138159 - RNA, 32 nt, Homo Sapiens
cuguuuuuauuacuaucuaggcuugaaauaua

SEQ ID NO: 138160 - RNA, 32 nt, Homo Sapiens
uagacaguauauaacuaacaaccaaagacuac

SEQ ID NO: 138161 - RNA, 32 nt, Homo Sapiens
acucugaauguuuccccucuacauugucccuc

SEQ ID NO: 138162 - RNA, 32 nt, Homo Sapiens
cccaacuugggguugcaaaaucauuuuuuccc

SEQ ID NO: 138163 - RNA, 32 nt, Homo Sapiens
gccuccagaaaagaaaucagagccaagcacag

SEQ ID NO: 138164 - RNA, 32 nt, Homo Sapiens
ccucccucugccucauccuccuccucauucag

SEQ ID NO: 138165 - RNA, 32 nt, Homo Sapiens
uguuuaacacauggauauaauuuagcuuugug

SEQ ID NO: 138166 - RNA, 32 nt, Homo Sapiens
agacuaucuauuuucuuuuuuaucagauaugu

SEQ ID NO: 138167 - RNA, 32 nt, Homo Sapiens
ucagauacaauguauucauuuaaaagauucau

SEQ ID NO: 138168 - RNA, 32 nt, Homo Sapiens
uccccacuucccaggcuaucagagucaacguc

SEQ ID NO: 138169 - RNA, 30 nt, Homo Sapiens
ccaugggguaucccuguguccuggucuauc

SEQ ID NO: 138170 - RNA, 32 nt, Homo Sapiens
cugaccuucuugaauaaccuggauauugcaga

SEQ ID NO: 138171 - RNA, 32 nt, Homo Sapiens
caaaaaguucuguauuuuuuuauauucuauau

SEQ ID NO: 138172 - RNA, 32 nt, Homo Sapiens
cugaaggacccuaccagaagcuaaaucaucaa

SEQ ID NO: 138173 - RNA, 32 nt, Homo Sapiens
aaccacaucgacgcuucuucucagccuccagu

SEQ ID NO: 138174 - RNA, 32 nt, Homo Sapiens
ugcuugguaccuuaauuuuuuauaccugauuu

SEQ ID NO: 138175 - RNA, 32 nt, Homo Sapiens
auaugggaaccucagcaaugcuaauuuucuag

SEQ ID NO: 138176 - RNA, 32 nt, Homo Sapiens
ccaugggacagggaaacgugguccucagugag

SEQ ID NO: 138177 - RNA, 30 nt, Homo Sapiens
uacagagaugugaugugggaaaccuucagg

SEQ ID NO: 138178 - RNA, 32 nt, Homo Sapiens
ccugucggguggcaggaacugcccaaagcugg

SEQ ID NO: 138179 - RNA, 32 nt, Homo Sapiens
accuugggaauccuccccuucaauacauuuaa

SEQ ID NO: 138180 - RNA, 32 nt, Homo Sapiens
ggcaccuccccgcucucccugucacgcucaug

SEQ ID NO: 138181 - RNA, 32 nt, Homo Sapiens
uuguguuuucuuuuucacacuucagaagagaa

SEQ ID NO: 138182 - RNA, 32 nt, Homo Sapiens
aagcuuaauguugaguuggugacuccagccuc

SEQ ID NO: 138183 - RNA, 32 nt, Homo Sapiens
agaaacgcuauaagugugauguguguaguaag

SEQ ID NO: 138184 - RNA, 32 nt, Homo Sapiens
accgaaagugggcggcggccgcggcggggccc

SEQ ID NO: 138185 - RNA, 32 nt, Homo Sapiens
cuucaggacaagccaccugaugccccucggcc

SEQ ID NO: 138186 - RNA, 32 nt, Homo Sapiens
cgccugcuccgucuuugugggggcucucaggc

SEQ ID NO: 138187 - RNA, 32 nt, Homo Sapiens
caccucagagccauggggagccagggcucugg

SEQ ID NO: 138188 - RNA, 32 nt, Homo Sapiens
aguguccugagcucagcguggagggguagggg

SEQ ID NO: 138189 - RNA, 29 nt, Homo Sapiens
ugaguuucuauccaaauaucccagaagau

SEQ ID NO: 138190 - RNA, 32 nt, Homo Sapiens
cgcuguuguuagucaccgcggagccgccgaaa

SEQ ID NO: 138191 - RNA, 32 nt, Homo Sapiens
gccaaaccuuggcuguuccagaaacugaaccc

SEQ ID NO: 138192 - RNA, 32 nt, Homo Sapiens
ugggaagaacagaauugcuccugcaugcaacu

SEQ ID NO: 138193 - RNA, 32 nt, Homo Sapiens
ucuuccuuuguucuuucaguacuuugaggcga

SEQ ID NO: 138194 - RNA, 32 nt, Homo Sapiens
ugaauaaauaaauuuacuuuuacaugaucgua

SEQ ID NO: 138195 - RNA, 32 nt, Homo Sapiens
cuuuaaauaauauguauagacaacaacaacga

SEQ ID NO: 138196 - RNA, 32 nt, Homo Sapiens
uaugaaucuauuauacuguauuaagagugaaa

SEQ ID NO: 138197 - RNA, 32 nt, Homo Sapiens
uuuguuauuaaacaaauaauuuagauggugaa

SEQ ID NO: 138198 - RNA, 32 nt, Homo Sapiens
agucuacaggcacaacugcugccucacaacag

SEQ ID NO: 138199 - RNA, 32 nt, Homo Sapiens
gggguacuacacucaccaccugggugacggga

SEQ ID NO: 138200 - RNA, 32 nt, Homo Sapiens
aucaguguuuuaauguuuguguguucuucaua

SEQ ID NO: 138201 - RNA, 32 nt, Homo Sapiens
gguuacucagcagcagagagcccugggugacu

SEQ ID NO: 138202 - RNA, 32 nt, Homo Sapiens
ucucucuccuuggcacuuuccacacaugagga

SEQ ID NO: 138203 - RNA, 32 nt, Homo Sapiens
gcucucccuguccuccuccccuuaaccacccc

SEQ ID NO: 138204 - RNA, 32 nt, Homo Sapiens
cagcugcccuccccuacuucucccuugcuccc

SEQ ID NO: 138205 - RNA, 32 nt, Homo Sapiens
aagggcacuggauugcucugcaaccaaagaaa

SEQ ID NO: 138206 - RNA, 32 nt, Homo Sapiens
gugccccagcugaguuccaagugaugcagucu

SEQ ID NO: 138207 - RNA, 32 nt, Homo Sapiens
cgcggcagcucuuccuccagggcguggcggcc

SEQ ID NO: 138208 - RNA, 32 nt, Homo Sapiens
ccucucguagauccagccuuaauguuuuucug

SEQ ID NO: 138209 - RNA, 32 nt, Homo Sapiens
ucuuuacuuaggagguuaauuagccuuuugcc

SEQ ID NO: 138210 - RNA, 32 nt, Homo Sapiens
auucuacuugcucacaugguggucuaagaaau

SEQ ID NO: 138211 - RNA, 32 nt, Homo Sapiens
acuuacuuauauauuuuuauuuagagcaaucc

SEQ ID NO: 138212 - RNA, 32 nt, Homo Sapiens
uaggagggaaaggacucaggaugugcguugca

SEQ ID NO: 138213 - RNA, 32 nt, Homo Sapiens
cuagaggugagcucagaaaccuacuguuaacc

SEQ ID NO: 138214 - RNA, 32 nt, Homo Sapiens
gauuuaauauuuuuauacuuccugcagguucu

SEQ ID NO: 138215 - RNA, 32 nt, Homo Sapiens
ccuccuucuucuucuuuuaacguuucucucug

SEQ ID NO: 138216 - RNA, 31 nt, Homo Sapiens
cacacggugcacacgaggccccgcgcccgcg

SEQ ID NO: 138217 - RNA, 32 nt, Homo Sapiens
ucaugacagugacaccaagggaaguugacuaa

SEQ ID NO: 138218 - RNA, 32 nt, Homo Sapiens
uuaccuguaaauugauuuacaaguacuuaaaa

SEQ ID NO: 138219 - RNA, 32 nt, Homo Sapiens
ggaaauuuggauguaguauuuucaggccccac

SEQ ID NO: 138220 - RNA, 32 nt, Homo Sapiens
cuagaagacuguaaauaagauaccaaaggcac

SEQ ID NO: 138221 - RNA, 32 nt, Homo Sapiens
cacacccuaccuucaucuccuccauguccugg

SEQ ID NO: 138222 - RNA, 32 nt, Homo Sapiens
aaacaucgugggccucuuucuucucaagcucc

SEQ ID NO: 138223 - RNA, 32 nt, Homo Sapiens
gcaacaggagaugggucagcuccugugauggc

SEQ ID NO: 138224 - RNA, 32 nt, Homo Sapiens
gccaguguuuucugcuuaaucauuugcuuugu

SEQ ID NO: 138225 - RNA, 32 nt, Homo Sapiens
caacucaaaaauguauuaaaaauaggauccca

SEQ ID NO: 138226 - RNA, 32 nt, Homo Sapiens
ggagguggcaggagucgaggcgcugucccuaa

SEQ ID NO: 138227 - RNA, 32 nt, Homo Sapiens
uaacuggugugagaugauaucucauugugguu

SEQ ID NO: 138228 - RNA, 32 nt, Homo Sapiens
cagcagccugcgcucuaaugggcccccggaug

SEQ ID NO: 138229 - RNA, 32 nt, Homo Sapiens
auugcaguccuuuuuuuuuuuaaagauauuuu

SEQ ID NO: 138230 - RNA, 32 nt, Homo Sapiens
auuuggaaauuaacacucuccaaacauuccag

SEQ ID NO: 138231 - RNA, 32 nt, Homo Sapiens
cugcuguauucuaacaaauuuacuacacgucu

SEQ ID NO: 138232 - RNA, 32 nt, Homo Sapiens
ugagauuuuucagaucuuuuagcccagucaua

SEQ ID NO: 138233 - RNA, 32 nt, Homo Sapiens
cuccuaaaauugugaaacuaguucuugaugag

SEQ ID NO: 138234 - RNA, 32 nt, Homo Sapiens
cggcguggccgcacgcgcggcccggcuucugu

SEQ ID NO: 138235 - RNA, 32 nt, Homo Sapiens
gcuuugaggagcuucucuucuuggcaucugaa

SEQ ID NO: 138236 - RNA, 32 nt, Homo Sapiens
uccuucuagucacaucagcaguguucugccuu

SEQ ID NO: 138237 - RNA, 32 nt, Homo Sapiens
ugauuuuacaguuugcuaaaucuuauuuucuu

SEQ ID NO: 138238 - RNA, 32 nt, Homo Sapiens
cucacagcaaagugcucacuucccucuucuuc

SEQ ID NO: 138239 - RNA, 32 nt, Homo Sapiens
gauaucauuacuguuaggugagguggauaacu

SEQ ID NO: 138240 - RNA, 32 nt, Homo Sapiens
uucuagaaugguuuuuguugagucucugaaca

SEQ ID NO: 138241 - RNA, 32 nt, Homo Sapiens
cugcccgcccgccgcucccagaccucgcccga

SEQ ID NO: 138242 - RNA, 27 nt, Homo Sapiens
gacucccccuucuucggcauucggccg

SEQ ID NO: 138243 - RNA, 32 nt, Homo Sapiens
uguagagcaguggugucuccaaugaacuuguu

SEQ ID NO: 138244 - RNA, 32 nt, Homo Sapiens
ggcccgagggcgacuugcggggcgcgcaggcc

SEQ ID NO: 138245 - RNA, 32 nt, Homo Sapiens
gaagaaagagaauuauuuuuaacugaacguuu

SEQ ID NO: 138246 - RNA, 32 nt, Homo Sapiens
gcuugggcccggcucuggggcccccaaggccg

SEQ ID NO: 138247 - RNA, 32 nt, Homo Sapiens
ucagcucggcuccucgcacgcugcugggguaa

SEQ ID NO: 138248 - RNA, 32 nt, Homo Sapiens
uuguuuuccuuccuuucuuuccaguccaggag

SEQ ID NO: 138249 - RNA, 29 nt, Homo Sapiens
auauguauauguauauauuuuuaaaaggc

SEQ ID NO: 138250 - RNA, 32 nt, Homo Sapiens
cuuuagaaucuuguauuuucuacaucagaguu

SEQ ID NO: 138251 - RNA, 32 nt, Homo Sapiens
uccagggcacggcgugggagggguagucgaag

SEQ ID NO: 138252 - RNA, 32 nt, Homo Sapiens
ggccgccggcgcccggaccaugucgucuccgg

SEQ ID NO: 138253 - RNA, 32 nt, Homo Sapiens
uuauuuuucuucagcugugucuauucugcugc

SEQ ID NO: 138254 - RNA, 32 nt, Homo Sapiens
gcaguagguaggccaagauaacuauuaaguau

SEQ ID NO: 138255 - RNA, 32 nt, Homo Sapiens
aggacuuuuuuuuuuucuuuuuuucuuuuuuc

SEQ ID NO: 138256 - RNA, 32 nt, Homo Sapiens
aaggccgcgggcccgugacugggcgcgaggcg

SEQ ID NO: 138257 - RNA, 32 nt, Homo Sapiens
gaagccgggcagcgggcgcccgcggguucguc

SEQ ID NO: 138258 - RNA, 31 nt, Homo Sapiens
cucaaggaggccugccugccucuguaggcuc

SEQ ID NO: 138259 - RNA, 32 nt, Homo Sapiens
uuacccugucacuuggucuagacccagagacc

SEQ ID NO: 138260 - RNA, 31 nt, Homo Sapiens
cagcucagcucagcuacuccaagggcaggac

SEQ ID NO: 138261 - RNA, 32 nt, Homo Sapiens
aucacagacauuaagcuaaacuguuucguuuu

SEQ ID NO: 138262 - RNA, 32 nt, Homo Sapiens
agaaauacuguaauaaauaugcaguagugaua

SEQ ID NO: 138263 - RNA, 32 nt, Homo Sapiens
aucuauaauuuaauucaagagaaugcuuuuau

SEQ ID NO: 138264 - RNA, 32 nt, Homo Sapiens
cuuccagguuccaugaaagauacauguaaaau

SEQ ID NO: 138265 - RNA, 32 nt, Homo Sapiens
uaccuaaaaaucaggcauuccuccuauggaag

SEQ ID NO: 138266 - RNA, 32 nt, Homo Sapiens
guauacuuguuuucaguuuucauuucgacaaa

SEQ ID NO: 138267 - RNA, 32 nt, Homo Sapiens
uugguaauucuagcaugguuauaugggaucau

SEQ ID NO: 138268 - RNA, 32 nt, Homo Sapiens
auaaaauagcuguaguuuuaaucuucaauaau

SEQ ID NO: 138269 - RNA, 32 nt, Homo Sapiens
auuuaggucucacaacucacuagacaucaaaa

SEQ ID NO: 138270 - RNA, 32 nt, Homo Sapiens
ccaggaccugaugccaagaaagugaggauuua

SEQ ID NO: 138271 - RNA, 32 nt, Homo Sapiens
cccgguccgaccccggccccuggcgccaugga

SEQ ID NO: 138272 - RNA, 32 nt, Homo Sapiens
cugacuccaucccauaccuuccaggccuaggc

SEQ ID NO: 138273 - RNA, 32 nt, Homo Sapiens
gggcaaagauaccaggccugcugcugagguca

SEQ ID NO: 138274 - RNA, 32 nt, Homo Sapiens
agcgcuguggggagcgcgcccggaccuggcag

SEQ ID NO: 138275 - RNA, 32 nt, Homo Sapiens
uuauggucuugcagaacacaccaagaaacccg

SEQ ID NO: 138276 - RNA, 32 nt, Homo Sapiens
uuuugguguuuaucuuaaaguacagcgaagaa

SEQ ID NO: 138277 - RNA, 32 nt, Homo Sapiens
cuaaauggauaccuuuccauccccucaaacga

SEQ ID NO: 138278 - RNA, 32 nt, Homo Sapiens
uuguuuuccguuccccuuuccccucccuuccc

SEQ ID NO: 138279 - RNA, 32 nt, Homo Sapiens
accacauuuauuucuauauucauuuuguaaaa

SEQ ID NO: 138280 - RNA, 32 nt, Homo Sapiens
uauaaagccuccugggguccccaggcacccag

SEQ ID NO: 138281 - RNA, 32 nt, Homo Sapiens
ucagccagcaaccuuagagagaggaaagacag

SEQ ID NO: 138282 - RNA, 32 nt, Homo Sapiens
cucucuuuuuugcuggacauuauugaguuugu

SEQ ID NO: 138283 - RNA, 32 nt, Homo Sapiens
gggggcggguccggcuuugaaaagccggcggg

SEQ ID NO: 138284 - RNA, 32 nt, Homo Sapiens
gacugccagaugagaggauauuuaaaugagac

SEQ ID NO: 138285 - RNA, 32 nt, Homo Sapiens
ugaacauauuauuugcaaagaaucuuaaacuc

SEQ ID NO: 138286 - RNA, 32 nt, Homo Sapiens
auggagcacggggucacaccccugccccaagg

SEQ ID NO: 138287 - RNA, 32 nt, Homo Sapiens
cacaauuccuuccaauuucugcggcuccaucc

SEQ ID NO: 138288 - RNA, 32 nt, Homo Sapiens
gagagcacaucgagggcggcggcggcccgagc

SEQ ID NO: 138289 - RNA, 32 nt, Homo Sapiens
aauaguuuuuaacuggaagggugugauguguu

SEQ ID NO: 138290 - RNA, 32 nt, Homo Sapiens
uaugcacacagcacucgcucuuagcuccucug

SEQ ID NO: 138291 - RNA, 32 nt, Homo Sapiens
ugcugugcuguuucuuuuucuucuuccugcug

SEQ ID NO: 138292 - RNA, 32 nt, Homo Sapiens
accugggaaagcucuccucccuccugaaaaag

SEQ ID NO: 138293 - RNA, 32 nt, Homo Sapiens
aguggcuggugccuugucccaggggagaggga

SEQ ID NO: 138294 - RNA, 32 nt, Homo Sapiens
uccugccgcaccuucugccccauccccaggcu

SEQ ID NO: 138295 - RNA, 32 nt, Homo Sapiens
ggccgcccuuccucagcccccggcucggacac

SEQ ID NO: 138296 - RNA, 32 nt, Homo Sapiens
gggaggccaaggcggacagaccaccugagguc

SEQ ID NO: 138297 - RNA, 32 nt, Homo Sapiens
ccugcccuugaacaucagacuccaaguucuuu

SEQ ID NO: 138298 - RNA, 32 nt, Homo Sapiens
cgacagggugcuugggcagagcccaucgggua

SEQ ID NO: 138299 - RNA, 32 nt, Homo Sapiens
aggauggcuuccuggaggaaauacagcuagaa

SEQ ID NO: 138300 - RNA, 32 nt, Homo Sapiens
guaggauucgccugguacccagugggacgaga

SEQ ID NO: 138301 - RNA, 32 nt, Homo Sapiens
guaaaaugccagugaauagagaggcucaaggc

SEQ ID NO: 138302 - RNA, 32 nt, Homo Sapiens
gggccugcucacccuccucggggaggggaagc

SEQ ID NO: 138303 - RNA, 32 nt, Homo Sapiens
aagaccagacugaagaacacgguugagucccc

SEQ ID NO: 138304 - RNA, 32 nt, Homo Sapiens
augaagaaauuuuguuucuaaacaugcacauu

SEQ ID NO: 138305 - RNA, 32 nt, Homo Sapiens
cugcccuucccucuuucucaccaccgccuucc

SEQ ID NO: 138306 - RNA, 32 nt, Homo Sapiens
ggaacugaaucccuccucccuccacuccuugg

SEQ ID NO: 138307 - RNA, 26 nt, Homo Sapiens
cauggagccgcccggacgccggcggg

SEQ ID NO: 138308 - RNA, 32 nt, Homo Sapiens
cucccugaggacugagggugaacuucgcucuu

SEQ ID NO: 138309 - RNA, 32 nt, Homo Sapiens
aagcuaaaucagaagaaaaugccaaggaagaa

SEQ ID NO: 138310 - RNA, 32 nt, Homo Sapiens
accagauuuuuuauuacaucauuugaaaauua

SEQ ID NO: 138311 - RNA, 32 nt, Homo Sapiens
ugucuaaaacaaaaacaaaaccagccaaccua

SEQ ID NO: 138312 - RNA, 32 nt, Homo Sapiens
gggcggcggucggcagcaaggcggcggugcgc

SEQ ID NO: 138313 - RNA, 32 nt, Homo Sapiens
ggcaaggugcagcgucacccccugcuuuaaua

SEQ ID NO: 138314 - RNA, 32 nt, Homo Sapiens
guggcuguaaaaaucagaucuagaguuuagag

SEQ ID NO: 138315 - RNA, 32 nt, Homo Sapiens
gcuuuuaugugauuuaucuguauacuuuguuc

SEQ ID NO: 138316 - RNA, 32 nt, Homo Sapiens
uggccagauuguggccucuggcugccucaggc

SEQ ID NO: 138317 - RNA, 32 nt, Homo Sapiens
uaauagcccuuaaccuucaaguccaagcaguu

SEQ ID NO: 138318 - RNA, 29 nt, Homo Sapiens
caguuauuggaugagugaaagauaaucau

SEQ ID NO: 138319 - RNA, 32 nt, Homo Sapiens
auuaaguguacuuuuuuccccuuuaauccaau

SEQ ID NO: 138320 - RNA, 32 nt, Homo Sapiens
ccucagcgccccagcgauccggugcccauuag

SEQ ID NO: 138321 - RNA, 32 nt, Homo Sapiens
aagacuaggagaaagaucuuuuuuaaauaauc

SEQ ID NO: 138322 - RNA, 32 nt, Homo Sapiens
gugcucugggguccuugacacacauaaaggug

SEQ ID NO: 138323 - RNA, 32 nt, Homo Sapiens
agccgugggacuggcacaggcuccucggcagc

SEQ ID NO: 138324 - RNA, 32 nt, Homo Sapiens
ccacagcucgguucaggcaucaucacucccug

SEQ ID NO: 138325 - RNA, 32 nt, Homo Sapiens
ugaagaugacugccucaccuugcacugucugg

SEQ ID NO: 138326 - RNA, 32 nt, Homo Sapiens
aaggcagaagggugugggagggggacaagguc

SEQ ID NO: 138327 - RNA, 32 nt, Homo Sapiens
gagccaccgcgcccggccggcuuggaauuuuu

SEQ ID NO: 138328 - RNA, 32 nt, Homo Sapiens
aaaaccccacugacuuggacccuuucuagucu

SEQ ID NO: 138329 - RNA, 32 nt, Homo Sapiens
gcuguguggaccgugggcgcccuggagcgagg

SEQ ID NO: 138330 - RNA, 32 nt, Homo Sapiens
uuaaagagauugcuuuauaacacuaagacauc

SEQ ID NO: 138331 - RNA, 32 nt, Homo Sapiens
ugugucucaucucuaucagccaucgccuuuca

SEQ ID NO: 138332 - RNA, 32 nt, Homo Sapiens
gacucccagcuauauuucuccagacuugcauu

SEQ ID NO: 138333 - RNA, 32 nt, Homo Sapiens
uaaauaaagcgugagacgucuuuacaguggaa

SEQ ID NO: 138334 - RNA, 32 nt, Homo Sapiens
gccuacgcuccgggaaggggcccccagcugug

SEQ ID NO: 138335 - RNA, 32 nt, Homo Sapiens
cagccccagggccaggguccccuuggugaagc

SEQ ID NO: 138336 - RNA, 32 nt, Homo Sapiens
cucagccccaccuccuccuccuccuuauaaaa

SEQ ID NO: 138337 - RNA, 32 nt, Homo Sapiens
uaugcuuuguacacgacacuucaauaaagcua

SEQ ID NO: 138338 - RNA, 32 nt, Homo Sapiens
cggggacggagcgagccggcgccagggccccu

SEQ ID NO: 138339 - RNA, 32 nt, Homo Sapiens
agagcaacaucauagagugugaauuucuauuu

SEQ ID NO: 138340 - RNA, 32 nt, Homo Sapiens
aaacuucaggacuuugagauguugaaauuaca

SEQ ID NO: 138341 - RNA, 32 nt, Homo Sapiens
gaaaauauuuuaggacauuaugucuaaaaauu

SEQ ID NO: 138342 - RNA, 32 nt, Homo Sapiens
agacugccacacgcgugcacauguggcucugu

SEQ ID NO: 138343 - RNA, 32 nt, Homo Sapiens
uuggaugucaagcagcacaggacuaucaaccu

SEQ ID NO: 138344 - RNA, 29 nt, Homo Sapiens
cuuugcauauguaugguacugaaaaaucu

SEQ ID NO: 138345 - RNA, 32 nt, Homo Sapiens
cuguucuccagagcgccagccagccacgggcc

SEQ ID NO: 138346 - RNA, 32 nt, Homo Sapiens
acucaauaaaaugugcaugaacuuacagaauu

SEQ ID NO: 138347 - RNA, 32 nt, Homo Sapiens
aguuggcuauuuuuuuuuuuuaauugcaagca

SEQ ID NO: 138348 - RNA, 32 nt, Homo Sapiens
aaugaugucgugauucucccuccaccugacag

SEQ ID NO: 138349 - RNA, 32 nt, Homo Sapiens
agugaaaagugucaagauaacaaaaaaggcac

SEQ ID NO: 138350 - RNA, 32 nt, Homo Sapiens
cugaguuuagcagaaaacgaugucuaaaugua

SEQ ID NO: 138351 - RNA, 32 nt, Homo Sapiens
caauuauauaaugaagaaaugaaaaugaaagu

SEQ ID NO: 138352 - RNA, 32 nt, Homo Sapiens
ccucuaauaagccccacccuccccgccugggc

SEQ ID NO: 138353 - RNA, 25 nt, Homo Sapiens
caauaaacacugggauuuaagacac

SEQ ID NO: 138354 - RNA, 32 nt, Homo Sapiens
agagggauaaaaccugaaugccauauuuuaag

SEQ ID NO: 138355 - RNA, 32 nt, Homo Sapiens
ucuauguaagauuaaccuacucuggacauuuc

SEQ ID NO: 138356 - RNA, 32 nt, Homo Sapiens
aggacagagucuuuccuccaauugacuggaac

SEQ ID NO: 138357 - RNA, 32 nt, Homo Sapiens
augauacaaaauuuaaaguuuauagagccagu

SEQ ID NO: 138358 - RNA, 32 nt, Homo Sapiens
accaagugucugcaaguaacaccuggagguga

SEQ ID NO: 138359 - RNA, 32 nt, Homo Sapiens
uaagaaauguuaacuuauuuuaaaagauguau

SEQ ID NO: 138360 - RNA, 32 nt, Homo Sapiens
ggccauaucucacucugucacucaggcuggag

SEQ ID NO: 138361 - RNA, 32 nt, Homo Sapiens
uguuaacacaggcagccaacaucacucaggau

SEQ ID NO: 138362 - RNA, 32 nt, Homo Sapiens
uccaggcaacgaccgaacacagacgcgggcua

SEQ ID NO: 138363 - RNA, 32 nt, Homo Sapiens
cuuaucagaaaguugaauuguuuucugccuac

SEQ ID NO: 138364 - RNA, 32 nt, Homo Sapiens
gauacuuuugaagaagcaaaugucuagagccu

SEQ ID NO: 138365 - RNA, 32 nt, Homo Sapiens
uuuccuguaaaaauagcacuauaguaucacuu

SEQ ID NO: 138366 - RNA, 32 nt, Homo Sapiens
gcggcccggccgcgccugguccugagcgguac

SEQ ID NO: 138367 - RNA, 32 nt, Homo Sapiens
cuaagcccaaugcccaguuugauuccacugcu

SEQ ID NO: 138368 - RNA, 32 nt, Homo Sapiens
cuccggacacucaccuucaggaccuuaauaaa

SEQ ID NO: 138369 - RNA, 32 nt, Homo Sapiens
uuuuacuaauaaaaauaaaucugccuguaaau

SEQ ID NO: 138370 - RNA, 32 nt, Homo Sapiens
uucuugagaguucccccucuuucugggucaag

SEQ ID NO: 138371 - RNA, 32 nt, Homo Sapiens
ugcacuuguuuuucuuuuuacaguuacuuccu

SEQ ID NO: 138372 - RNA, 32 nt, Homo Sapiens
cuaccgcuaucggcggugcggcccuggggaac

SEQ ID NO: 138373 - RNA, 32 nt, Homo Sapiens
uuacacaguugugaagauccacagcaaugaca

SEQ ID NO: 138374 - RNA, 32 nt, Homo Sapiens
accagggaccuacgaggcggccggcacgcaug

SEQ ID NO: 138375 - RNA, 32 nt, Homo Sapiens
cucggagguacugggcgcgcgcggcuccggcu

SEQ ID NO: 138376 - RNA, 32 nt, Homo Sapiens
cagauuaauuuuaaaggcaacucuugacuguu

SEQ ID NO: 138377 - RNA, 32 nt, Homo Sapiens
cuaacaaaaaauacagcugcaacauuuugauu

SEQ ID NO: 138378 - RNA, 32 nt, Homo Sapiens
ucagagagagcuuaauaaaaaucuguaaaaug

SEQ ID NO: 138379 - RNA, 32 nt, Homo Sapiens
cuaaauacuguaacacuguauaacauuuaaaa

SEQ ID NO: 138380 - RNA, 32 nt, Homo Sapiens
gacaggaugggaaagaaaaagcccuaauuaag

SEQ ID NO: 138381 - RNA, 32 nt, Homo Sapiens
cggagcuuguggaggaagauggcugccgccug

SEQ ID NO: 138382 - RNA, 32 nt, Homo Sapiens
ccagcggagggccuguucccuugccuuuucca

SEQ ID NO: 138383 - RNA, 32 nt, Homo Sapiens
gagguuaggaggagagaggacgaaguacagaa

SEQ ID NO: 138384 - RNA, 32 nt, Homo Sapiens
uugucugugcuaauauaaauacugaguaccag

SEQ ID NO: 138385 - RNA, 32 nt, Homo Sapiens
ccgccugcgggcccggauccuccuugccacug

SEQ ID NO: 138386 - RNA, 32 nt, Homo Sapiens
uccuuguucugucuuucaaaccagcuaaauau

SEQ ID NO: 138387 - RNA, 32 nt, Homo Sapiens
ucuccuucuugccugcccugucuccugggauc

SEQ ID NO: 138388 - RNA, 32 nt, Homo Sapiens
ucacugguuuaucugcagaaauuucucugggc

SEQ ID NO: 138389 - RNA, 32 nt, Homo Sapiens
ccaagaggugaccccugagccagccccggaug

SEQ ID NO: 138390 - RNA, 30 nt, Homo Sapiens
aggccaggcaggcagccggggccugacauu

SEQ ID NO: 138391 - RNA, 32 nt, Homo Sapiens
gguggggggaggagggagugcgucuguucacu

SEQ ID NO: 138392 - RNA, 32 nt, Homo Sapiens
acuggguugaacuugcuaaaguaaaucauacu

SEQ ID NO: 138393 - RNA, 32 nt, Homo Sapiens
caaucucacagcagucaucuccuaugcgggcu

SEQ ID NO: 138394 - RNA, 32 nt, Homo Sapiens
uugggaggggagaggacgcgggcgaggaagac

SEQ ID NO: 138395 - RNA, 32 nt, Homo Sapiens
ugguuguugggucuuccucagcucccuucugc

SEQ ID NO: 138396 - RNA, 32 nt, Homo Sapiens
ggaggacguuccccgcggccggagccauggag

SEQ ID NO: 138397 - RNA, 32 nt, Homo Sapiens
cuuuaugaaaauaauagugucuucuauggcau

SEQ ID NO: 138398 - RNA, 32 nt, Homo Sapiens
auuuauuauuaaagauaguagcacuagucuua

SEQ ID NO: 138399 - RNA, 32 nt, Homo Sapiens
aaggagauccagaacuuuuuaccagauuuuca

SEQ ID NO: 138400 - RNA, 32 nt, Homo Sapiens
ggcucuccugcccccacccccaggcaccagca

SEQ ID NO: 138401 - RNA, 32 nt, Homo Sapiens
agcccauguuagacagaagaagucagagaagu

SEQ ID NO: 138402 - RNA, 30 nt, Homo Sapiens
ggguaggggcuagggccgggucccggggug

SEQ ID NO: 138403 - RNA, 32 nt, Homo Sapiens
acagaaucaggagagugggcaaagugcuggga

SEQ ID NO: 138404 - RNA, 32 nt, Homo Sapiens
cagaaagagauuaccagccacagacgggucau

SEQ ID NO: 138405 - RNA, 32 nt, Homo Sapiens
cacauaaaaaauaccgaagaaaacccaaaauu

SEQ ID NO: 138406 - RNA, 32 nt, Homo Sapiens
caccgauacagccaaagaccagcaaagcgaca

SEQ ID NO: 138407 - RNA, 32 nt, Homo Sapiens
auuguacuuaagugcugaugacuguuagccag

SEQ ID NO: 138408 - RNA, 32 nt, Homo Sapiens
uuuuuuuuuuguauuucuuuuauauauaaaau

SEQ ID NO: 138409 - RNA, 32 nt, Homo Sapiens
cccguaaugcuuucuuuuuuccuuuauugcca

SEQ ID NO: 138410 - RNA, 32 nt, Homo Sapiens
uccaaggaaaauugaaaguauucagaaauuaa

SEQ ID NO: 138411 - RNA, 32 nt, Homo Sapiens
ccagcgugcgcccuuucucuugcugcucuguu

SEQ ID NO: 138412 - RNA, 32 nt, Homo Sapiens
ccugcuguuguaauguaaaagcugccacagac

SEQ ID NO: 138413 - RNA, 32 nt, Homo Sapiens
ugcccagauaaaauuuucaugagaguaguuua

SEQ ID NO: 138414 - RNA, 32 nt, Homo Sapiens
cguuugcuuaaauugaauuuagcaaucgcauu

SEQ ID NO: 138415 - RNA, 32 nt, Homo Sapiens
ugccacguggaccgcgcgcggggcgcucccug

SEQ ID NO: 138416 - RNA, 32 nt, Homo Sapiens
cacacacacacgugcacacacacacacauuua

SEQ ID NO: 138417 - RNA, 32 nt, Homo Sapiens
uccgccugcgcgcgccgcuuccguugccauag

SEQ ID NO: 138418 - RNA, 32 nt, Homo Sapiens
ggguugaggguggacugugcgaggccuggcgg

SEQ ID NO: 138419 - RNA, 32 nt, Homo Sapiens
ucuguauaaguuuuguaauauuuaacauaagg

SEQ ID NO: 138420 - RNA, 32 nt, Homo Sapiens
uaaagcaccacucuugauuuucugggauuggu

SEQ ID NO: 138421 - RNA, 32 nt, Homo Sapiens
cuuuuucuuuugcacaucuuccugaguugaau

SEQ ID NO: 138422 - RNA, 32 nt, Homo Sapiens
uuuuguuauuuuugcuuguuucugauuaauga

SEQ ID NO: 138423 - RNA, 32 nt, Homo Sapiens
ucaguuggaaacaguagcacuuugaaaacuuu

SEQ ID NO: 138424 - RNA, 32 nt, Homo Sapiens
gggggucaaggaacugagagaagaggcuuaag

SEQ ID NO: 138425 - RNA, 32 nt, Homo Sapiens
gcgcgcgccgccgccccgcgcugcugaagcug

SEQ ID NO: 138426 - RNA, 32 nt, Homo Sapiens
uugaggggcaccugguccucgguuggggcugc

SEQ ID NO: 138427 - RNA, 32 nt, Homo Sapiens
augccaggagcuggcucuguguuuaagaaaag

SEQ ID NO: 138428 - RNA, 32 nt, Homo Sapiens
cccuggggacaagagggaggagcccaggggcu

SEQ ID NO: 138429 - RNA, 32 nt, Homo Sapiens
aagaucaagaaacgugugaaaacucccuauuc

SEQ ID NO: 138430 - RNA, 32 nt, Homo Sapiens
uagaauggugcauacacaauguauuauuauca

SEQ ID NO: 138431 - RNA, 32 nt, Homo Sapiens
uugaacagcucuuccauugcaggucagauucu

SEQ ID NO: 138432 - RNA, 32 nt, Homo Sapiens
ucccgaguccgcugcucgccggcggccgcccg

SEQ ID NO: 138433 - RNA, 32 nt, Homo Sapiens
ggaguuccacugacagggcagcugcucuugga

SEQ ID NO: 138434 - RNA, 32 nt, Homo Sapiens
cacuccccaucccucccauucccccaucgccc

SEQ ID NO: 138435 - RNA, 32 nt, Homo Sapiens
uggaaaccaagccccacacucccgggaagccu

SEQ ID NO: 138436 - RNA, 32 nt, Homo Sapiens
uaaaaugcauauaauucauagauacaauacuu

SEQ ID NO: 138437 - RNA, 30 nt, Homo Sapiens
ggcgggcaucggcggcaccaguggcuggag

SEQ ID NO: 138438 - RNA, 32 nt, Homo Sapiens
cagauuuguuuaucuuuguacagaagcuuuga

SEQ ID NO: 138439 - RNA, 32 nt, Homo Sapiens
acuucgugagguuugugcaggggggcgccuug

SEQ ID NO: 138440 - RNA, 32 nt, Homo Sapiens
auccuaccccuuuagugaccgcccccaucccg

SEQ ID NO: 138441 - RNA, 32 nt, Homo Sapiens
agcuccuuauccaacccugaaguucccuaucu

SEQ ID NO: 138442 - RNA, 32 nt, Homo Sapiens
ucuaacuugaguuuuccaaagaccuuuugagc

SEQ ID NO: 138443 - RNA, 32 nt, Homo Sapiens
acagaaaguaaaagaaaaugagccaggugugg

SEQ ID NO: 138444 - RNA, 32 nt, Homo Sapiens
gaugccacagcaugaaccagaugccguugaac

SEQ ID NO: 138445 - RNA, 32 nt, Homo Sapiens
ucccaugcuguaaauagucuuuuugaugacug

SEQ ID NO: 138446 - RNA, 32 nt, Homo Sapiens
uggauaagccccaagcgaauuugucuucagau

SEQ ID NO: 138447 - RNA, 32 nt, Homo Sapiens
auaauuuguuuuacugaauuguauggagauug

SEQ ID NO: 138448 - RNA, 32 nt, Homo Sapiens
cucgcuuaguauauugaaaacacacaccacac

SEQ ID NO: 138449 - RNA, 32 nt, Homo Sapiens
cuccccaaacucccagccaaggcgcgcggugg

SEQ ID NO: 138450 - RNA, 32 nt, Homo Sapiens
uuugcauucagauacuuggucauuuacuuacc

SEQ ID NO: 138451 - RNA, 30 nt, Homo Sapiens
cucuggccauuccccacccaucuccuccca

SEQ ID NO: 138452 - RNA, 32 nt, Homo Sapiens
aggugggaaguaaaacaucacuuuuuacauua

SEQ ID NO: 138453 - RNA, 32 nt, Homo Sapiens
gagucuucguguguuaauacuaccuccuugua

SEQ ID NO: 138454 - RNA, 32 nt, Homo Sapiens
aagucuuauacuucuuuuauuaaauuuauucu

SEQ ID NO: 138455 - RNA, 32 nt, Homo Sapiens
ccaccgcccccuccucgcuccacgucagaggg

SEQ ID NO: 138456 - RNA, 32 nt, Homo Sapiens
gggaggguggaggugugggagcugaugggaga

SEQ ID NO: 138457 - RNA, 32 nt, Homo Sapiens
aacugagagaagaguguguguuugugugugca

SEQ ID NO: 138458 - RNA, 30 nt, Homo Sapiens
cagcccucuggugggcgggaaaccaguguc

SEQ ID NO: 138459 - RNA, 32 nt, Homo Sapiens
ggcgacugcccggcugcaugcacuccgauuac

SEQ ID NO: 138460 - RNA, 32 nt, Homo Sapiens
uuuugaucaauuuuuguugauuucaagguaca

SEQ ID NO: 138461 - RNA, 32 nt, Homo Sapiens
gcccggagggaagagcgcggugggggcgcccc

SEQ ID NO: 138462 - RNA, 32 nt, Homo Sapiens
aguuggauucagaaccaagaccuaacuccugc

SEQ ID NO: 138463 - RNA, 32 nt, Homo Sapiens
guuucagcuccggguacacuuccuccuuccuu

SEQ ID NO: 138464 - RNA, 32 nt, Homo Sapiens
cgcucggccccucuccgccuccaugugccgga

SEQ ID NO: 138465 - RNA, 31 nt, Homo Sapiens
ggccagggaucugacuccugaguugguugcc

SEQ ID NO: 138466 - RNA, 32 nt, Homo Sapiens
acaaagggccgcgggcggcgggcagugguguc

SEQ ID NO: 138467 - RNA, 32 nt, Homo Sapiens
cgccugccgccuuuuugugcgcgugugagugu

SEQ ID NO: 138468 - RNA, 32 nt, Homo Sapiens
ggagggaagauaaagugaauugcccagagcug

SEQ ID NO: 138469 - RNA, 32 nt, Homo Sapiens
ucccccuggcagagccgcagggcuccaucccc

SEQ ID NO: 138470 - RNA, 32 nt, Homo Sapiens
gaaaaucaggugggugggaaucucuuggagaa

SEQ ID NO: 138471 - RNA, 32 nt, Homo Sapiens
ugcuuccucugccccucccccagccacgcagc

SEQ ID NO: 138472 - RNA, 32 nt, Homo Sapiens
gaggcgcgagaauggagguggaggccgucugu

SEQ ID NO: 138473 - RNA, 32 nt, Homo Sapiens
uaaaauuuaccauuuuagccauuuuaaagucu

SEQ ID NO: 138474 - RNA, 32 nt, Homo Sapiens
aggcggggagaggaggcggcgagggucccggg

SEQ ID NO: 138475 - RNA, 32 nt, Homo Sapiens
cuggccagcuccugggggaggggccuggucac

SEQ ID NO: 138476 - RNA, 32 nt, Homo Sapiens
aggaaaaggagggaaccccggauuggauauga

SEQ ID NO: 138477 - RNA, 32 nt, Homo Sapiens
gauuugcuuuauggauguaauuuuacaaaaca

SEQ ID NO: 138478 - RNA, 29 nt, Homo Sapiens
cuggcucugggccagaggacccuuucuga

SEQ ID NO: 138479 - RNA, 32 nt, Homo Sapiens
guaaagugugaaucgcccuucccuuuuguaca

SEQ ID NO: 138480 - RNA, 32 nt, Homo Sapiens
uuugcaagccagaugauuaaccagagggcacg

SEQ ID NO: 138481 - RNA, 32 nt, Homo Sapiens
aaagggggcuugaaccuguugaauugcaugcu

SEQ ID NO: 138482 - RNA, 32 nt, Homo Sapiens
cgccgccgccgcuguugccgcggcuuguuauu

SEQ ID NO: 138483 - RNA, 32 nt, Homo Sapiens
cuucggagaguggccaggggcccccaaacccg

SEQ ID NO: 138484 - RNA, 32 nt, Homo Sapiens
aguaaaauaaaauggaccagaaaagaaaagaa

SEQ ID NO: 138485 - RNA, 32 nt, Homo Sapiens
ggcggcagcuggggcgggaaggcgggcgcugg

SEQ ID NO: 138486 - RNA, 32 nt, Homo Sapiens
gacccuuggggauggguugaugcgaggguccc

SEQ ID NO: 138487 - RNA, 32 nt, Homo Sapiens
gacugacacucuggcaaccaguccgcaccugu

SEQ ID NO: 138488 - RNA, 32 nt, Homo Sapiens
cgcgcggucgcacacauccaccggcgcggcuu

SEQ ID NO: 138489 - RNA, 32 nt, Homo Sapiens
uacgcuggcagcaaagagugguuaaaagucca

SEQ ID NO: 138490 - RNA, 32 nt, Homo Sapiens
cuggaugccagguauuggggucacaaagacaa

SEQ ID NO: 138491 - RNA, 32 nt, Homo Sapiens
ugcacuucugguuuugaaaugacucugucugu

SEQ ID NO: 138492 - RNA, 32 nt, Homo Sapiens
accccgcgcggggcgccggcuccauggcgacc

SEQ ID NO: 138493 - RNA, 32 nt, Homo Sapiens
aaauuuagagguguuuuggggguggggcgagg

SEQ ID NO: 138494 - RNA, 32 nt, Homo Sapiens
auacaggacauccaggcaucuaaaagguagcu

SEQ ID NO: 138495 - RNA, 32 nt, Homo Sapiens
caggccgcugcagcugcacagccucugcuaca

SEQ ID NO: 138496 - RNA, 32 nt, Homo Sapiens
ucggcacgcgccgccuucuccagcugcgacgc

SEQ ID NO: 138497 - RNA, 32 nt, Homo Sapiens
acccaagaauaaaagaauaaccacaaagugug

SEQ ID NO: 138498 - RNA, 32 nt, Homo Sapiens
ugcugaaggcacgggagcugcccccaguggac

SEQ ID NO: 138499 - RNA, 32 nt, Homo Sapiens
uaauugugacaauauaaaauggcauuguuaua

SEQ ID NO: 138500 - RNA, 32 nt, Homo Sapiens
gcugguuuuuaaaaaauguuuucuggggaaag

SEQ ID NO: 138501 - RNA, 32 nt, Homo Sapiens
ucgcggggggcgguggcgcccggcacagaggg

SEQ ID NO: 138502 - RNA, 32 nt, Homo Sapiens
aaagaacuucaggaaaaacauaaacaagaauu

SEQ ID NO: 138503 - RNA, 28 nt, Homo Sapiens
gggggugggaagaccccgagguggaaaa

SEQ ID NO: 138504 - RNA, 32 nt, Homo Sapiens
augaggucaggagauugagaccauccuggaua

SEQ ID NO: 138505 - RNA, 32 nt, Homo Sapiens
gugguuggcugcaacagcagcgacucagaggg

SEQ ID NO: 138506 - RNA, 32 nt, Homo Sapiens
ucagaauugugcuuuuucuccccuccucuauu

SEQ ID NO: 138507 - RNA, 32 nt, Homo Sapiens
acaaacuugaguugucugaaagcuugcucuac

SEQ ID NO: 138508 - RNA, 32 nt, Homo Sapiens
ugaguccgucacggcuccggcgcgagcgcgag

SEQ ID NO: 138509 - RNA, 32 nt, Homo Sapiens
gacuuacuggcuguagcaaugcuggccuguua

SEQ ID NO: 138510 - RNA, 32 nt, Homo Sapiens
cauuuccauucauuuccauacuggcuuuugau

SEQ ID NO: 138511 - RNA, 32 nt, Homo Sapiens
gguggccacagugugcagguuauaaaagcauu

SEQ ID NO: 138512 - RNA, 32 nt, Homo Sapiens
uacuaacuuguuucuuuuucguuucguccuug

SEQ ID NO: 138513 - RNA, 32 nt, Homo Sapiens
gggucagcgucacaugcuaaugacaggauguu

SEQ ID NO: 138514 - RNA, 32 nt, Homo Sapiens
cugggcccuggaccagcaccacuuccgagguc

SEQ ID NO: 138515 - RNA, 32 nt, Homo Sapiens
aagcgauuuuucugccucagccucugguguag

SEQ ID NO: 138516 - RNA, 32 nt, Homo Sapiens
gaaaguggagggcauuuuccagggcacugcuu

SEQ ID NO: 138517 - RNA, 32 nt, Homo Sapiens
ccaggcuugcgcgugguuccccucccgguggg

SEQ ID NO: 138518 - RNA, 32 nt, Homo Sapiens
cuucuuguaaugauaguuauuuauugacucug

SEQ ID NO: 138519 - RNA, 32 nt, Homo Sapiens
aaagggcuaggaauuucuuuuucagggagcuc

SEQ ID NO: 138520 - RNA, 32 nt, Homo Sapiens
aucuuggggaccagcuaagucucugcaguagu

SEQ ID NO: 138521 - RNA, 32 nt, Homo Sapiens
caugcaaauaucuauuucuaaaccacaaugau

SEQ ID NO: 138522 - RNA, 31 nt, Homo Sapiens
gagcggcggcgcugccugcagccugcagccu

SEQ ID NO: 138523 - RNA, 32 nt, Homo Sapiens
cagcccaggucccuggccccagggauggcugg

SEQ ID NO: 138524 - RNA, 32 nt, Homo Sapiens
auugauaaugaaaauaauagcagcacaccaga

SEQ ID NO: 138525 - RNA, 32 nt, Homo Sapiens
gaggacauguggaagcacuuuaaguuuuuuca

SEQ ID NO: 138526 - RNA, 31 nt, Homo Sapiens
auaaaauugguaggaauguuuucuugccauu

SEQ ID NO: 138527 - RNA, 32 nt, Homo Sapiens
agaacaacaacaaauacauggucugcugacuc

SEQ ID NO: 138528 - RNA, 32 nt, Homo Sapiens
caccuauacgcccagauggccugaaguaacug

SEQ ID NO: 138529 - RNA, 32 nt, Homo Sapiens
uuggggagaaaguaacuacuuuggcucuaccc

SEQ ID NO: 138530 - RNA, 32 nt, Homo Sapiens
ugguauuuauccauguacccccgggucuagaa

SEQ ID NO: 138531 - RNA, 32 nt, Homo Sapiens
agaacauguucuuuuccaacuugaagaaggga

SEQ ID NO: 138532 - RNA, 32 nt, Homo Sapiens
ccaccuugcucauaaacaaaaugcccauguug

SEQ ID NO: 138533 - RNA, 32 nt, Homo Sapiens
cugcccgcaccuccaacgcgaagcccuuccac

SEQ ID NO: 138534 - RNA, 32 nt, Homo Sapiens
cucaggucccgaguaacuuauguucaaugugc

SEQ ID NO: 138535 - RNA, 32 nt, Homo Sapiens
acacucuuggauaauaaauguauuaugugcau

SEQ ID NO: 138536 - RNA, 32 nt, Homo Sapiens
ccggcgagcccgguccccgccggcaccaugcu

SEQ ID NO: 138537 - RNA, 32 nt, Homo Sapiens
aagcagguagcuucuuuuuucucaaauguaau

SEQ ID NO: 138538 - RNA, 32 nt, Homo Sapiens
gaggcugaaaagaaagcagaggagaacccagg

SEQ ID NO: 138539 - RNA, 32 nt, Homo Sapiens
ucauucuaucaugauuuuauggugcucuaauu

SEQ ID NO: 138540 - RNA, 32 nt, Homo Sapiens
ugccugcaccaugacugucguacuggauguaa

SEQ ID NO: 138541 - RNA, 32 nt, Homo Sapiens
gauauuggggcuugccuuucugagugaggcgg

SEQ ID NO: 138542 - RNA, 32 nt, Homo Sapiens
cuuaucuguuccccaacuucuccaccugcugg

SEQ ID NO: 138543 - RNA, 32 nt, Homo Sapiens
uugccuuccagaagccagccuaucucuagccc

SEQ ID NO: 138544 - RNA, 32 nt, Homo Sapiens
cagcucacugcaaccuccgucuccaggguuca

SEQ ID NO: 138545 - RNA, 31 nt, Homo Sapiens
cugcccaggggccagaaccgaggaggccagg

SEQ ID NO: 138546 - RNA, 32 nt, Homo Sapiens
cgagcgucgagcucagcgcggcggaggcggcg

SEQ ID NO: 138547 - RNA, 32 nt, Homo Sapiens
agugacugcauuuagggagguuuaacgaguuc

SEQ ID NO: 138548 - RNA, 32 nt, Homo Sapiens
aggcucgccuccauguuacucccuuucucuuc

SEQ ID NO: 138549 - RNA, 32 nt, Homo Sapiens
aauuugagguguuuuguuuucauuuuuauuuc

SEQ ID NO: 138550 - RNA, 32 nt, Homo Sapiens
gacuugcccggggcuccagguagccugcaggu

SEQ ID NO: 138551 - RNA, 32 nt, Homo Sapiens
ggguggggccccuacagacuccguauuuuauu

SEQ ID NO: 138552 - RNA, 32 nt, Homo Sapiens
gcuguuacauaaauagagaugcagccaaaauu

SEQ ID NO: 138553 - RNA, 32 nt, Homo Sapiens
auggccccacccucuggcuggugcugggccgg

SEQ ID NO: 138554 - RNA, 32 nt, Homo Sapiens
agugcauucuaaauauuucuaugugaggaaug

SEQ ID NO: 138555 - RNA, 32 nt, Homo Sapiens
auguacaggcaacagagcuacgcacuccuuuc

SEQ ID NO: 138556 - RNA, 32 nt, Homo Sapiens
agggaaugugcuauuucuuuauucaguauaau

SEQ ID NO: 138557 - RNA, 32 nt, Homo Sapiens
aacaugucaacacauaauuagcguauuucugu

SEQ ID NO: 138558 - RNA, 32 nt, Homo Sapiens
gccugccaccaaucaguaaguuagucuauaac

SEQ ID NO: 138559 - RNA, 32 nt, Homo Sapiens
uaaaguugauucauaucaacauuagaacucca

SEQ ID NO: 138560 - RNA, 32 nt, Homo Sapiens
uagcuuuuccuuucuuuuuuuuuuuuuuuuuu

SEQ ID NO: 138561 - RNA, 32 nt, Homo Sapiens
gacggugaggcccugcugaggacuccggccag

SEQ ID NO: 138562 - RNA, 30 nt, Homo Sapiens
cuaccacucgugccgccgccggcgcugggc

SEQ ID NO: 138563 - RNA, 32 nt, Homo Sapiens
ucauuuucuauuccaauaaagucuuugaauua

SEQ ID NO: 138564 - RNA, 32 nt, Homo Sapiens
uccaaaccuguucuucuguuucuguggcaccu

SEQ ID NO: 138565 - RNA, 32 nt, Homo Sapiens
cugaucuccauggcuuccuccucccuccugcc

SEQ ID NO: 138566 - RNA, 32 nt, Homo Sapiens
guagguuuagcacugucuuuuauuauaggauu

SEQ ID NO: 138567 - RNA, 32 nt, Homo Sapiens
uauauauacauauauguauacauauacacaua

SEQ ID NO: 138568 - RNA, 32 nt, Homo Sapiens
cgggugcgggcggagucuuccucgaucccgug

SEQ ID NO: 138569 - RNA, 32 nt, Homo Sapiens
acucugcuagaauuuaggugugagauuuuuug

SEQ ID NO: 138570 - RNA, 32 nt, Homo Sapiens
agacaggcauacauuugccaucuuuuaaacag

SEQ ID NO: 138571 - RNA, 32 nt, Homo Sapiens
uaggcuuuuucuuuucuuucucuuuuaaaaca

SEQ ID NO: 138572 - RNA, 32 nt, Homo Sapiens
agcugacugugccgucccuuccccucacccgc

SEQ ID NO: 138573 - RNA, 32 nt, Homo Sapiens
uguggggaaaacaaccacaacaaacauccauu

SEQ ID NO: 138574 - RNA, 32 nt, Homo Sapiens
aggcucucuguuuggcucuccucccacaucug

SEQ ID NO: 138575 - RNA, 32 nt, Homo Sapiens
cuuuaaaccaaaguauaaaacaaaaucuagcc

SEQ ID NO: 138576 - RNA, 32 nt, Homo Sapiens
cucaccgcaaccuccgccucccggguucaagc

SEQ ID NO: 138577 - RNA, 32 nt, Homo Sapiens
agcuccuuucuuuuccucuggucuuuguggga

SEQ ID NO: 138578 - RNA, 32 nt, Homo Sapiens
acuaucacaacacuaugagaagccccuagcac

SEQ ID NO: 138579 - RNA, 32 nt, Homo Sapiens
aacagcagacucauacucaaugggcacuacag

SEQ ID NO: 138580 - RNA, 32 nt, Homo Sapiens
uagcaaaaauauauuuauggugaucugcauuu

SEQ ID NO: 138581 - RNA, 32 nt, Homo Sapiens
gguaggguagguggggcggggguaggggugga

SEQ ID NO: 138582 - RNA, 32 nt, Homo Sapiens
ugccuagccaaggagaaguuucagucacgugc

SEQ ID NO: 138583 - RNA, 32 nt, Homo Sapiens
uugcagacgacggagauacgcggcggauaggg

SEQ ID NO: 138584 - RNA, 32 nt, Homo Sapiens
aacuuuuuucccuugguuggauucuucaacac

SEQ ID NO: 138585 - RNA, 32 nt, Homo Sapiens
gcgaguagcugagacuaccggcgcacgccacc

SEQ ID NO: 138586 - RNA, 32 nt, Homo Sapiens
cacagaggggagagaagggucauagcuaaaug

SEQ ID NO: 138587 - RNA, 32 nt, Homo Sapiens
aaaguguugggucuuccuccaggaugccugca

SEQ ID NO: 138588 - RNA, 32 nt, Homo Sapiens
caaagaccgaaugcacggccuuguagggacgc

SEQ ID NO: 138589 - RNA, 32 nt, Homo Sapiens
cugagagauaaaauuguucuugauugccuuau

SEQ ID NO: 138590 - RNA, 32 nt, Homo Sapiens
ucacggaggaaauugucuucuccucagcccgu

SEQ ID NO: 138591 - RNA, 32 nt, Homo Sapiens
ugucugacauuaguagccacuccagcucucuu

SEQ ID NO: 138592 - RNA, 32 nt, Homo Sapiens
caaugaaaacaaauagugcaauguaagaaaua

SEQ ID NO: 138593 - RNA, 32 nt, Homo Sapiens
ccaugccgcgggcuaggucgggcccgugcagg

SEQ ID NO: 138594 - RNA, 32 nt, Homo Sapiens
guguguaaaauauuuauuugaaggacuuuaau

SEQ ID NO: 138595 - RNA, 32 nt, Homo Sapiens
cuccucuugucugcggcaucugugcucuccga

SEQ ID NO: 138596 - RNA, 32 nt, Homo Sapiens
auaucgcuucuguggucgugaccccauggucu

SEQ ID NO: 138597 - RNA, 32 nt, Homo Sapiens
aauguauaauauucuuuuuuuuuuuuuuuuuu

SEQ ID NO: 138598 - RNA, 32 nt, Homo Sapiens
ugaaagaacaaaugaaccccccugaccuuucc

SEQ ID NO: 138599 - RNA, 32 nt, Homo Sapiens
gcaccgcugugcaccauggcccgggcccugug

SEQ ID NO: 138600 - RNA, 32 nt, Homo Sapiens
gggggaaaacuuuuaaaagauacccucauugu

SEQ ID NO: 138601 - RNA, 32 nt, Homo Sapiens
gacuuauauuaauccuuguaacuuuuuucugg

SEQ ID NO: 138602 - RNA, 32 nt, Homo Sapiens
gcugagccgagccgagccgagcugggggcgca

SEQ ID NO: 138603 - RNA, 32 nt, Homo Sapiens
uuccuccuccuuuacccuuucagauacaauca

SEQ ID NO: 138604 - RNA, 32 nt, Homo Sapiens
cuggcuguuuccucugccuggaacacuucucc

SEQ ID NO: 138605 - RNA, 32 nt, Homo Sapiens
cugauucuagaaugaagucaccaguaggucag

SEQ ID NO: 138606 - RNA, 32 nt, Homo Sapiens
acuuugcugaagauguuucuaggagaguugcc

SEQ ID NO: 138607 - RNA, 32 nt, Homo Sapiens
aaaggcgccccuccccagagggaucccuaacg

SEQ ID NO: 138608 - RNA, 32 nt, Homo Sapiens
gcgagccucucccccagcaucauccagcccug

SEQ ID NO: 138609 - RNA, 32 nt, Homo Sapiens
acuggcagccaggccugucgggcccccgacgc

SEQ ID NO: 138610 - RNA, 32 nt, Homo Sapiens
ggcuuauuuuugauuagcagucaauggcaaag

SEQ ID NO: 138611 - RNA, 32 nt, Homo Sapiens
acccaccucacaggcuguugugaggacuaagg

SEQ ID NO: 138612 - RNA, 32 nt, Homo Sapiens
aagggacgcagguuucuguuuauucugaacaa

SEQ ID NO: 138613 - RNA, 32 nt, Homo Sapiens
uaauuauguagauucuuaauucuacuucaaaa

SEQ ID NO: 138614 - RNA, 32 nt, Homo Sapiens
ugcuuucugugcacaccuucucuuccuguguc

SEQ ID NO: 138615 - RNA, 32 nt, Homo Sapiens
uugccuaagaggagucuaaagaauuauguuuu

SEQ ID NO: 138616 - RNA, 32 nt, Homo Sapiens
uuuccaagauaagcagauuaaaaggaacaugu

SEQ ID NO: 138617 - RNA, 32 nt, Homo Sapiens
ggaaggcagcuagaaaugggagggaagcuucu

SEQ ID NO: 138618 - RNA, 32 nt, Homo Sapiens
cguggcagggcucaaacugaaagagugugggu

SEQ ID NO: 138619 - RNA, 32 nt, Homo Sapiens
cagugccaacugggaguuuuuguuugcugaau

SEQ ID NO: 138620 - RNA, 32 nt, Homo Sapiens
gagggagggcuuuguggauuccaaaggccacc

SEQ ID NO: 138621 - RNA, 32 nt, Homo Sapiens
uugacaguuaccaucacccagccagaaaaggg

SEQ ID NO: 138622 - RNA, 32 nt, Homo Sapiens
auuuuccuggaaaauuauaggugcccagcuaa

SEQ ID NO: 138623 - RNA, 32 nt, Homo Sapiens
augagccaacuuucuaaaucgaggcuguauuu

SEQ ID NO: 138624 - RNA, 32 nt, Homo Sapiens
aacauguuuccagugugauuccuuccagugag

SEQ ID NO: 138625 - RNA, 32 nt, Homo Sapiens
gcggcauggcugucacaaagcuuuauuugagc

SEQ ID NO: 138626 - RNA, 32 nt, Homo Sapiens
gaagacauuucuuuuucuuauaggcuuuaugc

SEQ ID NO: 138627 - RNA, 32 nt, Homo Sapiens
agugauuggggaggagggcagggccagcaccu

SEQ ID NO: 138628 - RNA, 32 nt, Homo Sapiens
auaauacaaauuaaacaaccaauauaguguaa

SEQ ID NO: 138629 - RNA, 32 nt, Homo Sapiens
ucaaucuaaaauuuacauaaggcuuuugaaaa

SEQ ID NO: 138630 - RNA, 32 nt, Homo Sapiens
gugaauagcaauuuggcaaaauccauuacauu

SEQ ID NO: 138631 - RNA, 32 nt, Homo Sapiens
gcgcgcugcugcggcugcugcgcacgggugcc

SEQ ID NO: 138632 - RNA, 32 nt, Homo Sapiens
ucucucucuguguuuccuccagcccuugucuc

SEQ ID NO: 138633 - RNA, 30 nt, Homo Sapiens
gcucgcauugcgcucccgccggcgaguucu

SEQ ID NO: 138634 - RNA, 32 nt, Homo Sapiens
cuauuugcugaguggaagguguguagccugaa

SEQ ID NO: 138635 - RNA, 32 nt, Homo Sapiens
aauggagagcauccuuaugacuuuacaaaggg

SEQ ID NO: 138636 - RNA, 32 nt, Homo Sapiens
uaugcccggagccgaggcgcgaugaaggagaa

SEQ ID NO: 138637 - RNA, 32 nt, Homo Sapiens
uuccuuccagcauuccugcugcuacagccuau

SEQ ID NO: 138638 - RNA, 32 nt, Homo Sapiens
gaucccugggggcugucuuagagcuuacucac

SEQ ID NO: 138639 - RNA, 32 nt, Homo Sapiens
cucacuuuucuuucuuucuuggauagagaaac

SEQ ID NO: 138640 - RNA, 32 nt, Homo Sapiens
agaagaccugcucuccuuccuuccuccccugc

SEQ ID NO: 138641 - RNA, 32 nt, Homo Sapiens
gccccccguggcuggcaccgcgugccaugcau

SEQ ID NO: 138642 - RNA, 32 nt, Homo Sapiens
uacuccagggcccacugcagccucagcccagg

SEQ ID NO: 138643 - RNA, 32 nt, Homo Sapiens
ggagagauguggcugugagcugggggucuggc

SEQ ID NO: 138644 - RNA, 32 nt, Homo Sapiens
gcugugaccccauuggucaccagagcaacugc

SEQ ID NO: 138645 - RNA, 32 nt, Homo Sapiens
uggacacucagcccccucuuucuggagcaaag

SEQ ID NO: 138646 - RNA, 32 nt, Homo Sapiens
gagugaaucuucaacaugauuguauuucuuua

SEQ ID NO: 138647 - RNA, 32 nt, Homo Sapiens
ugguaucaucuagcauuuuccaaacuaacuua

SEQ ID NO: 138648 - RNA, 32 nt, Homo Sapiens
uagacagaaauuuguaacauuacuucugauuu

SEQ ID NO: 138649 - RNA, 32 nt, Homo Sapiens
uacuuggaauaaugagauacaauaaucauauc

SEQ ID NO: 138650 - RNA, 32 nt, Homo Sapiens
ucuggagaugcagauacuguguuuccuugcuc

SEQ ID NO: 138651 - RNA, 32 nt, Homo Sapiens
aguccacucuucugcaguauccucccuggcag

SEQ ID NO: 138652 - RNA, 32 nt, Homo Sapiens
gauaaagucugucgagugacaccugcacgaaa

SEQ ID NO: 138653 - RNA, 32 nt, Homo Sapiens
gacucuggaagauuuucauugaggauaaauug

SEQ ID NO: 138654 - RNA, 32 nt, Homo Sapiens
ggcuggugaggagcuuaacagaggaaccucaa

SEQ ID NO: 138655 - RNA, 32 nt, Homo Sapiens
agcauaagcaaauuuuccuuuacaaugcaaac

SEQ ID NO: 138656 - RNA, 32 nt, Homo Sapiens
aaaguuuaaugauacuucugauguuucggaac
